United States Patent Application Publication US 2024/0093182 A1 - sequence listing, part 2

SEQ ID NO: 2188 - DNA, 1398 bp, Artificial sequence
  DNA replication origin
ccattgtcatcctggcccgttctcagtgagctgttgggcacacctcccagacggggtggtggccgggcagaggcgcccctcacctcccggacagggcggctggccgggcagggggctgacccccccacctccctcccggacggggcagctggctgggcggggggctgacccccccacctccctcccagacggggcggctggccgggcagaggggctcctcacttcccagtaggggcggccgggcagaggcgcccctcacctcccggacggggcggctggccgggcagggggctgacccccccacctccctccccgacggggcggctggccgggcggggggcttaccccccccacctccctcccggacggggcggctggccgggcggggggctgaccccccacctccctcccagacggtgtggctgccagccggagacgctcctcacttcccagatggggtggctgccgggcggagaggctcctcacttctcagacggggcagctgccgggcagaggggctcctcacttctcagacggggcggccgggcagagacgctcctcacctcccagacggggtcgcggccgggcagaggcgctcctcacatcccagatggggtcgcggccgggcagaggcgctcctcacatcccagatggggcagcggggcagaggcgctccccacatctcagacgatgggtggccgggcagagacgctcctcacttcctagatgtgatggcggccgggaagaggcgctcctcacttcctagatgggatggcggccgggcggagacgctcctcactttccagagtgggcagccaggcagaggggctcctcacatcccagacgatgggtggccaggcagagacactcctcacttcccagacgggtggcggccgggcagaggctgcaatctcggcactttgggaggccaaggcaggcggctgggaggtggaggttgtagcgagccgagatcacgccactgcactccagcctgggcaccgttgagcactgagtgaacgagactccgtctgcaatcccggcacctcgggaggccaaggctggcggatcactcgcggttaggggctggagacggcccggccaacacagcgaaaccccgtctccaccaaaaccagtcaggcgtggcggcgcgtgcctgcaatcgcaggcactcggcaggctgaggcaggagaatcaggcagggaggttgcagtgagctgagatggcagcagtacagtccagcttcggctccgcatgagagggagaccgtggaaagagagggagaccgtggggagagggagagggcccctaatttatttgttgatgtagagatgaggtctcactatgttgcccaggttgtttttgcactcctgggctcaggtgatcctcctgcctcagcct

SEQ ID NO: 2189 - DNA, 928 bp, Artificial sequence
  DNA replication origin
gaagtgaggagcccctctgcccggcagctgccccgtctgagaagtgaggagcctctccgcccggcagccaccccatctgggaagtgaggagcgtctccggctggcagccacaccgtctgggagggaggtggggggtcagccccccgcccggccagccgccccgtccgggagggaggtggggggggtaagccccccgcccggccagccgccccgtcggggagggaggtgggggggtcagccccctgcccggccagccgccccgtccgggaggtgaggggcgcctctgcccggccgcccctactgggaagtgaggagcccctctgcccggccagccgccccgtctgggagggaggtgggggggtcagccccccgcccagccagctgccccgtccgggagggaggtgggggggtcagccccctgcccggccagccgccctgtccgggaggtgaggggcgcctctgcccggccaccaccccgtctgggaggtgtgcccaacagctcactgagaacgggccaggatgacaatggcggctttgtggaatagaaaggcgggaaaggtggggaaaagattgagaaatcggatggttgccgtgtctgtgtagaaagtagacatgggagacttttcattttgttctgcactaagaaaaattcttctgccttgggatcctgttgatctgtgaccttacccccaaccctgtgctctctgaaacatgtgctgtgtccactcagggttaaatggattaagggcggtgcaagatgtgctttgttaaacagatgcttgaaggcagcatgctcgttaagagtcgtcaccactccctaatctcaagtaatcagggacacaaacactgcggaaggccgcagggtcctctgcctaggaaaaccagagacctttgttcacttgtttatctgctgaccttccctccacta

SEQ ID NO: 2190 - DNA, 731 bp, Artificial sequence
  DNA replication origin
cccagtaaatgagaacatacccctggcagcaactggggcagttcccaaaagctgagccaaatgctgtccatttcctgccctgctctccagcgggaagcaggagccagcagagggagcggacattcctcctgccagaaagctgctgcagcaggaaaggcctctctttgctgacgaggacaagtttgtgacaaggggagacttgggaagaattaaaccaccttgtttgcttttggtttccgaagcctgttactagtggaagcttggtggcggggcgctggggtccccacccatctgacagatggtgaagtgaaggcagggcaagggaaggagctgagtccccgtcatgtgagacccggacgggcttgcttggtcgtcccttagcccctcggtcagacgtggtgtgtaagggcagggacctgtcagccacccaagaggcagccacggaccctgccctcaaggggctcatagtctggtggagggggcaggcagtgactgagtgccacgctggagaggttgacaggaagaataccgttggggccaggcacagggcacagccagtatggcttgtctggggaagcctctccgagggggtgacatttgggctgaggaggaggaggcaattggcagtgaattgaggtgggggagtgtgccaggcgagagggagcctgtgccaggatgtgatggggcaagtttggggtggcaggggcctggactgcaggctggggtgtggg

SEQ ID NO: 2191 - DNA, 1140 bp, Artificial sequence
  DNA replication origin
ggcggtgccctcggatgggcaggctcgggaaaagtaagccctattttgcaagtggcggccgcgccgccgccgggctgcgggcgggcgggcggtgggaggcaggtgggcgggcgggcgggggccggaggctgctgcgccctcgggtccccgggtccaggcgccgcctgcctggccccttccccgaggccgcggcgggcggcgtgggagagcccattgttgggagccggcggaggttgggggatcggggaaggggcggtggggggagccgccggagggggtacttggtggccgtggcgcgggtcgagcgcgggggcccgcggtgagtggtgggcgaggtcccgccagcgagcctcgacgttctccccagccgggcgctccccgcggtggccgcactttgcccaccgggtgcgggcagggggcgcgtggcttctgcagccccgaagcctccttttgtccgcccgcggcgtgaggagtgcgtgccgggggctttgttcggccgggagcgctctcccttccctgtcctcggcttcgtcaccggctccgcgtcctcggacgccgggctgggcagcgacggtggtgccggcttggccccaggcttggggcacagttgtttggggggaggtgacgagggtggcgctttgctgccctctccagagcgcgccaagcacccggagtccagggccgagtctcctcggacctccaaagctggcgagagcgtagcgagcagtgggtcgggaaaggcaaggtggctgtggggtcgagtggcttgcgagtttgaggaacctaggtgggtttgcccgcgacgccacttggaagttcaagtttgggggctgctctccatccctcaccgcttgaggtaacgcgttccctggtccccaccccctaactgttcgcacctggcggccctgtttggggtgagctagctgcttacctctggtcggggccacaatgggacggcgcagacagggctcaaagcctgctggcaaggtcctggagagcgccggtgggatctgacgcctttccctctctctctttgccccctgtccactttccaggttagctttatacgtctacgaatatttactgcacgtaggagcacagaaatctgcacagaccttcttatcggaggtgagtgggact

SEQ ID NO: 2192 - DNA, 1197 bp, Artificial sequence
  DNA replication origin
gtctcctcgccccagcgaggagggggatctgacccgcgctccccgcggcgtggaccactggggggctaggggggcgctgcggcagcgtccgatgggagggggcgcagacccccaagcggtcgccgctcgctccctcccgccccgtccctctcccttatctgcccctcagctcccccccgccgcggcccgcaccagcccagcccttatctcgccctccgctcttggttgtcctccccctaggctccgaccccgaccccctccccagactccagcccggcccccagcccgccccgcccccgggcctccctctcgcccagtctggcttccgagcgccgggcccggggctccacgctgagagctgggcggctcgagccggcgccgaggcgcgcggctgctcctttactagatcattaaaatactttggaaaaccccaaagtggagccgcgcgaaaatggcccttggcgtgctttggggagccgggggggaggggggctggggacaggggacttgaattaagaggagggagagtgatttctcccaaatttccaaggtttgccagtcttggcaagttagcccctcggcttctgcacgggaaagggtgccactcggagatggggggcgtcacctgggcggcccgcgacgcggaatgctcgccacagaaatctgcaaacttcaaataaatggagctaaattggggagtgaggggacgagagtcaggcgtagggggaggggaagcttccattgtcagtgacccaggtgtacaatgggaaattgaggggggggctggcagagtgacccagctatttgctgctgactcctttctgcccacgccgagaacccagaagacacactgcgtgcccctcattagggactcttaagaccagataccggcgaaataggggaaggctcccccattttcagactgtttttagagagcggatctctttaaatgtgataaaacactgtcggcactgtctctttaaaagagtcaagcagaaaaagctgtgtaagcgctgattggctgcctgtttggatacatctttaggggagccttgaaactgttagcctaggttgattttttttttttttttttttttttttttaactgcgctgttccaataaacaagtaacgcccctccccctaacatgcctcgcaccaaacaattaaaggataggtcagtgtcctggggaaaacac

SEQ ID NO: 2193 - DNA, 940 bp, Artificial sequence
  DNA replication origin
cgggcaggagggagggaaggaaggaggaaggaaggaaggagggaaggaagggagggagggaaggaaagaaggaagggaggaaggaaggagggagggtaggagggagggaagaaaggaaggaaggagggagggaagaaaggaaggaaggagggagggagagaggaaggaagggagggagggaggaaggcaggaaggaaggagggaaggaaggtgggcaggcgggaaggagggagggagggaaagaaggaagaaaggaaggaatgaaggaaggaaggagggagggagggaagaaaggaaggaaggtgggcaggcaggaaggagggagggagggaaggaaagaaggaagggaggaaggaaggaaggacagagggagggagggagggaagaaaggaaggaaggaaggagggagggatggagggagggaggaaggaagggagggagggagggagggaaggaaatctttccttgctctggagctccatgggagtcagctgaagtgtttcctgtgactgcagcacagctcagcttctccctctaccccaccctgcttccctactacctcacatgagtccagcccagaagtgctccccaataagcttcctgcttgcaaatctcctgacccaagccatctcctcatctcagctccactgtcatcctctctgtccacttacaatgttgtcctatcactctatcaccctatcctattttatctttacagccttttgaaactacctctttatttgtgtctgttccttcatcttttgtctctctctctctctccccctggaacacgagttctatgagagctgctgtcccgtcctctgctgtgtccccagtgccaatgacagtgctggtgtagagttggtgctcactaaatatttgtgaactgaacaaatgtgtttgaaggagcgagtgggtgaaggaatggatgactgtgtga

SEQ ID NO: 2194 - DNA, 1615 bp, Artificial sequence
  DNA replication origin
tagaaggtggtgagttgcccaagatgctcagggaatcagagcctaaactgggactggagcctgagtgtcctggcccctgagtgtcctggccccacccctttgctctgcggcgggcccggatctcggagggagcagccggagtcactatgctgggaggcggcggaggagccgggggcgcgccccgaccccgcgggccccttccggcccctcccccagcctgctcaccgacccgccacctgctccccctgcgcccgggcggggctgccgcccccacccccgtccccatggcaacgcgcggcccctgcctgccggccctgcctccccgccgctgcgcagcccatctggccccaagcccaccccagctgggccacccccggccggtaccgccgggggccctcacagccccgcagcggccggagacccggacggggagcgccaggcgtcgggcgcctctcctagccatggccggctgctggccgcaggatgtggggcaaaagccactcaaccctccgcgatctcacattctagccctggaggcagagacccccaaatccccactcactgcggcaggaggcaacatgttggaattagaagccagctttctggaggcagctggcctgggttccagtccccaaacagtgtgactgcaagcattccccttaacctgttaacctatctgaaaaatgcaggtaaccatagaacctgcctcagagaatgcttatgaggaggaataaatgggccaataaagaaaaatgcatggagttagcactccatcagtgtcacctattattactactgcaggggcaagtgttgcaagagggagaagtggagggccctaacctagcctagggcagcaagggaggctggctggaatcttaggaagtggcagttactgaggaagccaaggtgaagagggaacagcatcagcaaaggcacaaaggtggaaaatagtatgggagggtcggtaggtgggaagggagacttgcaaagcccctgagtgttgctggggagtgtagaagaactgggcttttagaaggagagccctgggacaagagccatggatggttttgaacagaggtgtgatgtggccccttcctttcccagagaccactctagctgccatatggggaatggcttggaaggaccagtggtccttctgaaagatgataaggcctgaacaagggcaggtgcaaagtcactggaaggtggggacagaatcaggagctattaaggaagtaacatggcagaatggtgacctatggattggatgtggcaatggataagaacgctcaggtgcttggcttgggcactgggagggtggcagggccggaaaaggggcaggtctggggtgggaaggaagatgagaagttgtatgtgtatagcaagggttggaggtgctgtccagctgagaagacttctgtcctccaaaagaggaggaccagtcttctgattgaattctaaatatcctttccctggggtccaagtggaatctgtccaaaagaaattcaggagttctgacacaaactctatgtgtgccattgtgtttctgagctttttggggttttagatggctgttttggagtcagagcggggcaggaggatacaaggagatagt

SEQ ID NO: 2195 - DNA, 1312 bp, Artificial sequence
  DNA replication origin
gactggaacccaggccagctgcctccagaaagctggcttctaattccaacatgttgcctcctgccgcagtgagtggggatttgggggtctctgcctccagggctagaatgtgagatcgcggagggttgagtggcttttgccccacatcctgcggccagcagccggccatggctaggagaggcgcccgacgcctggcgctccccgtccgggtctccggccgctgcggggctgtgagggcccccggcggtaccggccgggggtggcccagctggggtgggcttggggccagatgggctgcgcagcggcggggaggcagggccggcaggcaggggccgcgcgttgccatggggacgggggtgggggcggcagccccgcccgggcgcagggggagcaggtggcgggtcggtgagcaggctgggggaggggccggaaggggcccgcggggtcggggcgcgcccccggctcctccgccgcctcccagcatagtgactccggctgctccctccgagatccgggcccgccgcagagcaaaggggtggggccaggacactcaggggccaggacactcaggctccagtcccagtttaggctctgattccctgagcatcttgggcaactcaccaccttctagcctcagtttccccgactgtgaatggaggggttggaccaggtttccaaggacattcccagcacacactactttttgtggctctggggctgggcggggaggactcagggctacgtaatttttcaccctcttcccaggtgaagactttattttttcaacagatgacatccaccgttgtatcctgaaccggggaatgtcagttgtaagagccggcagtctctgtacccaccacctccattgtagagatggggccgcagcagctcagagacggtgcggaccgtgtcgatcacacagcgcatgagagggaggggcggggtgagaaacccggtttgaacctcacagcaccccaccatcacctcctgccttggagccgaaaccgggtttgggcatgggggaggggcagttgctgtgggaagaaaacaaacacccctgcgctccggtctgcaggcgccagctgccaagatggcaaggagactgactgcctgagtgcagacccgaggcaggggcttcctgtctgcgaggaggccctggtggctgttctcccactgcccacacccttctggtctccatcagtgactggtacagcgccgtggccctgttgccagccttcataagaggtgtggaggtggtaacctccctccacccaccctcaccctagtaagcggacagccaggatcccaacca

SEQ ID NO: 2196 - DNA, 972 bp, Artificial sequence
  DNA replication origin
agaccctgtctctaaaagataaaaataaaaaaagaaggaaggacttatcccaggggtttgggaagaattctagtccaggatttgactctaggtgtaagatgacttaagaagggtcaagggccccttcatcataagtcaagtcaaaaggtcaactggtccatccctctgtggctaagctaccctggttactttgtccctaaacctgcttcctcctctgtgctagaagcaagccccatgttgcatgagtagggaaggaagggggaggctcctccctgattcctgggtttgtgtccaacaggctaggcccatagcccagcagccccttccctccctctccaggagcgtgacccccaccttctgcatggggggctccatttcttcctgcagccttgacccagggcagtgaaaccaaatggaaaaataagccccctttcccgggcctgggagggacagaaggaggcagggcccattttctaggtcagaactccttgcccctgctcttcctccccttgcctatatttttcaaaactagaccttggggagagagggagagggagagggagaaaagtgtggatgcttctgtgtgtgtggctgagtgcgtatatcctgtgtggagagagggagaggaaaagagaacagagcctgagagagtgtgtgtgtgtgtgtgtgtgtgtgtgcgcgtgttgtgtgcatgtggaaagagagggtgacagggagagggaaagagaacagagcctgggagtgtgtgtgtgtgtgttgtgtgcgtgtggagagggagggtgacacggagagggaaagagaacagagcctgggagtgtgtgtgtgtgtatgtgtggctgtgtgcaagagagagactggcgtgtgtgtgtgtgtgggggttgtgtgtgtgtgtggcgcttcagcagcaagctgtaccttaaagggacagaccctgcctctgcctgctcccctctaccatcccccacccccagc

SEQ ID NO: 2197 - DNA, 1002 bp, Artificial sequence
  DNA replication origin
ctgtttaccattagcggctgcccatccctccttagcgcacaaatgcccaagtgaaccttggtatgttttcagacccgcagctcaatcacaagcatgaagcaggcgaattgaaatccatctttagctgccttgaaaacctgcacaggaccccctttagattctccctgcccacgctctccccaagttctgtcttcctctccccgttttgaggacatatggccccttgaagtttttgtttgcttgcagtaggggaaaaacagctttaagtgtagagggtttttccttttttttttttttattaagcatcaagagacacagcaatctgcttggagatagtgtacgtgcataattaataaaatcgcattatttatttataaagagacacacgaggaacgggagaattagggctatccccattatatatgaagagagggagagagagtggagaggcaaaaatactttttgaacattagatcctttcagagaagtgtcttttaatatgcagtgaataaaacggcctgtactcctcatggaagtggtgccctgtgcccagaaggcatcagaaagcagaaacctggttcaggggcttaaaaaaggaacgggatcgatgtggcgctcgcagtgcccagcatgccggcgttgggtagttggcaggagagcaagagagagaggaggcgcggttgagggtttggccgctgggaaagaggattgagagccagtccggggtttccaaaagagagggacttggggcacagaatctctggcaggtgggggagaaacggctaccgtcaccccactgggcaccgcatgaataacccagatgtcggcgaaggggagcccctggtttcgatgagcccactgcaagccagatcccatgaacttggtggtgagggggttttagatagcagctttgcccttggacctctgcatcccggatgcccgggcaagaccgccaatatcaataacccaacttattatataacagcctcggagaccgggaag

SEQ ID NO: 2198 - DNA, 1037 bp, Artificial sequence
  DNA replication origin
ggtgtcggcccgggcagcagcctccgcagggttacccgggcgcgtgcagggaaacgtctcagcaattccagcgcccgagcggagcgcgcggtgggggtgggggcgcgcggcgcggggcaccttgaaaccgccggcggccgcgcgctgattggccgagccgccgcctcggcgttccagccaggcgcccctccccccgcgccgtccaccccggaaggaatttcctcctctggcggccgctattgttgtccaccttcgctgtttgggtcggatcgcgtaaccatagtatccaaaccgtgtccgcgcggggccccagcctgggacccctgtgccctcacccccccagcctaccccccacttttttttttctttttgcagcctacttatcatgacttcatcggactccggggagcgggaaagggggttggggcgggggggcggggagtgggcccgcttctggcggcccttacttcgagatgttttcaattacaattttttaaaaagtctgctttgtgggttcagggcttaaaaattcttcctacttgcccccctccccatgaaaccgttggaccaaacttgaatgggggtttccttcttttcccctttaccgtctatgctccagcccctgactttacggctcacggctgggggtgggggaaattcgcagcaggagtcgcccccctcaaacgctacccttcagatcatggctgtgtcctggcccctgggcctgggtttgagctggggaagcgaggctggtggtggggtggaaacatcacgcactgcagtaccccccaccccggggcgcttcctggcggggttgggggatccccggagatggatctggggtaggtggtacggggtggatgcccatcaaatatcggggaggggtgacggggataaaggggagacgggggaagcagctgacaggttattggaagaacaagccccctcgcccctcgaatttctcccacgggtctctgagctcagacatcctagtccgcgcaggcagcccgagccgaatgcctgctcccaaccccggc

SEQ ID NO: 2199 - DNA, 1220 bp, Artificial sequence
  DNA replication origin
gggtgccgcacccgcgccggaggggcggggaagggcagagccgtccaggaactctacagcgccgccgcctccgcgcctcccttcagcctgcccgcagcttcccgcctctggctgggctcggggacctcggaggcctgtttctgagcccctccccgcggactcgctccccggacgcccccagcgggctcctctggcctcggccctgcacgccgccggggcggagcctcccatcctttgggtaagagccccttccccgccccgcgcgggggaagggccccgtttcctgggctcctcctgtgctccagcacgctgcctggggagatcagcctgtaccccggcgctggcctccagacagccaggtgctgcctcgcacggtcttgcttgcaggctggggcatgaagcaccctggtatttacgctgggattggtctctcactagggttggggcgggctgtggtcacctggcccggcgcgccgcagaggctggctccggagaagacctgggggcgcaagactcagaggccagagggtgcagccgctgctgactcatttgcggacggggcggctgggaggagcgctagcccctgttgtgagcgatttgagagccagggccaaatctgggtccagacggccagctgggccagcgaggggattccagtccccacaggaggaggtggtgagagagggagagggagggcatatctgaggcccctaggcaggatgcgttcagggctgggccccacagcctgctcatccatcctgaatctggcctccgggacttggcgttcccgccctccgtccccaccaggctgtgtcttctttcctctggacacttctttccccctcccccggtttctcacagctttccttgccccaccttctccataaagaaatgtggctgtgagaagcgccacgttttgaagccaggtcacctccacttcctctagtgctggtatcactaaccccttcctctgtccttccttcctttgtccctctcccccgcatttatcccacaacttcctttattctgtcatgccatgcctaaggggcccctaggaggggtcaggagcaactgggagtttttagtttggagaacaggagggaatgagaacgttcttgcgtccactcattcatttgagcatgcatttacacatgcgtttacttccattcactcactcatacattccttcattcttttgcagttaattactcattcattca

SEQ ID NO: 2200 - DNA, 885 bp, Artificial sequence
  DNA replication origin
ggaggttgggggggtcagccccccgcccggccagccgccctgtccgggagggaggtggggggggtcagccctccgcccggccagccgccccgtctgggaggtgaggggcgcctctgcccggccgcccctactgggaagtgaggagcccctctgcccggccagccgccccgtccgggagggaggtggggggggggtcagcccccctgcccagccagccgccccgtccgggaggtgaggggcgcctctgcccggccgcccctactgggaagtgaggagcccctctgcccggccagccgccccgtccgggagggaggtgggggggtcagccccccgcccggccagccgccccgtccgggagggaggtggggggggtcagcccccctgcccggccagccgccccgtccgggaggtgaggggcgcctctgcccggccgcccctactgggaagtgaggagcccctctgcccggccaccaccctgtctgggaggtgtgcccaacagctcattgagaacgggccaggatgacaatggcggctttgtggaatagaaaggcgggaaaggtggggaaaagattgagaaatcggatggttgccgtgtctgtgtagaaagaagtagacatgggagacttttcatttcgttctgcactaagaaaaattcctctgccttgggatcctgttgatctgtgaccttacccccaaccctgtgctctctgaaacatgtgctgtgtccactcagggttaaatggattaagggcggtgcaagatgtgctttgttaaacagatgcttgaaggcagcatgctcgttaagagtcatcaccaatccctaatctcaagtaatcagggacacaaacactgcggaaggccgcagggtcctctgcctaggaaaac

SEQ ID NO: 2201 - DNA, 1158 bp, Artificial sequence
  DNA replication origin
cgggcagaggcgctcctcacatcccagatggggcggcggggcagaggcgctccccacatctcagacgatgggcggccgggcagagacgctcctcacttcctagatgtgatggcggctgggaagaggcgctcctcacttcctagatgggatggcggccgggcggagacgctcctcactttccagagtgggcagccaggcagaggggctcctcacatcccagacgatgggcggccaggcagagacactcctcacttcccagacggggtggcggccgggcagaggctgcaatctcggcactttgggaggccaaggcaggcggctgctccttgccctcgggccctgcggggcccgtccgctcctccagccgctgcctcccgggcggcgctcgctggcgcggcggcaaagactctgattttttaaaaatgtattctagagatggggtttcgccatgttgccaaggctggtcttgaactcctggcctcaagtgatccttctgccttggcctctgaaagtgctgggattataggtgtcagccactgcacccagcttaagcaacttggagaggcagcccagtgagtagaaatggctttggtattgagaaaagcgaaatctcagctccatcgctcaccggcagagtgccattagacaaggcttttataacccaagcctcagttcccttttctgtgcaggaggaataattgtccctcacagggttttggtgaggatgaatggtgttatggatataaagcaattttatataatgtatagaaaagcctgaaacttagtaggtgcttagtaaggatgcaccaggattccagagacacatgagatgtggcccctgtcttcaaggagtttcttattaccacatgtgtgtattcttttacagcctagaaagctctatgggccaggctcagtggctcatgcctgtagtcccagcactttgggaggcagaggcaggaggatcccttgagcccaggagttccagaccatcctgggcaacacagacctcatcttactaaaaataacatttaaaaaattgggcttggtgccgtggctcatgcctgtaatcccagcactttgggaggctgagggagcggggggcggatcacttaagatcattagttcaagaccagcttggccaacatggtgaaaccccat

SEQ ID NO: 2202 - DNA, 1224 bp, Artificial sequence
  DNA replication origin
tcccttccacccagctctgctccagtgcccaccaggtgctgctccatgcagaatccagcccacaccacccttcccaattcctctccttacaggccagctgcttgaactgtgacaggagaggctcaaagatgtcatagtagacttggtggacagcagtgttatcccggacgtagagcagatcttccaccgacatggggtccgaggcagcctgccacagcgtcaggctgtacctggggacacgagagctggctcagtgcctgtctgggcccagcaagaccctcagccccactcctgtgctcagaactggatgtcagctgggcgcagggtagagcatctgtcctccagtcgcccacctgccacttctccctgagtcctaccccttcccaagggcaggagccagagggaattcaggaaagatgactgaaagcagaggcccaggagggagggggagcctgtgctgcctcctcacttgcagtgtctatttctgagtcctgtcttaggaaaggggcaggacagatgggggagggtgtggaagggtaggtcaggcatcaagagggggagggggcagctttgggagtcctatggaaggtagggggtatagtgggggcaggggagtctctaaattcctatagggctatcctagggcaggggttaaaggcacaatctgtgtagccccaggggtacagcgggctcctattggaggaagctgtggggagacaaattgtgtcttggtataaatattttccagagggcagagaattacccaccaatgaaagggctctcttgggaggtagtgagtagcccgtcaccagaggtatgcaagcagaaagcagggactctgcagagggcatgagcactggcaggggttggacgaaatgacctttaagacccttccagccatgagcttctgggatcttgctgggggcatcagtgcctccaggagggtgggggtgggtttggtggttttcacctctcagattggctcagcagccagctgaagtggggccaggcagcccgcaccatggaagaccgtacagggaaggtgaccctctggggcactcctcccaccagctcgtgcatcttctccaccatggcttgggtgtacgtcctgtttggggacgtggacatgtagaaggtggtccagcctggagatagggtagccttgggatacttctcctggaccagggccaggaacctgcaaaaaaatcagagatgttggtctca

SEQ ID NO: 2203 - DNA, 1103 bp, Artificial sequence
  DNA replication origin
tgggatagaaatggatagtcctggcatgctggcatgggttactgcaggccggttctggggcagcgagtccatggggaaggggctgagtcaccacttcatgcagagggagttctgggggccctggtatgggaagcaagttagaggctgcccctattctgaggaccccagaatttaaacgagtccaggaatcacctgtaatgtgcacagagacttcagcgtctacacattggggctcacagagagatctggaatgtgaggctgtgataggccacccgaggcagagccgggcagttggtggctttgattgtgtgtgtgaaagggtgtctagaatgatgcccaggtgggcagatggtcgggactgaggggtggaggggcagggtgggagggattttggtcatggggcttgtcgtgggtcattcctgagtccattttcctgcctcggccttcccgaggagggaactggatatagaggctgtgggctcaggactgagatcagggccaaagacaagggcatgagcatcattttctggccaaagcaaagagagaaagggatggaggctgacttctggggaccactgacaggcggagagttggaggaagaggcattagtagaggaaaggggacagcagagggcggtgaggggtgtcaatgggaaggtcaagaagaaaggagtggtcagccaggctgggagatggagccctgtaaggacagcaaggcccccgatgctggccaggacagtttccctggatcagtggggagggcagaggtcagagcagagcctgtttagaggggccaggaaagaccagagaggctgaaggtacaggagggagaggcactgggacaaagtgaggatgggagcaggaggacctggtgctcagggggtgctattctgtaggatgtggggaacggtgggcattgtgagtggtgagtctgggggtgctggttgggaggtgatgtggtgaagggggacaatgagggagaggtttgaggacagggaggttctgttggctggtcggggcatgtgtggtatgcctacagggatccaacgagacccaagctgtgggctgctagatggacaggaccccattcaacaccccctcccc

SEQ ID NO: 2204 - DNA, 1046 bp, Artificial sequence
  DNA replication origin
gcccgagctgcagctgctgcgcggcaagtgcctgcgcatcaagggcgaggacgccaacgcggccgcctgcttcaagcgcgcagtggagctggacgacgcgggctccagccacaccgacggcttcggctgcctgctcgaggcgctgctggcgcagtggagccaggcacagctgagcgacggggagctgggccgcgaggtggacgcctggctgcgccgcgcccaggacaagtaccccgcggcgcgcctgcgccaggagctgcagcgcgtgtggcgcgggcacacggacgaggtgttggggctggcccgggccctggtggcccagggacggccggcgctggtgcggctgctcttcgagaccatggagcgcgagggcgagggcgccagcgcgccgcgggaccgccgggctgtctcattctagggctcaggtgcccaggccggaggctccctgggaccccgcccaggccccgcccagctgatgggaccaggtccggatggactccctgccttaggctgacctgggagcggagccagttcgattcttggtcgggaattgtgaatggggatgttgcgacacccgcgcggtttgaaacgcccacccagactggaaggcctgattcccgagagcagaagaggctgggagcagaggtgagaaaacactgggaagctgccaattaagggacagaattttctagacatacaggtaaaataagatggttgtgaggcttctgagagaaacagaagacagctacctcagtgtggcagttttctagtccgggcgctcaatccctcaggcctgagtgcctgtctttggactccggtaggccacactctatccttatgagaaagccccgtttactttagttgactggagtgtggtctcagctcctgcagccagaaaagccctgactaaagcagagggcagggtggcacggcgagtgagttacgggacagggccctagcctaagcctcgtgctcagggctcattcctgcctctctgctacttttctagtaggcctccttcttggtccgcttggcccaaaaggcct

SEQ ID NO: 2205 - DNA, 1280 bp, Artificial sequence
  DNA replication origin
agattggcccaggcattgaggttgcccgggtgctcgtgggccacctcgaggaagcactcgcgggcctcgtccagctcctccaggtagaatgcgaaagcgcccaggaggtgacgcacagcggggcgctgcggggcggccgccagctggagctcctgccgcagaccctcccgctgcagcttcaggtcccgggcgcgctgtggggccggcgagcgcggctcgaagttcaactgcatctccaggtgaaagtggcccgggaggtagtccaggtcgtcgatgagggcgtctagatcgtcggccacagcctccagctccgccatgactgctccctctgctcccctggcctcacccttgtccctgaggctgtggagggcagtggatgggggcgttccccgagcgagctccgtgcgggaggcgaggggcagccggcagaggccccgggcgctgcggcctctcggtctcagggcgcctcccgcaggtgggtgggcccgaggagtgccctgtaggtgtttccgctttcgctgctcagcggcttctagacgctgacattgcacaaccaggtgtgccagaaaaacaggcacattgtcaaatacggggtgcgcaaacctcggtgcaaggcaaaaggcgtgtttttacgctgctaagcagaggaggaaactgaggctcaagaggaggaagagaacttgcccaggtcacagagctggggcgtacccaagtaggtagacctggaaccccagtttgctgaaggccgggcccttcctccaggggcgctgctccgccctgtctgcttgagctgagtcaggactggccgttctagctgcggcagccacccttactcctgccgctgtcccatcctctctgcaggtcctcagtgcttttcctctgaatggagcctgccacctccctcctctctttttgggccattatttatgaggcttccttcctgggatttctctgcgccctctctgctcagcagtgagctcctgtgcaaagactatgggctgcatgtgctggttctaatcctgcttctccaaccctaataaagtatgacctgccacactttcctcacctgtgacatgaggatgacaatccttccgcatttatcaggtaagcctgataaatggccactctggataaatgtcagctcccactcctccagcttggttcccatcccatcttgcactccacctgtggtcccagttttcttgctttggcaaatgtccctcccaggtctagagtggtcccctaacctctagcctggaggctgggtggcagtgctccct

SEQ ID NO: 2206 - DNA, 922 bp, Artificial sequence
  DNA replication origin
catgtctggagtcccaagcagagagcctggcatacactgggtgcccaacaaattcattcacttacatatccatccagccagccagccaggaataaggattaagcacctcctaagtggcatacactgtcctagaccttggggatctagcagtgacgaagacaatgtccctgctctcatgaagtagatgtcctagtggtagaaatagtagtacaaagaaggaaatataatacgtatataagcagggctatgaacacaaattagacaggcaagggacaggcagtgatggtggtgcaattgatagagagtagtcagggctctgggaggaggtgacatttgaggaaacctacaggtcgtgagcaacggagacttgcaatgtctggtacagcattccaggcattggaagcagcagaggctaaggccttgaggtgggaacatgcttgtcaaatcagaccggcaggcaggaggccagtgtggccagagggcactggccgagggtgagaggaggcgagcgagagggcagaggggtgaagggctgggtcatgagggccctgcagccaaggtggggccttggtgttattccaggtgctgccgggggagggcagtggagggctttgacaggaagaggacctaacttacctttttagaggaagaccttcgagagggccagggttgggaggaggcgatggtgctgagaggtgggggtggcagcgccaggggatgatgatctcatcaggaggacactgagtgaggctgacactcagtaagggcacgagggagaaagcaggagtcaccccctaccaagggagccagcacagcagtttgttggcctggacctctctgtgctggatactctgttatcctcccagcccctcatataggccatgctctttcacatggggctttgcccctgctgttccctctg

SEQ ID NO: 2207 - DNA, 951 bp, Artificial sequence
  DNA replication origin
agagagagaaagaaagaaagaaggagggaaggaaggaagggagatagggagggagggaagaaggaaggaatgaatgaaggaaggaaggaaggaaagaaggaaaagagagggagaaagaaagaagaaagagagaaaaagaaagaaagaaaagagaaagaaagaaggacagaaagaaaagaaatatgggggggagggagggaagaaaggaaagaaggaaggaagggaaagaagaaaggaagaaagagaggaaggaaggaaggaaagaaagaaagagaaagaaagaaagagaaagaaagaaaaagaaaaagaagaaaagagaagaaaaggaaggaagggagggagggagggtagggaaagctgaggagacacttgccaactcctgccacaaaacctcagaaagttctaggaatgggacacacaggtatcttcaaaaacaggtgaggccgggcacagtggctcatgtctataatcccagcactttgggaggccacagtggtaggacagcctgagcccaagagttcaagacaagccttggcaacatagtgagactctgtctctacaaaaataaaaattaaaaagtagccagtcatggtggcacgcacctatagttgcagctacatgggagaccaaggtgaggattgctttggctcaggagttctaggctgccgtgagctatgattgtgccactacactcccacctgggtaacagaatgagatcccatctagacatgacctcctgctgactcctcacccagccagcagtagactggaggtttggtttgtggatagattccagggggctaggaggaggtgcacagtggaatgtaggcagacaggtcccacaatgagaagagagggggtaggaggcagtccatacgctgaatgagacagcccagtctccttcctctgatcgccaacaaccacacttacccccacccaggacagaggatt

SEQ ID NO: 2208 - DNA, 1063 bp, Artificial sequence
  DNA replication origin
cggcgacccgagccaatcgcgaggcggcgggcgatcccgggctccccgggctgtgggctacaggcgcagagcgggccaggcgcggagctggcggcagtgacaggaggcgcgaacccgcagcgcttaccgcgcggcgccgcaccatggagcccgccgtgtcgctggccgtgtgcgcgctgctcttcctgctgtgggtgcgcctgaaggggctggagttcgtgctcatccaccagcgctgggtgttcgtgtgcctcttcctcctgccgctctcgcttatcttcgatatctactactacgtgcgcgcctgggtggtgttcaagctcagcagcgctccgcgcctgcacgagcagcgcgtgcgggacatccagaagcaggtgagcggcgccgggtgcggccgggactcagggccggaggcggcgtgcgcggggatagcgggacgcgaggtggcgacgggagctgcggtgcgggggcggccaggacttcctgggggggtggggagctggcgttggagaggggttggaacgaaacaaaaatgtgatgggggcgggggaacagaacaggcaaagtgcccactgtgtgcagggcatatgcgggtacctggagggagatgaagaaggggaagagggggaggtgcgaagcactcaggtaactctcacccggcccaagcatttcagagaaggaaaggcttccgggaggtggagctgggtctagagattgggaagtatgggaaatgattgggggaaggtgtgtgggtggagggactggtgtgagcaaatgctgggaagccgacaagtgcagggcaggggcgggagaacgtcggaaaagtccgtttggtgctaggctggagaggggccttgatgccaaggccgagtttggactttattttgtacagcaagacgcttttgattgggtttaggatagaagactaaagcaagaaggtagaacccagcccagaagcgggagggaagaacctcacagcctctgctgacggagggctcactccttgacaaaggcagtcggtccatctctcagttcctcaggcacccacggagcctgtgacctg

SEQ ID NO: 2209 - DNA, 1270 bp, Artificial sequence
  DNA replication origin
ccagcgacacggcgggctccatggtgcggcgccgcgcggtaagcgctgcgggttcgcgcctcctgtcactgccgccagctccgcgcctggcccgctctgcgcctgtagcccacagcccggggagcccgggatcgcccgccgcctcgcgattggctcgggtcgccgaggttcggtgggccgagacccgggcggcgaccaatggcgagccgcgccggggatcggaccaggaacccgcagctttcattggctgcgggagtcggaccgctccacccttttctccccgccgccgcgcgaggcgggggtgccagggactgggtgccggtggggtccgctgcgaatactgggggtgggcagttgggactcagggccccaggccctcggggctgcggggccgcctcttccaaacgcgccttaagcggttttgcagtggctttccgccggagggctgggaggcgccccggccctgagtcagtcaccctttggccggacaggcggttcccgggcgcggaggatggaaacctggcggtaacctctgcaggtcgtgccactcggtgtgcgcaaggtctccagaggcatcttttcatttttagggggcactttccacgaattcatttgagctacacagcagtcctgggcagtggggagtggtgagctccattgtgtacacttggaagcagcccagaaaggtgaagacctgttcgtgaactccagaggccattggaagcatggaaggctatggctggcactcttcctctttttccagttcactgaggcagatgggaggcccggaggagaaagaatgaaggaaggcatttcagcccgagtaaactccccaggcccgctctgtgccaggcagtgttgcaagcctcgggtagggtggtgagcaaagcagatggccctgccctcactcagcaaccagtgtaggggagctgccacggttaccagcaaaagctgaaatccagcgccatttgcatttcatatggaattttaggaagttttcgagatgttttagtttagaagctaaacatgacataccaggttcttctctgtctggccttgcatacctatccagttccctctccattcatctctgccctgacatgcactcaggaggctccctgggcctcagcattcctcatttgcgcgcctctggtcaagctagtacctctgaatgccctttcccatccccttctcagagttcacctcacacattccgaagccagctcagggccacctctgaaacatttagagcactcccctgcccatccag

SEQ ID NO: 2210 - DNA, 1724 bp, Artificial sequence
  DNA replication origin
tgcaggaggcgcgggtgttaggggcggaggggcctggccgctgcccccgagccctgctccccagcccgcaaaaccgaggtctggctcctgggccctcccagggctcaccagccgcgccctctccgccgcccgcacccggtgcgcagggaccgagccaggcctcaccccggcgcccgccccgagggctgcgcgctccccgcggggctctgaggctgccgtggggcgcccaggggagcgcgggacccgggcctcgccctccactccggtggtgacgcccgccccacctctcctccgcgtcctcgggcagctccaggtgtccagcgctgtcgcccagcccgccccgcccgtccttaaagcgccagcacgattgggctggcggggactggggcttgccagcgcggcggggcccgaggagccgcggggctgctgctgaccggaacgccttggcgcggatcggaaccttgggtcctgggggccgtcacgcccccgcgagcgctccagggcgggcttggaaatggagacaaactcctccgagccgttaaggctcagccggacagggcttaggagtcccgagcccagtcctgttcacccccattttatagaaagggaaactgaggcccagacaggggaaagtcacttgccgaggtgtttgctgcagactgcgttgaccgaacctgctttttcacagcagtcagacagcaagccctcccgtccctccaggaccctagttcctggggaggaaggcgttctcagcgataatgaccagcattaaagtgctccccgttaccggcgtcactgccccagccagtggaggccccggagagggactgaagatgtgtcacctaacttctctgaaccttcctccctcaaggagaactgataatccctaactcacagttctgtgaggattgaatgccttaagcatgcaggttaagtggctactgaaggcagtttttgtggacaggtgatttgggagcctggaggaagggttacgtgcgcgcgcgtgtgtgcgtgtgtgtgtgcgtgtgtgtaagaatctttccgtgagaggacatctgaggtgccttaggagagtaggagtggacaacagcatccaggcagaaggagcagcatgtaggtgaagtcacaggctggtgagatcctgacaagttcatgtgggccaagggaagccatttccagaaccagctggggtctgggttttgttcttgccctttcctgctactccagcaagccgggggactggggccagcttgccactggcatggcctagattccccagtgagctgggggtgactaactctcttcccagcccaaggatagaaggtggagcagcctggccggcagggatctgaagcccagagagaggaagccactggctccaagtcacagagcaggtcagcggcagggccctgggcccccaaactctgtctctgaagaaatatcccaccaggaaactaaggctcagagaagggcacaggcctgtgtgtgcaaggctacagagccgagacaaggaccaggcagacttcctttgactttcagtctgtaggtgggaccaaggccgctggcagccctctttgcacccttgtaggcacaggggagatatgaatgggaagctggaggccacagagcttttggctccactcatttccacagggcaggcatctgtgtgtgttgtgggcccctcactggtcaaaatggaccctcccagccctgcctgtgtagtc

SEQ ID NO: 2211 - DNA, 1246 bp, Artificial sequence
  DNA replication origin
caagccccagtccccgccagcccaatcgtgctggcgctttaaggacgggcggggcgggctgggcgacagcgctggacacctggagctgcccgaggacgcggaggagaggtggggcgggcgtcaccaccggagtggagggcgaggcccgggtcccgcgctcccctgggcgccccacggcagcctcagagccccgcggggagcgcgcagccctcggggcgggcgccggggtgaggcctggctcggtccctgcgcaccgggtgcgggcggcggagagggcgcggctggtgagccctgggagggcccaggagccagacctcggttttgcgggctggggagcagggctcgggggcagcggccaggcccctccgcccctaacacccgcgcctcctgcagacccgagggtcgccgctggtagggtcgctcagccctggcgtcctccaccaccacaccttcacctgcgcccggctccctgcgcgcctggacagcgcctgctgcccgcctcccgatggccctgccccaggtgggtggaaacggccttctccctcctttacgggcactcagccccttctgtcgtcgaccttgccccgaccccttcccctaacctcggtcaccgtggcttggtgggcagtgtggacacccggggctctgcctgggttttatcttgctgggtggcttgaggccatggcactcagggcctcaattggggaacaagaacaaattcttgttcggacagtttcgtctttacagaaagcggcatctaaagtgcccttattggggcctggtgcggtggctcacgcctgtaatcccagcactttgggaggccgaggcgggctgataacttgaggtcaggagttcgagaccagcctgggcaacatgatgaaaccctgtctctactaaaaatacaaaaattagccgggcatggtggcgggcgcttgtaatcctagctgcttaggaagctgaggcaggagaatcacttgaactcaggaggcagagggtgcaatgagccgagatcgcaggactgccctccagcctgggcaacagagcaagatggaatctcaaacaaaacaaaacaaaacaaaaatgcccttattggtatggagtagggcacggagaatggcatggcgttccatcctggctttgtgcaggagtgggtgcaggagggaggctctgtcctccggactctcctgacaggagcagggcctttctactagacttttactgaagatgctgcccccttgccaggggg

SEQ ID NO: 2212 - DNA, 1141 bp, Artificial sequence
  DNA replication origin
cgcgtcgttgcagcagcggctcccagctcccagccaggattccgcgcgccccttcacgcgccctgctcctgaacttcagctcctgcacagtcctccccaccgcaaggctcaaggcgccgccggcgtggaccgcgcacggcctctaggtctcctcgccaggacagcaacctctcccctggccctcatgggcaccgtcagctccaggcggtcctggtggccgctgccactgctgctgctgctgctgctgctcctgggtcccgcgggcgcccgtgcgcaggaggacgaggacggcgactacgaggagctggtgctagccttgcgttccgaggaggacggcctggccgaagcacccgagcacggaaccacagccaccttccaccgctgcgccaaggtgcgggtgtagggatgggaggccggggcgaacccgcagccgggacggtgcggtgctgtttcctctcgggcctcagtttccccccatgtaagagaggaagtggagtgcaggtcgccgagggctcttcgcttggcacgatcttggggactgcaggcaaggcggcgggggaggacgggtagtggggagcacggtggagagcggggacggccggctctttggggacttgctggggcgtgcggctgcgctattcagtgggaaggttcgcggggttgggagacccggaggccgaggaagggcgagcagagcactgccaggatatcctgcccagatttcccagtttctgcctcgccgcggcacaggtgggtgaaggagtgaatgcctggaacgtactgggaactgcaccaggcacagagaaagcgggcttgccattatagtgggttccgatttggtttggaaaacatgggcagcggagggtggagggcctggagagaaggccctacccgagacaggggcggggtgggaaggacggcagatgctgggagcacgaggcaatttctttatgacacagaactcatgctctagtattccatctgtttcagccgaagaaaagaaccagctgaaggggcaggggagaaggggcggaggtattctcgaggcccattggcgtcctttaggactcaggcagggaagggcccttggtgctctggagccggaggtggtgcgcctggtactgggaccccggagctgagc

SEQ ID NO: 2213 - DNA, 1164 bp, Artificial sequence
  DNA replication origin
ctgggtgcagtggctcacgcctgtaatcttagcactttgggagggcaaggcgggaggatcatgaggtcaggacatcgagaccatccttgctaacacggtgaagccccgtctctactaaaactacaaaaaattagccgggcgtggtggcaggcgcctgtagtcccagctactcaggaggctgaggcaggagaatggcgtgaacccgggaggcggagcttgcagtgagccgagattgcgccactgcactccagcctgggcaatagagcgagactccgtctggaaagaaaaaaaaaaaaaagagctgttactgttgacagtagcatgaggtagaccatggcctgcaccaaaatgggggagtggagtgccactgaggccagaaggaaccacaccctcaagggtggggagttatggtatggggggtcctaggcatggagtcttttaattctttagacaatcctgggagcaactgtccctgtttcacagagggcggggccacacagctggtgagtgggcagccaagactctgttcaagtttgtgtgggtccaacacttgcggccacggtggaggggcatctgagccaggcctcagagagtggcgggggaagttgggtggggaagtgtgcccttctcattcctctgaggctcatcctcttggtgcctctctttcatggaaagggataataaggttattgtgaggatcccctgagttcgtatattcagacgcttagacagagccaggcacagagaagggcccggggttggctagtttgattgctggtgtaattgctaatatcttccagtttgtattggtcaaggttctgcagagaagcagaaccagtaggatgtatatattaagagtttcaagctcatgtgaccgtgcgggctggcaagtctgaaatccgcagggcaggccaggcaggctggcaattcctgcagaatttgatgttgcaatactgagtcctaaggcagtcctggggcagaattccttcttccctgggaggcctcagtctgttctcttaaggccttcaactgattaaatgaggcctgcccaagttatagagagtaacctgccttactccgtcttctgatttaaatgttagtcacatctaaaaaatattttcgcagcagcatttccactggcttttgaccaaacatcaggccaca

SEQ ID NO: 2214 - DNA, 1580 bp, Artificial sequence
  DNA replication origin
catgcatttattgattgatctatttttttctgagatggggtcttgctgtgttgcccaggctggtctcaaattcctgggctcaagcaatcctctggtctcagcctccccaagtgttgggattataggcatgagccgctgcacctggcctctctgatctatttaacaaacctgctgggagggtctcagggtcaggagcagcactgggctctgaggacacagagctcactcagccgtgacccagagggggtgcctgagctgcatgctgaaggttgttagcatgaccagcaaggcaagaaaaggccctgccgagattagcaaggcatgtgccaagccctggaatgtgacagccgggccttctagaaacctgagtgtataactctccttaaaagccagtaggagctcctcaaaaggcagccctaaggagtccactcttaaatgaactcagagtcagttttaaaatgcaagtctgtgttgattctggtctggatggtgcattcctcgagagcaaaagacagtcttggtcttggatccacttgccctgggtacactgagggctgctaggttccaggtgctcttcctggcactggggagggatacaggcccaagagacatgctgttctccctcctggagcatctattttagtggaggaagacagaaaacaaaccattaatatagagtactgaaaagatgcgatggagaaaactatagcaaggaagggaatggggtgggagagaggtcaggagaggtctcgctgacaaggtggacgaaacaggccatgaggcagagaacatgttccaggcaaagcaaaggcccccaggtggggatgtgcagggagtaccaggaaaccagagaggtgggaatagttatgagatggggggtgcctcagaggggacagggccaagtcaggtgagacctgagggtcacagtcagcagtgagctggggccatgcaggggtctggcctcagaggagtgtggtctggcctggatctgaacctctcactgtggcctagctgctgagctgagaagagatgacaaggaccttgggcagaagcagggagactggagggaggcggtggagggtccaggcgttggggcggggctcaggctggagtctgaagggagcctgcaggcctggtgggtggatgtgggtgggagagggggaggatggcaccaaggctcgggcccctggacagatggagttgccattaagtgggatggggcaggctatggggccatcagtttcagagggatgagtttggcactggcatggtaggcatctgtctatctccacggccctcaaaccaggcatgaagcaggagctcacgtgtttggtcagccatggtgcagaaccgcctgggtgggaggtgcggggtgggagatacacggttgtgtcccaaatgggctctgagccagcgagggccgtctgcactttggcctcacagaaggatgtcggagggagaaatgaagtgtgggtgggggtcccgggccacgctagacatgtgctttcttttcctcgggctctggcaggtgaccgtggcctgcgaggagggctggaccctgactggctgcagtgccctcc

SEQ ID NO: 2215 - DNA, 1239 bp, Artificial sequence
  DNA replication origin
ctgtgtggcctttggcttacacacttggcgaatcgttctgaatactcaccgtgtgccatggggctgatctagttggagctggggtggggaggagcaaggacagtctctctaaagtgacaacctaagctgagtgagagttgggggtgagtaggggggccctgaggtggaaggaagagagtacatttgataaataaaattcagaaaatgggccaggcacagtcgcttatgcctgtaatcccagctacttgggaggctgaggcaaggagaatcgctggaacctgggagaaggaggtagcagtgaggtgagattgcaccactgcactccagcctgggtgacagagcaacactccatctcaaaaaaaaaaaaaaaaaaaaaaaaaaaatcagaaaatgggggtggggaggtgcgcaggtgctagatcaagcaggactgtgttgaggattctggcttttctcctcatacaaagcctttgaaaggttttagtgcatgaaccagagagaagcaggggtggaggtgaggggatccttacagatgtaggcagagaggggctgatgacaggtggaggagagggacgagcaccctttcaaagggagctgtccgggatgacatgggggtgctgtgtgtgagataaggaacactgacggagggccagctttggtgggcgcagggaggaggggctgggcacatcgagtctgaggtctttaaggtatgccaagtggagaacgtcaagaacaagagagctggatgttcatgttcagaaatccaaggtgggtgcggagagaatatggagtgagggcaggaggatacaggttagagactccacaaacctttactggtggtccagaagaggcagtactaggaaggagacagagaaggaacagccagaagggtttgaggaaaactacgagagagaagtgtcaggaaagccctggaatagtgtttcaaacgggaagagcgccaggagcgctagatgctgccgagcagtcggctaagatgaggcctgaaagctgcaggccacctgtcaccccaactgctgagttggagagaagagggagttagcagggaagaggctgaagagcgagtgagagataagaaaatggggaaagttaagtttagagaattagtcgaagtttggctgcaaagaagagaaaagaaggcaggggcaacagggagaagagaggctttgacagggcagaagagaggctttgacagggcagaagagaaaccagtgtgctgag

SEQ ID NO: 2216 - DNA, 1910 bp, Artificial sequence
  DNA replication origin
gagcacccggggcaggaacgcaggggccaacctgggcgcggaggcggcgcggagggtgcgccgcgcggcccgccaggcccgggacccgtagcttcgccgtgcgctggccggggcggccaggaggcccaagccatggaatcggaggaggagcagcacatgaccacgctgctgtgcatgggcttctcagaccccgccaccatccgcaaggccctgcgcctggccaagaacgacattaacgaggccgtggcactgctcaccaacgagcggccgggcctcgactacggcggctacgagcccatggacagcggcggtggccccagccccgggcccggcgggggcccgcggggcgacggcggaggtgacggcggcggcggcggcccctcccgcggcgggagcaccggaggcgggggcggcttcgaccccccgcccgcctaccacgaggtggtggacgcggaggtgaggaggggcaaccccagacctctgtgggaagccactgggctggagttcctgggaggggacacaccccgctgggcttggtgtggggagagagggcattcgactggggctttagtgggggcggggcggagagagagagagaagccccaggctccagttgggaaccgaagtcacttgattgggggtaagtggggagagggacccataggagaggcgtgtgaaagggaattagggatgcgcagcggagctgtgggttggggtgaggaggggtcccttaggcttccggctatgcacgccgacgatggggaggaggctccagggctatcatccgagatgggaggacagacacttgagcatatagtgggaaggatgcgtgcagtagggggtcggaaatggggtactagtgcactaggctaggtcggagattttgtggcacgaggtttcagtgaaggattggcggaggcaccaggctcagagtcagaaaaagcggtgtgggccggccagagtagtggtctttgacaggatcacaggaaaactgttggggttaggagtgaggttggggttttagccaagggtcggaaagggggggcattgagtaggatttaaaatgaagagggaaggggccgcggccaggaatgaggacttgaataaaatcaggtatgagagcagtggggattgcactgagagggcagaggtgggaggcctgggcaggggtgggagctgaggagggtctaggcagggatggggactggaattggaagatagagctggcaccaggtctgggtaaagagggagtactggtcatcgataaggtcagaaatgagagaaaattagaccggggaaagagatggtagtcatactgagggtgctatgcagaggggcgcggaacagggtgggagcgcagtgggggtggaggaggagtcttgaggctaatggctttgatcagagacctcaagtctaggtggagaagactatgcctgtttagtttggggtgtgagcaaggaacgtgggggaagaaaacggactcttctataataaagaaaaaagatcgaccagaagcagcagtgcttttgaataattactttgcagaaacatagtagctcatggcaggaattttggtcagattcgttgggtagttcatttcaggggccagtagagcagcttggcctgaccacagaaaagcacagatctcaaattattgggattgcgttattaggtagagatacgaatttggttcgttcttaatgaagaattaagcttagtgaagctaagccttttgaaacactttttcctgagcagtgttatatccttttaattgtatgcttttgcaacagttcctcgggctgaagtagcttgaacaagaaggtggcacttaaaaagaacaggtttctgcacaagatttctttggcttccacacttagacacagttgctagattgccctctgtaacccact

SEQ ID NO: 2217 - DNA, 1131 bp, Artificial sequence
  DNA replication origin
gccctaatttaatatttggtgtatgtaaagatcttcgtgagtgctgggctggcaacagcaggggtttgatgggatgaaaaagtaaggttagctggatttcaggttcaggaagaaaccaggatgaggacattagaagatgaactcagcaagtatgtaggaataggcataggagatgaactcagcaagaatgaagggatatccgaatcttgggaaagggtgggaaaataacctagagaactatggattgaaggaaattgaagaggaaaaatagcaaggacttaggcccaggacggctttgaatgcggctcagcacaaattcgtaaacttcttaaaacatgatgagattttttaaaagtttcatcagctaccattagcgttagaatattttatatgtggtccaagacaatttttctccttccaatgtagcccagggaagccaaaagattggacacccttggcttagatggtggagtcaagggaactaaagatatgaccccagtgtgccaatgccaaaggtgagaagagaaagcaaagaaagcaggcctttaaagaggtagaggaatcctcaaaggtggaaagaaacagggataggatgctgcccaagaggcagggacaaagaatcggagccaaagactgcggtaaaaatgtgggaaggtgatgtccacgatgttcgaacgagtccgtggccgaaggaagtaagagtctgggtttctggaggttttcatacagagaactgggatttagatttcgggctggaaaaatatattttggactctcaggggctttcagggtaagagttcggtagagttcagtcagcttggcggagacaggtagtcagttaatgttggaaggaaaattcggacagctgggaattaatttcaacgggtttagggtgatttcggcaagggctggcggggctagggtcgagtgtgaatttcgtcttgggtggtccacgcgtctggtttgggcaggaatttctgtgggcagcgaggcgtattcaggcagcgttgcgggtgaatctgcgtgggatgagggtggatttccttcaggactgcggtgcatttcaggccggggtggaggtgcctcacagccgcggcgcagggaattccctctaggatgggggagcgggtc

SEQ ID NO: 2218 - DNA, 1271 bp, Artificial sequence
  DNA replication origin
cggccccgccccgcccgccgctcgcccgttgcttcccacctgggcccgaagcgcccagcgccctctcccgggaccccgcgcccgccccgcgcccctcgcggctcggggtccgccccctcgcccgcagggcccgctgcactgtgggtaggcggcggcggcggcggctacgcggagcggcaggcggtggagcgaggccgcgcgcgccgaagatggctgagaagcagaagcacgacgggcgggtgaagatcggacactacgtgctgggcgacacgctgggcgtcggcaccttcggcaaagtgaagagttgagtacgcgctccggaccgctgtgcggggctgcctgacttgcgggaggccgaggggagaggcgggagccccgggcctccggcgggcgcggggctcggcggcaggtggagcggtcccgggtcgcgcggagctggggccccgggagggtggcgcgcaccgcctcgcctggcaccggcgcccgggccccacagggtccagggaagagggcgggggtgtgagctgaggatgggcgtcctgggttccaggttccgcgcccatctgcctttctggaggtcggagcaaggcacttctgtgttctctggacctcagtgtcctcctctgcaaaatcgggagaactggactcgttctgcgaggcgccttccagctctgagcctgtaggcttagggcggggatcatccacgctactgaggactgaggcgccgtttcgtgccgggtgccctgttaggtgctttacatggaatctcattgaatcctcacagtgacttggtcaacatgttgtcctcaccctaaaggtgagaaaactaggacccctagagatgtagtaacaagcccaaggtcacacagaaatggtcagtaccagagtgaagtctaagatgtcctccaattctggtcttgctgggaggtccctgccatccccagattccttcacgttccaggactctcggttgttgggggtgactgtttgggggatgctccaggggccagaggttgtgagtctttcttcctggggtgttgtttaacgctggaatgcagctggattgggtcagaggttaattaaaacagagaggtctgaaggtgtttgtgtttgtaaaatggctatgggaagacttctagggtaagggagagaaaaagtttccttggtgtttggaggatttgaggctgaggaggtcaggactgctaaggcatattctgctaaggtctgtcttcatggagataggatccccttttgaatgtagaaaaacaggc

SEQ ID NO: 2219 - DNA, 1354 bp, Artificial sequence
  DNA replication origin
cccctgtctccctacttccgaccacgcgcgatcctgtctccagacttgtccacccctgacacgcgtctctctccaagaccccctgcgccctctttcctcctgcggtcctggctatatcggacctcgagcctgccttctcccgctgtcctgggctcccgaaactccctccctccctcgctggtggccagacccttttcctcattcggccgaaccccgttctcacttccctactcctccgtagcgctgagattcggcttcgacctctcgaaaaaccgactctatcccagtaatcccagccctttcgcgggcaccgtgagaactggatcccgcgttcctcggaccccggcctttcttcggatcctctgtggactctgttctctgccgctcgtccccctccatccactccccagcaccccctccccccacgcccagctagtcgcctccccagcccgcccctcttccttctctctgctccagactcgacgctctgacttggatgcagagagctcagtttttttttctaccaaggaaactttaaatctctgtggttcggctcataaagcaggcacacaagagggtgtcaaccgccgagagaacccagaggcagggagtccgagatggggggaggtcgtgtcgcggcgtctgaaaggggccactgggtgagtgtacaaagtaaatttcaaaaccagggtggctgctgcagccaggaccctgcctccgctggctgcgtcccgaggagtattattgtgacccctggtgggagggcgcatcttttctctgcactttttaaggcgctttttcttttctctgtttttgttttttggtggtgctggtgggcctgatggggggcagtgggcacaagggatcgctgcctggagaggcggacgccacttggctgctcccagacccgccagactgtgtacgtttcactccgtgtgaactacccccaacccccaactgcatcgcacaaatcctcattgttgggggtctgctggggcacttccgcttaggctgggagagtctgaaggaatggcgtgggggtggggaggccgggggcgcttggctaccgctccgctcttggcggcgggcggagtggagagcgccgcgacgcgggcatctgtgcgctccggtgtgtatgtgtcgccgagtctggggtgcgcgcccgcgtgggtcggtgtctgcgtgtgcgtttggatgtcggcgcacgcctgtgtttagctccattagaaagaggggcgatgtagggcttgcggtagcgagagcgcctttctccgcctgggagctggacgggggcgagcccgggggcgagccctcctgcgagctggatgctccagtgcagctcctagccagccgg

SEQ ID NO: 2220 - DNA, 1077 bp, Artificial sequence
  DNA replication origin
agtctggcgggtctgggagcagccaagtggcgtccgcctctccaggcagcgatcccttgtgcccactgccccccatcaggcccaccagcaccaccaaaaaacaaaaacagagaaaagaaaaagcgccttaaaaagtgcagagaaaagatgcgccctcccaccaggggtcacaataatactcctcgggacgcagccagcggaggcagggtcctggctgcagcagccaccctggttttgaaatttactttgtacactcacccagtggcccctttcagacgccgcgacacgacctccccccatctcggactccctgcctctgggttctctcggcggttgacaccctcttgtgtgcctgctttatgagccgaaccacagagatttaaagtttccttggtagaaaaaaaaactgagctctctgcatccaagtcagagcgtcgagtctggagcagagagaaggaagaggggcgggctggggaggcgactagctgggcgtggggggagggggtgctggggagtggatggagggggacgagcggcagagaacagagtccacagaggatccgaagaaaggccggggtccgaggaacgcgggatccagttctcacggtgcccgcgaaagggctgggattactgggatagagtcggtttttcgagaggtcgaagccgaatctcagcgctacggaggagtagggaagtgagaacggggttcggccgaatgaggaaaagggtctggccaccagcgagggagggagggagtttcgggagcccaggacagcgggagaaggcaggctcgaggtccgatatagccaggaccgcaggaggaaagagggcgcagggggtcttggagagagacgcgtgtcaggggtggacaagtctggagacaggatcgcgcgtggtcggaagtagggagacaggggcgcggggatggggggcaggacagagaaagagaagtcgcccttttcctcccagcaagtggagggagaaggcgaaaaactgctgcagtcgccatcctcccagcacccctagccaaactgctgagtggcgcgtcccaggagccctcctccgcgccccggggct

SEQ ID NO: 2221 - DNA, 1929 bp, Artificial sequence
  DNA replication origin
tgccgcgcgcccccgccgcgcctcacctcgcctagcccagagcatcctcctccgctgccgcagccgcccaggaagcggctccccatgcccggcgggcggcggcactcaggcgcgctctgcagcccggggaagcccgggcgagcgccgagctgggtccatcctccccgggagccaccggccccgcgtcagagtagggggaggagaccgccacccgcgcggacccgcctcctcccgcggccccccgccccgccgccccccgcgcccgcccggcgccccgcggcaccgctcacctgctagctccccggccgccgccgccgggccgtgagcccctcgccccggcctcgcggctccctccggggcgctctctgcgcagccggagcgcgctccgagagcttagccgagtggcggtggcgacgaggaggtggaagaacgagcgagcgagcgagcgagcgagcgggggcgccgcggcttgcagtcgcgcctctggagcccctgcactctctctccatcccagcgtggaagggggagagacgagccgagagcgaggggtccccgccccagccgcgccagcgtggagagggtaagggaggggggttgtcacaaagtatccagtgttttctcccccatcaccaccactggacgcagctccgcctggcctctctcatttttctctaagatctacccttttatccaagcctcgaaaacatatgcatacccaaatatatggagtgccaggaagggcgaaaccacgaggggagtctccgcgagggcatgttgcccccacgccccttggcaggagggggcgctcgctcccagccgccagtgcaggttcggcggctcctgttttgactgaggtttcccaggcaaagttcggcaagttgggagggagaaggctggcacgtgtcaagtttccgtcagtcctcaggagagacccgtgcccctgagagcacgcagaccacggttaactccggcttactccccgcgactcccctactcggctcttagaatgactgggagtaaacaatcctccgattcgaagctgtgcgggaggcggctccagcgagtacacagtcagttgctccttgcttagggtcctagctcacaaagatcctagaaacaccaagtcgcagaaaatattgggtcattctgaaaattcttccaccttgagactagattcaactccagaaaattcctgttgtgtggcatacctgtctccagaggcctgaaatgcaggagaagagaggagcctggtgaatcaaatcaagtgcataatatgtagattcgcacagcacacaaaccaccctgttggacccaggtgcagaaaaggaaagcaagaggcaggcaacccttccttaaaaagtttaccgttactctttttggggctacactcctgtcttccagctgtataataacaaagataatgtgatggatttgtgcttttctgttttggggtgtttttttttctcgtagcttctgacactcacccatgaaaatttaatgaagcatttagggttgttacctccagagtcaatgggctaaaaatatttagcctaatgcactccttgtggagccagtaggtccagggctggtacatacaaagtcatcaagagaccctccctttctccacaaaattcacgacccattaaacttattccataataacagcttccgtacaaatggagacctgagcaaacggaggctgtcatgcatcacctgaaaagatagcaatttacatagagacaagaacaatttgtaaggtcatagcaggatgcaatcttgcaagaagagttgatcagatgaaatttccaaaaaggtgggagggaggtcctatccctgatactactcggtttctacctacttccaggtgtgacagataatctacgagtggggagcagagaaactagcctaagtctctacaagttttccaaa

SEQ ID NO: 2222 - DNA, 976 bp, Artificial sequence
  DNA replication origin
tgtaacaaaatattgggattatatttatgacttctcaatagcctaactttttgaaaacaccattatttgatattattgcatgttttttgaaaagcgtcattttataagtctgtgatattccatgggcacagggataaggcggcctagaacattcagagagctccaagtgatagaaaaagggaataatacttaagagtctggattctggagtcacagtgccttagttcaaacccagatatgtgacaaaatatagagaggcttagcagagtgcctatagcagagtaaacactaggtaaatatccactggtggtaacagtggggggaaatgatggtggcagtagtatggagatagttgctgatactggggattggggtgatggaagtgataatgatattaaggatggaagcagtggaggtggtgggggatggagttgggagcggaaatggtggagatggtggtagtaatggtggtgggggcggaggtagtggtggagatgggggtggaggtgggggtggtgaaggtggtggaggtggtagggatggtggtgataacagataagactgctcaagtattaaatgcaagaaagatgaatcaagcatgtgtgtatgggggaaatcacagcaagagatgaagccagaaggatgtgcagatatccagataatgaggattttgtgcatgatcttaataagttgggccattttcctagaggctatgggaggggagggcagaagagagtctcaagcagggaagtgatgtggtctaatttggagtgggggagatattttaggacaggaatccttcaaatatcaccatctagtcatccacccattctgcatatgtatgaggtcagatatgatttggagcaaagaataaccctgtttcaggccaaagaaacacaacctggatgttacctgggagaagtcaagtagaatggtgagaggactagaaagcatggggcaagggtggaaacatgaa

SEQ ID NO: 2223 - DNA, 1259 bp, Artificial sequence
  DNA replication origin
cagcgtaggctcaggtcgcccttgtccgtgcggcgcacgcccaccgagttcacgcaccagcacaccgacgtctggttgcactggcgcgccttgaagcggccctcggggtcgcagtcggggtcgtagaggccatcgttgtccacgagcgcgtgctcactcggccgcaccagcgtgcgggcgttcttgggggcgctcatgcgcgccttgagcagcagacacttggaggtcagcgtggagcagtcgaccgccatgcccgagcccagcgcgcggcactggcagcggccgccggggccgtcggggctgcacacggtcatcttgttggtgggacacgtgcagttgtcctgcgcggccgtgtggccggtcaccgccgccagcaccagcagcagcagcggcagccgcagcggtggcggcgcgaggccggggccccgagccatggtggggcggaggaacgcggaccggacgcgggcggatgaggcgcggggactcgtcggggctcgggctccggcgtctgggatggtctgcaggcgtctgccgcccggccgctccctccggctcttatactctacccgacctgcccggctggttccaccaccgaccgtccccactggtatttgggtgacacatcccgcccccctccccgtcccacggaaggccaagccggccctgcgccgcccgcgataggatcagaacagggaagctgctcccgcctcctccggaccgaaagccgggaaggggagaaccgatactcacctgtaggcttctggggacccgccctcggcgcggcctcctgctacagacctggcgcgtctgggccgctctcccggcagaaagtctaaagagtttcattgcaaagtgtggctcgcgactgtcgcgctctcctctatacgcgactcccttttcgttctttcccagccccagccctcccttaatttctctcactccctctcttctttgtccagttctcacagtagcacacgtttatatagtttacagttcacaaacattatctcatcctaacaccagtcctgacaggtagggactatcagacccgttttataggtggtactgatgaggcttaaagacctgaagtcacactgctatcaacttcctcatatttctgagaggggtctttggcaccctgcctaggagtgatgagaccttaaataaagtgtttgtggacacgaagtgacacagaatctgaagggaagttagggaagcagttctgttactcaccatatcaagggtaaaacacaggtatc

SEQ ID NO: 2224 - DNA, 1018 bp, Artificial sequence
  DNA replication origin
ttcctcatgcgcttcctctccgccttgatccgctcctgggactccatgtcgatgggggacaggggcggtgtctcgccgggcatctcgggcactgtctgaggctcctccttcagggcctgcagccgcgggtgctgcacgggcatctgctggggcaggtggtgcggcggctgctgctgctgctggggttgcgcgggaaaggccaggccggccgcgccgtaggagggcgccccgccgccgctgctcagcgcgcctgggttgaagttgctgaggtttgcgtagaccggcggctcgctgtgcaggctggcgctgaagccgccgctgccgctgccccctgccaccgaggctaccgcgggagccaccatgcctgccccgttgaccggctgcgccgccgacgtgacgctgggcagcgtgttctggctgtgcagttcggccagggcgcgcacgaagccctcggcgaagccctcctgctcatctgtcacgttcttggggcacaggaactgggtgggggtcggcgtggtggtgatgtgcccgttgctggactggattatcaggcgctccagctcgggcgacgccagcttgagcagccccacgtcgggcgaggtgaggaggtccgagttcttggcgcggaggtgcggcttcaggctccccactgggtcggccaggttcagggtcatgctctgtttcaggatcttggggttactgtagccataaggtccgctctcggacgggaggaacgaggcgttgagggcatcgtcatagaaggtcgtttccatctttgcagtcatagaacagtccgtcacttcacgtgaggttagtttgggctgcgcgcacaagtttcggggccgcaacagggctgtggcaagcgggggacacccgcgccccccggagcctttgacagggaaagtttctctaagagcgcacgcacccgctggctgtcgtccccgctgcgccctcctcaccagctcgctccagggagcgcagggttaattaagatgcctcccgcactcttacttgtcga

SEQ ID NO: 2225 - DNA, 785 bp, Artificial sequence
  DNA replication origin
tttcccggcccgcccggtgcattgtgggctgacgtcttggggtttgactgtctagtgacggtggctgccgcgagcgggcggacgctcgcaacctctgatggaggggggctcaagttcacggctgcggacggggatgcgggggatgcagggacccgggaggccagggaacctggccagttgttttgggccaggggtgcgggcgaggggtggttgttgtttccccacttgtggggcccgaagtcatccaccggcggccgccaccgcgcggggctggaggctgagaatccaagtacgctgccacccccccgcacttccgggggggcgggaataccgcccttaaggtggctctgtgaagtcccaggtgggggcgagcctaaggggacttaagtttaggggcggtctcccgagagtcggccccccacgttgagaacactccgaagtttgcatctcggtcaagttcaggagcgacggtccgcggggtcgtctggctgctcgtagaagccgagagatttgtattgcccgaaactggacgctcagctgagtctccgttgcaccccacttcatcctccgggaccgtgggggaaagggcgcgggggttcacagctttgcctcggaggggcagtttttatagtgggcgcaattggtgggtaacagggtccagatgggaacaagcgtgtaggcgatccgaaactcggggaaccccggtgttagtctactccccctcccgcccccggacaacacgcacacgcttaacacaacacgcacaacataacgcgcgcgcgcgc

SEQ ID NO: 2226 - DNA, 1001 bp, Artificial sequence
  DNA replication origin
tcctcgccccgagcccgacagccgcataaagcctgctgctttcactggcccggtgggggccagcagggtcagggcccgcggaaaccctcagcctggcgggccgggaggccgcggtgctgcactggctcggcgcgctccccgagtggcgctcaggcggggcgcgttcatttcatctacagactgtcgggaaggcttcccgaactcctcctccctgcccgcctttgcgcagggccggactcttcggaaactgaaatcacgggccgcccggcccccaccagtcctcgtgggatccggcccgggttaaccttctatggggaggcccaggagggccgggcggagcgccggggcgggcgtgcgctgacgtggcgagcggctccctccacccgctcctcccgcgggcactgccgaggcccatgggcgggaagccgggcggcgggcgggacgtggcctcggtcccggccctgccccgccccgccgccactgagactcccagcgccaccaacgtcggagttgcagtttctttagctgtcatatgcagacaagtactacccacctcgcctttggagtgagcagcatgtatgtacggtacctgacacctaagaaatgctcaatgtatggtccctacatggtgtcactgtgattgttgtcgttgtggttacgctgggttgggcagctcgccttgtgaaataatgagctcccattgctgagaccgttcaggcacaagttgaatgagttcgggggacaaaaagaaatacgttagaacaggaagtcccccaaatttggcatccctcaataccgatctggtgacttcagaatcacctgggaagctcaaacagcacctcagaccagggatcgaaatcccggaaggcaagctcgtctaaaagtacagcttcatgtgtaaaccactgatctaggccaatagtccctgcacttttcatcttcaaagacccttctgtgattccctcctgccccactgactgcacagtgtaaagtatgttgtt

SEQ ID NO: 2227 - DNA, 1082 bp, Artificial sequence
  DNA replication origin
cgcctcggccccctggccccctcgccctctcgcctcctcgcactcacccagatcatgaggctgtcgcacaggggcagcttaggctgcggcggcggctgcgtctcctccatggccggcgccgccgtcgacgacgccgcggacaccttcacactccctcctaccggctctcctccaggagccggcgtccacgacctgctagcccccaggaaagctcggtaccaggcccgacccgcgcagctcacgcgcgaaccctcgcgctgtcgacgcgtccggcgtcaccccctcctcacccgcccccgcctcgctccagcgttcgccccctccccttcctgggccccggccgcgctgccaggcacctgagccccgccttctcccacccctcccctcctcccacccgtcctgcccactcccgcacacctcgccccgccgccctgagtgacctggccgcgcaccagtcacagagacggtaggtacccgggggggcgggcggggcggggcgggggcgggaagaaccgggataggttgcgcaggggggattgctgattggacgtgccctcgtgggctctggccaatcaacgtgagacaagcctgagccttgggtagagagtgagagtgggtgggaagaggtttatgacctggcaggtgcagtgagggcgggggtgggaggttgcgcgcgggaagcgagcgcgcgtgcgcggcggggattggtaaggctgaagctcagccccagtggccgaagaggcagaggggcagcagggcaccggctgggctcaggcgtcttccctccttcttcgcggtagcacgccgcctcgctacacctgtggagggcccacactctgcttccacattgtcttcagaaatagatcctaccggctgggcgaggtggctcacgcctgtaatcctagcactttgggaggctgaggcgggtggatcacctgaggtcaggagttcgagacccgccaggccaagatggcgaaacccattctctactaaaaatacaaagattagccgggggtggtggcacatgactgtaatcccagctactcaggaggctgaggcagaagaatcgcttgaacccggga

SEQ ID NO: 2228 - DNA, 935 bp, Artificial sequence
  DNA replication origin
gggaggggtgggagaaggcggggctcaggtgcctggcagcgcggccggggcccaggaaggggagggggcgaacgctggagcgaggcgggggcgggtgaggagggggtgacgccggacgcgtcgacagcgcgagggttcgcgcgtgagctgcgcgggtcgggcctggtaccgagctttcctgggggctagcaggtcgtggacgccggctcctggaggagagccggtaggagggagtgtgaaggtgtccgcggcgtcgtcgacggcggcgccggccatggaggagacgcagccgccgccgcagcctaagctgcccctgtgcgacagcctcatgatctgggtgagtgcgaggaggcgagagggcgagggggccagggggccgaggcgaggagcctggggcgcccggttctcccaggtgagctggggctacctgcacagggtcccggcgcaccctgcccttctcacctcgtgcccttgaccgagagaatgccacctgcgggtcgacgggcaggtgtgtgggcgcgggttggtgtccgggggtgggggtaaaggaagctctgggagcgtaacagtggaggctctggtctcaaccagaggattcgacctgcctggtgccctaacagctgggatatgaaccaagcacccatcctcttttctccccgctgccccattttctccccctgaacagcgcccgagccctccactttctggatcgccgactctcttgccttggtccgcttgggcgtgaagaccctttccgaaacctaaccctgcatcctcaaactaccttgctctacctggacacaggtggccaggaggtggctggctgttttagttcccggaccaatgctccttcaggactctagaacatccgattttgtagaagccgcttcaaagagatgtttgtatttcccgtatggagaaaaagatgtgttggg

SEQ ID NO: 2229 - DNA, 1329 bp, Artificial sequence
  DNA replication origin
ctaacctcacccttaccctaacacccagctcacttggggttaggagttttttgtttaggaaacagtttgtgcttcgactatagcccttctcaacctatattagaatcacctatttatttttcaatctcacaaacactgagctctttgaaactaacaatattttggctctgaatgcatattgttcttggcatggtgctcagtagtcattacatgattgcaaaaaaataaaaggaatgggaagggaaaagaagggaaggaaagggaagacaaggggagaggatcacagggaagggaagagaaaagaagggaagaggaggagaagggaggaaaggggatgggagggaaggggaggaaagggaagggaatgggaggaaaagggaggggaggggagggggaaaaggaaagggaagggaagggaaaagaaggaaaggggaggggagagaagaggacaggggcggggggagaagggagggaagggaagggaagggaaaagaaggaaaggggagggaaaagaaggaaaggggaggagagagaagaggacgggagggaagggggagaagggagggaagggaaaggaaaaaagggaaggggaggggagaagaggggagggaaaggaaggaaggagaaagagaggaagaatagaaaagaagtagggagagagggaggtaagaacggaaagaggtaagaaaaagagggaagagaggagggaaggagagaaggaaagagggaagaaagaaaaatcaagatcatgtttgagaaagtattttgtaaatttcacatggcttcatacaatcaggagccctattcatttcacctggaataagctaacgtacaaggctagctactcttagggaaagcccgtttttccttaaatcctttgactccagcagatcagacccacctacatcctctgtaaacttaagtgaatgaactttgtaaagagtgttgcctcttagccagcttctccatgtactccagtgtaatcaataaccaatccagagagcaaattaatgttaaatacagcttgaagaatggtggaaaaaaaaaacagtaggggagcattagcagagagccttcccagaattgtagtctcagggactgtaggttggttcagagattatcataatctgcaagataggagggccctccagaaatagagttatcattcctgctataaaaattgtgcccctgaattaacacaaacaagaatttccagatgacagttccaaatgccaattgctgctattttcacttcaacatcataattgactgagtgtgattgcttggtggttttgaagctgtctttgcaccctaataattgcactttcc

SEQ ID NO: 2230 - DNA, 1627 bp, Artificial sequence
  DNA replication origin
tgaaagatccccgagtttagaaagtgtcttgccgctctgcggacgctgtgtccgcggccccgctgtcgcgcagagctgggctgcgatcagaaagtccggctcccctggccccagacagtggctcccgggggaaccagcgtggagggtgaggagggacctggccttcgaaggcaggaaggacagaacccccaagccacgacggcagcggggcgcggggacggccgggctccagccacagaggcccgaactcggcccgcactgcccggcggcaggccgcgaaggagccccgggtagtgggggcggcaggaaggagaggcgcgcagggccttcggggcctccccaagccccgggctcccgtctgggctttgtgggttggcggtgtctgaatcgccgacgggccgagccgtgccgggaaggcgcgcggccccgcgcgggcacctggccgaggccgccccgcgctgccattgaaatgtgacactgatgaacgagctaggcccgcggctttctttgggagagttggaagtcgccagccgcgagatctggggctctcaggttccctgggaaacgttctccccgcaccccactgcctccaccttcggcactattgctatcctctcccatttccccccaacacacacacacacacacacacacacacacacacacacacacccctcacgcgttttcgagtgccagaccaagagtcttaagttcagctccaggaagacagggtagtggcgggaaagaacattctgacgacggggaagtttgagttggttggggctgagtcaataaagtcgccccttgagccttttgttttgaggctttgattgcaacggcgcctttcgccttttatatttggggcctggtgggtgacagtgaggggacagaggaaggggacgaagcacgtggaacctggccccttttgggatgtttctgcaccagcttttgttgggggagaggatgggaagggaaggagggagagtgggtgccttacaggcaaccagcaaggatttcttgagagacaacaacgtgcggagcactgaatcaggcaccagcagcgcttattgagaatgagaataggatcttgcaagctgattagcgagagaaaaattcaaaaaagggacaaattggttagattaagtatccaaatagatgcagcaaagctgagtaaacaaatcaaggatgggtattggaattggctagtggagtctcagagcatctgtgtgtggacatctccgtgagtccattgcagttcagaggttgttctatgtaggctcagcctagaaaacagatacttaataaagttcgagatgacgttgtcaaaaaaaaagagccaatcattccggttggaagataaagttggacaagtaaatcaagcccagactgagaaggctgaggggcccagaatctaacggataatctactggctttggggccagactagcacagaagcagccctatccaagcctcttaggaattgtaactatgagtctctgtttccctccgtgaaatggggataattatgccttggtattgtgaggattacacagggttaaatgagacaatgtccttgggcctaaatacttttggtattgatataacccctccttctctttcaaccatt

SEQ ID NO: 2231 - DNA, 1141 bp, Artificial sequence
  DNA replication origin
ccgctgtcccgtggggaggatgaaagcgcagggcccgggcggggccgcggcggctccaaggggcggcgagtgcggggcggggactgcggcgctcgcggtgaccgggccccccttcccaagccgcagctcctggccctgcaggtgcacccccagcccccttttaggcccctccgtggaaaccgccttccggcccaagttctatcctttgaggctttgaaccaggcctttcagaagtttttaaagctgccccgccccgccggcactcacgggggtcacagtcccccatccctccacctccgctacagctgccggcgaagcgggtgccgggaggaagcggagtgggggccagcgggccggcccgagggtcggggaccgaagcgccgccccggagcgccaagctcggccccagcgcttggagatcgcgccgcgtagcccgacctcggaggaagcgcgggcccgccagcccctggagaggggagggcaggggggctgggagaggaagagcgcgcggggaggggggcatgtccccatcaccgaggttcctgcgctcagttcaagccaggggacaacttaaattggccttcaggggaggcagctggtgacccgtgtcctcgccctccaaattcccctgagcgaagcagggcgccacctacaggcgagctctagatagcaggcaggagaaagacgcgcctgcaaagtaatgtggccccgtcccagcaagcctagcaaggcctgttgtgtccacagcctcctctcagctgcctgagcctgtaccgagttataggtccgttggcaacagcaagagccctgagggcactcagcgtgtgcttttggggagtggagaactgggtgttaatttcaggaattgggggattccagtatcaaagaagtagcagctctgattggacaggcaggttgcaccctgacaattttggctgcactttgactccagtatctcgactccaggctattttcatgggatgcactacgtttccttgagaatagctgtgtaaccttgggcaagttactttatctccctgagtctctgtttcctcatccctcaaaagagggaatagtggtacctgtctgatagagtcattgtgagaatttaatgagatgatgtaggtaagaagctgtaggt

SEQ ID NO: 2232 - DNA, 888 bp, Artificial sequence
  DNA replication origin
gggggtgtgggggagggggcggctgcggcgccgcgcggccagccgggtcccgagcctccgcggccgctcgcgctcgcaggctggctcgctcgctccccggctctctccgtggctcgctccttgctcgctcgcttgctcgctctcccgctcgctccccggcccccccgccccctcccccgatcagcgcattactgggtaacgcagtgaggagcagttacagtctgtactcccgggcagctataggctgccacaggatgtgcttaagcaaacaaaactacttttcctcgtccccatccccccacccccgctgcagacctccgcggacctcggtggaggacttgggcaactttgccaggttgccccgcaccccccgggccaccgcgtgggcacgtagagaaccgaggaggaggccgggcggcacatttgcatgtatgcaaatttctttgaaaaatcagacctcctaggtaactttttttcccccactgaaatgcggtaaggctcaaagcattgtaatctctccagcgaagctttctgtgggaatagattcgtcggcagaggtaattatgcacacaatcctgcaaactttgtgcagcttcggtcctgtggcattcagaagcgggggtggtgaggaatcagtgcccacagaagattcaccggatttggggggcgggggtctggagaaaagaaggcggagattaatgagcgttatccctcccaggactgtgaaactagtgggtttgaacacagacgccatagaaaaagttctatcacgttcagaaacaacagtggtttagctgtgacatcttttactttttaggaggaaaaaaatatgtgaaagggatgtccccttagggaagggagatattctgatccacaaacgcgtgccca

SEQ ID NO: 2233 - DNA, 861 bp, Artificial sequence
  DNA replication origin
cccacgcggtggcccggggggtgcggggcaacctggcaaagttgcccaagtcctccaccgaggtccgcggaggtctgcagcgggggtggggggatggggacgaggaaaagtagttttgtttgcttaagcacatcctgtggcagcctatagctgcccgggagtacagactgtaactgctcctcactgcgttacccagtaatgcgctgatcgggggagggggcgggggggccggggagcgagcgggagagcgagcaagcgagcgagcaaggagcgagccacggagagagccggggagcgagcgagccagcctgcgagcgcgagcggccgcggaggctcgggacccggctggccgcgcggcgccgcagccgccccctcccccacaccccctcccccccgcggcggcggcgcgagcgggcggcggctgtgcggtgcggtgcagagcggaggcggaggcgggcgcgcgggcagctcgcgggcacccggccgggccggcgcgggagcgggaaagggtgcgctatgcctttaacacccgcgtacagtaggcatgtatagtggagtgtagggaaactctaggcggggttaaagttcagctcatggagcggcaatagcgctggctggctggctgcagttgagccgacttggaaatgtgaacgcaagaagcaggcttgatttttttttctccccccttctctctctctctctctctctctcttcctctctccctctttctcctctctcacccacactcacgcacacctccaaaccgcacacccagacgcacacgcataccccagcgcccggcagttatgtattctccgctctgtctcacccaggtaagccgcggcgtggatgcggagggct

SEQ ID NO: 2234 - DNA, 909 bp, Artificial sequence
  DNA replication origin
cgcggcggggcggggaccaccgtggggtcacccgggcccgacgcaggaggacggcgcccccgccccgcctcccgggtcagcgcggacgcacgccgcgggcgccccatcctcgccgcggcccctctgagcgcccggcggcgccctccacctccggctcccacccactccaggcgggcgggcggggagagcgcgggggcagggcaggcaggcccgggaagccccgagggagctgcccccggccggcctccaggcgcggggacacccaggggcgagcgcgcactgcacagccgggacctcacgctttacctggtgcgctggaggagcaggtgggagcccgggtcgggcgggctcggtgtcggccctgcctcacctgggcggaagtgagaggcccagggtgaccgcgcctcacctggcaggccctcccctcgccccgactctccccgcccggggcggggcaccggggtggcgcagggggcgggggagggagcccggggccgcgggaggcgggctccaaggagggaggacggttgccctggctgtttacgtgcaggtgaattcctaccgggcgcgggatggccaagggcctgggaaaagtgggctgtgggggcggggtggcggatcagaccgcgcgtggtggggacagccgccactgacggggagggagatccggacagaccggtgtggttggaggcctgcgtgtagagcgagacccaagatcaaggaaattgaggaggatatcgatgaaagcgttgggtcaatccgcttaacactttgtctttttgcccctttcctttcctgttctctcatccctcctttgttttctctattcgctgacgcaaaataaaatattctaaaacgtgtaaatgtgggagtcattattttcttctcatttagtggaagaaagaaatc

SEQ ID NO: 2235 - DNA, 1435 bp, Artificial sequence
  DNA replication origin
cccgcgcctggaggccggccgggggcagctccctcggggcttcccgggcctgcctgccctgcccccgcgctctccccgcccgcccgcctggagtgggtgggagccggaggtggagggcgccgccgggcgctcagaggggccgcggcgaggatggggcgcccgcggcgtgcgtccgcgctgacccgggaggcggggcgggggcgccgtcctcctgcgtcgggcccgggtgaccccacggtggtccccgccccgccgcgcagggctcgccgaggccgcgggcagggaggggcgccgccccgcctccccaggcctttcgggcctcgaatctcggcccactggtattcgggggtggcacggatcctattttgcgcccagatcggtgcccctgtttcgctcccagagctgggcggagtctttccctccatcggtggccgtggaaggagggaacggggtgaggggacaaagaggagggggtgctcagagccgggctgagggggcgacttgggcccggccgcgtcgcggcgcctggtcatcccgtagcggaggttcccaagccagcggtcaggccctgggctctgccagccttgctgcgtagatggggaggttctgtcggaaagtgcttccagccttaggggaaattcctggactcctgcttttaaatcaagctcaggaaagcattttcagatcactcccactctccaaagcgccccagccgtcccgcacgcaggccgaattaagtgaacaccccttcacttggcactttgtcatatttccaagtggctcttgtcactttgaattccagttggttgtttactggcttgcctctgccatttagagggtgcccctttcagggccttatttttcgactgcatttagggtctggctattggtaggtgcgcgacaagtgtttcttaaaggaaggcagaagcctttggaaacccagaaggacaatgtcggttccactgaggatgatactaccacattctgggctaaattcctattggctgcaaattaatttgcacacatctatttgaaaggagtggaggcaggggcagcggttaaaaacttaaatctgtttgcagcattagaaaatgttaggtgagattgagccttttagctaaagtgagctttgatgtttttagggcccctaatggcctttaagatgttaacaataacaacaacaacaaaacactccaaatgtgttgaatttatttgggaatgagaaatgagcgttatagcccgaggtgcacaggcctggcaagccatatatgcatggaagaggggagggtaaaaggaaacttttattggcaaagtaagtgcagataagctgcgtgaaaacagagtttattggttttgcagactgaaagccagagttggccattgttgaagatgccattactgggcaggtgttatggagagcatcttatcaggcctg

SEQ ID NO: 2236 - DNA, 1055 bp, Artificial sequence
  DNA replication origin
taaaaatacaaaaactagccaggcgtggtggcatgggcctgtaatctcagctactcaggaggctgaggcaggagaaatcgcttgaatccaggaggcagaggttgcagtgagccgagattgcgccactgcactccagcctgggtgacataagaaaactctgtctcaaaaagaaaaaaaaaaaatacaaaaattttccgggagtggtggcgtgctcctgtaatcccagctacttgggaggctaaggcaggagaattgcttgaacccaggaggccggggttgcagtgagccaagatcatgccactgcactccagctgtggcaacagagactgtctcaaaaaaaaaaaaaaagaaagaaagaaagaaagaaaaagaaaaaaataactcgcagaggaaacagccagtgcaagggccctgaggcaggtagttccgtgttttttgaggaacagaaagagagtgtttctgttgtaagagtagtgctaagacaatgttgaaggggcagtccggatagaatgagaaggtagaaatttaaccgaaacaggaagccactgaacagtattggagggggagaaggattacagaggggtcgtgggagaggccagggagcagttggaggtgatttcagtgatccaggtgagagacaacgggggcttggactgggctggagctgtggagttggagagacgccggcaaattcaaggacttaggaatggattaactgcgagggttgaagaaaaggaatgaggtgaccttggggttcaggcctgggtgatgaggcgctttagtggtgcctttattcagatttgagtctggagtcgggtctgaggggtggggctcgttcaagcggaggcacggtggagacagagggaattggactcagtcggggggcagcaatggaagtcagcaattgcttagggcggaatgcgatttccggggaggaggcgcgggtatgtagacagagggggttgggacacaccaggaggggaggagccagccccagagatcgggaatcctctcagtccttagttacaaggctccatcctcactttgttcgctcc

SEQ ID NO: 2237 - DNA, 775 bp, Artificial sequence
  DNA replication origin
cggactggtgaggtgagttggagctctctgtcaagcctggatggttgagaaggcagtgggctgcaagaggagaaggaccaaatgtggaggaagcagaaaggataattcagtttggggcagatttttagtttccagtggatcatctctgcggaaatgtgcaaaggctattgagaattccagatgcaaaatgaaagggcaacagagctttgggtggggccagccagagcacatgcaatgaggcctttaggagaggagtcctcttttgctcttggttatcctgtgcagagagagagagagcacgtcagtggaggagacccaggcagtcgtgtgataactagaagaaataagaggattgtggctgatggggaagaacagcccatgaaaaacaaagattgtcaactgtgtcagattctgcagggtccctgaaggatgatgcctgggtttggcagatggaggggacggagagtgccactggtgactttggagacagctgctttaggggcatgttgggaggaaaccagctagcagagtggaaggagcaaagcgacaggcttggggaaggcagcgatggggtgtcttggctgaaggaggtgggagagccttcggagagttggttttgtgtgtttgtttggggagaggagctctgaacatattttttgactgagaagaagaatccaagaaagaagaggaacagataaggtgggggacagagacagggaatgagagacagagagacagacaaagagagagatggagagggagagaatgagagaca

SEQ ID NO: 2238 - DNA, 1144 bp, Artificial sequence
  DNA replication origin
gctctagtggaagtgaaatcgttcaaataaccatatttctataaaaacgtaaaatgaaagtcctagaaagtactcccccatctgggtcacaatgtcaaaaacgaaacccctttgcctaagtgttagcccttgccaatgggcccatgaaggatgcccattgtgggggtcagagctggcatccggagtcttacggggtccacggccctctacttgcctatctctgttgtcttcatctgtaaaggaggagtagcagcagctcctttttcctagggttagggtgcacaacgcccaccaggcacttagtgaactgttcattcaaggttagcggttgaaacgcaaacattttgaactgataaaaaactctggtgggccgggcgccgtggctcatgcatgtaatcccagcactttgggaggccgaggtgggcggatcacctgacgttcgagacccgcctggccaacatggtgaaaccccgtctctactaaaaatacaaaagttagctgggcgtggtggtgtgcgcctgtagtcccagctactcgggaggctgaggcaggagaatcgcttgaaccagggaggcggaagttccagtgagtcgggatcgcgccactgctctccagcttggccatagagcgagattccgtctcaaacagcaacaacaacaacaaacctttggtgggaggtcggagtgtgaaatgaaagacttagggttcctgagtgggactacagcaaggattgggaagaaaaaaaggagatggaaaaagacgatttaggagaggtaaaagttctgttactaggaccccagccctcactggcccacatccgctggcgaggacctaacttactgcacccagcttcccagtggccagacctaggttccagtcctggctggggcaagtcattaccttgtctggtgctgtttctgcacctatcaaatgaggatggaaatgtctagatgaaccgagataaacgcatacgaaagcactttgggaatctgaaaagcgctatgaacaggttaggagtttttggtctcttttcaaaaagtttttcttctaagctcatgtttatcaagggcttttgagtttatcgaggctaagaccctcccctcggtttcgcaattctgccccttcctacacaccaaagtccgcg

SEQ ID NO: 2239 - DNA, 874 bp, Artificial sequence
  DNA replication origin
cggagtcgcggccacactaggcctagggccatccaatgagacaaggcgctgccacggataacaatacatgctcaggcgaatgctgtagagctgaggcccggtcctcagcccctgctcgcctcattttcgcctgtttacctcttccctttctcggccgcaggaggaaacgaaagaacagtttcaggcccagctccggccgcgggagcttcccagggttcccgcgcgagccctcccaaagggttcaggagcggcaggcaggcctcatctggttgtgtgcttccttttgtgtttgtgtgcctgctttggtgaggtgacctcagctcaagtgctgcagttaagcaggatacgttcagcccaaatccatttaatcaagtatttttaaggtgcctactatgtgccaggcatttttcaaggcgcgagggatgtaaaggcattccctgtcataaaggagcattacattctggagagggagatacaagtgacgctaagataagtgatagatacgatagcctggaaagacctctttgagttgacatttgagcagagctgaatgaaaaagcttggaggaatctgagggaagaatggtgcgggcagagagaacagcaagttacaaacgtcctgaagcttaatgtggttggtgttttgaaaagaagcaaggaggccagggcgcttagagcgcagtcaatttgggaaataagatgggaggagatgagatgagtgagaaaggcaggaccctgggtaagccgagtaaggagatgggagtcgttagatgattctgagctggggagtggcgggattacacgttgaccttcaagagtacaagcagggtcgggcgtggtggctcacgcttgtaatcccagcacgttgggaggcc

SEQ ID NO: 2240 - DNA, 1007 bp, Artificial sequence
  DNA replication origin
ccccgccgcgagccaggccgcgggatcccggtgccggccccgccacacccacccgcctcctaggccaggcctgggaggactccgcggctctttctcgggcggcggcggcggcgcgccccacgccggatatttacctgctgatcttctgggcgaaggcgcggcgctcggccatggctgctgcggcgacggcgacggcggcggcggctgcggcgggccgggtgcggaccggcgggcgcgtgcctcctcgctcgtgctccctccctcgcggcctccgccagtccgggctccggacctgggaggctggggctggcggccggagccaggaacgagccctgccgtaatgttccttagaggcgcgcaacgagaaaccgctcctcccccagcgcgtcaatcccggcgggaaccccggctgcggaaggcggctgcggccggcgggagccgaggggaagaatggagcgctgaggaagcgaggcgccagccccagccgcttcgctgccgcggagcctgcacgaccgagaggtcgcggagagaagccagagacaggccagcgacctggcgaggcaagaaaataagataaccgaacgcgtagggggagcttggctttcccgaaatggaagggaaggaaatgaaaggtgggctttgccgagggggctgtgctttaaccaaagccctggatgactgggttcatgtttctgcagcaccggtctccgagctttttaaagcacttgggtttctgcttcggcctcatgaatgcagcctaactggagaaacagtggtttttcttatagagaaagagccagaaaataccttgctcctgcagcgataacaatagtaatagttgacttctggtgcttagccagccactggattaaagtttttcaagcacgagcgctttgaagtagatcgttactatcactattttagagggaaggaaattggcttggaaaagctaagtgactggccccaggtcgcacagatggtaaactcttccactgagactcaaaccc

SEQ ID NO: 2241 - DNA, 968 bp, Artificial sequence
  DNA replication origin
tactgggtctgcaaataccaacctggtgctggggtgggcctgaagcctggggccgtgtaggctggcatggtgctgggccagtctggggcctggggaaggtcttgatccttagctcatggggcctggcctggcacttggcaggtctggagcttgtatccacagggactagtcctgatccagggtctgtggttgccaacctggtgtagcagtggggctagaggctgggtctgtgggtactggcctggagtctagggctgtgagggctggcttggtgcggggataggcctggaggccaggccagcaggggctagcctggcactgggatgggcctggaagatgggtcagaggctgagtctgtggaggcaggcctgggttctgggactacacagtcaacctgatgttgcaatctgtaggtactgccctggaggatgggtctacagaggctggcctggaggctggggccatgggggctagcctagtgctgggagtggtctggaagctgggacctatgggataagcctagtagtggggcatgcctacagtctccagctggtgtctgaatctggggggtaggcctaaggtctggagttgggaggactggcttagtgctggggtgggcctgaagtgtggggctttggaggcctgcctggtgctgggttttacttaagtgggcctggtattgcggtctgaggcaatgtccagtgctcacttccttctcctaatagtatctctctccatgctgtgctgcttgtggttgggggtgaggtaacgtgggtaatgtgaaactgtcctccctatgctgtcttcagtgtgtctgagttctgtgatatacttatgtgatataatgtctcacctgatttttgtgatgctactttggtgtacagatactaattaatgtttccccaggcttcatgaatgggatgagctctaaaaagttctattctgacatctcgctaatgtcactcctc

SEQ ID NO: 2242 - DNA, 1223 bp, Artificial sequence
  DNA replication origin
gttggggcgctgacgcgggagggcgggcagggccgtggggcgcgcgcgggaagggacttgtgggaaggaagggagcggaaaggccgagcgccacccgccccgggagtctccagagcagcgcgcggggcagacctcctcgggtcctccggcgcttcggtctccggagacgcccggcctcctgaagggttcggcttgtcctcctctggcgctcagctccctctggcggccgggctggcaggacctcagcgcccagcccttccgtcttgttacgtccaggcaagttggcctggctttcggatgcctctggacagtccccgtccaggcccgcgacccagcccgaatggaggccccggggcccacagagcgcggcctcccaggccttccagccctggctgcggacgccgcagccttctcgcccctgggccggacgcggccttcctgcccaagaccactggggcccccgcccctcccgggacagggctgtggacaggccagctgctgccttatttttagcgccattccattcgcgcggttatatttaactcgacccactcctccgaggaggtcgctcggacatcgaattctccacatcgcagcttgggcctgcccgccttgcctcaggggtagttcctcaagggacagattggaaaacccctgcttaagaatccttgacatatctggagcttggagaggacgggactgggggagagatctggttctaggggcagtggccaccgcgcctgcagtgcactgcgtggggattccgccttgtgtggggcgggggaggggaggaagggacaggatcagtcctgtgggaaggattctctgcggggagtattgtgtccatttcctacttctgcatgactcagaacactaggtgacctggaagacctctcacgaccctgcccttggaaaagtttatcatttagcgtgagtgcaggaatcccctcttctctaccctccagtgcacccaacgggatatttgatttcaatggtatgttagctccttagttccagcccagtcttcccttggcaaaatcttaaaaagaccatgccaaaggctcactcacatcctggggaaaggacccacttggataacatacggaaacaccattgtgatacacgctttattcacacagaatgtcagttagcaaacaatgcagaagtcatgtactaaaggtacactaacagatgtgacatggatcgcggatatcgaaacacat

SEQ ID NO: 2243 - DNA, 869 bp, Artificial sequence
  DNA replication origin
cccaccgccgagcccccaggagccgcggggcccccacctatgatgttctcgatgctgaacgacggccgcgcgcttggctcggacttgatgagcgacgcggtggtgcccgcggcgcccgctgtgcccgcagcggccgcggcggcgcccaggctattgagctgcagctgcaggcccgggccgagctgtgagccgaaggcggccgctttgcggcccagctcgcccgagggcagcagcggcacagcgggaggcagcaccggtgccaccggcggcagcgcgtacgggtactggagcgccgccgcagcagccgcggccgccgccgctgccgggtgcgaataggcaccggccgccgccgcagggtgcaggccgtaggggcggccgtagggtcccgcggcgccggccgccgccgccaggctgtaagcgccgaagctctgcatcatgagcgccgtctgctcgcgcaggtgctcctgctggtggcgcttgaagcgtttccggcgccgcaggaagctgccgttgtcgaacatgtcctcggactgcgggtccagggtccagtagttgcccttgcccgggttgcccggctcgcgggggatcttgacgaagcagtcgttgagtgagaggttgtggcggatgctgttctgccaggcggggaacttctccctgtagtaggggaagcggttgctgatgaactcgcagatgccgctcagggtcagcttcttctgcgggctctgcaggatggccatggtgatgagcgcgatgtacgagtaaggcggcttcactaggctgttcttgggcttgctcggggccaggcctcccgccgaaccgctgcccgcgccaggcccgccgccgctcgcgccgccctcctcgccgccaac

SEQ ID NO: 2244 - DNA, 1314 bp, Artificial sequence
  DNA replication origin
gccgggcggggggctgacccccccacctccctcccggacggggcggctggccgggcagagggtctcctcacttcccagtaggggcggccgggcagaggcgcccctcacctcccggacggggcggctggccaggcagggggctgatccccccacctccctcccggacggggcggctggccgggcggggggctgacccccccacctccctcccggacggggcggctggccgggcagggggctgaccccccctcccccctcccagatggggcagctggccgggcggggggctgaccccccacctccctcccggactgggcggctggccgggcggggggctgacccccccacctccctcctggacggggcgactggccgggcagaggggctcctcacttcccagtaggggcggccgggcagaggagcccctcacctcccggacggggcggctggccgggcggggggctgaccccccgccacctccctcccggacggggtggctgccgggcggagacgctcctcacttcccagacggggtggctgccggacagaggggctcctcacttctcagacggggcggttgccaggcagagggtttcctcacttctcagacggggcggccgggcagagacgctcctcacctcccagacagggttgcggcccagcagaggcggtcctcacatcccagacagggcggcagggcagaggtgctccccacatctcagacgatgggcggccgggcagagacgctcctcacttcctagatgggatggcggtggggaagaggcgctcctcgcttcctagatgggatggcggctgggcagagacgctcctcactttccagactgggcagccaggcagaggggctcctcatatcccagatgatgggcggccaggcagagacgctcctcacttcccagacggggtggcggctgggcagaggctgcaatctcggcactttgggaggccaaggcaggcggctgggaggtggaggttgtagcgagccgagatcacgccactgcactccagcctgggcaccattgagcactgagtgaacgagactctgtctgcaatcccggcgcctcgggaggccgaggctggcggatcactcgcggttaggagctggagaccagcccggccaacacagcaaaaccccgtctccaccaaaaaaaaaaaaacgaaaaccaatcaggcgtggcggcgcgcgcctgcaatcgcaggcactcggcaggctgaggcaggagaatcaggcagggaggttgcagtgagccgagatggcagcagtaccgtccacctttggctcggcatcagagggag

SEQ ID NO: 2245 - DNA, 931 bp, Artificial sequence
  DNA replication origin
ctgcccggccgcccctactgggaagtgaggacccctctgcccggccagccaccccgtccgggagggaggtgggggggtcagccccccgcccggccagccgccccgtccgggagggaggtggggggatcagccccccacctggccagccgccccgtccgggagggaggtggggggatcagccacccgcccggccggccgccccgtccgggaggtgaggggcgcctctgcccggccgcccctactgggaagtgaggacccctctgcccggccagccgccccgtccgggagggaggtgggggggtcagccccccgcccggccagccgccctatccaggaggtgaggggcgcctctgcccggccgcccctactgggaagtgaggagcccctctgcctggccagccgccccgtccgggagggtggtgggggggtcagccccccgcccggccagccgccccatccgggaggtgaggggcgcttctgcccggccgcccctactgggaagtggggagcccctctgcccggccacgaccccgtctgggaggtgtgcccagcggctcattggggatgggccatgatgacaatggcggttttgtggaatagaaaggcgggaagggtggggaagaaattgagaaatcggatggttgccgggtctgtgtggatggaagtagacatgggagacttttcattttgttctgtactaagaaaaattcttctgccttgggatcctgttgatctgtgaccttatccccaaccctgtgctctctgaaacatgtgctgtgtccactcagggttaaatggattaagggtgcgagatgtgctttgttaaacagatgcttgaaggcagcatgctcgttaagagtcatcaccactccctaatcttaagtacccagggacacaaacactgcggaaggccgcagggtcctctgcctag

SEQ ID NO: 2246 - DNA, 959 bp, Artificial sequence
  DNA replication origin
gagccccgccaggccagggtttgccccggagccccgcggcgggccggggcgcgcccagggactcgttcctcggtgcgcagcagcgattgtcagcgctgacaggaagcgtggaggggtttgagggtcctgggggtgatcggggcacttctgtgcagggcgtccccccttgtctccctggacctctagcgcgccccagccggtgttcaggcaagtctatcctgcccccaagttgcgagccggcccggaaggcgcggtccaggagggagtttggattttcagtggtgctcgccagagcccaggcggctcgcggatcgacgcaaacaaaagccctgtcctcctggggctccggcggcctcgcatcgccaccgcccccggccctccggccctcccgagagtcatcatagaggccaaaacttgtgcgccgctgcagccgctgccactttgtgcaaaatgtgctgtcagaggcggcctgcggctccaaagtgctttgggtgtgcacgcgcgcgcgcgcgcgtgtgtgtgtgcgtgttacaaacaagagggggaaaagccatctaatgcatatttgattttggtaatctctaaagacaatcgcaacagttagagaaagacttcaccgcaagccggagcgtcttagttcgctgcgggaagctggggtccttgctgcgtctgagccggtacacaatgagagggaagagcccggctgagcctgtggagacaaccgattcattctttggaggttggagggggaaagttgattaaagtctccggggtctcgggcctcacttttaacatgcatcccttgagggggtgaggagcctttggattctgccctcccccactcccagccctaaacctgagcggataaatagatctctgctcttttatcatgcatctttcatttttaagttagcactgtgtttaggaaaagaaaaagttctgcgctacttagcagttga

SEQ ID NO: 2247 - DNA, 1321 bp, Artificial sequence
  DNA replication origin
gcccgttctcaatgagccgctgggcacacctcccagacggggtcgtggccgggcagaggggctcctcacttcccagtaggggcggccgggcagaagcgcccctcacctcccggacggggcggctggccgggcagggggctgaccccctctcccccctcccggacggggcggctggccgggcggggggctgacccccccacctccctcccggacggggcggctggccgggcagaggggctcctcacttcccagtaggggcggccgggcagaggcgcccctcacctcccggacggggcagctggccaggcggggggctgacccccccacctccctcccggacggggcggctgtctgggcggggggctgacccccccacctccctcctggacggggcgactggccgggcagaggggctcctcacttcccagagggggcggctggccgggcggggggctgaccccccccacctccctcccggacggggtggctgccgggcggagacgctcctcacttcccagacggggtggctgccggacggaggggctcctcacttctcagacggggcggttgccaggcagagggtttcctcacttctcagacggggcggccgggcagagacgctcctcacctcccagacagggcggcggggcagaggtgctccccacatctcagatgatgggcggccgggcagagacgctcctcacttcctagatgggatggcggccgggaagaggcgctcctcacttcctagatgggatggcggcggggaaaaggcgctcctcgcttcctagatgggatggcggccgggcagagacgctcctcactttccagactgggcagccaggcagaggggctcctcacatcccagacgatgggcggccaagcagagacgctcctcacttcccagacggggtggcggccgggcagaggctgcaatctcggctctttgggaggccaaggcaggcggctgggaggtggttgtagcgagccgagatcacgccactgcactccagcctgggcaccattgagcactgagtgaacgagactccgtctgcaatcccggcacctcgggaggccgaggctggcggatcactcgcggttaggagctggagaccagcccggccaacacagcgaaaccccgtctccaccaaaaaaatacgaaaaccagtcaggcgtggcggcgcgcgcctgcaatcgcaggcactcggcaggctgaggcaggagaatcaggcagggaggttgcagtgagccgagatggcagcagtacagtccagctttggcttggcatcagagggagaccgtggaaggagaccgtggagag

SEQ ID NO: 2248 - DNA, 877 bp, Artificial sequence
  DNA replication origin
ccaccccgtctgggaagtgaggagcgtctccgcccggcagccaccccgtccgggagggaggtggggggggtcagccccccgcccggccagccgccccctctgggaagtgaggagcccctctgcccggccagtcgccccgtccaggagggaggtgggggggtcagccccccgcccagacagccgccccgtccgggagggaggtgggggggtcagccccccgcctggccagctgccccgtccgggaggtgaggggcgcctctgcccggccgcccctactgggaagtgaggagcccctctgcccggccagccgccccgtccgggagggaggtgggggggtcagccccccgcccggccagccgccccgtccgggaggggggagagggggtcagccccctgcccggccagccgccccgtccgggaggtgaggggcgcttctgcccggccgcccctactgggaagtgaggagcccctctgcccggccacgaccccgtctgggaggtgtgcccagcggctcattgagaacgggccatgatgacaatggcggttttgtggaatagaaaggcgggaagggtggggaaaaaattgagaaatcggatggttgccgggtctgtgtggatagaagtagacatgggagacttttcattttgttctgtactaagaaaaattcttttgccttgggatcctgttgatctgtgaccttacccccaaccctgtgctctctgaaacatgtgctgtgtccactcagggttaaatggattaagggcggtgcaagatgtgctttgttaaacagatgcttgaaggcagcatgctcgttaagagtcatcaccactccctaatcttaagtacccagggacacaaacactgcggaaggccacag

SEQ ID NO: 2249 - DNA, 1418 bp, Artificial sequence
  DNA replication origin
cagtaggggcggccgggcagaggcgccccttacctcccggacggggcggctggccgggcagggggctgaccccccaacctccctcccggacagggcggctggccgggtgggggactgacccccccacctccctcccggacggggcggctggccgggcagaggggctcctcacttcccagtaggggcggccgggcagaggcgcccctcacctcccggacggggtggctggccgggcagggggctgacctcccccacctccctcccagacggggcagctggccgggttgggggctgacccccccacctccctcccggacagggcggctggccgggcggggggctgaccccccccacctccctcccggacggggtggctggccaggcagaggggctcctcacttcccagtaggggcggctgggcagaggcgcccctcacctcccggacggggcggctggccgggcggggggctgaacccccgacctcccggacggggtggctgccgggcggagacgctcctcacttcccagacggggtggctgccgggcggaggggctcctcacttcccagacggggtggctgctgggcggaggggctccccacctctcagacggggcggttgccgagcagagggtctcctcacttctcagacggggcggccgggcagagacgctcctcacctcccagacgggtcgcggccaggcagaggcgctcctcacatcctagacggggtggcggggcagaggcgctccccacatctcagatgatgggcgggcgggcagagacgctccccacatctcagacgatgggcggccgggcagagacgctccccacttcccagatggggtggcggccgggaagaggcgctcctcacttcctagatgggatggtggccaggcagagacgctcctcactttccagactgggcagccaggcagaggggctcctcacgtcccagacgatgggcggccaggcagagacgctcctcacttcccagacggggtggcggccgggcagaggctgcaatctcggcactttgggaggccaaggcaggcggctgggaggtggaggttgtagcgagccgagatcacgccactgcactccagcctgggcaccattgagcactgagtgaaccagactctgtctgcaatcccggcacctcgggaggccgaggctggcggatcactcgcggttaggagccagagaccagcccggccaacacagcgaaaccccgtctccaccaaaaaagtatgaaaaccagtcaggcgtggcggcgtgcacctgcaatcccaggcacttggcaggctgaggcaggagaatcaggcagggaggttgcagtgagccgagatgacagcagtacagtccagcttcggctcggcatcagagggagaccgtggaaagagagggagagggagaccgt

SEQ ID NO: 2250 - DNA, 862 bp, Artificial sequence
  DNA replication origin
gcccggccagccgccccgtccgggagggaggtgggggggtcagtcccccacccggccagccgccctgtccgggagggaggttggggggtcagccccctgcccggccagccgccccgtccgggaggtaaggggcgcctctgcccggccgcccctactgggaagtgaggagcccctctgcccggccagccgccccgtccgggagggaggtgggggggtcagtcccccacccggccagccgccctgtccgggagggaggttggggggtcagccccctgcccggccagccgccccgtccgggaggtaaggggcgcctctgcccggccgcccctactgggaagtgaggagcccctctgcccagccagccgccccatccgggagggaggtacgggggtcagccccctgcccggccagccgccccgtccgggacgtgaggggcgcctctgcctggccgcccctactgggaagtgaggagcccctctgcccggccaccaccccgtctgggaggtgtacccaacagctcattgagaacgggccgggatgacaatggcggttttgtggaatagaaaggggggaaaggtggggaaaagattgagaaatcggatggttgccgtgtctgtgtagaaagaagtagatatgggagacttttcattttgttctgtactaagaaaaattcttctgccttgggatcctgttgatcggtgaccttacccccaaccctgtgctctctgaaacatgtgctgtgtccactcagggttcaatggattaagggcggtgcaagatgtggtttgttaaacagatgcttgaaggcagcatgctcgttaagagtcatcacggccgggcgcggtggctcacgcctgtaatc

SEQ ID NO: 2251 - DNA, 1192 bp, Artificial sequence
  DNA replication origin
ccagcgcagcgagcaggcggcggcgaggactgacggcggcccccggggaagaggagcggcggccgggctgcgagactggggcagccacccgagcgaggagggaaaggggaggcttcacaaacccacacaactgaaagaaagaaagcaagcggtggggaaagggaggcgtctggtgccaccacgctgcgctccggctctgtgcacttcccggctgggccgccgcggcggctgcggtgatttatggaaccagcaagagaggcggggaaattcccccggttgcccctcctctctctccctggctcccgcctcagaacctgccccccgggacgccgggggccgggggaccagcctctctctctgctcggggaccggcccagcccgggcaggggagcccacggaccttcccgtggctggagacggagacccccgccagcgctccccgcctccgtccgcgccagggagcccacccggcccaggttccagccatcgaaaagtcctttaagttctaggacgctggctgtctgcctggcagcggttggggaagaaggggactgccatgtgtaggtccactccctctccttgatgttattcatcacaatggctagctagcgttccacccacagatttctgttgcaaccagccaccgtgtgcccggcactgggctcgggggtgtgcacattatcctttaatctccgcgacatgccataggaggtacgtatctttatcccaattttttaggtaacaaagactgaggcttagagaggtggaataaattgccagaggtcacccaggggataagaaacaaatccagagtttaagcacaagtcttactccaaggctattgctcctaaatacgatacagttctctctgtctctctttggaaatgaaccatctgatcccatcaaaagcaagaaaaaagaaaaagaacgactgaaccggagtccaccgcgcacacacctgttctcccaagcatggagaggcaaggttaaccttcctgtttgtccctgactactggctcaggctcgctgagaaatcacctgttggaagcacctggaacaagtcaacctgctgtgtgtggagaacagccactctcccttccaagccctgtgtggttgctgcttgcaggttcctggagaacagagccaacactggaaggttaaaggactagtccagggttacctagcagaggtg

SEQ ID NO: 2252 - DNA, 978 bp, Artificial sequence
  DNA replication origin
tttactactgttggtcgtgagtaacatcatcaggattccttactagctgcgggcagtttttctgtcagccctccttcctctcccgaggaggacggacatgataaacaatctggagaaatgggaaccttattcactttgctccctttttcttcgacccaaaaaggcacacacgaaacaaaaatcatacagcagacagcacgcaaactacagcaggatatgcggaaagcaacaaaaagagtcccccagcaggattagagtcgggagtctacccagaatctaccaggccagcccctccccccatgctcccgggaggggaaaggagcgcggagcccactcggagggccgctctccgccgggacctaggtgtccccggggcagctgcgtactctgcggcgccttccctcccggcgcccattggtgcgcctcggtagggaggacgcgaggacgcgaggacgcggtcaagggggtggggtggggacttcggaaaatcgtccgagccagacggggctggctgctctgggatggggacacaaagggggagtttgcaggcgtggcagggtgaaaacaagcctacatgggaaatgtgtgcaaattagagaagacgtgcgaggaaactggagaatccttgacgagatgaaggcgctggtactcagaagaggggggctgtgcagggtcaagtgggttccgtgcagagggcaggggattctccagagaagggcaggggtagacgaatgcatggaagaagagttggtgtattgtcagggggtctgtgcagaggacagaggggtccgacgggaagccgggctctatgtatgcaaggagccgatgcacacagtccaggggacttgtaccgggagtgggatgggagtttgagcaaaggagaaaggcgggatgtctggccagctcgggggccacttacctgcatggtgacgacccccagctcctcggccgccagcctccgcatctggctcgccagca

SEQ ID NO: 2253 - DNA, 864 bp, Artificial sequence
  DNA replication origin
gggatgtggaggtggcgacccggggtttgcagggcaagaggagttgaaggggcaggcgtggaagacaaaggggcagaacagcgaggggagagacaagcgggcggccggggacgaagcgggggacccggcggggcggggcggggcggggcggggcgaggccggggaacaaagagctgcctcgcgggccgcggggtcctggcgaccgggaggagggtcagggagaaggcagaccggggaaggagggcgcccggaaggcggggcggggcgcagccaagagggggaggggcggcggggtccagggggatggtcgggcgtggatggggtgcgcccagggagggggaagaggtggaggtgttggggttcgcccagggagggggaggaacggcggcatagggtgtgcccagggagggggaggggcggcggggcggggtgtgccccagaggagggggcggggcggggcgcggcccgggggcggggaggtcccttctggctacagcgattttatgcacctaatcaggctcctgagctgagggccttcgctgagccgctctccgaggcccaggaaagcccgcagcctccaagggtgcagcaggaggaatgtcccctcccctcccctcccctccagacctcgcagcatagtgacagttgcaagacgagcaataaggagacagccaccctgacagtaatgcctgtggctcccggggctgagcaggtaccagtacaggggctccccagaggctcttgactgccctcctgtatcttgttcctttccatctgcactggggatggtggccttgggaaaacaaaagcagttcctgcacggtcatccggagcttaaaattgggtggtggtataataaaaagt

SEQ ID NO: 2254 - DNA, 948 bp, Artificial sequence
  DNA replication origin
cggggaaggggggcggtgggaggagggagtagagagaggcggcgccgcagccagcagcctgctggcggggagaggaaacctgaggcgccgaggaggagcccgagaaccacctcgcgggaacctcccccgccggcccccggccccggcgcacaggcgcgcccgcgcccgcctctcgcgggtccgcaggcggggccgggcgccgccacccggacacctgtgagggcgcggacgcgcaggcgggctccccctctctgcgaggccttcgcgaacgcccagggtcgttctctgggggatgcggccccttcgcggtggcttcgccgggagactcagccccaggcgcctgtccccggctggccccccatgtgacgccgcagctctcccccggctcccctcgaaactcccgcgctggggcggcccgggggctgcgggcgcgaactcggtcttcccacacccgagatggggctggaggggtggcaggagggcgcctcctgcagcccggctggctcccgatggtaacccttctgttggttcaagaagagcatatttggcaaagtttgagtttacaatgagattttctggggagtaaaaagagggacattgtgggagaaatgttatgtatttggtaaaacctgatcgtaatgtattttgctagctgtgtatgagaaagcctgtgcccttcacctgtccctctgtccctgtcatgcagttcctaaaatgtaaaacctgggtagttgggtctgcaacatggaaagtgatgctgaaacaaagactagaatggaaaaggagctgtggcagaggggctggagaatacgctgcttggaacattattttaattgaaacttggagggagagttacagtgtagaactatacttagtcaaacggatgtcatcagatcaaacaatccagcagcctttggcactagcccaggtgaccatcagcgaagggga

SEQ ID NO: 2255 - DNA, 1177 bp, Artificial sequence
  DNA replication origin
aggctgctggctgcggcgccgcctctctctactccctcctcccaccgccccccttccccgcggttgggcccactctgcggcctctgcccgcctcgccctcgcccgggcctcctcccgctttctctctccgcttcccctggagcctccgaggagtccgcagccgctgggcgcccgggaagatggcggcggcggcgggagacggcggcggcgaggggggcgcgggcctgggcagcgcggcggggctggggccggggccggggctgcgcgggcagggcccctcagccgaagcgcacgagggcgccccggacccgatgcccgccgcgctgcaccctgaggaggtcgccgcgcgactgcagcggatgcagcgggagctgagcaaccgcaggaaaatcctggtgaaaaacctgccccaggacagcaactgccaggtactgggacggtgataggggcgacgcgtcccgaggggcggcggggcggcgctccgtgtccaggctgggatcgggggcgcctcagagcggtcctggggagtgggtcggcgccgagtggtgagagcggcccctcggtttgactgagttcttggggtttctagcctgcagacgccctgccagggaggggggcagattgggaaactgaggctctgagtggcgaagcggcttctccaaggtcacgggaatcaggggctgctgcctccaagttcggcccggtctttccttcccctacggccgtagaggagtaggaggtgaaggagagtggaggtgagttgtggagcacacattttgcgggggggagcgggggtagagggggccgaagcttcgggagcaccttggcaggggcgagggctccaacgtatagtccccggtgctcgggagtgccatagggggcaggggcacgagagagctgggagtgagtttcgctgttgttgcagaagcacttgcccaagtttctatgaaacaactctgtcttctcagtttgctaaggccccagaatagagttattgctgcgctccttggagccttgcagccgcctcctgctacgccaagtacagtactggagggtttgttctcagtgacttggatgaggtttaaagatagctactctgtgtatttaatccagattaactgttgcttttaagattagaaactctgcatctatttaactttttttttcccctgatttc

SEQ ID NO: 2256 - DNA, 1463 bp, Artificial sequence
  DNA replication origin
cggggcggggcgggacgggaggcggtgcgtcgctgagcgcaggccgcggcggccgcggagtatcctggagctgcagacagtgcgggcctgcgcccagtcccggctgtcctcgccgcgacccctcctcagccctgggcgcgcgcacgctggggccccgcggggctggccgcctagcgagcctgccggtcgaccccagccagcgcagcgacggggcgctgcctggcccaggcgcacacggaagtggtgagtgtcaccgggggaggtggaggagccggggcggccgcggtcggcaggcgaggggcgcgcagcccggactggccggaggcgcggccaccgctcttggtcggtccttaggctgcgcggcccgggctgctcctgagcgcagctcaggaccccgcggctcgggcggggaaggcggggatttccagccccgcggagccggcgggcggcgaggaggtcgccgggcgggggcccccggccgggagaagagcggttaagccaggccgccccctcccccagcgcgcacggcaagttttcataaacaagcccggagcgcgctgtctgacatcctgtttataccaccccgagatacaggcgcgggctggagggctgacgtccctagctccttgtaccgcgaacttgaccgccagctcccggccggggtggcagcgcagaaaggttttcttcttcggccccaggaaggaggctgagggtcttagcttttttccttccttgcggtctcagcgagggaaagtttctgggatttggagctgggtgttgggcgtccgcgaactcgggaaacgccccctcccctcttaggttctgttaggaaccaggcctcaggtagccagcgagaagtgggaaaggagaccctgggcgagaggaccagggaaggggaacagtgggagagaactacccggggaattgcgaatcccactggaaagggactgattaaccgaaactggggctggtctctggctccctcactccaactccatccgcgcatcgtcggcgaccgggagcatcggaggactaatagacactcctccaaagtcactccccagggtccctgggatgtgggctccttggatgtgtgtttaccacggaacttctagataaaagatgcgatgtttgccaggtgtttgtgcacacgttttttggagggtttgcactccatgatttcctgtgtgttcctggggaaggggaccccgtccttcctgccactcttcttactacgtggctgtgagctgccttctgcccctggttgagtacatcgctatacatgtcattgacacttttccccccaagtcatagggtttttctctcactggcaggaatttacagtggtataaaattgtcattacttctttcagggagtaaaacatgggtagttaagtgatgagaataatgcagagagagatgtaaatcagggcgtgtttggttttggctatttttttattttt

SEQ ID NO: 2257 - DNA, 1560 bp, Artificial sequence
  DNA replication origin
gcagcctaaggaccgaccaagagcggtggccgcgcctccggccagtccgggctgcgcgcccctcgcctgccgaccgcggccgccccggctcctccacctcccccggtgacactcaccacttccgtgtgcgcctgggccaggcagcgccccgtcgctgcgctggctggggtcgaccggcaggctcgctaggcggccagccccgcggggccccagcgtgcgcgcgcccagggctgaggaggggtcgcggcgaggacagccgggactgggcgcaggcccgcactgtctgcagctccaggatactccgcggccgccgcggcctgcgctcagcgacgcaccgcctcccgtcccgccccgccccgccccgcggccggccccacccccgtggccgccgggcccaccccctcgcgacgtcaccagcggcagccccggaaagcggggcggggtcgcggtcccggcggagactctgcgcctccggcctacccgccccgcccccatccggcttcgctcgcgaagctgcccccactcgtctctgttcaccgcgtcctctagattctagaatctagaaactcatctaggacgcgaggtcatctatcgcggggagtaaaattgccaggattcgcccgtagattgacccctcccagctctggagccccctccgccacacctttgtgcgctcgatgcagaaatgcatcccgcctcctccgtatacgctccgcttcttaccccagctcagtaggagaggagctagtggagcactagactaaaaagaatttaacaatacagcccccagcttggacaagctactgcagatccaacccattccgtattttaaaagctctttacgaaaaaaaaaaaagcatatgcataataggaattagaactacattcactgatacctaatgcatgtacagcgcttttcattttttactaataacctctcaaagtagtagcatcatcttatccatgaggaacaaattaagtctttagtgtcttaatcaaggtcacactgtagccaagattcatacttcgtaggcagtccacggacaaatcctaacaattttatttccttaggtatctctccaatcagttcacttgtctatgttccggcaacacggtccgagctgccaccatctctcacctgaagggaccacgaacatctcttaaatcgtcactccattcactccagcccccaattaattctctacaatgaacttttaaaaattcaaatctgttccacacactcccatgcttaaaacactccagcgacttccccctgacaatccctggatgaaaatcctccgaggccgtgcacggtcagaattctgcagcttcagggctgtggacagaggctgccccacctgtgctgacttcactaaccctgctggacagttcctgatcacttgagttactgcaactgaaactgagcaagatattctgggtgtggaataaagtcaagcatccgaattagactactgaatttgaggtttggcctccaccagtaaccacctgtgttgccctaaacaattcttagttgactcaattctcagtggagcagcagac

SEQ ID NO: 2258 - DNA, 1810 bp, Artificial sequence
  DNA replication origin
caaagttcattgtgttcctcctgcagctgatttaaaagttgatcttttcaaggagctggattcctaaggtagttctattttgagccttcttcctgttctgaagctaaagttggaagggcttaggtggtgatgtcatggaagggagactgttggtttttataggagggtcttctctggcaactctggggatgctcaaatggggaaaactcagagtgttacttttgatcttttcccccctccttccctttatagaatatcagctattccttagccagcaagaaaacaagttcaaataagcctgcaaacagatttacatattttacatgctaaacatctaataaatgaaaagactgagaaaaagaaaaatgcctcactgtaaggaacagagggtgacaacctctttctccacccctctccccaaatatctatcacagaacaaggggcaaagaggaggggagggtcgactggtaagcagaataaagggattataaagctaggaggcttttagagggaaacgctgttggaatattcaggacaggagacccttgggtccctgctcttcctctgtgttttcctcccttttggaatggttagacttgggctgggtgtgtcttctgcttgggaggcgttttttttggcgctggaaaagcaaaaggggccagggtggggcctggggaaagaaagccagagacaggctgcttaggcctggctctgggttaagcttaaggggaaaataaagggggctacggagggacagcagattccattagaagacccagaggggaataaaaaacagcgcactggccaaagggggtcacttctctctctccctcaacctaggcccaggagctatttgctggttggtgggggacaggtccagagggaagagaaaatcccaaaacatctgcagatcacaacttgccgggggaaaggggggctggggacagacatgccaaattaaatcagcaggtgaaagcagcaatttttggccaatgctgggattgcggagaggactaactaagaaccctggagagcaggggattccctggtttctcagctcacctctccttcaaagcagggataagcacaggtgtggtctttctccaggaaggtggcagctggcgtgcgggtagcagagtgagggaaagaattcctcgcacaggaaggcagggagaagccctggggtcagctgcggccaggagccggcgtctccgccaagtcccctcccccttcctgaaaaccgacctggaccagcacaaattacagcaaagcacccctctccccaataatgtttctaataaaagaaacagactctcatgcctatattaaaaaaccacgagctctagctgatggaaataaacaggtgagcccggggagaagcgggaaaacactgggaatgggagaatgaagggggagaaggcgttcccgaacgtgcagagaaaccgaggcttccccgccctccctccaccctcctcccctccggccggggagaatctgcgtggcagggtgcaagctaaaaatgccactgacggacccctcttcccgccccgtgcccgttctccctcctaccccagactccagcgtcccggcctcgtggtagcgcccggtccccggcgccgcgcggggctcgccctctctccggaccgccgccgccgcggggactccggtcttcctctcttctccctccctcctcctcctcctccggcaccgccgcctcctcctcttagactcctcccgccggatccttcatgtaaacaacatccaggctctatttacagtcgccgccggacggcaagggacccacgccagc

SEQ ID NO: 2259 - DNA, 1166 bp, Artificial sequence
  DNA replication origin
tctatttttagtagagacggagtttcaccatgttagacaggctggtctcatactcctggcctcaagtgatccgtctgccttggcctcccaaagtgctgggattacgggtgtgagccacagcgcccggccacactgagacattttagagggagatcagtctatggaacaaatgctggcctggggctggtggcctgggtgtgctgtctggccaattttgtgcgtggagtaagcagtggggagaggcgctgggtgtcaggaaactatgccaggccctgccctccaccaaccccaatcaaagagctgagagggggttcttctccacaccatcccactacttgtgtccctcaccttctctgagtcctgggtattggtgctgggaactctgcaacagatttcctgaaggcaggtggcctgtggaaggaaggcagaggagggggcctgcagaatgcaaaggtgtacggaaggcatctctgcgcccctgctgaagatttttcactttatcctgaagggaagacaatatctgaggccgggaaataataaatattgattttcactttatcagtattcctggcagctgcacggaaaatggaatggcacagaaactggagtcttatgggcacttatcccactagttggggtgggaaattaaaggctgtgtgtaaggtgggcacagatctaacagaatgtggattgggatatgcaggggagggtggagtgggggaagacagactccatttggacttggtgagttataggtgcagcaccagcataatgcgcatggaagtcctggaatcatttaccaagaaggtcctgaacacaggtgagggacatccccttcttccctgttccctaaggcgcctagactttggagtcagtcagtcttgggttccagcctcccgctaggacgcaatttcttgagagcaggattcgatctgttgttcacggctagatcctaagcgcctagaatagtttctggcacacagtaggcactcaataaacatttgcagaatgaatcaatgaatgaatggtcacgctccattcctcggctgtaaacacaatgaaatcacctagccgcaaacttggcgcacagtaggcgctcaacaagttgtatttttcccttcccttgcagtagaccgcggtccccaggcgaccgcgaaagaaaaaaa

SEQ ID NO: 2260 - DNA, 1095 bp, Artificial sequence
  DNA replication origin
ctggagggactggggctcccggatcacggcgcccttcccccgcccgcgtgtggtcgtgcaggctcgtacgtgccggggcgcatgcagctggcggccgcgcggcttaaccgcgcctggggaggaggccgaggctccaggggcggccggtgggaggtgcccacggctcctctccaccgctcctcctgtcgcgaggaatagcccgagccacccggccgagggaacgagaactaggcagggaaaacccggagcttccgtctcacgctgccctccttaaggcagagccgtccccgtaccccttagccctggccccctcccccgagtccctagagagccgcgcgccccctcccgcgggagcccagaggcggagcgccgcccacctgtggcagtcgggcggggccgcgcgccggggaacctgtggcgccggggggctcgcagcctcgcgcctctccagcccctccacgcagcctcgggcctcggggcagagccctgggtggctttgaaaggcctgtctgttcgttgtcgccttctaaggtaaactctccccagcaactcccccccctcccgaagccgccgggcctggccgtcaggagactcggaggagactcgttctgataaattacattttgtaatgcagctttcctggaaatggcttcttgagctgcctcccttggcatgagatgcctcctttggctggcgtggtgaacttggggatatatagatcgcctgatttcttagtctgacggggttgagtgcgtccctttccccctctcctcccactccacgttcacaccagttccgaaagaattggcgttaaaaggcgagaggtagcggttgtgctgctgcgaggctcttaacccttctgggatggagatgctggtaattagcaactcctttatgaaaagttgttcttcccagcaggggtcctttactgtcgatgtacttctcaaggatgtccgggctggttattgcccatcatggactaattatccggagatctgcatttcagaagcacagactggcttgaaaaggaaggtggaggacagtaccagaaaacaaaaggaaagcttaaaagcaaggaattaagaagtatctcca

SEQ ID NO: 2261 - DNA, 1573 bp, Artificial sequence
  DNA replication origin
cggcgcgcatctcccagcagcggcccggcacctggcagacgcgcggcggcggcggcgagcggtggcgctcggctcgggcgaccgcggcgggggagggcgcggcgcaccgatgggcgccactgagaagggaggccagaagagccggaagctgttttccttgcggcggccgtggaaggcgacccggcggctgtggaggccacgctcagctcgccaggcggcgcagggtgagtgtgggcgcggccggtcgggacctgttaccctgaggcaggggcgcagcggcggcggggccgtccccggcggtctctcgggtcgcgttcccggccctgggagcctggatgcctaggcgacgcccgaacccgaccctcggtcgcgggtaccgggaccgctggggaagcgcaggggctgatgtcggcacagtctcctttcctctagcccctgctcgttgctttggctctggacacagggaagccacggtggcgcggcgacacagcctcactgaggttagcttgtccccggcccccagcacctggcctggcgcctgcaatgcagtgcctactgggggaatgaatcagaacccgaggctcccttcaaggtcctcccgccctgtacccacctcctctctacctgcctgcggtgatttcgaagctctcgccacgataaactatttccaagcacactcagtcctgtcctcgccagggcctcaactcacagccaatcactgactcactccattcattcattccacaatttttatcgagcccctccatctgccttggccggagaacacgatgggcaaagcccggatcttggaactacttctagagaggaagacagacattacacacgcaaaacagagaaagcccggtacacattgctatgtgcgcttagagggaatcagtctgctgacagaggaaaaaaggcaggtccccgagcttccatggcaggcggactgggaaggcctctccgaggcattgcaagtcagcggagacccgaggactgactaggagttactctagcgtgaagccgagtaatagagaatagcaagtggaaaggttcccagagtgcctgaattgagcaaggggaaagagagggatgcagggcctggatcgaggtctgggcagaacatgaagaggagttcggattttattctacgtgagctgggaaaacactgaagtgtgctaagcagggaagtgacctgatctgggggctcccggcttttctctgtctgcagtgtccatgctcgcatctcagcctgccggattcctaccctcctgccaagactagcacaaatgcagtctcctcgctgaaatctctgtggttcctgccacctgtaacccctcctttagcatttcgtcacctgtagagcgtttgtcactgttcatctggtattaaagattccacattctcatccatttcatctttgcatcccccacgaggctaagtgcagggcttggtactgtgtagatactgcttatgaatgtgtcttgtcttgtcctttttgtctgtttccatcatctgaggatccttcctctggggggttgacatgccttatttctaaaatggccgaccggat

SEQ ID NO: 2262 - DNA, 1196 bp, Artificial sequence
  DNA replication origin
gaggaggctcatgggcaagcccggagaaaagagaaaataatcaacctgggaagcgaaaagggagatggaaggtggaaagggctgaagaaggaattaaaaaaaaaaaaaaattaagtgcccgacatgacgcaaagaggagggaaaagaaggagcggccaccggagagaagcttcgccgggcgaggcgaagccgccgccctgggctgagctcggctcggggcgccgggaggagggagggagggaaggagacgcggccgggcgggggcgcgcgtcctctgggccaacgccgcggagccgcccggccctgccgagctccgggccccaggccagcacctcctggctgaggagtgcccggaagcaatcctataggtgtcgccgcgtcgccccgccgcgcagcagggcagcgccaaagccgctggcccgcggggagggaaggaaagggaggtaggaagggaggggaggttcgtgaggaggggggttgaagggaaacggggcggggtggtcgggggaggggactactacgacgtgggttgggagggtgtgttcgcacgcgtgtgacagagaagaaaggggcgaggtatctcggcctgcgaagctttgaggaccaggggtcttgtggtaaaatccagacacacccatttcatgcaacttagcctattttcaccggaagattccgccaaagccaccaggacggtaaccgtcctagagaactgacttgtaactcaattcaacagaaaaagaatgcatgttaagtgccagaatatatctatgctaggatataaaggaagagcaatattttgcacattctccagaatagggatgatccctaagggagatatcaaagagttgggtattctaatactaggaggcagcgtccgttctgcctagagagcagatgtgactgtttagaactctttgttgagcgaataaactggggagaagggcaaggttaagtccgacgcattttcagatccgccaccatttaccttaggacctggagaaaagactgtttcagttagctagcttgaaggcctgcttgggaagcaagatagacaaggattttttttccccatcctctagcctcacgccttatttttctttcacaattctggccaaagaaagcagtaactcataatcagaagagaatttatcatgaagttaattaagctgtgtacctaattttgtatctgtcatcgt

SEQ ID NO: 2263 - DNA, 1440 bp, Artificial sequence
  DNA replication origin
cgtcgcgcgcgctcggctggccgtgggctctgcgatggggccgctccgaactcctcgcccaaggtgcggggcaactctcaggagaggaggagggcagccgagtgcgtggggaggtggggctgagcaggagcaggctggggtggggagaagggagggaagagtcgggtggccgcccgcgtgcgccccgcgccctccgcagccgcccctgagcgggaggagcggactcgagcggctagggcggtcgcgcaggtggcgggggcggcggcggggaatgccgctgcgggtggccgcgggcctgcgggaggagagacccggcgctggggagggaggacccctgcccgcagggaggccgagagcccaggcgaactcagcaagcacgcggtgccgcgagttccctggcagtacccccccaccccggacccgcgtcggtgaccgcaggcttgagataggcactggggttcccccgtccctcccacccccagacttccagaactctgcagcagcagttgtgtaaaatgctacaattaaggttgcaataactgggaggagtgggaaaagaaagctaaatggaaaagatcaaaactagtgaggtcatgagtttcctgataccagggatgcttccgccagcatcttcgtcatgcttatcaggaaggctgaagagggcattcgcgcatctggtgggtgggggtgtttggaggggattgagctatatgaccaccactctttcaatcctgaaattcaatgatgtttgacgtagcaaaattttttttgaaagtactcttgaacagtctgattccaactccaaagtaaatagacattttccggccctccactcaaaatgttcactcattatttgtctatgtattaaatgcgtctttattgaggagtgtcagacaatatgctaggtgcagttatagagttccttgaatttagagttaggggtgggaggacagacagataagcatgtattcatacaattaccatcagcgctgggtgatatggaagaaatcaacagggtaagggagaaagaatgaagcgtagtggacattctctagattggatggatggctaatttttaaaggcctctacttaatttgactaacggcctcataggaagaagcattccaggcacacagggaaagtgagttgcgggaagtagcccagagatgggtaggccagaagcgacgactcccggctccctggcccagctgctgtgcattatggaaggaaccttgctataacttcgcaaatggagcttctccttcataggaatcgcctctcagaacgagtgtcacttttttgaatagcacttggatctccagaccagttgttgaagccactttattcagaagtgtcatatttgtgtactaaatgggctttcagcactatctgtggtaggcgaaaaataacccagaaacactaacccttggatttccacca

SEQ ID NO: 2264 - DNA, 1554 bp, Artificial sequence
  DNA replication origin
gaggcaaggaattgcaactttttctattattgtacaccttgaaggcaaggttaattaactcctgttgtggggtttgagggctggaatttaatttttgaaattttatttaatgtcgggagcagattgggtaataaaatgtattttgagaataagacggcctttagaccttttagggtctagggctgtaaagtgtctcagggttgctgccaaacaagtcatgaactgggctggatttttatatttgatgaaaaagagcctaaacgctatctgatttgggataaagaaaaaggagcattaaccttgaccatgcctttagctccagccacctttttaagagtaaattgctgggcaggagtgggagggctagtcacggaacgaaactgtaagccagaccaggtgtgaggaggggaggtgataaaaagattatagggtggaggagcagaggctgaggaagaattgggacctagcttggcctggcgaggagcctggcgaggagcctggggaggaagggagaggtcagatgggtctgtagaaaaggaagattagaaagactcagtgatgcttggggttggtactgaggggacaggtgggagggaaagaaggaagatttgggacgagttgcactgggcacagagactagatagggactgacgtgtaaaagaatgcctggacgtcaggcacctcagaccgtttgcctattttacgacaagaattatttagatcttgcaggatggaaaaattcaaagtgccattttctggctatttggaactactgtcgagtttgtattggggtcaagcgacattgcagaagaaaataaggcatttaggttttaggtcaggtgtgagttgaagaggttttaagtttttgagaacacaggccaagggagtagaaggaggaatggagggtggaaggttgcctatagtgaaggaagcaagcaagcctagagaaaagagagagtagagaaacggagggaaggggttcgggggttcttaccttccagaaaagtgggaaaaggggttggggcgcagagataagaggtcggggcatggaaataagggatggggcgcagaaataaggggttggggtacggaaataaggggtaggggcatggaaataaggggtcagggcacggaaataaggggtcggggcaaggaaataagggattggggtgtagagatataagaggttggggcacggaaataagggattggggtgcagagatacgaggttggggtacttgcccctcctctagaaaagcgggacttgccactaagagtgaaggagaaggggttgaggggtacttgcccctcccccagaaaagcgggacttgccgctaagggtgaaagagaagaggttgagggtacttgtacctctcccagaaaagcgggacttgccgctaagagtgaaggagaaagggttgaggggtacttgcccctgccccaggaaagcagaacttgccgctaagggtgaaggagaaggggttgaggggtacttgcccctcccccagaaaagcagagaaggggtagagacaaggagagaaggggttgggttac

SEQ ID NO: 2265 - DNA, 1318 bp, Artificial sequence
  DNA replication origin
gttacaacctactacacagcatctcgtccgtgcgatacggtcacattgttattccccgcacccggctgaggagcgcagcgcggcagaccaagtggcaccggcgagctgtctctcttccggggggcgggggtggacagtagggagagggggtttaaagggccagaggacgagagaagagctgaggggcgcgtcgccagcgcctgtgtctccctggcgcgggttccccaggctagcccgctggcccgtccgcgcgcgcgcccccggcccgcgcgccccttcccggggctcctggcctcgcctcagcggctgcaggctcttcgtcgcgggccgggctgcacgcgagcgccctccgggcagactttcgtcccccacccccgggagcgcggaaggctcactcgcagcgcatggtctacccgcgccgggcggagccccggcgtccagagcgctgcggccgcggcggtgcagcagaggcgcctcgggcaggaggagggcggcttctgcgagggcagcctgaggtaagggctgcctaggaggctgcgggtttatttttcctcattctcttacttcatcacacactgaagcctcaatggagagtgtagggtgctgtggggctgatgtggggcaaagagggaatggggccgccgggcctggatggtcgtcttgacggcgtcattgtcgccccttgtaggaaatccgccaaccggcccctagcctttcgccctcatcttctctgcttcggcttccgcccttggacctcttgacaagtcactggggaggagaggatggagagaggctaagggagaatggagagaggcagaaggattcagggcttggaagccctggagtaggtgacggatgggcgcgcggtgcccagtgattgactgcaggcagcgggcgcggaagggaacctgaactacccaagagtttgctgggctgaggctccaggatgctcctgcgtgccctggtggctggggcaccaaggaggggcgcactcaagcctcggcatcaccaaggctctgccaggaacttttgggaagatttgtctggtgtttggtgagggggcttggacctttctagctacaagagtgtgttggggaaggaagaggctctcctcctttctcctgtcactttccttcatgcctactctcttcttccatcttcctgttttgcctccttccttcccgtttttcacaggccaccttccttgtgcggtacttcaaacacaaatcggaacccactatggccaacagctttaaagcgtgtataaggaggagcgcacagaagaatcgctcttaattacagtagttatatatgtgtg

SEQ ID NO: 2266 - DNA, 958 bp, Artificial sequence
  DNA replication origin
aagccatttcggatcgtattggaagactttaaaaatatatatatacatatatatatataaagagagaagccgtcgccgaagccccctcgggagacgcgagacacggaatcccgggcacgcagacaccccgctggtccgggatcctggggctctctctgtccccgaccccgagtcactggtcactcaccacgtgtcgcctgccagcgggcgcggtcccgggcctgcggggaccgggtggccccggtgctctgggccgcacgtgtcgcgctctccgcgctctctgccggcgctcgggcgttcccggtgccagcgcccgccctcccgcctccgcctcccgcctctgcgccaccaactccggggtgggcgcggggagctggcggcgagtgaggatcgggccggggcgggggtcggggctgggcggtggccgcagggcggagaggactcgcttctcagttcagctctggaagcgcagccgggcgggcgcccgtggtttccaccccgcgggtcgaagcgggctcgggtgggattctgccacctgtgggctctgctgtgtcgccttgagcaagataattctctctccaccgtcagtttcccctcatataaaatgcggataataaagcctgtctcataagacggagcaagggttgaccgaggtgaggtgcgtttatgcaccaagatatgataggcgcgataaaatcgtgtgctcagcgttcacagccatagagacgtggcactttgttgacagccatcagggaactttcctcgcagatgtcctttctctgtgctctgcaccgcccagctcttaccacacctgagcgccgaggcctcccaagtgggctgtgcacaagaccgcccactggagtgcgggcagaacatactggaacttccatttgtatttgctgtctaaaaaatgagaaaaaagttaaacttgaacagatggcgtgtcaccactcccgta

SEQ ID NO: 2267 - DNA, 1092 bp, Artificial sequence
  DNA replication origin
cccgcggggtggaaaccacgggcgcccgcccggctgcgcttccagagctgaactgagaagcgagtcctctccgccctgcggccaccgcccagccccgacccccgccccggcccgatcctcactcgccgccagctccccgcgcccaccccggagttggtggcgcagaggcgggaggcggaggcgggagggcgggcgctggcaccgggaacgcccgagcgccggcagagagcgcggagagcgcgacacgtgcggcccagagcaccggggccacccggtccccgcaggcccgggaccgcgcccgctggcaggcgacacgtggtgagtgaccagtgactcggggtcggggacagagagagccccaggatcccggaccagcggggtgtctgcgtgcccgggattccgtgtctcgcgtctcccgagggggcttcggcgacggcttctctctttatatatatatatgtatatatatatttttaaagtcttccaatacgatccgaaatggcttctcttcatcacagtcctaacgccctgggcacagatgttcacttggaggtactgggtggtggtttggctggatggaggggagggagcgcgcggactgagcctccaaggtactctctgggccggggcacagagtggtgggctcaaacggaagggaggggacggcgactggaaaagggcagagggcacccctgagggtccagccttggttcaggcccacagacgtggctcccgttgcttgaaaatgtatcaaatgtgagtaagatattggggggggccttccgtagtcccggatgagggtgaactaaccttgtctcagcagtctttcctgtggcctctggactgaccccgagtccctgcctggccagttactagcaagatgctctggtgcaagcaaattggccagcctcagttttctcttctgtgaaatgccccttcctttgtgaactatgaggccctcctcatctccctaggacacactaaatatcagtgtcagcattgtacgggattatgtatctgtaccattagatccaggtcttacaaatagtaacctaaaagcatacaaatagaccttgtctaagaacagggtcc

SEQ ID NO: 2268 - DNA, 1289 bp, Artificial sequence
  DNA replication origin
aggaggaggaggaggagaggtcggagccgtctccaggagcccttagagaccgagtcccggcggcgacggcggggcagcgcaccggcaggcgggtgagtaccaagcggcgggcgcgggtggtgagtcgggtccccgcggggtcggggcgcggcgcggggcgtcggccagcgagttcgggggccgcctccgagtcccgggtgctgggaagcgagatggagggagggagcggaggaaggaaggaaggagggaagagtgtcctgctggagggcggggactggtctgggcgctgggcgccggagaccggggggagggggaggaaggggccaagggacaccgagacccagaggcagaaacggcgcgcgcgccctcgacgggcggccgcccgaggttgcgggaagccgcccccacggctgtggctggggctagggctgggggtggaaggaaaggtctccccttgagctcgcttgcctcctcgccagcctgcggccgtgcgccccgcgccgggttgggaggcccccagtgttcccagccgtggcttgtggtggtgtcaggcgttggaggagggctggcatgtgggggcgacagggacgccacgcccctctgcctactttctacctcccgggaccagccggcgggagcgcagccttggaatccgctgggcgctgggggtctagcagggaaatagcgggtcgcagaggggagagcccatatgacgcaccccgcgagggacccccgagtggggacccgaggctgcttttctgcagactgtatttgcaagtggtaagggggaggttgaggcttagtcttgggtgatttttttttttttaattattgccccgacagttatcccgtggggcagggtgaattctgtttttcattttaattagggcatatcaattaaagctaactttaaaacgctgtcacttagcacctcccgtcactcactcgtccctcgctttgtgtgtcctgtaaacttggcttaaatcattcataactcacgataaggaagccgtgattcttgttcacgtcgccgcagtggagtgaaactttgcccaactgggactgagtggaggcattgctgcggccggtcatctggtggtcatcctgccgggcgtggttgtatacaaacaagtgggtcgagaaggaaatctctgaacaccagaggtagaagggaggttcctgcgcccacgtgtcagggcgcgtttaatggctgctcccagcggaaacaaacgggaatttattagaccgtgtggagttggacaaacttcacatgattagcttccttccca

SEQ ID NO: 2269 - DNA, 845 bp, Artificial sequence
  DNA replication origin
gctgctgcggtcgctagcgcggcgcgctgggcaggctgaggctggggagtggacgcgctcctgcctcccccgccggcgcttcgggcttcccctcagccgcttcccgcgggaacctctccagccgtccacctgaagggcactggcatcatggtctaacgtggcaccttcctggattcccctctatctcctgttcttcctaccttctactccttccctcctcttctcctccgaagaccctggcgcccactccactgcggacccctgaacacttaaggaataacccttggcagctgcacgactacgctctccgaaacctcatgggcagtttctcccgccggcgatgtgagtaaggcacgctcgctccgtggcggagggtgctgcgggggcccggccgcggcgaccgtaggcgcgcgaggtgtgggaccccagaggccggccgggggcgggggtggcagggcgggaggcttcggcgctcgcggggagctgcttgtgcggtggccgagggaggcggcgaagatgtggtaggttgcagagcatttggaaatggggtgctaactgggcgggtgcatgggagcaccgagtagcttgagctggcaagagaccttaaagggttacatactgcgaaaaggaaaggtaaatgttgggcgctggtgctgggaccattggttccgctgaaattaggtttagctcctcgttattatcttgggtatctccagtcagcttttttcccagaggtgtctgagggatgaagcgcgtgtttgatcgtgacacacacacacacacactcacacacacttgtggcaggacgcacttgtctctttatcttggaaggtgttgtatcaatg

SEQ ID NO: 2270 - DNA, 992 bp, Artificial sequence
  DNA replication origin
ggcgggaggcttcggcgctcgcggggagctgcttgtgcggtggccgagggaggcggcgaagatgtggtaggttgcagagcatttggaaatggggtgctaactgggcgggtgcatgggagcaccgagtagcttgagctggcaagagaccttaaagggttacatactgcgaaaaggaaaggtaaatgttgggcgctggtgctgggaccattggttccgctgaaattaggtttagctcctcgttattatcttgggtatctccagtcagcttttttcccagaggtgtctgagggatgaagcgcgtgtttgatcgtgacacacacacacacacactcacacacacttgtggcaggacgcacttgtctctttatcttggaaggtgttgtatcaatgtctcgatgtctgtttgaaaaaatacaattagaagatttttatgtgattgggattgaagggaaagggtggggtttggggggatggaggggacgaaggaacatgaaagactggaggacggaaagaagtgggggagcgtgttccctgggagtcagggagaaccttgcctccctccctgtcagctagacaactcctgcccacacatctcctttgtgtggcacgagaagctggtgaacctgcctattcccaatccagcgctgggtccccttgaggatcttgcgtcctcctctccgagttattaaggatgcaggacgtgtttcggattcgacgtggaaagagggagggaagcacattagcattaaggtaatcatggcaccctggctcgtggactattagattggctaccagtggtctctaatcttactgtttgcagagtcaagaatgggggcgggggttgggggactgtatagattgccttttaaaatagtgtgacttcataataacggagatggctgaaagattgcttccttacactacttctcggccatcagggctgaataaaggacccgcctccgccctctactccggctcttctctggctgtct

SEQ ID NO: 2271 - DNA, 1306 bp, Artificial sequence
  DNA replication origin
gagatgtggctgggatttctctcacagtggaggcaaggaattgttcagaaatatgttgctacttggctccctctactctattattgtacaccatcaaggtgagattaattaagtcatgttgtggggtttgagggccagaatctaatttttggagctttatttaatgttgggagcagattgagtaataaagtgcatattgagaataagacggccttctgacctttcagggtctagggttgtaaagcttctcagggttgctgcaaaacaagccatgaaccaggctgggtttttatatttgatgaaaaagagcctaaatgctaactgatttgggagaggtcggataaagaaaaaggagcactaaccttgactatgcctttagctccagccacctctttaagaggaaattgctgggcaggtgggggagggctagtcacagaatgaaactgtaagctggacctggtgtgaggaggggaggtgatagaaggattatagggtgggggagcagaggctgaggaagaatcagagcctgattcagcgtggcggggagtgacctgaggaagagcagtctggggaggaggggagaggtcagatgggtcggtagaaaaggaagattgaaaagactcagtgacacttggggttgggactgaggggacaggcaggagggaaagaaggatttcggatgagtcgcattgggaacagagactagggagggactgatgtgtaaaagaatgcctggacatcaggcacctcagaccatttgcccattttatgacaagaattatctagatcttgtaggatggaaaaattgaaagtgctgttttctggctatttggaaccattgtcgagtttgtattggggtcaagtggtattgcagaagaaaataagacatttcggttttagatcaagtgtgagttgaagaggttttaagttcttgagaacacaggctaagggagaagaaggaagactggagggtggaaggttgcccatagtgaaggaggcaagcccagagaaaagagagggtagagacacggagagaagggatggggggtgcttgccccccaggaaagtgtgcttgccactaagggtgaaggatcaaggcaggtgtccccagtgatcagagacctctgaaatgtgggtgaataatcaagcaggcatccccacagtaattaaacaccaagggaagactgtcttcccgagtctgtgaccggcgctggagttttgggttcatggataaaacgcatctcctctgtctctaccagaaaaggaaaggaactgaaattaagagaagagagagattgaaggatgg

SEQ ID NO: 2272 - DNA, 1202 bp, Artificial sequence
  DNA replication origin
ggggtttgtctcacagtggaggcaaggaattgcaactcagaaatacattgctacttggctgcctctactctgttattgtacaccttgaaggtgaggttaattaagtcctgttgtggggtttgagggccggaatttaatttttggagctttatttcatgtcgggagcagattgggtaataaaatgcatattgagaataagacggccttctgacctttcagggtctagggctgtaaagcgtctcagggttgctgccaaatgagccatgaactgggctgggtttttatatgtgatgaaaaagagcctaaatgctaactgattttgggagaggtcaaagactatgcctttagctccagccacctttttaggaggaaattgctgggcaggtgggggaaggctagttgcagaacgaaactgtaagctggacccggtgtgaggaggggaggtgataaaaggattatagggtgggggagcagaggctgaggaagaattgggacctggctcagcctggcgagaaggggagaggtcagatgggtctgtagaaaaggaagattagaaagactcagcgatgcttggggttgggactgaggggacaggtgggagggaaagaaggaggatctgggatgagtcgcattgggaacagggactagggagggaacaatgtataaaagaatgcctggatgtcaggcacctcagaccgtttgcccattttatgacaagaattatttagatcttgtagcatggaaaaattgaaaatgccattttctggctatttggaaccactgtcgagtttatattggggtcaagcagcattgcagaagataaggcatttaggttttaggtcaggtgtgagttgaagaggttttaagttctcgagaacacaggctaagggagaagaaggaggaatggagggtggaaggttgcccatagtgaaggaggtaagcccagagaaaagagagagtagagacatggagggaaggggttcataggttcttaccttccaggaaagcgggaaaggggtcagggtgcagaaataaggggttgggacgcagagataagaggtcggggcgtggaaataagggattgggggttcttgtcccctagaaaagtgggacttgccactaagagtgaaagagaaggggttgaggggttcttgcccctgccccagaaaagtggagaaggggtagagacatggagagaaggg

SEQ ID NO: 2273 - DNA, 1242 bp, Artificial sequence
  DNA replication origin
gccggtagctgcgcgacacgagcagcatggccagtgcgttgcccacgaaaccagtgagcagcatggtgatcgggaaggccacggacaccgatccgcaatcctcgccagaccctggagggcgcgtgaggttgccccgcgcctcggcggaacgctcgggcgcccacatgcctgtgtaggagtggttgaggcgggtgcagaagggggcatcccctccgtagccccgggtctccttcatgttggcttcgaggtgaggaggggatggcgtccagagagccgcagcgggagggggcagacgcggcgcgggcggcggcggaggtcggcgtttaccgcggctggggctgggctgccccccatggtgcggggcgcagccgccgccctactccgctgctgggaccgcggccgcggcggcgccagggctcactggcccgggagggagccacgccttcctctctgggaaacctctggtggcgaggcgcgcggaggtgccgagtcccctttataaggccgagggggcggggcgcccgtgggtgtggacagaaccgaggtgggaggagggtgcaaagcaactgagcgcctctcttggctgttgcctatcctgatcgcctgggttgggaagccccagacggtctcctctgaaacgccctgctcctggccggaccgggagcccactggggtctcctccagttctccgctaaagtgtcggtggacggcaagcagctaataagtagcactggacttgcggaccccaggcaaactgccgaggcgcacctgagcgctcgtcctcctgcttcttcaaccacaaacgctcctacagggacgggatccttctcctgaagtcctttagtaactctggtaaagtgaaaatcgcctgtccttaagcaatccacacaagcctttgcatagctgatcgttaacttttttcctttctgctttgtgactctagagtgattataaaaaggccaaggtgtcctgtcccctggggtgccgctgaaaactataaaattactagacagtgcctgtagacttaagggaatagacacagggaaacaaatacatcggatggttgaattccaagaccaagaaatcccaactactacccctcgcctaatcctgcccgctcccctccccaccacccaacaaaaaggtcagctatggcaaaagtggctacaggaaggtggcatcaatttgcatatctgaggtagtgaaatcaactgctcccagcctatgggagtgagaggggag

SEQ ID NO: 2274 - DNA, 888 bp, Artificial sequence
  DNA replication origin
gatagaaagacacagaaagagaaaaagagagaagcagagacagagtgagagcagcgagtgagacaggcagtgtgtacacatgtgtgagtgacaatgtggaacagagaaggagagtatgccttttaaaaacagtgagagacaatctgaatgtggaagtggttcttacagcatggaagtgccagtgcatgtgaggatgtgagagtatgtgagttagtatgtttatggaaataagatttatgagggtgagtaaatggtactggaggggaacagtgaccatgcctgtgtgtgccacaggggtgggaaacggtatggggagagggatgagaaatgggagtcaaaagagggaagacagggcacaggatagggacattaaggaggaataaaaaaaatagacaaaaagaaaaaagggtaaaagagaggaggaaaggggattaaatgtgaggaacagaaattagagtcgtggagataaaaatgagaaaatatgagaagaaattttaaaaaggagggaaaaaacagaaaatagaaaaggtatgaaaagagatattggagggaaaaagagttacaaggaggtggggaaaatggtataagagaatgaggaaggagaaaagaaagaaaacagaaagcggtaaaaggaaagaaagataaagagcaagaaatcgagcctaagtgtccaagtgagagggaaaataaatgggagcagagaacagcagtttgaaagagtcgcttatgctggagtaaaatagaaacaaacctgataaacttgtcagactctccaggagtaccccatgacagtaaaacagagaccttgtgcattgagtttcaaagtggcacctgcccctccttctaaacctgacagttcactcatccccaggctacttggcgttccgg

SEQ ID NO: 2275 - DNA, 1191 bp, Artificial sequence
  DNA replication origin
gcgggcagcacgctcggaacttctgatctgtttctccatactttctccccctcctactccgcagtgtcaggggctcatgtcagaggagtgcgggcggactacagccctggcggccgggaggactcgcaaaggcgccggggaagagggactggtgagtgcggaggggctcgcgtgctggcaagactggccgtggggaggcggcgcaggacgaagggccgctgtccccgcgctccttccagggcccagctggcccctcctgcagcagacagaggacggggcggagagggtctgggtggggtgggaagcttagctggcccgcgaggagggcagggccgcaagacttctggggtccgaataggtcaggggtcggcagccccagcgggtgcgtagccagagcttggactcggggaagagggcgagaatcgtgacctcaagaagctgggggtggggtggggtggccagggggaagggaggggaggcggtgggggcgcccttgtgggtaggtgggatgcgaaggggaggaggggtctagaaccgcctgcgcctcgcggtttcctgcaggtgagccccgagggagcgggggacgaggactcgtgctcctcctcggccccgctgtccccgtcgtcctcgccccggtccatggcctcgggctccggctgccctcctggcaagtgtgtgtgcaacagttgcggcctggagatcgtggacaaataccttctcaaggtaggatagggcctcgggtgcgaggcccaaggggagcgggcttagcgtgggagctctgggaaaagagtaatgttcctcccaccaacctttccgttcaagttctgggtgaaggttgtaggcttttgcagaaaatcagcccagtttagggcaactcatgcggtgggataaagtgagaagaaatcccagactcttctatgtcgttgcaaaacagctaatgtgtgacacatcctggtctggacgcgccggatgtgtgtggatgcgctggagtcagccactggcttgtagtggaagggaagtggaaaaacccttatccattctgagacagaaacctgcttagttatttttcacccagccccgaattattcctttcttaaacatctttgttccctctaaacggactgtggtctctccaccccagtgacgcccacgcccatgactgcttagaagaattttaagttggtatgtatt

SEQ ID NO: 2276 - DNA, 1629 bp, Artificial sequence
  DNA replication origin
cccttgatgctggggggctttctcttcttggccatcttctgtccccttccctcccccggaccccccacgcgcttcctccggctgccgcgcagctcccaggcgagccctcgccgcggctctcagctcagcgagctctttgttgctgtgatggcatctgcgagcagcagcggcggccgggctgcgcgctcagctcggctcggctcggctggggcgggcgccgccgcccctctgctctcggccgcgccgctggcccccctcttgcgctgctgtggacgcggtggctgctgcggcggcggcggctgctgtgctgctcctgctgctggagggggcagcgctgggtcccctgagcgcccgcccagcgctgacctcccccttctccacaccctccctcccccacgcccccacccccggtgtcccgtctgagccgccagcccccatccaaccggctaccgcgccgtcatccagcagcctctactggaaagacaacggtggcggcggcggggagctgctggggggcgcggagagaccgcggccatctggggccgggaaggagaaagccaggcagagtctgatggagtctgcctccggcctgccttcctctgggccttcgaagccccctctcaaaaggccaggacgcgctgggcccaagaaagacacccgtcttcacaggccaaccagaactctggccacctgcgggaggacggcactgtcccttgcgacccggcccaggagccgtcctcctccacagcctcctcgaggatagcgagcccgaattccacgcgggcgatgagccccgaagcgcgcggttgcctctgcccctcccgaaccgagaaggaaagaggggagagggaaacaggagtctgatggaggggagagaaatggaattccagaggcagcccacgggcagacacctgcaagaatggctgtgttctggccctgaagttcttaatagtgagggcccaggatagttcccttggggctgtgggaaaagagggaagttcacgctctcagatgttggaggaattggaagccggaggtgtgatttcttggcctccagcagaaacttggttacagtggccacgttctttctctctctgattgggggtttgctttggaaagttctcatgttcctggaggagctgtcctcccctcgcgtgctgataagggatgaaaagaagttctgctggcgtcccagaactgcaagggcaggcgaaagtttaagaatataaaggagtatcggaccttaaaaagaaacgcttaaagggtagggtagggagaggttaccagggtgtgccactgtgggaagaggctacaatatcgaattttttttatatgctgcagctgagattgccgccgaaacgcacttcctaattcgcagtgaccttcttaacacttctcctttcctcctcctaggttagtacagttcccagcccaatctgattgtctaaacattcagtgagttaattcaatatctccacccagaagttgccccagtactagtgtggtgcggcaaaaagaacagtgaagtcaaaaaccccaattgtgaattctggccctgtaacttcgtagctctgagaatttggacaagtcactcaatctctctgctcttctgttttctgatatgtgcga

SEQ ID NO: 2277 - DNA, 959 bp, Artificial sequence
  DNA replication origin
ccggccagccgccccgtccggaagggaggtcggggggttagccccccgcccggccagccgcccagtccgggaaggaggtgggggggtcagccccccgcccggccagccgccccgtccgggaggtgaggggcgcctctgcccggccgcccctactgggaagtgaggagcccctctgcccggccagccgccctgtccaggaaggaggtgggggggtcagccccccgcccggccagccgccccgtccgggaggtgaggggcgcctctgcccggccgcccctactgggaagagaggagcccctctgcccggccagccgccctgtccgggagggaggtgggagtgtcagccccccgcccggccagccgccccgtccgggagggaggtgggggggtcagcccccagcccggccagcctccccatccgggaggtgaggggcgcctctgcccggccgcccctactgggaagtgaggagcccctctgcccggccaccaccccgtctgggaggtgtactcaacagctcattgagaaggggccatgatgacaacggcggttttgtggaatagaaaggggggaaaggtggggaaaagattgagaaatcagatggttgccgtgtctgtgtagaaagaggtagacatgggagacttttcattttgttctgtactaagaaaaattcttctgccttgggatcctgttgatctgtgaccttacccccaaccctgtgctctctgaaacatgtgctgtgtccactcagggttgaatggattaagggtggtgcaagatgtgctttgttaaacagatgcttgaaggcagcatgctcgttaagagtcatcaccactccctaatctcaagtacccagggacacaaacactgcggaaggccgcagggtcctctgcctaggaaaaccagagacctttgttcacttgtttatctgctgaccttccctccactattgtcctgtgac

SEQ ID NO: 2278 - DNA, 1241 bp, Artificial sequence
  DNA replication origin
ccccacctccctcccggacggggcggctggccgggcggggggctgacactcccacctccctcccggacagggcggctggccgggcagaggggctcctctcttcccagtaggggcggccgggcagaggcgcccctcacctcccggacggggcggctggccgggcggggggctgacccccccacctccttcctggacagggcggctggccgggcagaggggctcctcacttcccagtaggggcggccgggcagaggcgcccctcacctcccggacggggcggctggccgggcggggggctgacccccccacctccttcccggactgggcggctggccgggcggggggctaaccccccgacctcccttccggacggggcggctggccgggcggggggctaacctccccacctcccttccagatggggcggctggccgggcggggtattgacccccacctccctcccggacggggtggctgccgggcggagacgctcctcacttcccagacggtgtggctgccgcgcggaggggctcctcacttctcagacggggcggttgctgggcggaggggctcctcacttctcagatggggcggttgccaggcagagggtctcctcacttctcagacggggcggccgggcagagacgctcctcacatcccagacggggcggcagggcagaggcgctccccacatctcagacgatgggcggccgggcagagatgctcctcacttcctagatgggttggtggcggggcagagacgctcctcactttccagactgggcagccaggcagagaggctcctcacatcccagacgatgggcggccaggcagagatgctcctcacttcccagacggggtggcggccgggcagaggctgcaatctcggcactttggggggccaaggcaggcagctgggaggtagaggttgtagcgagccgagatcacgccactgcactccagcctgggcaccattgagcactgagtgaacacaactccgtctgccatcccggcacctcgggaggccgaggctggcggatcactcgcggttaggagctggagaccagcccggccaacacagcgaaaccccgtctccaccaaaaaaaatacgaaaaccagtcaggcgtggcggcgcgcgcctgcaatcgcaggcactcggcaggctgaggcaggagaatcaggcagggaggttgcagtgagccgagatggcagcagtacagtccagcttccgctcggcatca

SEQ ID NO: 2279 - DNA, 1108 bp, Artificial sequence
  DNA replication origin
gtatccgtccagtggccgcggtcccgcggggaccccggggcgctgctgggtgctgctctccgccgccggctgcgagctgccggtggccgacgcctgctgctgctgttgctgctgctgctgctgctgctgcgggggccgctccttctggccgccgaggctgctgtacactagcaacaagctggtgcacatggtggtgagcgctaaacacactgccagaccatggcgctgcgggcgggcgggagagagaagaggagagcggctgagcgcagacaccggaggagcgcgcccagcggggacaactgtgcggtggtcactctagtgggggagatttggggcggcctgggccccagccccgccgcacgcaactgggacagagaaagcaccgtcccctagcgtatcgcaagggatgctccgggcgcgtcgctgctttcggccgccgccgcccagatctctcggtagagggcaggtggtgtacggccccgggctgagggagggagcgcgccggggccgaggacaggggtgggtttgcactttggggaagggcccgtctggcgcagccaccccagccaagctgctggaattttgagtccttcacacccctcctttcctggggccctggatccttgcgatccttgcaagtttgaaatctaagaaaacgaagaaagtctgcaaaggtcccccctccccgtccctcttagtttttggcaggctgttgcttttgggcacccccatcccttgagcaatctgcccactcctccatcgctcctgcagctctccgccaccccctcggacctctcgccggagatctaggaggcgaggcaaccccgagttcccatcctggctctgggattccgagccaggcagagctggagaatcgggagggaacgcggagcgggtagaaagttgtccctttgtaacaggcgacctcgcggcccagggttaggcgtctcggagtctccacggtgcgtcccgtggaccctgagcccggggatccccctctttgcccggtggagttgccacaactgactcaccatcagggtcttcattttgggcacctcttttgtgcagaatcctcaggctcgcgcgtccggggccactttttcctgga

SEQ ID NO: 2280 - DNA, 1109 bp, Artificial sequence
  DNA replication origin
ctagcactttgggaggccaaggcaggcagattacttgagcccaggagttagagaccagcctgggcaacaaaatgagatcctgtctctacaaaaaatacaacaattagccttgtgtagtggcatacacctgtagttccagctacttgggaggctgtatgggagggtcacttgagcctacaaggaggaggttgcagtgagcagagattgtgccactgcactccagcctggatgcagagtgagactgtcagcaaaggggaggggaggggaggggaagggaaggggaggggaggggaggggaggagaggacaggggaggggaggggaggggaagggaggggaagggaggggaagggaaggaaagggaaggggagggaggggaagggaaggaaagggaaagggaggggaggggaggggaggggagggcaggagataggaggggagggaaggtaaatagatggcggtgggaagacggatggtggaaatttaggttaaggaagagttgcaatttttggtaattttaaagtctaagatataccataagaatgagcaatggtggtgataaacaggatcctggagaaggggaggtaaaggaagttagaggctagagtattggaaggatcatctatgtggattttgaaatcactaagaattaagacagtaataatgttgaagagggtgaccatgatctgtaattgaaatctggtggatgcctgcaacaagaagaggcaatggtattgtctagtcaggtgatatgagattcaaagttagagagttttagggaggatgaaaagagaattatttggagtgaaaaaaggaggacgcctacttctgtgttacctgcaggcataatattttcagaatatgaaagaaaaacagctaccacatgagagggctctggggagagccaagtttacagtaaagcaagaaggtgagagaaatgttgacagaagagactgagaaaataagagtttgctgatgatggactgtgagttcaagaggacataagtctttctgcctccactccttactcttgccattggataaatagaggctgagagcatggtggtcttattctgagagccccctggcaggcatgagctttctaggctt

SEQ ID NO: 2281 - DNA, 806 bp, Artificial sequence
  DNA replication origin
atacacggttacctccgggtctccgaggaactcccaggaaaaacctaatagtcacaggatttatcatttattcctaaggttacggatctttcactatagggagctgtggggaagggggaaaaggggattcatggtgtggaatccaacccttcagataatttttagatcttgagtatctctatccttcaggaaagttttgctagctggtttcgaatttttaccctgtcggtgtcacaaatctttatagactttaggataaggccttagtgtgagcctgaaatcctaatcaactgaaggactaataagtagtcaactagttaattatctccatggagaagaagggacagtggaggagaaaggtgggtggtagtggagagctagagatgcttaaattgcaaatgtgtttagtaggtggggagggtgggcatcattaattagacctgaagagtgtgcagtccgtggacagtgtcgtatcagagcacccctgggggaatatgagtgagtatgagtgggtgcgctaaggcataatggttaatggatcttcctgctgcagaccattgttaaggtgtaacccatcttcctcctagctcccaagatgactcaattccctgctaagatgtcttcacattgcctatttgggagatagtccttgcccccggagaatatgatctctaacttcccacaaagcctaacactgtaggagggtgtgtgagagaggacactttggtaggcactggtatctggggtctggctggagaaagaagcaacgctgccactgctttaaaaaactatagagtctgaatgtc

SEQ ID NO: 2282 - DNA, 1350 bp, Artificial sequence
  DNA replication origin
aggtcgccgcagcccgggagcctccccgcttgcgccccaaggcacgcgcggcacagccatgaacaccaacgatgccaaggagtatctggcccggagggaaatccctcagctttttgaggtagggctagagctggccgacgggcggtagcatccggggactgcatctcaggggttcgggttgaggcagccgcgccccgtcccaccttccccacacggggcatgtaatgaaggggcttgtagaagcgcactcgcccgctcccccgagggtagtcgcctttcccgcgggttgccagggtccttgtcagaaggctgggcttagaagcctgcatctcacagatcaagtttcagtcttccagcagggttctgaaagcagcctgctcccatcgcgcccctcggatgtggacacccagggtgggctgcagaccgcggccgggccgcactctctgggggcgagggccaggtcaggtggctgcactgtcgcccagcagcgagtaaagactcgaaactgagggagccagagccctagtcactctgctggtcgagggtcggaacccctgggggaaagaggaaatgtggacgaaggcagcccttcctggagacagcttggaagagagggatgaagatgcaaaaagcaaaacccaacctatcaagtgccacctccccggtgacaggcccccagccttgctctgcgctttcgctgaatgaactcctgagcacgtttttcccgttgcctaggaagggttgggccgcaggtttcgccagtgctcgacaacccacctggagatagcgggtcggggagggagctgcgaggggggcggactcctgttgctcagtcttcagaccgcagcacagcatcatctgcaccgggacccgggaatggggggacacttggagactgagagagaggaggctcgaggaatgaaccttggtctgttctaagccacaacccctgtctcaggtcgtttggcttcctttccttctctttgtatttgaatttaaaaacattcctgaatctcaagtgcttttgcttgaagtaggggggaggaggagaaaagaatagaagcaagccaggcttcctaagcgagctctgaaaggagaaatccattcactgcaaacctcgttccccatttctgaaaacggatagactgatatcgtaaactaaaggtcatgagggtttttccccccggtttgggggatttgttctgttaaaaggaattttaaagcaccacttgagaaaataattttgcctcagtttccctaaactatctttaaaatgggttgccataattacaggtcttcttttctctcacctctataagccaccgttttcaggtcatctgaagtcaagat

SEQ ID NO: 2283 - DNA, 1166 bp, Artificial sequence
  DNA replication origin
cttaggctaaaagcctgagtgaggccgctgactctttctagacctaaatctgaccagtgggatactttacaggtcaaaaggatgactatgttgcaaagcccaccttaaataacattagctcccatttatgtagtgtttgaagtgagtcaggcgctttacatgtacaaactcatttaaccctcacaatagtcctgtgagtcaaatactattattatcctcatttttaaatgaggaaactgaggcatacaccaagaataagatagttgttattctcaacaaagagttcctggatggcatggagagctcctgcccactggtaaacgtggcctaacccccattctgacttaatcagaagaaaactaaggtgggggtggagtcagagggcaggagggcaaacttctcctcccgctccacttgctggaatgaccaaagcaaaaccatgatcacagtccacaatgctcatgtccttgtgctggtgggctgccctcatgccctgaggggtgcaaggatgagtgtggtcctgtgtccggaaatggtgggttcttggtctcactgacttaaagaatgaagccgtggaccctcgcggtgagtgttaccattcttaaaggcagcgtgtccggagtttgttccttctgatgttcggatgtgttcggagtttattccttctggtgggttcgtggtctcgctggctcaggagtgaagctgcagaccttcgcagtgttacagctcataaaggcagtgtggacccaaagagtgagcagtagcaagatttaccgcaaagagcaaaagaacaaagcttccacagtgtggacggggaccccagcgggttgccactgcaggctaggatctggccccacccacatcctgctgattggtccattttacagagagctgattggtccgttttgacagggtgctgattggtgcgtttacaatccctgagctagacacaagttttccaagtccccaccagggtagctagatacagagtgtggacacaaaggttctccaagtccccaccagagtagctagatacagagtgttgattggtgcattcacaaaccctgagctatccacagggtgctgattggtgtgtttacaaaccttgagctagatacagagtgccgattggtgtatttacaatcccttagctagacataaaggtt

SEQ ID NO: 2284 - DNA, 1240 bp, Artificial sequence
  DNA replication origin
tggatcctgcactgggccacaggtggagctgcctgccagtcccgcgccctgcgcccgcactcctcagggtggatgggactgggcgccgtggagcagggggctgcgctcgtcggggaggctggtgccgcgcaggagaccagggggaggtgggggggaaggctcaggcatggcgggggctgcaggtcccgagccctgccccgcggggaggcagctaaggcccggcgagaaatcgagcacagcagctgctggcccaggtgctaagcccctcactgcctgcggccatccggccggccggccggccgctccgagtgcggggctcgcggaatccacgcccacctggagctctgcgcacgcgcctgcaagcgctgcgcacagtcccggttcccgcctgcgcctctccctccacacctccctgcaagctaaggaagccggctccggccttgggcagcccagaaaggggctcccacagtgcagcggcgggctgaagggctcctcaagcgcggccagagtgggcgccaaggcggaggaggcgctgacatcgagcgggggctgtgagggctgccagcatgctgtcacctctcagtcccactagatcccaagaggcagcagaggcagcttctgaaaaataaaataagtgagtaggcaccccaccccactcgctccctttcccacggccccacccccctctcctggttccatttggcccactcagcttcttgcccaaacttcattctgaaggcgttggctctctccatcagggtgaggtcaccaagctttggggttacatgtatctgcttcaggcctgtcactcactagtccctagtgaccttgggaaggttaacctctgagggcctccatttcctcatccttaaagtgggaataatcatacttcccggcaagagcgccagagggcttatgggatggctgtttgtaaagcccttagcacagtgaagcatagccagctgctgaaatgttgctgatggcatctcagcagcccttccaagggcacttgtgctctaactaaggtcccctgaaaaccaaaggccatggagaatccggtgaggctggtgccagagccccagggtgccagcagggtgatgttgggggcaggccaatgtccccaagtctctgattcattcagccaagggcagagttctctgctcgtctgcttacttgatgttgaagactaaccacagtccggtgaaaacaagagcagagctaggaaccagacagctactcc

SEQ ID NO: 2285 - DNA, 1232 bp, Artificial sequence
  DNA replication origin
cccgccagtcccaacgaggagaaaggaggggaccggaaggagccgctggtgctgcgggaagtggcaggagcgggaggcggggacccacctggaagcgccgcggcgccgctatcgagcttcctgcagcggtggccacccgagcaagtgccgtggcgggggcggagagcggccacggcggcggcgcctccccaagtggcccgttgcgtccgaccccgcgtgaaaggtgagcaagagctcgggacacgtggtgagggccagacacgggggagggagaatgaagggggagggaatgggggtgggaaacgatcggcttgggacccggatttggagccaagtaccgggagggggtgggctggaggcgacgactgcgacggctgcgacggctgcgacggcgaagcccccacgtggggcgggggtgcgcgcgcacgtgtgcgcgggcgaaagggggggcggggagggcttttgggagggcgtcgggagcgcgctcgctcagtagcggcccacgtgacgggcacgccgaaaatgtttccacgtgacagggaggctgcctggggcagcgcactgcgctctgtttatgtagtataatcgtggtaatcggaggtttttaagatttctgcttttctgtacaaggggaaaggaggagacgtataaagcggaaagacttcctactgtctcagtgttttaaatgttcactactccgttagtgaagtgctttttaagttccgaaatactgatttttttctgtaccgccatgttgggtctagtggaagctcgcgagatgcgagtgggtttgtatcgcgagatctctcgattctcgcgggacctcgttggcagagcagttgtcctggatggcggagccttgggttccgggggcctgggacctgcaactctttctacaaggcaagtcgttagggaggggcccggggcgagtgcctcttggtgccgggatacgtgctgcatcagcttcccatagtcttgaagggaatacagtaaccccattgaggcaacactgccctccccatccccctgcgggcgctccaccacctgcaaaagcatatgcacccctcagccaggtccttctccccacgcagtgatagttccaccctgtcccactcactggaagtccgggagccgtgctcgcgcagacctgatgattccattggataccgttcctcttactttaagatgttcttgtcagtttttcccttcttgccattttctaaagtattcca

SEQ ID NO: 2286 - DNA, 1174 bp, Artificial sequence
  DNA replication origin
ccgagcagaggcgctcctcacttcctagacggggtgggggccaggcagaagcgctcctcacttcccagacaatggggggactgggcagaggcgctcctcacttcctagagggggtgggggccaggcagaagcgctcctcacttcccagacggtgcaggccgggcagatgggctcctgacatcccagatgtcagtggccgggcagtggcgctccgaacttcccagacagttgggtggccaggcagaggcgctcctcactttccagacggggcgggagctgggcagaggcgctcctcacttgccagacagtggagcagccaggcagaggtgcttctcacttcccagacggtggggtggcggggggcgtggggggggggtggaggggggagggcagggcagaggcgctcctcacttcccagacggtggagcagcggggcagaggtgctctcacttcccagatggtggagcagcggggcagaggtgctcctcacttcccagacgggatgggggcggggcagaagtgctcctcacttcccagaaggtgaggcggcggggcaggggtgctcctcacttcccagacggtgcgggccgggcagatgggctcctgacatcccagatggtgcagtggccgggcagtggcgctcctcacttcccagacagttgggcggccaggcaggagggctcatcactttacagacagggcggcagctgggcagaggcgcttctcacttcccagacgggtgacctgcacttttcatgaatggtactaaccagtttgaatttatgtgattatattttaaatgtcagcctccctccctagactgtgagctctgtcagagtagggcctgtgcttgctttgttcaccactgtatctctagcaccttgtatggcacctggcatatttgttgaaagaatgaactacatcaatgattttcaaagtgtgttctgaggtagcatcttatgtgtcgtggtaagggactgaggaaaatgtcagctggttgcctcctcccaggtcctgttttatttggctcaaatattggatcctggcataagaatatgagtatacaagaaatttccagtgcttcagaaaatattgtacaaactgctgaattagttgatgttaatgtatcttccatcttcaatataacgtgatcctaggtcaaaataacaaaggg

SEQ ID NO: 2287 - DNA, 1191 bp, Artificial sequence
  DNA replication origin
cattcatctgagggctgagggcctgtggtagaagttcttaatcttgttttcagggttttgaaattgtgtaacttttttttctttaatgtaatgagcatgtgtatacacatttttttttttccaggggaaaccctccataatttttaccagattgacaaccgttctagatcccccgacaggttacgaactacaatactagttttttttttttttttttaccggtttgtaaaaggatgcaattcttcgaatatagtttttgcatccacttgacgaggaaggagcctctaccctaaacaaaaatggcgggagctgcttcacacgtagtccctcacgcagaaagcctggaaggccccctccactttctctccaccttcgcactcctgaccccggaaggactccgccttctccatgtcagactgctgctcagcgccaggcatcagctgggaagctggcgtgggcaggccagctgtacctggcctggagctccaggtacagggccaggggcggggtggggtggagaggcgggcgggaggaagcggagagttgagcggccacgcagttggggcagaggcctcggggcaggggtggcgcggactccatcgctggcgttagctctcggagtgccaggtggagcggcggaaagccagagggtctacggccgtgccaccctgaacacccccgacctcgtctcatctcagaagctaagcagggtcgggcctggttagtacttgcataggaaagcaggagggtccccacgccagagggaggcctgcaaaggaagcgcggaattgggatgggctcgccactgctctgagccagaggaagggtctggacggccgagctggagggacccccttttctggtgttcttggcaaagaaaaaggaagacagcagaggagagctccgcgaggggctgctgtggggtcgggggagagcgcgctggaggtagggcagctggtgaggtctcaggttcggcttggatgcgggtggttttgagcagggagtggcttttggatgtgaaagattactctgctttgcaggtgctttaagagaataatttagcacgggagtattgtggtgtcaggtccttctgtaaagttgttaaattatctattttccagagggaagactcagcttgtttttgcacaggactttgaaacctttattattgttgttttattgttgttgtta

SEQ ID NO: 2288 - DNA, 999 bp, Artificial sequence
  DNA replication origin
tgcccggccagtcgccccatccgggagggaggtgggggggtcagccccccgcccggccagccgccccgtccgggagggaggtgggcggggtcagccccccgcccggccagccgccccgtccgggagggaggtggggggatcagccccccgcctggccagccgccccgtccgggaggtgaggggcgcctctgcccggccgcccctactgggaagtgaggagcccctctgcccggccagccgccccgtccgggaggcaggcggggggggggtcggccagccgccctgtccgggagggaggtgggggggtcagccccccgcccagccggccgccccgtccgggaggtgaggggcgcctctgcccggccgcccctactgggaagtgaggacccctctgcctggccagccgcctcgtccgggagggtggtgggggggtcagccccccgcccggccagccgccccatccgggaggtgaggggcgcttctgcccggccgcccctactgggaagtgaggagcccctctgcccggccacgaccccgtctgggaggtgtgcccagcggctcattggggatgggccatgatgacaatggcggttttgtggaatagaaaggcaggaagagtggggaaaaaattgagaaatcggatggttgccgggtctgtgtggatagaagtagacatgggagacttttcattttgttctgtactaagaaaaattcttctgccttgggatcctgttgatctgtgaccttatccccaaccctgtgctctctgaaacatgtgctgtgtccactcagggttaaatggattaagggcggtgcaagatgtgctttgttaaacagatgcttgaaggcagcatgctcgttaagagtcatcaccactccctaatcttaagtacccagggacacaaacactgcggaaggctgcagggtcctctgcctaggaaaaccagagacctttgttcacttgtttatctactgaccttccctcccttccctccacta

SEQ ID NO: 2289 - DNA, 1354 bp, Artificial sequence
  DNA replication origin
gcctcccggacggggcggctggccgggcagaggggctcctcacttcccagtaggggcggccgggcagaggcgcccctcacctcccggacggggcggctggccaggcggggggctgatccccccacctccctcccggacggggcggctggccgggcggggggctgaccccgcccacctccctcccggacggggcggctggccgggcggggggctgacccccccacctccctcccggatggggcgactggccgggcagaggggctcctcacttcccagtaggggcggccgggcagaggcgcccctcacctcccggactgggcggctggccgggcggggggctgacccccccacctccctcctggacggggcgactggccgggcagaggggctcctcacttcccagtaggggcggccgggcagaggagcccctcacctcccggacggggcggctggccgggcggggggctgacccccccccccacctccctcccggtcggggtggctgccgggcggagacgctcctcacttcccagacggggtggctgccggacggaggggctcctcacttctcagacggggcggttgccaggcagagggtttcctcacttctcagacggggcggccgggcagagacgctcctcacctcccagacagggttgcggcccagcagaggcgctcctcacatcccagacagggcggcggggcagaggtgctccccacatctcagacgatgggcggccgggcagagacgctcctcacttcctagatgggatggcggcggggaagaggcgctcctcgcttcctagatgggatggcggccgggcagagacgctcctcactttccagactgggcagccaggcagagaggctcctcatatcctagacgatggggggccaggcagagacgctcctcacttcccagacggggtggcggctgggcagaggctgcaatctcggcactttggggggccaaggcaggcggctgggaggtggaggttgtagcgagccgagatcacgccactgcactccagcctgggcaccattgagcactgagtgaacgagactccgtctgcaatcccggcacctcgggaggccgaggccggcggatcactcgcggttaggagctggagaccagcccggccaacacagcaaaaccccgtctccaccaaaaaaaaaaacgaaaaccagtcaggcgtggcggtgcgcgcctgcagtcgcaggcactcggcaggctgaggcaggagaatcaggcagggaggttgcagtgagccgagatggcagcagtaccgtccagctttggctcggcatcagagggagaccgtggaaggagaccgtgggaagggggagagggaga

SEQ ID NO: 2290 - DNA, 1756 bp, Artificial sequence
  DNA replication origin
ctacagtagggaacgcacccgaaactcagccgacaaggcgcaggggagcagggcaaagacattgcaaccagaagcccaaggccggccgacactttcagaccctggggcagcccctggtaggcaccccgccgagcccgcaggatgcggctccaaggcagggttcgcccgggccggggccagcgcggaccacagctgtatggcgcccggcgccctccggagctgcagcggagcacggccagaagccgcagaccccgagcgcctctctgcagccgccgttcccgcccccgcccccaccaggggacccgacacctccgtctccactccccccagcccacgttcccccaactcttctcaccctgcaggagccggtgaccggcgaaggtacttctttccgcgtggagggactgtgcgcgtcccgcctggctgtgggtaggggtctgggagctctggccgctaacacttctgctccagccgctgggagtcctctggctgccgctgccgccgccgccgccgccgtctccagcagcaagtttccataaaagtcctggtgtgcagcctgttcccgcattccaggcgggcccagcgccggctgcagctgttccaaaacacaaggccagttcccccaaccccccacctccgccgttatcacccggagtgggggtggagagttgaggagaaaagcaggggagggggaccgtggctgccaactttccgccagaatttgtctgtctcccggccctaggtgcgcgagctgaccccctaactttgggcctgcctccacctccagccaggcctggggaaggaaggctgcctccgccatgggaaaggaatgaggctgaaatgggcttcattaccgggctgaagctggctccccctacccgcaaccagtttgctctggggcccacttctctcagctactctacccgtcctagtttccagtcaagaagccaagccactacatatcttctactaccctaagcattgacctttggccaagttttcctttattacaaagagcgtggggcagcaatccgggaacacttcatctgtctattgctcccctgttcttagctccagtctttaactctaaaaggagagttaaaaaagaagaagaagaagaagaagaagaagaagaagaagaagaagaagaagaagaagaagaagaagaagaagaagaagaagaagaagaagaagaagaagaaagttgaaggcagaggaggaggaggagaagaaaagaaggaatatatttatataagtacaaatatctttatattccacctttttcttaattgaaggcaaaccatatctggtctttctaaagcttcataaaggcatctttgactattagacacccacagacctttttcaacttggaccgccagcctgtcaaacccatcagacaataccatattaaaacccgaaatgcacactcggagtatttttggtggacgagatctttaattcttcactgcacttgaaaaaaaaatcgaaatgacatccagataaagaataaaggtaaccacttccaccttcaggccctaagcagacagcggtgctcaggttatatttcagggatgttgaaaaggccttctgggctgggcgcggtggctcatgcctgtgatccccgcactttgggaggccgaggcgggtggatcacttgaggtcaggaattcaagaccagcctgaccaacatggcaaaaggccgtctttactaaaaatacaaaaaattagcctagtgtggaggcacacacctgta

SEQ ID NO: 2291 - DNA, 1037 bp, Artificial sequence
  DNA replication origin
ctgatggggtcctcagtcatagtgctttatagggtggtggcagtaggatccattctctattgcacatgccaacagcagctgcagtgctgcagaatgcatgctcattggcatgcatgctccagagaggtgatggagggtattcccagaggtggtggcagcacaatgcagtggagcagggagccaggggtggcaggaagccccactgacatcagtacatgcattcaagatggcagcagtgttagcgagagggctggcagagtgctggtgacatggaactgtgtgtgccctctgtgcctggcttcacgagggtaacagctgtctctgggggtgggggcagatttgcttgtcttccttcctagttttccatgcaggccgtgtctactcagggcagaggtgctggtgggcaaggggctagcagtttccatgcctgtgaacccctccaatagtaatggccaggtggaagggttggggttgggaggggcattggaaggggaatttgggagggttggaggggtggggtgcactcaggccagcagctgtggcatgatggggtgcatgggcacatgtgtgctgatgggaaagggagacaaagtccacctgtgagaactgcctgcagcaaagtaatgtcaaggtggccatgggtgaggcaggcaaagtggttctggggaggctgtggtggggggagggtgtagtgcggggagggtgcggtgggctggtgggtgtcatcaggtgcatgctactggagctctctgctggtcaagtaaagtcaccagagcagtagctatgatgtgggctcctaggaggccccctacctgggcatccgaggctacactgcaagcaggcactgccagactgctctcacagacccctgcacaactaaagaggccagtggactcaggggtgcttaggtcgaactgacctcctctcataggcaataccaccctgcagtgttcaagtccaacagcttccctagggctgaagtctagggaagaaaggtgagccttgggatacagacatccccagtagtgctccactac

SEQ ID NO: 2292 - DNA, 1049 bp, Artificial sequence
  DNA replication origin
taacagctttgtaaactgcctttttaaacccttcaactaggcaggaaatcatgtaatctcaactagctatacctggggaatctgcctgatagttccattggggatcctcttggggaactgctctaatgccttcctggaggtctggctcatggagctggcagttgtcagcatgagattgggctagagaaaaaactctttcctgttcatctggggagagggtagaagttaggatgacatttaagtcactccaggttaaattgtaggatatcggaattcctgtacatatttagtggggtctgatgagaaagaacctaaatgctggctgatttgggaaaggtctgatagagaaaaaggcacatgtaccctgactatgccttcagctccagccacctctctaagagaaaattgttgggcaggttggggagagctagtcacagaatgaaactgtaaacaagactgggtgtggggaggggaggtaatagaagggttatagggttggggagcagaggctgaagaagagttggagcctgattcagcctggcggggagcgacctgaggaggagcagtctggggaggaggtgagaggtcagattggtcagtataaaaggaagattcacgagactcagcgacacttggggttgggactgaagggacaggcgggagggaaagaaggaggatttgggatgagttgcattgggaacagagactagggaggaaacaaagtgtgaaaaatgcctggatgtaaggcacctcagaccaattgcccatttttcgacaaaaatttcgtaagatggagaaatcaaaagtgcctttttctggccatttagaaccattgtcgagtttgtattgggaccaagcagcgttgcagaagaaaataagatgcttagattttaggtcaggcgagagttgaagaggttttaagttcttgagaacacaggctaagggagaagaaggaggaatggagggtggaaggttgcccatagtgaaggaggcaagtttaaagagaagggtagagacatgggagaaggggtggggggtgcttgcccccc

SEQ ID NO: 2293 - DNA, 1014 bp, Artificial sequence
  DNA replication origin
gtcgggagcagattgggtaataaaatgtattttgagaataagacggccttttgaccttttagggtctagggctgtaaagtgtctcagggttgctgccaaacaagtcatgaactgggctggatttttatatttgatgaaaaagagcctaaacgctatctgatttgggataaagaaaaaggagcattaaccttgactatgcctttagctccagccacctttttaagagtaaattgctgggcaggtgggggagggctggtcacggaacgaaactgtaagccggaccaggtgtgaggaggggaggtgataaaaggattatagggtggaggagcagaggctgaggaagaattgggacgtagctcggcctggcgaggagcagcctggggaggaggggagaggtcagatgggtctgtagaaatggaagattagaaagactcagcgacccttggggttgggactgaggggacgggtgggagggaaagaaggaagatttgggatgagttgcattgggaacagagactagagagggaccgacgtgtaaaagaatgcctggacgtcaggcacctcagaccatttacccatcttacaacaagaattatttagatcttgcaggatggaaaaattgaaagtgccgttttctggctatttggaactactgtcgagtttgtattgcggtcaggtggcattgcggaagaaaataagatgctgagagtttaggtcaggtgagagctgaagaggttttaagttcttaagaacacaggctaagggagaaggagcaatggagggtggaaggttgcccacagtgaaggaggcaagcccagagaaaagagagagtagagaaacggagggaaggggtttgggggttcttaccctccagaaaagcgggagaggtaggggcacggaaataagggatcggggcacagagatataagaggttggggtgtggaaataagggatcagggcacagagatatgaggttggggtactttcccctcccctagaaaagcgggacttgcc

SEQ ID NO: 2294 - DNA, 1551 bp, Artificial sequence
  DNA replication origin
ggttcaggcgtttggaagttcttgtgtgctggagatgtggctggggtttgtctcacagtggaggcaaggaattgcaacatttttctattattgtacaccttgaaggcgaggttaattaaattctgttgtggggtttgagggctggaatttaatttttggagttctatttaatgtcaggagcagattgggtaataaaatgtattttaagaataagacggccttttgaccttttagggactagggctgtaaagtgtctcagggttgctgccgaacgagccatgaactgggctgggtttttatatttgatgaaaaagagcctaaacgctatctgatttgggataaagaaaaaggagcattaaccttgactatgcctttagctccagccacctttttaagagtaaattgctgggcaggagggggagggctggtcacggaacgaaactgtaagccagaccaggtgtgaggaggggaggtgataaaaagattacagggtggaggagcagaggctgaggaagaattgggacatagcttggcctggcgaggagcagcctggggaggaggggagaggtcagatgggtctgtagaaaaggaagattagaaagactcagcgacgcttgtggttggtactaagaggacaggtgggagggaaagaaggaagatgtgggacgagttgcacggggcacagagactaggaagggagactgatgtgtaaaagaatgcctggacgtcaggcacctcagaccgtttgcctattttacgaccagaattatttagatcttgcaggatggaaaaattcaaagtgccattttctggctatttggaactactgtggagtttgtattggaatcaagcggcattgcagtagaaaataaggcatttaggttttaggtcaggtgtgagttgaagaggttttaagtttttgagaacacaggccaagggagtagaaggaggaatggagggtggaaggttgcccatagtgaaggaagcaagcctagagaaaagagagtagagaaatggagggaaggggttcgggggttcttaccttccagaaaagtggtaaaaggggttggggcacagagataagaggtcggggcatggaaataagggatggggcacagaaataagaggtcggggcacagaaataagggattggggcacagagatataagaggttgcggcacagaaataagggattggggctcagagatataagagtttggggcgtggaaataagggattggggcacagagatacgaggttggggtgtggaaataagggattggggtgcagagataagaggttgaggtgcagaaataagggattgggggttcttgccccatagaaaagcaggacttgccgcaaagggtgaaggagcaggggttgaggggtacttgcccctcccccagaaaagcagagaaggggtagagacaaggagagaaggggttggggtacttgccccttccccagaaaagtgggacttgccgctaagggtgaaggaccaaggcaggagtccctgcgtggtctgacaccttgaaatgtgggggaataatc

SEQ ID NO: 2295 - DNA, 1041 bp, Artificial sequence
  DNA replication origin
gcgggtcctcggccgccgagtccgcgcgggaggcagcgccgcagctccccggccggacacggcgccgcagctcggcgcgtcctcctgctcggccgccgccgcctccagccgagcagccagcgccgggcggctcctggggttaagtcaacattttcccgcagtttcccacacgccgctcttcgagagaggtctttcacacacacgcacacacccccagaccgcacgctcccttaggaaaaaaaaatcgggaatcagagcgaaaggggtggtggaagcaaaagcctgacagaggtgcgcagacttgggagtcccttcgaagcgacgggcgggagggcgccgggggcgcgaggccaactcagtttgtcaggcgaagcccctcagccccccgagcgcccggccggaatagcatccctcgcgccgaccctgcggcctggggcgggaggcggcggcgacccctcctcacatttcggatctcccggccggggctgagcggtggccgctgccccaaggaaggctggcggcgcagactcgggctcggggaagcaaggagtagccgggaagagccacgccacacacagcagcggaggggagatgccccccaacaatcccaaggaattctctggtaagctcccgatttcgccccagcacctctgcgtgtgtgtgagcggagagagagtgagagggagcgagagggagagagagagagacgggggaatgcgaagtcctgacacagactctccgcgaggtctgaactggagtcacctccagcctcctcctcctccttcccccaaatccgccctccccgccagttgggctaatcatataaacatactagcgtgtacagcgtcaaaggacaaatctctccctcctgagttttccagcaaggggctcgggcaaactcaaaagaagattacaggcagctaagtacaaaacgtggagcagataatctataactcattgtcgcccaatggccgttttccactccatttgagcagctgctgcggctgtgcgcccaagcggcggggaggaggagcgaaaggg

SEQ ID NO: 2296 - DNA, 1088 bp, Artificial sequence
  DNA replication origin
ctccaggcatcagtctagttgccgggggcgctggcaagggggttaggatgaggctcccgtagccatgcattttttaatttcataaaagcttggggtcgcaaggttccgcccgtcctttcactgggggcctggggaggaggagtgtgaagcgcgtcctcggcggagcttatttgctccgggcgctggggcccggggccaccccagcgtcccgcccgctttgccctccggtcccgcactgtaagtggagcggggaggctgagcggctggagcgagttcgggggaagtggacggtgggggagggcttggacgagtttttgagggttgctgttccttctcgtcagtggttaggtggtgtggggaggcgaggatgacagtaaagcgcagccagatgtggtcgggccgccgccgggactggctacgattgggagcggcggggctgctgctgccagggcggcctcgtgggtcgggagggtgcaggggccggggacccggcgggccacggggagggcagagagcctcccggagccgcagtgagagggcagcagcgggccgcgttgggcctgcgggagaagttacggagtgtatgctgctggagtggctgtggggcagggagcctcgggagcttggtttgtgggatgggggtgccactggggagtggcgacgagagaaaggcgtgggaggagcgcgagggaaggggagacccccgcgctgcccgagcgtgggctccttgattggctggggcgaccctcaggcagagggggcgagggcgagccaaaccatggaagcgccccagcagtgtggaggtgcgcctgcgagacttctgcgcttgggacccgtaaagtttgttcctttcgccagactgcggggtgggggtgaggggagaatactggaagctttacttaatgctaaagtgtcgctgagtggaggctttttttccccccctccaatcctctgttcactctgtgctctcaaagaatagttgggagggacaagtcctgcggtatctatcatagcctttctctttttagggactcctcctcctcatcttttctccctctccccgccctccattccgttcttcccgatac

SEQ ID NO: 2297 - DNA, 1331 bp, Artificial sequence
  DNA replication origin
tgtggctggggtttgtctcccagtggaggcaaggaattgcaacttttttctattattgtacaccttgaaggtgaggttaattaagtcctgttgtggggtttgagggccggaatttaatatttggagctttatttaaagtcaggagcagattgggtaataaaatgtatattgagaataagaaggccttttgaccttttaggatctagggctataaagcatctcagggttgctgccaaaggagccatgaactgggctgggtttttcatatttgatgaaaaagagcctaaacactaactgatttgggagaggtcagataaagaaaaaggagcattaaccttgactatgtctttagctccagctacctttttaagaggaaattgctgggcaggtgggggagggttagttgaggaacgaaactgtaagccggaccgagtgtgaggaggggaggtgacaaaaggattatagggtggaggagtggaggctgaggaagaattgggacctagctcagcctggggaggaggggagagttcagatgggtctgtagaaaaggaatattagaaagactcagcgacacttggggttggaactgaggggacaggcgggagggaaagaaggagcatttgggaggaatcacattgggaacagagactaaggagggaatgaagtgtgaaaaatgcctggatgtaaggcacctcagaccatttgtccatttttcaacaaaaattatttaggtcttgtaggatggagaaatcgaaagtgccattttctggccatttagagccattgtcaaatttgtattggggccaagcggtgttgcagaagaaaataaggcatttaggttttaggtcaggtgtgaattgaagaggttttaagttcttgagaacacaggctaagggagaaggaggaatggagggtggaagtttgcccatagtgaaggaggcaagcccagagaaaagagagagtagagacatggagggaagggtttgggggttcttaccctccagaaaagcgggaaaggggtcgggacacggaaataaggggttggggtgtggaaataagggatcagggtgcagagataagaggtcagggcatggaaataagggatcggggtgcagagataagaggtcagggcacagaaataagggattggggcacagagataagaggtcggggcatggaaataagggatccgggtgcagagatgaggttggggtgtggaaataagggatcaggggtttcttgccccccagaaaagcagagaaggggtaggtagagacagagagagaaggggtcagggttcttgcccctccgccagaaaagtgggacttgcc

SEQ ID NO: 2298 - DNA, 1096 bp, Artificial sequence
  DNA replication origin
tgcgaagatacagtcgggccagggcctggcctgggcgcgcggctgcccgggggcgcgcagagagggcggaccgcgcgaagggggagtgtctgcccgccgccgccactgctgctgccaccgccgtcgccgccgccgccgccgccgccgctgctgctgccggtgctaaggagttcgctggagccctttcctcagacccggcccggtcttcgcgcccggactcctggcgccagcgctaggcgcactcaccgctctgacgggtgcagacgcgggagttgtcccagactgtggagtggcgggcacggccccagccccccttcccttccctgaccccttcttgccatcgccccagacatggggaacgcggcgaccgccaagaaaggcagcgaggtggagagcggtgagttgaaggccgggtctgggtatccgctgggcgggccggcgcggggcaccgagcgccctccgggtcgcagcttctgaggccgcgggcacgggccaggcctagcagcggccgccgggagtcgttctggggggccgggagaccagctgcctttctcctccattccgaccccccagctccgcgttgagagctgaacgcgaagggccggatgtggggatcctgggaagagcgttccctgggattccctttctcactctagcgaggaggacttgcacacgttctggaacacttccccaaatatggtccgaggaaagaagtccctagtgccatcccacccctgctttcccccctcgccgactctttgggagctacaggtagtgctgtgggtaaggttggctcttctccctccatcacttgggtccgacccaaccttatcacaaggcgggggctgctagtctggctctacgcaagtgaggctaatcctgagtggacaaccctgccttagagatccttcatctcttcagattaggaatggaaaacataatgagacccaacagcaactttatccattagagaaaaaagccaggcaggtttgccttttctctagacattcaaggatctgctaccaatgcctgtaaaacttaaaggtcattcggagttgaagtgcttccagaacacggttaatttcttctgagagcg

SEQ ID NO: 2299 - DNA, 1053 bp, Artificial sequence
  DNA replication origin
aaattgaaggatccgtaaacaggaaggccctcatcgagtggtcaaagctggtttcggcgcccacggcacctctccttagggctccgttctaccctaacttctcttcgtgccctgaagcccagacctagaggagcagaggaaggcgctgacctcgaaatctggatggtggcgaatcgggcggcagagctcaggctccgggcatgggcagtcggtcccggccgcgagccgcagcgccagcagcgccagcagcgccagcagcgctagacccgggacgccgctcggcgggctagagacgaggcgccagcgtcgaagctgcggccgggacatagcagcaggtctagcgggccggagtgggttcctaccgcctgggtgggcggggcctgctgcgcgtcggggcaggaaggggcggggagagtcgggaagggcggggaggggcgggaggggcggggctccggggcgggcgtgggaggtcgggcttcgagcgtccccgggcgctacaggtgggtgaagttaagtggctgctggagcgtctcgggggacagccagtgtctgcggcgccgagagggccgttcgtggactcaaatgggtatcacccctaccgtttatagtcctcccaatagtctgcatctcgttttgtcgtggctggtcgtgtactccttgtggagtctgaaggtacaaggggatccccaaaatggagaagtgggtgtctttggaagggcctactgagtaacatggttggagtggccaaaagactttgtttttcttttgctactcaaaagaaagctggaataccaaaaatttttacttacggatatcaggtcttagttaagatcgtggtttgaattcaagcatctaattttgcctactctcctgttaaaaatcaagtttaacaacctaaacacaaggacaaagagataacagcaacaaaatgttggaagctggagagcacaagtatgagtatgagaggtaaatcggaaaagggggagattagtcaaaggctgctcaaggactctgatcgctagatcctttttccagcttcatgtctctgggcag

SEQ ID NO: 2300 - DNA, 1614 bp, Artificial sequence
  DNA replication origin
tctccgggtttttttggaggtaaggaggagactaccgaggcccccacccgaccaatgcaggccacggttgttcatcgcctagcaactggcggagccaatgggaggcggcggggcctgcggcgccggcgcgcgggggcggggtgggaacctcggaaacctgcggaggccgggaggcggctgcaaggggcggggaaggcgggagcccgcagcggaggaggggccgcgggcgggaggcgctgcgaggcgctgctggccctcgggctgcgggagccgggctaggacgccgagcggtgactccccgccgctcccgggggccgtgacggtgagcagcagcgcctcgcgtcggggattgtgacgcgccccgccagggaggggcgggcgggggtgggcgccggcaaggggcgggcgcgcgcggaggtgagagccggcacctggctcagcgccccgttgttcggcgggaggctccgcgcggctgttggggccgttgcagggtgcgggcgagcgtcgacccgggccgctcctggaggaggaggtgggaggtaggtgctggccccgggaccgctctcgctggcgttcgcggagctgcgcctgcggagcgctctgacccggggagccccaaaccctctctgggatggagcaaggttggcgcccggcgttgggggacgagcagcgcggggacgtgggggaggaggggatggccgatttggggctgcagagtctcagcagcggccgtggggcatgcggggtttggcgatttgctagtgcagccgcaagaggcagtctttaaaacgagttattgggtggccgctgcagtggaagagaaccccgatagtggtctagtaaaaagtctaggggaagaatttacatcatccaagaggcaggcatgtgtgaaaatactttggtttataattttatcatgaaaatactttggtttagaattttatagtcaacgacagtaaactgaattgtgagctccctgcacattttttgagcctatgctgattgcccagttaggcatatcgcttgggcccaggacatagaatatactaatttgctgtctgcacgtataatgtaggaatttttagattattacccagtttcaggacccatagttgtaaatgccaaactgcgattactagcaacgctgataaagttcttgaatctgagagaattgagatttctcttttctggacgctgtaataggttgaggattagaaaagaaggtgatttagaagtgtaagggtggaggcttcttgaacttcctgggctttctaacaattcagattagagtcaaggtgtagagttagctgtgggtgatggatgtcatggaccttttcatggttcatgggggtttggcttactgtggggtagaagaaaattctggtgatcctacagtttgatcctgaactagaaaggttggtatgagttgactcatttaggagagtgaataaaatttgtaaagaattagaaatttggagaggaaagaaatgcctttaaagttcacgtcaagctattttgaaatttagaagttagaggtagatttatgaatttggatccagtcggcaaaacttgatccatcagatctcttatcctaaaactatcaacctacaggct

SEQ ID NO: 2301 - DNA, 1023 bp, Artificial sequence
  DNA replication origin
ctgccggtgtgcaaccgcgcctcgggcctgtcctgggggccgcaccacaggtcagtgccccacggcgcccttggcgtgccccacgcctccctgggggccccaccgccgcccccttttgggactgcttacttcctcggctcttctcgcgcgcgcctcggttccatcccctacggcccccaccccgcctccgcgtcgccgacccccttctccgggagcgcggggaggctggtccgctgaagcgtggaataagtcccctaggaccccaactggggaagctccggtccccggtaggaggcggcggggcggggcggggcggggcagccccttgggggcggggcgggagcgcctggccacgcgccgcatcctgcagggtgcacacagagccgcctttcagccgcccgagaactgcccgccgcactccacgactgcggcgcctgctctcgggccggggtctgcgcgcaccacgcggccggcagaaagggtaagagaagggaaccccgctttgcagggctccaacttcggcggacgcgttacggcgagggcgaaatgagtcggccgtgaacggtgtttcctgttccgaatcccgagagccctggaaagttttgaaggaggaggcatggcccggcagccttatcgttttccccaggcaaggattccggagagaggatcaggtgttttcaggttaaccgtcaggtgaggagtctgggcttcatctttcaggatgctggactggagaaatcttcctaaagtcgatggctttactttcgtagactagagcttgcttgctgccttgggaatgcttatattaactgcttgcagttagttaaataaggctaggctgtgccttccagaacaaacaggcctttccctcaggtgggagggttgtagtgtggctaaccccagttcctcggcctttatgaaaaggcgcacagttcagccggttggcgctgccagcgggcccctcctccgtggtcaaacctccagccaccccagcacagttgagccaaagttgtgagtacaaac

SEQ ID NO: 2302 - DNA, 1180 bp, Artificial sequence
  DNA replication origin
tggtgcgcgcagaccccggcccgagagcaggcgccgcagtcgtggagtgcggcgggcagttctcgggcggctgaaaggcggctctgtgtgcaccctgcaggatgcggcgcgtggccaggcgctcccgccccgcccccaaggggctgccccgccccgccccgccccgccgcctcctaccggggaccggagcttccccagttggggtcctaggggacttattccacgcttcagcggaccagcctccccgcgctcccggagaagggggtcggcgacgcggaggcggggtgggggccgtaggggatggaaccgaggcgcgcgcgagaagagccgaggaagtaagcagtcccaaaagggggcggcggtggggcccccagggaggcgtggggcacgccaagggcgccgtggggcactgacctgtggtgcggcccccaggacaggcccgaggcgcggttgcacaccggcaggtccagcacctccatgcctcgaggcatggcgcggccagggagcggcaggaggacacctagcgtgggacggctacacctgtctgggcgcaggcccgccgcccttgcactctccacccaagtgcccaacgctgcggtacggcccgctttggctcggggtgtctgccggagaagcgccttacagagggacccgggcggtgggccctgcggcaaagtggcccacgcaccctccacaccgctcccgggcggccgcacctggcactcccggccctctggggttcctgcctttttcgggggggtggtggtgagaccgggtctcactctgtcgcctgacctgcgatcactgctgactgcagtcttgaactcctggacccaagcgattctcctgcctccgcctcccaaagtgctaggattacaggtgtaagccgctgcgcctggccccttcttttcttcactctctcatgcattcatttcttgtttccacatgcattaatttgtccgttgctttggtcattcctgttttgatgcttagggaaacactcactgagagccaagccgaccgttgggtactgtggtctctgggatgacaaagacatggtcctttcccttgaggacttcacattaaactgacaagttcattcattctggcttttctctaaagtgcacgatcatgaaagtctgtgacaagggccatatttctgagatgttagaaagtgcga

SEQ ID NO: 2303 - DNA, 868 bp, Artificial sequence
  DNA replication origin
ggggaggccgggaggcagcgagctgtcggggacgccgcgggaaggccgggccgggcagtcggcgccatggagggcaggcgggctggagctgggcgcgagatgcagctgttccgcgccgcccccaagccgcccgcaggtcagtggaggagcgcgcctgccgggcctgcccggggctgggcgggtgggggtgctctgctcctcggtccccctccaggccgccgcccacctgtggccagggctcagagggctggaagccacccccgcccggagcccctgggctggaaggcttggatgccggccggggctccagatggccttgacgcggctcggctggcccctttcaaggcggactgtccccctgttagaggtgggggcggctggaagtgggggctcaggcccgggtcgctgcgctggctgaaagcagccgccagccgggctgcggccgtctgagctccacggcagtgcccggggatggcagcgaccgctctgggacatcgctgcaaccctgcagatctttctcgcacacactacccaacaaaagtgtcaacccttgttgtttgtttgtttgaaaaaaaaagaagactggagagactaaagttttgtgtctggtgaagtgggaaagcgcttctgaaaaaacgaggttgcataactttgtcgccaactgggaggcctttgctatttatacactcccgggctttctccaattttctacagcttactccaatcaagcctctgcccgccaggaacaggtaacctgtgtgtgtccgtttgctccttctaagagcatgcctgatagatacttcggtagcctctccggatggccccttcgtcgggtagcctctcctgatggggtccttcgcccaccctg

SEQ ID NO: 2304 - DNA, 939 bp, Artificial sequence
  DNA replication origin
aggggcttggcggatcacagcttccccgcgggagcccgggctccgggccagccgccttcccgcggcgccgcgtaccgccgagcctgcccccgggacggggagcggggaggcggcggacgccctcggcagcaggtgtccccgccccggtcgcctcagagggagccgcggggaggccagctgcggactcctcggatgcggccgtcctgcagcagaagcctcgagagcctccgggtgggtgccaagccgcctcccttccagcggtggccgagcgacagctggatcaggtgcggcgcgcaccgggactgggacgagcccccgccacgtggaggcaggatggacggctggagtggggaccgcgcccgggcggctgcacccaccggcctccagcctccaggctgcaaggaccacggctgctcctcgggaagccctttcagggatccagcggggtcctctgtgatacgcagtggcaaaggagaccgccaggaaggcccctccttcctcaggccgccggcagtgacagtcaagaagctgcagaagtggatgtacaaagggcgtctgctgtccctgggaatgaagggtcgtgcccgtgggacggctcccaaagtcacaggaacgcaggcagcctccccaaatgtgggcgctttgaaagtgcgtgaaaaccgtgtcctgtcggtgcctccagaccaaagaattacgctgacaggtaggatactttgcgatgaaaatgctagcaccgcgagccttactgtttaccgactgggcttctgtcttaagagccaagaaaaagttatgtttttgcgacaggtacgttaccgggcgaaagtaagtgtcatgtaagtggcagcttaaagtaatttcggggttacttaatgtaatgcatttactcgttttgcttttttttttctttttaatcagacaatggcatgaagaattgaggtt

SEQ ID NO: 2305 - DNA, 1123 bp, Artificial sequence
  DNA replication origin
gccctccggggacccgcgccccgggaccccacgcctcaggtgacggcgagggctgctgtaggctccgcccgtgtcccccggcgtgctcacgtgggagggtgtctgcggcaccccaggcgtctcccgcggctgccgaagaggccgccaccgcagctgcggctgccgcccggagccctagccccccggtgccgcggggaccccgccttccccggagcctggacagcgtcctcctcagagggtccgccatcccctctgccttagccgcgaggctcacccccgccagggggagaggtcggagccccgctggggagaaaaccgcgctcgcggaggcggaggcggaggcggcggcggctccccatgaccggcgctggccctcgccggctcctcacatacttggcataactctgccgcgggaaggcgtgggggagggcggtggcgccgcaacgcgcatgccccggagccccgggccgcgacggggcgcgcgggccgggggcggcagaggtgggttctcggggtgggcgagtggtgcaggtggaggcggagggcgcgggccggtaggttgagtagtaggtcggctgaagctgaccgacggaagcaggggtgggcgcacagagcgcgaagggtgcggggagagttgaggcaggggaaagaagaacgagcaggaacgtgagtttgggctggtggctgcaaagttttggttagggagcccgagaaagggaaagtgccctcctggctgtcaccccagcaccttcaccgccaccgctgcacgaggtgtgtcttaggcacagcaagtcctagcttgagagaaaacaaagattgttttgacggacaaagtacgagtgcaggtgtatctcggtgcatgtgttctagaaatgtatcaatcattttaatcgcccagagagctagctagctaaaagaaatttgcagcgattccttttctataagagttcttttatcaaaaacaaaacaaaacccacccaccgatgtctcttttaagtctgtttttccttctttatttcagttaatgcatgctaacaaaattattacatcagccaaaacttgtaaaatggagccacaaatattatgtccctcatcaccctacctacaagattatcatacaggt

SEQ ID NO: 2306 - DNA, 1229 bp, Artificial sequence
  DNA replication origin
ggctccttctgcaccacattcagcggctgccaagaggagccgacgggcgctcgcaggctcagcgcgcgctgcccgcggcaggacccggccgcctccgccgccgccgccgcccctaagcctcccgaagccatggccgggctcggccaccccgccgccttcggccgggccacccacgccgtggtgcgggcgctacccgagtcgctcggccagcacgcgctgagaagcgccaagggcgaggaggtggacgtcgcccgcgcggaacggcagcaccagctctacgtgggcgtgctgggcagcaagctggggctgcaggtggtggagctgccggccgacgagagccttccggactgcgtcttcgtggaggacgtggccgtggtgtgcgaggagacggccctcatcacccgacccggggcgccgagccggaggaaggaggtaactgccgactcgaggggcgcggccggggcgcgcgccaggccctcccccgccgccggccgccgtgttgcctggggagtcgcgccattggccctcgggctagtagttcacaacttcccgtcggggggcgagtgtgtgtgtgtgtgtgtgtgtcagagagtcagagagaagttcattgttcacacctcccggctgccggcagccttctggaggatccgattcaatgtggttgtacggtctcgggcaggtgggtgggcgggggattccgtctcacgggcatttttatttgtgaaaattaaacggcagcgacgacagtgcaactctgagtgtttcccagggagcgagggccgcgaggggtgccgctccggtagggcgggtggaggctgggcgtccctccagggggcagcgccagtcgtgacaccgaagcccccaagtcctgcctggcgctcggagcaggacaagctggatgaattaacggggtgtcggtgcccacagacctggggcttctcaagttagttttcagtggtggcgagtgagtcccaaagaacgggactagtaagtgaatgaatggaaggaaaagtgttttgttggtgagctgtgctaaatgtgtgcatgaatgggctaggtttgaaaagctgtactctgtgcggtgttgggtgtgtgtgctagcgagcgtgtttaattagagatggttgtttcacaaattccataatttttattctctatatttttaaactcacagcaattaagagagtttttctgttctcaagggttgtaactactttgaaatactgcag

SEQ ID NO: 2307 - DNA, 952 bp, Artificial sequence
  DNA replication origin
ggccaaactgcccgggtctaccccgccgcccgcaacgctccggggtcccgcgcggagggaggcctgggcgcgggccgccgcggcgcacttttcaggaacgcggcggccgcaagcctgccaggccgggtcgcaggacagccgccgccgccgccaccgccaccgccaccgccccccgaagctagatgacggagtcttgaaagactttcaccaaatatgggccggggctggaaacgtcctgcgccgcgcgccgccggaaacctcgattcttggcaaccgcggtgactgtgggcgcgcgggcggggtggccggcagggggcggcggtagcagccgggcaggcgcgtccggatgcctcgcgtcccgcaccctctcgcggtgcggaccctctccgctccctccgcaggggtcccggagccgaccgccctctccgcgcgtcggccacccagttcctgccgcagccaccaggatcctggcttcctggggctctcctggctgtcaagccaaggggatgggggcggggaaatggtagaggagagaaatgggatggtacgggggcgccaccttaaagccggtcttttgcagacaccattaagttctgttcattaaggtggctttgaagagtggagttgtgaggttgggtgtgcagccgaggatctatgaagacacacacacacacccctactacaggcactccggtcgtccagggcagtggtgctcagggtgtgatctccggaccagcagcatcaacatcacctggggacttgttagaaatgtaactaatcagaaactctggggtgggaacccagagaaccattcattaactagccctccaggcgactcggatgcacgctagtctgagagccttcctagggctaggaaactggagtcgccagatttaccgttattattctcggttgccgccagacagtgagcccttcattaggtaacctaaaa

SEQ ID NO: 2308 - DNA, 913 bp, Artificial sequence
  DNA replication origin
ctttgaagagtggagttgtgaggttgggtgtgcagccgaggatctatgaagacacacacacacacccctactacaggcactccggtcgtccagggcagtggtgctcagggtgtgatctccggaccagcagcatcaacatcacctggggacttgttagaaatgtaactaatcagaaactctggggtgggaacccagagaaccattcattaactagccctccaggcgactcggatgcacgctagtctgagagccttcctagggctaggaaactggagtcgccagatttaccgttattattctcggttgccgccagacagtgagcccttcattaggtaacctaaaattccctggcagcagcggttgagagacgtccccatctctcagcccgaagccaggagctgcagaagacaagtagccccttctccgtggattgcaatccaaggcagcccaaggaaacaaggcagtccgttatttcctcctggggcacccgtatggggagggtgaaggagaaactagcaaaagagccatacagaattagcacccgaagcaacacttacccataaacatttgcacatttcgcctcctgtccgtcaacttggactgatctgcggctcccagcggaggcggcgagaaggcgacgggaggctggggtttctggacggtctttgggcaggacttgaggagccgctgtttctcttgcctaatgtcgtcgattactagcaggcgcaacagcacatggtatatggagaggctgtgcacataggttactctagtgtctcccgctcccacacctcctggccctgttgctccagcttcccacccccatcccacaacacaccccctgctttaaatgggcagctgacggtaaggttctctaaatttctcttctggggcaaactcatcctcaagattc

SEQ ID NO: 2309 - DNA, 1395 bp, Artificial sequence
  DNA replication origin
ttcaggggacatgccatagctagaaatacagtttacagtcatcagtgtatatgtggaatttaaagatatagagttcatgagatcatctagggatgaatgcagataacgtccaaagactaagccttatggggggtactccagagtttaataaataggaagaggaagaggaagaagaaggaggaggaggaggagaaggggaggaggaggaggaggaagaataagaataagaaaaagaagaaggaggaggagaaggagaaggacgagggaggaggaggggggaggaggagggggaggagaagggaggaggagggaggagggaggaggagggaggagggaggaggagggaggaggagaagggaggaggagggaggaggaggagggaggaggaggagggaggaagaggaggggggaggaggagaagaagaaggaggaggagaagtagaaaaaggagaagaaagacgaagaaagaaaagagaagaaagaaggagaagaagaacaacaacaacaatacaataacaacaagattgagaaagaatgataagtgaagtaggatagtggtagggacaaaaaagtctgtgtagagtaggtccaagagagaacaaaaggagaggaggtctcctagctaacagaaacaacttaggagtttcactctaaaagggaatagcataaggagcagaaaggagacatgtaggctcaaggaaagctttttttaagatgacaaaacttaaagtatgtttactgtaatggaaattatcctgggtatatagaaattattctgaagagaagtaaaagttaaaataatgcaggaaaaacagagcgtcagtgatagcctggtgaaagaatggtggatttgtctgtttaatgagagaaggcagagcattttagaacagagttaggttgaggtagtagacttggttgtgagaacttataaaaattaaaaacaagatcactagctaagaggaaagaaagagaaggagttatgaaataatcatctataaaaatgggaatgtgaattgactaagacaattattggacacattaaataaaagaccaaacaatgaaagaagttatgaatttaaagtgaagtttgtcaacatgaattttttctcttagtcacattcggctgttaggcaggtgcagaatagatagaatttagatttaagaattgccaggtaagcttataagacagagagagaaaggggaagtagggtcatttatgtatgcaatggagtgactatgttagacccttgtatttaggctgaggaggaaagcgaggccataagggggatgaaccaatgaaaatgtggtaggatccacatattagcagcttcaaataaataaatgttaaagtgaatcaaataaatgttaaagttgtggaggcctatgaagagtggg

SEQ ID NO: 2310 - DNA, 922 bp, Artificial sequence
  DNA replication origin
attgaggggggcataatgaatttctatattcttgcatttaaaaaattaccaagcttgagagtcacatcaatcattgtcattcaccaatatgatcactttaacctttataatgtgtgtgtaatgtgggatccctttcagcatgtggaagggtcattagctctggaaggcacacaggctagacaagaaaaatttggagcaatgattctcagtgatatgcagcattcattcaacagatatgccaggtaggtgctaagaacacaactatgaacaacacaatagattcctggcctcttggagtttccagtcttattaataaggaagataaaatcagaacgtttgttttctgtttgtttgtttgtttgtttgtttgtttttgtttttgcaaaaatcagaaggtggatttcttagtataaggccatgggggcatagagacttgtatcaaaagaagaaatttgctacaaaagttggagaaggtattcaaattgttaaggtagtggtgtgtgcgtgtgagagagagagagactgtgtgactgtagtgtgtgtggtgtgctcttgctgtgaaccagtaatacttgtagacaggaaaaggcagaaaggtgaattacaggagaaaagtcagtagaaggtcgtaagggggacagactgaaaggaaggagtaaagggaggaaaggtagaaatgaggacagttaaagtcatttaataataccacgtaggccactggcctaactgcaaagaaggcaagaaggtcgcagggtaatgaaggcctcctctaagtgtgatttcagaagatgtgggtgaaaagggtagagaaaaagattggggatgagagagaagcaagagggaaacatcaaattggggactgctgagatggggaatggagcatgaacatggtatggaaggaaggatactagctgcctataag

SEQ ID NO: 2311 - DNA, 1309 bp, Artificial sequence
  DNA replication origin
acggggcggctggccgggcagaggggctcctcacttcccagtaggggcggccgggcagaggcgcccctcacctcccagacggggcggctggccgggcggagggctgacccccccacctccctcccggacggggcggctggccaggcggggggctgacccccccacctccctcccggacggggcggctggccgggtgggggggctgacccccccatctccctcccggatagggtggctggccgggctgaggggctcctcacttcctagtaggggcggccgggcagaggcgcccctcacctcctggacggggcggctggccgggcggggggctgacccccccacctccctcccggacggcacggctggccgggcgggggggctgaccccccacctccctcccggatggggcggctggccgggccgggggctgacccccccccacctccctcccggacggggtggctgccgggcggagacgctcctcacttcccagatggggtggctgccgggcggagaggctcctcacttctcagacggggcagctgccgggcggaggggctcctcacttctcagacggggtggttgccaggcagagggtctcctcacttctcagacggggcggccgggcagagacgctcctcacctcccagacggggtctcggccaggcagaggcgctcctcacatcccagatggggcggcggggcagaggcgctccccacatctcagacgatgggcggccgggcagagacgctcttcacttcctagatgtgatggcggctgggaagaggcgcgcctcacttcctagatgggatggcggccgggcagagacgctcctcactttccagactgggcagccaggcagaggggctcctcacatcccagacgatgggcggccaggcagagacactcctcacttcccagacggggtggcggccgggcagaggctgcaatctcggcactttgggaggccaaggcaggcggctgggaggtgtaagttgtagtgagccgagatcacgccactgcactccagcctgggcaccattgagcactgagtgaacgagactccgtctgcaatcccggcacctcgggaggccgaggttggcggatcactcgcggttaggggctggagaccggcccggccaacacagcgaaaccccgtctccaccaaaaccagtcaggcgtggcggcgcgtgcctgcaatcgcaggcattcggcagactgaggcaggagaatcaggcagggaggttgcagtgagccgagatggcagcagtacagtccagcttcggctccgcatgagagggagaccgt

SEQ ID NO: 2312 - DNA, 972 bp, Artificial sequence
  DNA replication origin
ccccgtccgggagggaggtgggggggtcagccctccgcccggccagccgccccgtctgggaggtgaggggcgcctctgcccggccgcccctactgggaagtgaggagcccctctgcccggccagccgccccgtccgggagggaggtgggggggtcggccccccgcccggccagccgccccatccgggagggaggtgggggggtcagccccccgcccggccagccgccccgtccgggagggaggtggggggaggtcagcccccctgcccggccagccgccccgtccgggaggtgaggggcgcctctgcccggccgcccctactgggaagtgaggagcccctctgcccggccagccgccccgtcctggagggaggtggggggggtcagcccccctgcccggccagccgccccgtccgggaggtgaggggcgcctctgcccggccgcccctactgggaagtgaggagcccctctgcccggccaccaccccgtctgggaggtgtgcccaacagctcattgagaacgggccaggatgacaatggcggctttgtggaatagaaaggcgggaaaggtggggaaaagattgagaaatcggatggttgccgtgtctgtgtagaaagaagtagacatgggagacttttcattttgttctgcactaagaaaaattcctctgccttgggatcctgttgatctgtgaccttacccccaaccctgtgctctctgaaacatgtgctgtgtccactcagggttaaatggattaagggcggtgcaagatgtgctttgttaaacagatgcttgaaggcagcatgctcgttaagagtcatcaccaatccctaatctcaagtaatcagggacacaaacactgcggaaggccgcagggtcctctgcctaggaaaaccagagacctttgttcacttgtttatctgctgaccttccctccactattgtcccatgaccctgccaaatccccctctg

SEQ ID NO: 2313 - DNA, 903 bp, Artificial sequence
  DNA replication origin
gtattagcatgtgacggagctagggtccagatatggtctcggtcttctggggtgagggtggaagagaggataacatagaggtcatgccaggttagttcataagactgggtgaggtactgaaactctctaatgtaagaggtagggtcttctggaaatgaactgagtcttttgttaatttgagagagatcagtgagggagaagggaacatgaactctaaaaacaccttcagttcctgctgcttcccaaagtgggcactctagcacctgcactgaagtaagggtggggcatgggccaaagatggcacccaagtgagtatgggcaggagagaaggaagaagccggaagtggttcttgctgagtgtttgaaggggaaaggggggatgagttaacaggcagtggaggatagacaggggcataaggtgttgggatgggtttacaagcctcaggagagggtggtgggggaggagaatgggtacaggcaattctagaattgtcctgaggaggggatggtgcagaagaaaaagtgggtactgctgactgagaagatggccgctaggaagagggcagctgggaagatggcggttgagaatataatgaggaggcttggggggttaaagaagacggttgagaggaagaggtaggggctgggaggggtagacagcagtcagctggattgaatgaggaaaaagaggtagggtcaggaagagaaaggtgatcagggcagcaagaatggaggagaaggatttgaacaggtgagcaagaattgcagaggtcgagttgtgatctgagtgcaaaaaagcctggacataaggaatttctccccatttctccagtcgtcagcaataattgcttaaatcagttaaaactgtaaagtcgaatgtttcatttgtgggccatttggacc

SEQ ID NO: 2314 - DNA, 1252 bp, Artificial sequence
  DNA replication origin
aaaggctcatggagagggcctttagcagcttggtataacagtttggcaagtagagtgaaggagggaacccagagcctaaaatatcccgctagtcctagaaaagagaaaatttcttgctgagtttgcaggagcgggaaggactggaggagggatatgcagtccgttgtgagccttcgggtttgcggggtaagagctaggcctagataggtgactgagggggtgcatgtgtgctttcttaggggagacctgatacccctgttctgccaagaagtttaaaagagagatggtatgggcattgcagtctctttgagaggggctacataggagcagattattaacatattgaaggagagtggatggttttagggataaggtaaagaggtctcgagcaagggcctttccaaaaaggtgggggctgtctctaaaaccttgaggtagtacgcaccaggtgagcttaagtgaaaggtgggtgtcagggtttttccacataaaggcaaagaggttttgggaatcagggtgtaaaggaattgtggggaaaaaaaggatcctttaggtttagaacagaaaaatgggtggtattggagggaactgtggagagtaaagtatacgggttaggaactactggacatactgggagtacagcttggttaatgagcctgagatcctggactaattgataagttccatctggctttttaacaggtagaattggtgtgtgaaagggaaatttgttgggtggagtaggtgactggcgaggaggccagaaatgataggctttaggcctatgagagttgcttgggggatgtaatactgcttctgtgataggaactgggtggtctctttaaaggtaatgcggaggggggtgtggtgttttgcaactgagggtctggaagtatcctaaacagcggggttaactacggatgggggataaggaaaagttgcatgttttaaggtgggaggttggaggagcagaagaaagaagccccggaggggtctgggttgatgcgttgggtactgtggggaatgtggaaatggatagtgtggagttttgaaaggatgtctctgcctaggagcggagttgggcatgagggcaggactcagaaagagtgagtgaaggaaaaggtgtgtggggagcagaaaagtggaggggtggcttggggtttggagactcgtccatcaattcgcacaacagagacttggcaggactgggtgggttctgaaaaattaggtaaagcagagtaggttgtcccat

SEQ ID NO: 2315 - DNA, 882 bp, Artificial sequence
  DNA replication origin
gtgaggagcccctccgcccggcagccaccccgtctgggaagtgaggagcgtctccgcccagcagccgccctgtccgggagggaggtgggggtcagcccccgccaggccagccgccccatccgggagggagatgggggggtcagccccccgccaggccagccgccccgtctgggagggaggttggggggtcagccccctgcccggccagccgccccgtccgggagggaggtggggggtcagccccccgcccggccagccgccccgtccgggaggtgagggacgcctctgcccggccgcccctactgggaagtgaggagcccctctgcccggccagccgccccgtccgggagggaggtggggggggtcggccccctgcccggccagccgtcccgtccgggaggtgaggggcgcctctgcccggccgcccctactgggaagtgaggagcccctctgcccggccaccaccccatctgggaggtatgcccaacagctcattgagaacgggccatgatgacaatggtggttttgtggaatagaaagcggggaaaggtggggaaaagattgagaaatcggatggttgccgtgtctgtgtggaaagaagtagacatgggagacttttcattttgttctgtactaagaaaaattcttctgccttgggatcctgttgatctgtgaccttaccccacaaccttgtgctctctgaaacatgtgctgtgtccactcagggttaaatggattaagggcggtgcaagatgtgctttgttaaacagatgcttgaaggcggcatgctccttaagagtcatcaccactccctaatctcaagtacccagggacacaaacactgcggaaggcctcagggtcctctgcctaggaaaaccagag

SEQ ID NO: 2316 - DNA, 1653 bp, Artificial sequence
  DNA replication origin
caatgagctgttgggcatacctcccagatggggtggtggccgggcagaggggctcctcacttcccagtaggggcggccgggcagaggcgcccctcacctcccggacgggacggctggccgggcagggggccgaccccccccacctccctcccggacggggcggctggccgggcagaggggctcctcacttcccagtaggggcggccgggcagaggcgtccctcacctcccggacggggcggctggccgggcggggggctgaccccccacctccctcccggacggggcggctggccgggcagggggctgaccccccaacctccctcccagacggggcggctggcctggcggggggctgacccccccatctccctcccggatggggcggctggcctggcgggggctgacccccacctccctcccggacagggcggctgctgggcggagacgctcctcacttcccagacggggtggctgccgggcggaggggctcctcacttctcagacggggcggctgccgggcggaggggctcctcacttctcagacggggcggttgccaggcggagggtctcctcccttctcagatggggcggctgggcagagacgctcctcacctcccagacggggtcgcggccgggcagaggcgctcctcacatcccacacggggcggcggggcaaaggtgctccccacatctcagacgatgggcggccgggcagagacactcctcacttcctagatgggatggcggccgggaagaggcgctcctcacttcctagatgggatggcggccgggcagagacgctcctcactttccagactgggcagccaggcagaggggctcctcacatcccagacgatgggcggccaggcggagacgctcctcacttcctagacggggtggcggctgggcagaggctgcactctgggcactttgggaggccaaggcaggcggctgggaggtggaggttgtagcgagccgagatcacgccactgcactccagcctgggcaccattgagcactgagtgaaccagacaccgtctgcaatcccggcacctctggaggccgaggctggcggatcactcgcggttaggagctggagaccagcccggccaacacagcgaaaccccgtctccaccaaaaaaatacgaaaaccagtcaggcgtggcggcacgcgcctgcaatcgcaggcactcggcaggctgaggcaggaaaatcaggcagggaggttgcagtgagccgagatggcagcagtacagtccagcttcggctcggcatcagagggagaccgtggaaagagagggagagggagaccgtggggagagggagaccgtggggagggggagagggagaccgtggggaaagggagagggagagggagacggagacagagacggagacggagaccgtggggagagcaattttttgtatttttagtagagatggggtttcaccatattagccaggatggtctcgatctcctgaccttgtgatctgcccgcctcggcctcccaaagtgctgggattacaggggtgagccatcacacccgagttgacttttaaagaatttatgctcacgatgattccacacacacagagctatgtttaaatatatgtatcttttttgagtcagggtctctctctgctgctcagg

SEQ ID NO: 2317 - DNA, 1895 bp, Artificial sequence
  DNA replication origin
ggaagtgacaggtattaaataacggcatatgaaagcttaaaagtcatcaaatacaatcactgggtgctttcgattacccaaatcaggcacttgcctaaactccccacttctttacttctgcggtctcctttcttttattcacgacacttcgtcaagcagccaagaagccacgccttcgccagttttagccccgccttcttctccaagtttacccaattgaatgtcgtcttgattgagctctgtggcagaggaaaccaaccgtaaaccgaaccaagagcgaagcgcaggggctcttccgtccaataagcggacccgaacggggggaggggcggggcttctggttgccgagcagcgtacgcggatgcgtgcgcgtggtggcggagggggatgggcgggggcggggatgagggcggcgcagccgcagcgccggtggaggggcgcgcggccgcgagcaaaggagggagggaaggaaggaagagagggaggcgggcaagcaggcgggcgcgggggtcggggactgaggcagtagagggaggcgagagcccggcagccgcttcgcgctgtttgctgcgcgggcttttggagggggcggccgtttagtcggctgaggagaagcggacaccagcggcgttggtgatagcgcctgggggagggggactggagaggcgagaaggggggtcgctgcggtggttctctcgctgtcgctctctctttgcctcgctcccggctcggcgggctcctcccggcgtctctctcgcctccggggtcccgctccccgccccccgcggtatgtcttgatcccgagcagcgggtttcatggggctcctcaggattatgatgccgcccaagttgcagctgctggcggtggtggccttcgcggtggcgatgctcttcttggaaaaccagatccagaaactggaggagtcccgctcgaagctaggtgaggaactgaactgccccgggctgagtgctgtggaaggggccgaggaggcgctgccgccggagcaagtgggcgttcatctaacctggggtctggctcgggggctgaaagcggtttcaaagagaaccgggaacaaggggcagcgagagcacgagctccaagaatgggttgaattaagcttgagcggcgtgctgggctcgcgaggtcacggggcagaggttgcaaggttgggcttccctagccaaagggtagccccgaagtaggcattccgcggagagagagcgagagagaagaccgaactcagtggggagcgtgtgttgctggtctccggagacagaagcgcttagcatcgcgtgttctcttggaagtcgtacaggaagccctggcaatgtcagatgaggggtattctaatttgagctatgggcatctggatacgaattcttttgggggctcatgaagggataggtgcgcagaaatgggaggagatgctgggatgacggagagcaacatgtgaacactgtagcgagttgcactcttgtgctccgggcagcaaaggaccttgtaattgccagctgagggaggctggccgggtagtgcgggaacgcgagtgcaaagcttcatcggagtacggaaatgagggtccggagatttaaattcttctttagtggcgctaaactgatgaattggggcttgagaatagggatgcctatgtatgttgcttcacggcagtgttgatgtgaatttcgaagaggagggaacgctgaaggggaattatgtagtgaagtttgtgtttgttaaaggaaaagtaggattatgcggaaagctaaccatatggttaaataccttaaagggttaacaggtgctttaatggatgagggggtctaaagtacaaaaagttggtgtgaagttgtgaaagacaggccagaaaaaagcacagataataggtactttcgga

SEQ ID NO: 2318 - DNA, 872 bp, Artificial sequence
  DNA replication origin
tctgagatgtggggaatgcctctgccccgccaccccgtgtgggatgtgaggagcgcctctgcccggccgcgaccccgtctgggaggtgaggagcgtctctgcccggccgccctgtctgagaagtgaggagcccctccgcccggcagccgacccatttgggaagtgaggagcgtctccgcccagcagccgccccgtccgggaggtggggggcagcccccgccaggccagccgccccgcccggccagccaccccgtccgggcgggaggtggggggcagcccccgcccggccagccgccccgtccagggggggaggtgggggccagcccccacccggccagctgccccgtccgggaggtgggggggggggcgcctctgcctggccgccccttctgggaagtgagaagcccctctgcccggctgtcacccccgtctgggaggtgtacccaacagctcactgagaacgggccatgatgacgatggcggttttgttgaatagaaaagggggaaacgtggggaaaagatagagaaatcagattattgctgtgtctgtgtagaaagaagtagacataggagactccattttgttctgtactaagaaaaattctgccttgggatgctgttgatctatgaccttacccacaacccggtgctctctgaaacatgtgctgtgtccactcagggttaaatggattaagggcagtgcaagatgtgctttgttaaacagatgcttgaaggcggcatgctccttaggagtcatcaccactccctaatctcaagtacccacggacacaaacactgcggtaggccgcaggatcctctgcctaggaaaaccagagacctttgttcacttgtttatctgctgaccttccctc

SEQ ID NO: 2319 - DNA, 1172 bp, Artificial sequence
  DNA replication origin
ctgatttctctatcttttccccacgtttcccccttttctattcaacaaaaccgccatcgtcatcatggcccgttctcagtgagctgttgggtacacctcccagacgggggtgacagccgggcagaggggcttctcacttcccagaaggggcggccaggcagaggcgcccccccccccacctcccggacggggcagctggccgggtgggggctggcccccacctccccccctggacggggcggctggccgggcgggggctgccccccacctcccgcccggacggggtggctggccgggcggggcggctggcctggcgggggctgccccccacctcccggacggggcggctgctgggcggagacgctcctcacttcccaaatgggtcggctgccgggcggaggggctcctcacttctcagacagggcggccgggcagagacgctcctcacctcccagacggggtcgcggccgggcagaggcgctcctcacatcccacacggggtggcggggcagaggcattccccacatctcagacgatgggcagccgggcagagacgctcctcacttcctagacgggatggcggccgggaagaggcgctcctcacttcccagacgatgggcggccaggcaaagacactcctcacttcccagacggggtggcggccaggcagaggctgcaatctcggcactttgggaggccaaggcaggcggctgggaggtggaggttgtagctagccgagatcacgccaccgcactccagcctgggcaacattgagcactgaatgaacgagactctgtctgcaatcccggcacctcgggaggccgaggctggcagatcactcacggttaggagctggagaccagcccggccaacacagcgaaaccccgtctccaccaaaaaaatacgaaaaccagtcaggcgtggcggcacgcgcctgcaatcgcaggcactgggcaggctgaggcaggagaatcaggcagggaggttgcagtgagccgagatggcagcagtacagtccagcttcggctcggcatcagagggagaccttggaaagagagggagaccgtggggagagggagagggagagctgtgtttattaaatcttaaagctaaatatctttaagaatattctttagtaattgcttcctttctacacacagacacacatgtat

SEQ ID NO: 2320 - DNA, 943 bp, Artificial sequence
  DNA replication origin
ccggcgcgctggagcctgcgccgctgccggggctgttgctgcccggctcggaggcggcggcggcggcggcgctggcctctagccggctcgctcgctccctccgcggctcttacacatgtgttactgacagagcaaaatcccaactactccccggctctgcctccgacgtcagcgaccctcagccactgggcggccggattgttcaggcggaataataaaacctgccaatccggggaaggacaaagggatgactgaaacgagactcggggggcgggagagagagcgaggcggcagagctggccgacagaggagaagggaagggcccgaatcaggtggggtgaagtgacccgggcgcctggggccggggacccgcttgggctgcccttcgcgacccgggatccggagtcgagacgcagggcggggcctcacctgccttctcagcgcacggggaccctgaggacccgcgcccgctcgcccctcggggactgccatcccctctatctgagaggagacccttaggaaacttaccatctttctcagaaatgggtctcttcctgtttgggaagataagtcctgcatcttagggcagtggacttctatcccctcacgcacaagcacacagaagaggatttttgttgttgtttctttaattcacgatattggagatttatgaaccgtagtggaagcttagttaacaaggtagaaacataaaggaaataatagttgctagctaaatactgcctacttagcctccctcatactcccatttttccgagtttgaaagtgcctagcaggcatttcctggatccttgtcaattgctggtgatgtagggagcacagtccttattttcaaagttgacgaaaacttaagggagaaagcctttcccgactaccctcctcactgtggaggatgagaggcggaaattctcacagcccccaaaag

SEQ ID NO: 2321 - DNA, 1360 bp, Artificial sequence
  DNA replication origin
acgtttctgtgcgctggagagttaattatctaaccagggggactgtccggacagtgtttgatttaaaaggctcgaggctttaggtgctcaattaagtagctatcggtctcagactggactataatgggctcttttctctttaactcaagcaacggggagatataccccaggtcaggctaattaaagccaggggagtctttaattgtgatgacagaatcggtttcagtttcctttctttgggtcctcagtccaagaaggtcgttaatatttcagcatttgggcaatgcaatcaatcacaaacatcaagaggttccttatacagggaaaacggaaaagatgggaagaaatcccaccaaaccactgcactttaaaggtgctttgctcctgtttgaacaacaccatgtagttttattcctgtttgcccgctgagctccagctctccttgctggcattaagagatggagggcaaatcgtatttttagtttactatcaatgcttagcatctttcagtaacttcaatgaccaataggtgggcttattttcaactgcattattacttcaagcaaaatacatgcaatatgaaacgctacctggctgtgttttctaaactgcttttgggcaaggagaggtacgtttctgagagtgtggctgaaaggtatatacatttgtacctgcaagtaaatatcagcaacctatctgaggagaaaaaagcacatccacagctactgatccagaagcaattggttttccagcaggttcctatatttaatctaaattctgcaccagctatattaaatgtaacaaagaaatgcaacccagaaattatgcctggagccaagtccattaaaggtacttcggaaaaactagagaccaggcaccttaaaagcaccagaagctattgatacttaagaggggggctgtgcataataggaaaaaaaaaatcagccaaattacgcttggttaattcagagtaacagatctgcccccaagtgaattggaggccttgaattaattctgttatgacaaatcaagataaacgttccccctaaattgcatgcgatttaattaatttttgagatcctgttttttttttttttctagctaatagttcacatgctcctgtgctgtcattgtgcttgagtgggcagacttcaaagtgatattaaataaccaactattagatttacctagcacgtcctattggaaaagtgccatttaattacctagcctgttcaattaaagggacagcattctctgaatatagcagcttgctgttgattaccagggaaatgaactcgctgtctggcggcgcctccattcctaacgccaccccctacccaaacacaccctccaccaccaa

SEQ ID NO: 2322 - DNA, 1736 bp, Artificial sequence
  DNA replication origin
acccgggtctaggggattcccccctggaggccagtcacctcggcgccttcccctcaaactgctaatctagggccgactccctgcagccacccccgcaggcggccccgcagcgactccggcaagaggagcccgacctccgttccctcgccccgtacgccgggacggccctagtcagtccgcacggaagcgccgcgccgcgccgcgcgcccgccccactcacctatccggtgcgggaacctcgcctccctaggctcgagtcccgactgggcttgagggcccggctgggcgggattcggacgcggggggcggagccgggacagggattgactctggggtttgcactcagtgcgcgctttggcggaggggtaggccaggatctctaggctggaagagactggatgaggggtgtttttttgggaggggaggggcgggatttgggcagttccgggcttgcgggaacaagggggcggggcgggggcgagcccggatgtggccagggattggctgtggagtgtgactcacggcgcgcgatgacggtggggtccgccgcgatcgcggaatggatggaaatggaggagggaaggggtgggggccacgggttgggcttgagtgaggaaggggacaagatggaggatggcctggacgtggccggggattggctatgggtgtggactcagggaactccattggctgtggagtcggccgggatcacatgctggttcaggcatgcgtaggtgcgggctcgagttagtggggcggggacttggatatgggtatggaatttggccccagggctcgaatcggatgtatgcgactgatcgggttggggcaggttataggacgaggactggtttgcaaggatgggcaagctgtggggccgctgggcttgtacaagtggagggatcgggttggaataactttggaaggtgcctgagagagggcagggctagagagagtgtgaaaaggggttcctagatgcatttgtcatttgagatgggggtgtggggttaaaaagcgtaaaggaacttcactttcctggatatgagtttgatcagcaaactaagaatgaaagggacatgtgagactgaagaaggaagaaaaatgacactaaaaagcgaaaaagaaaattctctaggaaaacaaggaaaccactggtgacttctttggggagggcagtgtcagcgaaaggagagtttttgttaaaaattgaattttatgtttggatatttttcctcttctattttaagaggatgagaggctagagggagtgggagaggcgttagcattgttattcagttctaaaggagggaacaaaagtatacattgattaaaggaatatactcttcaactaggtacaggaagtttcagaagacggttaggtgcatggagaaattattgtgtacaggtaggggcgagcctggatgtggcctgggattggctgtggagtgtgactcagcgcgcactggctgtggggtcccccgcgattggtgatcatactacatctcacctttaggagggaggaaaagtgcagggctaaagctgtaatcggcaaagaagcaacaatcatattagctgggggaggaggaaaggtgtagggctaaagctgtaatcggcaaagaagcaacaatcatattagctgggggaggaggatagtttggtatttttgtagtttgcacagtgacctttttaaaaatctggttaggcaaaaatagtgtgatcttgtttgttgtctcact

SEQ ID NO: 2323 - DNA, 1151 bp, Artificial sequence
  DNA replication origin
aattcacagcaggagcagctaccgaagcgactgcagcctcttcctcctcttcctcctcctcctcctcctccgccactgctaccgccaccaccgtggtagccgcctccgcgccctgcctccgccccgtcccctcctcctccacccgcgaacttagtcagcggttcgcgccgccgagcgcccattggccagcggaacgcgtcgcgtcacaatggagccggtcggaggcggcgagccggacagcgccggggcttcccgctgagcccgcagcctccggcagccgggaaagtgcgggcgcggggccgcagcctgcccgcccggagcggcccaggagcacgccgcggggagcgcgggcgtccggggctggagtcgcgcaggtaggtcggagcgtgacaccccggttccaggagggcgagccgcgccgaccgaggtggtggaggaggaggaccggatacggggacgcagcaggtggggctggccgaacaggtgcggttacctgttcacgcctcacctgcgagccaggctgcgggccggtagcgcggctgcagagacgagtggccgcttcgttgtgctccctgccttcgggagagacggagtcccacgctgagaggacctctcctgtgtgctggggtcatttggagcaagaggtgtgggcggtcgcgccgagacggtcacctctctttcccccgggagtctcggcgttgcacctgagcgtgagtcctcggggcggggcgggaaaggggttccgctttcccaggctggcgtctcgctccagatgagcgcaactcccctgagggtgcccccatttggtcgctctgttttgccccctgcgctggcgctgttgggaactattttatgctcttgggaactattttatgctgttggatacgcgttggttgcctataatttggtggtggtgttgggcgttgatttgtttgagaaagaaagggcaagcgttaccaatttaagaagaagactcaagagtttcccctgagcttagttgagcaggtgctgagaggtcagaagggaggaggctcagtattggctcattaatctgtgtgctcaactgacttcctaaagtccatagattgcctttagttagatgacatttgtggaaaactttttttttctttgtggtcaaaaagacacccctc

SEQ ID NO: 2324 - DNA, 1210 bp, Artificial sequence
  DNA replication origin
ctccatccctccgcggatcccccgcccttacctccgggcgcgagagtgtcgactggagaaggtgctagggagcggcgagctgcctgggggtcgggctcagcggctgccagggacggcggcgtcgcccgcggggtcgctgctcatggcttgtcgcgcccgagcactgcggccgcggccacggcggcgccttcctcctacttctcttcgcgggcttccagccgggacgcagctaacgccccagccccgcaagccctcctcccctccgcctccccggccgcggacggagccgcctccagcgccgccccgcacgcagcccggctagcggcagccagcgccgcccagcgcccggccccggggtcgccaccgcccgccgagtcgactccgcggtgccagccccgctgtgacgcaggccgcgccgcccgggaacttcctcccctgcagagaccacctcgctcccgggactcgccagcgagggatgccgccggccgccgggggccttctccaggaccaggagagaaatcctctctccgcttcacgacgcggccactcccacccctgagacgcccacctggcggactctgagggaggattcggctgcgtctaataccacctccacccctcatccctcacaatgcgcggaaaaccacaggcggctgtgcgcgcagcgtcggctcagccaccgcagctcctcccctgggtaagttagaggggagcagccaccactaaaaatagcccttctgggaactcctccgaaggccagggtcaggatgaagataacccctccacaggagaagcgaaggcctcctaagagaagggtggggaggggacggtgggatagaatgaggaagatggagaaggagaaaagcaaaacccaatatccttggatcatgaagcccttgagccccttgacaaccaagtctcctttcaggccggaatccccaactgcaccgcccctgcaatacgggctaaggggcagattccagggagactcagttggaatgccccgcctacagctcccgcataaaggagttgacggtgcacagcaaaaccacctgttgtttaacgagtatggagggaggggttctctctcattgattgatctgaaccgtgcttttcttctccccattttcccacccaatttcaggatgaaaaagcactctgacgtcttgaaagctggcagctctctgtttggaaaatctctgcccagtga

SEQ ID NO: 2325 - DNA, 907 bp, Artificial sequence
  DNA replication origin
agagcgtctctgcctggccgcccatcgtctgagatgtggggagcgcctctgccccgccgccccgtctgggatgtgaggagcacctctgcccggccgcgaccccgtctgggaggtgaggagcatctgcccggccaccccgtctgagaagtgaggagcctctccgcccggcagccaccccgtctgagaagtgaggagcccctccgcccggcagccgccccctctgagaagtgaggagcccctccccccggcagccgccccgtctgagaagtgaggagcccctccgcccggcagccgccccgtctgagaagtgagaagcccctccgcccggcagccgccccgtctgggaagtgaggagcgtctccgcctggcagccaccccgtccgggagggaggtgggggggtcagccccccgcccggccagccgccccgtccgggaggtgaggggcgcctctgcccggccgcccctactgggaagtgaggagcccctctgcccggccaccaccccgtctgggaggtgtgcccaacagctcattgagaacgggccatgatgacaatggcggttttgtggaatagaaaggcgggaaaggtggggaaaagattgagaaatcggatggttgccgcgtctgtgtagaaagaagtagacatgggagacttttcattttgttctatactaagaaaaattcttctgccttgggatcctgttgatctgtgaccttacccccaaccctgtgctctctgaaacatgtgctgtgtccactcagggttaaatggattaagggcggtgcaagatgtgctttgttaaacagatgcttgaaggcagcatgctccttaagagtcatcaccactccctaatctcaagtacccagggacacaaacactgcggaaggccgcagggtcctctgcctagg

SEQ ID NO: 2326 - DNA, 1028 bp, Artificial sequence
  DNA replication origin
ccggctcggcgcggctccacctgcgcgtcgccttccctcgcagcccccggcccctgccgggagaggtgcgcaccaaccttggggtgcagctcggccgccaagccacggcttatgctgaggccggaggtggcggcatcacccgcggcgggcggcggctgcaccgggacgcgccggggcggcgaaggcgcgctgcaccctggaccctgctcccgcggccccgcccgcggctgccacctcgaagcgcggcggaggagccggggcaccacgggcggcggcagcggcagcggcagcagcggcgacgggagcagcagcacatgactctgtaacgaggggaattagacaaagcgtaacatggactccgggcccgtgcaggcgctgcagctctgggaccaaccgcagccggcgagtgccgcgactggcccggccgcagccaatggggcgggcccgggcctccatgtgattgcgagcgctttctccggtggccctgcagcgcctgaccggacggggtctgtgtggcgagggaggggacccggggttggagactggcggcgagcgactgctagatgcggagcaggtgcttgggaggggaagaacggcagcctacataaccatcgccgtaatgctctcgcaagcgtccacctgggcagggctcggtgccgggcaggcgcagctgccagttagctgcgaggcatggtcaggagccttcacccgtcctgggcgaaggaggctgtcccgtcgactaaaactctgatattaagacttggcgctgggggtggggagttgaattacgttaaaaagtcacttaagtgccttccaactctaaggagaagtacttatctgagctttggggcacacacaactactacttggcatggagagtttctcagcttcatgtgttccgtctgttattgaagctgtattggaaagtcggttcttgtttttatctgagcccgccgttttcatcccattcttttcgtcaaaaatatgttacatctgaaagaggcagatgaaaagattattctatgcta

SEQ ID NO: 2327 - DNA, 1010 bp, Artificial sequence
  DNA replication origin
ggggacgtccgggggtcgggaggaggtggcggcgagcggagtgggctcccgtttgctgccgccagggcctgggagattgttccgctttctgcagtctgagcgtcggccgcttcggccccgggcggccggccctgcgggaggggagtgcggcttcctggctcctgaacccctcgcgcgcgctcccttctctcacctccctccgccctatcggaaaggcggggagagccggtttcggctctgctggttcctcccggaggtgggtgtttggtgtctggccttgctggcccggcgtccaaaggtgagccctttaacttctccagaatcgcctcccctccgcttccttcctgtgcagggtgggctgcgctgggagcccggcgggcgggggcggggaggtgaaggcccgcgccccgccccccgcgcctgtgggagggagctgggggcccgcaggtgcacccagccgtccgcgggccgtctccgggttgggtaccggtataatccgcttctagcttgtttggaggcgtgggctcttgggagcgggacttctgctcaaatcctgtccaggggcttgaaaaggaggagaattgggggtggttgccgggaggaccagcacctccagttactggagggttgataggggccttctcctttccgtcaccctttactagggggtatcccttgcagataaatgagattttttgatttcttaaaaagccagctgcagtgaagaagaactgctgcaggtcgaggggaagagaggtaggtccttgctggagagggagaggtgggctgtgaggttccaggagcacgcacttggggtgtgtgtggccgaaagtatggaggtagggttgtgggaaggaaacagccgagatgagagggagggcgcactcaggatgtaggcggagagatggggaataggtactggggagtcctagcggaatgtggggcccagctggagccgcttggcttatatttggctcctcgttgcctcgcagatttcctgctcttggatc

SEQ ID NO: 2328 - DNA, 918 bp, Artificial sequence
  DNA replication origin
tcgctgctgtgcctcattcctggtccctacctttccggtgtgtgcctgcatcattaattccctctgtttggcatggcctggctttcccaaaacagaaaccaaggaaccggggtcctctgtttcagcagctgaagagctgatttctgagcatggacactaagattcttttctcctgtccaccttacacttcacccacaactcatcttcttcctcttccctacgtcccaaccccttaccctcccaccaccctgcctcccaggacatttatgtgtatgaccccagaccagtaagggaggaacaaagagctgctgcttcaggcagcagcagctggaggagagggtggagagggcagctggggactccaggaagactccccgagcactggcagctccagcgcagcccggggcagtccagcctggaaagcgccctagtggagtcctcgcaggcggctccgcagcgcacgcccagggccttccgccggcccgaacccagggcggcagcagccagagtttggcagagaccccgggtgagaagccagtggtggggggcgggcaagtgaagctgcagcacagagctggagatgcagatccgacactagcagtgctccgtgccgcagacttcccgacccgctccctggacccagacccgaccccgcgcacctggaccaagcggccaccctgttctctcagggcgctctctggggacgcggcttgggcgagctccggaggctggaaccacggcgacaggagacttcactcctccatcctgagacccggcagcacgttatagacagccgtgcacttcctgtttgaaaacacaggggagagaaagagctagagagatccaagtgtcggcagcggggaggaaggagtgcagggcggcggggaggcaagaccagggggtcaccgcttgcataac

SEQ ID NO: 2329 - DNA, 991 bp, Artificial sequence
  DNA replication origin
ctccccgctgccgacacttggatctctctagctctttctctcccctgtgttttcaaacaggaagtgcacggctgtctataacgtgctgccgggtctcaggatggaggagtgaagtctcctgtcgccgtggttccagcctccggagctcgcccaagccgcgtccccagagagcgccctgagagaacagggtggccgcttggtccaggtgcgcggggtcgggtctgggtccagggagcgggtcgggaagtctgcggcacggagcactgctagtgtcggatctgcatctccagctctgtgctgcagcttcacttgcccgccccccaccactggcttctcacccggggtctctgccaaactctggctgctgccgccctgggttcgggccggcggaaggccctgggcgtgcgctgcggagccgcctgcgaggactccactagggcgctttccaggctggactgccccgggctgcgctggagctgccagtgctcggggagtcttcctggagtccccagctgccctctccaccctctcctccagctgctgctgcctgaagcagcagctctttgttcctcccttactggtctggggtcatacacataaatgtcctgggaggcagggtggtgggagggtaaggggttgggacgtagggaagaggaagaagatgagttgtgggtgaagtgtaaggtggacaggagaaaagaatcttagtgtccatgctcagaaatcagctcttcagctgctgaaacagaggaccccggttccttggtttctgttttgggaaagccaggccatgccaaacagagggaattaatgatgcaggcacacaccggaaaggtagggaccaggaatgaggcacagcagcgagttctgagatgtttagtctggtgtctggcttgttaactccactgtggtttctgagccaggcctcctcgctgagacagaaggtactttaacatatgagccaggcatctttattaattccatttgtcat

SEQ ID NO: 2330 - DNA, 986 bp, Artificial sequence
  DNA replication origin
tcgatagctttcttcgctggttcggggcggctgctgaacggcggagtggcgtggacctcatgtagcaatgacaatggaaggggccagcgggtcgagttttggaatagacacgattttgtccagtgccagttcaggcagcccaggcatgatgaatggagatttccgcccgctcggtgaggccaggaccgcggattttaggagtcaggccaccccatctccctgttcggagattgataccgtagggacggcgccttcttctcctatctcagtcaccatggagcccccggagccgcatctggtagcagacgcgacccagcatcatcaccacctccaccacagccagcagccgccgccgccggccgcggccccgacgcaaagtttgcagcctttgccccaacagcagcagccgctgccgccacagcagccgccgccgccgcccccccagcagctgggctcggccgcctcggcccccaggacttccacgtcttcttttttaattaaggacatcttgggcgacagcaaacctctggcggcatgtgcaccctacagcaccagcgtatcctctccccaccacaccccgaagcaggagagcaacgcagtgcacgagagcttcaggccaaagctcgagcaggaggacagcaagaccaaactcgacaagcgggaggattcccagagcgacatcaaatgccacggtgagtcccgccacccggcgctctcggccgtctagcttgtcctcctggttcccaatctccccttcagccttcagcagatctctgctggggagcgattccaggagcttctcgggcgactgggcgacggtcaaaagactgcagctgaagggaggcctgggcgtgcgatgtggggactcctcgaagttctgtttattgttctaccccacaaccttcacggccatccagctccttcctttgttttatttaattttaatctactgggggttgaggggcggcggagggcatccgacagga

SEQ ID NO: 2331 - DNA, 891 bp, Artificial sequence
  DNA replication origin
agctcctggaatcgctccccagcagagatctgctgaaggctgaaggggagattgggaaccaggaggacaagctagacggccgagagcgccgggtggcgggactcaccgtggcatttgatgtcgctctgggaatcctcccgcttgtcgagtttggtcttgctgtcctcctgctcgagctttggcctgaagctctcgtgcactgcgttgctctcctgcttcggggtgtggtggggagaggatacgctggtgctgtagggtgcacatgccgccagaggtttgctgtcgcccaagatgtccttaattaaaaaagaagacgtggaagtcctgggggccgaggcggccgagcccagctgctgggggggcggcggcggcggctgctgtggcggcagcggctgctgctgttggggcaaaggctgcaaactttgcgtcggggccgcggccggcggcggcggctgctggctgtggtggaggtggtgatgatgctgggtcgcgtctgctaccagatgcggctccgggggctccatggtgactgagataggagaagaaggcgccgtccctacggtatcaatctccgaacagggagatggggtggcctgactcctaaaatccgcggtcctggcctcaccgagcgggcggaaatctccattcatcatgcctgggctgcctgaactggcactggacaaaatcgtgtctattccaaaactcgacccgctggccccttccattgtcattgctacatgaggtccacgccactccgccgttcagcagccgccccgaaccagcgaagaaagctatcgatcgtaaaacaaaataaacaccaaacaatgttgccgccgcttaaaaaaaaaaaagtggggcggggagagaaggaagggtaattgggaagtggca

SEQ ID NO: 2332 - DNA, 934 bp, Artificial sequence
  DNA replication origin
agcctggcaccgggcggcagcggtggcggcggcggacgcggcaggtgcagcgaccgcgaagcccgggcggccgcgcgccctcggaactcccccgcggctcccgaggtggcagccgcgcgccactcggcagccccgtagccgagtttctgaactttcttggaaagttgcggggcagacacggccgcagcggttgcggcaacccgaggaggaggaggaagaggaggacgacgagaaggagcaggcacagaaggaggaagcggcggagacgcgatgccgggcgactccggccgctgccgggcgcgttcgcttgtaatccggctgctggcgggcggcgccgaccccctcccgtgacgtcacggccactaccgccgctccccgcgccgcgccgcgccgggcccgcgcccccgccaccgaggccgcgcgtccggccccgcgcccctattggccgcgcccgcgcgagcgagggacgccgacgtgccagggagccaataggcgcagcgctcgtgagcccgtcagcggactcggctcggactccgctgctcttttgagaacccgcacatccctgagcccgcagccctgagccgaactccgagtccagtggtcccggtgtccacaatcacgagtgcgaggcaaagggagagggaggaagagatcagagggagaccagagaaagggaaccaaaggggagaaagaaaaaaaaaagtagcaaggattcgcccgttttcttaagtcagaagagagagagaagaggacgggaagggacttacctttaggctccagcgcggcggccctcgcagcctccccaaacgcgcgcgggaatagtccgaagacattaagagcggaggaaggagatccctgaaggaatccacagaaaagtgtgtcacttcaggcgccggagccttgcataagcgggcgggtcggctctgggctctga

SEQ ID NO: 2333 - DNA, 919 bp, Artificial sequence
  DNA replication origin
ccggccgccaccctgtctgggaagtgaggagcgtctctgcctggccgcccatcgtctgggatgtgaggagcccctctgcctggctgtccagtctgggaagtgaggagcgcctcttccccgccgccatcccatctaggaagtaaggagcgtctctgccccgccgccccgtctgggatgtgaggagcgcctctgcccagccgccccgtctgagaagtgaggagaccctctgcctggcagccaccccgtctgagaagtgaggagcccctccgtccggcagccaccccatctgggaagtgaggagcgtctccgcccggcagccaccccgtccgggagggaggtggggggtcagcccccgcgaggccagccaccccgtccgggaggtgaggggcgcctctgcccggccgcccctactgggaagtgaggagcccctctgcctggccagccaccccgtctgggaggtgtacccaacagctcattgagaacgggccatgatgacaatggcggttttgtggaatagaaaggggggaaaggtggggaaaagattgagaaatcggatggttgccgtgtctgtgtagaaagaagtagacatgggagacttttcgttttgttctgtactaagaaaaattattctgccttgggatcctgttgatctgtgaccttaccccccaaccctgtgctctctgaaacatgtgctgtgtccactcagggttaaatggattaagggcggtgcaagatgtgctttgttaaacagatgcttgaaggcagcatgctccttaagagtcatcaccactccctaatctcaagtacccagggacacaaacactgcggaaggccgcagggtcctctgcctaggaaaaccagagacctttgttcacttgtgtatctgctgaccttccctccactattgtcctatgaccct

SEQ ID NO: 2334 - DNA, 1160 bp, Artificial sequence
  DNA replication origin
gtggtgatgactcttaaggagcatgctgccttcaagcatctgtttaacaaagcacatcttgcaccgcccttaatccatttaaccctgagtggacacagcacatgtttcagagagcacagggttggggggtaaggtcacagatcaacaggatcccaaggcagaataatttttcttagtacagaacaaaacgaaaagtctcccatgtctacttctttctacacagacacggcaaccatccgatttctcaatcttttccccacctttcccccctttctattccacaaaaccgccattgtcatcatggcccgttctcaatgagctgttgggtacacctcccagacggggtggctggccaggcagaggggctcctcacttcccagtaggggcggccgggcagaggcgcccctcacctcccggacggggtggctggcctcgcgggggctgaccccccacctccctcccggacggggtggctgccgggcggagacgctcctcacttcccagatggggtggctgccggacggaggggctcctcacttctcagacggggtggctgccaggcagagggtctcctcacttctcagacggggcggctgggcagaggcgctcctcacatcccagacggggcggcggggcagagacgctccttacttcctagatgggatggcggcggggaagaggcgctcctcacttcccagactggacagccaggcagaggggctcctcacatcccagacgatgggcggccaggcagagacgctcctcacttcccagacagggtggcggccgggcagagactgcaatctcggctctttgggaggccaaggcaggcggctgggaggtggttgtagcgagccgagatcacgccactgcactccagcctgggcaccattgagcactgagtgaacgaggctccgtctgcaatcccggcacctcgggaggccaaggctggcggatcactcgcggttaggagctggagaccagcctggccaacacagggaaaccccgtctccaccaaaaaaataggaaaaccagtcaggcgtggcggcgtgcgcctgcaatcgcaggtactcggcaggctgaggcaggagaatcaggcaggggggttgcagtgggccgagatggcagcagtacagtccagcttcggctaggcatcagag

SEQ ID NO: 2335 - DNA, 1240 bp, Artificial sequence
  DNA replication origin
cggtctcccggggttgaggggaggatgcaggagtcacacgtggaggccggactggactaagggggcaggagcggcgactggggcgctgcggcggggctctagaccgcgggaagccagtgctagcgctggcgcgtggtgggcccctgaggccgccggagtccggagagctacgcggaacccgcggcgccaggcctgagcggtgggagggctctgcggggcctggtgttcaggcgtcccaccacgagggtggagcagcgttggatacttgttccttagggaccgaaggctctggtggcacccgggctatttctcagaggacaattagtaacatgtcgccatgaggagccggagtaactccggggtccggctggacggctacgctcgactggtgcaacaggccatcctgtgccatcagaatccagtgactggcttgcttccagccagctatgttcagaaagatgcttgggtccgagataatgtgtacagcatcttggctgtgtggggtttgggcctggcctatcggaagaatgcagaccgggatgaggataaggcaaaggcctatgaattggagcagagtgtagtgaagctgatgagaggactactgcactgcatgatcagacaggtggataaagtagaatccttcaaatatagtcagagtactaaggatagcctccatgcaaagtacaacaccaaaacctgtgccactgtagtgggtgatgatcaatggggacacctgcagttggatgctacctctgtgtacctgctcttcttagcccaaatgactgcctcaggactccatatcatccacagcctagatgaagtcaatttcatacagaaccttgtgttttacattgaagctgcatataaaactgctgacttcgggatatgggaatgtggagacaagaccaaccaagggatctcagagttgaatgccagttcagttggaatggcaaaggcaacattcagattctcctgtagaaccatggatatgtagatgaaaactttcataagctgcagatttgatatccaactgcttttgtggcatgtctctacttatatgccataaggacttgaaaggacttaaactaaacttatcatctctaccattacaaaaacaagcaaaagaaggcttttattcctttcgtttatcagttgaccaagctttatatcaaggaatcatctttcaatcctctatcctctttattttcctccatcccccaaatcatcatcatcatcatca

SEQ ID NO: 2336 - DNA, 1021 bp, Artificial sequence
  DNA replication origin
gccgctggagccgagtagcgtacagagcggcgtgtgacgcggggacgccgcgtgctcccaacgtcgccccggtttgacgcacacggcaccaaactgtgagtttcaggggttatttggtcagattcgctgggacccgagtgggtttcgggcctctgggctgtggcagcggcgggactgagggtggcggaagaacttgggggacccggcctccggctctcgggcccggggagctacgccctaggctgggtcccagccatccaaaaggacgcattttgccgcacaggctaagatggcggcggcggccgaggaggcggagttggtgctacacaaggagcccgggccccgggttcggggaggcggcggccgcggcggtcgctgggggccacggagcctgaggtgagcggcggccgccgccgcggggcgggactcggcggggggatggggggggggctttccgctgcggcgtcggaggatccggtagcggacacaaaggggctgagctgggcactagacttgggggttttgtttagtcacatgaagccgagcagccagtgagcagtagggggaaggggccgagatcaggcggcttggggagcctggcggtcgccattgcaatgcactgagtaacggggcgggccgagagcagtcaccaacccctctcgttgaggctgctcggttgtggccagaaacgctggctctggcattaactgtctacacccctccccttacttgggacaggaccgcatagccctcccctccccccgtcctgcaagatcttatgcggctaggtgcctgggaagtaacagcaagaggtaaatcgctcgaagtgtttgggttgccaggggcttggtgggtgtccagctaaagctttttgcctctccaggtctgattctctggcctttgtgtccctgggaagttactctgccagaggaaagcaggtgtgctccacttctcccgtgaacctgaagatgagttgtcccagactcttctcagtgattggaaacttaggtggtggagctaa

SEQ ID NO: 2337 - DNA, 1015 bp, Artificial sequence
  DNA replication origin
tctacacagacacagtaacaatctgatctctctttcttttccccacatttcccccttttctattcaacaaaaccgccatcgtcatcatggccctttctcaatgagctgttgggtacacctcccagacggggtggcggccgggcagaggggctcctcacttcccagacgggccggccgggcagaggcgccccccacctcccggacggggcggctggtcaggtgggggctaccccccacctcccggatggggcagctggccgggcgggggctgccccccacctcccggatggggcggctgccgggcggagacactcctcacttcccagatggggcggctgccaggcggaggggctcctcatttctcagatggggcagccagtcagagacgctcctcacctcccagacggggtggtggcggggcagagacactcctcagttccaagacggggtcgcggccggacagaggcgctcttcacatctcagacggggcggcggggcagaggcgctccccacatcccagacgatgggcggccgggcagagatgctcctcacttcctagacgggatgacggccaggaagagacgctcctcacttcccagactgggcggccgggcagaagggctcctcacatcccagacgatgggcggccaggcagagatgctcctcacttcctagacagagtggcacctgggcagaggctgcaatctcggcactttgggaagccaaggcaggcggctgggaggtggaggttgtagcgagccaagaacacgccactgcactccagcctgggcaacattgagcactgagtgagcgagactccgtctgcaatcctggcaccttgggaggctgaggctggcagaacactcgcagtcaggagctagagaccagcccggccaacacagcgaaaccccgtctctaccaaaaaatacaaaaaccagtcaggcgtggcggcgcgcgcctgcatcccaggcactcggcaggctgaggcaggagaatcaggcagggaggttgcagt

SEQ ID NO: 2338 - DNA, 1102 bp, Artificial sequence
  DNA replication origin
cgcccgggctgtgggctctgcaggctgcgcgggtgcccgtcggcgcggcgcgggctgccagtgcctacttaccggccagggtcgctccagccgccaggacctccggccttgggagggaggcgctggtggggcggtgtttaccctccggggagcaggcaccggtggccagcggtgcgtgggcagcggccgcacggggcaggcagtgcccccggcgatgcgcagtgctggggaggaattctccacgcccgccctcactcttcctctccgcgggtccttctgacccctgcggggcgcggcggccacttccctccgggcgcgtgacagcttcggtgggaatggtttgttgtgggttcgcagtcaattgccgtggcccaggctgtggctcccggactcgtgcacggacgcggtttgcgttccccgctggccgcgccctcagggtgccttgcgggctgagccgcaagctgcagctcggcccccccccgccccggtttattttgaaggctctcttcttgtattcatttggttaggacaaacttggaaatcttggactgtcgctagaagaatctgcttgcagacttgatcttattagggcatttgccccgctttgcagaatcgcatagtgtcaggagccgacgtgtcaagcatgaattaccttggcaaagtagaacttagtggatttggtgtcctcacgaaaagctggaagaagaaaaccgttccatttccctagctgtgaagtgaggatagtagtacttgccccgtaaagttgctgtgagcatctaatgatttaatgtgtgtgaggtgctacaacagtgcttggcaccgagtaagcaccgcacggaggttagcgctgcttgccgctagccctgcggtggcaggataggagcggcgagggcagaggatagtaggagtgacaggctgtgctggggaaccaggcgtattctgagttttatgtccttccgaagaagtgagcggtttgggagaagtctccacaggtagtaaaaacacacgtcaagaccgtttcttcttcctgaatgcagagtgcaaacagttacttcagtgtgaactcagttgtttcttttggataataataacagctaacgtt

SEQ ID NO: 2339 - DNA, 1220 bp, Artificial sequence
  DNA replication origin
cggcagctgctgcgccgcggcaaaactacgccatccggacccgctggggactctcacctcctgcagggagctccgggaatcgcgcagggaaagtggccggggcgcgagagccgccgactgccctccttcactcgctgggaagaggaaagtgccgctcggcgtccccgaaaccctcgattacccccatcaggccgacccggcgcactcgccctccctcgcacacacgcgggcggggacgggcaggacgccacagcaatcagcgcgcggggggaagggcgctcctccgccggccccaccgggggctctcggccgcccagaaactcctcctcccgcctcccgcctcccgcctcctctctcctccccctttgcctccgcggctgatggatgagccccgaatgctgctcgagcctgtgcttcccttcgggacgaggaggccgagagagaaggggctaggggcgcggccgggctcagcgtgcccgggttggggcggcccctgtcctgggggaagcgcgagggagacgtgggcacgagctgcggggactcgctccctcaaacgaggtcctttgaactttccagggctccctggaagagttggattttcatttggttccttggtctttatataaaagttctgaaacctcagataatctgatcacagcctcttgccctctccccagcagagctcccccatgcacacattcattctgtccctgtgctttttcccaacctccggtcccgcttgttgtcacgctctgatggtgggcgccggcggagtcttgcctcttcccctccagcagctgagactgcattacccagccgttccccctgctagctaaataaattaatacaaataatggagctaggtcagcattaccggcgttacccggaggtgggcgcgatatgaacgacagtctcggcggggcaacgtcctaagtacctgtgcctgtgcgacgtcctaagtacctgtgcctgtgaagtacacgctgcagaagttgaactgctggcaccagaacaccactctgatactcttgcttacacccagtttttcttattaaaaagtatacttaagtaacaggacattgttttacaaacaggcaggtgaaatgaccgtggactgacaggtttcaaagaccagacttccagtcctgactactgtgcgaccttccacaaatggctaacggctaatacccgtcaaggctcagttcaaatgaagggcttgg

SEQ ID NO: 2340 - DNA, 758 bp, Artificial sequence
  DNA replication origin
cccgccgccctgtctgggatgtgaggagcgcctctgcccggcagtgaccccgtctgggaactgaggagcgtctctgcctggccgccaccccgtctgggaggtgaggagcatctctgcccggccgccctgtctgagaagtgaggagcccctccgcccggcagccgcccagtctgggaagtgaggagcccctccgcccggcagctgctccctctgggaagtgaggagcgtctccgtccggcagccgccctgtccggaaggtggggggcagcccccgcccggccagccgccccgtccgggagggaggtggggggcaggccctgccgggccagctgccccgtcagggagggaggtgggggacgcctctgcccggctgccccgtctgggaagtaaggagcccttctgcccggccgccaccccgtctgggaggtgtacccaacagctcattgagaacgggccatgatgaagatggcggttttgttgaatagaaaagggggaaatgtggggaaaagaaagagatcagattgttactgtgtctgtgtagaaagaagtagacataggagactccattttgttctgcactaagaaaaattcttctgccttgggatgctgttaatctataaccttacccccacccccgtgctctctgaaacatgtgctgtgtccactcagggttaaatggattaagggcggtgcaagatgtgctttgttaaacagatgcttgaaggcggcatgctccttaagagttatcaccactccct

SEQ ID NO: 2341 - DNA, 1108 bp, Artificial sequence
  DNA replication origin
ggtaaggttatagattaacagcatcccaaggcagaagaatttttcttagtgcagaacaaaatggagtctcctatgtctacttctttctacacagacacagtaacaatctgatctctttcttttccccacatttcccccttttctattcaacaaaaccgccatcttcatcatggcccgttctcaatgagctgttgggtacacctcccagacggggtggcggccgggcagaagggctccttacttcccagacggggcagccgggcagaggcgtcccccacctccctccctgacggggcagctggcccggcagggcctgccccccacctccctcccggacggggcggctggccgggcgggggctgccccccaccttccggacagggcggctgccggacggagacgctcctcacttcccagagggagcagctgccgggcggaggggctcctcacttcccagactgggcggctgccgggcggaggggctcctcacttctcagacagggcggccgggcagagatgctcctcacctcccagacggggtggcggccaggcagagacgctcctcagttcccagacggggtcactgccgggcagaggcgctcctcacatcccagacagggcggcggggcagaggcgctccccacatcccagacgatgggcggccgggcagagatgctcctcacttcctagatgggatggcggccgggaagaggcgctcctcacttcccagactgggcggcccagcagaggggcccctcacatcccagacgatgggcggccaggcagagacgctcctcacttcccagatggggtgggggccgggcagaggctgcaatcttggcactttgggaggccaaggcaggcggctgggaggtggaggttgtagtgagccgaaatcacgccactgcactccagcctgggcaacattgagcactgagtgagcgagactccgtctgcaatcccggcacttcaggaggcccaggcgggcagatcactcgcggtcatgaggcggagaccagcccagccaacacggcgaaaccctgtctccaccaaaaaatacaaaaaccagtcaggcgtggcggcgcgtgcctgcaatcccaggcactcg

SEQ ID NO: 2342 - DNA, 2043 bp, Artificial sequence
  DNA replication origin
ttagtccggagctgggaggggctgccccaacgtcccttttgctgctgtttttgtttcctactgtcctggttcctccgggtttgtctcctaggtgccatggcctctctgcgcctgccctcggatccgagagggttcccggccggggtctgggtggagaggggaagacgctcggctgccctggtcgggggattgggggagccttcagcaccctcagactcaaccggtcccagcctgagcccctcacctgcctcctctttgcagacagcacttcaaatgcaggcggggcgaaggcggagccccgggaccgtttgtcccccgaatcgcagctgaccgaagccccagacagagcctccgcatccccagacagctgcgaaggcagcgtctgcgaacggagctcggagtttgaggacttctggaggcccccgtcaccctccgcgtctccaggtaggaacccactgggaacctcttgggcgggagctgcagggacccggcagtgctgggggggaattggcgcgaccttgggcgtagaaatgctaacggggagttggagagtctttccgggagaagggagctgattcgtaggggaaggaggcatccggcttctctgggacttggacagcttgcccgctggggctgctgcctccatcccaggcggcaggaccctagctgcttgtcgcttagattcgtttgcgcggagctggccagtgacggaaaacaaaccagtcgtttcgactggcggcaacgctgacctttcattttctgaccagacctgactgttttataaagtgctaggatcctgcaatctagacccccaaacctcaaacagagaacagggcagaacgggccaggcagaggagctaggcgctgggcggcagggagggggcaggacgaaaatctcagcccgcggcttggtcttcacaggcgcagattgggggcctgtttcatttttcgttttgccgggttaacctagcctcaggggcctgctctctgggtttcatttccagcgagcaatccagcttcaggcaaactaagtgaccacacgttgggtgggggcgtctcgagtcccggccgggggaaggaatgagcagaccagccggattctgtcaagggccggttatatccagaatatgtttgctagttttagaagataccaccacccgtcccacaatcagtgagttgacttggcgaaaaccatagctccagcaagtgtgtctgggagccggcggcgggaggattcttcctgccagggcgtcaagtggccagacaaggattgggcgcgccccgaacccctccgaacgaaactccgggtacagcctctcactgaagtggccagcctgaactggagtgttgtgcgcacacacacacacacacatttgtaaatgccgtatgcactcacatgcgttggggtcactagttttagcaaaattcacgtgggtgggggcgtagcaggccgagaattcagagctgtctccttgcaggtggtggctaaaccttatgagttatagttattctctgagaaattcaggttccccgcctccatcaaactgtaacaggaatggggagtatttggctgtcaatttaagcccaaaagcccctttcctgctgctcctttgctacgtacactgggcacttaacttcgtgaaatcttaataccttcgggtttattcagacagcagcctttcgggtagttcggggccgcatttatggaccttctccctccttcctcttggattctgggaagaaaaagaattgaatgggaacatgtaggggctgggagagtgcctgcgctggtggctggacccttccgcccttgagtgctgtgaggggccgaacggccgccaccttctccttcttaacagctcaactacgggcatttatagatgcgcccttccctgtaggatctccaggtgcgcgggtccagccagaaaagatcctcggaacgccgagcgcctccgctgcactcgcacagaatttacgacctcctctcccgaggtcttttcaatgatctgtttactgttctgcctcctatagtggcctgcgagg

SEQ ID NO: 2343 - DNA, 970 bp, Artificial sequence
  DNA replication origin
gctcggctaggcgccggtacattctctaaacggagggaatagtctggtcctggggagcgcggctggtggtagctgtgagccttcttgcttttgacgagaaatgagcgcggcatggtggtccggcactttccccactgcgccccaagagtccctggagccgctgtcacccacggtcactccgagggcttgctcagccccagcccggaggagacctgagagggaaagaaaaccaggtggagacgtgggtcagtactctccggtgcggcggactgggcacccaggcggagggagagcgcgggccagggaggcgcgcagagggcccacgggaggaggggcttgaccctgctgcgccgcgcttaccaggtggcacttggacaggtggcgcgaacccgccgtcgttgccgccgccgccactgacacagctcagcggtaaaacctgtcccggggccctgtctcaggcccctttcctcctccctgcccacgccccccagctcctcccctttcctagcgaagctcgctccggcaatcaaactccctggagagctgtagttcccatcgggtgggttaccccaactcagctactcatcgcctgcctggctgtgctttacggctggcgagggagggcggggacacgcggatcggtttaggggccggggatgcccagtggtcgaggacccggaaggggcaaggagccaagacctccaagagccagctaccaactggagtgaaaggaccggggggaggggggaacagaacacaagataaaactgtggggcggcgggaggacagcagcagagggattggggacagcagaggccagagaaaggaggtgggagagcaaagggacaggaaagtgaggggaacaacagacgaccaacccccgccccaggagaaactcgcatctgggtgatcccactcgcccctcactagtgccccacgtaggagaaactttgcccttggactcccggct

SEQ ID NO: 2344 - DNA, 1160 bp, Artificial sequence
  DNA replication origin
cgggggcgatcagagggcgcgggcggtttcccacctgctgcggaccgccgtgcgggagcccagagagctccggcagctgggttagggcgcgacccgcgcagtgtgactggaaatctggagctgggggcgcgcagcaggcggtctggtggttcggcaggggagccaaatccaccagggaaggaaacatctggtggggaggcggcggcagctgcgctcgggaggacgcccccttagcgccctcggctccctccttcctgggcccggacggtgaggagaggcctgagcgcgcggaggggccgccccacctcccgcgccagctgcagcgcggggttgccttcccacgcgctcggcccaggccccggggcccctatctcctccaaactctgtcgctccccacaggaaccagcaaagcgggccggggtgcgagagaggcgtgggcttacagcccgggtggggaggcggcctccgcgtccgcctggtctctggtggcgccagcccagacccagctccggcgctgacagttaccccgcccccatctgtcccgctcccagccaacgtgggtccaagctgcagcgggaccctcgggacaacgccactccgtttttcttttcttccgagtttcgtggctgtttaaagaattgggtttggggtttgtggcgtctaattgtacggacgagaagtgcaggaagcgacaaagctctagccctaggagccaccccggagggaggcggatggcactctcacccctaggggcattctggcgcttgggtagcgggaaacttcgcgggagccccgcgacacgtcccaggcgtcttttctcccaggtctattcccattcctccggagaaggggacacaatggggctggggatctggagcagggggcctgcaccctacagggaccaaggcctgtaggactcgtttgagctgagagcgccaacggacagacgtagactgtgtggcctgcatcttgcctaggaagccgaggggctcctagtccggcagtggaaacagcgcgaagccggaggactgcaggtcctgccccggcccagagttcccagcaccctcgtttctgaaccagccgaggccacggagaactgctgtactgcagctcacgtgtgaacccggtcaccatcgccttcaccccgggaggaaggcaga

SEQ ID NO: 2345 - DNA, 1133 bp, Artificial sequence
  DNA replication origin
gcgcctgcgccttgggctctcctgacgcggccgggccggaccccggaggaaccagctggccagctggcaaggggctggctgcagttccgacagcggcggtgccgggaggggtaggtgagggtcgcgaggcggccctgagcttctgagtgagcgtggtgcttttgggaactcgggacgggcgacccgtggagccaggagcggggccgaggcgctgagacgcggcggcgcggctgccggctggatgggaagttaatgtttacggcgaagtctactcaacgtttccaaggtgaggggcgctgcgccaggccgggcgggccgggaggccgggcgggcggtgagtccgtgttccgctggcgcacagctgggccgaggcgcggcgggcgggggccgccgcaagttttgctgtgggagcggggcgggcgcgcctggccccgccagggcctaagttccctgcactcgcttcctcgcctgtcgccgccgccgccgcccgcagccctccttctcgtgggcgctggggaagaaactcgtcggcgggtctaactgtggcgtcccagggcggtggagggacggagcagcttcgggggcacgtcctcgtaaatcccgtggaggacactgaccctgcaccccaccctcgaggccagaagtcggttccctttggggacctgaggggcgagagcactcgcccccctgacttgcaaagttggcgtctttacttggcctccgggattctgcgcatggcgtgtctccaggctgctgatgggcaagacagatgtgccaggtccagaatgaacttgagaagagtttgtagccattcctgaatcaccttatgactagtggggcaagcctcaaattaacctcaggatttccggtaggttggattgtggtgttggtgtttccactcaaaagagttgctgtgatttccctgtgtctgtctgtctgtctgtctttggggcttcttagatcatctcatttggcatcctttcacccaagagttaaaccaagccttttggaatggtttcctcgctttcctcctatctattgctggtagagctgctttcgaaaagaagtattttcttgaagtggtatcttttctttgggttacagtgttgaataataaactcctttctttgccg

SEQ ID NO: 2346 - DNA, 1103 bp, Artificial sequence
  DNA replication origin
gcagcgcggcggggcgatgtgtgattaccatggcgaggagtctctgtccgggggcctggctaaggaaaccctattacctccaggtaggccggcggccgcccagccaccagctgcgggagcacccggccgtgtgccctgccgcgccgcgcaggactcgcccgctcccctcctccctccctgggtctgtgcccgcccgaaccccgctgccccctgccgtccggcacctggcggcgcgccctccccagccccctcagcggctctgccgacgccccccaccgcggccctcgcggctcccgcgccgcggccagccgggctccagggcccgagtcgtcccgcccgggtacgccctcgcatcctgagagccccgagacgtgacctgggtacgaccccgcgctccgggcattgcccgcagccctgcgccgctccaggcggagctcgacgggccgccttctccctggtgttttcggggctttcccccctcccccgtgggcccccgcaggtcggttgcccttgactcagtgtcttgggtcttaagtcggtggtaggaaaggtggtgtagcattcctccgtgtcttagaaaattatgacaatttgtcacaccagtgtttccccaggctccaaaaagcagcgtgtgcctcgtgccgagccccttggttgggtcgttccatcacacccaagatttaaatgggaggtggagaccgataagcctgaaccaggcggatgggtgtttgctttttaaaggaaaggggctagtggctggtctgtggatcccaaataccctagtaatgcaaacgtaattctcagtcatgtcgtgtgtacggttcgcgtgttaatttttcatgatttcccgttccaccctctgttccgctgccagtctgtgccttggaaccctactactgcctaagtgtactgtttggtcaccagggggacctagtagacaccgcgagtagctgagcgcaaatccatcactccgatggaaaaacaactacaaatcaatgccttgcgtgggtcagcagtgttagccaacgctgcattcagaggacagtattcctttaccgcttacattaaaaggccaagaggtagatgatttggggtcagctggt

SEQ ID NO: 2347 - DNA, 1607 bp, Artificial sequence
  DNA replication origin
gtgccagcctgccgacgatcaggagcgcagctttcactattgtgttagccccggcggcggaaggactgagcctcactgcaacgttaaagagtccttctttgttcagccccagtcggggacgcagggcgcggtgttcctccgcgctcgccgcgcagtccctgcccccccgcggctttggagagctgccattcggcaccggagtcgctccgcgctcccagaatgcaccggcagtccgcgggaaaccaaaatggcgaggggctgtattgaagtgggctgtgtttgaggccggtgtaagaacgctcattctacccccaacccttgtctccaaggacctcggtttgtgcgtgcatatgtgccgggtacccggtggggcgggtgcccagtaagtgctcggactcgcaggggaagcgcccacggggacggattggttgttttttcctgtatgaagcggttggcaccactgaagtgaccgaatgaggtgagagaccttggcctgggaaccgactcttccggaggagatgggggttgggggaaggaggaagaaaggaagcaagtataaaagggaaagatggaggaccaaggtgggggtgggggctcctgtatgtgggtgcctttgcatttatgtgtatattgaaaagaatggatgaagaggagtagtcagttgagtgttgggagaaaatagggactaaaggagcgaggaggtcgttgggggagtctgttggaggaacaagatgaaacgttgagacggggaagctgtgtttggagggcaggaaggaacctgggggcgggagacggttggaggggcaggatgaacctggtgacgagggggtggggagccgagaggaggagccgttgggaaatgggggctgagggaaatgtggggagcagagtggagggctgcctgggaccttagcagtgcgcaaagggaagtagcagcttggaatcggagggtggaattgtatggaattggagtaaagggggtcgagtgtaagtgctggtaaggataaggggaacacactgaagtggaggttggaagcacaacctgaaagcttaaagggaagcggtgggagggaaagtgagatgggggaaagctaggtagcttatatttggagctcaccaaaaatatgaggcttttcttgtgtttaattaaacctaactcatataatctacgtctaggatgtagatttgtattgtattcatttttacaactgaggtaattacggctcaaggaattttaaccaatttgccaagatttcttaacatatttcggtagtgccagaactctaactctgtgttttacaatctggtgtccttggttgctagaatttttctttggaagcaattagagggaacagatggatttatcggggtaatctgactaacagcaagggtttgtgaacaatgggaaaaggcttatggaatgttactctattctttaaaacatttaactttggttaaagatagaaaccatgtaacactaacttaaatgtgaaaacctagctaggcctgtgtgtaatacataggaaggcaccatgtgaggtcagtacagagctagaaatatgtaaatagtacctgatttaatttgacttcagaacctccggtagtaa

SEQ ID NO: 2348 - DNA, 970 bp, Artificial sequence
  DNA replication origin
agcaggcggaagctgctggcagcgcgaacgggcggctcccgccggcgtgggtgggggaagggcggcagccacacccggaagtcggtccgggagggagggggaaatctgagggaacgaggcttccggtggcgcaaagggtgtcgggagcggcttcctgcaaaccttccctggcatctggagggaccaccgttgccgcgtcttcggcttccacgatctgcgttcgggctacgcggccacggcggcagccactgcgactcccactgtgcctggctctgtccatattagttcccaggcggccgtcgccgttccagcagcggcagcggcagcggcagcggcggacatgttgtgaggcggcggcgcgggtgtctgaaggatggtttggccgaggcggcggcaacggctgctggcggcggcggcagcggcagcggggcctcgggctctatagagccgagcccgctgggtacccgcccggtaccgcggcgaggccagtgcccctggatcttgcctctgctccgacgccgttggggaccagttaggcgacagcgcccgcccctctgaggagacacgaaggtggttccccagccgctcaaatttccggaccaccgcgctttcccctcctcagcctgggctgtgctctctctagaatcctcgggcccccactttcttcccaaactcatcctaaatctctcacacacgcgagtgttcccagccctcaagccagctgctcctccgttcattttctgcaccctcttcgcaaagcaccccccgggatcactctccgagggcgactttttgagaaatctcggtggagtagtggaccagagctggggagtttttaaaagccggggcgcgagaaacaggaaggtactatggcttcctcgtctggcaacgatgatgatctcactatccccagagctgctatcaataaaatgatcaaagagactcttcctaatgtccgggtggccaacga

SEQ ID NO: 2349 - DNA, 1202 bp, Artificial sequence
  DNA replication origin
tgtcctgacctgtcagtggaagaacctcgctcagcacttcaaaatcaaccggacagttctgcgactcagcgaggcctacagccgcgtgcagtaccagttcgagatggagagcttcgactccatccccggcctggtgcgctgctacgtgggcaaccgccggcccatctcccagcagagtggcgccatcatcttccagcccatcaacaggacggtgcctctgcggtgcctggaggagcattatggcacctccccaggccaggcccgggagggcagcctcaccaagggaaggccggatgtggccaagaggctgagcctcaccatgggtggcgtccaggcccgagagcagaatttgcccaggggaaacctcctcaggtaggtcagggcctcctctgcaggactatgaggggcgccggggtgcccaaggttagttaggcaggtgaagaattcatcatggaacaaagaaataaaagatgttaataggaatgccgactgttcgcagaatagctgtcacgaggcagtgaacaattagctcccagctgagcagtgtcagcaatgaatggtacaggagctgaggaagaatttcggggggtgctgatggggataccttgtgaagggggtagacttaggctggtctgatggctgggggaaatttggatagatgctgcaaagggctgggggtgttccaggtgggaggcatagcatgggcataagtgtggggacagaaaatggtatgaagagcttgaagtgaatgtgctggtagggctggaacaaagggtctgtgcaagggacccgtagcagtgggcttagggagatagccccagccagatcatgggggccttaatgccaggtgcagggctttaagggagctgtacagactcagcatagcgaacacggtgtcctaagaatagaaatggacagtgatgtaccgggggtgaggagagagacaggaacaggaaacccagttagtgagtcatggagggccccggctgcaggagtggagtggagggagagtcaagagatgtaggagcctggcctcccaggactcttcttcacgtggtagagtcagaggagggcacattggagaccacaggagtgaccaggagggaggggactttggaggataaaacacactttttcatctgagctggaagactatgggcttgttgagtgccacagtccagcagcagttttggggtccagga

SEQ ID NO: 2350 - DNA, 1166 bp, Artificial sequence
  DNA replication origin
agcccgagcgcccagcgccgcgccgggaggtgagtctccgccgcgcgcccagcgtcctcggggtgctgttcctcccggggcgcctgggcctcccccaccccggtgaggacacgctaggaagtttgttggacaaagttaggctctggggaaagtagagccggcgtttgttggtccctacccacccccgccagcggatttggcgttgggggcgggggtgactgaagtggggctggggcttgcgctctccaggccctccgagcgcgctgggactccccgagacgtggcccacggcggggagcgctcagcgattggcggccaggcatcttgctcggtggcactcgagcggcatcttcccgggcgctggcctcgcccgaccccctgcccgtcggagctgctctgccggccaccccgccctgtcccgcccgtcccctcttcgcagaagccggccggggtcgggcagatgcgagggcccagagcgctctggtggaagcccaaggctccgaggaggcgagtttctccggtaatctcttgggaagtttgcaaagaaagcgaaggagcctgccctgtaactgttgacaacatctccctccctctctccctttgttgagaaagaatgaatagttggttgtgttgctccctctgcgtcgcggtggggagaggcgagggaaggcaaaggaagggagggacggtgggaaggaggttccgatagatcgtacagcccaactgtccttacccacttaggccgctgagggcgccgccgctttaaaacggtgtaatcaggtgtagacactcgtcgaggaggaggttgagcggactccgaagcatctggcaaggcggcgtgttccgtggggcggcgggtcgggtcatggttggggttaactcgcttgaagcaaggtgcaaaggagaaaaaccattttcctaacctcatatctgttttcgcttaaagctgttagctgagatggaaagtagagccgtgcattcagattgttttaaaccttgactttatctcccaaggctacacagacctccccaaggaaagtacgctggccgagggaaggtcattttgggagctgatagcctcccttgtgttgcctgggactgagttgagatcctggaggctgggagaggcctcagtgctgggggtggggcccagctcaacacaggtc

SEQ ID NO: 2351 - DNA, 801 bp, Artificial sequence
  DNA replication origin
gaagacaggagattggataaagatggtagataggggcataaaattgagcaagctgttcagggcaagggaaacttgagcagcttaactggctgagctggaacagccagctgagagggaggcattaaagatagagagaaagagggtgatgatagagtgggatgggaatgggatggatggcagcaagaacatactgggtgggtttctactgaaccacaggagtgagacagtgaagagacaggtggagaggttgacagtgatgtcagttccattgtagggggaaaaggagtgggagttggagcctgatggcctcatgggctctaattctagatgaagttgagcttaccctagatttgtgatggggtgggcctgcagggttgtggggtttctctgaagatttcagagaagatggaatgaattaatctgagcgttcctgagtaagtacaacagaaggatatgggtccagactgacaacaaactggctcatgtgattaaccatgggtgggcagggaaggaagaaggaagcccaggaggggcctgatagaccagaatgatgtcgatgcatgacaggattatgctcaagggccaggtgccagggaacaggaatgtgggagggcgaggggaatgtgggcagaaagaggctattggcctgacgatgtcaggggaggagcagtcccagggaataacaaggcccaggtgggccagagtgtaggctgaggtggagcacaggtgaaggtgatcagagttgggaggtcattttactttgaggctggagcattggaggtgctgtcacaggacaggagt

SEQ ID NO: 2352 - DNA, 1131 bp, Artificial sequence
  DNA replication origin
caggagccagaaaaatgagctaagaagactggagaacaactgagaagcagtataattactgtgcattgctcgagagtgaggaatttaaagcctggaggcttgagttcaaattctggctctgtcactagttgtatgaccttagccaggttacttaacctttcttggcctcagtgttctcctttatgaaatgggagaaataatgcctacttcatgaggttattgtgagatttcaacacattttgcatgtaagcacttagaacagagcctagcatgcagtaggcattcaacagtaagtgttagcaggctggctgcaatgctcatgtctataatcccagcactttgggaggccgaggcaggaggatcacgtgaggcaagcagttcaagaccagcctgggcaacatggtgagaccccaactctaaaaaacatttaaaaattagccatgtgtggtgacgtgcacctgtaatcctagctactctggaggctgaggtgggaggattgcctgagcctgggagtttgaggttacagtgagctgtgttcatgctaccacacttgtaacaagcaagaccctgtctcaaaaaacaaaacaaaatagaaaaacagtgttggctattgtagaagagtttatgtagatcatgacatgattgtatttgtcttttggaatgaaccccacagtgtagagaatagattgaaaggggcaagagagaaagcaggaagaacaggcaaggagtggtcatttgacaagagatgggggagcctaagctaaggtggagagaagagaggagatttgaaggagcttgaggtggaatggaggggactgggagattaattgactatgattcaggagggagagagagagagtgggtgaggcaacttagaagaggctttgggaaagaggttgggatcaggctggggtttgaagggccatctttgcagagaagagggaggaggaagcaatatgggaggagaacaagggtttttcagagagtattggggttggggatggaatatgtggtaggacgtgacaatgattgggttcggggtgaagggtgtcatttcagcagagaagcatgagtccgtagcacgtcaggtccctctgtggcctggcctgcctttgcctggctctgggtctt

SEQ ID NO: 2353 - DNA, 895 bp, Artificial sequence
  DNA replication origin
ccctaggagtagcccccgggatgtccactgaagctcatcctgaccttggggatatcctctgacctctgagcaggggagctcaatccttagggctgcctggcgtaagagcgaggtcccacttgaacaggagatgcaaacatgtgtgctacagtggggcggacaccttcccctaggactgtggatgtggcctggggtagaccgggcaagaggaaacctctggacccagactcccacttaggaggcagaagtgctcaatcaggggcatatacagagcccaaaggagagctagataccaaaattgaagagaggaagcattctgaccaggtcccccacactgaagaacccaggtaggtgtggaagcccgggtgagaggcaaggactctgggcaccctaggcactgaggagagaggcaggaggggcaggcttggtgtcatggggagccaggtctcctggtagcgatgtggggatgggcctgagcagaggcacataggtggaagactgtggcagcaattcaggaagagagtggtgatagccgcagcagagatgtgactgtgagaggcaggagatggaggccacagatatcacaagggtagactctgtagggcttggtgcctgggctggggtgggagaggggagggaggtctcagatcatgcccatgttcctagcttggctgatgcgatgaatggcggtgtcagagactgggacatggaggaagggttgggtctatggagaaagaggatgaaggaggcctaagaatggctgaatgggaggggcctatgggacatccatattccagaaacatcatcacaggaaggaatgagaagagatgggccccctggaagtgtgggaggattgagaagcgcagacacacagacccaggcagcagcgtggggt

SEQ ID NO: 2354 - DNA, 1244 bp, Artificial sequence
  DNA replication origin
gaggccgagcggcctcccctcgggctgcgagacgtaagcggcgacccctctcgggcctgggctcttccctcgcgcccggccgccgcgcccgacccagccgcggctggacctgcgcgcgagcgccgccgcgcgacgtctgtgtgcgtgcttgtgcgtgtttatttgcgcggggttcgaaaaacggggtttgggttgcatttcgctccccacagacccagagccgaatttctgaggtatccgggctctggtggactgaggggggcgacgcgccccgcgccgcagcatcctccgagagctcgtcttgccgccagcacctgcctccaaggacgccgcgcagctgccccgagcccgcgcgcccggggcccgcgactgcgtgggcggaagccgggagggtgtcagcacgcgtgggagcgctgggagcatgcgtatgcgggtgcatgtggtcggagggcgcgcgctcgagcgcggccgcggggtttcctggtggctgcgagcggtggggacggcagcgggcctggcgccgctgcccagaagggtgcggtcgccacgaatctgagaggcggctgggtgggggccggcaggtttccagtgcccgcagtgatccccatccgcaagaccccgaagccctttgaaatagacggtcaaagccgcgtggttgctctgcgactgcagcggcgagaccgaacgcccggcccccgttcctattagctcacagcagtcccggccccgcctacggaggattcgcagggcggccgctgggcgcgctttctcggctcggccacagcccgtttctgcaccaaacccgccagccgcggcccaccctgtgcttcacccatacccgcccctgcccagcatcgccaggcctcaaatgcagaatagtctctggcagagttcaaagagggaaagggaagtcctgggaagagtccagtgtggtagggattttacagtcttacttaaccccaagacgaagctatggggcgggtacatacacaccaccgtcccctttataatataaagaagggaaactgcagctaagagaggttaaaaaactcgtgtagggacgcccagctagtgagcgtggagaactgtgatgaatcatattttgttatgtttgcaaactaacacgttagctttcacggtttcatgaatgctgacagaacacaccagacttctgagtcagagataaaagactattacaacaaaagcaatagccagagtatcaccatttttgagttggctccctg

SEQ ID NO: 2355 - DNA, 1059 bp, Artificial sequence
  DNA replication origin
cagctgcgcggcgtccttggaggcaggtgctggcggcaagacgagctctcggaggatgctgcggcgcggggcgcgtcgcccccctcagtccaccagagcccggatacctcagaaattcggctctgggtctgtggggagcgaaatgcaacccaaaccccgtttttcgaaccccgcgcaaataaacacgcacaagcacgcacacagacgtcgcgcggcggcgctcgcgcgcaggtccagccgcggctgggtcgggcgcggcggccgggcgcgagggaagagcccaggcccgagaggggtcgccgcttacgtctcgcagcccgaggggaggccgctcggcctcggccgctcacaggcgcgacgtaaaggcccggcgtcaccggcccggcttaacggtgcaacggctggcctgggcctgcaactctggggtcccggccgggctggagcggccgccggagagacctggtaggcggggcgcttggggcaggaagggagccggggagggaaaagcgcgactgtgattcgtacggctgggcccggaccgtgaaggggaccgggttgcggctgccctcacaccgaccaggtgggaccgtcggactgcggccgcccttggctcaactgggtcgccgaccttgttgaggggcgaccactgcggggagaccgagagcctgcggctggcgtttgaggcggatggcagtgccctgagcgcggcggctgggtctcggtgacactgacgacgggaggcgcggtcggaagagcgcggggccgtcgcctctggcttaacatagcagatgcgctgagactccaacaggtggctccgtggcgcaatggatagcgcattggacttctagaggctgaaggcattcaaaggttccgggttcgagtcccggcggagtcgtaacgcttttttccctcccccctacaatttattttctgcctccatcatgtctcttattttttttttttgctaaacggtttaacttctctctcattccctgctctcgcagttcactgcattcggttcttgcggtcctttcttaagcggctcgcagggtcccgagc

SEQ ID NO: 2356 - DNA, 835 bp, Artificial sequence
  DNA replication origin
ggcagtgccctgagcgcggcggctgggtctcggtgacactgacgacgggaggcgcggtcggaagagcgcggggccgtcgcctctggcttaacatagcagatgcgctgagactccaacaggtggctccgtggcgcaatggatagcgcattggacttctagaggctgaaggcattcaaaggttccgggttcgagtcccggcggagtcgtaacgcttttttccctcccccctacaatttattttctgcctccatcatgtctcttattttttttttttgctaaacggtttaacttctctctcattccctgctctcgcagttcactgcattcggttcttgcggtcctttcttaagcggctcgcagggtcccgagcccctcagctccccgggcctcggtggcccagggcccagctcagccgactgggcagtcgatgtaggtcctgagaagagcggcggcggcggcggcggcggcggcgaaggaaaagcgacactgaagcgaaggctcgcggtttcggcctaaaggaaagtgcaggggaggcccgggtctcgggtgacacccccacgccttgagcgggactgtggttgcgagggagggacgagaaaacacgcctacgccctgcgtgcgctgtgctgactacctctccagcatggaggcttccagatgagcagacacccgaatcccagcgggagcccgtcaaaaatggagatttctgccgtcactctgggactcttaattcggtccgtctggggtggggcccaggaatctgcatttctgataaggtcacccgctcccctcccccattattccagtgcaaagaggtcctaggcccagtgcccat

SEQ ID NO: 2357 - DNA, 980 bp, Artificial sequence
  DNA replication origin
ccgccccaacctgccgcggtcgccgaccccgccccccgggagcgcgggccaggccaatgggctgggctccaaggggcggggcaggcggccggcgcagccgtggcggtagctgcaaaggcggcggccgctgtggtggtggtggtggtggtgtctgtggctgcggctgccacttggccgggcgtctgcgggccgtgggggatgggggcggcgagctccagccctcggcggtggcggcggccgtaggtgtggggcggccgtccgcgtccgggacgcgggatggagcgccgtggtgagtgtgaggaggtggcgctcgcttcggccgcggcggtggtggctccgggctggggtcgcccgcgcgggcgccggctagttgccgtccagggtccggcaggggctaggggcgcgcccggcgaggcaggcgcggacgagcgagaggacgcgggcgggcgctgccggtacgccgcggaccccgggtgcgcgctctgagttgtgtgacgccggcgggcagcaggggagaagctggccgggtggactttcctccccttacaggactccccgagcgtgtctcagccccgctccctttgctagccaccagccctcatcgcctcactgcggaattcaggggctcctttacccttaccccattggttttcttcaccgggtctcaagtccgtctttcttactggggatgctttttggaagtttggtgacgttttctgaaatttcagtctgacacatgcaaaggctgagtaaaacagacatctcatgttccatatttactttttcttattgcacttcacctcacctagaccctggctatttattactttgggggagggagatctaaggttgtaaaacaccgtcttgcgcattctcaccgtgtgccccttctggagcgtctctgtcgttccctcccaccctactcctccccttctctctccccactcattactgcctggtctcgcccttccaccttttcc

SEQ ID NO: 2358 - DNA, 1116 bp, Artificial sequence
  DNA replication origin
cagtaaggtagccgccgccgccgccgccgccgcgtcccctcgccggctcgctggtaccggcagtgccatggcggccttcagcaagtacttgacggcgcgaaactcctcgctggctggtgccgcgttcctgctgctctgcctgctccacaagcggcgccgcgccctcggcctgcacgggtaagaaggcccgtagccgtgcagctttcccgggctggagcgggcgctccccgcgcgctctctctccccacccggccgacaggtctctttgcccgacggggtcgggcggagagagggccgaccgcgactgccgtgggacttcaatgtcagggtgtccgcgagtccccgccacgacggcgtcggtcccagctggcctgtccggcgacctcgctccaccccgggagtgcgaattcttctgtgcccgcgggcgaaccggcgcccagccagcactcaggcagcggcctccagttgggggtgggagggggatgcggtgtgtcccccacccccttccctacatcacccccttctgtgtcaactttctgggtgtgttctggttttgccatctcatcttcagaccgtgaaggatttgttttggggacgtggatgtgtgattgaggatggggattggattcgccaggctggaggctggtgtctaagtcacttggacgaggtttggctcgattcccgactaactgctattgaaagtcgcgagggtggcttctatgaaactattcccggtccacttggcaggattgccgtctaaagtggtgagcccttggagtcggtgaaccctttggtcggtgaacatttggtcggtggcatttcatccggaaaggctggatcggttctgtcggacttagagggaaatgttttccttcctgggctctgtaggtgaaagatgagagtgtggtttaggtgaggatcaagctcctttttaatgacacgccactgcttccaccgcgggagaatttcagtgcttagatttaactttgggaggttatcagttcagaaaaagtaaaaaagagagagctgaattacggttgcgacatacaggtatgtatgtcacatacatgcaatttttatttgctggacaagtgaaagagaaaaggctacttccca

SEQ ID NO: 2359 - DNA, 972 bp, Artificial sequence
  DNA replication origin
gataaagaaaagagagcattaacgttgactatgcctttagctggcagccccctttttttttttttttttttgagatggagtcttgctctgccgcccaggctggagtgcagtgacacgatctcggctcactgcaagctctgccttccaggttcacgccattctcctgcctcagcctcccgagtagctgggactacaggcacctgccaccatgcctggctaagtttttgtatttttagtagagatggggtttcaccgtgttagtcagcatggtctcaatctcctgaccttgttatctgcctgcctcagcctcccaaagtgctgggattacaggtctgactcactgcacctggccagctccagccacctttttaagaggaaattgctgggcaggtgggggagagctagttgcggaaggaaactaagccggaccaggcgtgaggaggggaggtgctaaaaggattatagggtgggggagcggaggccgaggaaaaattaggacctggcttggcctggtgaggagcagcctggggaggaggggagaggtcagatgggtctgtagaaaaggaagatcagaaagtctcagcgacgcttggggttgggactgaggggacagtcgggaggaaaagaaggatttgggacaagctgcattgggaacagagactagggagggactgatgtgtaaaaaaatgcctggacgtcaggcatctcagaccgtttgcccattttatgacaagaattatctagatcttataggatggaaaaattgaaagtgccattctctgactattggaactactctcgagtttgtatcaggcccaagtgacattacagtagaaaataagatgcttagattttaggtcaggtgagagttgaagaggttttaagttcttgagaacacaggctaagggagaagaaggaggaatggagggtggaaggttgcccatagcgaaggaggcaagtttaaagagaagg

SEQ ID NO: 2360 - DNA, 1039 bp, Artificial sequence
  DNA replication origin
gcgagcgcttaccaggtactcggcgcccaggcagtgcatcgtgcgctcgccggcgggggccggtgactgggagccgccgccgcctcctgtacgcggagacgcagcgcccgcgagccggggccggggccggggctggggctggggctggggctggagccggggccgggccggggaggggcgggcacggtgcagcgccgcctcccgttcgcctctgcgcctggcccggcgactgcgggcgctgcggtccactgggtccgcctcttcccggcatgggtttctgcccagctcacccgctgtcagctggggtcctgctctggtgggaggaagaggctcagacgcttccctgccctctcgcctcaaccacctcgaggcagcggctcccaggatgtgcactttgacgactaaagctgagccggcgccgccacgaccttgggcgggtggtcggcctctgccctgagcaggaagtagaaagtctcagcagacccttcctgagggccgagcaacagtgtagtggcgtattccacatagcaaacaggtaagcagcatttactgtgtgctggattctgttctcactgctattgttattcctaatctacggaggagggaaactgaggcacggccattggtgatgcaacttgttcgaggagacccagtaagttgtggaggcaggagtcgaacccagacactccgggagaccggcgctctcgaggtggtttactctgacttctctcccaccttgccttaggacaatcattgcctgacttcgcaattgaaatggtagtgtccactgaagcgactggtggcatagttttccaggtagtgtcagaccagcgcaaaagcactgttggggtgaggaatttaaaaaacgaaaaacaaaaaaaactgcaggccgacctccccccacctcctctcaatcaagcctctacccttccccctgccacccttagggttgctaggttaattgcttcctttaggtgctgcttctccctaagggtagaaacctgactggaggaaagatctgggtaagtgggagaaactg

SEQ ID NO: 2361 - DNA, 1049 bp, Artificial sequence
  DNA replication origin
ctcgggcgggcgcgggggcccccggggcacccttgggctggcctggcgctgggccgtgcttcgtttgctcttcgcgctgtggctcaccgttttcctggagaggggccgtcgaggcggcgcgagcgtctctgcctgtcccggtcgcgtccagtccccgggcttgcggggccggctcccgggcacccgcctggctttgttcccgcgccgtgggacaggactagtggctggcggtgggttcccgggcgcctggagtcccgcggcgccagcctttccggctgcgggggtctcgggggccgtttggtgactgcagaacgcgccctccgggaagggggcgctcctgcgtggccactcgcccttaggcggagcccgtctgcgcggccagggacccggcgagccgctgccgcagcccccgccatctgcccgggccccgggtgctggcggactccgcgcctccccacggggagagagaccgcctaatgtcccgccgaccccaggggccccgaggaacggaagccggtccgggacccatcacagtctccgatctcggtgcctgggaggcatttggaggcagattgctgctgctgcttctgctgttgcttttgcgggaaatggagacaaagcctgagcgcgccactgtgcgagtgatatctgcttaggcttgagactttttatgaaacactgagaagtttgaagtacattagactttcacgacataaaggattatttttgtgggttgcttttgtttggggcttgtttgctgaggcggcttatagtttggagcgattgggatttggtgacgctcagctttgccactgagcccaagaatgcgttaggtttatctttaggacttttggcctgggaaagagatgagaggcgtccccctccccaaatcctctccttccttcctccctccctgcattccaagcccatgacatcaggggtttctggggggagagaccagccaatcggcgcggaactgtgcacagaacgctcattgtctcctttctgctgttctggccaaagcgccacaaaggagggctgcctgtggt

SEQ ID NO: 2362 - DNA, 1256 bp, Artificial sequence
  DNA replication origin
gggtccaactgggtgctacagagcctcgagctccgctgcgaagcacccggctgcctcgctcgccgcccgcacctcggttccccacaggccgcccccgcctccgcctgggccttcgaggattggccgccgggcccgaccaatggagggccgcctcctcccgcctctgcgccgaggggcggtgcggccaattgaagggccgcgggggccgctttccctcccgctccctccccgcgaggtccccggcccccgccccagccctcacgccaccggggccggcggctaggcggccccgcccccgggctaggcagggcgcctgggggcttcccagccacaggccattcacgtcaacctccaggcatcctccgcggcgggccggaccgggccggcggaggggagcggaagcccaccggggctggcccgccgctgacccgccgcctccgtctgcctcctcccgggctctgggcccagcgcgcccagatgccgggcaggacccctccgcccgctgctggaacaccaatagcagcgttggagcctctgggccggaggaactggggcctccaccgacacctgcttcttccctcacctcgcagccttccacacctgttgatctgacctctgccccgctgccgcccaggagtaacctaaggcttttggcctgattcgagctcactccgtctaaacctctaaatgcggtgcgaaaaaatcctggggaatgtgccatgcaaagcctgggcatttcaagtgcttttctggattcgcatcaactcctctttacaggcatctttatccggaattcagctcgtcccaaaccccacgtggtgtagctctgcttgtgtttttgaatcccggggcctctttgaatcagaagccctttgtatagagataagtatcctttaggccagaatcagcctccatttttttcgcagtcccatttcctacccgtaatactttcttctgattttaaagccatttgatagagaagggacagggaacagaaccttcgccccccgcctgagcagctggtagactagatatcttccaaacattatctcatttacttccctggagttacaaataggtagatttcatgtccgttgaggggtgagaaagctgaaactttgagacttaagaatcctggccgaggtcagcctcctccgaagcttcatctcttgccaccactttctggtgcacacctaggacagatttcaatccctgagatcccaggatgaaacctatgtttgccaaataccagctac

SEQ ID NO: 2363 - DNA, 1120 bp, Artificial sequence
  DNA replication origin
gggaagccgcggcacccctctccgcgggctgcgcttggcggctggcgcgggggagccgcggggcgaggcaagcccgccttcctccccaaccccccctccaaacggcgtcacctgtgccgggtcccggggcgagtcgcgcgcgggcggcggctgcgccgagccgggagagggcggcgggtgtctacaggagtctgctcatccgggccggcccgagggctggcgctggccagtgccgcccggtgagatgctcacgggagccagggaagccgcgggttccgggccgcttggaggtgcagtcgcggaggctccagctaccgcggcggccgtcgcgcccgcccggactgcgggctcgggttaccgcagagctgctccttaaaggggccgcggccgctcgggctccggctcccgctccgggcggctccgaccctggccaaagtgggcggggccccgaggcgggccgccgagcagaccttcttgccctggaacttgggtcccggaaagagcccaaaaaccctaacacccgaagtcgcagcggagagatcctggaagctcacaccttgccaagggcagagggtgcaattcccgggttttccaaagcaagtcacaaaacttgccagcgggggaactgtgtgagcccgcccccgcagcggtcagtacctgggctagccacgtaacaaaaaatcttcttaaattatgaatttacattctgccttaaatgctcaaatactggggacttcatggttagatcatcagaaaagagatgaaaaggcaactgctggtttttcttgccacgtctgacacggccacactcgagtcccgccagttcttctttggggctgcaggtgcataccaaactggtagggggcgcgtgtagaagaagcgtgttctctccagcaccacctccagaattcctgaaaaacaccctcatgggtgcaccagcactacacctacacccggaacccctctgttgtcggggtgtggaagttggatttgaatatttggtgctggctgagaattccaagttgcctagtagataaagtttgacattaaatagatgttctgacctgttatatacagccccaaaagcctccaagtgatctgcatcaaccagagataattg

SEQ ID NO: 2364 - DNA, 823 bp, Artificial sequence
  DNA replication origin
tagcttgcagggaggtgtggagggagaggcgcgagcgggaacccgggctgcgtgtggcgcttgcgggccagctggagttccgggtgggtgtgggcttggcgggccccacactcggagcagccggccggccctgccggctccggcaatgaggggcttagcacccgggccagcggctgcggaggatgtactgggtcccccagcagtgccagcccgccagcgctgcactcgatttctcgccaggccttagctgccttcccgtggggcagggctcgggacctgcagcccgccaagcctgagcctcccaccccctccgtgggctcctgggtagcccgagcctcctccacgagtgccaccccctgctccacggcagccagtcccatcgaccacccaagggctgaggagtgcaggcgcacggcgtgggactggcaggcagctccacctgcagcaccggtgtgggatccactgggtgaagccagctgggctgctgagtctggtggggccttggagaacctttatgtctagctcagggattgtgaatccaccaatcggcactctgtctctagctcagggtttgtaaacacaccaatcagtaccctgtgtctagctcaaggtttgtgagtgcaccaatcgatactctgtatctagctactctggtggggccttggagaacatttatgtctagctcagggtttgtgagggcaccattggacactctgtgtctagctactctggtggggccttggagaacctttatgtctaggtcagggattgtaaacgcaccaatcagcaccctgtcaaaacagacccctgggctctaccaatc

SEQ ID NO: 2365 - DNA, 965 bp, Artificial sequence
  DNA replication origin
aaagtgaggagcgtctctgcctggccgccatcccatctaggaagtgaggagtgtctctgcctggccgcccattgtctaagatgtggggagcgcctctgccccgccgccccgtctgggatgtgaggagcacctctacccggccgcgaccccgtctgggaggtgaggagcgtctctgccctgcccccccgtctgagaagtgaggagaccctccgcctggcaaccgccccatatgagaagtgaggagcccctccgcccggcagccaccccgtctgggaagtgaggagcgtctctgcccggcagcccccccatccgggagggaggtgggggtcagccccctccaggccagccgccccgtccgggagggaggtgggggggtcagccccccgcccggccagctgccccgtctgggaggtgaggggcacctctgcccggccgcccctactgggaagtgaggagcccctctgcccagccaccaccccgtctgggaggcgtacccaacagctcattgagaacgggccatgatgacaatggcggttttgtggaatagaaaggggggaaaggcggggagaggattgagaaatcggatggttgccatgtctgtgtagaaagaggtagacgcgggagacttcattttgttctgtactaagaaaaattcttctgccttgtgatcctgttgatcggtgaccctacccccaaccctgtgctctctgaaacatgtgctgtgtccactcagggttaaatggattaagggtggtgcaagatgtgctttgttaaacagatgcttgaaggcagcatgcttgttaagagtcatcaccactccctaacctcaagtacccagggacacaaacactgcggaaggcggcagggtcctctgcataggaaaaccagagacctttgttcacttgtttatctgctgaccctccctccactattgtcctatgaccctgccaaatccccctctgtga

SEQ ID NO: 2366 - DNA, 1232 bp, Artificial sequence
  DNA replication origin
acacagcacatgtttcagagagcacagggttgggggtagggtcaccgatcaacaggatcacaaggcagaagaatttttcttagtacagaacaaaatgaagtctcccgcgtctacctctttctacacagacatggcaaccatccgatttctcaatcctctccccgcctttcccccctttctattccacaaaaccgccattgtcatcatggcccgttctcaatgagctgttgggtacgcctcccagacggggtggtggctgggcagaggggctcctcacttcccagtaggggcggccgggcagaggtgcccctcacctcccagacggggcagctggccgggcggggggctgacccccccacctccctcccggacggggcggctggcctggagggggctgacccccacctccctcccggatgggggggctgccgggcagagacgctcctcacttcccagacggggtggctgccgggcggaggggctcctcacttctcatatggggcggttgccaggcggagggtctcctcacttctcagacgggggggcagggcagagacgctcctcacctcccagacggggtcgcggccgggtagaggtgctcctcacatcccagacggggcggcggggcagaggcgctccccacatcttagacaatgggcggccaggcagagacactcctcacttcctagatgggatggcggccaggcagagacgctcctcactttccacactgggtagccaggcagaagggctcctcacgtcccagacgatgggcggccaggcagagacactcctcacttcccagacggggtggcggccgggcagaggctgcaatcttggcactttgggaggccaaggcaggcggctgggaggtggaggttgtagcgagccgagatcacgccactgcactccagcctgggcaccattgagcactgagtgaaccagactccgtctgcaatcccggcacctcgggaggccaaggctggcggatcactcgcggttcagagctggagaccagcccggccaacacagcgaaaccccgtctccaccaaaaaaatacgaaaaccagtcaggcgtggtggcgcgcgcctgcaatcgcaggcactcggcaggctgaggcaggagaatcaggcagggaggttgcagtgagccgagatggcagcagtacagtccagcttcggctcggcatcagtgggagaccgtggaaagagagggagagggagaccgtgggg

SEQ ID NO: 2367 - DNA, 2036 bp, Artificial sequence
  DNA replication origin
ggagggcggagggagaaaggcgcgcgaaggcgcggaggaggcgtcggctgcggcgcccactccccctagtcccagcgccctgccgctcgcctcccgctgccgggcgccggcgcgctcggctctttccgccgccgccgctgccgcgcggtggcccgtgcgcctcggcaccttcggcaatttccgtcgggccccagccgccattttctcgccgcttgtgtggctcgctggctgcgtggctcggttcttgtgagcgaagctttgtccggttcggcaatggacgggtatgtaatcgggccggcgagaaggtgtgtgtgagagaggagttggaccgtccttcggcccggtcccgggccggggagaaaccctcccgcggcccctcccagggctgggctgccgttacccaacccccgccccatcgcacacacccctccctttgcttcccccggcgggctttggtcgagaaaatgagaagaaagcgggcttggaggctggggaggcataggggcgatggcgggggtgaggatcccggagtgggagcgggcaccggcttggcggcgggggatggggtgggaaccccataacgtctccccggtctgtccctgccccctctaggagccatttcgatccgtaccttgggacccgacccttgggttagcggtgcctgtgagagcgagtgggatgggcagagacaggcctttggattgggggagcctctaggggaagaggagagaggcaccccatgtggaccccagccatgagcaacctctccggcctcgcccggccctccgtggtcgggagagatgccggtggcgggagctccggggaaagcctagtgggagccgctggggaaggggggagggcgtgcggcggcgggaggaagggggagggcagatgtcatactcctttgttttcatttgagtctggtagtgggggcgggagggaggaaaaaatgcctttttgtggggactgaaaacattcaaggcttggcaaaagggcccagaaattaaatcatctaaaaaacgaagtgtttgaagccgacatcagtcacatgggcaaaggccaacagcaatggcagaaacaagagcagatagtcaacaaagggctatctctttagctactttggtcagtttctggaaaaacgactataaaaacccagaaccatgctgcatctttgcgaacctgagtcaagacggaatgctgagtgaggtgagaggcaagactgtgaaatggtagggaccgatgtctcgctcatatgcttcacacctgaaaagactcagtaatttaactcaatgttagaaagggggcacgcttaaggtcaaaaatacagcagtatgcagctcttttgggagtgtaaacatagtatcatttaacaagtacatttattaaaatcagtgagtatttgaagaatcaacaatttggttaagcgcctagagtttggtgtgttttaaaaggtactaaaaacaagattttataaaagttaacacagtctcacagaattcaaatcatcctagatgttacctaaagattattttccagatgaaacaaatccagagaagttcagtattccccccagatcaacacggaaattgatgtcaaaacttgcactagaattcatgtttcctgattcctggttcctgtggagactactaaagagtttaagcgttaaattattaatctcagtatactggcattgtagaaatggcatagtgttttgggttttgttctttttggctattgaatgtgttgttaaaaaataccacaagttgtctcacatttgaaagttacttttagaaaaccaggttggtaacagtacaggtaagtcacggatcatctgtggtattttttatccccatctgtgtgtgagtggctggaagatttatgaatgatggactatcctaaaaagttttagagccaaagagtgagtgattagaagaataacaggaggttgaaactacttattttttctttgcagaatcgtcactgaggttgcagttggcgtgaaggtaggaaaatactatgtttgaaactgggattgt

SEQ ID NO: 2368 - DNA, 929 bp, Artificial sequence
  DNA replication origin
gaggagcgtctccgcccggcagtcaccccgtctgggagggaggtgggggtcagcccccgccaggccagccgccccatccaggagggaggtgggggggtcagacccccgcccggccagccgccccttccgggaggtgaggggcgcctctgcccggccgcccctactgggaagtgaggagcccctctgcccggccagccgccccgtccgggaaggaggtcggggggtcagcccccagcccggccagccgccccgtccgggagggaggtggcgggggtcagcccccagcccggccagccgccccgtccgggagggaggtgggggggtcagccccccgcccggccagctgccccatccgggagggaggtgggggggtcagccccccgcccggccagccgccccatccgggaggtgaggggcgcctctgcccggctgcccctactggggagtgaggggcgcctctgcccggccgcccctactgggaagtgaggagcccctctgcccggccaccaccccgtctgggaggtgtacccaacagctcattgagaacgggccatgatgacaatggcggttttgtggaatagaaaggggggaaaggtggggaaaagattgagaaatcggatggttgccgtgtctgtgtagaaagaggtagacatgggagacttttcattttgttctgtactaagaaaaattcttatcctgttgatctgtgaccttacccccaaccctgtgctctctgaaacatgtgctgtgtccactcagggttaaatggattaagggcggtgcaagatgtgctttgttaaacagatgcttgaaggcagcatgctcgttaagagtcatcaccactccctaatctcaaggacccagggacacaaacactgcggaagtccgcagggtcctctgcctaggaaaaccagagacctttgttcact

SEQ ID NO: 2369 - DNA, 1350 bp, Artificial sequence
  DNA replication origin
tcccagacggggtggtggccgggcagaggggctcctcacttcccagtaggggcggccgggcagaggcgcccctcactccccagtaggggcagccgggcagaggcgcccctcacctcccggatggggcggctggccgggcggggggctgacccccccacctccctcccggatggggcagctggccgggcggggggctgacccccccacctccctcccggacggggcggctggccgggctgggggctgacccccgccacctccctcccggacggggcggctggccgggctgggggctgaccccccgacctccttcccggacggggcggctggccgggcagaggggctcctcacttcccagtaggggcggccgggcagaggcgcccctcacctcccggaaggggcggctggccgggcgggggtctgacccccccacctccctcctggatggggcggctggcctggcgggggctgacccccacctccctcccagacggggtgactgccgggcggagacgctcctcacttcccagacggcgtggctgccgggcggaggggctcctcacttctcagatggggcggctgctgggcggagggactcctcgcttctcagatggggcggccgggccgagacgctcctcacctcccagacggggtcgcggccgggtagaggcgctcctcacatcccagacggggcggcggggcagcggcgctccccacatctcagacgatgggcggccgggcagagacgctcctcacttcctagatgggatggcggccgggaagaggcgctcctcacttcctagatgggatggcggccgggcagagacctcctttctttccagactgggcagccaggcagaggggctcctcacgttccagacgatgggcggccaggcagagacgctcctcacttcccaaacggggtggcggctgggcagaggctgcaatctcggcactttgggaggccaaggcaggcggctgggaggtggaggttgtaacgagccgagatcacgccactgcactccagcctgggcaccattgagcactgagtgaaccagactccgtctgcaattccggcacctcgggaggccgaggctggcggatcactcgcggttaggagctgcagaccagcccggccaacacagcgaaaccccgtctccaccaaaaaaatacgaaaaccagtcaggcgtggcggcgcgtgcctgcaatagcaggcactcggcaggctgaggcaggagaatcaggcagggaggttgcagtgagtcgagatggcagcagtacagtccagcttcggctcgtcatcagagggagactgtggaaagagagggagagggagaccgtggggagagg

SEQ ID NO: 2370 - DNA, 943 bp, Artificial sequence
  DNA replication origin
ttaaaagccctaaatcaccaactggtagatccctagagaaaaaaggtaattcatggaataatgaaggaaagaacaggagttacatattctcttgctggtgatagaatgtcgaatgcaaagacagcatctgtgttttctttcctacttcaactcattcttaaaatggactcgcccccgggagcttctgagaagggctccacccgttccctgcagacgacaatgttctttgagcgcaaaagctgtgagtatagataccctgggagtaattgtgggatcagacacaatggggtgggattaggggtaggcagagggtgtgtgtggagtacccttcactgggaatcctaaatattagaagaaaggcgaaaccctaggtggggaagcatgagagtgtgcctgcttccttcaagacacctcggtgtcagcctctccagggttcagactgctcttgtgggcaagagcccagtggggcacacgcacttcgtgcctgagaaaggcccatcctccagggggagaaggtatctgagatgtagctcagcttagagcggtcccagagcgacaagagggagagcttcacaggcctctaagtttatttgatttttctcctgcagtttccatttctcaggaattcagtcttcgtgcgtagcccgtgcacaaccaacgaccaccacgcagggaggaaacctggtcttagtgtttggccgcgctagtggaatcttctgggcgcctggtacgttcttgtccccagcactctgtccttccacctttgaagcgccttgataggacggtcccagatgcctcacaagaaggaaaggcaaggtgcaaagctggcaaagctgtgtggtccgacgctggcgagagctgagacctggagccccagcccacgccttccactctgggtcatccttcccagcttcatcttgggcatgccaactcctgccacgtc

SEQ ID NO: 2371 - DNA, 931 bp, Artificial sequence
  DNA replication origin
cctgcccggccagccgccccgtctgggagggaggtgggggggtcagccccctgcccagcaagccaccccatccgggaggtgaggggcgcctctgcccggccgcccctactgggaagtgaggagcccctctgcccggccagccgccctgtccgggagggaggtgggggggtcagtcccccgcccggccagccgccccgtccgggagggaggtgtgggggtcagcccccgcccggccagccgccccgtccgggaggtgaggggcgcctctgcccggccgcccctactgggaagtgaggagcccccccgcccggccagccaccccgtccgggagggaggtgggggggtcagcccacccacccggccagccgccccttccgggagggaggtggggggtcagccccgccgcccggccagccgccccgtccgggaggtgaggggcacctctgcccggctgcccctactgggaagtgaggagcccctctgcccagccaccaccccggctgggaggtgtacccaacagctcattgagaacgggccatgaggacagtggcggttttgtggaatagaaaggggggaaaggtggggaaaagattgagaaatcggatggttgccgtgtctgtgtagaaggaagtagacatgggagacttttcattttgttctgtagttaagaaaaattcttctgccttgggatcctgttgatctgtgaccttacccccaaccctgtgctctctgaaacatgtgctgtgtccactcagggttaaatggattaagggtggtgcaagatgtgctttgttaaacagatgcttgaaggcagcatgctcgttaagagtcatcaccactccctaatctcaagtacccagggacacaaacactgcagaaggccgcagggtcctctgcctaggaaaaccagagacctttgttcacttgttta

SEQ ID NO: 2372 - DNA, 1149 bp, Artificial sequence
  DNA replication origin
ggtgggtgggctgacccccccacctccctcccggacggggtggctggccgggcgggggggctcctcacttcccagtaggggcggccgggcagaggcgcccctcacctcccggacggggcggctggccgggcgggggctgacccccacacctccctcccggacggggcggctggccgggcgggggactgacccccccacctccctcccggacagggcggctggccgggcagaggggctcctcacttcccagtaggggcggccgggcagaggcgcccctcacctcccggatggggtggcttgctgggcagggggctgacccccccacctccctcccagacggggcggctggccgggcaggggggctgacccccaccacctccctccctgagggggcggctggccgggtgggggggctgacccccccacctccctcccggatggggtggctgccgggcggagatgctcctcacttcccagacggggtggctgctgggcggaggggctcctcacttctcagacggggcggtcgccaggcagagggtctcctcacttctcagacggggcggccgggcagagacgctcctcacctcccagatgggatggcggccgggaagaggcgctcctcacttcctagatgggatggcggccgggcagagatgctcctcactttccagactgggcagccaggcagaggggctcctcacatcccagacgatgggcagccaggcagagacgctcctcacttcccagacggggtggcggccgggcagaggctgcaatctcggcactttgggaggccaaggcaggcggttgggaggtggaggttgtagctagccgagatcatgccactgcactccagcctgggcaccattgagcactgagtgaacgagactccgtctacaatcccagcacctcgggaggccgaggctggcggatcactagcggttaggagctggagacctgcccggccaacacagccaaaccccgtctccaacaaaaaaatacgaaaaccagtcaggagcggaggcgcgcgcctgcaatcgcaggcactcagcaggctgaggcaggagaatcaggcagggaggttgcagtgagctgagatggcagcagtacagtccagcttcggctcggcatcagagggagaccgtg

SEQ ID NO: 2373 - DNA, 764 bp, Artificial sequence
  DNA replication origin
attggtgtgatgttccttgggctggtcgatctgaggacctgaggtcgtaggtggatctttctcatggagcaaagagcaggaggagaggggattgatctcccaagggaggtcccctgatctgagtcacggcaccaaatttcacttgcgtctgtgtgaagagaccaccaaacaggctttgtgtgagcaataaagcttttaatctcctgggtgcaggcgggctgagtccaaaaagagagtcagcaaagggagataagggtggggccattttataagatttgggtaggtgaaggaaaaaggggggttgttctctggcaggcaggaatgggggtcacaaggtgctcagtgggggagctttttgagccattatgagccaggagaaggaatttcacaaggtaatgtcatcagttaaggcaaagactggccattttcacttattttttggtggaatgtcatcagttaaggcaggaacaggccatttaaatatcacttcttttgtgattcttcagttacttcaggccatctggatgtatagtgcaggtcacaggggatatgatggcttagcttgggctcagaggcctgacacttgtagagttctttcacctccttagctagatgtattcctagatttatttgtggttatcataaatgggattgcattcttgatttgtctctcagcttgaatattgttggtgcactgaaatcctaccacaaaaacacacttaagtacatagcctacaggccctatcaagcaactgcacaataga

SEQ ID NO: 2374 - DNA, 1474 bp, Artificial sequence
  DNA replication origin
catctggaaatagagcatgctgctggtgagcgccgcgggcagcaggggcatgcacgcctcccgggccgggccgagccgagccgagcgggcggtcgacgcggtgggccccctccccggtccgccgaggcagccaccgggggcgcggcggcggaggcggcgggaggacgaggcacgggaggcgggatggagccgctggaggaagaggcggaggcaggtccgggcttcgaggcgccggcaggctgcagaggaggcggctacccccggacgagccccctctcccctgcccgccccctgcccgccgcaagcgccgcccgccccggcgcggggtcgcgagggagggcggggagtcccgggcgacgggcagcggccgctgcgcccctgcacgagaccattcgagaagcagcggcgctgggtcaatcccccaggctagcccggaggaggcgctgcgtgggcggacggggcggcagccggcgggacagcggcacctgtacccctcacagggcggacgctgtggggctggagaagctcctggcgggggtaaaatcaaaagggggggaggggaggcagtagagatggagcttccagaaactcttccgaggcaccagctgagaggtttaagaaacccgcacaacgcctgggaaaatggtgcgtggacgcgtcttccgagcgcaaagcccaccaaggcgcaaagtgccgatgcggcgcccagagtttcaaccggtgcgttcagcctgcatccctcgaattccttgacccagcccggggctggagcctggcggtggtttctaggcgctgttagaaaaatctcagcgaggtttctttgcctcctctgcagcttcctagggctttgtgtatatatatatgtatatacaaataataatagaaatcatagcccagtagctcccgaagcatcatctcttgtacagcggccccttcctggatccatgcattctcttgctcatcttttcagtctgtctttattagctgcttgtgagaggaggcattgcagattccaggcactgagcggtcccagccaccagggtaggaaaaaggactatttgcctcatctcgttctttattccctgaattccagggaactgcagggattcctcaggggtcgggataaaggagagggagaccaatgctggctcacagcacatgcatacaaaaattcatccgtccatggctatccacgcctatgcgtgggtatgtaactaactatggaactgcatatgtgcaaggagcccgttctgtcatgccatgtgggtccctgctgcaagcttagtcagcagactctcaaggggtctttctttgagcctcaggctgacactcctctactccagtgagcaggtgaggaagcatgaatacaagcaagaggaggaaaatatttttagagccctgccctgctcattaaaacctggaatcaccttagcagggttctagaatgttggttcattgtaataggctgtagctt

SEQ ID NO: 2375 - DNA, 870 bp, Artificial sequence
  DNA replication origin
gagatgtggggaccgccactgccccgctgccccgtttgggatgtgaggagcacctctgcccagccgtgaccccatctgtgaggtgaggagcgtctctgcctggccgccctgtctgagaagtgaggagcccctctgccaggcagccgccccgtctgagaagtgaggagcccctccgcccggcagccgccccatctgggaactgaggagcgtctccgcccggcagccgcctcatccaggaggtgggggtcagcccccgcccagccagccgccccgtccgggagggaggtgcgggggcagcccccagccggccagccgccccgtccgggaggtcgggggcgcctctgcccggctgccccttctgggaagtgaggagcccctctgcctggctgccaccccgtctgggaggtgtacccaacagctcattgagaaggggccatgatgacgatggcggttttgttgaatagaaaaggggaaaatgtggggaaaagacagagaaatcagattgttgctgtgtctgtgtagaaagaagtagacataggagactccattttgttctgtactaagaaaaattcttctgccttgggatgctgttgatctatgaccttacccccaacctggtgctccctgaaacatgtgctgtgtccactcagggttaaatggattaagggcagtgcaagatgtgctttgttaagcagatgcttgaaggcagcatgctcgttaagagtcatcaccactccctaatctcaagtacccagggacacaaacactgcagaaggccccagggtcctctgcctaggaaaaccagagacctttgttcacttgtttatctgctgaccttccctctactattgtcctatgaccctgccaaat

SEQ ID NO: 2376 - DNA, 1223 bp, Artificial sequence
  DNA replication origin
cctgagtggacacagcacatgtttcagggagcaccaggttgggggtaaggtcatagatcaacagcatcccaaggcagaagaatttttcttagtacagaacaaaatggagtctcctatgtctacttctttctacacagacacagcaacaatctgatttctctgtcttttccccacattttccccttttctattcaacaaaaccgccatcgtcatcatggccccttctcaatgagctgttgggtacacctcccagacggggtggcagccaggcagaggggctcctcacttcccagaaggggcagccgggcagaggcgcccccgacctcccggacggggcggctggccggctgggggctgcccccgcacctccctcccggacggggcggctggctgggcgggggctgacccccacctcctggatgaggcggctgccgggcggagacgctcctcagttcccagatggggcggctgccgggcggaggggctcctcacttctcagacggggcggctgcctggcagaggggctcctcacttctcagacagggcggccaggcagagacgctcctcacctcacagatggggtcacggctgggcagaggtgctcctcacatcccaaacggggcagcggggcagtggcggtccccacatctcagacgatgggcggccgggcagagacgctcctcacttcctagatgggatggcggccgggaagaggcgctcctcacttcccagactgggcagccgggcagaggggctcctcacatcccagacgatgggcggccaggcagagacgctcctcacttcccagacggggtgggcggccgggcagaggctgcaatctcggcactttgggaggccaaggcaggcggctgtgaggtggaggctgtagccagccgagatcacgccactgcactccagcctgggcaacattgagcactgagtgaatgagactccatctgcaatcccagcacctcgggaggccgaggctggcagatcactcccggttaggagctggagaccagcctggccaacacagcgaaaccccgtctccaccaaaaaaatatgaaaaccagtcaggcgtggcggcgcgcgcctgcaatcacaggcactcggcaggttgaggcaggagaatcaggcagggaggttgcagtgagccgagatggtggcagtacagtccagcttcagctcggcatcagagggagaccggggagagggagagggag

SEQ ID NO: 2377 - DNA, 1173 bp, Artificial sequence
  DNA replication origin
ttagtacagaacaaaatgaaaagtctcccatgtctacttctttctacacagacaaagcaaccatccgatttctcaatcttttccccacctttcccccttttctattccacaaaaccgccgtcgtcatcatggcccgttctcaatgagctgttgggtacacctcccagacggggtggtggccgggcagaggggctcctcacttcccagaaggggcggccgggcagaggcgccccccacctcccggacggggcggctggccgggcggaggctgaccccccacctccctcccggacggggcggctggccgggtgggggctgacccccacctccctcccggacggggtggctgccgggcggagatgctcctcacttctcagatggggtggctgccgggcggaggggctcctcacttctcagacagggtggccaggcagagacgctcctcacctcccagacagggtcgcggccgggcagaggcgctcctcacatcccagacggggcggcggggcagaggcgctccccacatctcagacgatgggcggctgggcagagacgctcctcacttcctagatgggatggcggccgggaagaggcgctcctcacttcccagactgggcagccaggcagaggggctcctcacatcccagacgatgggcggccaggcagagatgctcctcacttcccagatggggtggcagccgggcggagactgcaatctcggcactttgggaggccaaggcaggctgctgggaggtggaggttgtagcgagccgagatcacgccactgcactccagcctgggcaccattgagcactgagtgaatgagactcctctgcaaacccggcacctcgggaggccgaggctggcggatcactcgaggttaggagctggagaccagcccggccaacacagcgaaaccccgtctccaccaaaaaaatacgaaaaccagtcaggcgtggcggcgcgcgcctgcaatcgcaggcactcggcaggttgaggcaggagaatcaggcagggaggttgcagtgagccgagatggcagcagtacagtccagcttcggctcggcatcagagggagaccgtggaaagagagggaaagggagaccgtgggtagaggtagaggtagaggtagaggtagaggaagaggaggtagaggaggtagaggaggtagag

SEQ ID NO: 2378 - DNA, 781 bp, Artificial sequence
  DNA replication origin
tgggaagtgaggagcgcctcttcccggccgccatcccatctaggaagtgaggagcgtctctgcccagccgcccatcgtctgagatgtggggagcgcctctgccccgccgccccgtctgggatgtgaggagcgcctctgcccggccgcgaccctgtctgggaggtgaggagcgtctctgcctggccaccctgtctgagaagtgaggagcccctccgcccggcagccaccccatctgagaagtgaggagcatctccgcccggcagccaccccgtccgggagggaggtgggggtcagcccccacccggccagccgccccgtccgggagggaggtggggggtcagcctccgcccggccagccgccccgtccgggaggtggggggcgcctctgcccggccgccccttctgggaagtgaggagcccctctgcccggccaccaccccgtctgggaggtgtacccaacagctcattgagaacgggccatgatgacgacggcggttttgtggaatagaaaagggggaaaggtggggaaaagattgagaaatcggatggttgctttgtctgtgtagaaagaagtagacatgggagacttttcattttgttctgtactaagaaaaattcttctgccttgagatcctgttgatctatgaccttacccccaaccctgtgctctctgaaacatgtgctgtgtccactcagggttaaatggattaagggcggtgcaagatgtgctttgttaaacagatgcttgaaggcagcatgctcgttaagagtcaacaccact

SEQ ID NO: 2379 - DNA, 1262 bp, Artificial sequence
  DNA replication origin
aagcgtctctgcccggccacccttcgtctgggatgtgaggagcccctctgcccggctgcccagtctgggaagtgaggagcacctcttcccggccgccatcccatctaggaagtgaggagcgtctctgcccggccgcccatcgtctgagatgtggggagcgcctttgtcccgccgccccgtctgggatgtgaggagcgcctctgcccggctgcgaccccgtccgggaggtgaggggcgcctctgcccggccgcccctactgggaagtgaagagcccctctgcccggccagccgccccgtccgggagggaggtgggggggtcagccccctgcccggccagccgccccatccgggaggtgaggggcgcctctgcctggccgcccctactgggaagtgaggagcccctctgcctagccaccaccccgtctgggaggtgtacccaacagctcattgagaacgggccatgatgacgacggcggttttgtggaatagaaaagggggagaggtggggaaaagatagagaaatcagattgttgctgtgtctgtgtagaaagaagtagacatgggagactctattttgttctgtactaagaaaaattctgccttgggatgctgttgatctatgaccttacccccaaccctgtgctctctgaaacatgtgctgtgttcactcagggttaaatggattaagggtggtgcaagatgtgctttgttaaacagatgcttggaggcagcatgctccctaagagtcatcaccactccctaatctcaagtacccagggacacaaacactgtggaaggccgcagggtcctttgcctaggaaaaccagagacctctgttcacttgtttatctgctgaccttccctccactattgtcttatgaccctgccaaatccccctctgcgagaaacacccaagaatgatcaataaaaataaataaataaataaataaatacaagaaaagaaaagaaagggaagaaggaaggaaagaaggaaggagggagggagggaggaagggaggaaggaagggagggagggagggagggagggagggagggagggaggaaggaagggagggagggaggaaggaaggaagggatgttatattttctttctgtagcccaatagatatatcagcgcataccccaagggatacatagccactctgtagacctctaatgcaaatcactgaaactaaaatttttatatacagtaaatgaaacatcagagagcctacagtaggtcagattccatgactcagtt

SEQ ID NO: 2380 - DNA, 978 bp, Artificial sequence
  DNA replication origin
ttgggggtaaggtcatagatcaacagcatcccaaggcagaatttttcttagtacagaacaaaatagagtctcccatgtctacttctttctacacagacacagcaacaatctgatttctctatcttttccccacctctcccccttttctattccacaaaaccgccgtcgtcatcatggcccgttctcaatgagctgttgggtacacctcccagacggggtggtggctaggcagaggggctcctcacttcccagtaggggcggccaggcagaggcgcccctcacctcccggatggggcggctggccgggcagggggctgacccccccacctccctcccggacggggcggctggccgggcagaggggctcttcacttcccagtaggggcggccgggcagaggcgcccctcacctcccggacggggtcgcagccgggcagaggcgctcctcacatcccagacggggcggcgggacaaaggcgctccccacatctcagacgatgggcggccgggcagagacgctcctcacttcctagatgggatggcggccgggaagaggtgctcctcacttcccagactgggcagccgggcagaggggctcctcacatcccagacgaagggtggccgggcagagacgcttctcacttcccagacggggtggcggccgggcagaggctgcagtctcggcactttgggaggccaaggcaggcggctgggaggtggaggttgtagtgagccgagatcacgccactgcactccagcctgggcaacattgagcactgagtgaatgagactccgtctgcaatcccggcacctcaggaggccgaggctggtggatcactcgcggttaggagctggagaccagcccggccaacacagcgaaaccccgtctccaccaaaaaaatacgaaaaccagtcaggcgtggcggcgcgcgcctgcaatcgcaggcactcggcaggctgaggcaggagaatcaggcag

SEQ ID NO: 2381 - DNA, 860 bp, Artificial sequence
  DNA replication origin
gtctattccttaaagtagcaaaatataaccgatctgaaagacaagtttaaaagacagaaaaaacatatgagaagtagagaagtggaagtgaaggtgggtggtaacatacgaaggatcacaatttaaagaccccattaacacgtggaattcttgcagaaacctcatccctcccagaaagctagagactcaagagcacaacagttaggcaagaggaggacctgaccgaggaactcagcggggctcagagcacccacatttcccttgtttcaggccagcagagtaggcaggagctgggggtacccgcagaactggaggtgcaagtttggttcccaaatctccagacctcagcagctgcgagaaggggaagaaagaggtgagcctcccgacgcagcttcggagatttgaaaaagaggaagggagagagacttggggggtgtggttgggggtgtcccgaaaaccgaagcctgcgatggtggagtaaaggtgaccggtgagcatccggagcaggctccccatgagctgctgagtgccggagtacgggcagaagccggtgctgtcccattacgaggccgagaggccatccgagggagctgcagagggagcaagggacacaagaaagagaagccggaagcagggggtcctcggagaaaggagagtccctagaggggacgagagcgcgcgcagcggctgcaggacactggcagcctcaggagaaggtggggacagtggcgcgggaagtgaagagttgggggcaagaaagcgttggaagatgcggggcggctgctcctcacctttcatgaactcacaagccccgattagttcccctgactccgctgccatcttaagcgagatacgcacgg

SEQ ID NO: 2382 - DNA, 1697 bp, Artificial sequence
  DNA replication origin
cggcggcggcggcggcgcagccgggcaactggtgcagcaggtggaagttgagcacgctgacccgcttgacgctgacacgcacgcggcgcacgatgcccaggtagcagtgcagcagcagagctgtctgcgccagcagcgccgcggcggccagcagcgccgggtagtggactcgcggtggcgcggcgccgggccgcggtgcccagggcgggagcagcagcacgaggcccagggcgagcgcccaggacagcgccagcatgcccgccgtgtggcgcctctggtacagcgcctggtaggtggcgggcgcccgggtgatgagcaggtagcggttcagggccacgaggcagtgggagaggagggacaccgtgagtccgaggcccagcagcccaccccgtagcaggcggtagctgcccccagcgccgtcccagtctgcggggggctccgcagagccggtgggcaggagcccgagcaccgcctcctgcggcatccagagggcgcagacgctgaggtcggcggcgcagccgttcacgatgaaggcgttgctggtggtctgcagctttcggaaggacgacacgagatagatgaccatgccgttggccagcgtgcccccgatggccaggcccgaatacaggagtgacaccgggatgcgccggcccgcccacgactcctcttcctcgcagagcagcagcagcgagccaccggtggtggaggaggtggatgtggaggaggagttggtcattctggccaactcttcacacctccctcgctagcgtcggcttctggcagcgcggtccatcctgacactgtcctgcctgccagaagggcaaagacatcccttcagccctctgccactgacacaaaaggctgaagcagaataatgggctgggggagggggagaaagggagctcgaggaggaggacgggggtggcagatgacaggtgcctgcctcggaaatgtctccagagccaggggaaaggccactttgcattggattcagcaggtatcggggaagccctaggacagagcaatacctaaaacagtctcctcttctcccccaacacacacacacacacacagagagagagagagagagagagagagagagagagagagagatatgttgccagctggaggacctagttccaggagaaagcagagatatcccagctggggaaaatcccatgggaaagaggtgaaggttaccttgcgtttaggctggtccttagccggtgtctcagggggagggatgccgggaaatacctcctcagcaacagcatcagtggtccagaaatcaacaggagaaactcagctgggatcagtgccaggagcaagtgcccgcttctcccaagcagcatccacacacatggtcctgggcaggaactagcagctgcagggagacttctcagctggtatcagggctggagaaagtaaagtggcgggctgcaagcccaggcgggtgggcaggcaggcagcagcagcaagaatgcttggctgcaaaagcagaagctgagctcaagaggagagcaccctgtgctcagaagcaggagtggtggctgatgtggtgaacccactcgaagctctctcctgcttagttatacatcatccagggaaaagacagcctttccacgcttggcatgaattattcaatagcttccaacttgtaaaaggaagaaaaatatcttgctcagaaagtcctgtcg

SEQ ID NO: 2383 - DNA, 890 bp, Artificial sequence
  DNA replication origin
gtcccgcgccatgtgctggcactcctcagcccctttggatggtggatgggactgggcgccctggagcagggggcggcgctcgtcggggaggctcgggccgcacaagagcccacggagggggtgggaggctcaggcatggcgggctgcggatcctcagccgtgccccgcgggaaggcagctaaggcccggcgagaaatcgagcgcagcgccggtgggccggcactgctggggcacccagtacaccctccgcagccgctggcccgggtgctaagcccctcattgcctggggccggcagggccggccggctgctccgagtgcaggacccgccaagccaacgcccacccggaactccagctggctcgcaagcgccgcgtgcagccccggttcccgctggcgcctctccctccacacctccccgcaagctgagggagccggctccggccttggccagcccataaaggggctcccacagtgcagcggtgggctgaagggctcctcaagtgccgccaaagtgggagcccaggcagaggaggcaccgagagcgagcgagggctctgaggactgccagcacgctgtcacctctcaatagcaagaggggacagataaattccttggtagaacgggacagtgccgggtaaaacccaaacttcaagccacagacagtctgaaacctgaaaactgacctaccagttttgggtggagcccgtcaccggagtaagaacttctttacttcctggatgccttttagccaatcaaatggtgctttttccagacctgcccaaggaccaatcagcatgcactcctccattctgagcacatataaaccctggactcagcctcacaggtggctgctacctgctttccggcctcctctcccacggagggctgc

SEQ ID NO: 2384 - DNA, 1022 bp, Artificial sequence
  DNA replication origin
atcttttccccacctttcccccctttctattccacaaaaccaccattgtcatcatggcccgttctcaatgagctgttgggtacacctcccagatggggtggtggccgggcagaggggctcctcacttcccagtaggggtggccgggcagaggcgcccctcacctcccggacttggcggctggccgggcgggggggctgacccccccacctccctcccggacggggtggctggccgggtggggggctgacacccccacctccctcccggatggggcagctggccgggcagggggctgacccccccacctccctcccggacagggcggctgccaggtggagatgctcctcacttcccagacggggcagctgctgggcagagggactcctcacttctcagacggggcggctgccaggtagagggtctcctcacttctcagatggggaggccgggcagagatgctcctcacctcccagaaggggcggtggggcagaggcgctccccacatctcagatgctgggcagccgggcagagacgctcctcacttcctagatgggatggcggccgggcagagacgctgctcactttccagactgggcagccaggcagaggggctcctcacatcccagacgatgggcggccaggcagagacactcttcacttcccagacggggtggtggccgggtagaggctgcaatctcggcactttgggaggccaaggcaggtggctgggaggtggaggttgtagcgagctgagatcacgccactgcactccagcctgggcaccattgagcactgagtgaaggagactctgtctgcaatcctggcacctcgggaggccgaggctggcagatcactcgcggttaggagctggagaccagcccggccaacacagcgaaaccccttctccaccaaaaaaatacgaaaaccagtcaggcgtggcggcgcgtgcctgccatcacaggcactcggcaggctgaggcaggacaatcaggcagggaggttgcagtgagctgagatggca

SEQ ID NO: 2385 - DNA, 898 bp, Artificial sequence
  DNA replication origin
gccatcccatctaggaagtgaggagcgtctctgcccggctgcccagcatctgagatgtggggagcgcctctgccccaccgccccttctgggaggtgaggagcatctctgcccggcctccccatctgagaagtgaggagaccctctacctggcagccgccccgtctgagaagtgaggagtccctctgcccagcagctgccccgtctgggaagtgaggagcatctccacctggcagccgccctgtccgggagggaggtgggggggtcagccccctgcccggccagctgccccatccgggagggaggtgggggtgtcagccccccacccggccagccaccccgtccgggagggaggtgggggggtcagcccccccgcccggccagccgccaagtccgggaggtgaggggcgcctctgcccggccacccctactgggaagtgaggagcccctctgcccggccaccaccccatctgggaggtgtacccaacagctcattgagaacgggccatgatgacaatggtggttttgtggaatagaaaggggggaaaggtggggaaaagattgagaaatcggatggttgctgtgtctgtgtagaaagaagtagacatgggagacttttcattttgttctgtactaagaaaaattcttctgccttgggatcctgttgatttatgaccttacccccaaccctgtgctctctgaaacatgtgctgtgtccactcagggttaaatggattaagggcggtgcaagatgtgctttgttaaacagatgcttgaaggcagcatgcttgttaagagtcatcaccactccctaatctcaagtacccagggacacaaacactgcggaaggccgcagggtcctctgcctaggaaaaccagagacctttgttcacttgttta

SEQ ID NO: 2386 - DNA, 1414 bp, Artificial sequence
  DNA replication origin
ggggctgcgtgagccccgcaaggctgcaggcgggggcgcgggatcccctttctggccgccgcccccctccgccggcccctcccccgcgccccgccctcggccacagaccccagccccggccgccggcgcgctcccacccgcgcgtctggggacttgcggaccgcagcgagaccggccggcgtgctgggcatgctcagtggcgggccgggcgctggagtcggaagcctgtgcgcggcagccgccgccgagccggccggggcgcacggagagcgcgcgggactcgctgcagcggcggccgggtcgcggcgcacccgggccgggaccggagccgagcctagcgcggcgcccgcgacccgtcagccgcggctcctgctccctcgatcccgcgcggggaaagggccggcggctgttggcgtcggcggggcgcggaggaaccgcggcggcggcggcggcggccgcatccttgccgcccgccccggcccagccgcgtcccggagccgtcgggcatggagccgtggaagcagtgcgcgcagtggctcatccattgcaaggtgctgcccaccaaccaccgggtgacctgggactcggctcaggtgttcgaccttgcgcagaccctccgcgatggagtcctgctctgccagctgcttaacaacctccgggcgcactccatcaacctgaaggagatcaacctgaggccgcagatgtcccaggtgaggaggccggcacgggcgccccgcctccagccggcagctcccattaatcatgcggctaatttctttgtgtaaatgcaaacgtctaggtgcgctgagcttgccctgcttcccagccttctgctttgggaccacttcggcaccactttggcgtttcctaccttggcttgaaatggtttagctcctcaagctgaatgcgaaagctttgcgtccggagatggtgtgaggatttcgtaaaggctttctgtgaggcgggaaagaaataagttgtcttagggtgcccttcacctactctgcgtgtgtgtggcgcgacaaagggaatttgatcaagctcttctataataacgaaggggagggacgaaacgaggtgatggggtaatttgcctttagtctcttcttttgctttgcgtcttgtactcatgttttcctaaaagaggaaccatgacatacatgaggactcgaggaagtgaagggcgtttggtcccgttatctgtccaggagtgacattggtcaaagggaagaacagggagcagaacccggaggccgcccccagggcccctgagctggtggccagccggcaagctcccgtttacagctcttcctaagccatgtgagaaggagcgagtccagcctctctcagcagcgacaggaaatgagaagtttcactagagattccgctttccttcctgcagtgccctgctcag

SEQ ID NO: 2387 - DNA, 1005 bp, Artificial sequence
  DNA replication origin
acgcggctgggccggggcgggcggcaaggatgcggccgccgccgccgccgccgcggttcctccgcgccccgccgacgccaacagccgccggccctttccccgcgcgggatcgagggagcaggagccgcggctgacgggtcgcgggcgccgcgctaggctcggctccggtcccggcccgggtgcgccgcgacccggccgccgctgcagcgagtcccgcgcgctctccgtgcgccccggccggctcggcggcggctgccgcgcacaggcttccgactccagcgcccggcccgccactgagcatgcccagcacgccggccggtctcgctgcggtccgcaagtccccagacgcgcgggtgggagcgcgccggcggccggggctggggtctgtggccgagggcggggcgcgggggaggggccggcggaggggggcggcggccagaaaggggatcccgcgcccccgcctgcagccttgcggggctcacgcagcccccggcgtcctggggtcttctctcggggcggcttcccggctttgcggggagtgtggctgaatactgtaatacgatggggtcccccaggaccccctaaacaacaaatgctcaaaggagcgacggattaattggggcacccagactccccagagcaatgaaaaaagtgcctagagcatcagtagagcacggcgctgaaagttttagagatcgtcgccccctcgccccttgcagctctatcccctccattctctatagctgattcctcagcctattcctcctagttgcccctagtggtgttttggcaccctcaaagtgagtgagagtgcgtgtgtggagacgcctgcggaaaccgccccgatccctgagcctatttcctcgcgaggtgattttcacttggagctggtttgcccctgcactgtcaggctcggaactgtttgccgttgctgttctggcccttttgctgaccccacaaaaacctgcttgagaaaggcctgtgccacggtgctagactgcgcat

SEQ ID NO: 2388 - DNA, 882 bp, Artificial sequence
  DNA replication origin
gctgcccagtctggaaagtgaggagtgtctctgcccggccgccatcctgtctaggaagtgagcgtctctgcccggccgcccatcgtctgggatgtgaggagcccctctgcctggctgcccagtctggaaagtgaggagcgcctcttcccggccgccatcccatctaggaagtgaggagcgtctctgcccggccgcccatcgtctgagatgtggggagcgcctctgccccgccgccccgtctgggatgtgaggagcgcctctgctcggccgccccgtctgagaagtgaggagaccctccgcccggcagccgccccgtctgggaagtgaggagcgtctccgcccggcagccaccctgtccgggagggaggtggaggggtcagccccccgcccggccagccaccccatccgggaggtgaggggtgcctctgcccggccgcccctacagggaagtgaggagcccctctgcccggccaccaccccatctgggaggtgtacccaacagctcattgagaacgggccatgatgacaatggcggttttgtggaatagaaaaaggggaaaggtggggaaaagattgagaaatcggatggttgctgtgtctgtgtagaaagaggtagacatgggagacttttcattttgttctgtactaagaaaaattcttctgccttgggatcctgttgatctatgaccttacccccaaccctgtgctctctgaaacatgtgctgtgtccactcagggttaaatggattaagggcggtgcaagatgtgctttgctaaacagatgcttgaaggcagcaggctcgttaagagtcatcaccactccctaatctcaagtacccagggacacaaacactgcggaaggccgcagggtcctctgcctag

SEQ ID NO: 2389 - DNA, 1191 bp, Artificial sequence
  DNA replication origin
gggggtaaggtcatagatcaacaggatcccaaggcagaagaatttttcttagtacagaacaaaatgaaaagtctcccatgtctacctctttctacacagacacagcaaccatccgatttctcaatcttttccccacctttcccctttttctattccacaaaaccgccattgtcatcatggcccgttctcaatgagctgttgggtacacctcccagatggggtggtggccgggcagaggggctcctcacttccctgtaggggcggccgggcagaggcacccctcacctcccggatggggtggctggccgggcggggggctgacccctccacctccctcccggacagggtggctgccgggcggagacgctcctcacttcccagacggggcggctgccgggcggagggtctcctcacttctcagacggggcggccgagcagaggcgctcctcacatcccagacggggcggcggggcagaggcgctccccacatctcagacgatgggcggccgggcagagacgctcctcacttcctagatgggatggcggccgggaagaggcgctcctcactttccagactgggcagccaggcagaggggctcctcacatcccagacgatgggcggccgggcagagacgctcacttcctagacaggatggcggccgggcagagacactcctcactttccagactgggcagccaggcagaggggctcctcatatcccagacgatgggcggccaggcagagacgctcctcacttcccagacggggtggcggctgggcagaggctgcaatcttggcactttgggaggccaaggcaggcggctgggaggtggaggttgtagcgagccgagatcatgccactgcaccccagcctgggcaccattgagcactgagtgaacgagactccgtctgcaatcccagcacctcgggaggccgaggctggtggatcactcgcggtcaggagctggagaccagcccggccaacatagcgaaaccccgtctccaccaaaaaaatacgaaaaacagtcaggcgtggcggtgcgcgcctgcaatcgcaggcactcggcaggctgaggcaggagaatcaggcagggaggttgcagtgagccgagatggcagcagtacagtccagctttggctcggcatcagagggagaccgtggaaagagagggagagggagaccgtgggga

SEQ ID NO: 2390 - DNA, 1169 bp, Artificial sequence
  DNA replication origin
gcgacccacctcctcggcgtcctggcccagagggatgcccaggttcctgagcccctcctgcagctcgccgatgtccaccactccgtccccattgcggtccagtgcctggaagagggtctcgtagcgcgtcggctgctccgcgtcctggcaggccgcggtgggcagcacgaagtcccgcagccagcgcaacatggtcccagaggcgcaggcggcctggccgaggaagtcacgggagatcgagggctgcggggcgagaccgggaccagcgcgaggccgggctgggcggggcgcgcggcgcaacagcgtttggggcgccgtcggggttgcggctgcggcgcgcagggcgcagggcgcaggagcggagaccccacccgagcccgcgcggagcgcagggtgtggccgtcccgccgctgctggggaggagctcgccgcgctggcctcggcggcactggccgggcccgcctccagagagccggaagtgagggagctgggagctgggtctcgggaggtgctgtgcggacccggggtcgacctctgcccagttgccagtcccgctgtcagcatgcgggtccgaggaagaggcccccagcaggtccagggctgcagcgtcagcgcgtcggtggcttgggagcggggtcttgaagactggttactccacttaaagaccctctcgggccggagccttggcggtcagcccagagctgcttctctctgcctggaaactgggccatggagggcattgtctctcacggatgtctaattttttcgtggttgcacacctgggatggcgattctgctttaaaaagcagagagttaaatcctaaagcatctattggagcaattataaaacaaaaaggagaaactcctggatttgttgcagaaaagatcaacagccatctgcgtgggcaacggggaaaagaaggactagtttggtaggcagcttagctaggatttgcccgtgattaagcgtatagagtgtctgccagctgcacttatcagaaaaaaccacagcgccctcctccttctcaagatgggtgcagttccgaggtttggagcttattactcaggcaagacagaacttattactgcctagcatggaataacggaaggaacattggacttaacagagaaagtacctaatccttcaggtgtgacatagcgtctccggg

SEQ ID NO: 2391 - DNA, 1269 bp, Artificial sequence
  DNA replication origin
ttttggagttttatttaatgtcgggagcagattgggtaataaaatgtattttgagaataagacggccttttgaccttttagggtctagggctgtaaagtgtctcagggttgctgccaaacaagtcatgaactgggctggatttttatatttgacaaaaaagagcctaaatgctatctgatttgggataaagaaaaaggagcattaaccttaactatgcctttagctctaaccacctttttaagagtaaattgctgggcaggtgggggagggctagtcaccgaatgaagctgtaagccaaaccgggtgtgaggaggggaggtgataaaaggattatagggtggaggagcggaggctgaggaagaattgggacctagctcagcctggtgaggaggggagaggtcagatgggtctgtagaaaaggaagattagaaagactcagtgacgcttggggttgggactgaggggacaggcgggagggaaaaaaggaagatttgggacgagttgcaccgggcacagagactagggagggaccgatatgtgaaagaatgcctggacgtcaggcacctcagaccgtctgcccattttatgacaagaattatttagatcttgcaggatgcaaaaattgaaagtgccgttttctggctatttggaactactgttgagtttgtattggggtcaagcggcattgcagaagaaaataaggcatttaggttttaggtcaggtgtgagttgaagaggttttaagtttttgagaacacaggccaagggagaagaaggaggaatggagggtggaaagttgcccatagtgaagaaagcaagcctagagaaaagaaagagtagagacacggagggaaggggtttgggggttcttaccttccagaaaagtgggaaaggggttggggcatggatataaggggttggggcacagagataagaggtcagggcatggaaataagggattggggcacagagatataagaggttggggcacagaaataagagattggggcacagagatatgaggttggggtacttgcccctcctctagaaaagtgggacttgctgctaagagtgaaggagaaggggttgggggtttcttgccccccagaaaggtggagaaggggtagagacccagagagaaggggttggggtacttgcctctttcccagaaaagcgggacttgccgctaagagtgaatgaccaaggcaggcatcccttcgtggtctgacacctctgaaacctgggtgaataatcagagaggcgtccct

SEQ ID NO: 2392 - DNA, 958 bp, Artificial sequence
  DNA replication origin
ggggcacctctgctcggccgcccctactgggaagtgaggagcccctctgcccggccagccgccccgtccgggagggaggtgggggggtcggccccccgcccggccagccgccccatccgggagggaggtgggggggtcggccccccgcccggccagccgccccgtccgggagggaggtgggggggtcagccccccgcccagccagccgccccgtccgggagggaggtggggggggtcagcccccctgcccggccagccaccccgtccgggaggtgaggggcgcctctgcccggctgcccctactgggaagtgaggagcccctctgcccggccagccgccccatccgggagggaggtggggggttcagccccccgcccggccagccgccccgtccgggagggaggtggggggggtcagcccccctgcccggccagccgccccgtccgggaggtgaggggcgcctctgcccggccacccctactgggaagtgaggagcccctctgcccggccaccaccccgtctgggaggtgtgcccaatagctcattgagaacgggccaggatgacaatggcggctttgtggaatagaaaggcgggaaaggtggggaaaagattgagagatcagatggttgccgtgtctgtgtggaaggaagtagacatgggagacttttcattttgttctgcactaagaaaaattcctctgccttgggatcctgttgatctgtgaccttacccccaaccctgtgctctctgaaacgtgctgtgtccactcagagttaaatggattaagggcggtgcaagatgtgctttgttaaacagatgcttgaaggcagcatgctcgttaagagtcatcaccaatccctaatctcaagtaaccagggacacaaacactgcggaaggccgcagggtcctctgcctaggaaaaccagagacctttgttcacttgtttatctgctgacc

SEQ ID NO: 2393 - DNA, 1327 bp, Artificial sequence
  DNA replication origin
cccagtaggggcggccgggcagaggcgcccctcacctcccagacggggcggctggccagggggagggctgacccccccacctccctcccggacagggcggctggccaggcggggggctgaccccccacctccctcccggacggggcggctggccaggttggggggctgacccccccatctccctcccggacggggtggctggccgggctgaggggctcctcacttcccagtaggggcggccgggcagaggcgcccctcacctcccggaccgggcggctggccgggcggggggctgacgcccccacctccctcccggacggcacggctggccaggcggggggctgaccccctcacctccctcccggacggcacggctggccgggcaggggggctgaccccccacctccctcccggatggggcggctggccgggcgggggctgaccccccccacctccctcccggatggggtggctgccgggcggagacgctcctcacttcccagatggggtggctgctaggcagagaggctcctcacttctcagacggggcagctgccgggcggaggggctcctcacttctcagacggggtggttgccaggcagagggtctcctcacttctcagacggggcggccgggcagagacgctcctcacctcccagacggggtctcggccgggcagaggcgctcctcacatcccagatggggcggcggggcagaggcgctccccacatctcagacgatgggcggccgggcagagatgctcctcacttcctagatgtgatggcggctgggaagaggcgctcctcacttcctagatgggatggcggccgggcggagacgctcctcactttccagactgggcagccaggcagaggggctcctcacatcccaaacgatgggcggccaggcagagacgctcctcacttcccagacggggtggcggccaggcagaggctgcaatctcggcactttgggaggccaaggcaggcggctgggaggtgtaggttgtagtgagccgagatcacgccactgcactccagcctgggcaccattgagcactgagtgaacgagactccatctgcaatcccggcacctcgggaggccgaggttggcggatcactcgtggttaggggctggagaccggcccggccaacacagcgaaaccccgtctccaccaaaaccaatcaggcgtggcggcgcgtgcctgcaatcgcaggcattcggcagactgaggcaggagaatcaggcagggaggttgcagtgagccgagatggcagcagtacagtccagctttggctccgcatgagagggagaccatggggagac

SEQ ID NO: 2394 - DNA, 904 bp, Artificial sequence
  DNA replication origin
caggctggagtgcagtggcgtgatcttggctcactacaacctccacctcccagccgcctgccttggcctcccaaagtgccgagattgcagcctctgcccggccgccaccctatctgggaagtgaggagcgtctctgcctggccaccatcccatctaggaagtgaggagcgtctctgcctggccgcccatcgtctgagatgtggggagcgcctctgccctgctgccccgtctgggatgtgaggagcgtctctgccaggccgccccgtctgagaagtgaggagcccctccgcccggcagccaccccgtctgggaagtgaggagcgtctccgcctggcagccaccctgtccgggagggaggtgggggtcagcccccgcccggccagccgccccgtcagggagagaggtgggggggtcagccacccgcccggccagccgccccgtccgggaggtgaggggtgcttctgcccggccgcccctactgggaagtgaggagcccctctgcccggctgccaccccggctgggaggtgtacccaacagctcattgagaacgggccaggatgacaatggcggttttgtagaatagaaaggggggaaaagtggggaaaagattgagaaattggatggttgtcgtgtctgtgtagaaagaggtagacatgggagacttttccttttgtgctgtactaagaaaaattcttcttccttgggatcctgttgatctgtgaccttgcccccaaccctgtgctctctgaaacatgtgctgtgtccactcagggttaaatggattaagggcggtgcaagatgtgctttgttaaacagatgcttgaaggcagcatgctcgttaaaagtcatcaccactccctaatctcaagtacccagggacacaaacactgcggaaggccgcag

SEQ ID NO: 2395 - DNA, 1091 bp, Artificial sequence
  DNA replication origin
cgcccttaatccatttaaccctgagtggacacagcacatgtttcagagagcacagggttgggggcaaggtcacagatcaacaggatcccaaggaagaagaatttttcttagtacagcacaaaaggaaaagtctcccatgtctacctctttctacacagacacgacaaccatccaatttctcaatcttttccccacttttcccccctttctattctacaaaaccgccattgtcatcctggcccgttctcaatgagctgttgggtacacctcccagccggggtggcagccgggcagaggggctcctcacttcccagtaggggcggccgggcagaagcacccctcacctcccggacggggcggctggccgggcgggtggctgacccccccacctctctccctgacggggcggctggccgggcgggggctgacccccacctccctcccggacagggtggctgccaggcggagacgctcctcacttcccagacggggtggctgccgggcggaggggctcctcacttctcagacggggcggcctggcagagacgctcctcacatcccagacggggcagcagggcagaggcgctccccacatctcagacgatgggcggccaggcagagacgctcctcacttcctagatgggatggtggccaggcagagacgctcctcacttcccagatagggtggcggccgggcagaggctgcaatctcggcactttgggaggccaaggcaggcggctgggaggtggaggttgtagtgagccaagatcacgccactgcactccagcctgggcaccattgagcactgagtgaacgacactctgtctgcaatcctggcacctcgggaagccgaggctggcggatcacttgtggttaggagctggagaccagcccggccaacacagcgaaaccccgtctccaccaaaaaaatacgaaaaccagtcaggcgtggtggcgcgcgcctgcagtcgcaggcactcggcaggctgaggcaggagaaccaggcaggggggttgcagtgagcggagatggcagcagtacagtccagcttcagctctgcatcagagggagaccgtggaaagagagggag

SEQ ID NO: 2396 - DNA, 1276 bp, Artificial sequence
  DNA replication origin
gcactgaggagagctcctcgagctcgaagtccaccttaaacttaaacttcttcttcttcatcatcgtgagagccaggcgcctgcaagctgggcgcacggccgggcgccgccgcctcagcttggccgagccccggatcagcccagccccatggccggggccgcgagctgtgcgcgggggcgcggccggggggcgccgcaggccggccgcggccggggccgctgccgccgcctctcgcggcagcctgggccggaacgcggcggcagctgcggcgcggaccccgaccgcccgcggggagcggtcgtgctgcagctcgcccggggaggtgagcgcccttttggtgctcagctcgccgccgccgccgccgccgcctccgccgccgctgccgcccgtctgggagtcgggagaggcgaggctcgaggaaccgccgcctcagcgcctcgggggtcgggggcgcccccagcggccgcggcctgcagcgcacggcggggcggaagccggagggagggcggggactttgtgggcgggcgcgggcttggccgcggactctaacccgcgacggcagttagcacgtcacgcctttctggggttaaaaaaagacaaacccgacagagaaagcttccttctaccgcttcctctccgcctttcttttcagtttttgcaccgcctcctttctcccccaccccctccagtggtttctttcctttgggtttgagagccatgggttaatagaggcaattaaaatctcagcgttgttttggtcaaattgaaatcctaaaactaaaatttccgttaggtactctaaattcacgagccttcaaatataaaaggaagataaggtaggaaaaaggaaaatgatgtgctgagggactatcaagggcccaggcaccgtactgctgcaggcgctttctctggggtatagcttatctagttcctgtcacccaggacaaaagataaaagagcaaagaagcagttaaaataataccctccctttaaaaatttgtctgtctatactgagaactgaaatgcttaaaatcaaattctgcaggcagtctggcatggctacgctgtaatcccagctactcgggaggctgaggagggaggttagcctgagccggggaagcggagcttgcaatgatcggagatcgcgccactgcactctagcctgggcaacagaacaagcccctgtcttaaaaacaaaacaaaatcttcagagcaggcttaaaaaaaaatctccctaggggaataacaattacctgccttctgtaatcatgcatg

SEQ ID NO: 2397 - DNA, 1091 bp, Artificial sequence
  DNA replication origin
cgtgacgtgctaactgccgtcgcgggttagagtccgcggccaagcccgcgcccgcccacaaagtccccgccctccctccggcttccgccccgccgtgcgctgcaggccgcggccgctgggggcgcccccgacccccgaggcgctgaggcggcggttcctcgagcctcgcctctcccgactcccagacgggcggcagcggcggcggaggcggcggcggcggcggcggcgagctgagcaccaaaagggcgctcacctccccgggcgagctgcagcacgaccgctccccgcgggcggtcggggtccgcgccgcagctgccgccgcgttccggcccaggctgccgcgagaggcggcggcagcggccccggccgcggccggcctgcggcgccccccggccgcgcccccgcgcacagctcgcggccccggccatggggctgggctgatccggggctcggccaagctgaggcggcggcgcccggccgtgcgcccagcttgcaggcgcctggctctcacgatgatgaagaagaagaagtttaagtttaaggtggacttcgagctcgaggagctctcctcagtgcccttcgtcaatggggtcctcttctgcaagatgcggctgctggacggcggcagcttcaccgccgagtcctccaggtaactcgcctcccgcgccgcctcgcccctttctgcttggccagggcttgttggatgggcagcatctctccttggcccatttgctcgcctttccctagggaccgctctaaaatcagtcgaatttattgatctgcaaagtgctttgcaaatgggttcttctcagctggccttggttcctgcgctcctgactccagatggtgcctggtatctgctcttccctcccaaatcctctaggaatgggagcaatggccagagagggaggatgcttctgttttctcttaagacatttccatatttgtgaaatgcaaagtagaacttgagctgttaaaaactaaaataacccaaactgcaggagttccaagagcccagctctgaacagaaacctgtgcttagcacaattccttctcccttgtagattacaaggggacttggccacccactc

SEQ ID NO: 2398 - DNA, 1235 bp, Artificial sequence
  DNA replication origin
caaaatgaaaagtctcccatgtctacttctttctacacagacacggcaaccatccgatttctcaatcttttccccacctttcccccctttctattccacaaaaccgccattgtcatcatggcccattctcaatgagctgttgggcacacctcccagacggggtggtggccgggcagaggggctcttcacttcccagtaggggcggccgggcagaggcgcccctcacctcccggacggggcggctggccgggcggggggctgaccccccacctccctcccggacggggcggctggccgggcagaggggctcctcacttcccagtaggggcggccgggcagaggcgcccctcacctcccggacggggcggctggccgggcggggggctgaccccctcacctccctcccggatggggcggctggccgggcggggggctgacccccccccacctccctcccggacagggtggctgccgggcggagacgctcctcacttcccagatggggtggctgccgggcagagaggctcctcacttctcagacggggcagctgccgggcggaggggctcctcacttctcagacggggtggttgccaggcagagggtctcctcacttctcagacggggcggccgggcagaggcgctcctcacatcccagatggggtggcggggcagaggcgctccccacatctcagaggatgggcggccgggcagagacgctcctcacttcctagatgtgatggcggccgggcggagacgctcctcactttccagactaggcagccaggcagaggggctcctcacatcccagacgatgggcggccaggcagagacactcctcatctcccagacgggatggtggccgggcagaggctgcaatctcggcagtttgggatgccaaggcaggcggctgggaggtggaggttgtagccagccgagatcacgccactgcactccagcctgggcaccattgagcactgagtgaacgagactccgtctgcaatcccggcacctcgggaggccgaggctggcggatcactcgcggttaggggctggagaccggcccggccaacacagcgaaaccccgtctccaccaaaaccagtcaggcgtggcggcacgtgcctgcaatcgcaggcactcggcaggctgaggcaggagaatcaggcagggaggttgcagtgagccgagatggcagcagtacagtccagcttcggctccgcatgagagggagacctt

SEQ ID NO: 2399 - DNA, 1028 bp, Artificial sequence
  DNA replication origin
atgtggggagcgcctctgccccgccaccccatctgggatgtgaggagcgcctctgcccggccgccccgtctgagaagtgaggagaccctctgcctggcaaccaccccgtctgagaagtgaggagcccctccgcccggcagctgccccgtctgagaagtgaggagcctctctgcccggcagccaccccatctgggaagtgaggagcgtctccgcccggcagccaccctgtccgggagggaggtgggggggggtcagccccccgcccggccagccgccccatccgggagggaggtgagggggtcagccccccgcccggccagccgccccgtccgggaggtgaggggcgcctctgcccggccgcccctactgggaagtgaggagcccctctgcccggccagccgccccgtccgggagggaggtggggggtcagccccccgcccggccagccgccccgtccgggaggtgaggggcgcctctgcccggccgcccctactgggaagtgaagagcccctctgcccggccaccaccccgtctgggaggtgtgcccaacagctcattgagaatgggccatgatgacaatggcggttttgtggaatagaaaggggggaaaggtggggaaaagattgagaaatcggatggttgccgtgtctgtgtagaaagaagtagacatgggagacttttcattttgtgctgcactaagaaaaattcttctgccttgggatcctgtagatctgtgaccttacccccaaccctgtgctctctgaaacatgtgctgtgtccactcagggttaaatggattaagggcggtgcaagatgtgctttgttaaacagatgcttgaaggcagcatgctcgttaagagtcatcaccactccctaatctcaagtaatcagggacacaaacactgcggaaggccgcagggtcctctacctaggaaaaccagagacctttgttcacttgtttatctgctgaccttccctccactattgtcccatgaccctgccaaatccccctctgtgagaaacaccca

SEQ ID NO: 2400 - DNA, 874 bp, Artificial sequence
  DNA replication origin
gacatgggggtgggggaggagacaggggaggtggacaggggtacttcatgaaggcctttaagccatgcctgaggctgagtaattgggcagcattgaaggtttttttttttgtttttttttttttgagacacggtctcattctgtcactcatgctagagtgcagtggtgtgatctcagctcactgcaacttccactccccaagttcaagtgattctcctgcctcagcctcccaagtagctggagttacaggtgtgcaccaccgtgcctggctaatttttgtatttttagtagagacggggtttcaccatgttggctgggctggtcttgaactcctgacttcagggtgatccacctgcctcggtctcccaaagtgctgggattacaggcatgagccgctgcacctggctgcattgaaggttttcaagctgacaaatgggaagcaccatgggggcaaggctgaaggcacagagattggttcggaagccagaatccaggtaacaagtcaggagggcctgaacgaaggctggcaatgaggctggagatggggacaaatctgggggtttagggaaatggtggcagatggaaagggctgaagagaggaagggaagaggcttggatgagctccagatttctggcttgggtaaccaaggtcaggaataaaagtagaggatcccgtttagaatgggtgtggaaggcaagcaggaggcaagacgtcaagttgagtttggggcattttgagtttgagctacctttgggacatctaagtagagggctccagtaggcagttagaccagtggatctggcctgcagagctgtttgggtgagaaatgtagatttgggcatagttgtgagttgacgctggagtggatgagac

SEQ ID NO: 2401 - DNA, 975 bp, Artificial sequence
  DNA replication origin
ctgagggctccagggcaagcccggaggagcggcggaggagaacgcggctgggaggccggcggccagggccccgaagcggccggctccgggctgcggcaggagcacgacggcggcggtctgggtttggcgtcggtcctccctcctaccgcccgcgcgtcaatccatcagttcgtcaatccgtccttctcacgtccgcccctcccggcccagcgactcctcagctcagcctcttgcagactgcggttgtcaagtgccggggagccgagctctacccgcgagcggcagccaatcgccgcgcttccccgaggcgcctcaggaccccgccgcgcggggcggccaggcaggtgcctgagccgaagggcgagtcggcggggcggggcggggcggggaggggcgtggaggggcgggcccaaagctggggcggggaggggcggggcggaccaaagcctgggcggggcggaccaaagcctgggcggggcgggcgggggtcgggcttggagggaccggctaggggcccgggggagtagcagaacgggtgcggcaatagcgtgagactggtggcagggacgtagacccttagctggccggtgaccccatgtcccaaaatagcacgaacaggattgtcgcctgcaaatggagaagactgcgcattaggattgactcttcatactcctccccgataattaataaaggttaatgaaattaatgttgccttctacccttctttcgctgctttcctaggtcccacttcgtcccagaaaactccagtagtttgtttgtccccttcctggtttctcattttgcaaagctgatctgccttgaaagcatttttcagttacttaacatttaatatgttcaggttttgtctactcctgttggttgtaagccccttattccacaaatatacgtgatgttcaaccgagcttaattaagcatccaggaagtataaccataaggaagaatacaattacacaa

SEQ ID NO: 2402 - DNA, 1417 bp, Artificial sequence
  DNA replication origin
tctttcttttccccacatttcccccttttctattcgacaaaaccgccatcgtcatcatggcccgttctcaatgagctgttgggtacacctcccagacggggtggcggccgggcagaggggctcctcacttcccagacggggcagccgggcagaggcgtcccccaccaccctcccggacggggcggctggccgggcgggggttgcccacgacctccctcctggacggggcggctggccgggtgggggctgccccccacctcctggacggggcagctgccgggcggagacgctcctcacttcccagatggggcggctgctgggcgaaggggctcctcacttcccagacggggtgactgccgggcggaggggctcctcacttctcagacggggcggccgggcagagacgctcctcacctcccggacggggtggcggtcgggccgagaggctcctcagttcccagacggggtcgcggccgggcagaggcgctcctcacatcccagatggggcggcggggcagaggcgctccccacatctcagatgatgggcggccgggcagagacgctcctcacttcctagacgggatggcggccgggaagaggcgctcctcacttcccagactgggcggccgggcagaggggctcctcacatcccagaggatgggcggccagtcagacgctcctcacttcccagacggggtggcggcggggcagaggctgcaatctcggcactttgggagaccaaggcaggcggctgggaggtggaggttgtagccagcccagatcacgccactgcactccagcctgggcaacattgagcactgagtgagcgagactccgtctgcaatcccggcacctcgggaggccgaggcgggcagatcactccatgtcaggagctggagaccagcccggccaacacggcgaaaccccgtctccaccaaaaaatgcaaaaaccagtcaggcgtggctgcgcgcgcttgcaatcccaggcactcttcaggctgaggcaggacaatcaggcagggaggctgcagtgagccgagatggcggcagtacagtccagcctctgctcggcatcagaggggagaccgtgcaaagagggaaaggaagagtgggagggggagggagcccaactaatttttgtagagacaagatttcacagtgttggccaggctggtctggaactcctgacctcaagtgattgcccacctcagcctttcaaagtgctgggattacaggtgtgattctgataagtggaattctaaagttagaaatagggctgggtgaggtggctcatgcctataatcccaacactttgggagacctaggcaggcagatcacttgagccaaggagtttgagaccagcctgggcaacatggcaaaaccctgtctctacaaaaattagctgtgtgtggtgacg

SEQ ID NO: 2403 - DNA, 810 bp, Artificial sequence
  DNA replication origin
tctgagatgtggggagcgcctctgccccgccgccccatctgggatgtgaggagcgcctctgcccggccgcgaccccgtctgggaactgaggagcctctcggcccgaccgccaccccgtccgggaggtgaggagcgtctctgcccggccgccccgtctgagaagtgaggagcccctccgcccggcagtcaccccgtctgggaagtgaggagccccttcgcccagcagccgccccatctgggaagtgaggagcgtctccgcccggcagctgccccgtccaggaggtggggggcagcccccacccggccagccgccccgtccaggagggaggtcgtgggcaacccccgcccggccagccgccccgtccgggagggtggtgggggacgcctctgcccggctgccccgtctgggaagtgaggagcccctctgcccggccgccaccccgtctgggaggtgtacccaacagctcattgagaacgggccatgatgacgatggcggttttgtcgaatagaaaagggggaaatgtggggaaaagaaagagagagcagattgttactgtgtctgtgtagaaagaagtagacatgggagactccattttgttctgtactaagaaaaattcttctgctttgggatcctgttaatctataaccttacccccaaccccgtgctctctgaaacatgtgctgtgtcccctcagggttaaatggattaagggcggtgcaagatgtgctttgttaaacagatgcttgaaggcagcatgctccttaagagtcatcaccactccctaatctcaagtacccagggacacaaa

SEQ ID NO: 2404 - DNA, 1411 bp, Artificial sequence
  DNA replication origin
cggcgcttgggaaattgcggctaaggcaaactcctcgcttaaactcggatcaactacagtgtcagggcttctcttctagccggttgtaaaagcacggatggatttggcgggatgtaagatctccaggagtggccttcgtaggagggaacacgtactggggcctcttccaggcgacgacgtctggagggtgatctctccatcttctttctctcggttcacacgccacgtgtgcaacatcggagatgctcataaaataacccctggcccgaaagggcagtagaaaacggaaatttgttggctggcttggaggatgcttccactgtgttcttcacacgagccccgggcctgcctgttgggccggttgcgcaccccgggcgcgcgctctcccgcgcccacgccgcgcgcaccagcggcggcggctgccatggcgacccgcaggtgagctgcagaggcgcgcgtggtccctgccccacccgcgcggagccagagaggaggcggttgtcaaggcgacgtgggtaggaggagaggacagagggaggaggaaggatgggcggtgttggcgtagccgcagggaggtgactgaagcgagcctggcctcttgcatcctccgcctgtgtacctccctcccctttttttccgccttctgccagcagaagcagcagccgcagcacctgagccgctactgccgctcactcaggacaacgctatggctgagcctgggcacagccaccatctctccgccagagtcaggggaagaactgagaggcgcataccccggctgtggcggctgctgctctgggctgggaccgccttccaggtgacccagggaacgggaccggagcttcatgcctgcaaagaggtactgccgcccccctacccgatcccgctttggtcacaaaagtcttggatccaggcggagaccttggggacccaggcgcagagagtttcagacgccacggagtttagatttctttggggatgaggcgtggggggagggaagaggagccagtctggcgtcatgaggaggccagcacattggaggactcacggatagatcatcctcacagattgggatgctgagctcagcgagaaaggtcccagccccaagaaggggagctacctgggtacctgaactcagaatgagggaggcagacgagttattttccagttaggatgaactcaccttaaaagtggttgacaagaaaagattatgcacagagaagcaaaataggaagaggaaagaagagtagtgggagaggaaaggagttaggaaggccagaaaaaagtatcagagcgaagtggttttatcatggctacacaaaacggagtgtgaaggtgggagatgtgcgagagggatgataggattccagctctctagttccttgtttattaaacatcggttagtgcagac

SEQ ID NO: 2405 - DNA, 1141 bp, Artificial sequence
  DNA replication origin
tttcttggttgggggagtggtggagaggggcaaggccctgaccccctcacttcaacccagcagcactactcatctgttctatattctggccttccacttcagatttcttttgaagaaaagaattctactgctaaataaacatttgagaaccattcaccttattcaatcccctcattttacaaaaagggacattgaggcacagaatttgagcaaggtcacatagctgtggtgttggaggctgggacccaggcccaggcatccccccaggccagggcatccccccagggactacctgactgggcccctggctgctccaggatgtagggaagccttttctgggtcgcctgcacggctcctgcctggctctccgtgtggtccagcttcatgtctggtcctcttggagaacccctggaatcctgcacaccctctcaaatgaagctgccttggagagggtcaggagcccgggtaccaggtaggcctcctcgctggtcacaaaactgtggcggaaggagggggtagccgcaggacatggacagggaggcaggaggggatgagaggccgcctctctagacaggacctcagggggcagtgtaagccccttgtctagaatccaggaagcctgtgttaaagctaggctccaccgcagccggcctccgaatctggtgacagtgtgtttgcaccacctggcttccacccactctgacccttctaatttacttccctggaaaagcccaagtggtgtccaacatgaggctggggtcattcttccaacagcccgaccccaaggggcatgctggtcagacaacagcctcgctggtggggtggaggggacggtagggagcgagtgggcccggtgactcattgtgggtgcttctctgggattttggaggctttgttgtgttgctcagggcccttttaactctgtctgacctatgggaggggacagcaacgagggcttttatgactggaatgaactggaaacttggcctctgagagcccttaaaatgttttggaaacctctaggcatacttagggtacttccaccatgattatcatcggctgtgtggcttccgatcgctaattcgcaccgggcatctggcgaggccggcctggggaaattgggatggagggtcctgctgga

SEQ ID NO: 2406 - DNA, 2466 bp, Artificial sequence
  DNA replication origin
gtccagaatcacgatcagtggctgagatctgcaggacgctagtgaagggtggcacatcctcatagacactgccctggtaggagtctcgcaggaactgaggggcattgtcattcacgtcgttcaccaggatctccaggtaggtggtgtcggacttctggggaatgccattgtcccgagcagtaatggccagggtgtaagacacttggtcttcatagtccagctcagcctgggtggtgacagcccccgtgtctgcatcgatgcggaactgggggatgctgtcctccatgaagtaggtgatgcgggcattctcacctgtgtcctcatccgtggcgctgatcagcaccaccgtggtgcctgccggccggtcctcattaacattcactgtatagtgggagctctgaaagacaggacgatgggtgttggcgtcggtgacattcaccacaatctgtgccgtgtcctgccgagtgccatcggaggcggtaacagccaacacatactgccgctcaagtttgtagtccagtggcagggcaagggataccagcccaccaccactttggctggtgatggagaagcggtttcgagtattgccactggtgatctggtaggtgatgacactatgagcatcacggtccacagctgacaccgtcaccacgctggtgcccacagctgcatcctcattgagccgcactgtgtactctggttgggtaaaggttggattgttgtcgttgacatccaggacagtcacgctgacactggccgaggcagtgagtgctggagtgccatggtctcgagcttctaccccaaagctgtagaaatcaacttcctcccggtccagttcagcagccacagagatccagcctgtgccattgttgatggtgaaggggaagtcatgtcccaccccagcaaggcggtattccaggcgggcattgtcaccagcatcagcgtcgatagcctggacatggagaaccaggtagcctaaggggacactctccaggacagtagcctggaaaggggtgctgacgaagatgggggcattgtcgttgatatccaggacctgtactgtcaccaagccagagacattagagagtgggggacggccaccatcctgtgctcgcacccgtagggtgtactccttggtcgtctcatagtcaagagggctcaccacatccagagctccagtctgggcatccagataaaactgtccccgagcattgccactcatgatgctatagtgcaccacggcattgctccccttgtctcgatccgaggctgtgactcggagtactggggcccctggagtcacatcctccctcacctggaccacatagcgcttctcactaaactggggggcattatcattgtcatcctccacagaaaggaaaacagcggctgtggtactccgaggacccgggtcccgaccctggtcacttgcctctaccgtcagctggtaggattccacctcttcccgatccacagggccacgggttcggatcaccccagagcgagggtcgatctcaaagacttcagaggggctgcccccagacccctccagcaggcggtacagaatattggcattgggaggggcatcaccatccgtggccctgacagtgagcacctcatagccaacctccaggttctccctgaggctctccttgtactcctgctgctcgaacacagggtcatggtcattggtgtcagtaaccaagatggtgagtgtagccagggcacttcgtcggggcatgccgtggtcctgcgccgtgaccctgaagacgtgggtgctcttggtctcacgatccagctcctcggctgtggttactgcaccagtgactgggtccagggagaagaactggttggagcggctatcaaagagggcatccatggtgtactccagtcgacctgcctcaccctcgtccgggtcgatggccctcagggatgcaacaggggtgcctgctggctggttctccggcactgtggcctggtagctggggggctggaactggggggctgtatttacattccttttccgacgcccacccagggactcttctggtgacctttcccctgccctgagcccgggggcctgtgccagcttgcaggactggcatctgagccgtggagcctttaagcacgggtgctcctcgggcagtgtgagcttgccctgtggggaaaggtggcctccaatgcccaggaggcgacagctccaggggcagccttcaggagctggtggtaggggaatatgggcctcggattctggacaccaaaccctcaggccatcgtggtggggtaccaggtggccagtcagctcagtgcccgcatccctgcagcggctggtgtagagccagaggttcgacgctgaggatggacagagccagcccatgggggcgcaggcccccgaagagcctcgtcccctggaccccaaggaacgacagggccccacttggtctcccaatagtggcggcggcagca

SEQ ID NO: 2407 - DNA, 855 bp, Artificial sequence
  DNA replication origin
gcagtgggttgactgttggggatgggggacaacagcagagggggcaggtggccacagatggtggaccagatgggaagcaacagagacatgctgggagaggggcccaggcggggcctaagacgatggcggtgggggacacagggagaagtgtttgttcccagggctgaggggtggcaaagtttctcccgctccatggccttggttgccccctctcctctcttaatcagttatgggcactgtgtgtggagtcttgggctgctttctgcctggagggaatatcccgtcaaggaatcattaggcagatataccaggtatacaagagctctgtgccagctgagcatcctggtgcggggaagtctgaaacggagaggaaagtagagcctgatgacataaatctgggcaggcttcctggagcaggtgagctagggcaggttagaagactcagaggactgtgggctggtgtctgggtgggaaggaacagcctgtgcagcagctttgagacgagagcaggaggaacagaagtgggtgatgacaagcaggcttgctggtgagagctagtgagaataagcaagtgatgaggctggagggtaggtgggcagtcggctgaggacatggctgagatgggggtctgctttcagccttcccggcttcagctgagccaccgctggtacagtcagccaccgcaagtaggtacaacacagatgcagaatttgttcccatgtcccttgcctactcccaccccaccccagaaacatgggctcctgccccgttactgctagggtaagcatttgctttttatatctagttgggctccccctgctatgtggttttgtttgtttgtttgggacagagtct

SEQ ID NO: 2408 - DNA, 1503 bp, Artificial sequence
  DNA replication origin
cctgacctcgtgatccacccgcctcagcctcccaaagttctgggactacaggcgtgagccactgcgcccggccccctgctatgttttaaagtccgtttattctttgtggagactgaatagattgtcatccacatctcagtgttttctgaacacctactatgtgtaaggcattgtaataaatacaaatatgaatatgccagtagctcatgcctgtaatcccagtgctctagaaggctgagatggaggatcacttgaggccaggaatttgagaccagcctggacaacacagcaagaccccatctctacacacaaacaaaaattagccaggcatagttgtgagcacctgtggtctcagctatttgggaggttgaggtgggaggatcgcttgagcccaggagttcgaggctacagtgagctatgatcgtgccactgctctccagtgtaggcgacagagagtctgtctcttaaaaaaaaaaaaaaaaagactatcccttcttgccctgtaaagccatttcctccttctccaggccccagctttcattttttagctaaataaaattcattcccatgtgtatgtgcattcaggtgtgtatggtatttctgggcttagggtgtgtgggtggaatgagacaccagcaagtgtgttttagtgcttagctgtttataagtgagtgtgttgcctgggggcatagcaggcatttgggtgtaatggttgagccaagtgggtgatgagtagctagaggccctaggaccagagaagagactgactcagtggggctctggggtctcagagtggagagctgcccaggcccttctatctctgccttccggtcccccaccccgactcaccctgtctccagcatggggcagtgggtgatgatgtcactggttaacgtggctcagctggatttcctggggtggggccccccaggctacccacagcagcccagagagttgggcgggaagaatgctttgtgttggatgttgccatggggatagcaggtctgcgcgcccaagcagccatggggctcagtgggagggggactaggtggcccactgacccagtttacccactcccccccacccccgccaactccctgctgctgtgggggagtggggaacacagccatggttgcgattatcgtggtgttgaggtgtagaggctgagggggcagggggatgatttttgtgggtctcaggatgctctgggccctgtagaaaagtatgaaaaagacaacatagggttcccgcgcaggcagcacagactctgggggaagggagcaggagcggtggcttgggcagggaaaggtgcacaaacattaagaggtgtgccgtgcatcagcgacagaaggttttgggaaaggatgcaaagagaactgcaaatctcatcccctgagccctgaaggagtgattggcccacacgtgacatacctggctcagcacccttatgccagttggaaaggagagcctttcttggtgggtggtgcaggaatatgcaggctg

SEQ ID NO: 2409 - DNA, 2093 bp, Artificial sequence
  DNA replication origin
accattgcacctgtatgggcctgggcagaatggctccgcctccgcccagctgctggtaaaagaggatcctggctaggcggcttccctgttggcctgtcagccaaggtctttacacatcctgctccctgggatgctcactgtctctgctctatgctcctgacccctcccttcaggctcctgtgtcttctcaggacaccccctgctccccttccctgtgggcctttccttcctagatgcccaggccctgctccttgtcctccagggccatgcccactggctctgccagcagccataggcaggccccactccttccccgctgcatcttcctgcccagaacttgccagacttgacttctctctgctgctgctaggggtggggggaaggggagggacgggcttgggggaggggagagaagtctttgtccaggaggatggtggggggggttgggagggggggggttagagcaggcgaacaacagtttccatggaaacaagagccagtcactaggcacaggagctgagaacctatctctagaatctgggaatggggagggagagaagggtggattttcccatctgatgttggagttttcagctcctctgttgaattcttgtctgctctcagggctcagtttcccactctcagcatgtcccaggtgcacagaggtccttagtctggaccgcagggctcaaggtgggagtcctctgccccattcctgggggctccccagcttctctctcatactcttccataacccagacaaatctaagtggaagcctggtcccatccccagggagggaaactgatctcagtgcctgagagggacaaaagcaccagtgggaaggagggaggagggaggctcccagccctcccgctgtcctgcaggcccatctgcttgtgcacatttaccctcttgggggccaggacacccccaggtgtgcttggtagtgtgacatcgaaggctcccgggatccgggccttacaaccaagtgtcccagcaggcctgtgcttatgaaacccaaatggggtagggaaggtgctggggactccgaggaacttgcaggggagcagtgcgtggagctgtggcgagagcggctcagtgagccaaacagggtgcccatgaagggctggggaccataggtctcagagaagatggcacacgagaggaagtggggatgcctgggaggtttggggagtattacgagggtcacgggaggccatgggagctatcactgggttgtggggggtctcagttcccctcctgtcctcaggtacttggtactcacctgcctttcctcttgtccaggtgagcactgtgaggtgagtgctcgctcaggccgttgcaccccgggtgtctgcaagaatgggggcacctgtgtcaacctgctggtgggcggtttcaagtgcgattgcccatctggagacttcgagaagccctactgccaggtgaccacgcgcagcttccccgcccactccttcatcacctttcgcggcctgcgccagcgtttccacttcaccctggccctctcgtgagtggctgggcactgggggtggggagtgggcctggtgggcatctgaggtgcctcctgttctgtggttgaagtaagaggtcaggcagtgaaagcgtggagcaggctgccggcagagccaggtctgctcttggagttgcctgtggttctgccagcagatctccctcccctgcgctggttaggtggcgggggtgctggcatccaggtgggtaccccattccctgcccccatccccaactcctgttcaggtttgccacaaaggagcgcgacgggttgctgttgtacaatgggcgtttcaatgagaagcatgactttgtggccctcgaggtgatccaggagcaggtccagctcaccttctctgcaggtgatcacagttgccccccatccttgcccatcttccaaaggccccaagtcttccagcccctgaccccaagccacatactctatcagccaaatctgggcccagccccagccactggcaccccaaaccctgccattcctagccctcgtcaggcattccagctcacctggtcctttccccaggggagtcaaccaccacggtgt

SEQ ID NO: 2410 - DNA, 1097 bp, Artificial sequence
  DNA replication origin
aagcctgggccagaggcaggtgctgggggatcccgggggagccacagaagaggaaaccctgggccaggtgctgcactaggcaccttattagagttcatggtgcaggagcaggggttgccagtgggggctggggaggcggcctgagaaggtggggacagtttctgggcagtaggagcatcttacagggaggtcagcctggttgattcccaggaggaagaccagctgagccaggcccagggcagctgtcaggttacgtcggatgccgtgttggttggagcgcaggatacgcaagagagtgaggaagaagaaggtgagcagaagggcagccaaggtgacacctagagccacgtatgtcagtgtcttcagtggcaggatctccccattctgcagagtaggtggcagggggccagggaattaggaagggcaggacctgagcacccagccccgtgccctgggtgcccacccacggctctgcagctgcccctgtgggcccgacctcccgccgagaaacgtccatgagcacagcgaagctcgtcatgtggttgcactggcagctgacgtggctctcattgcggaagacgacttcacagcctctggccgaccagccacctgtgccactgaccctgtgtgaggaaggcagggtcagggagacaaggagggtgaggcatgcaggggcctggactttcagcccgaagcctgagggggcgagggcagtgcaggctcacaggattgaatggttccagaagacacagatgggcttggtccgctcctctgtctccagcaggcggaactgcaccgtgacgggtttgtccagggcccggggcagaagctcctcatcatcatggacgctgatgctcaccacgggtgtgttgatgatcgggcgtttggggactctgatgtggggcagtcaggtgcacagtcaccacggcagtcacatgactggggagacgcccccgaccccctccatgcctcagcactcaccgcccgacccatacccctacccacacctgtcccctagctgctgacctcaagctgcgcttgtcagggtcatagttatgaggcagtagcccggccagggtgcggtagatgatgacgct

SEQ ID NO: 2411 - DNA, 1407 bp, Artificial sequence
  DNA replication origin
ggcacgcgggcggcacctcgcacccgagcggctcccgggcccggcgcccgctcacctggtgcgtgttgttggccagcttggcgacgaagtcccggacccggccgcactcctcgtcctcgcccggcgcgctgcgacgccaacggccgccgcggggaaacgcgcccccggctgcggccgcccgcagcccccagctcaccccgatggggccagaccagcgcggcagcggcgcagcgggcggcggcggcgcgtccagccggtcctggctgagggtcgacggcggcagcagctgcaggaggaggaggaggccgaggccatggggccagcgcgagaggccgtccgcagctccccagggccgctccatcgccgccgaatgccgccgacgccgacacctgccgcccggcgcgcccgcccacccccgccggcgcgcgccacacccccgagccgagcgcggcgctccttggatacgcgcggccgggcctctccgccccataggctggccgcctgtccctcttccccggcccactcctcattggctcgcgtcgcctccggcttcgggggtcctggattcggatgctaagatgcgggactgattggctggaacggggcagagactgctgaggtcaaccccgcctcgcccggcgtctcccgggcccggcttgtggagttcacgtaggagcttctcataccttcccgccgagccccgggctcctggcgtcgcgaccccttgccgcacctctagcgccctcaagttggggctgggttacgtccctcctgttccccagagacactcctaaaattccttcggtgaggcagagcctggaaaaacctacccaggaaatccctgagcttgctcagctggaaaagggggctccatcatgaaccggggcttcgggtttttataaaccccgctcactggagcgcccattgtctgctaagcagctgccttgctgcaagaaggtgaatgcgaactgatgtgggccacatcctacggagacagacatcaggacatccgtgactcctgcaagcctgaagaatagtctttccatacgtttggcctctctcaccttcctcttctgaggggaggtaggccaaaggcggaattacttacaggttttccaggacttcgaatgtagcttaggcattaggggcaggtaaaagaggggcaagagaatgatccaatgcctactgtacacatgatcatttcctagatgcacatttattttaccaaagtgccttaactctgcagtgagagcttcggacaagtttggttccagtatgtgatgtcctctaaattagcaccccgatccacctctaatgaataaaataaaacccctacgctgttccctttaccgcagaagctgcacacacaacttctacaacacgtagcacaggtaaaaccagttctga

SEQ ID NO: 2412 - DNA, 1753 bp, Artificial sequence
  DNA replication origin
gtgtccgccgcctcccggccagagagccaagccaccacgccgcgcccagcgctcgccgcgccagcatgtcctcgaccgagagcgccggccgcacggcggacaagtcgccgcgccagcaggtagtccctgcgcgcccaggactctcacccgcccctctccacctagatgtcgggctgcacacttatcccacccctggaccgcgtgtgagtggggcaaggggaccagcgccttcccagggttccccaccgccctgaccccccggccggctgtgtctccgcaggtggaccgcctactcgtggggctgcgctggcggcggctggaggagccgctgggcttcatcaaagttctccagtgggtgagtcgctgccccggccccgggctatttcgggagcctgggctgtgacgctgacctgaagcaatggagccagggtgggggctggggaggtgctgcggccgggccacggcggaagggtggggggcggcgacaggtgggcgggggaggggcgggctggggctgcttctccggacttagtggcaggagggtgaagagcgaggcatgcggagtcccggattcggtccttctatgtgcaaggagcctttgcccagggcgctcacatttcacccgggcgagaggacccgggtgtaacctttccagaactctgatcctgcacataccactccttggtgacgggaggggggagaaggacgacggggacgaggtccgctcttcaccaagagggaagccgcagagggcaaaggagggaaggaagcaggcgatggaaaccgtcctgcccccaaacccaccagggcctggatgatcctgcaagtactgggctcaggggacaggctctcggctcgccgttcccttttgaggtcactggagtaatccgagttcctgtaaatgagtgagggagtggatgaatgaatgaacggagcttgtggttctatgattaaataaaagaaaaaaataagaataaaaatcacggcatggctaaaatgtggcatgtagaataaaatggaacactgatctgagaagctggggccctgggatccagacctagactggccttttccagctatgtcaccttgggcaattcatttctctggacttcaatttccaacactagttagatgttgatcagaaccttcctagggtctccttatgctctaaatagtttggtgtgccagaatatggccctaggttagacttactttgtgaccttgaaaaagtcacttgctcaggtcctcagtttcccctgttacagtctagtggaaatactatcttgcttcactaggccagtgcctaaggcctcctgggtataaattaggaatgtggacaggtgcagtcaatttctcaaatcataaagacttgtagggggcatttagtgcactattgcagaagagattttaaattagacaatccacataccaaatggtgtgtgaataacttaattaatgtgctctcagtacagaattcagctagggaataagttaccattaatactgaggaggattgagttctacagggctttggagacaagaattagcactgtgacaccagttcttaaatcatggtttggatgagaataatcaaatctggaacccaggggcaaaagtgcatttgggattatcgggccagcctgggagctcccaagtgcaaactctgggacctggtggggactctccacctttcttactgcctcaagagtggttagaccaattgctgattgagctcttttgcctttggcccctt

SEQ ID NO: 2413 - DNA, 639 bp, Artificial sequence
  DNA replication origin
atgcaagtgcggggaatgatggatagaacgaaactgggagtcggatgtctcagaggagaacaagtgtcattagagacccctccgtgcagtctcctcctccacctcttctcacttgcaaacttcttcaggggcgtgatgcctgctgtcaccccgaaaggccacgaggccaggtgctccctggggcccagaagacaaagatcagaagaaggggctgtaggcccgctcactaaggcactcaggggcctagagaaggtgagagtaagagcagagagccaagaggcagggcaagaggcctgggaaaggacagtgggttggaggcatggatggatggaccgaaggatggagggagggaggatagatggatggacggacgaactaacgcggagagggcgggggtctaaaagcactgcagctgcaggcaaatgccgaaaaggagcaggaggtgtggggcaaaaggcgaaggaacaaggggggtgaggaagggggcacagaagtggggtgcgtgggaaacacgtggaggactgttgcggacagggaaagctggaggcaggtgcaggagggtcgcgagctgaggggcagcaggcaaggagaaagataaaggcaagcctatatgggggcaggtattagcgactggcagag

SEQ ID NO: 2414 - DNA, 1693 bp, Artificial sequence
  DNA replication origin
aggggtgaggtataggtatatgaggaccaggaccacactaaggatacagcccactagggtggtataggctgtgttgagggtgtcatggtgtccgtgcaaggtgaaattgtgcactttcaattccacagacagtgtctcattgaaagtctctcccatggcatagcaggtatacacaccaccgtcctcgacctgcacctgctggaaaagaagactgccatccttagacacactcactgtgccattggtcacctcatctagcacccgttcattacttggtgtcacccacaccttggtcatcccttgctgcttggtgtcacacttgatgatcaaggtgtcacccaggtgggcctcccaggcacgctccttgtactcgccacagttgaggaaactcaggttgaagacattgtgcagcttcttggagttcatgcagtacagatcctcttgaaagtccatcacggagctcagctgccgatactgccagtgtgaaaacagctggtagagctcacagtcgcagttcagggggttgttatgtaggtacagcccattcttgatccaggccggcagcttctgcaggtcaggcaatggcaagttcttcagcttgttagaagagagatccaggagcgttagtttgggtagcttggctccttccttgaccagttccagagggaagcgagagatctggttctggctcaagtagagtttctgcagctgggccatgtcatcgaaggcgcaccggtccaccgccatgatgtggttattgtagagcagcagcacctccagtacttgcaggtcactgaacaggaactcatccagtgtacgcagctggttggaggagaggtccaggtagcgcaggttgggtaccggggaaaaggcctcagaggagatgaagttcaggtggttgtggctcagcagcagggagtgcagttgggtcaggcgcgtgggggtccactcggcccgcaggcggctcaggttgttgtgactgaggtccagtagtgctgtgtaactgggcaaggaatggggcacattgggcagctgctgcttggagcagctgaggatgttgctggcgcacaagcaggcggcaggacagctaaccacggctcggccagctctggccacctcaaaaagcagcagggacaaggacggcagcaggagccagaggcctctcgggtcacggtgggggtgcatagtgtcactggagtgggcgaggaaggccacaaggaagatctgggaggaggtcacccgggcatgttctggtggggtacggaagggtcacttgagagaaagaggatgggtttgtggtcaccaaggactccagagggaaggacaccctctcccacttcccctcccacccttacctccaccccctttgggctaggagagagagatgctgggtagtttccaggcactgtgcaggcagtgggctgtaaatatcggccgaagaggaggtggcccgagggcctactgggctggggtcacaggggtgcaggctgcaggtatgcacaggatggcagggactgctgggagtcacagggatggcacgggcagggtttggaggtggggtcggtgtgccttttgggaggagctgagggaaggtcaacagggcaccgggctgggtaggacgcgtccggtcggggttgagggtccccggggcctgtaggggcgggctccccccggggcctccggtcactgcacc

SEQ ID NO: 2415 - DNA, 1138 bp, Artificial sequence
  DNA replication origin
taggacgcgtccggtcggggttgagggtccccggggcctgtaggggcgggctccccccggggcctccggtcactgcacctgctcggcgaggacgtgtctcagcccatggccggtctgggagctccgtcgcggcctctcccggcggcgcctcaccggccggcctgtcactgcgcccaccttacgcaggggcccgcgcccggcaccgtcgcctcccggggacttgcggggccccgctccgctcaccctgccaccgcctcgaccgctgagcccgccggagcccaccgaccgcggtcgctgcctccaggtccgcaggcctggcgcggatcggtgcggggagccggaggcgcagcgatcccagcggagggagcggcgtgggggcagcgagcaccgcgcgcgcgcccgtcgccgccgccggagcctcggggcgcgtgcgcgcggcgggggcggggcgcacgtgcgtgtgtttgtgtcggagccggccgggcggacgcgcgcggggtcgttccctcaaccagcgagctccggacgctgagctaaagacgaaaattggcaggaagagcggcactggccccttaggctccgctataacttcctccatcccccattcccccatctcccagcacccttctcgctacacagaccggctctcaggaaaagtctaactaaagtgaattcgctgcacctactcgggcaagaggcgtcacatgtcttttaatttcgcaaattgaagaaatctggctcagctcccgcctgccaatgttggcgggaaattcattagtcacattctgaggttccccctcccttctctctgtggctgtggggtctcaaaaattgggggaggggttccccccaccccacccccgtcttgatgctactagttcatgacccttgaggtaccactgaagggcacagctccttagcctgcaagccagctgcgcaggagtgaggggaaagggggtgtttggtgagcccaggccccagaacacccctttacagacacctcatgcacctctccccactccacctgctacacacacacacacacacacacacacacacacacacacacacacggactgcatacaagccagggacaatttccattcctggaaactccgaaacccttcccagcccggag

SEQ ID NO: 2416 - DNA, 1072 bp, Artificial sequence
  DNA replication origin
gtaaatgaggcttcaagttgggcggcgggcagcgaacttgacagaacctcgaaactctgcagatccgccgcccaacccagccgccagctccccgtgacttccgctttcggtctcaactcctctccctgaggagagtggtttaaacggtgaaggctgcggggcgtcgccggaagtgtcgtaaacgtcggatatccggttcttctgggcgctaagggagctgacggagagggccaccgcccagcaatagacggtgcctcagcctgccgagccgcagtttccgtggtgtgagtgagtccgggcccgtgtcccctctcccgccgccgccatgggctgcacgttgagcgccgaagacaaggcggcagtggagcgaagcaagatgatcgaccgcaacttacgggaggacggggaaaaagcggccaaagaagtgaagctgctgctactcggtgaggggctggaggcggggactgagtggtggtcgggagagcctaggcgcttggaaggcctgaacggggtctggtcgggccgacggaaaggaccctaaagggatctggagggcgtgccgggcgtggggcggggtgttggggttcctagctgaggccccagagggcgtgatgaggggggtggggttttggggttgcgggaattaggctgtagagggtgtgactccgggctagaattgcgtttagcagagagacttgggagtatgggccggtagatgttgagggagtaggaatatgggaaaagctcataaaggaagagttgatactaggaaggttttacgttgggttggagcgtgttggtaacgagaacggcatagagtatatgttgggcttgtataatggtttgtgagtttggagcgtcgtggttctttggcaggataaagctagcaggcttgaatggatggtacagagactggaacagaatggtcacataaggacgttgacatttgttagtaagagagccatttgaactgttggaagaaccctggattatccaggaacatgaagataggtaggtgagataaatgacaagttatcaggtataaaggaaaagagcttgggtgcagaggcca

SEQ ID NO: 2417 - DNA, 1129 bp, Artificial sequence
  DNA replication origin
agtctccctccatacccttccagaccctttcagagccccttttctgcctctttccctcgcaccctgccttggggggtctgcacagggagcatagagtgggctttggagtcgggctgctgggttctgttctgtcttctagccgccggtgtggctgggtcatgttgcttaacttatgggtctgctttctcatctctaaagtgagtgagaacagcacagggttctgcagctctgcctttgaggatcacatgtgacaacatgtgcacagcacctagtgcggtgctgggacctgggagcaagggccgtccctcgggatctgcctgacttctcacccctcttgcctctaggctggagccagacatcctgcttcgggccaagcaagatttcctgaagacggacagtgactcggacctacagtgaggagggcagaggggcacaggggatgcggagctgcagcctgcccttctgccggctctaaacccctcccttgaatgcaccccctgcaggctctacaaggaacagggtgaggggcagggtgaccggagcctgcgggagcgtgatgtgctggaacgggagtttcagcgggtcaccatctctggggaggagaagtgtggggtaagtatggggtgtatgttgggtgagtcgccatcacctatgtcttagtgggttcccccagcctggagagctgggggtgggggctggaaagggcgtttctctttccagcagctggaggggcggaggggcagaggggctgcctaggagccacttgatgtgctggaccagggtgatctgagtgttcctgggggtcagggcctgtgggaggtggggatagtttgggttctaagataaggccttagggaggaggtctctgagtccaagactgaggagagtgatcgcatatcctcatctccaggtgccgttcacagacctgctggatgcagccaagagtgtggtgcgggcgctcttcatccgggagaagtacatggccctgtccctgcagagcttctgccccaccacccgccgctacctgcagcagctggctgaaaagcctctggagacccggacctatgaacagggccccgacacccctgtgtctgctggtgggactccccatctctgccccatgccatgt

SEQ ID NO: 2418 - DNA, 1031 bp, Artificial sequence
  DNA replication origin
cctgcagtacctgtactacctggcccagatcggcatcgccatgtctccgctcagcaacaacagcctcttcctcagctatcaccggaatccgctaccggagtacctgtcccgcggcctcatggtctccctgtccactgatgatcccttgcagttccacttcaccaaggtcagagcccagcaggcagccaggcgggcgggcgtcccaggacgctggggtctcccgggttgggtggggggcggtggggggggcggtctctcgggttggtgctgccccctgctggtagagcatagctggccaattgacaagtcttatggagttgaggggttggggggttggggggatgggggggcgggggtggggagagtgagtgaggaggctggggaagggaggcaggggcagctggccagggcgcactcgtctgagggaacctggcccgtgcaggagccgctgatggaggagtacagcatcgccacccaggtgtggaagctcagctcctgcgatatgtgtgagctggcccgcaacagcgtgctcatgagcggcttctcgcacaaggtactacagcgcctgcctggaccttggcatggcatcactcctcccctcctctgcatttggggtcctgacctgtccctgggatggcttggggtggggcatgacccctcagcactggctgcagccctgcccattacccccgctccttgcaggtaaagagccactggctgggacccaactataccaaggaaggccctgaggggaatgacatccgccggaccaatgtgccagacatccgcgtgggctaccgctacgagaccctgtgccaggagctggcgctcatcacgcaggcagtccagagtgagatgctggagaccattccagaggaggcgggtatcaccatgagcccagggcctcaatgagcctggtccatgaagtgcccaccacatcgcagcacttttaccacgttttgtcctcagaccccgcccatgctgtgtggtctctgcatgtctccattcttctctgtctctgtcttgcatgt

SEQ ID NO: 2419 - DNA, 1944 bp, Artificial sequence
  DNA replication origin
tggactgcatggatgaggcagcctcaatgtcaatcaggggctgattgacaactcttcttcccaggccgcttcatccagtaggactgcaatccctctgcctgcaattccctgcccacttcaccccttggctgaactcctgtgtgtcctttaagggccagcccttgcattccctgagtcatggtggtcctgtccaggggctgacacctggccctggggctgctggggaatcacagagacagctcccatccctgcccctgctttccccagccctggcacaggggtaagtggcttctacgagccaggtggagacataaacaagagagatgatgtccctccctcgcaactaacctgccaaggtagaagaaacaaatgtatctgaagataatcaaggtcctgacaagtgacaagagagaaatagagtgaagtggatgatggcatgggggtgggagggtgtttggaagcacgacgtcggagaaggcttctctgaggaggggagcttcaagctaagccagggatgggaaggagcctgggagagggggccagcaatgtgaagggcttgcagctgagaaggaacgagctggcggagaggtgaccgaaatggggtggacaggggccagagcacacagggctccgtagaccatggccaggagcctggtttttattccaagggcagttggaagacacggaggggttttaaatggaggagtggcatgattggatttatgttctagtcacaactctggctggggtggggagaatgggctgtggggggagtgggggcggactcagggagaccacaagcagctgctgcagagagggtggtgaggcctggacatggcagggcagtgaggatggagacttaggctgcaggtggaacggatgggacatgctatggattagaatgggggttgagaggggaaaaaggacctattaggactcaggtttttggcttggacaactgggagggttatggtgacatctggtgagatggggaaaccgaagagaagagggattgggaggcagggggatatgaagagttactgttccattctggatggcctcagtttgagaggtgttttgggcctctgggtggaagtagcaggaaggcaggggcaggtgtgagtcagaagctcagcagagcaggatgaccacatgcaggcattcagaagcatgtggagaaagatgattcaatgatgcggggaacgtttgcagtgtagaagacagtagatacttggcagctgtaaatacacgaataacattcagagacctaagactcacgagaccacatgcgggaaagtgtatagataaagagaagggggctcacgactcaacccaggcgctccaacattaagagattgggaaggatgaggggagactaaggggctgccagtgagcagcaaggagagctgggaagagagtgtttcaggaaggaggggtggacacctgggccaggtgctgctgggaggtggaggaaaggctaccatctgtgggtttgcagtgggggctggagccagctggggacggctgaagagtgtgagggtgaggaggtgggctgtgagtgagtcgccgagtgtagacagtgggcatgggaggctttgctggggatgggatggtgggccagggatgacataccagaaacttgttcagatgtgttcagggtggaagacttggcataatggctagtgggaacacactactgcagagacagatgagacaacagagatcctgggcgcatggcaggagggcggtttctgtgggagggcaggggagaaggtgggcttgtctctggagcctctggtcacacctgggctagactctgccatgctgcccacccctccacctgcctgccctcctcgataaaggcagacgaagggcgagtgcgtgatttgaaggcaggggggtgatttgtagccccacaattacaagaggcccagtggcttaagt

SEQ ID NO: 2420 - DNA, 1111 bp, Artificial sequence
  DNA replication origin
ggattggagtgaaggatatgtagcgctactgacaagagactcctcttcaagagcaggccacatatcctttatttcccagggggtggaaacgggcaacctcacagaggaattgaatcataatgaattgaagaaagaaaaatctcctgaagttggcattataattaataggcttaggctcatcctactagtcctcacttagactcattctcatgtagaaacaaaacgtgattaatcacctcagtaagtgcaatttccaaaaacatccagggaaatctagggtccaggtgcaggacctttccaatctgagttggattttgcctccaggagagagcatgggtaccagccagcattttcatcatctaagggtcaggtgccttgaagtgtctgctggcacccagggaagagccccccagcttgctgtcacaggacacagctgctcccttcctggccaggtagctggcctccctcccagaatgggacttgaagctggccgggctgcttgggggctgcagaggaagaagggggctgccggcaaacctgctgactcaggctccacgagggagcaagtaacactggactcctttcggcactccgagaatggggtgggggcgtcttcaaaggatttccctcccttcccagtgcttgtccctgctctcggtccgttttctgctaagatttggggattttcaggcctggagggaaagtcccttgggacgatcatagagcgctagcactgaatcagcctggagagcgcggaaggaaagggtcggtccgcagagggcgcggggaaggcagggtggggacgcggtggagcccgcgctcgtttgctgaaggcttggaagtgcagcgcagaagacagagggtgactaggaagacgcgcgagcggggctggccggccggcgggtgggggaggggaggcgggggaaggcggctgagtgggcctctggagtgtgtgtgtctgtgtcagtgtgtgtgtgtgtgtgtgtatgtgtgtgtctggcgcctggccagggtgatttcccataaaccacatgccccccagtcctctcttaaaaggctgtgccgagggctggccagtgaggctcggcccggggaaagtgaaagtttgcct

SEQ ID NO: 2421 - DNA, 1740 bp, Artificial sequence
  DNA replication origin
tcccataaaccacatgccccccagtcctctcttaaaaggctgtgccgagggctggccagtgaggctcggcccggggaaagtgaaagtttgcctgggtcctctcggcgccagagccgctctccgcatcccaggacagcggtgcggccctcggccggggcgcccactccgcagcagccagcgagcgagcgagcgagcgagggcggccgacgcgcccggccgggacccagctgcccgtatgaccgcgccgggcgccgccgggcgctgccctcccacggtaagcgacggccgcggcgctgggcccgggacgggctggggcgggggctcggcggccaggcggccgggagcggcccctcggagccgacagcctgggcgcgccggctgcactggcccggcgttcccgccgcggacgaaccgcctttgcgcacggactgggccctggcgccagggcggaggccggtggcggccctgcagctgcaccgggactgccaggcttccctgggaaacggagggctgctcaccccattgcacggaggggaacactgagccacctgcaggcaggagcccccgctcagccagggtgccctgcctctctccctacccgccaccaccaaggcacgggcggagtggctgtgcgctgagtgtgtgccctccccggtgggcaccttcctcatcggccacacacgtgcttccaaggccctgctgaggagtgggcgcttctgggcagggaaagttcagggggtcaaccagcttatagaacgccagggacttgctggcagagggacggagaggggcaagccactgcttgttccagcccacaggcaggagctacggaggacttgggtggctgtttggggggtggggtgggggacggcaacagccggcaaacagccccccacccccggggctgcttggggctagctcagaatctctttttcttgcaaattctggtttcatcggttggggagattctgggctttgtggtggtttatggtggtttgcagtgcttgaggaaaatggaaagagggtttggtgttgcagagctgtgtccaggggcagggtctgctcctgactgcgtaagggacgccctgccccaactgtggcggtagcagatgcagccatagaaagtgagggtggcactgttcatgaccagtcagtgggctcataatagatttgcttctgaggagtcctggaagaaaatgagaggggaaacctggggggaaaagagcagaaaattatttgggggtagaggagagcgggctgcaggtgaggtgagagagaaagggaagagtgggtccacagaaagaaagtgcctcactgagagagaggagatagagttgagaggggaagggagaagggttagccataggcagaaagcaaagcttcggggctgaaggggagaccatgaggaaagaagagaaagacaagggggctgtgtttagacaggggaagtccaagggcccggttctgccaggtctctccagaggccttgttgagggggaagatgaaatggaataggataggtggcagaggaggctggacagctggactgaggtgtcctagcatctctgagcctgcagcagagattccttctgagggctgctccccaggcagaagccagggctaggggtgggaggaagaggcagtcagaggagagcctgcccagccagatgcaagccagagtgttaaccccccactgtctgtccagatcctcctgaggcagaatggaggccccaggtccag

SEQ ID NO: 2422 - DNA, 1352 bp, Artificial sequence
  DNA replication origin
ggtcagttaggcagttaccaagatagttggttggttagtcattcacccagccagctggtcagccagtcagtcagagtcagtcagttagctggttaactggtcagctagaggctggtcagttagagacagctggccagggtcagtccgtgagtcagccctgaagccagtcagtcaacatttattgcatgtttggcaaatgtggagaggccctctcttagtagaacccaggatggaaaaagaaacacaaaaaaaagtggaagacagtccctgccctcaaggggcttacaatcttagggatgtggaatgtacaatacatataaaataagattttaaaaaatatgaaaacaacatccaaataagtgcaaattgatatactattagccaaatacaaaagagcaggaggagcatgactgaaaagagcagtcagaaggttgtggagaagccaggaaggcttcctgatgggctggctgtgggcttgggtgggagggggaagaggtgggccagctggggttggcggggggcaggggtgaggaacaatagggtcacagctacatcaacaacatgggcaaagacaacagcaggcactcatcaatgtgcaggaggcacaactgggagggctacggagatgacagaattaggatttcacacaacttcagtaggttcaggtgatgggcagaaaccaacaaggtggctttaacaaaggtgaacataaactgcactttggttaaaaaagttaagttgtccaagtacagggtagagatggtctggcttgacagaagtttatgggaaatggaactaggggttttaatagaccacaggctcaacatatgacaacagtatgatgcagttgttaagaaaaaaactaatgcaatcttaatctgcacaaatagaagaatactgtccatatcaaggaaggtaacagtcccactgtactctctctgagctggtcagacaacatctggagtactgtgtccggggctgggcgtcacattttcagagggacattgacaaacgagtgtgtccaggatggtgaggggtctgaaaaccatatcatataaggaacgtttgagggacttggccatacttagcttagagaattctcaaaggggacatggatacctgacttgaaatatctgagggttttcatgagaacaggagggaggagcagtatggagggggcagggaagccagttttgcctcgcatgaggaagacgtttctcccagtctgactggaagatggcatgggctgtggctaggcagggagctgggctggatctgggagtgtgtgacagccagctggctggctccctgttggggacatggagaggggcagtccctttggggtgggaacc

SEQ ID NO: 2423 - DNA, 1433 bp, Artificial sequence
  DNA replication origin
gccctctaccctcgctttgcgtgcgtgtttgcgtacagcggaggtggcggcgcgggcaggtcggagctcggagctgctgttctggttctcttgtggccgccgtcgctgtccggctgccttgggctgccgaacagacaaggcgtgggccacagcacctcagaagccgacgcagctcgacgcaggggccggcaggagggtgggcgatcgcgtgtcggagggcgccgcgcgggcaggcgggcgggcgccagagggggaaagaggcgggggcggcgggtcagccgctggccgggccggccggggaatgtcgatgcctgacgcgatgccgctgcccggggtcggggaggagctgaagcaggccaaggagatcgaggacgccgagaagtactccttcatggccaccgtcaccaaggcgcccaagaaggtgcgggggctctgggtggcggcgggggctcgggctccggcctcgcggaagggacgcgagcaagcccgggctctggctagtttgggacttctgggggtgactggggacggcggaggtgatgtagggggtggcggctgtgcggccccaggcctctcccgggctgaaaggccgcctctgacctcgctttcctttgtccctcggcccaagtcctccgggatcgttttgaaacccgacagggccaggccttaaatttgcgactgacttttcctggatgaagggcctcgaagacgagagtgggagggggtgaaccaactcagctgacccttgtgaccagtccgggggcatggggtgtacagaaaatctcccttcaggtgagtgggtaaatctggcagaacttccatcaaatctttgggagcagtggccgctttatccaacaactgcgtgatagctgggaggcaagagaaaagaatgcgtgaagctagctctgatatacaggtgaaagcgatgagggtaacatgaaactgaaaatctatgattttcactttctacagcattccaattacttcgaaatatgtaagaaattgacatttggaggttggtgacagcagacactgtcatggatacaggtggatcctagagtcatgtgaatagatcacttaggcatccctggagaaaggagcttgggtgggttggagtagtgggtggtaagggaagattgctcactcttgactgtacttttgaggcagaacaagtttgatctattgtgctgtaggttgactcaaaggacacccttcgaattctctcataaatggcaacctttggagattttagtctgactagctctccgagtggtggaattgggatccttattgctttctcatcatttactgccaaccacatcttgattttccatacacctggcacccagttagcagtagaccagagaacctttacaaagaggtgaccttcctgaagccagtgagaacccagataaatgtctcccttctttata

SEQ ID NO: 2424 - DNA, 1885 bp, Artificial sequence
  DNA replication origin
ggacaaatgggcctctcaggatctgggtctggtgagtccctgtctgcactgtgaaggacaaatggggcagggtcctcctcagctggaaggtggtcagttactttccaggactacccaggccatgagataagctcctggtgtgtgtcctggaggactgggagagtcgagcagggctacctagccttggaccatgcccagcctgtacacaggcctgtacacaggtagcccacagctacagcccagggaccagggctccttcacaactcaggtggagcacaggggagaaagtgttccagtctctgacttccattcttgggccagcacatttcaggtttagaggcagttccatttgatagaagcttaggaaggaagactcacagaagttgaaccaaataattgaaaatgataggaagactagggacactggaatgggacatcccccccccccgcccccgccacccccaccacatgcatacacacagcaggccatggaaatgttcagcctgagaagaaagagtcttggtgtcttgtgtttgtagggaggctgtgctggactccaggcagaaaaggggtgagggtagctcagggctgagggtcagggctggggttcaagagtactgacatcctggcagaggccctccaaagccctggggcttgctcatctgcctcttgggtctcaataggacctgcccagaagaagggaccagatctggggccctgagacttgcgttcccgaccttgagccaccaagctgccagggacaagggatgaaagtgcagtaggacttctcagagcagcttccccaaagaagaggctaagcctgctgacctatgcccaactcccatgcctgcccagtctacagccctctcaagggaccacggaactgctctcctcattgtcattgccctgaaacctccttgatctacctggagaacaccagagggagggtggcatccctccactttgggagaggggcactcctcagagaacacagagcagcctcctgaggagcaaggcccagaagaggaaagggatagaactgggacaaatggaaggcagaagccaggaaagacaggccaggaatagcagccagcagcttgaacctaagcttgtaaaggagtgagggctgctctgctgagcacggggcacatctgaggtgtgtatggattgtgcagaggagtcactgcacctgatccggacactaggtggttaaggcggggtactcatgttggagacagcctgagacaacgctggggtgtcttctgcctgcataaccgcagggccacagcagcagctgttgggcgtgaaagccaggagccttttaacgtagtaaaggagctctctgtccctgacccagctctcaggcctgccgtaccctgagcacccctcacccggaggagtgccagagcccctaccagcggctgcttctaagccactgtgcagccaggaagcagcgccgcagcaggcccgagtgctccactgtccccacagaaggcatccattgagaccgcgggaccagccttggctttcacatttcgctgcagccttgtcccgcgccgcactgtttcctccggccactgtggggtcactaagcgacctgcagaactcgctgaggcccaggctcctgcagctcccgccgaagactcaaagccagagtggacataaacgccgtgggcaggaccccggtgaggcctcggtgcccttcttgggggttctcagcgttggcccagaagcctcagcccgggtctaagaacttgggactctcctcgactttggcgatcggccgggtcatccggctcagggcctcagcggcagcgggcaaaactctagtaggagtctcttgccgagggcgtgtttcgacgtcagagccaaactcgggacagac

SEQ ID NO: 2425 - DNA, 907 bp, Artificial sequence
  DNA replication origin
tatctgcgctgccatatcccgcagcctaggcccagaactggatcctccaagatccgcctcaaccccctgccgccgcccggctggcgcctcgcgggcctccacggagtggccgggcatctccggctttcgcccagccggggcggtgggaatgtgtaggggagggcggggaggtgtgtgtgggtcaacggaggaaatgaacgagtccgcggagcttcgtgtctgtgccctttgaaagaggctttcctgataaaaaccacagttgggacttaatgagaagcagttggcctggctcctctgatcccagccagacggcagaggccgcgcagtgcggtgagcaccgccagagacaggtacccggcctggctcagcgctccgcgtcgggcaggagccacccccccaggcccgcgtccctgctaggcgcgccgcatccggcaccgacagctcgggcccccggaccacaccggtgccgcgcgaactgcagagagcgctggtgcggaacgagcggccgggagaaacccagcaccccgggatccgacggcaagggtggccttgacaacgaaataccgagaaagaaaaccaaagaaagcgagcgacaaccaagaaaaggggaagggaaattgaacaaaacaacggagagcgcggcgagaacgagagggtaaatggcagtcggcgagctgggatgaactaaaatgaataaatgaggaacgaacgaataaaaaaagcaggagcaagatcgaacgaaacggataactagagaagggggaaaggacaaagagggagggagcagactaaacaaaagaaaacggagcatgtttaaagcgtagaatatatcaaaatgagaacaagggggtaagaaaattaacgatttcagttgaacggaggacaggccaaacgaaagggaggcagg

SEQ ID NO: 2426 - DNA, 1012 bp, Artificial sequence
  DNA replication origin
ctgagccggcatggaccccgagcactgcgcgcctttccgcgtggggcctgcacccggcccctatgtggcctcgggggacgagcctccgggcccgcagggaacccccgccgctgcgcctcacctgcaccccgcgccgccccgcggcccgcggctgacccgctttccggcctgcgggcccctggagccctacctcccagagccggccaagccgcccgccaagtacctgcaggacctcgggcccggcccggccctcaacggcggccacttctacgagggccccgcggaaggtaacgcgcggcgcggggcgtagcgcgcagcccgaccctctcttcttcttccttacccgggcccacccgggccttcctgcttatctctcccgctcgcctatttctcaactttttgcccctctcgcctttcgccacggcttccacggaagccgggttggcgctggcccgggccaggcaaaggccagtgtggggcgggagggtgaaccaccgttcctcggcggcgggaatggaaggcgggaggtcgagggaaggtgcagtggcgacggcccggagtccagtcggggcccgaaagcagttggacctgggaaggagagagcatgctctgccgaagttggactggaactgccacctaccctgaagcccagacccggccgagggctgtggagccacactgagacctgacgaagaagcgcggcttttgtgtctggcgccctttgagggccctgaggctgggcctcaacctagagtggtcaaatcggggtcggctggggactgcggcctggtcttggcccgtctctcctccccgggcctagccttcacaggaagggtgctgcctgtgcggcagactggcacagtctggccgcgactggtcgtgcaatgccagggctgtcctcaagacggaataactgtattcttatttctcatactaagctggcctccctgccgttatgcactatgatagccgcccttctggcagtcttggcttccccgcgctggatcatcac

SEQ ID NO: 2427 - DNA, 1699 bp, Artificial sequence
  DNA replication origin
tgggcccgggtaaggaagaagaagagagggtcgggctgcgcgctacgccccgcgccgcgcgttaccttccgcggggccctcgtagaagtggccgccgttgagggccgggccgggcccgaggtcctgcaggtacttggcgggcggcttggccggctctgggaggtagggctccaggggcccgcaggccggaaagcgggtcagccgcgggccgcggggcggcgcggggtgcaggtgaggcgcagcggcgggggttccctgcgggcccggaggctcgtcccccgaggccacataggggccgggtgcaggccccacgcggaaaggcgcgcagtgctcggggtccatgccggctcagggcgcacaggcctccggggctccggggctcgcgctgcccgcgccgcctgtgagcgcccgccaagggggagggacctgggcgcgggggcgcggagcccccgggagcggcgcgcgccgcggggggcggggggcggggggcaggggagggggccgcgcctctgacttaatgctggaaccatccacgtcacgtgtggccccgtgcgggttaacccctcggagcccgggaaccccctccccccattcacccagagcccagtcccaggcagctcaggagaggatgaagcagcttcctctctagggcaggatccctttgtctacccatccaggtgagtctcttgctcagagcagcacccgtggtcctgatatccagcctagaggcacttgcccctagaggggtgaggccgtgtgggcatcccccccaaacacttttgggcctggactctggacatcagcctgggatgagggcctgggcgggcagacaggcaggccttaggctgcagttttacttaggtctccgctaggagctggacaaaatgttgcctcagcaaaaaacacctcccttagagatctcttgtttctcacagtgaaaggagctattgggagtgttgtgtggaagcagatctaagctgggaatggggtgctggggagcttggacctggacactatcattaattagctatggttccttgcgccaatcattagtgtcctcatctgactgtggaggtcgggccaagccaaccctgggtctttctatgtatttgaggtgtgtttcagaagtagagacagggccagagcagacagggagactcccatgggcagctcaggactgaacagtgtcctgcaggggcagcctttggaacaggtggaggatgagcagaagggctggtgtttcctctggcagcagcttggagtgaatgcgtttcagtgggcagatgacccaagtgtctggggacccactggagagactgtctgcagctcggacctcagggctgtgctcccccaggcctgacgattcagaagggatgagggtagaactgcatcttctaagagctgagtctccccaaccaaaaggagacaggattagagcagtagcttagaatttcagaaaagagaaataaccaccaccctacctaagatctggggagaaatacccaaggacccgaggaccctgctcacttcccatggattgaggagcccgtggggctgcgttaaactgtttttattatcaatgcccccggagactagcaagagaggtggggagtcaaacatcatttgtatttcatttgaattctcaatttttaaaggaatccaagaggcctggtgtgaacacctccctcttccgctgggg

SEQ ID NO: 2428 - DNA, 1637 bp, Artificial sequence
  DNA replication origin
cccaatgcttccctccttctagccaggctgggctgcagggaggggcagcagtgggtcaggaaaggcccctctccagctgaagccctggccccaactctgtcaccaaagctcccccagactccctgtcctgatgggtgcggaaagtggggtgcatttggagatggttgggaagggggttcaggggaagccaggagtactgaggctttgtctaacgtgttaccgttcaaggttaagtagcagcagcagcctgaggttgtctgggtgagaggagggaccagcaggacggctccaagggcctctgccctgtcctctctgatggacagtagctttgatcctggggtctgaggctcataaataatgtcccaggcacgggtgccctgggactcatccaagggcggttggctgacaaggcagactctgccgggccgcagcaggcaggcctggccccactgcagcaggccgtgacgggtttatgaccagccaccgacagtagctacctcagatttatcacccttctacaagggcagtgggaactgctaaaggctgccagggagcccttaaatcacagtgatgggaaatgctgtcggagggagcagaggggtaggtaggagccattcggggggctcaggcttcctgctggctcctcaggttacagtcccttccagaggggatttacagccctggagtccagcggggccacacagcacccctgtggaggagccaggaggaactgcaggagaatgagggctgggctggcaggggcagagccatgggaggaagtgcaggaacccagcacccagcctgctggccgctgtggctgtgggaagattgcctggtcagatgcccctagtgcaggtgtggccctgagtgtgcaggtgtctgtgccccttctctgggtatgtgtcacgtctgttcaggggtatacatcagcaaatacgtgcatgcatacaatcaataagaccatttcttattgtactggagcactgggctggctatgggtacttatgaactggtactgtaagtgagcaggggttgaggggtcaggcacatactcaaaggtagtgggttctgagtccctgcacatgcctgctcactgtgtgagtctgggaaaataaaagaaagaggacacacaggaggacaaggagaagagctgctgttgctgctgctgctgatgatgatgctgatggtaatggtggtggtggtgatggcgacggtgatggtgttggtggtgagggtggtgccggtgatggtgttggtggcgacagtgatggtgatggtggtggtggtgatggtgatggtggtggtagtgatggtggtagtgtgtggtgatggtggtggcggtggtggtgatggtggtggtggtggtgatggtggtgatggtgtttaacagaagggcaactaccgatggctgaaagaaatgggagaaagaaaggtgggcagtgggtggatagaaagtgatataaggaacagagagagaaagagctgaaaggaagcacccagatagccatacaatgcagccaaattagccccaaatgtgactagagaggacagcagataaatggtagtgaagaggtacaagaagaaaagcaaaaaagacagagaaaggagaaaggtgacccaagaggggagtagggtga

SEQ ID NO: 2429 - DNA, 1663 bp, Artificial sequence
  DNA replication origin
tagtcgcgcagactcggcccgtgcactccggccgagcagctgcgatccccgacgggtcgcggacgcacagctcctcccccgggccacaggcccccggctggggctggggcgacccggagctgcgcgccggcgcacgcgactccgctcgctcctcactccctgcctcaccaccagtcccaacctggctcccgcccgccgcgcgctcggggctcaggggagcggcgcggggacccaggtcccacggcggagagagcgcgcgggattgcgaagactggggccgagtgccgccctccctgcgccctggcagcgccggctctgcggagcagaacggagctgggcggagcgctgcgcgcactgttccctcgctttccgaaaggccaccctggcggcggggcgccgtgacgcaggcttgactcacgcgcgggccggcgtcaatgcgaggctctcgggcagcgagcgaggctctgatggccgacgtaggcggagagggtgggcgtggggcgggagagggagttgcaagggggcttagcttcttgaggcccctggtcaggggatgcagaccctggagccctcgccagggcttctgccctcggagaggaatggggccccaatggttaaagccctcctggaccctgggcctcactttcttcttttcagactcacctcttttggccttctttaatgaactcaatctcaattcatgtggttatttcccctgccctagacatttccacctccgtgcttctgttccctttcctctagatgtccttccactcctccgtccttccatcctaccattctgcaaggccgttccctgtgcaggtcaactcttaggacatcactcatctgttgagcacctactgtatgccaggggctgcagaggctgaaaggatcacagacgtgagggaacctcctggagaggcagtgtgggttgacccaggtctttacagtacaaagcgaaaggattggagaaccgtacaagatgagtaaagtggggagacagtgacagggaaattctgactggtctctgagtaggcctcttggaagatcctggcctaaaggatggacagtcagaaggggagaaggatgacccctgtggagtggacagcatggcaagggcatagatgcaagagagtagaaacgtatgcgtggggtggggtggtggttgcctgagctggagcaggggtggggatgatgagaggtgaagttagacagggaggcaggagccatcctgccagggccttggggggctgttatgagagtctggatgaattatctctcttctagggaacactaagggggcctttggcatccaagggaggtgtttgggaggaatgggagatggaggttgtcttagtgaaaggtggtaagggccattgtcaagaactctgaagagtctgagattttacacttacaatctaagttaccctgccagtttcatggatgccatcagaagacaggaaactctgggccagacacaaaggactttaattactcatggcacagcaggctgcaagagcttcacattcagatcaccttcccttaactctgaagtcctatgggtgggacatgagactggaccacacacactgagaaactccaagcttaggaaacctcaatcttttataatgcgctgcaagcaaacttgcccgacatttgcctt

SEQ ID NO: 2430 - DNA, 1365 bp, Artificial sequence
  DNA replication origin
gacaggtgagtcgctggccgcgccccgcctggctttaccgggccggccactgcaactttccctgttctggccccgccccagccagggagggctgaggaccaaggtgtgaggcggcgctgcccccgcatccgcccgaccctgcgctcgtcccgggctcctctcgccgctccagccgccgttgcctggcgacggagccccggggcccgctctccttcgcgcatcggggtccccagcggcgtacgcacgggttggacaccgggcttcagcttctggtgctcagaagggcccaagaactccggaggaaattgggcttagctgcggaggcaagcgcccgcggagaaccggagggggcctgtccggcccatccgcggcttgaaactgcgcgcccagggcgcagttccactgggagcctcttacgcagctggagaccccagccccagccgctcggcctcaggcctgtgaccttgacagtaacattggcaagcgaagcagaactgtcacgcccgagatgaatatttaattctcagtcctggggctggtcctcgctggattcggagctagcagagagcccttcctccctcgtgggaagcgcatctggggaacggaatggctgagacaggggacgtgcgtgtggtgcccatctggagggggcgccgtcctggcgggtcgagaggcctctgctgcatttatgcctgtgtgcgccgtgctctgaagcgatgctggatgctcgcagtactatgggtgggccgctccccaggggcgcggctgccttggaaagaagcgtgatgtttccttttaaagcccagacagccctgtcagaaatcaaattcagaaatcccaaggccattcaccttacaggacctaggccctgtcaagttggctttagaaaatattttttgatgccattcctctttcctttttttttttaagaaatactttaacaggccttttggattacgagatttctaaccagagctacctttgggcaattcagctgtgaacttgaggcagatgggggtgggttggggagacagggaagtggtaatgaggaggaagattcttttccgggcattgtccttgttaacaggaacttcaggaacaaagacaatcctgtaatggctccaaaaaaattcggccaaaactttagttagcgcctaactgttaaggccttgctggacacgctcactgatgtctggagaacaaggtcagagtgtgttgaggttaacagtggggagttcttgtgtctcgttctgtgcttacattatcccatggctctgtgaggcggacccatcacctgggcaggaagagctttgaggtcacacctgattgtccttggccatggctcatccacgaggaccgtcagag

SEQ ID NO: 2431 - DNA, 1205 bp, Artificial sequence
  DNA replication origin
agggagcctcagcgcaacgccccggcgcctggttcctgcgatctggcggcgctgggagccacgccatctacgcgtctgcccatctccgggcggggcgccggccttggctcgcgcgcggcagggggcgggcgcgaggtggcataggggagggggcgcctcggcgccggtgggctggggccctaggggctcatggtctccctccggcgctggcagcggccgccacgccccagtggcgccttttcctccggggccccgcctcgcccagacgcgcccttcgcggggcggggtgggcggggcgcggcgcagcgcggggccgatccgactcactgcaggccctggcgaccgagcgcagtcttcctccccggagccgagccccaaccaagcgcgtcacctcctcgccgccagtgcccagcccagcgcgccgcccctgcgcgcttccgccggcaacccctcccgcccccctcagccctgctccgcgcctcccccgggcccgcagctcctcccaccgcagcccgctgacaccgaagcgctctcgacccctgacctctaacctccgcccggctcttcttgcttcgtccctcgccccctccccgccaagctggtcgcactgttgccgtttcactgcggctgacggaaggccaaggaagaaagagggtagagacgctgtcgcgaggatcaggctgccctctcctttcccagggaccgtgttggggccttctgaccaccccgccccgcatcctgcgcctcggaggcccaacgtagcccaagacacccatggtcttgatgctctccgcctctgtcccagccaccaaagtccccgcgatggaatggaggacggggtggccttgggcagagaagcgcttcttgtgccggatggaaggaaaccgtagctctggctgtgttcatcgcgaaatgttttatggatgtggagtgggtgggtggccctgaaaagtcattagttaaagcctttgctcgtcattgctctggggtccacataggaaatgcccgtgtcctgcctcatgaccccttcctgtttctactcttattctacccattacaatttgactttgcctgtgtatatgtctcctctcccctccctaaccctgagctcctgcaggcggcattgtgctttttcatcttgatagctcccacagtgcctgcctctgagaacctgtttgctaagtgattgagaagctgccataccc

SEQ ID NO: 2432 - DNA, 1171 bp, Artificial sequence
  DNA replication origin
ccctagcggcccgggaggagtagggatcctcgaagagcgcccacatgcggggctgccagccgcggcagcccccagacccggcgccatggcccgcgcctccctcgtgggggcccagtcgctgcagggccagctcccgctcatcgtcgccggcctcgtcgctgggccccgcgccgctgccgcctccgtccgggctctcgaagatgtcgagcgcctcctcggcgtcgcggtgctgccggtaggtcatccagcagcagggttccacgtcggtctcgtcgatgccccagaaggtgagctcctcttcgaagagcggcccgcacacgtccgcggggcagtgcagcttgccggtgcggtagtagttgagcacgtaggcgaagacgcccgggtgcctgtcgaagaagaactcgcagcccccgccgccgctgctgccgctgctacccacaccgccgccatcggtctcgggccggcccccgccgtcggggtcggccagccaggcgaggcgggttcccggtagggtgcgcagggtgctgcggtaggtctcatgtcgcgtgccgcccacgttgatgatgatcttctccgacgcctcgcccttggccatctcctccttcagacatgttttggacggaggcttgttccccgacttgcgcccgcggtaggaggagacacacaccgagctgatcataagaagcgctgcggggctccggcttggggcggccgctgccctccaaacacccttcccgaggaggcagcgtcagacgggggagggggaggagacgaagaggaggcaggaggcggtggcggccccctctgcggcttgggcttgcccctgcctatccccctaggacgcggagcgggaggagttggatttctccggtacacaggtggttggggttagggcaggaagctccggagagagggaggcgcagagagggaggacccggggaagtagaagcaagcacacacgcggtcccccgctacgacgggacacacaaacgctctgggccggggacacgcccccgccttcaccccgaccaaagacgaggaagcgcacagtccacgcgcaccgcgaaggtccggggcgctcgcgctcacacgggccaccctccggctccaagaccgcaccaagccccggaatagccggcttccccgcagcggcggcagcgcagcagcaaca

SEQ ID NO: 2433 - DNA, 1282 bp, Artificial sequence
  DNA replication origin
cacgcgacatgagacctaccgcagcaccctgcgcaccctaccgggaacccgcctcgcctggctggccgaccccgacggcgggggccggcccgagaccgatggcggcggtgtgggtagcagcggcagcagcggcggcgggggctgcgagttcttcttcgacaggcacccgggcgtcttcgcctacgtgctcaactactaccgcaccggcaagctgcactgccccgcggacgtgtgcgggccgctcttcgaagaggagctcaccttctggggcatcgacgagaccgacgtggaaccctgctgctggatgacctaccggcagcaccgcgacgccgaggaggcgctcgacatcttcgagagcccggacggaggcggcagcggcgcggggcccagcgacgaggccggcgacgatgagcgggagctggccctgcagcgactgggcccccacgagggaggcgcgggccatggcgccgggtctgggggctgccgcggctggcagccccgcatgtgggcgctcttcgaggatccctactcctcccgggccgctagggtgagtggcaggagcccgtgtctccccatcttgggtctgcaaggggtccgtggtgggtggtgggtaggggccgggaggagcagggaccgagcctgacttaccttaccaccgcagattgttcccgccttcctctcaacccccctccgtggctcgcaggggaattacacactcccaccctctcccctgcacgctccatcaggagattgcacacacttgacttactacttggacccagtcccagctgcctgctttgccgcatcccctccagtgagtggggtgcccagctcagctcctccacccccttctttggtctgcacaggctgccctatcttcagctgccctccactccacacaggactacggtcctggaagagctggaatttggtcttctgatgggggcaggcagggttgagaggaaggaaactagggtgggttttgttagatgcttccatgccgtgccacctcatttacatcctcccagcagctcagtgtgctcacaactatgcacttcagagaggaggatataggcttcagcatcttaagctcagaagaggcaaagctgagaccacaatccggcctcctttccaggtttaagaaaggcattctttctgccagggaggataccatgcccctgaggcttcctgcacacctgggatgtcctggcctcagctggggtgagaggagaattaaacacgaagggcctagcgttctaggctctgcaggctcccacggcca

SEQ ID NO: 2434 - DNA, 1005 bp, Artificial sequence
  DNA replication origin
gcgccgtggagcagggggcggtgctcgtcagggaggttcaggccgtgcaggagcccacagccggccgtgggggtagactcagacatggcgggctgcaggttccaagccctgccctgcggggaggcagctaaggcctggcgagaaatcgagcgcagcgccggtgggccagcactgctgggggaccccgcgcaccctccgcagctgctggcctgggtgctaagcccctcactgcccggggccggcagggctggcgggccagcctctccgagtgcggggcccgccaagcccacacccacccggaactctagctggcccgcaagcgccgcgcacagttccgggtcccgcccctgcctctccctccacgcctccccgcaagccgagggagccggctccagccttggccagcccagagaagggctcccacggtgcagcggcgggctgaagggctcctcaagcactgccagaatgggggccgaggccaaggaggcaccgagagcaagcgagggctgcatgggctgccagcacgctgtcacctctcacaggcactttgagaggccaaggtgagtggatcagttgaggccaggagtttgaaaccaacctggccaacatggcgaaaccctgtctctgtgcaaaaattagccaggtgttgtggtgcatgcctgtaatcccagctacttgggacgcttgaggcacgagaagcacttcgacctgggaggaagagggttgcagagagccgagatggtgccactacgccccagcctgggtgacagagtgacactctatttcaaataaatagatagataaataaataatgtaaatgcaatgagaggctccttaggggaggtttagcattgtgcctggtaaacagcaagcactcaatacatgcttgctattaaggattaccaccaagatgccctgtcaacatctaaaatcaaacccagtcatcttttcgctgttattgagttcactgcttttttctaagacacccagttctatcgcctagac

SEQ ID NO: 2435 - DNA, 1681 bp, Artificial sequence
  DNA replication origin
ctgcagagagggctttccccttcgctggggccgtgggctgccgccgagcccccgcgcttaaaaggaagctgagatctggggcggcagcctggcgcaggctactccccacccccagagatcaggttccgggattttgggttggacactgagcctcggcggtccctcggctggacgccgggggcttaagagctgaactgcgcttgggcccgcagcaggagccgaccgcgcgggcaggagggggttaaggtggcgctagcggccgcggccagcgggagggtctggtcctctgcgcggaggcgagcgctgagtgcgccgaacggaatcccggccggagcccggggcgatggggagagggcccagacccctccccgccctggggccggcgggattgggtcggcagggggccagtccggaagccggcttcctccaggctccccctctcgctgctgccaagccgcctcgcagctaggcaggcggagcgtttattctgtgctccctgccgaggagatgtgagggattttctcttgggggagaaatcagtggtcgagcgcctgcccagctcaaatgccacccggctcagagggaggcctgcggcccagggatcccggagggagagtaagttcatccagttttcgtacagtgcagactttgttgtgtggggtctccctagatgcgctctgaaggagtgtgtgtgctggggggtggggtgcttcttttccaggactggctgaggtcagagcttgtagacaggctgcagtgagctaagccctcctcttgggagctgctgtgtcctgacatgtgggggtaggagtgcttcttccagagtccttcctgagagcagctggggactagcaacctggatcaacccagggaggcccctggagaaggcaggcccagccaagcctgagtcttgctccctgggagaaaatgcttcaagctgatgggaagcctgcccagaagaggcaaggaggctgagggatagtcctcaggcctggcatcagaatagaggatgggcatgggggcctgttacctcccatgagggaagctgccagaccctcctaaatcttggcaccagctggttcaaatgccctggttccaccttgctgctgtttttttccaggcaacgtcacacctcctgaggacagccaggactccagcttttgctgagctttgcatcttgcctccttccttcaaaaggctccaggcccatgctcggctgtcttcaagtcccgcatgcccctggccaggcacctcaccgcccctccagcccagcccaatcctagagctcacctccaggacccagagtctgcccttctgcccagaatgactcaccattatttctagctcgagtgagaagacgtgatgaggagttgggctgcctgttggtgcatctcagattcctgcagcatctgatcagctctgcaaggaagagagcttcacgtctctggtcaggtaaatcaatctatcatttaataacagccttgtgtagaatcactggggtggaggccaatgagaaagacccaggcccaagctccccaaccatgaatacctccctgggtatgagtatctgagacattagtgcagcacctgggagagggtccacttttaacctattagcatggggttatgctccatgaagcctgtgtgctacaagcgggcctgtaccagccaccttccccca

SEQ ID NO: 2436 - DNA, 804 bp, Artificial sequence
  DNA replication origin
ctctgccaaagaatgttttcctcgcggggcgggggctgaggcccgggggcccaacgaggtgacgagctcggtggcggcggagggcagcttgtcgccccggccccggccccggcccccgccggcccctttaattcgagttcgccgtcgagccaggtgcggcgctgcgtggcgcggtgcggctgcgggcggcggccgggagctccgtacgcgccgcccgcgggactgcagagccggctcccggctggccgcccgcaccccgccgccgcccgctgccggggttctgccggcgctggccgtaacctaggaacatggaggccccggtgcccatccggaagggtaaatccgtgtcggggcgttgcgcggcgcgtgctgccttccctgcccggctgcggcgcccagaggggctgcggggcacccggcggcgcagcctgcagcgcagcaggcttgggctgagtccgcggcggcaagcccttgccgaccactgccgtctgctcggcaggtcccagaccggggagatcaaggggaacttgcaccctgctcaagaagagtgcacagaatgggctcgggaccctctggggtttgcgtggcgcggggcggagggcacggagaggagctggtgggtggtgggaagtgcagctggcagcataaccatgtctggtaaatagcgcgggttggtaggacctgaaccacttgggacggccgggctgcattcgcctcttcggcacagaataacaaacggctttgctgcagagagggctttccccttcgctggggccgtgggctgccgccgagcccccgcgctta

SEQ ID NO: 2437 - DNA, 874 bp, Artificial sequence
  DNA replication origin
gtcggcaagggcttgccgccgcggactcagcccaagcctgctgcgctgcaggctgcgccgccgggtgccccgcagcccctctgggcgccgcagccgggcagggaaggcagcacgcgccgcgcaacgccccgacacggatttacccttccggatgggcaccggggcctccatgttcctaggttacggccagcgccggcagaaccccggcagcgggcggcggcggggtgcgggcggccagccgggagccggctctgcagtcccgcgggcggcgcgtacggagctcccggccgccgcccgcagccgcaccgcgccacgcagcgccgcacctggctcgacggcgaactcgaattaaaggggccggcgggggccggggccggggccggggcgacaagctgccctccgccgccaccgagctcgtcacctcgttgggcccccgggcctcagcccccgccccgcgaggaaaacattctttggcagagcccgacttactaaccagaacctccaggagagctcagctgggtgctgccgggccggggagatgggggagggcagaagttgaggggcactggtgagaggctcctgccaacgtaatgaagtaggcaaggaggagataatcaatagcagctaccccaggcccacagcgggatccagccccgggagagacgtgttgctattattgtggtgcctccagacaggatctgcagacccctttcttgccctttctcccgccagcgcgaccccttctccagatcggcttcccacctccctgttacccagcaaagatttggcttcgcagggaaatgcagcaggtgcggtccgcagtgtggcagaaactcttctgctgtgttcgcccccaccgagaggagccgcagga

SEQ ID NO: 2438 - DNA, 1418 bp, Artificial sequence
  DNA replication origin
tcagctgggtgctgccgggccggggagatgggggagggcagaagttgaggggcactggtgagaggctcctgccaacgtaatgaagtaggcaaggaggagataatcaatagcagctaccccaggcccacagcgggatccagccccgggagagacgtgttgctattattgtggtgcctccagacaggatctgcagacccctttcttgccctttctcccgccagcgcgaccccttctccagatcggcttcccacctccctgttacccagcaaagatttggcttcgcagggaaatgcagcaggtgcggtccgcagtgtggcagaaactcttctgctgtgttcgcccccaccgagaggagccgcaggaacaggcagcactgcagggctggccctctccactccccgactccctcccccagggcccgggcagggaaggctgggggacacgccgctgcccttgggaatggtcagctactcacaaaacgggccctctggcagaacttgcaaagccaggtggcccacagggctctgaacttaggagtgcagcttacagcaccctaggtgggcagacgaggatgccctttgctttcgggaaatgtgtgtgggaggcacagcctactttctgcctagatagggcatccgagaaggtccagggtgcttttgggaggcagacgacagcctcaagcccctgctagttctgttctccaggtccctgtcagggtcacctagacaggtgtgccaaacagtggtggttccttgagataagactgcggtagacacggagctctggattcagatgggctctagcaccaggaagtccccactgggccctcccccctaccctccggccgggaaaccctcctctctatgcgtgtacctcgtggggagagccctgaaagcccatgaagcgggactccggattctggcgtttcatcgtggtagtctgtgaggtgtggttgaagactgggagcctgcctagagctgcagggggtggtctgggagggcagtgacctccgtgggcccaaaggatgacagatgactatagagaagggctggtatggtttagagcaccttgaacctggcctgttagtgtcccagtcagtgaacggcttgggtgttttggaggcagtcagatggaaacgtaactccctaacagttactagataagttatttcacttctctgggcaccagtgccctcctctgaaaaatcaggatgcccctaagggtgtggtgaggttttaattgttgaatgagtttagcatccagcagacactgaatgcatgatgatttcgctgctctgcttccttgtgaaactctcctcatagctcttagcttccagcttagctctggggtgtttctctaggctcccaatcaccaggtccttgttgccccattccctctgcttcccagattgccccgcc

SEQ ID NO: 2439 - DNA, 1236 bp, Artificial sequence
  DNA replication origin
acgcagctgaagaccctttgccagttccccgagacgctgctgggcgaccccaagcggcgcatgaggtacttcgacccgctccgcaacgagtacttcttcgaccgcaaccggcccagcttcgacgccatcctctactactatcagtccgggggccgcatccgccggccggtcaacgtgcccatcgacattttctccgaggagatccgcttctaccagctgggcgaggaggccatggagaagttccgcgaggacgagggcttcctgcgggaggaggagcggcccttgccccgccgcgacttccagcgccaggtgtggctgctcttcgagtaccccgagagctccgggccggcccggggcatcgccatcgtgtccgtgctggtcatcctcatctccattgtcatcttctgcctggagacgctgccggagttccgcgacgagaaggactaccccgcctcgacgtcgcaggactcattcgaagcagccggcaacagcacgtcggggtcccgcgcaggagcctccagcttctccgatcccttcttcgtggtggagacgctgtgcatcatctggttctccttcgaactgctggtgcggttcttcgcttgtcctagcaaagccaccttctcgcgaaacatcatgaacctgatcgacattgtggccatcattccttattttatcactctgggtaccgagctggccgaacgacagggcaatggacagcaggccatgtctctggccatcctgagggtcatccgcctggtaagggtcttccgcatcttcaagctgtcgcgccactccaaggggctgcagatcctcgggcaaacgctgaaggcgtccatgcgggagctgggattgctcatcttcttcctctttattggggtcatccttttctccagcgcggtctactttgccgaggcagacgaccccacttcaggtttcagcagcatcccggatgccttctggtgggcagtggtaaccatgacaacagtgggttacggcgatatgcacccagtgaccatagggggcaagattgtgggatctctctgtgccatcgccggtgtcttgaccatcgcattgccagttcccgtgattgtttccaacttcaattacttctaccaccgggagacagaaggggaagagcaatcccagtacatgcacgtgggaagttgccagcacctctcctcttcagccgaggagctccgaaaagcaaggagtaactcgactctgagtaagtcggag

SEQ ID NO: 2440 - DNA, 997 bp, Artificial sequence
  DNA replication origin
cctcccctgcggggcgcgcgcccgcctccgcgtccccttaggattcccgcccaccgcgcgggcgcgcgtcccgctctcgggggcagccgccgggcctgcatttcttgcagccctcaaggcccctcggtgtcagcgaaagagccctcatgttgtacctcggcgccccgcgggaatgcccacccagcagagccggcccacggggagtcaggctgccggcccgggcccctaggctccgcccgcttctggtcagcgcccctcgcccccggcccgcctggccgcgtcccagtcgccagggttttcggcccgtgggccgggagagctcccgccgcggccccgcgggcgccggccccctggcctccacacccctaggtacagcccggggagggcaggcgggcccagtgtccagggagggagtgcaggccaggcgggcgccctgggccagaggcaagcctggcgccggcatcccaggttcccttgagggtcgaggaccgccaaaccctggggaggagcgggggtttaaacaatttagcttctgctaggatgcgaagccaaagggagtaatgggtgctgatgggcttcgcaaacggagtccgaaggaaatggattgttaaaggcgttcgggccctgctgctttagtgaatagttcacacccgttttcgcagcggagatgtcggccactgggaagaatcaaggaccaagtttctgattgggattagcagtgacagcctggtctttatccactacacaggtttcctgttggcggggaaataagaggaaaaatgggaaaggaaattcacgaagtcgaagttgtgtggttagaaagtccagctttatgactcaagcctgtcgtggaagggatgagagcaggacctgtacctagactttttacttaatattttggcactgcccttgtggtagggaatttgcagcgctctagttgttaaactggaaggacattcattctgcaacttgtacctcttgcttgatctgggcccag

SEQ ID NO: 2441 - DNA, 911 bp, Artificial sequence
  DNA replication origin
tcagcccccgccaggccagccgccccgtccgggagggaggtgggggtcagcccccccgcccggccagctgccccgtccgggaggtgaggggcgcctctgccctgccgcctctactgggaagtgaggagcccctctgcccggccagccgccccgtccgggagggaggtggggggggtcaggccccgcccggccagccgccccgtccgggagggaggtgggggggtcagccccccgcccggccagccgccccgtccgggaggtgaggggcgcctctgcccagccgcccctactgggaagtgaggagcccctctgcccggccagccgccccgtccgggagggaggtgggggggtcagcccgccgcccggccagccgccccgtccgggagggacgtggcggggtcagccccccgcccggccagccaccctgtccgggaggtgaggggcgcctctgcccagccgcccctactgggaagtgaggagcccctctgcccggccagccgccccgtctgggaggtgtacccaacagctcattgagaacgggccatgatgacaatggcggttttgtggaatagaaagtggggaaaggtgggggaaagattgagaaatcggatggttgccgtgtctgtgtagaaagaggtagacatgggagacttttcattttgttctgtactaagaaaaattcttatcctgttgatctgtgaccttacccccaaccctgtgctctctgaatcatgtgctgtgtccactcagggttaaatggattaagggcagtgcaagatgtgctttgttaaacagatgcttgaaggcagcatgctcgttaagagtcatcaccactccctaatctcaagtacccagggacacaaacactgcggaaggccgcagggtcctctgcctaggaaaaccagagacct

SEQ ID NO: 2442 - DNA, 1532 bp, Artificial sequence
  DNA replication origin
tccctcccggacggggcggctggccgggcggcgggctgacccccccacctccctcccggacggggcggctggccgggcagaggggctcctcacttcccagtaggggcggctgggcagaggcgcccctcacctcccggacggggcggctggccgggcggggggctgacccccccacctccctcccggacggggcggctggccgggcggggcctgaccccccccacctccctcccggacggggcggctggccgggcagaggggctcctcacttcccagtagaggcggcagggcagaggcgcccctcacctcccggacggggcagctggccgggcgggggggctgacccccacctccctcccggacggggcggctggcctggcgggggctgacccccacctccctcccggacggggtggttgctgggcggagacgctcctcacttcccagacggggtgactgccgggcggaggggctcctcacttttcagacggggcggctgcgaggcggagggtctcctcacttctcagacggggcggccgggcagagacgctcctcacctcccagacggggtcgcggccgggtagaggcgctcctcacatcccaggcggggcggcggggcagaggctctccccacatctcagacgatgggcggccgggcagagacgctcctcacttcctagatgggatggcgaccgggaagaggcgctcgtcacttcctagatgggatggcggccgggcagagacgctcctcactttccagactgggcagccaggcagaggggctcctcacgtcccaggcgatgggcggccaggcagagacgctcctcacttcccagacggggtggcggccgggcagaggctgcaatctcggcacttagggaggccaaggcaggcggctgggaggtggaggttgtagccagccgagatcacgccactgcactccagcctgggcaccattgagcactgagtgaaccagactccgtctgcaatccccgcaccccgggaggccgaggctggcggatcactcgcggctaggagctggagaccagcccggccaacacagcgaaaccccgtctccaccaaaaaaatacgaaaagcagtgaggcgtggcgtcgcgcgcctgcaattgcaggcactccgcaggctgaggcaggagaaccaggcagggaggctgcagtgagccgagatggcagcagtacagtccagcttcggctcggcatcgggagagggagagggagagggagtgaattcattttcatatcaatgtctcactgctgagttctgctgagctgacctcttgcactagacttacagtgctttcttttggtgataaacctgagcgattttaagatcacaaattggttctggaactcattaaagtcagcaaatgagcattaaaagatacttgcacaggctgagtttgtgctaatctgtctatttaggcaattacagctcagaggatgaacagaggggcggtgagaaagaaccctccaactcccagcaagatgatccatttcagatgtctgtcaacg

SEQ ID NO: 2443 - DNA, 804 bp, Artificial sequence
  DNA replication origin
gagggagcggggggcgcgggtcggccgagccgagggtgaggcggctcatgtcgccggtcagtcgcctggctcccccttcctcctccgcgttccatcggtgtcggggcggcggcccgggggcctggccggcgggaggggccggagatctgggaggcccggccgccgccagggccagagccaaccacgcccgcggaccgacccggtcgactgtaggcctgcgggagaccgtcgggaggggccccggccggctgtgggagagaaagaggacattgtgtcccccacccttcagctccccgaggtgtcatagcacaagcccatttccctcgccgtctccccagacacggtgccctcgtacctcactgcctgagagaagtagaaggttggacatcgctgccttcctcctcttgcatgtcccctgtctagggtcagagcttccttcaaacccagctctcccttttgggcccgcgggggcgggggggagggacacacggggaacggggttggagggttgggtgaattctctgtcctctgctgtaggagtgcgggtagactggagcattgctgtctccgggctcacttctgtcagggttcagggtctccctttccttcctttattcccccagttaatagggctgacatctacatcccactccaccttccagcccctttcccgccttctttaccctcatgtcttccgtagcttaccatgtgttcgccttttcagtgttacttttcatgggtctctgcttcttccctgaattttgttagggaagaggtcacggtgtgattcttgttatccttcaa

SEQ ID NO: 2444 - DNA, 1236 bp, Artificial sequence
  DNA replication origin
aggcagagggcagggcttgtcctcaggaaaggggaccacgaagaaactttgagcaaagatttgtgatgagacaagaacaagtgacagagagacagagggagcaagccagccaggctgaaatgtgacacagagaaccccagagagaagatagggcacgcccagagacggccaggcacacggacgcagtggggcccccgcgccgccgacgcggaaagcgcgagagcgaaggcctggggagcgggacgcgggcgcctgggtgcggggctgcgcggggcgacctggagcgcggggaggaggagggtgctgggtcctgatccctgcgcgggcacgaggtcagcgggactgctcgctcgagggaagcgggtaccaccctgggcccccagctctgccgggcttggcagagctggcgcggctgcgggggcaggcttggccggctgtctgcctgggcttgtctgccagcagggagggggctggcagctggaaaggcgggggagggccctgcgctggaggaggggctctgcctggcaaatcgagagcgggagctgcggaggcccagccagatgtcaggtctgggcttggggagtgcgcagggagcgttcggaggccccgcggtacggggagggggagaagtagctcagtctgggggggtggaaatcaccgaagtcgggggagtggtgttcgctaaagctatgttagggagagccaggttgattctcactggcttcatataccactgcccccgcccccacgccacctgccacctttcttattccttcacccaccggaattcaggcaaatgttatgcacatacagccccatctctgctttgcccatctctccttccactaggctctctgttgtgtctttgccctcgtctctttttgtctcttttagtttgtctctcttggagtcgactcttctcagtctcacttttctgctctcctctttcttcttactttacagagccaggggcactcaggccacacaacagcaggcctggatctagaaagggccagcttatggctctccagattctgtgacagcgtttcccactgctgcctgcaaaggctacactcttcctgcttgggaaggaacttggcagtgtgttaggggccagctctgggggtagggggcagagtttgaaactgcaggtgttctcactgatgcttcctgaccaagtaaccctgccactcttcctgtcagtcctactccagggtcagcctgctcacatcaacg

SEQ ID NO: 2445 - DNA, 796 bp, Artificial sequence
  DNA replication origin
gccggggcggagaccaggtgcccgtcggggcggagcagccctccctgccccggcgccagcttcgctcttaccagctcctgtttgaggcgacggagatagcagtccatttccctgctctccatcgtcatgcgcccatttgtcgggttcggttcaaacagagagggcccgggtgaaaccccggccccactggaaactgcgctccgggccggctccccgcccctgcgcccgtagcgctcgcagcgcggagctgagcctgcgctccgagcccgggactcagagtcgcttccccagcggctagccgcgcgcggtcggtgctgggggtggagggaaaagtgggacagccaatgagaattcaggggggctgtcttcagccaatgggcagggcggccgggaggccgggctgggcggccgaggcggaccctaccgcagtgtttgcacaggacccgggcgcagccactggggctggcgaggacacacctggtcccggccagcgcggcggagggcatcgtgactccaggctgtaccgcggcccccaacgaagcacgtgaccctcgtgtggtcataaagggagagcacagttttacggggagggactgggtagcggtctcagtaacaggcagagtgccatagtgtcagtcccttttcccaaactccgatcaggaagggaaacacccccacccactccgctcccatccccagaagtccctcagaagctcttttctccccgaagaggaccctgggaaggtggctcccgcctcactcctagagtgaaatcctcgcagccctgccctcgcgg

SEQ ID NO: 2446 - DNA, 895 bp, Artificial sequence
  DNA replication origin
atctggtcccaagtgtgtagagaaggggagatgctctggctacggggactgtgcctgcaaggaaggcctctgccctgtgcctgcctgacctttctacagatttctttctcctaaacacatacccaaagagattcctcctcagctgaagtcagagcagcagcagaaggaggaggaggaggaagaggaagagcaggaagaggaaagaggagaagggagaagaggaggaagaaagtagaggcaggagaagaaagaggggaaaagagggaagggagaggactcagggggagggaaggggaggaggaaatgagggatgagagggagatgtggagagggagaggaagcatgagggaggaaaaagaagggaggacagggtgagaggaaaaggaggggaaggaagaggaaggggaggagggagaagtggggagggagaaggagaaggaaggagggggaaggagggagaccaagagcaaggagggggaggaggcagggtgaggacggagagggaggagggaaggatgattctacctcagctgtgggaccaggctgtagaccagactgcctgggggtttctctgcttttaccaaatctgagggtcagggggaggcctttgggcaaaaacgtcatgcattttacatggccttggcctcacagagcaaagtgcacaccaaatggggaggtgggggaaggggtaataaaaattaaattaaagaaattttttaaagttggaagaacaaattatttggagacgaagcaaaaatatctgtgacatagcgagcactgttttaatgacagcccgtgtgggaggacagtttagtcatatttttcattttctcgtccccggggagctgcatcccagtgatcaggccctgatagcaaactggcatgttccctagat

SEQ ID NO: 2447 - DNA, 1522 bp, Artificial sequence
  DNA replication origin
gcggcggcggcagtggcggcggcagtggcggcggcagtggcggcgggggagggagggccccacggacggacggacgcacgaaccgaccgagcgagggaggcagcgagcgagactgcgctggcgaggaggagccgcgcgagcggcggctgctgggcgcttccccgcgctgctgggcgctcggcgcctccgcggccccggctcccggccgcagcttcctcgcgcgcgcggggcgccgggcgcggggcccgggctggcttcgcggaaggtaagagggacgcgaccgagccttctggagccaggaagtgcgaggagcgctgctcccacgcctgttgctccggctgcccacgcggcaccctcccactcccgcgcccgggtgggtgggcgctggggcgccggaaggattgggggtggggcccgtgccgtgggggagcagacagccggcccgggggcgtcggttccctcgggctgtggagccacctccgggcagccaggcgctggggttcgggggtggggtgtgaacctctgccctctttccattggcctgtcttccctcggcgggtgccagagacaggtggcgaaggcttgctccgtccccgctcttggtgaggggacaaggagagaaatggctgaaagtggaaacccggagcggtttggggcgcttcgcaaagttctccagctcggcgagccggcggtgtgtctaccagaggctgggggccagtccatctggtcctgcccgacgccacttccaccccgcgagctctgggaaaggtctctacgtgacgccaagggccgtcgcggccccggggagagggatcgaaagactcactctgcgaggtgtttacactggaggtgggggacgggaagggactgggcaaagttacctggactcaactaaattcctgcgcttgcttagtgttgacatttgaataggatccgagatgttctgcttttatcccgggcagccctgatatgtcagcaacaggctgaggttccagacctgaaatcgcactgcaagaaaaagggtccgtatttcttaagagagagcgtctgaactttctcggggtcctaggcacaatgcgatctgtttgtaagaccaggcatgcgttgctgtattttgcatgaatgtacgtgatggtcaaatgtatgccttgtttaccttacttcgagggagcctgtatgtttactgtctgtagaaagggctcctgggtgtccacgaattcaatacaaagcatgtgtacatttccccatgtggacctgttggcacacaggaagggaactgatgtgtttattttttcctcgtctctacttgaatgcaacaaaatgcaagtatacaagggaccccccagagaaagaggttagtagcttgttcccttttgctcttgaggaggctggagaaaaagagttcaggaaagtgccctggctagcctaggagtggcaccgttggagaagaggatctgtgcgtgtgtcccaagcctgtcccccaaggatccccagcttggttcaccttgtcagtttcatgctt

SEQ ID NO: 2448 - DNA, 1260 bp, Artificial sequence
  DNA replication origin
gccgccgctcgcgcggctcctcctcgccagcgcagtctcgctcgctgcctccctcgctcggtcggttcgtgcgtccgtccgtccgtggggccctccctcccccgccgccactgccgccgccactgccgccgccactgccgccgccgccgctgccgcagcctccgccgctccagccccggctcggcagcgcgtcccctccccgcctcgccgctccgctcgcgggctcgcgggctccctcgctctctcccttcccccgccgctgccggcgccgcgccgagcggagcccggccggccacgggctgcctctcccgaggtccctttcccgagggggggaggtggtgggggcgcggcgcaggcggggcggggaggagaggagagtccgggggaggcggcaaggctgcgccctcggctcccctccgatccccgcgggcccagcggccccaggccgggccggagagcgccgagccgccaggcagtggaggaagagaggaggaggacccggagtctcgccgcgggagggtgcccagggcgagggcgtgcgagggggagtgactccgcgcgcgagggtgtgtatgagtgtgagtgcgtgtgtgtgtgtctgtgtgtgtggagaggggcgcgcgcgtgagcggggggtggggagacgaggcagagcctagtgcgtctccccgggcgagtggaggaatcctagggtgtgcctggaggtggcggagtgtaccgacgcgggtgtgagcgcgtgtgccagcgagggtgggcacgggggtgagcgtggcaaggtgagctgggtttgggggtgggggaggagcagggagtacggcgtgagcgtaagttcgggggcgtgtgtggctggggacccacggagaggtggcagggagggccggcgtgtgcgcgcgtggggtatgtgtgcacctagctgtgtgtctatttctcgctgactgtccacagggcagcagcacctgcttgagaccaagcccggcgacctggcaaggtggggccccctaccgcgcaatctttgcggctggcccccggctctcagctccgagtgcagaggctgaagaggtacccgggggacacactgcctctaaccccacctatgagccgctctcctctcggaggacgaaggcaccatcagaaggtcgagattcgccctcctctcccgccacgtctacccactacctagaccgggagtctggacttgggagcgtgaactctcacccgagccggtccccttacaactggagcccgcccagcccctcagtc

SEQ ID NO: 2449 - DNA, 1276 bp, Artificial sequence
  DNA replication origin
tccctcccggactgggcggctggccgggcagaggggctcctcacttcccagtaggggcggccgggcagaggcgcccctcacctcccggacggggcggccggccgggcggggggctgacccccccacctccctcccggacggggcggctggccgggcagaggggctcctcacttcccagtaggggcggccgggcagaggcgcccctcacctcccggacggggcggctggccaggcggggggctgatccccccacctccctcccggacggggcagctggccgggcagggggctgaccccccctcccccctcccggactgggcggctggccgggcggggggctgacccccccacctccctcctggacggggcgaccggccgggcagaggggctcctcacttcccagtaggggcggccgggcagaggagcccctcacctcccggacggggcggctggccgggcggggggctgacccccccccacctccctcccggacggggtggctgccgggcggagacgctcctcacttcccagacggggtggctgctggacggaggggctcctcacttctcagacggggcggttgccaggcagagggtttcctcacttctcagacggggcggccgggcagaggcgctcctcacatcccagacagggtggcggggcagaggtgctccccacctctcagacgatgggcggccgggcagagacgctcctcacttcctagatgggatggcggcggggaagtggcgctcctcgcttcctagatgggatggcggacgggcagagacgctcctcactttccagactgggcagccaggcagaggggctcctcatatcccagatgatgggcggccaggcagagacgctcctcacttcccagacggggtggcggccgggcagaggctgcaatctgggctctttgggaggccaaggcaggcggctgggaggtggttgtagcgagccgagatcacgccactgcactccagccttggcaccattgagcactgagtgaacgagactccgtctgccatcccggcacctcgggaggccgaggctggcggatcactcgcggttaggagctggagaccagcccggccaacacagcaaaaccccgtctccaccaaaaaaaaacgaaaaccagtcaggcgtggcgtcgcgcgcctgcaatcgcaggcactcggcaggctgaggcgggagaatcaggcatggaggttgcagtgagccgagatcgcagcagtacagtccagcttcggctcggcatcagagggagaccgtg

SEQ ID NO: 2450 - DNA, 971 bp, Artificial sequence
  DNA replication origin
agccccccggcccggccagccgccccgtccgggaggggggagggggagtcagccccctgcccggccagccgccccgtccgggagggaggtgggggggtcagccccccgcccggccagccgccccgtccgggagggaggtggggggatcagccccccgcctggccagccgccctgtccgggaggtgaggggcgcctctgcccggccgcccctactgggaagtgatgagcccctctgcccggccagccgccccgtccgggagggaggcggcggggggtggtcggccagccgccccgtccgggagggaggtggaggggtcagccccccgcccggccagccgccccgtccgggagggaggtggggggatcagccccccgcctggccagccgccccgtccgggagggaggtggggggatcagccccccgcctggccagccacccagtccgggaggtgaggggcgcctctgcccggccgcccctactgggaagtgaggagcccctctgcccggccacgaccccgtctgggaggtgtgcccagcggctcattggggatgggccatgatgacaatggcggttttgtggaatagaaaggcgggaagggtggggaaaaaattgagaaatcggatggttgccgggtctgtgtggatagaagtagacatgggagacttttcattttgttctgtactaagaaaaattcttctgccttgggatcctgttgatctgtgaccttatccccaaccctgtgctctctgaaacatgtgctgtgtccactcagggttaaatggattaagggcggtgcaagatgtgctttgttaaacagatgcttgaaggcagcatgctccttaagagtcatcaccactccctaatcttaagtacccagagacacaaacactgcggaaggccgcagggtcctctgcctaggaaaaccagagacctttgttcacttgtttatctgctgaccttccctccacta

SEQ ID NO: 2451 - DNA, 1308 bp, Artificial sequence
  DNA replication origin
cgtcccgtccaatgagagcccgcggccgaaggggctgtccgcacactaggcccgcagctcccttcagcgccgcagaccccctgacaccgcacccggtcctcaggcagcgcgccccagaccccgggttcggcacgccgtcgtcggcttccggacatcgcaacttgcgcccctctcggggatcctcctcccgggctctggaccccaggtgatcctaggtccccagccgccggcgaacaccatggccccccaggggggtgaggtaggagcagcctgagtacccccagaaggtgccccgtccacgcccctccgggctgcgcggcgggagtcttcggggagctatgctgagaccgggtggtgcggaggaagctgcgcagctcccgcttcggcgcgccagcgccccggtccctgtgccgtcgcccgcggcccccgacggctcccgggcttcggcccgcctaggtcttgcctgccttctgctcctgctgctgctgacgctgccggcccgcgtagacacgtcctggtggtaagtgtggctctcaggctgggcgggtgaggcgcttggtaggagaggccggaggcgcctggagggactggctgctcacgggaccaggctgttgcttcgacgggttggagacgattcgggcaggactgtcactgaaatctgaagtcgcggggtggcgggagggtgaggcgccgcgtcttacacgactggtgagaaaggcgctgggcattcggagcaaggatgcccggtggtcgcggctccttaggcctccacgtgctgtaccccctctatttcagctcaagccccttagggcagaagctaccttccgagtttccctcagggtgagttcaaggaacgaataaccttccagggcccgcaatagcttcgccagggccccaatcgcctaaggtcgccctctgagaggtggagaaaggggcagctcgctagtctagcccacccataccacaggaaggctttggtgaggcagcagcacccagccgaggcttagaaatggaatcgaggcaaaatttaccccattaactcccacaattaaaacaaacaaaacgcatgggtttgcattatctaggcatttgtcttcagccaccgttttgaggatgtcacttaggaaactttgcctccctcccttcttcctattctttcccatctcccatttctcccctccaagagccagagggctgcggagtcccaagatactaagagaccccctccccagatttcttgcaggccctagactccagacacttcacaagagggcagatgaggcaaaaaggcattacagatccactgga

SEQ ID NO: 2452 - DNA, 938 bp, Artificial sequence
  DNA replication origin
ccagtccgggagggaggtgggggggtcagccccccgcccggccagccgccccgtccgggaggtgaggggcgcctctgcccggccgcccctactgggaagtgaggagcccctctgcccggccagccgccccgtccgggagggaggtgggggggtcagccccccgcccggccagccgccccgtccgggagggaggtgggggtgagccccccacccggccagccgccccgtccgggaggtgaggggcgcctctgcccggccgcccctactgggaagtgaggagcccctctgcccagccagccgcccagtccgggagggaggtgggggggtcagccccccgtccgggaggtgaggggcgcctctgcccggccgcccctcctgggaagtgaggagccccctgcccggccagccgccccatccgggagggaggtgggggggtcagccccccgcccggccagccgccccatccgggacgtgaggggtgcctctgcccggccgcccctgctggaaagtgaggagcccctctgcctggccaccgccccgtctgggaggtgtgcccagcagctcattgagaacgggccaggatgacaatggcggctttgtggaatagagaggggagaaaggtggggaaatgattgagaaatcggatggttgccgtgtctgtgtagaaggaggtagacatgggagacttttcattttgttctgtactaagagaagttcttctgccttgggatcctgttgatctgtgaccttacccccaaccctgtgctctctgaaacatgtgctgtgtccactcagagttaaatggattaagggcggtgcaagatgtgctttgttaaacagatgcttgaaggcagcatgctcattaagagtcatcaccactccccaatctcaagtacccagggacacaaacgctgcggaaggccgcagggtcctctgcc

SEQ ID NO: 2453 - DNA, 1171 bp, Artificial sequence
  DNA replication origin
gcccttttcttctttccagagcttcctgagcttctcccttctaccctgggcctcttcagttctcccagatagcggacccccgaggcagcagcgcctcaacaaggtggcagaggtccctgtaaagcccgcgctcgggctcgcagcccccaacaggcagcctctaacccgcgctcccgcgatgcctgggccccctctggaggctcccctcccccaccgcgagcgctgtccctcagcccccgcgagcggcgcatggacgcgggacgcagctcccggccccgggttccggcctccgggggcgcgggcagcgcgggaggctctccgcggcgacttggcgcaggggcccagctcgggcagaactggcgggctccgggcggcgctggtggggcgtgggcgaggcgcgggaggggaggtctgcgccgccccgggactggcctgagccgctgggggagctgcgtccctctgcgccccggggcgggaaaggtggccctcgcgcgggggtcgtggcagcaagctgggcccgcgattcggggccgggagtgggccggcccgtacctgatcttgaagtcgcggttataaatggtccgcagccgctcgcgatctgtctccatgtccagtccccgaacgaccaggaaactctcgaaacactggcccgcctcccggagctgccggcagctgaacttactgggcatcgcggcggcggctgcggcccaggcaggagggtccgtggaaatgaaactgaaagtcgccgctgcagctggaagttggcggccctgagatgagggtgcagcaggagggaagccccctaactctgacccctgatcctgcgggctcccttctccccaccaggcttccctcctccgttcttttcttacctgagctttcccttcggtttcttcgtcctatcccctccccctcttcgcattaactctttcctaaagcgtctgacccctccctcagggccctccccttaccccaagctccctcccctggcttctagccagtatcagaacgtggctaccgcttggggccctctgaacagcccgggaggacctccgagcctcagccagggctaccctcacgcccaccctccagagcctcgggactcagtgaaaagcaggagagcaaagggcagggctgggatctaggtcggctgcggccggaatggggaagc

SEQ ID NO: 2454 - DNA, 1401 bp, Artificial sequence
  DNA replication origin
agctccgggaggcgggccagtgtttcgagagtttcctggtcgttcggggactggacatggagacagatcgcgagcggctgcggaccatttataaccgcgacttcaagatcaggtacgggccggcccactcccggccccgaatcgcgggcccagcttgctgccacgacccccgcgcgagggccacctttcccgccccggggcgcagagggacgcagctcccccagcggctcaggccagtcccggggcggcgcagacctcccctcccgcgcctcgcccacgccccaccagcgccgcccggagcccgccagttctgcccgagctgggcccctgcgccaagtcgccgcggagagcctcccgcgctgcccgcgcccccggaggccggaacccggggccgggagctgcgtcccgcgtccatgcgccgctcgcgggggctgagggacagcgctcgcggtgggggaggggagcctccagagggggcccaggcatcgcgggagcgcgggttagaggctgcctgttgggggctgcgagcccgagcgcgggctttacagggacctctgccaccttgttgaggcgctgctgcctcgggggtccgctatctgggagaactgaagaggcccagggtagaagggagaagctcaggaagctctggaaagaagaaaagggcacaaactacgtgcgtaccaaacctccattagcacctgtggcttctccatggagacccaggggcagagccagccttctggaggctccctttcaccctgtggctgaaggctctttggtctccttttcctgctaccacccaagtgaaaatcaaagagtcttctgtcacaccacagaattgtgcttcaaaaacacgtttatcaacaggctgctgccttgcgtggaaaaccaagaagcagtttaacaagggtaaacgtaaagacttgtacaaataaacataaggtagtgggaatctgggcttaataacagacctcccgaaaaagaccttgggttttagcagaccagagggccagtatgggtgagatatggctgctaaaacagctgaagtctaagattgagctaacagaagtgtgatttggggtgggggaaaagggtagagactctccatattggtgaaatcgtgtctggaatatcgttttcactaatggttatcacatttggagagggatattaacaggcttgaacaacatctgagaaggggcaaagatgatgaggccctgttttatgtcaccatgctggacactatggggactcttaagatgaaaaacacacaatcccagaggagcatcagaggctatgatatgcatgcaatatacatgtacacaatataggatagtacatggtaaaatggaggattatactagggatggtaagagaaaaatgctggaggaaagagcgagc

SEQ ID NO: 2455 - DNA, 895 bp, Artificial sequence
  DNA replication origin
gtcttggggaaggccccagaagttccaggctccattccaggccctgtgtggggctcagttgcccctcttaaggggtcagtgggacagtccctctggggctgcctctcacagggagttgtccatgccatcttggccttgggcctagtgtcctggcctgggctgcctgctgttctggcccaatcatagcctggagggaaagtcttctaattgggctggaggctccaggtcccttaacgcatgcctcaaccccgggtttctgtcctctgcctcccaccactctggtgccgtctgaattaccctgctggggggacagcagtggcatactcatgcctaagtgactggctttcaccccagtagtgattgccctccatcaacactgcccaccccaggttggggctaccccagcccatctttacaaaacagggcaaggtgaactaatggagtgggtggaggagttggaagaaatcccagcgtcagtcaccgggatagaattcccaaggaaccctctttttggaggatggtttccatttctggaggcgatctgccgacagggtgaatgccttcttgcttgtcttctggggaatcagagagagtccgttttgtggtgggaagagtgtggctgtgtactttgaactcctgtaaattctctgactcatgtccacaaaaccaacagttttgtgaatgtgtctggaggcaagggaagggccactcaggatctatgttgaagggaagaggcctggggctggagtattcgcttcctaaagggcagtgtgaggtggtggtggggtgtggggagtagaggcgttcagtcagcccagtttgacaggatgtgggactgagagaaaaagctaggtttgaggctgagatcaggttaccgtcgctttcttaactgctc

SEQ ID NO: 2456 - DNA, 1175 bp, Artificial sequence
  DNA replication origin
tggagggaacggggtccacgcccaggccgaagcccctcctcgcacgggccccgatctccgggccagcgaggaagggaaagtgctctcctggggacgagttcccaagacgccccaccgcccgcagccccggcccagggtaccttccgctccgccgcctccagctgcgcggccggtgccggaggctcagactgaccccagggccccgccccgccctcctccagcgccgcggcggggagggcgggcccggcagggggagggtcggccgggggcggcccttggctcggcccgccccggccccgcgcagggccgcagccaccggccccctccgcaggccggggactgggggccaggggcgtccacccctccaggtcggggagagccacggggagattcctggactgcggaggagccgggcgagcggggggagcacgacccgggtggactcagactctgcccagccttcaatcccctaggggaggaccggcgtcgggaaagttaagaggtgctcggggtggggtcaggaagggccgctgctgccctcctgtggccaagcggccacccgctcctgctgcacctgggacctcgcgggaagcgggactgggaaagggtatccgccgggaggtcccagggcccggcgcgggtgtgttggttggggggagatgtccaccctcttgttcctaggatcgtacagcccaacgtcatcccccaaacttgaagacctctcagagccgttcagacccagaccaccgttcctcctcacaattcgctttcttccctgggcctggaatttccaggagtccaattcctacctactcctcaaagggtgcgcctagaaatgcttctggatcccagctgtgaattctgttcccactcctaggtctgacttggcgcataggatatttacctacacgcgtatctcctttccctgtaagggagctgaggaggtgggagtagaatgaggacgtccaccaacatttcattggcttgtgcttgggacactacacagcttaaccctttcaatattcatcacagatctctggggaaaatatacccatccccttttgcccatagagaagctgaggttcagagaaatcaagtggcttacacaactgtttttgacttgtgacagcaagaattcacacagccgggcctgtctggctccaaactggtggtct

SEQ ID NO: 2457 - DNA, 1469 bp, Artificial sequence
  DNA replication origin
ccttcttcacgtccttcccgctcattgactgccctcgcccacgccgcctcaggaccctgttctgccccagagcccggagggcggagagcccggcgaaggatgagttggccagttccccgtcgcggcccggcagcttaaaggctaagggaaaaggggtttcacgaaggagcggggttctttttaataggggacatagcggttgggaagactcgctcacccgcttcccggctccagcgccccagttccctgtccctcttaccgtagttcccctccccctccacacccagaaatagcccgcgacaccaggaggccgccagcttccccaggagcggggagggggacgcccggggtagaggagggtcccatttagatgcccttcagcctgccaactcgtgctggcctggcaaagaagcggaccccctgcccggagcggccggctggcccccgggctgtgtgtattttaaatgcatctgccgggaacgcagagcaccgagggagatgggggcgctcagttcgctgaggaaggtggctggtggcccatggacccaccaccacctcccttagcctcctgtgtgggaggagtttatgggtatgtggctcctgcccagtccaggtgggctttcacttctactctatttcagttcctctttcccgatctgggctggagagcttcctcattgttaaggcagcagaaactttcgctggatggttttaggataagggtgggtgtgcccatgaggatgaggtgctggggacaaggcactgggagagttgatagtggttgagggtgggatgtagggtctagctagcagggaagtaaaacttctgctaccaactagcccctcccccagaagcaccactaggaatgcctttttcttttttcttttttttttgccagggatgggggaagtgaggcaggcaggggacatagcggttggccagaagctcctgctggcctttctgtgaagtggtagggctggccacccaaacagtactccttacaccttgccagccctcccttctcctcctccctctggcctggatcccaggtggctgtgacctttctcagcttggccagcgggcgcaggagacggtgtgtgtctaaggtgggggttattccaggacctggtctggtgtccaacctgatgtggtcattctggcctggcagggtcatcaatgctggcaagagtcggcacaatgaggaccaggcttgctgtgaagtggtgtatgtggaaggtcggaggagtgttacaggagtacctagggagcctagccgaggccaggtaagacccatcccctttcccagagacacagtgacacctctccccagggactcaggcctctggttttaaatctgagccatgcggaagacctgatgaactcactggctatctaccttctggcacagaacctttacctggtattcatcagttagattctaccatgtaagcatgaatgttactttccca

SEQ ID NO: 2458 - DNA, 908 bp, Artificial sequence
  DNA replication origin
tagctagaccctacatcccaccctcaaccactatcaactctcccagtgccttgtccccagcacctcatcctcatgggcacacccacccttatcctaaaaccatccagcgaaagtttctgctgccttaacaatgaggaagctctccagcccagatcgggaaagaggaactgaaatagagtagaagtgaaagcccacctggactgggcaggagccacatacccataaactcctcccacacaggaggctaagggaggtggtggtgggtccatgggccaccagccaccttcctcagcgaactgagcgcccccatctccctcggtgctctgcgttcccggcagatgcatttaaaatacacacagcccgggggccagccggccgctccgggcagggggtccgcttctttgccaggccagcacgagttggcaggctgaagggcatctaaatgggaccctcctctaccccgggcgtccccctccccgctcctggggaagctggcggcctcctggtgtcgcgggctatttctgggtgtggagggggaggggaactacggtaagagggacagggaactggggcgctggagccgggaagcgggtgagcgagtcttcccaaccgctatgtcccctattaaaaagaaccccgctccttcgtgaaaccccttttcccttagcctttaagctgccgggccgcgacggggaactggccaactcatccttcgccgggctctccgccctccgggctctggggcagaacagggtcctgaggcggcgtgggcgagggcagtcaatgagcgggaaggacgtgaagaaggtgacacaggctgccccccactggaaaatgggttgggagggggtgcggcccgaagaccagaggatagcaaaggtccacggaaaagggagctcctggcccgg

SEQ ID NO: 2459 - DNA, 1050 bp, Artificial sequence
  DNA replication origin
agcccggcccgcgtggtcatcggcgcgtcgcagccccccggggctcagctgcagaaaggtcggtctggagaagctcgctcgagcctcaacagccttcgcgggcgtcgcgctcccgctcccagccttcgcgggagggctcctgggcgcttctggagcggcggcgggcggcgccgaggcggcgttgggcaggtccggggatttggggcgcggaggcggagcgcccccggagctcaccaggtgcgccacggccgagcgcacccggtttagcatgctgcctccctgccccgccctcggccgcggccccgcccccgcccaggccccgcccccatggctccgcgtgggcggtgctcgcgccagccggcccttccctgctactggctcccggccagctgggcgggtcccgggcgaaacttgcccttgctctgggccaccccaggaaccggcccacgggtccccggcctctgccccgccccattccggcttggccccgcctccgtttcttaggggtaggttctgttgctgtgggaagggggcggagagaaggaaaccttatttcagccgtgcgctagattagacacagctagaatgtctccattgtgacgggggctgagggacaagggggtgcggtctcctcgctctcggttcggtgtggccagccagcccagagagccatggagctaatgacctcagagcaaaacaggcgcttgggagccgctgggtatgaggcgccaggtgtgacaccacctctggatggggctgctggagcgagagcgggcaagctggtaccgggtggggttgcgggattaatgacgcaggctgcagccgaccaccccggaatcaggagccggggtagattcctgggctcctgatgcgctgttccccgtgaagaccacctctagatctgggagagcggttgctactcccaccctcctttctctctcagaacccaggtctttcccacaatgcagaccttccctgaccacagcaggacaagctattaataggataataacaacataacaaatactatttattgaagaagtactgcat

SEQ ID NO: 2460 - DNA, 930 bp, Artificial sequence
  DNA replication origin
gccgccctgtccgggagggaggtggggggggtcagccctccgcccggccagccgccccatctgggaggtgaggggcgcctctgcccggccgccctactgggaagtgaggagcccctctgcccggccagccgccccgtccgggagggaggtgggggtgtcagccccccgcccggccagccaccccgtccgggagggaggtggggggggtcagccccccagcccggccagccgccccgtccaggaggtgaggggcgcctctgcccggccgcccctactgggaagtgaggagcccctctgcccggccagccgccccgtccgggagggaggtgggggtgtcagccccccgcccggccagccgccccgtccgggagggaggtggggggggtcagcccccccgcccggccagccgccccgtccgggaggtgaggggcgcctctgcccggccgcccctactgggaagtgaggagcccctctgcccggccaccaccccgtctgggaggtgtgcccaacagctcattgagaacgggcctggatgacaatggcggctttgtggaatagaaaggcaggaaaggtggggaaaagattgagaaatcggatggttgccgtgtctgtgtagaaagaagtagacatgggagacttttcattttgttctgtactaagaaaaattcctctgccttgggatcctgttgatctgtgaccttacccccaaccctgtgctctctgaaacatgtgctgtgtccactcagggttaaatggattaagggcggtgcaagatgtgctttgttaaacagatgcttgaaggcagggtgctcgttaagagtcatcaccaatccctaatctcaagtaatcagggacacaaacactgcggaaggccgcagggtcctctgcctaggaaaaccagagacctttgttcacttgtttatctgctga

SEQ ID NO: 2461 - DNA, 1128 bp, Artificial sequence
  DNA replication origin
tctcacagtggaggcaaagaattgcaactcagaaatacattgctacttggctgcctctactctattattgtacaccttgaaggcaaggttaactaagtcctgttgtggggcttgagggccagaatttaatttttggagctttatttaatgtcgggagcagattgggtgataaaataaaatgcatattgagaataagatggccttctgacttttcagggtctagggctgtaaagcatctcagggttgctgccaaacgggccacgaactaggctgggtttttatatttgatgaaaaagagcctaaacattaactgatttgggagagatcggataaagaaaaaggaggattaaccttcactatgcctttagctacagccacctttttaagaggaaattgctgggcaggttggggagggctagtcacagaacgaaactggaaactgtaagccagaccaggtgtaaggaggggaggtgataaaaggattatagggtgggggaccggaggctgaggaaaaattgggacctagctcggcctggtgaggagcagcctggggaggaggggagaggtcagatgggtctgtagaaaaggaagattggaaagactcagcgatgcttggggttgggactgaggggacaaggcgggagggaaagaagcaagatttgggacaagttgcattgagaacagagactagggagggaccgatatgtaaaagaatgcctggacgtcaggcacctcagaccatttgcccattttacaacaagaattatttagatcttgtaggatggaaaaatcaaaagtgccatttgctggctatttggaaccactgtggagtttgtactggggtcaagtggcatggcagaagaaaataatgcatttaggttttaggtcaggtgtgagttgaagaggttttaagttcttgagaacacaggctaagggagaagaaggaggaatggagggtggaaggttgcctatagtgaaggaggcaagtccagagaaaagacagggtagagacatggagagaaggggtgggggggtgcttgccccccaggaaagtggagagaagagagggtagagacatggcgggaaggggttgggtgagcagccctgggctgcaatgtgggtgagcag

SEQ ID NO: 2462 - DNA, 1000 bp, Artificial sequence
  DNA replication origin
ttcctttttctcttccagaaactaaggggtgagaccgacgtttgtgtgccggacgcgtgcaggtggcggcgacgctcccgggagacgcggggggagaaccagtctgtgcgcgcggctgtgagaagccccgaccaagctttccacgcgcttgtttcgggcagcagaggacgcgagggccgactgcgtccccagtgcgcaggctcggccgggggcgcgtaatcaggcagcccagcggtcccttcaaaccgaggcagggaagctctacgtcttgggggccgcatggtgccgagagcgcagaccagacccgccccgcctctccgtgccacgcacgcgctcggctccgcgcttaatggttagttgggtaacagcccgcggtgccctagttgcccgggtggggtcggagggaccctcgcgggaggggagaccacgtctccagggggtgggaggcggcctcactgagggcttcgcaggcagctgcgtgacctcggagcgcggcgctagtggaggggcggccaggtggtgtggccaccagctcccggagaggaatgtggccaggtgacctggggtaatcacttcatcctcacaggaaatgctttttttgtctggaagaatagtgactgggctgtaaaaacaaatgcccctgccttcaggctctctgggcaagatatacccccttgggaggtgactggggctgagccgaggtggggtttgttttggggattgtggggtgccacctgtaaccttctaatctttaaactctatttgttcctcttcctttaattaaacctgacaaataattttccccagttcgtgattcccgtgacccatgactttgctctgcccatagaaattctcttctaattccttcccctccctgttctctgctttgtagtacgtgaaccttattattattattattattattattattattattattattattattattattgagacgagtctcgctctgtcgcccaggctggagtgcagtggcgcg

SEQ ID NO: 2463 - DNA, 1339 bp, Artificial sequence
  DNA replication origin
cccaactaaccattaagcgcggagccgagcgcgtgcgtggcacggagaggcggggcgggtctggtctgcgctctcggcaccatgcggcccccaagacgtagagcttccctgcctcggtttgaagggaccgctgggctgcctgattacgcgcccccggccgagcctgcgcactggggacgcagtcggccctcgcgtcctctgctgcccgaaacaagcgcgtggaaagcttggtcggggcttctcacagccgcgcgcacagactggttctccccccgcgtctcccgggagcgtcgccgccacctgcacgcgtccggcacacaaacgtcggtctcaccccttagtttctggaagagaaaaaggaaaagccaccgagaggcctgaccctgaggggtcggggggagatgcgggcgcgtagtagagggaagcgactgaggagcggggactgggcagcatttgaatggatgcgggtgccgctggcacccgggaagacgcctgggagccggcgctggggagccgggcatgggctgggatgtgtttggattccaatctgggcctgacaccagttcagtgacctcgggaagttccccaaccctgcgggcctgtttcctccctctgaagtggcgacagtaatagaaccgacctcgtaggctcatcgggaggtcctgatgggagaacccatgcaacttgccaccacagagccaggcccgcggcgactggctcctggtgggtattaaagacgagtcgggaaagaagagcaggtaagagggcggggagactggcccagtgggttggggtgtgcacctcggccacgtggaaaagcgagaatgcaggggccggacgcttatggacgatgcatatgtggggccggatagaattgtggcaggcggcgctggggctgatgcgcctcacccagattatcctctgtaatcctcacagccctgtgaagtgggccctgccatgaacattttgtaaataaggcacccgaggctcagagaggtgaagtaattttccagacagcccagctcgtcagcggccagcatttgaagtcacactccagagcctgtttttatcataatagccgctgtgaccgcataaccaacgtgtgtgttgaagtgatcaaataaccatggggtggtctctgatgtccaggacttttgagaaatactgaaaaagtatgaggcaaggcccctgccttcaaagagctttcaagtttatgggagagactgagtcaggcgcaaattaaccaacatctgttgagcacttactgcttgccaggaccctgcccttctctcactgtcttcctcccttccaggactcaccccctcacttacccttcccc

SEQ ID NO: 2464 - DNA, 956 bp, Artificial sequence
  DNA replication origin
cgggaggtgaggggcgcctctgcccggccgcccctactgggaagtgaggagcccctcagcccggccagccaccccgtccgggagggaggtgggggggtcagccccccgcctggccagccgccccgtccgggagggaggtgggggggtcagccccccgcctggccagccgccccgtccgggagggaggtgggggggtcagccctccgcccggccagccgccccgtcagggaggtgaggggcgcctctgcccggccgcccctactgggaagtgaggagcccctctgcccggccagccgccccgtccaggagggaggttggggggtcagccccccgcccggccagccgccccgtccgggagggaggtggggggggtcagcccccctgcccggccagccgccccgtccgggaggtgaggggcgcctctgcccagccgcccctactgggaagtgaggagcccctctgcctggccaccaccccgtctgggaggtgtgcccaacagctcattgagaacgggccaggatgacaatggcagctttgtggaatagaaaggcgggaaaggtggggaaaagattgagaaatcggatggttgccgtgtctgtgtagaaagaagtagacatgggagacttttcattttgttctgcactaagaaaaattcctctgccttgggatcctgttgatctgtgaccttacccccaaccctgtgctctctgaaacgtgctgtgtccactcagggttaaatggattaagggcggtgcaagatgtgctttgttaaacagatgcttgaaggcagcatgctcgttaagagtcatcaccaatccctaatctcaagtaatcagggacacaaacactgcagaaggccgcagggtcctctgcctaggaaaaccagagacctttgttcacttgtttatctgctgaccttccctccactattgtcccatgaccctgccaaatccccc

SEQ ID NO: 2465 - DNA, 978 bp, Artificial sequence
  DNA replication origin
agggggcggcggccgggagagacgactccgccccctgcgcgcatgctccggccccggcgggttataaggcagcctcgctggcccggccagacaaagtggtgagctgcgacgtgactggctagctgcgtgggtactggaacaagcaaacgaggcagcgagcgaaggacgggagccggaccctgggccccgtggaactccagcctgcgccaccacgtcacgcacacgctcggcgctgcgatccgcgcatataacggttagttgggtaacagccggcggcacgcggcgcggaccccacggtgccctcgctgccctggtggggtcggaggggacctccggggttgggagactttgtctccggcggagggaggcggcccagcagagggcatcgtggtcacaggcagccgcgtggcctcggactgcagtgctggtgaaggagaccttgaggcgctggggtcagcgcctctcttagccgagccgcgggccccgtgctaagatgccggtcccaggcctggccgaggagttgggtcgtggtgcccggtgacggtggggaagtcccttcccccctaagtcttcaataggctcctcgagagatgctttgatctggaaaagggataacatgaggctgctgcatgtggtacctccagactctcctggccgcttctgccccaagggaagggactcggggcagaagttatttatgattcgtgacattgtccgccccaaccttcttggcccgccgatccttgccccacctggtgacttgcgagagtggtgcggagagccgcattccccacagccaaggcgtgactgcagggttcgagtagactttgcggaggggacggggcagcccgcagactcctgggagtggtgctgacgggggctctttgtcattcaacctgtggctgccagcgtccgccgcagcgcccttctactcatggacttaaggcggccctgttgagagaaatctggaggatagcg

SEQ ID NO: 2466 - DNA, 1452 bp, Artificial sequence
  DNA replication origin
ttacccaactaaccgttatatgcgcggatcgcagcgccgagcgtgtgcgtgacgtggtggcgcaggctggagttccacggggcccagggtccggctcccgtccttcgctcgctgcctcgtttgcttgttccagtacccacgcagctagccagtcacgtcgcagctcaccactttgtctggccgggccagcgaggctgccttataacccgccggggccggagcatgcgcgcagggggcggagtcgtctctcccggccgccgccccctccccgccacacagacatccgaactgcagcccgcgcctccacacgctttcagccgcgcgcgccctctagctcgcccgcgcgcgccggcgccccctccccgccacgtgaccggcgtcccagtccgacccgcgcgctgcgcccctgctgagcggcgcggagctaccacgccctgccagactcgcccttgggtccctgtctgacgagctctaggcaatctgccctcgttcgggacacaaccatcggtctcacccctcagtttctgccagagaaaaaggaaaagtcaccgagaggcctgaccctgacgggtgggggagatgcgcgtgcggagtagcgggaagcgactgaggagcggggaatgggcagcatttgaatggatgcgggtgccgctggcacccgggaagacgctgggggccggcgctgtagagccgggcatgggctgggatgtgtttggattccaatccgggcctgacaccagttcagtgacctcgggaagttccccaaccctccgggcctgtttcctccctctgaagtggcgacagtagtagaaccgacctcgtaggctcatcgggaggtcctgatgggagaacccatgcaacttgccaccatagagccaggcccgcggcggttggcgcctggtgggtattaaagacgagtcgggaaagaagagcaggtaagagggtggggagactggcccagtgggttggggtgtgcacctcggccacgtggaaaagcgagaatgcagaggccggacgcttatggacgatgcatatgtggggccggatagaattgtggcaggcggcgctggggctgatgctcctcacccggattatcctctctaatcctcagccctgtgaagtgggcactgccctgaacattttgtaaataagggacccgaggctcagagaggtgaagtaactttccagacagcccagctcgtcagcggccagcatttgaagtcacactccagagcctgtttttaacataatagccgctgtgaccgcataaccaacgtgtgtgttgaagtgatcaaataaccatggagtgtctttgatgtccaggacttttgagaaataccgaaaaatatgaggcaaggcccctgccttcaaagagcttgcaagtttttgggggagacttaggcacaaattaaccaacatctgttgagcacttgctgcttgccaggaccctgc

SEQ ID NO: 2467 - DNA, 1283 bp, Artificial sequence
  DNA replication origin
tccatttaaccctgagtaggcacagcacatgtttcagagagcacggggttgggggtaaggttatagattaacagcatcccaaggcagaagaatttttcttagtacagaacaaaatggaatctcctatgtctacttctttctacacagacacagcaacaatctgatttctctatcttttccccacatttcccccttttctattcgacaaaactgccatcgtcatcatggcccgttctcaatgagctgttgggtacacctcccagacggggtggcggccgggcagaggggctcctcacttcccagaaggggcggccgggcagaggcgccccccacctcctggacggggaggcggccgggcgggggctgccccccacctccctcccggacggggcagctgccgggcggagacgctcctcacatcctagacggggcggctgccgggcggaggggctcctcacttctcagacggggtggctgccaggcagaggggctcctcacttctcagacggggcggctgggcagaggcgctcctcacctcccagacggggtcgcggccgggcagaggcactcctcacatcccagacggggcggcggggcagaggcgctccccacatctcagacgatgggcggccgggcagagatgctcctcacttcctagacggatggcggcggggaagaggcgctcctcacttcccagactgggcagccgggcagaggggctcctcacatcccagacgatgggcggccaggcagagacgctcctcacttcccagacggggtggcggccgggcagaggctgcaatctcagcactttgggaggccaaggcaggcagctgggaggtggaggttgtagcgagctgagatcacgccactgcactccagcctgggcaacattgagcactgagtgaaccagactccgtctgcaatcccggcacctcgggaggccgaggctggcagatcacttgcggttaggagctggagaccagcccggccaacacagcgaaaccacgtctccaacaaaaaaatacgaaaaccagtcaggcgtggcggtgcacgcctgcaatcccaatcactaggcaggctgaggcaggagaatcaggcagggaggttgcagtgagccgagatggcggcagtacagtccagcttcggcttggcatcagagggagaccgtggagagagagggagagggagaccgtggggagaggcagaggcagaagcaggaggcaggaggcaggaggcaggaggcaggaggcaggaggcaggaggcagaagcagctagatcc

SEQ ID NO: 2468 - DNA, 943 bp, Artificial sequence
  DNA replication origin
ggggggtcagcccccccgcccagccagccgccctgtccgggaggtgaggggcgcctctgcccggccgcccctactgggaagtgaggagcccctctgcccggccagccgccccgtccgggagggaggtgggggggtcggccccccgcccggccagccgccccgtccgggagggaggtggggggggtcggcccccctgcccggccagccgccccgtccgggaggtgaggggcgcctctgcccggccagccgccccgtccgggagggaggtgggggggtcagccccccgcccggccagccgccccgtccgggagggaggttggggggtcagccccccgcccggccagccgccccgtccgggagggaggtggggggggtcagcccccctgcccggccagccgccccgtccgggaggtgaggggcgcctctgcccggccgcccctactgggaagtgaggagcccctctgcccggccaccaccccgtctgggaggtgtgcccaacagctcattgagaacgggccaggatgacaatggcggctttgtggaatagaaaggcgggaaaggtggggaaaagattgagaaatcggatggttgccgtgtctgtgtagaaagaagtagacatgggagacttttcattttgttctgcactaagaaaaattcctctgccttgggatcctgttgatctgtgaccttacccccaaccctgtgctctctgaaacatgtgctgtgtccactcagggttaaatggattaagggcggtgcaagatgtgctttgttaaacagatgcttgaaggcagcatgctcgttaagagtcatcaccactccctaatctcaagtacccagggacacaaacactgcggaaggccgcagggtcctctgcctaggaaaaccagagacctttgttcacttgtttatctgctgaccttccctccactattgtcccatg

SEQ ID NO: 2469 - DNA, 1475 bp, Artificial sequence
  DNA replication origin
aactgccgctttcaaaccagccgcaacctcctcctcctcccttttcccttcccccggccctcgcccatccctcatccagagccccgccccctcccgccgcgcggcgcccggcgcgctgccgtcacaggctgggcgcttgggaacgagccccggccctggactctcgcgccagggattggcccccggcgggcaggaggcggaccgccaacgagaatggggaccactggttggtcggtgcgagtggaggaggcgggcactagaatgactgaagtttagagagggtggaaaaaagaagtttggagagtgagggagggcgcagaggaggggcaggggagtggaaggggctgtaggtcgcagggccgggagaggccctctgcgcggcggctggagccgaggaaaactcgaatccgagagggaccgagctccccgaagtgggggcgtggccggcgagttaggcggagacgcgggcggagcctctgagcctgtgcggggcgcagagaggggccggtgtgcttagattggaagacaacgtgcggagtcctgagccggccgaggttccggggcctttagggtggcctgttacagccgatagtttgcattgagtggatattgcttgttcattcgttcattcaacagatgttactgaacgcccattgaggcagggcttcggagtccggttgatgaaagatattataaaatagagtccggcactgctgtatgacctaagacaaattagacaacctctctgagccgcagcgtcctcagtgaaaagtgaagattacagaagatgtacaaaataactgcatagtgcctgacagtgggtggttgcctcttaaagtttggtagctgctgctgctgctgctgatgacgatgacgattttgtgttagatattgtgctaggtactgggattcaagggtgaagaaaacagaagccccgctattgaggaggttacagtctagtgggagagactgagaagtaagcagactgcctgaggtgagggagtggggtggaggtagaaggtggattattaagaactaacctggtagccagcagatctggttggagtcctgacatgctacttacttgctgtttgaccttggccaaatctcagttaaaggaggtgaagggagaacgaacattaaataaaagatatcgtagatcccttccagctctaatttttcagaaatttcacttgagctttctctcttccccggcttgacttacactcttccctgtctttggaatgcccttcatctcatctcttttaaaactcctatccgtcctcatcccaaatgccggctcttccaggtagctttctctgatttcttgccctcaagtggaaagtgttttctctgagctatgatctttgtttcacttttgcagcatgacatttatttgtgtagtctcctgtctccctttaatagtaggtgaaagcccttataaaactccacacctcagatagactggaccaagc

SEQ ID NO: 2470 - DNA, 1739 bp, Artificial sequence
  DNA replication origin
cgggcgctgagcccagggaccagccggcggcagtgaccccgcccgaagccccttctggaacctcctggggacaattcccttttcctttcttcagcctaacccgcggtggccctcgcggagtccggtcagccccggggagcgcagccgggaggggcgtccaaggggcgtctcgcgtctgggaacggccgggcccccagcgggctgtggtcgcggggtgggggccggagcggcgaggccccccttaccgggctgcgcgggccgcccagggcccccgggctgagacggggccggagcggcgccccggccgcccgcgcggggtctcccccatggtgcagcggggttcgggatgtcgaagacgctgaagaagaagaagcactggctcagcaaggtgcaggagtgcgccgtgtcctgggccgggcccccgggcgacttcggcgcggagatccgcggtggcgcggagcgtggcgagttcccctacctggggcggctccgcgaggagcccggcgggggcacctgctgcgtcgtctcgggcaaggcgcccagcccaggcgatgtgctgctggaggtaaacgggacgcctgtcagcgggctcaccaaccgggacaccctggctgtcatccgccacttccgcgagcccatccgtctcaagactgtgaaaccaggtacgccggccctgcgtatctgtctcggggtgttggggagaggggcttcagggtgggcgtcctgggagcggcggcacctccccaccgcgtattgtcccgggtaatcttagacctctagggtgtgccagactccttgacgagggggaggggtggcgttggtgagtcccattttgccgaagggaaaactgagctctggcttggcgcggttgctctgctagctgtgctagctgtcacagaattgcgactagaagctgggtttcctacatttgtagctccatctccccccgcagacaagagtttttgactagagaaggccagccttttcctgtgttgtgcaaaaaggcccttaggattgtaacattttctttggaacgatcttacgcatcttctaacagggaaaaagggactttactatagaggcacttggtgccaaggttaccacctggtgtacctggaagggcttagctgcttcagtgtttcttgcactctagcagacatctcagagctgacagcctaactctgtcagtccaggtggttcaggtgtctgagtaccgatgacggtacaatatgtgatatgtggcagactggtgtgttcttgcagggagctgttgaatagagtctgggttttgcaggaagacctaggtgcctagcggagtgaaagcttctgtaacgcttttgattttacagaattttgttgaagtggtaggttaaaggagcctctgttgccctggtatcttttatgctagtaaaaattgctgcaaagcacgttatgtttatggcatactcgtcagtttcaaagcattgatcagagacagcatacagtgagatctgatagtatgtagtagttcttatgaatttgttatagacagcattgttggttttgtttcagcatagatagaatgtggttctgtcgtcttagatgtttgtgggagagagaattgtgattgtaacattattagaaaccaaactgtttttccttaatgtgctctgctgagtatacggtgcatcaaaatataatgggctggttaattgttacctgggctaggtagcagtccatcccttgatggcaaaatgcta

SEQ ID NO: 2471 - DNA, 1993 bp, Artificial sequence
  DNA replication origin
gggtgtctctccggctgcgagtggttttccgcgtctccgctggggggcgggggacagggggcggggtgggggagggtatgagggtgttgcggcgtccttcccccaccccctctcgcccctataactcgctccctccgtccctctcggactcggactcggggccggtgcgcgactgagctggcgcctctagccgactttgccaagagggcgcctcctgcccgatccgcgctgaccctgcgcgggacgcagccccaggcggctgcctagccgaggcgggagcccgagctgagtcgagctcgccggagcgggtgagtcccgagcccgatccccgccgggctggaccctggcgcgcagctgcggcgtctccggggagtcgcggcagggggaatggcgtgtcgcgccctggcggcgggagctgcgggagggtcggcgacgtggcggccggcccagggtatttacctgctgcaccagtgcccggcagccacgctcgccggctgccgcggggcttctttgtcccgatatctggagggtccggggcgggagggagtactgggtcgcgtcccctccatgggggaggggctgggggagtgagaggcctggagataatgcggagtgggggtggggagatcctgcaaggaccaggacgccggggttccaggagactctgcaggctccatccctccttattcccccaccccgaccccagtagcgctgggcctaggagcactcgggagttgctcagtggctctgcaccgctggcgcgggaaggggagaaaggggctgccagaggcgggaatttggtccccacgcgctgctccagggacgagaagccagggaccggcggttctgggagcaggtacaggtggggtaaactccccagcggctgcaggtcccagggtcctgttttctttcacttgaggttaaaggtcgtatatagaggtagatacccgtgaggagcagttcgggggagggggcggtgggccaaggggaggcttgtgtgtgtgagggggctgtatccagccttggggtgagcggagcccacctgagccctgtgagggtcgtaggaggcgctgctgtccctagttgtggcaatgtttagtcaatggtttgatcactgcagcagaagggactgaggttagacataaagaacttttagagggtggtacagagatggaggttggggaagttgattccctgccttggagattcgcagaacacattaggcctaacaagttattattataagactctggttctctggtgccatcccctcctacaccacgcatacacaccagacacagaattttccctatcagggagcctcttcctgcctctccctactccccagctcccttccgtcttttccaccaatgatccatctccagtggagccttaatgctggtcctgaccctcagagcctagagggtgagaacatacctgtggagttccatctgggatggaagctgactctcctgtctgttcagggcagaaatgctgggggtgacggtggaagttgctggaagtggggcagggctgtatgtgtgcagcacatcttggtagggggaggcacaggtgttctgactccacagagatacccataatctggaatgacaggtgcctggatggccaggttgagggtgagaaaagcctgaggggtgagagtcggcaggcccagatgaattactatgccttccctgcaggctgcatcagaagatgagttctagttgttagctcaggaaaactttaactttggctgctgagtcacaagtcccaggaagcccagggtccaagctgagaggctgaaagggatatggggaggcaggagcagaccctttgatcatagcaagagaaagatagtggttgagagtggccttgggattttgagaatttaggtgaccagagggtctggggagatgccatggagttcaggaccaggccccagctgttccgcctcccagcctgctctctgggtccagattctccaaccagcaca

SEQ ID NO: 2472 - DNA, 1271 bp, Artificial sequence
  DNA replication origin
gagggatggagcctgcagagtctcctggaaccccggcgtcctggtccttgcaggatctccccacccccactccgcattatctccaggcctctcactcccccagcccctcccccatggaggggacgcgacccagtactccctcccgccccggaccctccagatatcgggacaaagaagccccgcggcagccggcgagcgtggctgccgggcactggtgcagcaggtaaataccctgggccggccgccacgtcgccgaccctcccgcagctcccgccgccagggcgcgacacgccattccccctgccgcgactccccggagacgccgcagctgcgcgccagggtccagcccggcggggatcgggctcgggactcacccgctccggcgagctcgactcagctcgggctcccgcctcggctaggcagccgcctggggctgcgtcccgcgcagggtcagcgcggatcgggcaggaggcgccctcttggcaaagtcggctagaggcgccagctcagtcgcgcaccggccccgagtccgagtccgagagggacggagggagcgagttataggggcgagagggggtgggggaaggacgccgcaacaccctcataccctcccccaccccgccccctgtcccccgccccccagcggagacgcggaaaaccactcgcagccggagagacacccggacacaaagacctcgtgccagccgcagacccaagtttctcccggagagactgggggtccgcccgcgttcaccgcgagaacacacaaacggacggacagaccgacgcacggacccggggacctcgacactcgctaggaggcaagccctattcctcagccgggcgcccctcgtctcccgctctctccatggacccctctcctggcaaatcgcccgcagagcgagcttggagatgcgagggaaactgaagccccaagggtgccccgtcctgggagcctggctgtctgcggggtcccccgcattccgcagtagtaatacaggagggccgggggcttctaccccaacctccgctccccttcgggtctctcctggctgtgcaagcgatgggccagagggctggacgaggctggctcccaatccagaatcccgagctggggagttctctctaggttctggggctcctgggaccggggctttggggaagggagatcgcaggacggatatccaggaagggagggggccctgggtctcccgttacctgcgcctgccgcgctgggactccgctctgggggctgcagctcgaagctccga

SEQ ID NO: 2473 - DNA, 961 bp, Artificial sequence
  DNA replication origin
ggaccggggctttggggaagggagatcgcaggacggatatccaggaagggagggggccctgggtctcccgttacctgcgcctgccgcgctgggactccgctctgggggctgcagctcgaagctccgacaagtctccacgtccagcccgagagggggcggccgggcccggcacagcgaggcgaggaccgcgagcgcctcctggcaccgaggcccgccggccccccacactccgctcatgccctagacacccaggcttgccgagcagcagctcgaacccgcgccccggccgcactggggcggggcacgacggccccaagaagaccctccctgcagcggccccctgcggctccgctctgcttttaatcacttccccgcagggtccccgcccctcacgtggcatcccgcggcagctggcgagtctggcgcctcgcggccgccccctctacactcagggactggcctgagtccggggggtgggggtttcgaggcgggaagccgggctgtcccgaatctcggagggtgcaaggccaggaaagagtccgggttcccactccgcattcactgcctggtgtgaccttgggcgtctctgagcctcaattttcctctccgtaaaggaggtgtaatgattttaagtacttcacggactccctggggatagaaagatcgtgtttgtgaaaacactgggtaaactgccacatgccacacgaatgacagagaaatagataaccccgtaacagaaagagcgacggtcaggcagggtctgggaggaccttggccgaggttcctgacgggagcagttagactggcccccgagtcccagcttcggaggtagaagaccccaagacaggcgggcgatgcgaactgcaagactttccgagctccgcaatcctgcggtccgcggtacccgcatgttgctatggcgacgggaggcagcggccgtctctctccatggcaacgggag

SEQ ID NO: 2474 - DNA, 1086 bp, Artificial sequence
  DNA replication origin
gtaaagttgatgatcaaccttgattagatttgctctttctaattagcagagctggatggttggagctccttcatccctcccctctgagactttattttttaaatttctttatcattaaatgaggaatgtggaggaaaattagaagggtggatgcttcgaagttcttattgtctagctctgaccatctgccctggactcaatttattccagattgccagttccatgagccatcttaatgagcaagcagggagaaggtctcagtccaaggcttgctctggcctaaagtgattgcctcacgaacgactcactaatttttaattaatgctctgatccatcccagaaccctggcttgtgcatattctgcctcttccccccaccgttcacaagcaggaagaaagacatctgggctacttcagtgcctgttgggacaggaaaaatagccagggcagtgtacatccctttcgttttcagggaagtcacagaaccacatctgttttttaaagcgcaagagtggaaggctgggatgggggagaggctgggggagaagggatgtgagtatgtggtgggggctatggatgtggtagtgatgaggcgagtgtgtctatgagtaatacggtgtgtgtgtgatgtcatgtgggtgtgctatgcaggtcaagtgtgtgatggtgtctgtgtgtgtgcacgtgtgttgtgtgtgagatgtggtatgagttgctgtgtaggtcaagtgtgttttttgtgtgagtatggtgtgtgtgtgctcatgtgcagtgcggtgtggtctgagtgtgaggggtatatgtgtgtatgtgtggtacagtgtgtgatgtacaaatgtgctgtgttgtgcaggtcaagtgtgctgtgtttgtatggtgtgtgcatgtacagtggggtctgggttctatggatgagcatgtgcatgttgtgtaatgtgtgttttgtagtgtggtgtggtgagtgtggaggaatgaatgcggtggtagtgatggtggtgatggtggtgcctgtgtatatgtgtgcatgtgcgtgtgtgaaaagaggcagagcaagaatgaaagcatctctaacaaaataagctgcttg

SEQ ID NO: 2475 - DNA, 1420 bp, Artificial sequence
  DNA replication origin
gacgggggggtggccgcggcctcctcgggctcggcccaggctgcttcatctcctgcggcctcagtgggcactggagttgccgggggcgcagtatcgacgccggctccagctccagcctcggctcccgctccgggtccctcggcagggccgcctcctggaccgccagcctcgctcctggacacctgcgccgtgtgtcagcagagcttgcagagccggcgtgaggcggagcccaagctgctgccctgtcttcactccttctgcctgcgctgcctgcccgagccggagcgccagctcagcgtgcccatcccggggggcagcaacggcgacatccagcaaggtgagccggaggccctgcctggcatctgggccgcaagggatttgcgcaaccctagaggagctggggacggaggtgctggggcctggggctgctcggacgggcgccatcccgaggggtctctaaggtgaaagactcgcccctgggacactttccagagaagctggaccgcaagagataaggggagcatgaagggaggggtgccggctgcgagaggctgggggaggggacactggctccgagggagggtttgtgatgtgcggaacccggccgagcgctggttctggagctggcagacccgtacagtgagagaagggggatttgggaaacacgttgtgaggaagcgttttggctgaaagggcccgggccagcgaggtgttgagggagtaggtaagaggtaagggcagtgaagatggattgctttggagggaggggacttggcgtgttcacagataggagagaggaggactatggattaaatggaggtggagagaatatgttggagagcaaggggtccagagaaggcgcctggaagaaaattgtaagatgacatggggaaagagaaactcggaaagtggactgcatggttagggaaaatcctaaggtttggggatgaaggagaaatgaactttgaaggaaattgagagttagggaaagctgggcatgaatttgttttagctaattggccgttaatgagcccctagtgttggggcactgtgctaggattgaataaagtactcaatgaagacttcattcacagtctaacaggagaaacatataacttgcagcagtggaggtgagtcctcagtacaatggttgtggcacaatagaggaaaggtcagggaaatttcacaggaaaggaaatccatgaacaggtttcttgaagaatgagtacctcactgggttggagggtattcagggcacaggacacccttctacatccctggaactaaagactgtgtagggtgattggtggaaattagattggattgatgggctgaaaagataaaggtttcacagtctcttaaactcttgggatccaggtgtaaggacttcagaatattttgggatttttcttttttctgg

SEQ ID NO: 2476 - DNA, 842 bp, Artificial sequence
  DNA replication origin
gccgccatcccatctgggaagtgaggagcgcctcttcccggccgccatcacatctaggaagtgaggagcgtctctgcccggccgcccatcgtctgggatgtggggaggcctctgactggctgccaccccgtctgggagatgaggagcgtctctgcccggccgccacgtctgagaagtgaggagaccctccgcctggcagccgccccgtctgagaagtgaggagcctctccgcctggcagccaccccgtctgggaagtgaggaacgtctccgcccggcagccaccccgtccaggagggaggtggggggggtcagccccccaccaggccagccgcccagtccgggagggaggtgggggggtcagccccccgcccggccagccgccccgtccaggaggtgaggggcgcctctgcccggctgcccctactgggaagtgaggagcccctctgcccggccaccaccccgtctgggaggtgtgcccaacagctcattgagaacgggccaggatgacaatggcggctttgtggaatagaaaggggggaaaggtggggaaaagattgagaaatcggatggttgctgtgtctgtgtagaaagaggtagacatgggagacttttcattttgttctgtactaagaaaaattcttctgccttgggatcctgttgatctgtgaccttacccccaaccctgtgctctctgaaacatgtgctgtgtccactcagagttaaatggattaagggcggtgcaagatgtgctttgttaaacagatgcttgaaggcagcatgctcattaagagtcatcaccactccctaatctcaagtacccagggacacaaactctgcggaa

SEQ ID NO: 2477 - DNA, 1053 bp, Artificial sequence
  DNA replication origin
acctctttctacacagacacagcaaccatccgatttctcaatcttttccccacctttcccccctttctattccacaaagccgccattgtcatcctggcccgttctcaatgagctgttgggcacacctcccagacggggtggtggccgggcagaggggctcctcacttcccagtaggggcagccgggcagaggcgcccctcacctcctggacggggcggctggccgggcggggggctgacccccccacctccctcccggactgggcggctggcctggtggggggctgaccccccccacctccctcctggacggggtggctgccgggcggagacgttcctcacttcccagacggggtggctgccaggcggagaggctcctcacttctcagacggggcggctgccaggcggagggtctcctcacttctcagacgtggcggccgggcagagacgctcctcatctcccagacggggtggcagccagtcagaggcctccccacatcccagacgatgggcggccgggcagagacgctcctcacttcctagatgtgatggcggccgggaagaggcgctcctcacttcccagatgggatggcggccaggcagagatgctcctcactttccagactgggcagccaggcagaggggctcttcacatcccagacgatgggcggccaggcagagacgctcctcacttcccagacggggtggcggccgggcagaggctgcaatctcggcactttgggaggccaaggcaggcggctgggaggtggaggttgtagcgagccgagatcacgccactgcactccagcctgggcgccattgagcactgagtgaaccagactctgtctgcaatcccggcacctcaggaggccgaggctggcggatcactcgcggttaggagctggagaccagcccggccaacacagcgaaaccccgtctccaccaaaaaaatacgaaaaccagtcaggcgtggcggcacgcgcctgcaattgcaggcactccgcaggctgaggcaggagaatcaggcagggaggttgcagtgagccgagatgg

SEQ ID NO: 2478 - DNA, 1693 bp, Artificial sequence
  DNA replication origin
aaagcaaaatgactgattatttaggaaagaggacaaattaggaaccccaagcatgtcatagttacgtgtaagttatgacaaggatagtgaaggagaatttatcaaaggaattttgtgtgtgattaagttagctataattttttttttttttttttgagacagagtctggctctgtcacccaggctggagtgcagtggcacaatctcggctcactgcaagctccacctcccaggtacacgccattctcctgcctcaacctcccgagtagctgggactacaggtgcccgccaccacacccagctaattttttgtatttttagtagagatagggtttcaccatgttagccaggatggtctcaatctcctgacctcgtgatccacccgtctcagcctcccaaattgctgggattacaggtgtgagccaccacacccagccgagttagctataatttaaaaggaagtgtttacaatagtctttctaaagaatgatccccagagattggcaagacggccaaataggaagagttacagtctgtagctcccagcaacaccaacacggaaggcgggagatttctgcatttccaactgaggtatattgtttgtctcattgggactcgttaggcagtggggacagcccacagagggcgagcaaaagtagggtggggcatcaccccaccggggaagcgcaagcagccaggggtctctccctccccgagccatgggaagccgtgagggactgtgctatctggctcagatactatgcttttcctacggtttttgcaatccaatccccagaccaggagattcccttgtgtgcctacaccaccagggccctgggtttcaagcacaaaactgggcggctgtttgggcagacaccgagctagctgcaggagttttttttttcttaccccagtggtgcctggaaccccagcgagacagaactgttcactcacctggaaagagggcggaaaccagggagccaagtgttctcactcagcgggtcccactcccacagagcccagcaagctaagaaccactggcttggaattctcactgccagtccagcagtctgatgtcaacctgggatgatcaagcttggtgtagggggggcatccaccattactgaggcttgagtaggcggttttcccctgacagtgctaaggaggctgggaagtttagattgggccaaacgcaccacagtgtggcaaagcggctgtggccagactgcctctctagattcctcctcactgggcagggaatctctgaaagaaaggcagcagccccatcaggggcttatagataaaactcccatctccctgggacagagcacctgggggaaggggaggctgtgggcacagcttcagcagacttaaatattcctgcctgccagctctgaagagtgcagcagatcctgacaaggagcattctcccagcacagcgcttgagctctgctaagggacagactgcctcctcaagtgggtccctgacccccgtgcctcctgactgggagagacctcccaacaggggttgacagacacctcatacaggagagctccagctggcatcaagccggtgcccctctgggatgaagctgccagaagaaggagaggcagcaacctttgctgttctgcagcctccgctggtgatacacaggcaaacagggtctggagtggacctccagcaaactgcagca

SEQ ID NO: 2479 - DNA, 849 bp, Artificial sequence
  DNA replication origin
cgtctctgccctgctgcccatcgtctgagatgtggggagcgcctctgcccctccgcctcgtctgggatgtgaggagcgcctctgcccggccgcgaccccgtctgggaggtgaggagcgtctctgcccggccaccccatctgagaagtgaggagcccctccgcccggcagccgccctgtctgggaagtgaggagcgtctccgcctggcagcctccccgtccgggaggtggggggcagcccccgcccggccagccgccccttccgggagggaggcggtggggagggggggcagccctcgcccgccagccgccccgtccaggagggaggcgggggcggcagcccccgcccggccagcctccccgtccgggaggtggggggcgcctctgcccagctgccccttctgggaagtgaggagcccctctgcccggccaccacctcgtctgggaggtgtacccaacagctcattgagaatgggccatgatgacgatggcggttttgtcgaatagaaaagggggaaatgtggggaaaagatagagaaatcagattgttgctgtgtctgtgtagaaagaagtagacataggagactccattttgttctgtactaagaaaaattcttctgccttgggatgctgttgatctatgaccttaccccaacccggtgctctctgaaacatgtgctgtgtccactcagggttaaatggattaagggcggtgcaagatgtgctttgttaaacagatgcttgaaggcagcatgctcattaagagtcatcaccactccctaatctcaagtacccagggacacaaacactgcggaaggccgcagggtcctctgcctaggaaaaccagagac

SEQ ID NO: 2480 - DNA, 1180 bp, Artificial sequence
  DNA replication origin
tcatagatcaacagcatcccaaggcagaagaatttttcttagtacagaacaaaatggagtctcctatgtctacttctttctacacagacacagcaacaatctgatttctctatcttttccccacatttcccccttttctattcgacaaaaccgccatcgtcatcatggcccattctcaatgagctgttgggtacacctcccagacgaggtggtggccgggcagaggggctcctcacttcccagaaggggcagctgggcagaggcgccccccacctcccggacggggaggctggccgggcgggggctgccgcccccgcctccctcctggacggggcggctggcgggcgagggctgccccccctccccaccgcctccctcccggaaggggcggctggccgggcgggggctgccccccacctcccggacggggaggctgccaggcggagacgctcctcacttcccagacagggcggctgccgggcggaggggctcctcacttctcagatggggtggccgggcagagacgctcctcacctcccagacggggtcgcggccgggcagaggcgctcctcacatcccagacgaggcggaggggcagaggcgctccccacatctcagacgatgggcagcagggcagagacgctcctcacttcctagacaggatggcggccgggaagaggcgctcctcacttcccagactgggcagccaggcagaggggctcctcacatcccagatgatgggcggccaggcagagatgctcctcacttcccagacggggtggcggctgggcagaggctgcaatctcggcactttgggaggccagggcaggcggctgggaggtggaggttgtagcgagccgagatcacgccactgcactccagcctgggcaccattgagcactgagtgaaccagactccgtctgcaatcccggcacctcgggaggtggacgctggcagatcactcgcggttaggagctggagaccagcccggccaacacagcgaaaccccgtctccaccaaaaaaatacgaaaaccagtcgggcgtggcggcgcgcacctgcaatcgcaggcactcggcaggctgatgcaggagaagcaggcagggaggttgcagtgagccgagatggcagcagtacagtccagcttcggctcagcatcagagggagaccgtggaaagaga

SEQ ID NO: 2481 - DNA, 1238 bp, Artificial sequence
  DNA replication origin
aatctcggcactttgggaggccagggcaggcggctgggaggtggaggttgtagcgagccgagatcacgccactgcactccagcctgggcaccattgagcactgagtgaaccagactccgtctgcaatcccggcacctcgggaggtggacgctggcagatcactcgcggttaggagctggagaccagcccggccaacacagcgaaaccccgtctccaccaaaaaaatacgaaaaccagtcgggcgtggcggcgcgcacctgcaatcgcaggcactcggcaggctgatgcaggagaagcaggcagggaggttgcagtgagccgagatggcagcagtacagtccagcttcggctcagcatcagagggagaccgtggaaagagagggagagggagaccgtggggagagggagagggagggggagggggaggggggagggggagcaatgcatggccatttttgcaatctgctatagaaggagaggtaacaatggttaaagattgatgaggggtgttaagggtctaactaaaattagaaattatacttttgtcatagcacaatccctatgattttacattttctgtagcatggctcagcttcttaaaggcagattgtggtactagaggtggaagagagtgagacctttgggaattagtcatggtacccactcaaagaaggtggcagtggacctagggatatggtatttcgtggatagggtgatatccacctgatgtggcactggtgcttaacaaaggcagtcccatgcagtagaaggtagcgagtagagatcactattttagtgagatagacgaggctaaacaacaagaattccagataatttttgaccagtcatttttgttgtcacatgtgatgcattccttagaacatccataaatatgagtgtggaagataggtgacttgaagagagagtgaaggcaaaagccagagatacactaaatcttaaaattctgtacacaatataaaccacaattcccaggaagagagtggcttcaatttttaataaattggaaagttgggttagataagcatgcttactttattttttttcgtttctttttaaaaatttgtgagtggtttgtgtatgtgtgagaagtactggcaaggttatacgttagctttgttactcctggatgggttcatagtggtggtatagtcaaatttctctactggactgatgccaaggcttctgcttttccatttgcaaggttgcatatgttttta

SEQ ID NO: 2482 - DNA, 1319 bp, Artificial sequence
  DNA replication origin
atcgcccgggcctcaaaccggtctccgcacagggcgctgattaaatgggtccccagtccccggtgggcgctcccgccctgcaggtgctccgatagccggcggcggtgcgcccactggagggaaggaaggtggtccctgggtccgggagaagagcgaacgtgctccctcgggctgctcgatctccacccgctggcgcccccacccgtcgccagccacgccgcttggggtccacgcgcccctccccgccgggccccgccccgccccccggaggccccgccccggtcctccccgctccgccccctccccgccggagcctgccgctccccgcgctcgtagcgcgggcctggggactggggatcccgccgccgggccgcagcatggggcgcttccgcgggggcctgcggtgcatcaagtacctgctgcttggcttcaacctgctcttctgggtgagaccaggagccgggagggccggtcagggcagggggccgggtggcgggcgcggggccggggtccccgagctgctgactgcggcgtccgagtcgcgctcgtggggagggctgggtgctcaaacgcggaggcgaggagaaggcaaacaaagagggaggggagggatggaagggagagaacgggaagacagaaggttgatcaatgagaaatggtgagaaggggagagacaccgtgtggctctttcctggaaggaacccccacctgccttggtttttatctcccagctagtgaccccaggtgcggggacccagcctctcctcacctccggaggacttgggtccctgttcccctccagtctcccgtgcacacacccccttttcactctgcctaccagctggaaccagggcctggccagggtgatgggagagaaacccctgccctggggctgcctggggtggtgctccattcgagtgtgtggacactgtacctggctgtgatggttttgtttaggaaattggagataggagtgaaaattgtggtgggggggcgtcgtcctttttctgggcatcagggtaagagtacccctgggtgagaggaggtggtgggttctcttctgagaaggggatggggaatggaagggcttctaaagggcagcagcagctctccacaacccccagccgcagcctctgctaaatactaattctcccagagatgatctcattcaactttgcagggtttgattgaactgacagcgttcccaggattcatggttcacagagagataggatcttgacccttgtctcctatattatcgagacagggatacagctagaccagacctacatccctggataccctgtcccagggcctgc

SEQ ID NO: 2483 - DNA, 1574 bp, Artificial sequence
  DNA replication origin
gtttgagcacccagccctccccacgagcgcgactcggacgccgcagtcagcagctcggggaccccggccccgcgcccgccacccggccccctgccctgaccggccctcccggctcctggtctcacccagaagagcaggttgaagccaagcagcaggtacttgatgcaccgcaggcccccgcggaagcgccccatgctgcggcccggcggcgggatccccagtccccaggcccgcgctacgagcgcggggagcggcaggctccggcggggagggggcggagcggggaggaccggggcggggcctccggggggcggggcggggcccggcggggaggggcgcgtggaccccaagcggcgtggctggcgacgggtgggggcgccagcgggtggagatcgagcagcccgagggagcacgttcgctcttctcccggacccagggaccaccttccttccctccagtgggcgcaccgccgccggctatcggagcacctgcagggcgggagcgcccaccggggactggggacccatttaatcagcgccctgtgcggagaccggtttgaggcccgggcgatgcttgagggataagcacttggtctcgtggctatggaaatctaggaaggtgacctcgggtagaagagctaagtggggtcggaggttgccccgaagctggcaggaccagtcgcggggcacctgactgagtgtccagggctgcggctccgcggcgcggagcaagcacacaagcagcttctaggggaccctccctccggcccctcccccctcctcgggggactcttaccttaataggcaagaactgagagagggtgcgggaggcggcgccctgagtcctgtgggctgccctcaacccagccggccagtggagggagtctgacttctcatgtcctgccgggttccactgatcggagggcttggaaggatcccaaattttcgggatcttaattatgatgtggagatgggagaaaggggaagggggcggtttttgttttgctttgtttttattaagttaggctgttggcaggaaaatcagactcccacttccattgactaagtgtctacaatatgtggtgtcagacagtatgggggagacaagaaagcaaaattcggagagcttatgcataaattcagcaaaactttgagtgcctattataggccagacatagtagcaagccccagggactcaacaatgaggagacagccaggcccagaaccacagtctctggtgttggagacagatctgtaagcaaatagggtgaggagagaagggctgggtgctagacaggtgtgcctggcctgactgccttaaccagaaaaggcattgctaaggagaggggcctgatctggtctagaagacggagcccaggcggaaaagatcagtccaggaagacagcatgcgcaaaagcacagagctggagagaacaaggcctccaagggagttctgagaaccgcagttagcccgagtgaagcctggtgggggcagagtgagtcaggaaggcaggagccaaatcacagctttcagtcggctgaccaatgtgccaaactgtcattggccccgagtgt

SEQ ID NO: 2484 - DNA, 906 bp, Artificial sequence
  DNA replication origin
cactcacacttacactcacacagacacacacatcatcatcaaatgtcatctctccatcaagtgcgtgtgggggtgggggaggagtgctggttaggctccctgcagggggggcctttgagatgcagcaggaccctctcctacagagcctttcccaggggtccggggactggaagcagggagcaggaatacgcaggaagagccagcagctgcctgcgtcccaggctgccgggactgggcggggggaaaggggggaaaggggggtgaaaggggggaaaagggtgggaaaaggggagggcggggggagtgacccagcctgggtgggaagggagaagccacctccctgctccaggagcggcctggcagggacccagaagggtgcaggtgcggcgtcccgggtttccgctcgccgtcactctctccgggcgctccaggtagttggcggcagtggcagcccgcactcccaagcggcctgtgtgccaggggagggctggtaggaggcgttcccgcagctgccatccaggcttggcaatccatggatctggataacgtcactcaggagctgcagccacattggaagccggaacaaattcgtagcaaggtagcagagcaggcaccaggacggatggagcccttcagggctggaaccaggacgcggtgtacatctgttcatgcatttttccagttgcgagtcccacaggtgcgtgcgtgccagtgcccctcgctgtgcagaagccagccttgaaccttcaggagacaggaacctttgagggacctccacattcacatacacatcgctgtcccttctccacccatggtgggagcaaagcctccagactcagagctgccccagcccggcccatgagccaccctttggaattccctgcgctgggtggaagctctcaccgt

SEQ ID NO: 2485 - DNA, 1254 bp, Artificial sequence
  DNA replication origin
gaccattggctttacccataggaacctggctgcctgagtcagcaacatctgctctctggagcctactgggaggctgggggtgggggaggaagatggtctaggccactgagtggggcagcagagcctggggactaggagtggtgaaaatcagccacattgaacatatgggtgtcttctcaaggaaatgtgacatatgcgagagaaaatggagtctagaagggatgaggaagaggtgatcaagggagtgaggggttcttggagccaaggttccctgattaaggctagtcagggtgggcctgcatttccccaccccaaatgcccgcaatactcctgtagacaactcttaggaaattcagcacttcattatacactgcttccactggaaaatcctgccacgtaagcagctttgggtcccagctagattggagatgatcagtaaggaaccctaatgctaccaacacaagacaactaagaaaagtgcaaatattcatgaaaatcgttgccaactgttttgtaatcctcaccacaatcctgcaaggtggacagcagcatcctcaccacttttcagacaggtaaacaaaggctcagaaaggaaacagtacctggttggaatcagcactgaagcttcagctacctgcctgcagagatgtgctcatctagcagtttctaggagactaggctggcggcagtgcctgctctgataagggaggaggaggggagaggcttgctgtggtggcttgtagggggtgtgtgtgtgtgtgtgtgtgtgtgtgtgtgtgtgtctatttgtggggtcatttccagggctacatgtgagtttaagtgtgtgtatatgggttgagatatggtgtatatggatatttgtcggtcagttcttggaaagtgtgtatatgagtgtgtgttgagtggggttggggggttagtccctgagccgtgtgaatatgtggatgggggcactcgtgagggcaaatgggctcggattttgtgcatgattgtgtgtgtgtgtgtgtgtgtgtgagcttgagattccaagtatgtgggggagggagggggcggtgtcggagatcaatccctgggccatgtgtttatagtgtgtgtgtctgcccagaagagagtgggttactgggctgtgcacgtctgtgtagggtgagtgtgtgtatgagggtgaatgagtgtgggaggtgtcattccctggtccgtgtgtaagagtgtgaccgcgcacgccttcgtgtgtgtcccgggtgtgtggggtcg

SEQ ID NO: 2486 - DNA, 1172 bp, Artificial sequence
  DNA replication origin
ttcggaccatcccagctcggcgcactcggatccggagtccctgggcggcacggacaccaaggtgctcggcagcgtgtcggacctggagccggtggaggaggccgagggcgacggcaagggcggcagccgagccgcgctctacccgcacccgcagcagctgagccgcgaggagaagcgccgccgccggcgcgccacggccaagtaccgctcggcccacgccacccgcgagcgcatccgcgtggaagccttcaacttggccttcgccgagctccgcaaattgctgcccacgctgcccccggacaagaagctctccaagatcgagatcctgcgcctggccatctgctacatctcctatctcaaccacgtcctggacgtgtagggcggggtgcgccgcggggggccgcctgtcccggcgtccgcgaaacgctacggatccggacgggcgccgtcgctcgggtggcggaggctgcggtggcccagcgagacggccgcctcgagagacggccggggaagaagctcgctacctgttctctctggtcagcagggcgacgagggaaggtttccgacgcaggcaggtggggttgtctggcgagcccgggggctcgcaggggggattttccaggccaggagaacctcgtggagacacccgagatgagccacttctggggctccccaagggttgtggttttaacccactggagactttgagttctcctacattcatccgccacaaatcttaatgtgttgaaagaatgagggcagaagttcagagtatgcaggctcataactttaggctatctggaatttttctaatggacaaatcaccaaacactgggaaggaggagagaggagggatctctcccatagagatggaaggcacagaaaggtgcgactggaaactttcctttctgttgtgaaaataaagattatattagaatccaaataaaccctgaatatttagtaagtttaaaaagacaaattgagaacaagtagacacactgtgggaggatctgagcttggtgatattttatccccaagatatgacaccaaggtagacaggaaaatccatatttaaatggaaactttaatatctgattacttttgcaggcgaagtgcccctttatatatccaaaaacatctatttgtgaccttaaacatgtggacccataggt

SEQ ID NO: 2487 - DNA, 1168 bp, Artificial sequence
  DNA replication origin
cgagcctgacagccccgccgcccgcgcaggcgccccgccccggcccggcccgccccggccccgccgccagcgcttccatccccgccccggcgggtccaagccggtgccgggcgcccaggggttgccgcgctgggcgggagggcagcgcctgagagggcggtggggtggcggggttcctgcgcgcggcccgccatggaggtggaggaggcgttccaggcggtgggggagatgggcatctaccagatgtacttgtgcttcctgctggccgtgctgctgcaggtaagtccccgcggccccgcagccgcatttccctcttcagggccgcccggcgcagggctaggcgtccgctcccagaccgccggggccggggccgaggccgaggctctgcaaacaccgaggtgtggcgagcgtcggggtggggcaggggcgaggcgccgcgcggtggcctgggcccggccggcagcgtcaaggtcgccggccggcctcagagcctcttgggttctgctgggccctccaccccgccaccttgagtggtggaaggagcgtgttgggggaggtttctcagccgctatgctggttaaggagggatgcaaaattgtgttacctgccctacgctgttgcctataacacgctgcaaatatgaagggaattgttaccctacctgtggcactgtcaccttggaatctaggacacagtcttgataatctgcagacaaaaggttgtgtctaggatcgcctccctctgcgccgggtgtcctctgcctcttttcctgggcttgagggggcttactcttctaggggctttcaaagcataggatttatttccctctggtttaagttctgctggctcattcggccctgcgccagccttgggctgagactcccgtgagccgaatagtgccatctaccatgtgtggttatcaaatggaatcacttcttcattataaagaattctcagaacctacttgtacaccccagcctcaaaatatcgattccatatgcgaaaggtcactacagattaactgcgccaggcaaggattagtccttcaccaacttaaatggctcatttgacattagtcgcttctctcaatatgccagaggcatttcattcacaaatcctttcttagtatttgctgtgagccagccattttactctttccttcagtcat

SEQ ID NO: 2488 - DNA, 1521 bp, Artificial sequence
  DNA replication origin
gaaattcctcccgctgaaggcagagagcagactgggacactgcggttcccgagagccgcagccccgccgcctccgcccacgctggccctcgggaggcggaagactagctgacggcggcccccacacgcgctctgcagcctgggggtaaccctcagcccacccagtgcccagcgagggggctctgatccacaggctccgcccagctccctgggtcctcttttcagtgggcctcttttattgcctagcactggggatcggggtggggggtggacagttaccccagtatagatactggctcatccggacatatctgtgctgctgcagggcactcagcctccttccctgcaagattagaggggctgtggaagacagaagaaagatgctgtgctcttatggactccttttccttagactaatgcccacggggaaaggaaaggaaagggaagggaagggaggggagggagttaagcgctccatcacccccaggccaggcgtcatggtaggaaggtcataaagagggtgggtgggtcagaatgctccaggaaaggaaaggatgggacaccaagatttgcagatactgcctatgtgcctggcacatattttaggggctttgtgctttatctcatttaatcccctcggcactcctttggagtaggtaggcagcataaacccattttgccaatgaacacttggaggctcacagagaaaaaagaacttgcccaaggtcatgggctggagtggacagagccatattctttatgcgtttgtcataatgagttccttacagtgcaggtgacaggagagacatgaaggcacagcctaccaggaccagaagtccaggaggaagactcagtccttctgctgggccctgcaaccctatgagcctcgcaggaaccaagagagagggagttgagcagagagggacccagaggcaccctctgtgggtgctgttccctgaccttgacatagaggacattcctcaacatggatgtgggtcaaggtccttccctgatggtggaatgggtggagctcgtagtgtgacagatggtagagaaaggtgttcttacaattgcccctgggctaacattttccagttgtacctttgaacgctctaaaaaatcctaaaaatcactttcacaaaagttaatcattcactctgcaggccagatgacctttgctatgtagttggggttttgtttgctttttttttttaaagtcttgtagtttgtaattggacacatatcctttaggtgaagaagaaaataatttagggtctagtaaaaggcttggttttcttcttgccctccatctcccaggagtttagaaacattttctcagtgagaggctataaattgaagactgaaaacaaattaatcttccaaagctgtggccttcatggagtactatatacaggagaccccaggagacaaaaacataccaaaaccaaaaaatcaataaaatccaagccatcacccaccctgcacctgattccttaggcccctgctgtcatctgggtggcag

SEQ ID NO: 2489 - DNA, 1408 bp, Artificial sequence
  DNA replication origin
gacgacgcagtttggaaatggagggagcgcagtaacggggggcgggggaagggagcgccgaggggctggagcgcggcattgcttaggggggtgggcggaccctgggcgggggctgcgcgccccggaggccgagcgggccgggggctccgagaggcggtgcttgggaagcctcggggccgggaggagggggcttgcagcagcgggggcggccccgggactgagccggcatccctgagcctggctcccctccctgcgaccgccgtcacctccttctccttccttttccctccgccctccgtgccctgaggaaaggcgcgctcctccccttcccctggggcgctccgccggggcctcctcccgggcctccgttcccgccgcggccccggttccggcgggggcagcctccgggttcggggctccttctcctggggacgctggggcttagcttgctccgcgcagaggcggccgccctcccccaaagaaaaaactggctgcttctaagtgcgaagccggctgggcgggctggtgccagaaagggtgtgtcttcactgccctaagatggcctttaaggtatacttttgagggctttcttgggccactttccgtaaacacaggatgcaccgatggcaactggagttgtcatccgatggtggggagaggcgtgcagattttttttgaagggacgagccctgaaggaggataggcagacccaccagggcctcagggtacaagaaacccgaaaaaggactggaggctgcaggcaatacggtggtaggaatctctgccggtttccagcgtcgcggaagcaccaaagggcggtccctgaaggaaacgaggggtcttggggctggagagcggcgcggagcgtggtgggaatatcgtcacaacgccgctgtcctacatttctgtagcgaagacttgattacccctagctattacccgtgcaggagactgggccctggaccccaaatgagccaaagtctagttgagaaaaatttacacagaataacctcggagttcatggggtgaaagtgaccatgtcatgagaatacaaatgggagagaatccacttcgttgtctccagggtttagcacagtgcagacactgagtaggtctttgaaggccctgaggcttctgggtgtagacagagtgtcgggagcagagggaggctgcactccttggggactctaagggagttttaaaggaggtaattgaaaggcttggacctggtggggagaacaggcacaagtggaaatgcacaactcgcctcgcttttaaaagcatgcagcgtggagggctggtccaggtcaggtggcatcaaagagcggagtacagggcctctccattcccctgatggagtctgggttagtggcctgtgcttttaccacaccgtcaaacccttgatcat

SEQ ID NO: 2490 - DNA, 1140 bp, Artificial sequence
  DNA replication origin
gaaacgcatgcaaatggtaatgatgctgtgcttggaggcagaattggaagcagtgttaaagttatttatcatcattcgtgtttttaaaatgccgtgtgatggccgcaatacttctgtaacgaatgatgtttaagcacggagcccttcactggccgacgcgcgggtgggagataggagccgcgcccaagctcaggtggcggctgcgggcagggccgcctggggccgcagccgggcgcgctcccggcggggaccctctgctctccttgcagacggaggccgcgccgggtttggaggcatcccacagcctcaggccgaggacccgccgcgaagcgccgcctccgcgggttgaccctctgcagccgccgtagcgcagagacgaatccgcgctcccccaggctgtcgcgcgagctccccggaagctcccacctgagcggcgcatcctcagggcctgggcctggcctccttgcctgtgagatggcactgtgacggtgcccacctcgtggggtgtgtgagggccgagtgaaatcgtgcatttgcggtaagaaagtgcttatcacggtgcccagtcctaatatgggctgccagcctaagtacagagtcccaatcccagcccaaaggccagtttccaggtgaacccttgtcggggagaccaccagacggaacagtcccagtctacactcctgcaccgagcaggggacagtgtggaccgcagagaggtccgaagtccctttagaataaggatggtgcttcagggttgttaaaaggattaaatgagatgatatctaaagggattagcacagtggctggtgctaaaataaatcattttctctactgccactgctcttacaaccagacgcctggaacagcctgctggttcgtctcctcatttgtaagctggagttagtaggtgtgttgtgaaggttgagagaatatgcataggcagaacctggcgtttaatatttgggaagtggcagcaattctttcttcattaatctacaagctgcactgtggtaggcacatacccttagcaccgattcttataagtgcaggtaagagagagagaagatatattgtgtaagtcgaaggagccagccgtgtccaggccaccgcaaaacctcgacagtactgtaccagggccct

SEQ ID NO: 2491 - DNA, 1898 bp, Artificial sequence
  DNA replication origin
ggtgagtgaagcctgccccaggggccccgcgccggccggcgggtactgggcagcacccaggctgggtggacgcgccgggctcgaggcggttgccgatcagagacgggtggggacgggtcgctgtgggccgggaacaactcagccgtgggagccttttcaggaagagaaagttgttatttcatcgccagtgtccctcatggagtcagcaaggaactgtgtggccttagggaaggacgggctccggcccgctagcctctcctgcggggcctgcgcccccccgccggccccctcccgagctccagtgaccaagttccttcctgggcttccccagtaacgtcgctgagcgcttcagcggactgcaaaatttttcccagccgtgaacgcgcccgggacggggagcgggcgcggatgccacctgctcgagggcgacgcctgctgccctccccgcgcggtgccgtccccgcccgcgcggcgtccgccgtatcagcagagaggacttttcagaatcgccccacagcgaggagcgggtaggcaactaggaagcccagtcggcagcggcctcacgttgggattcctaagtggtgcgactcctgctcctttttcctcccctcaaatcctaaaaactagtatcagaactggttccatcctctccgtgtgttgtcagccaagtcgtcacaacaacctcaggaaataggtccccttcttcccattttgcctccccatcctccttcaccctccacacattggccccagtcaggccatagcaaaaccccgggagtacagcagtaacctcccagcgagttcaactgtacttgaggggttctcatggctggctcctgcaccccactgccagccctccagcccgtccgtccgtttgctcagcgtccgctgcctgcccgggaggtgcgcgtgtgcatctatggaagacagccaagggggaggggttgagatagactcaaaagtacccgcacgatcagataagtcagtgttgtaagaggcctgggctgggcgtggtggcttacacctgtcatcctagcactttgggaggctgaggcaggtggatcacttgaggccaggaatcggagaccagcagggccaacacggtgaaagatcggctctacaaaaaatacaaaaattagctgagcgtggtggcgcatacctatagtcccagctactcggaaggctgaggtgggagaatcacctgagtcccggaggcagaggatgcagtgagctgtgattgtgccactgaactccagcctgggtgacagaatatgacctgtctcaaaaaaaaaaaaaaaaaaaaaaggtgagctgtgagggtacagagggaagaagaaggcagtctcttttgtgaaatcaagtgtcttttgtgaagcagtcttcatgggagggaggatatttgagcccagccttcaaggactggtgatgtgtggacatgtgataatgtgggaaaagattgctgagtgtccccttagggagtctggattctctgagctgagagagcttctcctgggccttacaggatcaggaccatgcgcctgggaagaagaatctgttagcaacaaagaggaaggctgcagtcaggaggaattggaggcagggaggccagaaggccagggtggactaccatcacagggcccaaatagctctggggagttcatgtgcgggtggctggggaaaagaagagatacaaacagggattaattgaatggatggggtaactctcctccaggcaagctggtccctcattccctggcaccttgggtcactgctgcctgtacctgtgttctcccttccactgcaaacccagtttgcccaagctccacctccaacagattatttgaactgtcccttcctggtgatctctctcacctaattcatgtattcattcagaagtc

SEQ ID NO: 2492 - DNA, 1183 bp, Artificial sequence
  DNA replication origin
tcatatcccgttcctgtatgaagggataagagtagaggcattggacatggcctcagctggactccaagttctgccctttactgtgtgccctgagtaatttaccttccccaggcatcagtttcctcatttgcaaaaacaacagcagcagtaagactaagttaatccaagcaatgcacttcacacagggcctgctcaatagatgtttgctgtcatatcacttcccagctcaaaaactttctgtggctccccagtgtctgaaggtctaaccccatcctgcctttctaagttggcctgagttcctaccagcccagggcagagaacacttgatttcctcatattttatgttacacactgcccctgccttgtgttcccagtatctacagatggtagggaatatctcgagatagcaggtttgtggtagagggcattggtcccagaagtttcactgatagagataccttttaagattttatggctaacttaagaaataattcatgtctctttgcaatatggttcaagtgtcttgagtgacttcgagtccccacctggggataatggaggtgaagcagcaagaaagcacattcccactcagtttcacaacctgcaccatgtatgtgttggtggttatttgggcagcagggagtcctgttcatggaaatggattcctgctcacataataactaagagttctgtgaactccctcagctgggcaggggcaactctggtgcttctgtctgcaagaaaggggacagacagggaggctgatgtgaggagctggttctgggaatagggtcatttgttctgggatatagggatgtgaggggagggccagctcaatccagactgatgaagagcggggagagtgatgagtgcctgcctcagcttgggctggatggatgtggggaggctgggcagtgagggagatgtggatctgacatctcagcctgagggaaagtcccggttgagatgggggaagacagaaaaagaggaatctgagaagggagaaaccaaaggctggaaatcccagctccggggataagggagtatggggacgggggaggcctgcctcaggtaaccctacgcctaacagttgtctaaaatgctccctttccttgtcatgtttgaggaaaagtggttcaaagaggccgtctgatgcgggatcacacagcgctgaagggatgag

SEQ ID NO: 2493 - DNA, 914 bp, Artificial sequence
  DNA replication origin
gaaccggacccaggtgtccggaccagctcagcgctcagccccagtgggttttgcagctttgcctttgataaaaatctctgttgtgtttgttttagaaatctgctcgcgctggggtaccgcttcagggctgccgaacgccaacttgcttcgtgtgccctaggcaggcgtggggcaggtggcgcctccgtgacctaccaccatggatggaaacggactttttggtgaagaaacccaaacggttgatgccaggcagggtgatttggccgtcaaaggttttgacgaaacctgccctgttctctctggggaatccgaatgagggagatcacagacaccttcactgagaagccaaggacatttctgtataatcagtggatgaaaggattttctcagacccttttttccgtgcttctggaggattaatccactacagtctgcaatttcagtggaaactgcaaggcacacgatgtggcaggagccgggagcgacttccgaattgttgtggacccttcctgtagcataggggagttttcacacttgcctccactcctccccttccccccaactccctccttctgatctcttctttttaatctgttcccattttccgagttaagttctatttccaaaactgttctctggagctataagtggattgccagaaatgagagattaggagctgggagaagaggaagcgccttgtgttgtgtctcctggaggctgccgacatgaagtgctttttcccggtgctgagctgtctggctgtgctgggtaagtggctctgcttatcagtgcaatcgatgtgaaagtttaacctgctcttggttcctgtaatttctcgtggttctttttcatcaacactaggatttgggggacaccaggaggcggtcggtgtgtgtcacaggttggagtagagt

SEQ ID NO: 2494 - DNA, 885 bp, Artificial sequence
  DNA replication origin
cccagtgaaggaagaagcaaagtcccctgagaaggccaagactcttgatgtgaagtctccagaagccaacactccagcaaaggaggaagcaaggccctctgcagataaatcccccaaaaaggccaaaagccctgtcaaagaggaggtcaagttcccagagaaggtgaagtctcccctgaaagaggatgccaaggcccccgagaaggagatcccaaagaaggaagaggtgaagtccccagtgaaggaggaggagaagccccaggacgtaaaagtcaaagagcctgcaaagaaggcagaggaagagaaagctaccgccacgccaaaaacagagaaggagagcaagaaagaggagtcatccaacaaggaggctccaaagcccgaggtggaggagaaggaagctgccatcgaaaagcccaaagaatccaaagttgaagccaagaaggaagaggctgaagataagaaaaaagcagccaccttagagaaggaggctcctgccaaggtggaggtgaaggaagacgctaaacccaaagagaagacagagatggccaagaaggaaccagatgatgccaaggccaaggaacccagaaaaccagcagagagggaggaggcggcagcagcaatggagaaaaaagataccaaggaggagaaggccactgagttcaagaagcctgaggagaaacccaagacccaaagccaaagacgaccctctcaaaggagctcagtgaacctaaggcggaaaaggctgaaaaatcctccagcacagaccaaaaagacagcaggcctccagagaaggccacagaagacaaggctgccaaggggaagtaaggcagggagaaaggaatgtctggagcagccaaagaaactcaaaagggtcctggagctcaa

SEQ ID NO: 2495 - DNA, 1922 bp, Artificial sequence
  DNA replication origin
gcacagtgagaaggagcagctgcaggtgctgaaggactgcttcacaggctagagcgacaaggtgcggcaactagacgtgcacaactgcagcctggagggtgaggcggtggtgctgcgatagcagcaggcaggctgcaccaccgtgggtgagctgtatgaactcgaggtctgcgggatgcgccccacggtgctgtgcctgggcatggtgcgcagtctgctgcgcctggagcaggagcacctgctccaggacttccacatgtgcaccggtgcctccatgatgaggcccagcagcacaaagaggtcaaggcttgtgctgttggcggcttcttgcaggaggccgaggcggcgggcgtggaactgcagaagaaggcgcaggcactgcaagaggagtgtagctacctgtggcaccgccagcaggagcaggtgggcgagctgctcggccagatgcagggctgcggcgcctcgcaggcgcaggcgcaggtgcaggccgcggaggggacgccctcaagtgtgacgtgatgtcacggcgtctgcactgcatgagatctgcggcagcttgaaggccatgcggtgcagagcacgctgcagtttgaggagtggttccaagtgaggatggaccgactgtctgaggcagccaaggtgaacacagactccatgtgctgagtgcaggaggagataactgagtatcagcgtcagcttccggccgagaccacagagctggaggcactgaagagcaccatcgactcactggacaggcagtgttctgagctggaggaccgtcatcaggccgacattgcctcctaccaggaagccactcagcagctggacgctggaacaccaagtgagaaatggcggcccagctgcgagagtactaccaggacctgctcaatgtcaagatggctctggatatagagatagccccttacagaaaactcctggaaggtgaggaatgtcagactggctttggcccaattcctttctcacttccagaaggactcctccaaatgccctccatgtccactcacataaaggtctaaagcaaagagaagatcaaagtggtagagaagtctgagaaagaaactgtgattgtggaggaacagacagaggagacccaagtgactgaaaaagtgactgaagaagaggagaaagaggccaaagaggaggaggtcaaggaggaagaagggggtgaagaagaggaggcaaaagggggagaagaagaagcaaagtctcccctagcagaagaggccacatccccagagaaggaagccaagtccccagtgaaggaagaggcaaagtcaccggctgaggccaagtccccagagaaggaggaagcaaaatccccagctgaggtgaagtcttctgggaaggccaagtccccaacaaaggaagaggcaaagtcactggctaaggccaagtccccacagaaagaggaagcaaaatctccagctgagatcaagtccccccgggaaggccaagtccccagcaaaggaagaggcaaagtcactggctgaggccaagtctccaaagaaggccaagtccccagtgaaggaagaagcaaagtcccctgagaaggccaagactcttgatgtgaagtctccagaagccaacactccagcaaaggaggaagcaaggccctctgcagataaatcccccaaaaaggccaaaagccctgtcaaagaggaggtcaagttcccagagaaggtgaagtctcccctgaaagaggatgccaaggcccccgagaaggagatcccaaagaaggaagaggtgaagtccccagtgaaggaggaggagaagccccaggacgtaaaagtcaaagagcctgcaaagaaggcagaggaagagaaagctaccgccacgccaaaaacagagaaggagagcaagaaagaggagtcatccaacaaggaggctccaaagcccgaggt

SEQ ID NO: 2496 - DNA, 1050 bp, Artificial sequence
  DNA replication origin
tcacacatttgatagtggggaaataagaaacatttgttggttgaaagacggatgcatgagagtaaaagcagtgttcttccccagtgtgggcagtttccgcataagcatctgcgatccgttttgcatgtgaatgaaagcccagtgacgggcagtgggcaccagtgctgctccttgcgtgtttgaatcatgcttgctaagtttcaagcaaggaatgctccatttctcccaaccaagtcgggccttttgtattcaaatcaaaagcacaaaactctattgtagggggaaaaatgagtctttattggcaatcagtggtgtccacttagagcaataaatattaagtcttaagagtacattctatatgaagtactatagctattaatacacttgggttttgtttgttttttaaatgggtgtctttgtggggtgctgttctaatcagtgccacaggcgccgaggagagggagggagctgggtaaggaaggagacaggcccaccctagccaccggggagtgggcagagtcaggagagcggggttctgattttgccccttccctgtgaatccttgggcacctcaccgaaacacttaaggcctctgtatggtagaggttggaatccgtggcctttaaaagtcctttcagctccttcgctcctatctgcataatttttggcataggccaagcggctggttggtggggtgtttagctcaggacgagaggccgaacgagcggggagttggctgaggatagactagacacgcgtgggtgactccagcgtgatggaacgcggggtgtcccgggatagggctaaagcgatgggatttccagacgagtctttcccaggccaacttttaaaggtcggaggaaagtttctcgtggggtgggggcccagaggggatggcagggtgggctccgacgcctcctcgcctttaagcgggtggccccggctcttcctccgttacctggagcggggaggggcttgggaaagtttgtgtttgttgctggcaaagcgccggatgggaggcgcgggcgggcgctgcggttcttcccttct

SEQ ID NO: 2497 - DNA, 1443 bp, Artificial sequence
  DNA replication origin
agagagggacagtccctgtgaaacggtgacgctgactacactatgccgctcgctccgagccttggccttttcctcccgccgcactctaagcccttcggccgccccgcccacggccttgtcaggtcccgccccccgcgtgagtggactggcgaagatgtggaatttccaaaacttattggatgcttagtggcgtcactctggagggcggcggggcccggagcggcgagggccgccgctctcggacggtgattggactcgccggagtagaccgggctgggattggtgtgaggaggggccagagcccgcgggcgtcccgggccgaggcgcgggagaggcggtggacaccgagaagcccgccggcggcttgcaattccctcacccggcgcgcgcctttcgcagagggaaggagcaagagggcccctacctcatcgtgcgcgggtggggtcggcgcttgtcgcgtgtggcgcgcagtggggcgggcggcgggaggggggtggcagtggagggagcgagaggtgcaggggtgactttgttggcagcaggactagctggagagctagacctggaagcgcatccggggaggacttgcggggcagaggagggcgtgggcgtgtctggtgtgggatgcagtggaaaggagggggccctcctgagtagatctgtgggtgattccttcgaggacgcctcgtcttcccgtctgcccttttatttgtcagcgagggagtccccatggtctctgttcaagttctggagactttctctttgggtgggcttaatcacctgctactaaatcgtagaactgcccagggccctttctaatattggtcacaaacgtgaggagtatgtcagaaaacagaaaaccgctgctgggctttgtaagcaaactcactagtgggactgcacttgggaactcaggcaagactcactgccccctgtgcttggggcttttcaaagcccccaggctcttgccttgtttgcatacagtttgcaccacgtgtctggagcagctggagcccttctcagtagtggacatccgagggggagactctgacacaagctctgaggggtcaatattccaggaactcaagccacgaagtctgcagtcgcagatcggcatcctttgtcctgtatgtgatgctcaggtggacctgcccatgggtggagtgaaggctttaaccatagaccacctggccgtgaatgatgtgatgctggagagcctacgtggggaaggccagggcctggtgtgtgacctgtgcaacgacagggaagtagagaagaggtgtcagacctgcaaagccaacctctgccacttctgctgccaggctcataggtaaagatgggacactccatcaggtgtagcttaagagcagattacaaagaggtgtcaagacaaatccctcggtgagcagatgaaaaggaaagccttctcaaataccgtggaag

SEQ ID NO: 2498 - DNA, 1540 bp, Artificial sequence
  DNA replication origin
agagaagattcagtgttgagcccaggaatctatttttaagcagcatcccagaagatgtggatgcaggtgctgggctgatcacactttgaaaagcactgcgatggaagtggaggtcccccagagtgcctaggaagaacaaaagcctcctgagaacagcttttgtgaaccacctacactcaggaggtgggaggaggaggggaatctgcacactggagctcctactgtgtaccccatgcttttcctgggatgtcctactgtgtgccccgtgcttttctatgtcctgggatagcaaggccttgacttcttggagcctccattctaatgtaaaataatacatacagtagacaaacacataaatatataacatgggtttaaatagtgccatggagaaaataaagcagaataagggcttgagagtgatgggacatggggaagtgggggaggggggaaggggagtgggggtggaggagcactttttgattgaataaggagaagcctctcaggcagtgacatctgagtagaaccctgagacgaggtggccataagaagatctggaggaagagcattccaggcggagaatgagatgcgtaacaattctgagttgagaaacagctggttgtgtctggggaatggctgcagggccaggcagggtccagtggggctgtagcagagtgagtactggggaggggagcaggagaggaaggcagaggagccagcaggagctgggccagggaaggaggacttttggctgtggccttgtaggccatggtaaaggtcttggagcttattcttagatgtgttggggacctcactgggagctctgaggagagtgacatgatctgacttgctttttaaaggaccagtttgtctactgtggatggtagaaagtaagtatggagtggaagactcaccagcaggccactaagctggtgcccagagatcacagtggttgggccatggatgggagcaggggagatggtcagaggcgggcaaacctgacatgagttttgaaggcagaaacaacacaactgctgaaggattagctgtggtatgtgagagaactttctggttttctagtgttttggcagaaggaacgattgaacatttaagaaataaacatgatgtaatgggatggaaggcaaaggaaaagaggacatcagagccttctatgtcttggtattgctaatgccttgcaccatgatgcgcagggcaagctcttaacaaatatgttttgaatgaatgtttggatgactcaatgctgcatttaagctagggaggcaaggactgaaaaagccattagatggtataattaagatgctgttgggggtcaaggtggacggttatgttactaaccagatgagggacatggaggaagctgcggttttcgggcaagaaggtaacagtttacagaggtgatgaggaagatcaacagaggagaatgggccttggcagggctgagctgacaccgatgagggagaggagtttgaacctagagtggtaacctagaccaactgaataatgtctgataccttgaagcagc

SEQ ID NO: 2499 - DNA, 892 bp, Artificial sequence
  DNA replication origin
cgcgggggcctcctccgcgccgcctccggtggctcgcagctgctggctctggcggcggctgccagagaggcagcgcgcccacgccgctcggggctgcggcccggtccccgtaccctgcctccccaggcctggtgagcgcagcagctgctgggccgacacccgttgggctcacgccggagaggaaccggagggcgggggcgatgggacccgggccggcctaccggccccggctcgcgagtgggcgtccccgggcggcggagtgtgaggtgcgcgcgcacgctcccggctccgctgccgccgcccctcccccacccagcctggctgcccgggctccggcctcgcgccgctgccggctccagcagcccgaaagcgtactgctgccgccgccgtctgagcgcgaaagaagagaaggtcgccgatctgcgctgccacgagaacttcaccggtgcccagggccttgccaccgccagttcgtggggttgacccagcgtttgggcgagagggagcgaggggttgggtcgcgaaggtttcgctgaaatgtagtgtcaccggagttaatggcttctgatggcttaggttaacgtttactgtgattctttggaagtcttgtcttcagcgatagaccgtcaggcccgaggattcagcaacagggtctcaaacttccacgcagcagcccatgctcacgttattgggcccccgaggctcgattaatagagcaccaacatgtgccatgttacgtttttaaaataaagtggtgaccctgctccttcagctgggcttcctttcagaggaatctaggtacccccgatatgacaggcgtctcttcattgttcagtttctggggcacgttctatcatcttcacacacctcatcaacccccttcccataaaag

SEQ ID NO: 2500 - DNA, 1284 bp, Artificial sequence
  DNA replication origin
ggaggaggcccccgcggccgggcaggaaggagacgcggccgacctctgcccgcccgaggcgcggctgctcccgcgcgcccaggccctcccgccgctccagggctgagtgaggaatgagccggcgcctaccccgggctctcggagcgtgggccccggctcggcttcttaggcgcgagggctcggccactgcggccggcggcctagctcggggagcaggcgccggggttcactgaaccggccgcggagaggaggaggaggaggaggaagaggaggaggaggaggaggaggagctcggcgggggcggccgccgcgcctcccctcccccaggacacgccggggcttctcagtggccgccggaggaggaagttccgctccctgacagacccgtgcggtagcaacagcggcggcggccgcggcggctggccggactcaggtgtttcggacgctattgcccttcgcgccagccgtcgagtgggcagcagcgggactcagccgggcgccaggttcctgccaggcagcgccgggaagcgcgggcggccgagaactccttcctgctacttcgcccagcgccgctgcttcggcttcccagcgaagtgggagaccttcctccctgtttgcagacgtccgtgggagacccttattttttccaccgctaaggttaagagattctggaatagaagcgtcgaaggagatcaagtgaaccttctacaactcctcggatgtcgccagtctccctttcggggcggaagactacgtttgagcatctcactgaggtgcaggaatggaagaacccaccttgcagcttttctgcagtgtggcttgcctgatctacccctaggaatgaagaggaggcttgtaataatccgatgaagtacagatgttgaagaggatatcgcaggacctaaacttgtgatcgtttgggggaggtcacacacgtttctgagtgggaatggatgggcgtgaatgacgtgccctcttaaaaagcacaacagtcctttaagaggagcaaaattgagttttcccattttggccaagattttgaagacagttcaatgtattctacatttgacataagatgagaactttctaaagtattctctccaagagcgtaaacgatgactaccccagccctgctgcccctctctggacgtaggataccacctctgaacctggggccgccttccttcccacatcacagggctaccttgagactttctgagaagtttattcttctccttattcttagtgccttcatcactctgtgttttggggcattctttttcc

SEQ ID NO: 2501 - DNA, 930 bp, Artificial sequence
  DNA replication origin
cggccagccgccccgtccgggagggaggtgggggggtcagccccccgcccggccagccgccccgtccgggagggaggtggggggggtcagcccccctgcccggccagccaccccgtccaggaggtgaggggcgcctctgcccggccgcccctactgggaagtgaggagcccctctgcccggccagccgccccatccgggagggaggtgggggggtcagccccccgcccggccagccgccccgtccgggagggaggtgggggggtcggccccccgcccggccagccgccccgtccgggagggaggtgggggtgtcggccccccgcccggccagccgccccctccgggagggaggtggggggggtcagcccccctgcccggccagccgccccgtccgggaggtgaggggcgcctctgcccggccgcccctactgggaagtgaggagcccctctgcccggccaccaccccgtctgggaggtgtgcccaacagctcactgagaacgggccaggatgacaatggcggctttgtggaatagaaaggcgggaaaggtggggaaaagattgagaaatcggatggttgccgtgtctgtgtagaaagaagtagacatgagagacttttcattttgttctgcactaagaaaaattcctctgccttgggatcctgttgatctgtgaccttacccccaaccctgtgctccctgaaacatgtgctgtgtccactcagggttaaatggattaagggcggtgcaagatatgctttgttaaacagatgcttgaaggcagcatgctcgttaagagtcatcaccaatccctaatctcaagtaatcagggacacaaacactgcggaaggccgcagggtcctctgcctaggaaaaccagagacctttgttcacttgtttatctgctgaccttccctccactattgtcccat

SEQ ID NO: 2502 - DNA, 1303 bp, Artificial sequence
  DNA replication origin
agatggggcggctggccgggcagaggggctcctcacttcccagtaggggcggccgggcagaggcgcccctcacctccagacggggcggctggccgggcggagggctgacccccccacctccctcccggacagggcggctggccgggtggggggctgacccccccacctccctcccggacggggcggctggctgggtgggggtgctgacccccccatctccctcccggacggggtagctggccgggctgaggggctcctcacttcccagtaggggtggccgggcagaggcgcccctcacctcccggacggggcggctggccgggcggggggctgacccccccacctccctcccggacggcacggctggccaggcggggggctgaaccccccacctccctcccggatggggcggctggtcgggcggggggctgaccccccccacctccctcccggacggggtggctgccgggcggagacgctcctcacttcccagatggggtggctgccgggcggagaggctcctcacttctcagacggggcagctgccgggcggaggggctcctcacttctcagacggggtggttgccaggcagagggtctcctcacttctcagacggggcggccgggcagagacgctcctcacctcccagacggggtctcggccgggcagaggcgctcctcacatcccagatggggcggcggggcagaggcgctccccacatctcagacgatgggcggccgggcagagacgctcctcacttcctagatgtgatggcggctgggaagaggcgctcctcacttcctagatgggatggcggccgggcggagatgctcctcactttccagactgggcagccaggcagaggggctcctcacatcccagacgatgggcggccaggcagagacactcctcacttcccagacggggtggcggccgggcagaggctgcaatctcggcactttgggaggccaaggcaggcggctgggaggtgtaggttgtagcgagccgagatcacgccactgcactccagcctgggcaccattgagcactgagtgaacgagactccgtctgcaatcccggcacctcgggaggctgaggttggcggatcactcgcggttaggggctggagaccggcccggccaacacagtgaaaccccgtctccaccaaaaccagtcaggcgtggcagcgcgtgcctgcaatcgcaggcattcggcagactgaggcaggagaatcaggcagggaggttgcagtgagccgagatggcagcagtacagtccagcttcggctccgcatgagaggga

SEQ ID NO: 2503 - DNA, 884 bp, Artificial sequence
  DNA replication origin
gcattcggcagactgaggcaggagaatcaggcagggaggttgcagtgagccgagatggcagcagtacagtccagcttcggctccgcatgagagggagaccgtggggagagggagggggagggggagggggagggggagggggaggggggaggcctttcataatgaaaaaaaggatccattcattagaaagacataatcacaacattaaaacataagcaaatgtgtaggcatcaaataacagagctttgaaatgtatgaatcacaaatggaagaattaaaaggagattcctttttaattttttattaaaaaggtaattccacaaagattgttggatccttcaacattcttctcttcaactgatagaataagcagacagaaaatcaaagatgatgtagaagtcccgaatgacagtatgagctattttaaatgaattgatatttatttatacagcactttactcaacagctgctgagtacactttcttttcaagtgcacatggtatgtttaccaaaaataaattgtatgctggatcataaaacacattcagtcaatttaaaaagttagaaatagtacagagtatggctaggtgcaatggcttatgcctgtaatcccagcactttgggaggctgaggtgggtggattgcttgagctcaggagtttaagaccagcctcggcaaacatggcaaatcctcatctctacaacaaatacaaaaattagccgagtgtggtagcatgtacctgtagtcccagctactcaggatgctgaggtgagaggattgcttgagcctaggaggttgagtctgcagtgagctgtgatcacactgctgcacttcagctggggcaacagagcaaaaccctgtctctcaaaaacaaaaaacaagca

SEQ ID NO: 2504 - DNA, 1020 bp, Artificial sequence
  DNA replication origin
agcgcaatagagggggctgcgtcgacacccacttaacttcggagttagtgggacacctttctttttgcttagtacgcttttctgctattcctgccgcataactctctcttccccaggcttttcccatctccatcctattctctcgcaggcaggtttttcttccgcctctctggggattttcgcgttggttctccctgcccccaggagtgaggcgggtaacgcccacgcctacctccggtgtgtgtttttgaagtcggaaaaaacttaatggtttctgggccctgggcacctttctgattccccaagcaaactggctggaggcgaaggcgtggtcttcggggagagagcgccggcggctctctggccccggggaccacctgtgtgcagttagtgggacgaagggcctcggggagtccatcgccaatgtcggcagccgcagccgcttcggccccattcggaatgccacagcacttggtccagtgtgttatataacatgcaggcagggcttggacaccatccattcataacatagcgagtggtttacagcccaggttctgaattcagactaatctgagttgagatctccatgcaccacttaaactttctgtaaggccttaggcaagtaactgaaccaaccctccaacaacctgcgtctcctatctgtaggacaagactaacaatgggacagctctgtagaattatataagtattaagaaaatacgtgggaaacaattagtgcattgcctagtgcctgttagaaagtgtgtggcaaatgctgtatgtatcagatagtagccaatgttggacaatgttatttatcaatagacattattgtacttgtattgatcgtttactaggtgctgggggaaaagattacttcccagatgcagtatttacatctcctccgccctactcttccaaccctgcctgaaataagtgtggttctcctgtctgtcagactatgaagagttctcaaatatgtctttcccagcgagggagaggagagtgagtatccaggaa

SEQ ID NO: 2505 - DNA, 848 bp, Artificial sequence
  DNA replication origin
ggtcctcgagggagcaggaggggaaaggagcaccgggtctcggcacctgtccgcagctcccctcgggtccgcctgccccctaccaggctgggcaaagacctgagcaccacttagtgggggcggacccccactaagtgagctcgcggctccctggggctgctgccgcatcgccgcacctttagaggaggggggtcgcggactcacctgggcaatagaagaggaggcgacagaggcaggtccttggcgtgggcaggccccagcaggagcggcgcgacctctacagcccctaggcagcggcaccgagtgagccgtcccgccgccgccccctccgttcttatacggcgggaccacgcccccgtccccgcccctgagccgccctcccgggggagccaggggcggggcgtggcggagccagtcccctcgggacccttccgcccggccctgacggcaggggcggggcgagggctgccctctgattggctcttcgggtgaatggttgccaagagacgagtaaatcctcagcggcgggaaggggcggggtgctcagggaggcagcactgcgcaagcgcaatagagggggctgcgtcgacacccacttaacttcggagttagtgggacacctttctttttgcttagtacgcttttctgctattcctgccgcataactctctcttccccaggcttttcccatctccatcctattctctcgcaggcaggtttttcttccgcctctctggggattttcgcgttggttctccctgcccccaggagtgaggcgggtaacgcccacgcctacctccggtgtgtgtttttgaagtcggaaaaaacttaatggtttctgggccctg

SEQ ID NO: 2506 - DNA, 1548 bp, Artificial sequence
  DNA replication origin
tcttgttctttgacggggtggccctgtgggggaggaaggagaagtgttcctccactgctgttctgtggagcgggacctggctttgttcggcctccctgctctcgggagcctgtactccggctcgcacgcctgactgctggccctggccgctgctcgggccccgcgcaggcacacgggacaaggcgaagccccgacgcccagagggcgcttgggcccagcacacccgcgcacagcccaggaaacgggaaaggccactgtctgcttccctttcgcagattctatccgctggcacgcgaaggtcacacgggctctcaatgctaatttggaatgggaagcaccacgaagggttgaggtagcctggtggccctgactgcgcagggtgcggacagtgagcccgtatccagcttcgctgccacgcgcctagcagcccggcggccccggcccggcccaaggaggaggcaggccgcctgggtcggcttccgtggcctgggggtaagctctgattcaccccaaggtgaggtccccggggatgcccagattcgggccgggaaacgcaccgggagagaaccaccaagcgctcttggttatgaaccagagcttataactgtggccgcagctagacctaggggaggcctgagcgccgaagcctccgtttcctcgaccggaattcgtgagctattaaacatgggccctagcggggcccacgccctgtcttcctttgctgacaaggctccgcggggtagtgggcgggagacaagggtctcagaacagaggggctggcccggcgcggcgggccaggaactcccgggcgtgtgtgtgcagtggtgcggggtgggggtggaggtgaggtctcctttagttcctgggatctgggaatcccggcttctcgatctcatccggcgcggagatcttaagggtcggtggaccagttagtgtgtacggcctcacccctccgcctccagctttcgaggctctccgcttcagagctccaaaggaaaacttctgcgacttcaagaacgtcctgcgcattcacatggggtcgcttcctggctggttgaggagagtgaaagttctagtgcctaagcctccttttctcttgcccatttttctcactcctcaaccacagataaagaaacactacatcgttgaaaaaaagtagtgaattatctaccagtgaggtagaggaaattaacagtcccaagactgcccccaggtgatggttttcaggaataacatttctgggcaatctcaggtcgcttatttctcttcggagctaatttcatctgtgatagaaaagttattgaatccaaaggctatgttaatccccccaaaaggaaaaaatggccccagaaacctcctgcccacagacactgagaatttgttcaatttgtctttctagccttacatttgataactgcacttccaaaaatcaaacgctctcctccccaaaaggcagacatgctcccacccatccccttttcttcttcttttccttctttctagtttcctctttctgaaacaatagcgcgggctgctggagtcagtctg

SEQ ID NO: 2507 - DNA, 1303 bp, Artificial sequence
  DNA replication origin
gccgcactccccgcaggcgaagggccgcagcgccgccgcccccgcgccgctggccgccgcgtgcgcgcgccggtggctcaacagatgcgagctgaggctgaaggcctcgccgcactcggggcacgggtagggcttctcgcccgtgtgcaggcgccggtgcttgagcaggtcggcgcgccagctgaagctcttgccgcagtcggcgcacaggttgggccgctcgcccgtgtgcaggcgcaggtggttggtcaggtaggtgttgcggctgaagcccttgccgcactccccgcagcggaagggcttttcgcgcgggggccgggccagcgggggcccggccccgaagccccccgccacacccacccccatcatgcccaccatcgcgtcgcactcgcccgccaggccgaagggctccaggctggcggcggcagcggcctcagccaggcggtgaatgcgctggtgctgcaggaaggcggcgccaggactgaagctctccccgcagtcggggcagatggtgggcgcgtccatgatgctggccaccaggctatccagctccccgaggtccacggccatggggtggtggagccggtggaagcggcggtgggcgggcttgtcacctcggtgccgactccccagggagagatgtcgcctccagggaagtacgggaggggccggctgctcctcttcctcctccagccggttctccccagcactctcgtcgtcgtcctcccggaggctccgggatatgctgtcagactcagacagtcctgggaacatcgccatgtcagctacaccggattggtcatcctcttccccacggacagaaacgccttcttcctcactcagctgcccctctgcaacagaaaaaggtggcagtgggggattactatacttggcattcaaaagataagcccagaggaaacctcagtaataaaactgtgatcccctccctcaggcactctggatccctgcccctccaagaccccctgagagtttagcctctctcaactggatcctccagggaaaggcctaaaggagagtgcactcattgccccctctgcccaccagttcttcaggcagcctcctcgggcccaggcccccctagctggacccgaggcactgcctagcagagccatctgaaggcctgactgcctgtgttcaggatattcaagtctgtgccaggtgggacactacgtaagatctcaggagaaaaggtttactcactccaagagctaccaatgccttttaagattctagtctcaaaagacaagaacagtctgccaacctgagaaagaccacttggcct

SEQ ID NO: 2508 - DNA, 822 bp, Artificial sequence
  DNA replication origin
gtgaatgaaatgtgtgcctcccttttcctctcttctccattctagcccactcaaatgagcggctttggggctgccatcagaccgggcaaatgacacaataaggacgggtgggtggagagatgggcagcagctcgcagcccaagaggggtggccgtctagccccgggaggcattccaaccacacgtgtccatgtaggtaggtggtggggtggtgggcaaagctggaacctgcacctcgcggggatgccgaggctcaggattgtgcatggaggcacgggtgaggcgcgtgttgggaggagtgggtgagtaaaaggttgagggggagcagcgacacagaggcgctgagtgtaccttatggccaatgtacattatggccatgcatcgggaactgactaccacttcctctgggactttccacgattttcctttttcctaaccgcctcccccaaccgcccccgccctgcctcccccacaggagtgaatcacccaccccttactacatgaaccctgggctgaattgaagttggtgatgtatccctgtccttgtagtgggcatgtttgtccttaacctgtaggatgacaccaatactccgcatcccctactgcgttaccctcctccctcaagactgagcgtctggtaaatgcggttggataatggctagcgagttaaatgtctttgagtagctgtggtggatgagtgggcaactttgaatacagtccaagtgtgactgttgtaactgaactcagcatgcctaaggggccacactcactatctctcctttctcccctcacctgattttttgttgatgcccccaactgttta

SEQ ID NO: 2509 - DNA, 1258 bp, Artificial sequence
  DNA replication origin
ggcgcccgctgctgcggtggcaggaagtccccgggaactacaaatcgaggcatgctgggaacattctcccgctcctcccaggaaatgtcctttgtccagccctacaggaagccccagtgaggagtcagccgggcagccagccagcgagccagccagccagccagccagccagccagccaaccagccagccagcgggccacccagcggccgctgcagccgccgccgccgcacaagggcagacgcgctgcggtgcggggctcgggccggggcgctcggtgccctagctcctcgccgcgccagccgcctcgcaggtaggagcgtggctgtggctgggctcaaccgcctcccggggatggggctgatcgggaccagacccgaccgctgcggggatggggtgtgtgttcgagtgcggtggcggaacggctgggcgaagttgtgcctcgtaaagtggaccgttgtccgctcccctggggcgcagggccccgggcttatggggtgctctcgcgcccccaaagccaggactgagctccctcaggggtatgtggcgaggggcggggaggaggaggctgagacttgagggaggagacagcgatgcaagagggaataggaccgtcccgccgaccaccgaagggggcatcagagaccctcggagaaaccaagcccagggaggagcttggaaggcaaggagaaggtgaagggctttgtgtgcagctgtggaccttgacggactgcgctccccttgccttgtctgttcgtgcctccagccccactggggctaagggagggtggggggctccgagaagggcaggagagaggcggcaggtcatcttgggtcctagtgaatgaaatgtgtgcctcccttttcctctcttctccattctagcccactcaaatgagcggctttggggctgccatcagaccgggcaaatgacacaataaggacgggtgggtggagagatgggcagcagctcgcagcccaagaggggtggccgtctagccccgggaggcattccaaccacacgtgtccatgtaggtaggtggtggggtggtgggcaaagctggaacctgcacctcgcggggatgccgaggctcaggattgtgcatggaggcacgggtgaggcgcgtgttgggaggagtgggtgagtaaaaggttgagggggagcagcgacacagaggcgctgagtgtaccttatggccaatgtacattatggccatgcatcgggaactgactaccacttcctctgggactttccacgat

SEQ ID NO: 2510 - DNA, 995 bp, Artificial sequence
  DNA replication origin
cgggagaatgttcccagcatgcctcgatttgtagttcccggggacttcctgccaccgcagcagcgggcgccctggaggtagctcgggccaggctaggactccgggacaggaggaaaggcgctcgctgcttctctaagcgctgtggggaagggagcggccggcgggtcttgccccacgccccgccccgcggcgctcaaggagcccgctgtcccggagcacgcgagatcccagcgctgcactccgagctcgcggcaccggttgcgggcagccggtgggacgctgccgctgagctgtcccatggttcgggagggctctgcggtgggagaggccttttctttaaaaactgggaagtttgtggtgggttcgctttttaaaaattaatctaaaaacacaaaatctatcttttaaaatagattttctttttgtcttttacgccgttgacatcctgctgggggccgattaaagaacttgattgctcaccaggaattcaggttccttaagatcttggcgcttcatctttaaaaccatacagagctgattgtttccagatcccgacccggtgacattcctccctcattgttgaccttgtcccaaacatcttttcaagaaaagcaattaaattgagattgaaaataaattacgtaaattaaatattagacgtgaaaacctgtgtgctgctgaattaggaaagtgctggactttctgcgtatctttccttcattaacctttaggattcagcttcttggtcccataaaacagatgtgctggccactgtatattgagtgtgtgtatttcgggagtggaagggtgaggagaagaggacattggctacaagagaggaactctacttccagcctagcaagagtctatgatgccctgcacatgtttttgtctatttctgggaccacagactcaggacccttagaaaatcaaggaaggaccacatagagactaaatgactaaaagctatattctctcctggagcatgagcagaa

SEQ ID NO: 2511 - DNA, 907 bp, Artificial sequence
  DNA replication origin
ctggtgctctggtggaggtgagagtcagaggctgttctgcaggacaccccactgcctttcctggttgttccccagagccactgatacaatttcacacaagaaaggaggtgacagatgtgaggagcctgccacccgtccaatcctactcaagtcctaagcccttgcccaccaattctgtgcatgatgattggacctttctctggcttttccagaaggggaacacgcaaaggttagggagctggatggtctaattcggggctatgctcttgtgtcatctgctcaactgtctcctgcgtattagccatgctccctaaccagcttacaaacttcttgaaggcagggaccaaattcttctgagtacagggcagagctggatacttggatatagtgtcatgccatggtgacaagatccacgccagcagatacaaaggcagacaaagtgagcgaggcagtttccaggaccacgtggttgtggcacaactaaagcaacaacagcagcctctgcggtctaaggggtcctcggaggaggagacggctgaaggtggtggacagggctgaggcgggcagaaggcggttgtgcgatttggagggtgggggagaatatactggatcaggtgaggtagagactgggcagctgggtcgactacagaggtcgaaagtgcaggcactggagtgaagagttcacaaaataaatattccggacaaggccaccaggcccagcaggccttttcaaacacggtggataaagatttgaagtagattaattatatatcacaacaaaaggagataaaaatttgctaagactataaatcatctgggagcgtttgggatcggattctagtcgagtctggtcactcccaaccagcgataaaccaaaggtggggaggaggctaaatctggaccccag

SEQ ID NO: 2512 - DNA, 1274 bp, Artificial sequence
  DNA replication origin
tagcgccagggcctgagcctttgaagcaggaggaggggaggagagagtggggctcctctatcgggaccccctccccatgtggatctgcccaggcggcggcggcggcggcggaggaggaggcgaccgagaagatgcccgccctgcgccccgctctgctgtgggcgctgctggcgctctggctgtgctgcgcggcccccgcgcatggtgagtatcgggctgaggggcgctgtccgcggcgcccggggctgccacctggggcgacccttctccccctcggtccttctctgtgtgggaaggccaggctcggccgccggcgcggagcgaggccactcgctgggttcccaagagtttggacatcgccgggggcccctcccgtggtgccccgccaaccgccggggttccccgccgcctctgctccccgcggcccgggaccccttacacgcctcctcggcaggagggaggccggcagcaagtctcagaaactcctttttcgtagtgccagggtgcagggaggtgggcagttttgcccttcaggttccgcgtttcttggggtcgagcgagagccgacggcgggcctcggaggggctgagcgaaggaatgccagattctggcgtggagagcgggggcagggccgccaagccaaacggcctgcaccgtcgcagccagcctcgcctttgccagggggcggcacatgggccgggtgtgtgggcttggtttggatggggacggggttttgcggcgcgcctgagttttgacactccaaccccaccgaaagtccgggggagccgtgtgtgctgctcgcgtctttgaaaggtggaggcaggagaagtagggcaactggtgtggctgcatgctgaggcacatgatttaaaaatctcaactgctgttattctttccgaggcgcggagctctgctgctgtttcaggctgtgtccagacccaggaatgtggtgtgacgatcaccaattcctccaacctggcagcagcatttgctgctcctttggcatggctgggggtggggcacgggcgggtgagaaaaagtggatacgttaattcaaagggcttccttagaaagcttctttatggttggatgtttctaacacggttggaccaaggaaagggaatcaaatcatatcttccccatcccacccacacttttagattctacatttcttcagaccctttagtggaaataacttgggctttggagccctgctctgtaatcctggattcaaatccagctctgctatatgaactcaccaataaaatgggaaa

SEQ ID NO: 2513 - DNA, 1085 bp, Artificial sequence
  DNA replication origin
gcatcttctcggtcgcctcctcctccgccgccgccgccgccgcctgggcagatccacatggggagggggtcccgatagaggagccccactctctcctcccctcctcctgcttcaaaggctcaggccctggcgctacgctccgaagcccaggcgcaaatgcctcgactccccgcgccccgagtccgccgctcctcggccgccgcctcagccgccgcccgaagtttggctgaaactttctcgggtgtgcaacgaagcagcctcgtgtgtccttccgcctcagccgcctcctcccaccgcaagccccgccccactgtcgccgcggcctcggccccgccgccttgggcacccaggggtttcccgcaggaagaagcgccggcccgagctccgcgcggagggatctactacgagtcactggccccgtccgcatccttctccagcggccccgggggccgccgcgccttaactcgatcagggctgcagcggctcgctggcttgaccagtgcagaaggggcgtgggggtgaggggggtggggtaggactctgaacttcaagcactggagtttgccgggatcgtgaacttgcagggagaggcggtcctcatccagtgaggtctgtatcgccacctacacccacacatccacacactgctttgctagctagaggaatgctctggagtaggaccagtgctgtcaaagaaggaaagtgggccaaggcgccaaagtccattaaaaaggaatagagccatcacggagtggtgctgccccattcattcattcatttgttcatccgtgtagcgaatatttcttaagtgccttactttgcgtagctgtgtgcttggcagtgggatgataccaaagatgcacaagcaactttgagtaccaagactttgccgctgtgggctgggggattcagggaaggctttcccagaggagctgggatgaaagcaggatcttgaaaggtcagtaaaatttgtataagacaaggagaccagctaagctaaggatattcgttgtaacactgtaatagcaaaaccttgaaaacaacataaatgcccacccttagaggaatggatgaataatgtatgg

SEQ ID NO: 2514 - DNA, 1352 bp, Artificial sequence
  DNA replication origin
gcctgaatgtccagtgtgctctgctggggcagcacatttttgtacattgctgtatctgaaaaaaaccctacaagattcatgaaactggacgaccgtctttataatactcctagtgataaaacaagtaaggatggctggtttgcagtcatctgagcagcctctctagtttcatagatacggtttctctctgatattgaacgacttccaaatgtcaagcgaaatgctacatcacaaggataaccgtatgtgaaaagaaccgtttttctttgtaatcctaaactttctagtctgagctttaaaagccattatttgaagaaaagcgcacaggctccagctggccgccaaaggggtcctttgcatcacaggctaagaacctacttctttgggagagaccagggacggggatgggagggaaaggaggtagagtcaggtgtcacttcctccgcccgctcccgcagctggttggtcggccgagtggcagagggtggggcggaagagcagacggggacgggaaaggcgctgtcggtgacatcacagatagggcgattcctatgcagaggaggcagctcaggggctgctgcttcgccaggaaagatttctcgtgctgtgggagctagtccaggacttccggttggacgtgatagtcccagctgtgtgtcagggctaggaggacttgaggcggcatgggggcggggtgggggaatgcgcggggcaagtgaccgtacgtgtaaggggtgaggcgtatggagctgtggcagggcggaggtgcgttcattcatacttatgtaacaggagaaaatacggccatgaagttggtgtttttcgggggcggtttttccattgtactcagtatgtgctgactgactcctgttacttccacatgtggggaaactggactgtaatttgtggtggtggggaattgcgttcgcgctttcttctggaggttgtagtgcaaaaagcagtttgtctaccaagtgatactttcagcttttacaaatgctgaacaatatccgtggtgtgttttcatgtcacctcctctcccttctttgttagaaaaaaatggaagagcacgtggatgttttgagatgagaagaggtgcgttcaccaccttcacctccgtgtaggcttgttattaagggaaagggaacaaaggagtctcacttatgtaagatgaccttacatgagaagaagaaattcgagttggtgaaaagaaagaaattcaatttcagccgggcgcggtggttgacacctgtaattccagcactttgggaggccgaggcaggcggatcacgaggtcaggagatcaagaccatcgtggctaacacggtgaaaccccgtctctactaaaaaat

SEQ ID NO: 2515 - DNA, 1787 bp, Artificial sequence
  DNA replication origin
ggtcgcgctggctacctcgcatgcgcagagccggaagcccgctgaccggactacagctcccagaagagccttgtggaggccgcagacgcgaagccgctggcgccatcttgaaatctgatcctccatccccgaggctttgcgtctgggcggccggccgctgctgctccgggagcccagtctgctaaaaggggaggacgttgaggacgcggcggctggcgggagagacagctggggagagacatggcagggtcggagcgcggcctgcgcctctgtcactcagcatcctcttaggcgtttccacgcccgccccctgcccgaggggcggggctgacggctctggtacccggagtcggcgcgcgggacaggggcgcgcccctgcagagtggggaccccactgggctgtgccatgctgaccggagaccaccgaggcgggagacagagcgcggcgaagagccattgagtggtcacccagtagccgccgccgccgccgcctcgggaagcttgccacccgctaggagggaagatgaaggagatttgcaggatctgtgcccgagagctgtgtggaaaccagcggcgctggatcttccacacggcgtccaagctcaatctccaggttctgctttcgcacgtcttgggcaaggatgtcccccgcgatggcaaagccgagttcgcttgcagcaagtgtgctttcatgcttgatcgaatctatcgattcgacacagttattgcccggattgaagcgctttctattgagcgcttgcaaaagctgcaactggagaaggatcgcctcaagttctgcattgccagtatgtatcggaagaataacgatgactctggcgtggagatcaaggcggggaatgggacggttgacatgtccgtcttacccgatgcgagatactctacactgctccaggaggacttcgcctattcagggtttgagtgctgggtggagaatgaggatcagatccaggagccacacagctgccatggttcagaaggccctggaaaccgacccaggagatgccgtggttgtgccgctttgcgggttgctgattctgactatgaagccatttgtaaggtacctcgaaaggtggccagaagtatctcctgcggcccttctagcaggtggtcgaccagcatttgcgctgaagaaccagcgttgtctgaggttgggccacccgacttagcaagcacaaaggtacccccagatggagaaagcatggaggaagagacgcctggttcctctgtggaatctttggatgcaagcgtccaggctagccctccacaacaggaagatgaggagactgagagaagtgcaaaggaacttggaaagtgtgactgttgttcagatgatcaggctccgcagcatgggtgtaatcacaagctggaattagctcttagcatgattaaaggtcttgattataagcccatccagagcccccgagggagcaggcttccgattccagtgaaatccagcctacctggagccaagcctggccctagcatgacagatggagttagttccggtttccttaacaggtctttgaaacccctttacaagacacctgtgagttatcccttggagctttcagacctgcaggagctgtgggatgatctctgtgaagattatttgcctctccgggtccaggtatacaaaacgtctacatagtgcctttctgattatagctagctggcctctggcttcacgtgatttcggtctaggtggaggttagaaatattctggacttgagaaaattagtcatgaccccatttttgctgcacctttt

SEQ ID NO: 2516 - DNA, 1074 bp, Artificial sequence
  DNA replication origin
gtcgcctcctcctcctcctccgccgccgccgccgccgccgcctgggcagatccacatggggagggggtcccgatagaggagccccactctctcctcccctcctcctgcttcaaaggctcaggccctggcgctacgctccgaagcccaggtgcaaatgcctcgactccccgcgccccgagtccgccgctcctcggccgccgcctcagccgccgccggaagtttggctgaaactttctcgggtgtgcagcgaggcagcctcgtgtgtccttccgcctcagccgcctcctcccaccgcaagccccgccccactgtcgccgcggcctcggccccgccgccttgggcacccaggggtttcccgcaggaagaagcgccggcccgagctccgcgcggagggatctatacgagtcactggccccgtccgcatccttctccagcggccccgggggccgccgcgccttaactcgatcagggctgcagcggctcgctggcttgaccagtgcagaaggggcgtgggggtgaggggggtggggtaggactctgaacttcaagcactggagtttgccgggatcgtgaacttgcagggagaggcggtcctcatccagtgaggtctgtatcgccacctacacccacacatccacacactgctttgctagctagaggaatgctctggagtaggaccagtgctgtcaaagaaggaaagtgggccaaggcgccaaagtccattaaaaaggaatagagccattacggagtggtgctgccccattcattcattcatttgttcatccgtgtagcgaatatttcttaagtgccttactttgcgtagctgtgtgcttggcagtgggatgataccaaagatgcacaagcaactttgagtaccaagactttgccgctgtgggctgggggattcagggaaggctttcccagaggagctgggatgaaagcgggatcttgaaaggtcagtaaaatttgtataagacaaggagaccagctaagctaaggatattcgttgtaacactgtaatagcaaaaccttgaaaacaacataaatgcccacccttagaggaatggatgaata

SEQ ID NO: 2517 - DNA, 1239 bp, Artificial sequence
  DNA replication origin
ttgcacctgggcttcggagcgtagcgccagggcctgagcctttgaagcaggaggaggggaggagagagtggggctcctctatcgggaccccctccccatgtggatctgcccaggcggcggcggcggcggcggcggaggaggaggaggaggcgaccgagaagatgcccgccctgcgtcccgctctgctgtgggcgctgctggcgctctggctgtgctgggcggcccccgcgcatggtgagtatcgggctgaggggcgctgtccgcggcgcccggggctgccacctggggcgacccttctccccctcagtccttctctgtgtgggaaggccaggctcggccgccggcgcggagtgaggccactcgctgggttcccaagagtttggacatcgccgggggcccctcccgtggtgccccgccaaccgctggggttccccgccgcctctgctccccgcggcccgggacccctcacacgcctcctcggcaggagggaggccggcagcaagtctcagaaactcctttttcgtagtgccagggtgcagggaggtgggcagttttgcccttcaggttccgcgtttcttggggtcgagcgagagccgacggcgggcctcggaggggctgagcgaaggaatgccagattctggcgtggagagcgggggcagggccgccaagccaaacggcctgcagcttcgcagccagcctcgcctttgccagggggcggcacatgggccgggtgtgtgggcttggtttggatggggacggggttttgcggcgcgcctgagttttgacactccaaccccaccgaaagtccgggggagccgtgtgtgctgctcgcgtctttgaaaggtggaggcaggagaagtagggcaactggtgtggctgcatgctgaggcacatgatttaaaaatctcaactgctgttattctttccgaggcgcggagctctgctgctgtttcaggctgtgtccagacccaggaatgtggtgtgacgatcaccaattcctccaacctggcagcagcatttgctgctcctttggcatggctgggggtggggcacgggcgggtgagaaaaagtggatacgttaattcaaagggcttccttagaaagcttctttatggttggatgtttctaacacggttggaccaaggaaagggaatcaaatcatatcttccccatcccacccacacttttagattctacatttcttcagaccctttagtggaaataacttgggctttggag

SEQ ID NO: 2518 - DNA, 1570 bp, Artificial sequence
  DNA replication origin
tgttttctgggttatatacaagggagatgatccagtcatttgttaagcgcctcaaataagacatgccctagatgtttttttgcttgtttgttttgtcaaattgggattatttttgtgtctttggagaatataaaatactaatatgaggtaagcactaaggttctgagatggccgtggaagagatgacaaactccatcaccatgcctgagagtgtccaatcgtctctgcgggggccacatatttttgtattacactgtatttgaaataacaacaacaacaaaaaacccttcaagattcataaaattggacaactgtctttgtaacacttctagtggtaaaaccagtaaggatggctagtttgcaacccatctgagcagcctctctggtttcatagatatgttttctctctgacattgaatggctttcaacttgaagcggaatgctacatcacaaagataaacaggtttgaaaggaaccggttttccttgtaatcctaaacgttcaagtctgcgcattaaaagacattatctgaagaagggtgcaaaagcttcctgttggccgccagaagggttctctgcaggacacagatcaagtaccacagtcttagggggagaccagacgcggggtctctgcgcacctccccaaaggacaatggcaggaggaaaaggagaaagagacagacgtcacttccttcgccagctccggcagcgggttgatcggctgagtcggcggagggtggggcggaagagcagacggggactgggaaaggcgctgtcagtgacatcacggatagggcgatttctatgtagatgaggcagcgcaggggctgctgcttcgccactaaggagttcccgtgccgtgggagtgggttcaggaccgctggtcggacctgagagtcccagctgtgtgtcagggctaggagggctggggggggcggggaggtgcgcggggcaagtgaccgtgcgtgtaaagggtgaagcgtgtgaggctgtggcggggcggaggtgcaaaagcttatacttacctggcaggggagatactattatcaaacgaaggtggtttttctcagggcgagggttatccattgtgttccggatgtgctgacctctgcgatttccccaaacgtgggaaactcgactgcataatttgtggtagtgggggactgcgttcgcgctttcctctggtgcttttgtggtgcgaatagtaggtgagccgtaagtgtttttgtaattcagggtgcgggctcgtgttttgtggctgtgttctgtccggtcagttgtttccgttcgcaacggttagttttcgtttgtgaggccatgtttggggacagcttagaactatccacttactctcttgggaggcgaatttcagtctctgttggttggggtgttctcccaggttagctgccgctgtacttgctaggtggagctcagggatcaagggtcgggagctttctggtttgttcagtgctcccagggcttctaacatctcttaaaaactctggtgttttctgtcatcctcggagttacctcttagcctctgttttttttgttgtttttttccccccctc

SEQ ID NO: 2519 - DNA, 956 bp, Artificial sequence
  DNA replication origin
ccattcgcccgagtcaaggggcggccccccaaaatcccaacgtcattgtttcctcggggccggcaggtgtgaaaacccggcggcagaatggaagttcggtagtctgcgagggcccgcggcctccccaggcgcgtagctgagtccctccaaccccgccccgggcccgcctgctctcgggccccggcgtggcgccacctggcggccgtctgtggaggttgcagctgccgccaagccacggggatgctgccggcctcaggtgcgcccggccaagcctccgcggagaggaggactggtagatcacaggaaacgggaggacggcgctgggctcccagcaggcgccccagcttcttggcttgtcgcaagagcagccggaggcggcggcggcagggagggagcgggtggggagtgggagaggccgcccgcctccccgtccagctcggaggacctcccagctggttccctcaccgtcaaaagcaggaagggagctggctcagcgggatcagcaagccagcgggcaagaaggctccaggctccgcaggggccaccccacatggactcgggaaccgccgagcttcactcacaagggcccacggcccatcctatcacggacgaaaagattacaggactgacaatgagcccctggagggatctgatgcagctggcggggagaaaggtgggtcggacttagaggggtggtggggtggaggaatatctttcttctccctgggacctaccgaggcttcacctgtgagggtcttgggcccatccttcaatccgagagcttccaagccaaagcacagctccccagagtggacaagtggagcagaaccggcattaggttgggagggtgggtcgttaggggtagttcttcaccttccaggctgggtatggagacctctaaattcatcctagggccacaagagcttctgtaagagttcaggcccgtttcagaacac

SEQ ID NO: 2520 - DNA, 1197 bp, Artificial sequence
  DNA replication origin
aggtgggtcggacttagaggggtggtggggtggaggaatatctttcttctccctgggacctaccgaggcttcacctgtgagggtcttgggcccatccttcaatccgagagcttccaagccaaagcacagctccccagagtggacaagtggagcagaaccggcattaggttgggagggtgggtcgttaggggtagttcttcaccttccaggctgggtatggagacctctaaattcatcctagggccacaagagcttctgtaagagttcaggcccgtttcagaacactcagaggttcctagcctgagaagtaatccccaaagcagaccaaccggtttggggtaaaacaggaatagttgggtccattctggatctttcctagctaaatgccttcaggatttaggaatattttcctaggagggccaaggattagctagacctgcccagcgattccagccctgagaaccagacagaatggaggtatagccgacagctggctgggagggggctgacggtcctcactgccaccaggcttagttggagacagattccccgggctgtagagagacaacagtagaagcaaagagaccagttaggagtctaggtgagaggcagcggcagcctggactaacatggtaacagtggagctattgagagtggtcacatttggaagatgttttgtaggaagtgtcaacaaagtttcttattgattagatgtagggaatgtgagaaagagaaggcggggggaacacgtagattttgggtcaaagcaataaatattccattgacagaattgagacagcaagttggtggaggaggggaacggggtagcaagaagcaaatgtttcatattggaaattttaagattcctatttgacatttaagagtaactcttgaaaaagcaatggatatatgaagaatcctagactagagatacaaatttgccaatcatcatatagatgtggtatttagagtcaggggactagaaagaacaatgtaagggggaagtacagatagaaaaaggtctaaggctgagccatgaaatatgccacattttagaggttgcgtagaagaggtggtagcaaaggatattgataaggagtaccagtgaggtaggagggaaaacagagaataaaacgtctcaagaaagagagatcaactatgtcaaattctcctgagaaaactattggatttggagtg

SEQ ID NO: 2521 - DNA, 1778 bp, Artificial sequence
  DNA replication origin
gccacgctgaggaaacaagacagggagcagaggcggcggggttcaggcgagcgggaagcgggaagcgagaggcgggtgtgagatggggtcctgaggctggaagggagcccggggacaactggagttgcacacgctcggaaggcgggaggcggcaaggagaaggctgccttagaggtgaggggaattggggcatgatcatgggccgcgatgttgcgtgaagcgcaaggatgtcaggaactgtgggggccgagatgtggtctagggatgggagtgggcgaagagaagtccatcggggcgggccggggggtgggactcggggagagccccggaagctgcgcggaacacccatcctcctgggtcctaggctgggacccgggctgtccgccagggctgggagacactggaggaggccggccgatgattacgcgcgatgccaacgacgactgccctacggtggaccgcggctgcccgtgtgcggaggaaagggagaggcggctgggtgctggctgcgctgcggtccgtgagccaggacggagtcccaggctgtacagtgatgggcggagagactcgcagtcctgagaagtattatgggctgtactgggagatttggagagggtggaggaggggcggtctgagggattccgggcggcaccgctaaggcgatgccgcgagcagcatccgcgccctctccttcccgccccagcccgggtttgttcagtcagggctccagcccggcggccgggaggaagaaaaggaagagggaaggagcctttacctggctctgacgcgacgggtcccaggcccccggttccgcttcccactcagagctctcctcccctctcttccccgccacccgtttctacgcagatcggtgccccagtccctggaggagcctccgccgcctccgccaactccgcaggaccccgccgggaagtagagcccacccctttaccaatcaccgcccgttttctatcgaccgatggggcccatagccaataggaagagctgataccgagaggcccggaatgagggggaggagctggcaaaacttggaggtgtgactagcactgccgaggcgtggtcacagattaagctccaccccgggttgttgaaccccgaagtagaactgatgggcgggattaaggtggaaccgacgaccaaacacaaactcttgagctaaggcatggccaattgggccggggtagagaggaggggtgttgcggggaattttaaccaataaagagtagaggccggtggagactgtagtccctcttccaataagaagcgggaagggcgtgtcttgccactttcactagggctaaggcagggtttgccgaaacctcccgaagccggccaatgagatcggaggcggagccaagctcagccgaccagaaagccgaattgatctcagcaccgttactggggcggtgcctacggtcttcaagccactaagctctcgtgaggggaggccccggagccttccaatgagggactggggctaactctagttcttccaatcggtgcgcggcgctggcaattcaaactgataccgggttggagaggcaggaaaagcggaagagggagcgaaaaccaacgtgttcggtgacagaccccagcgccgactgagcctctaaagcgacttcagctctgccccaccaacaccaccgcgcgcccgggaacagccgctccgggaagaaacctgaggggactgcggggggcacgagggacagctgagggaagggaggacgcgagagaaacagcgcaagcacgctgagggc

SEQ ID NO: 2522 - DNA, 795 bp, Artificial sequence
  DNA replication origin
gacacatccaggaaaacaatgtggtcagctgaagcaggaaacgggttagaggatagggtcggagccgggaaaaccggggggcggcgagcggaaggcagccgtcgcctccctcaagctagggacgatagtgactataaatgccacccccaatatttttttgacacccaagctcagagatcccagatatcccacccaatcccaggctggggatgggaggaggtcggtgaggtcgcagtcctgactcctcgcaccaggcggtgcccgagaagatccggccccggacgaggcccagggggctggagggacgcaagcgggagcgcggagcccggcgactagctccctcgcgtgccgcagcggcgaccctttctacttggtctttccttttcctccgagcgccgggaggaggaagctcccgctagcgtctcccacttcccgcggctggaggaaggggccacgctgaggaaacaagacagggagcagaggcggcggggttcaggcgagcgggaagcgggaagcgagaggcgggtgtgagatggggtcctgaggctggaagggagcccggggacaactggagttgcacacgctcggaaggcgggaggcggcaaggagaaggctgccttagaggtgaggggaattggggcatgatcatgggccgcgatgttgcgtgaagcgcaaggatgtcaggaactgtgggggccgagatgtggtctagggatgggagtgggcgaagagaagtccatcggggcgggccggggggtgggactcggggagagccccggaagctgcgcggaacac

SEQ ID NO: 2523 - DNA, 822 bp, Artificial sequence
  DNA replication origin
cggggccagcagggctggctggctgctccgagtgcggggcccaccaagcccacgcccacccggaactccagctggcccgcaagcgccgcacgcagccccggttcccgctcgtgcctctccctccacacctccctgcaagctgagggagtgggctccagccttggccagcccagaaaggggctcccacagtgcaggggggaggctgaagggctcctcaaatgccaccaaagtgggagcccaggcaggggaggtgccgagagcaagcgagggctctgaggactgccagcatgctgtcacctctcaatctgaattgttctaattaagatcacatactaggaatagggtgatttctccaagtttagaagaattgatttattttctgataaagatggtgcttggcaacattttttcctcaaataaccagtgagtatttattgattgaccagttctgtgcttgtacaaggcattggaaaatacaagagaagtttagggagtcattatgtggttggagagaagattttgaatacaggaagcaattagagcataaagcagtaatgatctcattaattggtgttatgtacaacatagatctgatgagaggtcagagatggttaaaggttctggaatagtctggaaagttgtcatgaagcaggtgggacctaggcttgagaggtagatttgtgtggcagaggagagaacagcaagtgcaggtgagaggaagcaggaatatttggtgatgagagggtgtaggggctagtgtgggatccagctttattaaagggaaggttcctaacacattcatctaactgatttccattgcac

SEQ ID NO: 2524 - DNA, 1040 bp, Artificial sequence
  DNA replication origin
agccgcggcggcggaggggcaaaaagccgcggcggcgggtgtgtggcagaaagccgcggcgggcaaaaagccgcggcggcgaggggggcacaaatccgcggcgggcaaaaagccgcggcggcggggggtaaaaagccgcggcgggcaagaagccgaggcggggtgggggcaaaaagtcgcggcggcggggggcaaaaagtcgcggcggcaggggacaaaaagccgcggcgggtaaaaagccgtgggggcaggggggaaaaagccacggcgaggaaaaagccgcggcggcggggggggcaaaaagcggcggggtgcaaaaagcggcggggtgcaaaaagcggcgggggacaaaaagccgcggcggcaaaattcgcagcggcaaggggtcaaaaagccgcggcgggctaaaagccctggcgccgggggggcacaaagcagcggcgggcaaaaagccgaggcggggtggggggaataagccgcggcggcgggggggcaaaaagccgtggcggcggcggtggagggcgaaataatggagatggagtggaaggccggcacagcttggcattgctggagtgcgatgtgataggaaatgagcagccaaagacaaaaagatgtaagtaggcttgactcattgaagctaagaacccagatgttatcttgagggtattaactaataagcagtttaaatcagaatgacacattctgatttgtttcttgtacgttcacatttggcaggcatagatactgtttgaagagagaaaagtcagtagagagaggtaacaaacttaaatatgtgccaagtctagaaacaagagaccagggggatagggacctttcaaaataaaatgcaagatttgaaaactgattggctgggggatgaggaaaaggcaggtctttaaggtccatccctgttttgctttaagttgttagggggtggttttatcacatgttgtagaatatgtcatttcagttttgaacatcttgagttaaattgtcctagcatatcttatgaatttgattttcttccctgggaagctaat

SEQ ID NO: 2525 - DNA, 1027 bp, Artificial sequence
  DNA replication origin
cgcggcggggtcgcggcaaaaagccgaggcggggtgggggctaaaagccgcggcgacggtggggcaaaaagccacggcggcgggggacaaaaagctgtggcggccagggctagaaagccgcggcgcgcaaaaagccgcagtggcgggggggcaaaaagccgcggcggtgggggggggcacaaagccgcatggggtaaaaagccgcgggggcagggtggaaaaagccacggcggtgataaagccgcggcggcggggggggcaaaaagcggcggggggcaaaaagcggcagggggcaaacagccgcggcagcgggtgggggacaaagccgcggcgggcaaaaagccagggcggcaaaattcgcagcggcgaagggtcaaaaagccctggcgttgtgggggcaaaaagccgctgcggacaaaaagccgaggcgcggtgggggaaaaagccgcggcggcagggggggcaaaaagccgcggcggcgggggggcaaaaagccgtggcggcggagggcgaaataatggagatggggtggaaggccggcacagcttggcattgctggagtgcgatgtgacaggaaatgtgcagccaaagacaaaaaaagatgtaagtaggcttgactcattgaagctaagaacccagatgttatcttgagggtattaactaataaccagtttaaatcagaatgtcacattctgatttgtttcttgtacgttcacatttggcaggcatagatactgtttgaagagagaaaagtcagtagagagaggtaacaaacttaaatatgtaccaagtctagaaacaagagaccagggggatagggacctttcaaaataaaatgcaagatttgaaaactgattggctgggggatgaggaaaaggcaggtctttaaggtccatccctgttttgctttaagttgttagggggtggttttatcacatgttgtagaatatgtcatttcagttttgaacatcttgagttaaattgtcctaacatatcttatgaatttgattttattccctgggaagct

SEQ ID NO: 2526 - DNA, 1782 bp, Artificial sequence
  DNA replication origin
cctccaccgctctccttcttctctcccatcggggccgagcgcagtgcagctctatgctggctgcagctgcccaggaacagagcctggggcgcgggtgtctaggcaaggaacccccgaaccgggagagctggaccaggagtgaccctcggcgctgccttagccaggacgcaggtagatctggaagctgagtctgctgatcccgccctcagacccgcggcggtgggggcaaaaacacgcgacggcggggtgaaaaagccgcaggggtaaaaacctgtggcggcgggagtaaaaagccgcgacggcggggaaaaagccgcggtgacgggggcaaaaagccgcggcggcgggggcaaaaagccgcaaaaagccgcggcggcgggcgcaaaaagccgcaacggtggggtccaaaagccggggcgacgggggcaacaatccacagcggcgggggcaacaagccagggcggccgaggcaaacagccacggcgacaaaaagctgcggtggcgggggcaaaaagatgcggtgacgggggcaaaaagccgtaaaaagccacagcatcggggtaagaaagccgcgacggcggggacaaaaaccacggtggcggggtaagaagccgcggcggcaaaaagatgcggcggcgggggcaaaacggtgcggcggcggcaaaaagccgcggcgtcgggggcaaaaagcctcaagaagccgcagcggagtgggtaaaaagccgcaaaaagtcgcgacagagggggcaaaaagcaggggcggcaaaaagccacgacggcggggacatgaaggcgcaaaaaccgtcggcggcaggagcaaaaacccgtggcggcgggggcaaaaagtggctggggtgataaaaagccgtggcggcggggcaggaagccgcgtacggggcaaggagccgcggcagcgggggcaaaaagctgcggtggcaggggaaaatagcagcaaaaagtcgcggcggcgggggcaaaacgacacaaaaagcccgggcagtgggggcaagaagccgcggctggaaaaacctgcggcggagggggaaaaaagccgcggcagcgggggcgaaaaggcgtaaaaagccgcggtggcgggggccaaaagccgcggcggcaaaaagccgtaaaaagccggggcggcaaggcaagaagccacggcgggaaaaacctgcggcggcggtgacaaaaagccgcggcggaaaaatttgcggtggcgggggcaaaaagctgcggcagcagggggaaaaagccgcaaaaagccgcgtcagctagggcaaaaatccgtggcttcaggggcaaaaagccgcagcggcggggggagaaagaggcaaaaagctgcagcggcaaaaagcctcggcggcgagggcaaagagccccaaaagccgcggcggcaggggctaaattccgcgaggccgggggcagaaagcaacggcggcgggggcataaagccgcaaaaacccgcagcggtggggtcacaaatccacgacggcaaaaagccgcgtcggcgggggcaaaatagtggaaatggggtagaaggccagcacagcttggcattcctggagtgtgatgtggaaggaaaagtgcagaggaagacaaacaaagatgtaagtaggcttgactcagtgtagctaagaacccacatgttatcttgatgttatctatcagctaattttttgtattttagtagagaaggggttttaccacgttggccaggatggtctcgatctcctgacctcatgatccacgcacctcagcctcccaaagtggtgggattagaggcat

SEQ ID NO: 2527 - DNA, 1532 bp, Artificial sequence
  DNA replication origin
cgtcaccgcatctttttgcccccgccaccgcagctttttgtcgccgtggctgtttgcctcggccgccctggcttgttgcccccgccgctgtggattgttgcccccgtcgccccggcttttggaccccaccgttgcggctttttgcgcccgccgccgcggctttttgcggctttttgcccccgccgccgcggctttttgcccccgtcaccgcggctttttccccgccgtcgcggctttttactcccgccgccacaggtttttacccctgcggctttttcaccccgccgtcgcgtgtttttgcccccaccgccgcgggtctgagggcgggatcagcagactcagcttccagatctacctgcgtcctggctaaggcagcgccgagggtcactcctggtccagctctcccggttcgggggttccttgcctagacacccgcgccccaggctctgttcctgggcagctgcagccagcatagagctgcactgcgctcggccccgatgggagagaagaaggagagcggtggagggggtgacgcggctatcgcggagggaggcccaggggccgcagccagccgggtgctgcagcagtgaggacagcttcagaagctcatcggcatctcccttggcagcctgcgggggctgcgcaccaagtgcgctgtgtccaaggacctcacccagcaggagatacagaccgtgcaggtaaggggatcggggaccagggctgggctccagcaccgggctggacatctccctctgggcccaagttaactcctggccgagttgcatccttgagcccgcgtcacccccttggaggcttctcctcccttctgcactggctgatgcggcagccggaggacccgagaccagccctcaccttgggcaggatttgtggggtgggtgcgtgttgggaactgtgatggaggctcaaggggcccgtgggaggggtgggctgcgtgcggacatccccttacgccccgaatttccatctggtgcagccttctcatcttgtaggtgaggaaaccgaaggcctgagggagaaaggacttgccaggaacccctgttagggaaaattaacaaagtgtggttatcaaaggagaactgagttcagattcagacctggagtcccacacccttggttgagacattatatcaccttgagtctggcctgttgactgagggtgaggcactccatcctcgtctgattgtggggtcttgacctcaaggggtttcctgcaggaagaagcaaatgggtttgctttcctacctctgtccagtactttagggaccctgagaactggagagattcttggagagccatctggtgtatgtcatgggtgggccttgtttgaaggtcagtctgcccagtgggctggctcagcccgaatgaactgtcttgaatctttggagacgtctgggtagttttaagggtttctcatccttgcaccaaaagatcccctggaaattacgtgggaaaaccttaacttttgtggagccttgtatttgtcttaaaagttcatgcacatagccatgtgt

SEQ ID NO: 2528 - DNA, 1271 bp, Artificial sequence
  DNA replication origin
acgtttgttacactgagaaaaatctaatagagctaaaaataaatattaatttggaaaggtcattagatactgatacattcttacgtttatacattctttcatatattcatatattcttttaacagtatcaatggtttggagttatgtgtacaaaaccatgacctatatgtaatacaactaataacaggcatttacaattcaaggcatattatatacaaagctttaacttcttatcaaaatattttgttttttttctttctgttttggcagatactatgaacactacattcaactcacagacaccatggagcccttactaagcataaagtactgtgaaaggccagggctaggacagaactgagacagggccagggataggacagaacaggggcagggtcatggccagagaaaaaccaggggcagggtcacggccagggacatgagaggaccaaggccagggccagaagcagggcagaaccagggccagggcagggacatggcagggccagggccatggcaggatcagggtcagcagaaggccagggcagggctagggtagcgcagggccaaggcagggcagggtcagtgtagagcaaggaacgggccagggtatggcagggcagggacagggaggtccagggccagagtcaggtccaggacatggacaggacagggccagaaatatggcaggaccagaaaggggacagggcaagggcaaggccagagaaggaccatggaaaaaacacggccagggagggtccagggcaagggcaaggccagggcagaaccagagccagagcaggccaaaggcagggccagggcagggcaaggccagggtagggcggggccagtgtagggtgagggtagggccagggtgagttcagggccagggcaggactaagatagcacagggccaaggcagggccagggcagggccaaaaggaggggccagggccaagcatggccagtgtcagacctggggattgtcagggccagggtcagggtcaaggctgggccagggacagggccagagcaagggcagggccagggagaaagcagaaccagagaggatccagagcaaggccagggtcagggcagaaccaggaccaggataaggcaaagccaaggccagggcagggcaaggccagggcaaggcaagaccagggaagggcaaggccagagtagaaaaggccagtgtagggccaggccagggtaggagaaggccatggtagggccaaggccaaggcagggcagggctagggtagcacagg

SEQ ID NO: 2529 - DNA, 2018 bp, Artificial sequence
  DNA replication origin
gccgccgctgtccgcctctccgccgctgtccgcctctccgccgcgccgccgctgtccgcctctccgcctctgtccgcctctccgccgccgtccgtctctccgccgcgccgccgctgtccgcctctccgccgccgtccgcctctccgccgcgccgccgctatccgcctctccgccgccgtccgcctctccgccgcgccgccgctggccgcctctccgccgccgtccgcctctccgccgcgccgccgctggccgcctctccgccgccgtccgcctctccgccgcgccgccgctggccgcctctccgccgccgtccgcctctccgccgcgccgccgctgtccgtctctccgccgcgccgccgctggccgcctctccgccgctgtccgtctctccgccgcgccgccgctggccgcctctccgccactggccccctctccgccacgccggcgccagcgctgtgtgcctttgcgagggcggagctgcggtctcctcagcacagacccggagagcattgcgagggcggagctgagttctcctctgcagacttcggagatacagcgaaggcagagcaatgttctcctcagcagagacgcgggcgggcgggccggtggcaccgcgagggcggagctgcgttctgctctgcacagaccttgggggcactgcctcgctttgggacaactcagggccgcatggacagtgaataaaatccttcctgtttgcagccctgtttgtggttggtggcagcgatggacactgcagccagccagagcgtagaaaggcgtcggggtaagtgcactatccaggctgcactgtgggtggcctgggacgggttgggagccctatctcaggcgtcactgcccgtcttgggtggccggttgggtgtgctatctggggctgtgctgcctgcaccgggcggggggggggtggtttgggggccaaaccggggctgcactgcctttggtggggagccggttgggggcactatcccagactgtattgctggcaacagtgaggtgggctaagtgtgctatccggggctgcactgtgcggctgtcgggggggtggcggtttcgggttgagggcgctatggggtgctgtaatgcccatggtgtggggaggcggggcagtttgggtatgttgggtgtgctattgggggggtgacactgctggtggtagggggcagggtgggttgggggccatatcaggggctgcactgatggctttagctaggatttctggtactatgttaaacaacagtggtgacagggggcatccttatgttccagatcttagaggaaaagctttccatttttccccattccatatgattctagctgtgggtgtctttcctgtagtttttattacgttgcggtatgtttcttctgtgcccgtttctttgaggatttatagcatgaagggatgttgaatttcatcaaatgctttttcagtttcagttgacgtgatgatactgtttttgtcgtttatttggttgatatgatgtatcacattgtatgttgagtgacccttgggtcccagggatacatcccacttgatcatgatgaattatctttttaatgtattactgaatttgattcactggtattttgttgaggatttttgcatcaatattagagatcctggcctgtagtttccttctttgatgcttttgtctgattttggcatcacagtaataatggtctcatagaataagtttggaagtattccctcctgtttttcaaaatagtttgagcaggattcgtactaggtctttaaattgtttggtgtgaagccatcagcagtgaagacatcagttcctgggcttttctttactgggagactttttctgatggcttcaatctcattacttgttaccaatctgttctggtcttggatgttttcattgtttaacctaagtaggttgtatgcatctaggaatttgccaatttctactaggctttccaatttattggcatatagtagccagttatgatcctttgaatttctgaagtattagttgtaa

SEQ ID NO: 2530 - DNA, 1581 bp, Artificial sequence
  DNA replication origin
cggacggcggcggagaggcggccagcggcggcgcggcggagaggcggacggcggcggagaggcggatagcggcggcgcggcggagaggcggacggcggcggagaggcggacagcggcggcgcggcggagagacggacggcggcggagaggcggacagaggcggagaggcggacagcggcggcgcggcggagaggcggacagcggcggagaggcggacagcggcggcgcggcggagagacggacagcggcggagaggcggacagcggcggcgcggcggagaggcggacagcggcggagaggcggacagcggcggcacagcggcggcgcggcggagagacggacagcggcggagaggcggacagcggcggcgaggcgcgcagcggcggcgcaggcgcggagaggccgtggcgccggctctggcgcggagaggcgcaggcccaggctccactccccagctgtgaaagggtaagaaccgagggtggctgagactcggggttgttcagggcggggtgggctctggacccagcaggcccggcacccaggtcagggctccaggggaggccgggtgggcgaaggccaagaaggggctggggctggtcaggaagggctcctggtgaccggagcactttgcgtgagccagcgtgggaggaaggtgggctggatgagccagggaggcgccgggaggggccttggcagaggcgaccccctccgtcacccccaggccactgaaccctgggtagcggagaaccgacaggggaggctgcagacagaggagtggaggctccccggctttgggggctctgagtagaagcatctagggtgtccctcaagaggcccccaaacgcttccccatggtgagaaaagaaggtgcagagaggggcacggcgctggtgcagaggggcacacagcgagatttgctgtgagttcttttattgccccaagtgtacctcatcttggtagatttctattggctttaaaaatgtgtgtgttttgctgttggggagtggggtattatacggatgtcagattttgctggttgactgttcagatcttttgtaaatccttgctccttttgtgcctagtttcactctgtcacttacactagagtgcggtggcacgaacatgactcactgcagccttgacttcctagggtcaagtacttcccctggcttaacctcctgagtagctggtactataggtgtgtgccgccacacctggctaaatttaaaattttttggagagatgaggccttgctatgttgcccaggctcgaactcctggcctcaagctatcctttgtttttgcctcccagagttctgggattacaggcatgagccactgtgcccggcctctgcctagttttaacagttgctaagaggaggatgttgaagtagatgtcttcttggtgggttaatccttttgtcattaagcagttgttatggtcacttcctcttttcaccccattggtgaaggaggggtccctgccctaaagtgtaggagatggctgaacacgacacctggcgtggatggatgcgattgacagcagtgttttagtcacatatacccacagctcagaggagga

SEQ ID NO: 2531 - DNA, 834 bp, Artificial sequence
  DNA replication origin
tagtgtgagccagactccatagagacagtgacggcaggacacatgcatgggggtccaccttcccagagctggagcccacatagctccaggacctcaagggaagcccagggtctgaggggcccaggaggcccatccatgtgatggacccaaggagactttggtggcttctctgttaagatttgaagggggccaggtgtggtggctcacgcctgtaatcctagcactttgggaggctgcagcagggggatcacgaggtcaggagttcaagaccagcctggccaacatagtgaaacctcatctctactaaaaatacaaaaataaaaataaaaaattagccgggtgtggtggtgggtgcctgtagtcccagcagtttgggaggctgaggcaggagaatcgcttgaacccaggaggcagagattgcagtgagctgagattgtaccactgcactgcagcctgggagacagagcaggactctgtctcaaaaaaaaaaaaaaaaaaagatttgaagggagcccagggggcaggactgggtgggcacaggatggagacagtgacacccttggtcttgggtggcccctgccagccccagcatatcctcagcagatagggtgacaacagcgcctctacctctagtgggaggcgcaagagaaattcacacgatgcacttgcctgggcttggtgagtggaaagctccccactgactcgagggctggtggtgaggatggagagggaggtggagatggaggcgacagcatgggcagagcaagagcacagccgtggaagggaggtcctcccagctagcctttgggaggcccatggccagtctcggggcag

SEQ ID NO: 2532 - DNA, 986 bp, Artificial sequence
  DNA replication origin
gcccccgacaacctgccccgtctcctgtcacttcccgacgcccgccctcccctcttctgccccttcgtcctcagtcaaggtaccaccctgtccacttacccagcgccccaccccgctgacccgggattctacgagctcccttgcccactgcccctcactgggcaacgcccggggcagccatctgtcccctccgggacccacgcggaccgctcccggctcctgatccctgggacactggccagccctgccccgacactagcgcgtcctcccgcacctccgcccgcgcgcccggcccccgcccaccgtctgcagccctcactcctgcgccgacgcccacccacccagcccctgtcccggcgcctcagaaacgctgggtgacgagagatgcctcccagagtcccggggttgcggggctggggagagggggtcttccagagccagcccgaagtggggtgtgcgcggggggcgtggctgctgccaagtggggcgcacggggctccacaggggcgtgctatgctccgggccttccccgagggtctccgttggggaacccagaggtccaggtgatcctgcctgggtccgtgtccgagcgtccgatggtctgtccttgtccctgcgtatttctgtattgtcttctctgtgccggtcactctgtgtctggccgtctgttttcgggtgtgtctggttaggggtggaggagcgccagtcactggctctctgaattgggggaggggccgccttctgtgggtttttctgtttgtccatctggtgtgcctgtgtgtcggctgcgagacgcccaggcgcagaataagacctgagccactttctaagaaaagagaccatcccgcaccctcccccaaaggagcggcagccattctggacgcagaggagctggaatgagggaggccccagggtctgccctggggcaaccggcgcccaagcatctccaccagccccttccaaagccccggtgcctgccttgcacc

SEQ ID NO: 2533 - DNA, 823 bp, Artificial sequence
  DNA replication origin
agagagccagtgactggcgctcctccacccctaaccagacacacccgaaaacagacggccagacacagagtgaccggcacagagaagacaatacagaaatacgcagggacaaggacagaccatcggacgctcggacacggacccaggcaggatcacctggacctctgggttccccaacggagaccctcggggaaggcccggagcatagcacgcccctgtggagccccgtgcgccccacttggcagcagccacgccccccgcgcacaccccacttcgggctggctctggaagaccccctctccccagccccgcaaccccgggactctgggaggcatctctcgtcacccagcgtttctgaggcgccgggacaggggctgggtgggtgggcgtcggcgcaggagtgagggctgcagacggtgggcgggggccgggcgcgcgggcggaggtgcgggaggacgcgctagtgtcggggcagggctggccagtgtcccagggatcaggagccgggagcggtccgcgtgggtcccggaggggacagatggctgccccgggcgttgcccagtgaggggcagtgggcaagggagctcgtagaatcccgggtcagcggggtggggcgctgggtaagtggacagggtggtaccttgactgaggacgaaggggcagaagaggggagggcgggcgtcgggaagtgacaggagacggggcaggttgtcgggggcgtggggtaggaatcggaggggagttgaaaaggggggtgctggttgcagaggcgtcggggcaaggacaggagccaggagcgcaggcggggcccgacggcagccac

SEQ ID NO: 2534 - DNA, 1128 bp, Artificial sequence
  DNA replication origin
gggaggccaaggcaggaggatcccttgaggccaggagtttgagaacaggagacaacacaacgaggctctatctgtacaaaatataacaaaacttagccaggcaaggccatgtgtacctatagttccagctattcaggaggctgaagtgggaggattgcttgagaccaggaggaagaggctgtagtgagctgtgactgtgccactgcactccagcctgggagatagagcaacattgtctcaaaaaaaaaaaaaaaaaaaaaaaaaaaaaaaaaaaagatgtggcagccccttgagaaaggaagagctcctatcttgacgatttcagccaatgcccgtgagtaccagcaggagcctctatccctctctgccccaccctgcatccacgcattcattacatcattcatcccccctcattttctcaacacccacttgtgccaggccctgaggtggctctaggaccgagagacagggatcacagagctccccagtggagtggagggtacagacatgtcgacaagaacactggaacccagtgcgggctgggagcgtgtggtcagacctgcaaagcggggaagagaagggggtcggagaagcttcgcggggagaatggggtgaggcctgaggcctgtctcggaaagcagaggggcaggtgggagagtggaaaagacattcctggaggagggaaccaaaggtgctgaatgtgcagaggcagagatcctgtgacaggagagaaagtcctcgagaatgaccccagcataggatgagaacaaagaaggggatcaaaggaaacgggccctcggtggccgggtgctagaaggctctgagtgtcaggagagggagcgtgacctccctcatggggtcagtagggccactgtatggctttaagccagggaaggacaggagaggtttctgtaactgtggctgtaatgatggaagcgtctggaggcggagaggaggctcctgcgacgacccaggcttcagagagagagagagagaggaaagaaggaagggcagataggaaagctaggaaagatgcacagagagaccaaggcagaaaaggctgaagggaagacggcagtggtaggaagggggcagagccgtctcaggatgcagccagcgggcgaggag

SEQ ID NO: 2535 - DNA, 1019 bp, Artificial sequence
  DNA replication origin
gcaaccattcacccatagactcaggcgccaatgctcggagtcaacctgaaaggaggcagagagagaggaagaacaaaaaaacacagatggatggatggacagatggatggatggatggaaggatagatggatggatggatgatgaataagtgtggatgggtggatggatgcatggtggataaataagtgaatgatgatagaagctccagggaagaggatgatggttctgggaagttaactgcacttcaatataaagaagagcattccttggataaggatagactgagtagaaaaaagaagaaagaggaagaagaagaagaagaagaagaagaagaagaagaagaagaaggaggaggagggggaaggggagggtgggaagggggaagggagggggagggagagggggagaaggagaggagaaggagaaggaggcacattctaaatgcaccaggctgggcgtggtgtctcatgcctgtaatcccagcactttgggaggcaaaggcaggcagataacctgagctcaggagtttgagaccaactgggccaacatggtgaaacactgtctctactaaaaaatacaaaaattagccaggtgtggtggcatgtgcacctgtagtcccagctaatcaggaggctgaggcaggagaatcacttgaacccaggaaatggaggttgcagtgacccatgatctagccactgcactccagccttggcaacagagtgagattccatctcaaaaacaaaaacaaaaacagcagaggagagaggaagagaggaaggaagagaaagagaggagagagggaagagggatagtggagggaaggctagaggaaggaagagaggaaggaagaatgaaggaggagaagagagaaagaaaatgaggaaaaaaataaggaaagggaggctgggcatggtgactcacactggtaatcccatcactttgggaggctgaggcaggcagatcacgaggtcaggagttcgagaccagcctggccaacatgatgaaaccccgtctctac

SEQ ID NO: 2536 - DNA, 966 bp, Artificial sequence
  DNA replication origin
ccccaccagccgcccaccacagcgttcatgatacagcttcggagtgtgggtcggggtctatctgggaaaccagggcaaaggcggtggcagctggcagcacccacacccacagctggggcactgctcacatgagcccccatcagcaggccccttggttgtgccacaggcaggggtcctgccccagggagggggtagtccgggggagctcgagggtgtggcacaggccagctgtcactcctccctggagaggcagctggggacgcagctgggaggggagccaggagcagagacagcccggggccagcaggtgggtgacaggtggggcagcgggaggggcatgcgctgtccgcctggggctggggtgtagagacgggaacctgccccccaatgcctggtgctggcccagcctccccccggggtctctagcaccttcccagttgtgtctgcaccctcctgggcatggcgggggagggtgggggtcaacccctttccttgtagtcccgtgccagtgggcaagggagacgccccagtgagcaggagcctagcctctctgcctggggaggccaggtgatgagccacccggagtgggagggggccttgaacttgggtctgaaagatgagcaggggtttgctgggccgggtacaggcaagagctaatgcaggaaggcagagagcaggagcgcttagagggagtggctctgtgcagccggagtcagatgggtgaccctcactcaggaggaagcactgggaccctctctcctcacgctgggtcccccgcctccctctaggatccccacacccaggtccttctgggcctctgccacacagatcaggtctggaaggctccctggaggaggcggtgcctagacttggacataggcctgcagagctggtttccctcacaaccctgggaagacagaactcctcagcgggttgatgtggaggagggcggagcctccctccaag

SEQ ID NO: 2537 - DNA, 1034 bp, Artificial sequence
  DNA replication origin
gcagcggcgatggggcaaaaagccacggcggcgggggtaaaaagtcgctgcgggcaaaaagtcgcggcggcggggagaaaaaggcgcggcgggcaaaaagccgtggcgcagggggacaaaaagccgcggcggggggtggggaagccacggcgggcaaaaagccgcggcggcgaggggcacaaagccccggcgggcaaaaacccgaggcggggtggggtctaaaagccgaggcggctgggggtaaaaagccgaggcgggtaaaaagccgtgggggcaggggggaaaaagccacggcggcgggggggcaaaaagcggaggggggcaaaatgccgcagcagcgggggacaaaaagccgcggcggcaaaattcgcagcggcgaggggtcaaaaagccgcggcgggctaaaagccctggcgccggggggcacaaagcagcggcgggcaaaaagcctaggcggggtggggggaataagccgcggcggcgggggggcgggaaaaagccgcggcggtggcggcggagggcgaaataatggagatggagtggaaggccggcacagcttggcattgctggagtgcgatgtgataggaaatgtgcagccaaagacaaaaagatgtaagtaggcttgactcattgaagctaagaacccagatgttatcttgagggtattaactaataagcagtttaaatcagaatggcacattctgatttgtttcttgtacgttcacatttggcaggcatagatactgtttgaagagagaaaagtcagtagagagaggtaacaaacttaaatatgtgccaagtctagaaacaagagaccagggggatagggacctttcaaaataaaatgcaagatttgaaaactgattggctgggggatgaggaaaaggcaggtctttaaggtccacccctgttttgctttaagttgttagggggtggttttatcacatgttgtagaatatgtcatttcagttttgaacatcttgagttaaattgtcctagcatatcttatgaatttgattttcttccctggaaag

SEQ ID NO: 2538 - DNA, 1208 bp, Artificial sequence
  DNA replication origin
cctcacttcccagtaggggcggccaggcagaggcgcccctcacctcccggacggggcggccggccgggcggggggctgacccccccacctccctcccggacggggcggctggccgggcagaggggctcctcacttcccagtaggggcggccgggcagaggcgcccctcacctcccggacggggcggctggccaggcggggggctgatccccccacctccctcccggacggggcggctggccgggcagggggctgaccccccctcccccctcccggactgggcggctggccgggcggggggctgacccccccacctccctcctggacggggcgaccggccgggcagagggtctcctcacttcccagtaggggcggccgggcagaggagcccctcacctcccggacggggcggctggccgggcggggggctgaccccccccacctccctcccggacggggtggctgccgggcggagacgctcctcacttcccagacggggtggctgctggacggaggggctcctcacttctcagacggggcggttgccaggcagagggtttcctcacttctcagacggggcggccgggcagaggcgctcctcacatcccagacagggcggcggggcagaggtgctccccacctctcagacgatgggcggccgggcagagacgctcctcacttcctagatgggatggcggcggggaagtggcgctcctcgcttcctagatgggatggcggacgggcagagacgctcctcactttccagactgggcagccaggcagaggggctcctcatatcccagacgatgggcggccaggcagagacgctccccacttcccagacggggtggcggccgggcagaggctgcaatctcggctctttgggaggccaaggcaggcggctgggaggtggttgtagcgagccgagatcacgccactgcactccagccttggcaccattgagcactgagtgaacgagaccccgtctgccatcccggcacctcgggaggccgaggctggcggatcactcgcggttaggagctggagaccagcccggccaacacagcgaaaccccgtctccaccaaaaaaaaacgaaaaccagtcaggcgtggcgacgcgcgcctgcaatcgcaggcactcggcaggctgaggcaggagaatcaggcatggaggttgcagtgagccgagatcgcagcagtacagtccag

SEQ ID NO: 2539 - DNA, 988 bp, Artificial sequence
  DNA replication origin
cgcccggccagccgccccgtccgggagggaggtgggggggggtcagccccccgcccggccagccgccccgtccgggaggggggagggggagtcagccccctgcccggccagccgccctgtccgggagggaggtgggggggtcagccccccgcccggccagccgccccgtccgggagggaggtggggggatcagccccccgcctggccagccgccccgtccgggaggtgaggggcgcctctgcccggccgcccctactgggaagtgaggagcccctctgcccggccagccgccccgtccgggagggaggcggcggggggggggtcggccagccgccccgtccgggagggaggtggaggggtcagccccccgcccggccagccgccccgtccgggagggaggtgggggggtcagccccccgcccggccagccgccccatccgggaggtgaggggcgcttctgcccggccgcccctactgggaagtgaggagcccctctgcccggccacgaccccgtctgggaggtgtgcccagcggctcattggggatgggccatgatgacaatggcggttttgtggaatagaaaggcgggaagggtggggaaaaaattgagaaatcggatggttgccgggtctgtgtggatagaagtagacatgggagacttttcattttgttctgtactaagaaaaattcttctgccttgggatcctgttgatctgtgaccttatccccaaccctgtgctctctgaaacatgtgctgtgtccactcagggttaaatggattaagggcggtgcaagatgtgctttgttaaacagatgcttgaaggcagcatgctccttaagagtcagcaccactccctaatcttaagtacccagggacacaaacactgcggaaggctgcagggtcctctgcctaggaaaaccagagacctttgttcacttgtttgtctgctgaccttccctccactattgtcctatgaccctgccaaat

SEQ ID NO: 2540 - DNA, 1087 bp, Artificial sequence
  DNA replication origin
tcgttttctcagcccctgcggcccctaacctgctccaacccgttgtgcggtagaggcggccgtgtccttttaagtctctgctacgcctgcgctgggcggcggtagagacagcggcggtgctgggaggggtaggtgagggtcgcgaggctgcctgagcttctaagtgagcctgatgcttttgggaacgcggaacgggcgacctgcggtgccaggagcgaagccgaggcaccgcgccgctgccgcctggatgggaagttaaggtttactgcgaagtccacccagcgttccgaggtgagggcgccgcgccaggtcaggcgggcggcgagtctgggacctgcgggcgcacagctgggctgaggcgcggcacgcgggggcccccgcaagttttgccacgcgagtggggctgacgcgccgggccccaccggggctactttccctgcgctggattcctcgcttgcggctgccgcccgcagcctcctctcatgggcgctggggaagaaactcgctggcgggtgttctgtggcatcccagggggtggaggaacggagcagcttggggggcacgtcctcggaagtcctgtggagcacactgaccccgcaccccaccctcgtggcggtttcttctgggaacctgaggggcaagagtgctcgcgcccctgacttgcaaagctggggtctttattggcctcagggattgtgctcctggcggtgtctccaggctggtgatgggcaagccaggtgtaccaggtccaggatgcacgtaaggagcgtttgtagccatcactgaatcacctcatgactagcgggacaagcctcaaattcacagcaggatttctggtaggttggactgtggtgttggtgtttgcagtccaaagagttgctgtgattttcctgtgcctgtctgtctgtctttctttccttgaggcttcttagatcatctcatttggcgtcctttcacccaagagttaaccaagacttttggaatggtttcctcgctttcctcctaccttttgctggtggagctgctttcgaaaagaagcactttaagaggctgacgtggcggatcatgaggtcaggagattgagacc

SEQ ID NO: 2541 - DNA, 1637 bp, Artificial sequence
  DNA replication origin
tccacatagtaattgcacctctaccctatagaaatacttacaccagtggctgaaagtgcccatacaagaatgactagagcattatatgtaatagtaaaatcacagaaccaatttaacctcaaaagcgtatggaaagggctaaatgaatgacagagagtgtcaggcgcggtggttcacgcctgtaatcccagcactctggggaggctaagcgggcggatcatcaggtcaggagatccacaccaccctggccaacatggtgaaaccccgtctctactaaaaaatacaaaaattagctgggcgtggtagcttgtgcctataagcctagctactctggaggctgaggaaggagaattgcttgaaccagagagtcggaggttgcagtgagccgagatcgcgccactgcactccatcctggcaacagagcgagactccgtctggagagggagagggagggggagggggagggggagggggagggggaggggcagagggggagggagagggagagggatgagaggagggtaaagttggtctcgctctgcctttccatgagtgcatgtgctggatagaagaaagttgccagcggtttaagcatttttaaaatgcaggaaacgttccatagaacgagctcgaaccacccgcctccagacttggaagcaagcacaccacccgactgcgacacaggaacagtcgactctcgctctggtatcaccacgcagagcaagcgtccatctaacgttaggcggagccaccgccttttgtagaacaattgtgcaggctccaaagcctcggaaaaccggagaggggcagcttgccggctacggttgaaacccgtgcattgggtgattctgaagctggaagggcagcggaatggccttcgcctcgtcctgcccctcgcaggcatcagacccagcatcctggaaacgcccgggtccgcgactccctgagcctgaatcgcgtgggtccgaagggaagcaagcagaacgcccggtgggctctagtgacagctctcgcagttcttggctccgccttcacctgactcgctacgctgcttgcgctaccctcgctcacctctgcttcggtcggtccggcgggagagaggaagggtgaaaagcagaaatacggagaggccggagagaagtagaggaggtgcgaatgaggacagagagacctcgcgagagaggcccaggctggagtggaggagataagaatttttctcatcacatatgaggattgggaggaagggagggaaaagcagagcgggtatgaaagaatagcgcgatccccctgtagctgtctgggaacaaagccgcctaataatcgaaatctattgatgtcaaaattagtagagcaagctcagctatcatcgcttggcctgtggctcgccatgatcgtatagtggttagtactctgcgctgtggccgcagcaacctcgattcgaatccgagtcacggcaatgtcgttcttccaggccgtcagctatccactttcgctccctgcaaccaggcgcctcagggaaaggaaaagagacctcacagcccactaacctggcgaggaatccaagggaagcgctggacgtgctccgtccatttccgagcctcacacagcaaataacccagtcagccctgttggtggct

SEQ ID NO: 2542 - DNA, 1282 bp, Artificial sequence
  DNA replication origin
ttggatgactttgtttctgtctttgcagcatataaagtgttaacatgaggtaagcgctaaggtctagagaaggcagtgaagagatggcaaaacgactccagcaccatgcctgagtgtccagtgtgctctgctggggcagcacatttttgtacattgctgtatttgaaaaaaaccctacaagattgatgaaactggacagccgtctttataatattcctagtgataaaacaagtaaggatggctggtttgcagtcatctgagcagcctctctagtttcatagatactgtttctctctgatattgaacgacttccactgtcaagcggaatggtacatcacaaggataaccgtatgtgaaaagaaccggttttctttgtaatcctaaactttctagtttgcgcattaaaagccattactcaaagaagagcgcccaggctccagctggccgccaaaggggtccttggcatcacaggctaagaacctacttctttgggagagaccaggggtggggaagggagggaaaggagatagaggtagacttcacttcctccgccggctcccgcagcgggttggtcggctgagtggcggagggtcgggcggaagagcagatggggaccgggaaaggcgctgtcggtgacatcacggatagggcgattcctacgtagatgaggcagcttaggggctgctgcttcccacgaaggatttctcctgctttgggagcaagtccaggaccgctggttggacgtgagagtcccagctgtgtgtcagggctaggagggctccgggtggcatggggcggggtgggggtgggggtgcgggtgcgcggggcaagtgaccgtgtctgtaaaggttgaggcgtatggagctgtcgcagggcggagatgtgtgaactcacacttacctggcaggggagatagtatgatcatgaaagtggtttttccagagcgaggcttatccattgcactccggatgtgttgacctctgcgatttccccaactgtgggaaactcgactgcgtaatttgtggtagtgggggactgcgttcgcgctttcccctgaattttccagtgcaaaaagcagttggtatgcaaaggtctacttctcgcttttttttgctgtataatcttggtggtggtgtgttattcttatagccggatggcagggaaacaggaagtaacatgtcgccgtcgttcctgccggaaaaataagcgtcaggcgttgtgttcctgtttaacacaagctaagtagcgcgaaggccgcacagctccttcctttcaacatgag

SEQ ID NO: 2543 - DNA, 1083 bp, Artificial sequence
  DNA replication origin
tgggcagccaggcagagaggctcctcacatcccagacgatgggcggccaggcagagacgctcctcacttcccagacggggtggcggccgggcagaggctgcaatctcggcactttgcggggccaaggcaggcagctgggaagtggaggttgtagcgagccgagatcacgccactgcactccagcctgggcaccattgagcactgagtgaacgcgactccgtctgccatcccggcacctcgggaggccgaggctggcggatcactcgtggttaggagctggagaccagcccggccaacacagcgaaaccccgtctccaccaaaaaaatacgaaaaccagtcaggcgtggcggcgcgcgcctgcaatcgcaggcactcagcaggctgaggcaggagaatcaggcagggaggttgcagtgagccgagatggcagcagtacagtccagctttggctcggcatcagggggagaccgtggaaagagagggagagggagaccgtggggagagggagaggagggagagggagacgagggagagggagaggaggacttaaaaaaatttttatctgaggaatgtgagccctttcaaatgatcaggcccagagagatgttaaatcgagagagaaacccctttccattccttccttttgagctatgtattcatctgttgaaactgcttgatatcgcctcaagtcgctgtaaattatcctaataatgccacaccaaacactataccccatagcctataacttaacaacataaagccaatcaccaatcaatgttatttctgtaaaccaatgagaattcctgacaggcacctttctatcagcctactgtctgtccctgcttttgaccttaaaaacctgcttgtgacaaaagccaaagggagctcagatccaaggttccttgggtgtgagtcttccaggcagctgtcttcatgttggctcaagtaaactctatattatgttttgtgcttcagcctctttcttttaggtcaacatgttcaacaacagtcaaatgaataaataagttaatgtatattcatacaaagtaagacacacagaaacaaataaccatatgaataag

SEQ ID NO: 2544 - DNA, 1162 bp, Artificial sequence
  DNA replication origin
tcctctcttcccagtaggggcggccgggcagaggcgcccctcacctcccggatggggcggctggccgggcggggtctgacccccccacctccctcctggacggggcggctggccgggcagaggggctcctcacgtcccagtaggggcggccaggcataggcgcccctcacctcccggatggggcggctggccgggcccggggctgacccccccacatccttcctggacggggcggctggccgggcagaggggctcctcacttcccagtaggggcggccgggcagaggcgcccctcacctcccggacggggcggctggccgggtggggggctgacccccccacctccctcccggacgggcagctggccgggcagagggatgaccccccaaactccctcccggatggggcggctggccgggaggggggctaacccccccacctcccttccggacggggcggctggccgggcggggggctgacccccacctccctcccagacggggtggctgccaggcagagacgctcctcacttcccagacggagtggctgccgggcggaggggctcctcacttctcagagggtgtggctgctgggcggaggggctcctcacttctcagacggggcggttgccaggcagagggtctcctcacttctcagacggggcggccgggcagagacgctcctcacatcccagacggggcggcagggcagaggcgctccccacatcgcagaagatgggcggcctggcagagacgctcctcacttcctagatgggatggcggccgggcagagacactcctcactttccagactgggcagccaggcagagaggctcctcacatcccagacgatgggcggccaggcagagacgctcctcacttcccagacggggtggcggccgggcagaggctgcaatctcggcactttgcggggccaaggcaggcagctgggaagtggaggttgtagcgagccgagatcacgccactgcactccagcctgggcaccattgagcactgagtgaacgcgactccgtctgccatcccggcacctcgggaggccgaggctggcggatcactcgtggttaggagctggagaccagcccggccaacacagcgaaaccccgtctccaccaaaaaaatacgaaaaccagtcaggcgtggcg

SEQ ID NO: 2545 - DNA, 1007 bp, Artificial sequence
  DNA replication origin
ccctactgggaagtgaggagcccctctgcccggccagccgccccgtccaggaaggatgtgggggggtcagccccgggcccggccagccgccccatccgggaggtgaggggcgcctatgcctggccgcccctactgggacgtgaggagcccctctgcccggccagccgccccgtccaggagggaggtgggggggtcagaccccgcccggccagccgccccatccgggaggtgaggggcgcctctgcccggccgcccctactgggaagagaggagcccctctgcccggccagccgccccatccgggagggaggtgggagggtcagccccccacccggccagccgccccatccgggagggaggtggggaggtcagccccccgcccggccagccgccctgtccgggagggaggcgggggtgtcagccccccgcccggccagccgccccgtccgggaggtgaggggcgcctctgcccggccgcccctactgggaattgaggagcccctctgcccggccaccaccccgtctgggaggtgtactcaacagctcattgagaacgggccatgatgacaatggccgttttgtggaatagaaaggggggtaaggtggggaaaagattgagaaatcggatggttgccatgtctgtgtagaaagaggtagacatgggagacttttcattttgttctgtactaagaaaaattcttctgccttgggatcctgttgatctgtgaccttacccccaaccctgtgctctctgaaacatgtgctgtgtccactcagggttgaatggattaagggtggtgcaagatgtgctttgttaaacagatgcttgaaggcagcatgctcgttaagagtcatcaccactccctaatctcaagtacccagggacacaaacactgcggaaggccgcagggtcctctgcctaggaaaaccagagacctttgttcacttatctgctgaccttccctccactattgtcctgtgaccctgccaaatccccctctgcgaga

SEQ ID NO: 2546 - DNA, 2881 bp, Artificial sequence
  DNA replication origin
tgcctcgttaaataattaccagccattattccagaggtcacaagatttgcagcttccccaattactgctgtgaagaacatcactattgtagaacctaagattggcctcttgagatgtcttttcaggcttttgcatttctgactactggatggcaccatttggcccaaaaatcaaccagtcccttagctcccacccagaagctgactcaatgcaggagggcattttccacacccctgtgatttcatccccaacaatcagcaccgcccaaaccctagccccctccccaccaaactgtctttgaaaaccctttacctccaagtcttcagtgagatcgatttgagtaataactctgtcccccacatgtcgtggctggcctgtgtcaattaaactctttacctcaatgccatggtctccatgaattgattttgtatgtacagtgggcaggaagaacccatcaggcggttacatctgcaggatggtgccagttctttccacaaaggctggtcagatacccagaaagtatttctccactactacctggacaatgtgtctccctgtcagtatccagggaatggggcctggctcaaatatttagtattcagcagttattactacactgtcacctaatctctcattttcaatattttgccatgccttccagtggcctaactggccaccatgccacagaatctttactttatggtctccaaggagaactctccactcgatgttttgtgatttgagcaatggaatagaatctgatactggtggcctggggaaagtccccggacactagtgggatctcgaccccagctgtggtgtccaggctcttgacaccatctcaagaacaaagtcaaggatgagtcagcaaacagtgaaagaagagatttattgcaaagcaaaaagtacacactcaagaaaggggagttcgggcatacccgacagagaacaatgggttctggggtttcatcttgattggtttctctaaccaaggagtggaatagtcatgaaaattcctgggtaaaggtggagatttctcggaactgtggtgccatccatttttacatcacatattggtctcagaactgtcatggcactggtgggtgtgtgatttagtatgttaatgagcatataatgagggcctcggtaaaacctacatcaaatccagcaccacattgggtccagtcagtcttagccagcttggtccacaccctggtttttcagcgtcttatcagcccatagcctcaagtcatgtaaatctgctgcctagaatttgttaccctgcggccaccctgtattattcctgcctcaaatctacttgtaaatattcaaatggtctttgacttgggaattccaactttacttacttcacagtgtttcctgcgttataatccaatgtaagaaaagatgatccagacatttgttaaacatctcaaataagatgtatcccaggtatttgtgtcaaatttggattattttggttttgtctttgcagaatataaaaaactaacgtgaggtaaacactaaggtctggagatggctgtgcaagagatgacaaagtccaacaccacgctggagagtgtccaatcatctcttctggggcagcatatttttctacaatactgaagttggaaaacaacagcaacaacaacaacatcaaaagcaaacaaataaacaaacaaaaacctacaagattcatgaaactggacaactgtctttataacattaccagtgataaaaccagtaaggaaggctggtttgcagtcatctgagaagcctctttcatttcataaatatggtttctctctgacattgaacggcttccaatttcaagcggaatgctacatgacaaggataaggatgtgaagagaaccggtttcttttgtaatcctaaacgttctcgtctgagaattaaaagccattatttgaagaacggtgcccaggctccagctggccactgaaaggttgctccgcagcgcaggctaaggaccagcttcttcgggcgagaacagatgccggggcgggagggaaaaaagggagagacagacgtcacttccccctgccggctccggcagcgggttggtaggctgagcggcagaaaggcagacggggactgggaaaggcactgtcggtgacatcacggatagggcgacttctatgtagatgaggcagcgcaggggctgctgcttccccacctgctgctgcgccacgaaggatttcccgtgccgtgggagcgggttcaggaccgctggtcggacctgagagtcccagctgtgtgtcagggctaggagggctgggggtggggggggggggggggggggctgcgcggggcaagtgaccgtgcgtgtaaagggtgaagcgtgtgaggctgtggcggggcggaggtgcaagatctcatacttacctggcaggggagataccatgatcacgaaggtggttttcccagggcgaggcttatccattgcactccggatgtgctgacccctgcgatttccccaaatgtgggaaactcgactgcataatttgtggtagtgggggactgcgttcgcgctttcccctgattttttgtagtttaaagaatagtctacacagcaagggttacttgttttttttactggcttgtgttttagtcttaatcgttactctcacagtcgaaggctgagaaatagtagtaatatgtcgctttctccccgccccgggagaaataagaatcgtcgacctttacacaagctagctagcgcgaaggccgcacagctcttcctttatctaggcggggctgctttttgcagagatttgtctgcccatggtctgcagtctcttgggttctcagggtctgtgaaaatctacgtgtttttccctagcccccagtcacatttcacac

SEQ ID NO: 2547 - DNA, 951 bp, Artificial sequence
  DNA replication origin
ttcgcccgagtcaaggggcggccccccaaaatcccaacgtcattgtttcctcggggccggcaggtgtgaaaacccggcggcagaatggaagttcggtagtctgcgagggcccgcggcctccccaggcgcgtagctgagtccctccaaccccgccccgggcccgcctgctcccgggccccggcgcggcgccacctggcggccgtctgtggaggttgcagctgccgccaagccacggggatgctgccggcctcaggtgcccccggccgagcctccgcggagaggaggactggtagatcacaggaaacgggaggacggcgctgggctcccagcaggcgccccagcttcttggcttgtcgcaagagcagccggaggcggcggcggcagggagggagcgggtggggagtgggagaggccgcccgcctccccgtccagctcggaggacctcccagctggttccctcaccgtcaaaagcaggaagggagctggctcggcgggatcagcaagccagcgggcaagaaggctccaggctccgcaggggccaccccacatggactcgggaaccgccgagcttcacccacaagggcccacggcccatcctatcacggatgaaaagattacaggactgacaatgagcccctggagggatctgatgcagctggcggggagaaaggtgggtcggacttagaggggtggtggggtggaggaatatctttcttctccctgggacctaccgaggcttcacctgtgagggtcttgggcccatccttcaatccgagagcttccaagccaaagcacagctccccagagtggacaagtggagcagaaccggcattaggttgggagggtgggtcgttaggggtagttcttcaccttgcaggctgggtatggagacctctaaattcatcctagggccacaagagcttctgtaagagttcaggcccgtttcagaac

SEQ ID NO: 2548 - DNA, 851 bp, Artificial sequence
  DNA replication origin
agctggcggggagaaaggtgggtcggacttagaggggtggtggggtggaggaatatctttcttctccctgggacctaccgaggcttcacctgtgagggtcttgggcccatccttcaatccgagagcttccaagccaaagcacagctccccagagtggacaagtggagcagaaccggcattaggttgggagggtgggtcgttaggggtagttcttcaccttgcaggctgggtatggagacctctaaattcatcctagggccacaagagcttctgtaagagttcaggcccgtttcagaacactcagaggttcctagcctgagaagtaatccccaaagcagaccaaccggtttggggtaaaacaggaatagttgggtccattctggatctttcctagctaaatgccttcaggatttaggaacattttcctaggagggccaaggattagctagacctgcccagcgattccagccctgagaaccagacagaatggaggtatagctgacagctggctgggagggggctgacggtcctcactgccaccaggcttagttggagacagattccccgggctgtagagagacaacagtagaagcaaagagaccagttaggagtctaggtgagaggcagcggcagcctggactaacatggtaacagtggagctattgagagtggtcacatttggaagatgttttgtaggaagtgtcaacaaagtttcttattgattagatgtagggaatgtgagaaagagaaggggggggaacacgtagattttgggtcaaagcaataaatattccattgacagaattgaaacagcaagttggtggaggaggggaacggggtagcaagaagcg

SEQ ID NO: 2549 - DNA, 893 bp, Artificial sequence
  DNA replication origin
gggtttgccgaaacctcccgaagccggccaatgagatcggaggcggagccaagctcagccgaccagaaagccgaattgatctcagcaccgttactggggcggtgcctacggtcttcaagccactaagctctcgtgaggggaggccccggagccttccaatgagggactggggctaactctagttcttccaatcggtgcgcggcgctggcaattcaaactgataccgggttggagaggcaggaaaagcggaagagggagcgaaaaccaacgtgttcggtgacagaccccagcgccgactgagcctctaaagcgacttcagctctgccccaccaacaccaccgcgcgcccgggaacagccgctccgggaagaaacctgaggggactgcggggggcacgagggacagctgagggaagggaggacgcgagagaaacagcgcgagcacgctgagggccgggggttgccaggagaggggcccgcggacccgcagagcggaggaaggtccgggagaaaaggggcgggacggaggagaatccgggatcgcctggcagaaaaagagaagggagtttctgaatcctgggaagaggaggcgtgggtagggacgcttagcccgagatccgacagcagggaaccggagcgctccgggggaggggcttaatgctggggaagggatgtcttaaaagaggagaagctttaaattagacgatcggagaaggctgagggaattgctatgaaggggcgggagctgaagtgtagaggactcctttagacagcagaaagggaaagccgttgagaagttcccttcaaactccacctgcctcctctccaattcaaactccactcccttctccaaaagttaaaaggaaagccaagtttgccacgctcccctgttcct

SEQ ID NO: 2550 - DNA, 1698 bp, Artificial sequence
  DNA replication origin
cccacttcccgcggctggaggaaggggccacgctgagggaacaagacagggagcagaggcggcggggttcaggcgagcgggaagcgggaagcgagaggcgggtgtgagatggggtcctgaggctggaagggagcccggggacaactggagttgcacacgctcggaaggcgggaggcggcaaggagaaggctgccttagaggtgaggggaattggggcatgatcatgggccgcgatgttgcgtgaagcgcaaggatgtcaggaactgtgggggccgagatgtggtctagggatgggagtgggcgaagagaagtccatcggggcgggccggggggtgggactcggggagagccccggaagctgcgcggaacacccatcctcctgggtcctaggctgggacccgggctgtccgccagggctgggagacactggaggaggccggccgatgattacgcgcgatgccaacgacgactgccctacggtggaccgcggctgcccgtgtgcggaggaaagggagaggcggctgggtgccggctgcgctgcggtccgtgagccaggacggagtcccaggctgtacagtgatgggcggagagactcgcagtcctgagaagtattatgggctgtactgggagatttggagagggtggaggaggggcggtctgagggattccgggcggcaccgctaaggcgatgccgcgagcagcatccgcgccctctccttcccgccccagcccgggtttgttcagtcagggctccagcccggcggccgggaggaagaaaaggaagagggaaggagcctttacctggctctgacgcgacgggtcccaggcccccggctccgcttcccactcagagctctcctcccctctcttccccgccacccgtttctacgcagatctgtgccccagtccctggaggagcctccgccaactccgcaggaccccgccgggaagtagagcccacccctttaccaatcaccgcccgttttctatcgaccgatggggcccatagccaataggaagagctgatcccgagaggcccggaatgagggggaggagctggcaaaacttggaggtgtgactagcactgccgaggcgtggtcacagattaagctccaccccgggttgttgaacccctaagtagaactgatgggcgggattaaggtggaaccgacgaccaaacacaaactcttgagctgaggcacggccaattgggccggggtagagaggaggggtgttgcggggaattttaaccaataaagagtagagaccggtggagactgtagaccctcttccaataagaagcgggaagggcgtgccttgccactttcactagggctaaagcagggtttgccgaaacctcccgaagccggccaatgagatcggaggcggagccaagctcagccgaccagaaagccgaattgatctcagcaccgttactggggcggtgcctacggtcttcaagccactaagctctcgtgaggggaggccccggagccttccaatgagggactggggctaactctagttcttccaatcggtgcgcggcgctggcaattcaaactgataccgggttggagaggcaggaaaagcggaagagggagcgaaaaccaacgtgttcggtgacagaccccagcgccgactgagcctctaaagcgacttcagctctgccccaccaacaccaccgcgcgcccgggaaca

SEQ ID NO: 2551 - DNA, 858 bp, Artificial sequence
  DNA replication origin
gggcaaatctgcaggaaaaagcctgctcggcacgggacacatccaggaaaacaatgtggtcagctgaagcaggaaacgggttagaggatagggtcggagccgggaaaaccggggggcggcgagcggaaggcagccgtcgcctccctcaagctagggacgatagtgactataaatgccacccccaatatttttttgacacccaagctcagagatcccagatatcccacccaatcccaggctggggatgggaggaggtcggtgaggtcgcagtcctgactcctcgcaccaggcggtgcccgagaagatccggccccggacgaggcccagggggctggagggacgcaagcgggagcgcggagcccggcgactagctccctcgcgtgccgcagcggcgaccctttctacttggtctttccttttcctccgagcgccgggaggaggaagctcccgctagcgtctcccacttcccgcggctggaggaaggggccacgctgagggaacaagacagggagcagaggcggcggggttcaggcgagcgggaagcgggaagcgagaggcgggtgtgagatggggtcctgaggctggaagggagcccggggacaactggagttgcacacgctcggaaggcgggaggcggcaaggagaaggctgccttagaggtgaggggaattggggcatgatcatgggccgcgatgttgcgtgaagcgcaaggatgtcaggaactgtgggggccgagatgtggtctagggatgggagtgggcgaagagaagtccatcggggcgggccggggggtgggactcggggagagccccggaagctgcgcggaacacccatcctcctgggtcctaggctgggacc

SEQ ID NO: 2552 - DNA, 985 bp, Artificial sequence
  DNA replication origin
aaagccgggggcgggcaaaaagccggggcgggcaaaaacccgcggcggcggtggggcaaaaagctggagcgggtaaaaagccgcggcaacaaaaagccgcggcggcgggggcgcaaaagccgcggcggacaaaaagctgcggcggcggggtgcaaaaagccgcggtgggcataaacccgaggcggcggggggggagggggggtgcaaaaaaccgccgtggggaaaaagccgcggcggcggggggcaaaagcccgcggcgggcaaaaagccgcggcggcgaggggggtcacaacaaagccgcggcgggcaaaaagccgaggcggggtgggggcaaaaagccgaggcggggtgggggcagaaagccgcggcggcagtggggcaaaaagccacggcggcggggggtaaaaagccgcggcgggcaaaaagcccaggcggtcaaaaagccgaggcggggtggggggtgggggggggaagccgcggcggggggcgaaaagccacggcggtggggggcaaaatagtggagatggggtagaaggacggcacagtttggtattgctggagtgtgatgtgataggaaatgtgcagccaaagagaaaaaaagatgtaagtaagcttgactcattgcagctaagaacccagatgttatcttgagggtattaactaataagcagtttaaatcagaatggcatattctgatttgttttttgtatgttcacatttggcaggcatagatactgtttgaagagagaaaagacagtagatagaggtaacaaacttaaatatgtgcgaagtctagaaacaagagaccgggggataaggacctttcaaaataaaatgcaagatttgaaaactgattggctggggcatgaggaaaaggcaggtctttaaggtcaatccctgttttgctttgttaggggttggttttatcacatattgtagaacatgtcatttcagttttgaacatcttgagttaaattgtcctaac

SEQ ID NO: 2553 - DNA, 3208 bp, Artificial sequence
  DNA replication origin
gccggcttggctgccttggctgtctggccggcttggttggctggcaggctggccggcttgactggctggctggttggctggcttggctagctgactgtcttggctggttggctggcttggctggttggctggctggcttggccggccgggtggcttggctggcttggctagctgactggcttgactggttggctgtcttggctggcttggctggcttggctggctggcttggctggccgggtggcttggctggcttggctagccggctggcttaggtggctggatggattggctggcatgcctggcttggctggctggcttgcttggctggcttggctgcctgtctggcttggctggcatgcctggctttgcttgctggctggcttggctgcctggctggcttggttggcatgcctgtcttggctggctggctggcttggctggcttggctggcttggctgcctggctggcttggctggcttggctcactggctgggtggctggcctggctagctgggcggcttggctggcttggctggctgggcggcttggctgggcagcttggctggcttggctggcttggctggcttggctgtctgggctggctggctggcttggctggcttggctggccaggtgacttggctggcttgagtggctgagtggattggctagcttggctggccagctggcttggctgtcttggctggctgggttgcctggatggcttggcaggctggctggcttctctggcttggctggctggctggcttggctggttggctggcttggctgccttggatggctatcaggcttggctggcttggctggctgtctgtcttggctggcttggctggctggcaggcttggctggcttggctggctgggttgcctggatggcttggcaggctggctggcttggctggcttggctggcaggctggtttggcaggcttggctgtgttggctggctgggttgcctggatggcctggctgtctgggtggctggctggcttggctgtctggctggcttgctggctggcttggctggctgggtggcttggctggcttggctggctgggtggcttggctggcttggctggctgggctggctggctggcttggctggcttggctggccgggtgacttggctggcttgagtgggtgagtggattggctagcttggctggccggctggcttggcaggctggatggcttggctggcttggctggcaggctggtttggctggcgtggctgtcttggctggctgggtggcttggctgggtcggtggcttggctggcttggctgcctggccggcttggctgccttggctgcctggccggcttggttggctggcaggccggccggcttggctggctggctggttggctggcttggctagctgactggcttggctggttggctggcttggctgtcttggctggctggcttggctggccgtgtgacttggctggcttgggtagccggctggcttcgctgactggatggcttggctggcatgcctggcttggctggctggctggctggcttggctcactggctgggtggctggcctggctagttgggcggcttggctggcttggctggctgggcggcttggctgggcgccttggctggcttggctggctgggtggcttggctggcttggctggctgggaggcttggctggcttggctgtctgggctggctgggtggcttggctggccgggtgacttggctggcttgagtggctgagtggattggctagcttggctggccagctggcttggcaggctggatggcttggctggctttgctggcaggctggtttggctggcttggctggcttggctggctgggtggcttggctggcttggcttggtcagtggcttggctggcttggctgcctggccggcttggctgccttggctgtctggccggcttggttggctggcaggctggccggcttgactggctggctggttggctggcttggctagctgactgtcttggctggttggctggcttggctggttggctggctggcttggccggccgggtggcttggctggcttggctagctgactggcttgactggttggctgtcttggctggcttggctggcttggctggctggcttggctggccggctggcttggcttgcttggctgtctgggtggcttgggtggctggcgtggctggctggctgttttggctggcttggctggctgactggcttcgctggcttgactgggtggcttggccatcttggctggctgagtggcttggccggcttggctggctggctggcttggctggctgagtgtcttggccagcttggctggctgggtggcttgaccggcttggctggctgggtggtttggctggcttggctggctgggtggcttggcaggcttggctggctggctggctggctggcttcgctggctgggtgtcttggctagcttggctggctgggtgtcttggctggcttgggttgctgggtctcttggcaggcttgtctggctgggtggcttggcttgcttggctggctgggtgtcttcgctggcttggctggctggctggcttggctggcttgactggctggcaggcttggctggcttttctggctgactggcttggctggcttggctggcttggctgactggcttgggtggcttggctggtttggctggctggctggcttgactggcttggctggctggctggcttgcatggcttgcttggctggctggcttggccggcttggctggctggctgtcttagctggcttggctggctgggttggctggcttggctggctcgctggcttgcctggcttggctggcttggctgtcttggctggctggctggcttggctggcttggctggctggcttgcctggttttgctgcctgggctggctgtctggctgggctgtctggctggttggctggcttggctggcttggctgggtggccggcttggctggcttggctgactggcttggctgggttggccagcttcgctggctggcttgggtctcttggtttcctgggttggctgtctggctggttggctggcttggctggcttggctgggtggctggcttggctggcttggctgactggcttggctggtttggccagctttgctggctggcttgggtctcttggctggcttggctgggtggctggctggcttggctg

SEQ ID NO: 2554 - DNA, 1230 bp, Artificial sequence
  DNA replication origin
cccttaattacataggaataaacgtttgttacactgagaaaaatctaatagagctaaaaataaatattaatttggaaaggtcattagatactgatacattcttacgtttatacattctttcatatattcatatattcttttaacagtatcaatggtttggagttatgtgtacaaaaccatgacctatatgtaatacaactaataacaggcatttacaattcaaggcatattatatacaaagctttaacttcttatcaaaatattttgttttttttctttctgttttggcagatactatgaacactacattcaactcacagacaccatggagcccttactaagcataaagtactgtgaaaggccagggctaggacagaactgagacagggccagggataggacagaacaggggcagggtcatggccagagaaaaaccaggggcagggtcacggccagggacatgagaggaccaaggccagggccagaagcagggcagaaccagggccagggcagggacatggcagggccagggccatggcaggatcagggtcagcagaaggccagggcagggctagggtagtgcagggccaaggcagggcagggtcagtgtagagcaaggaacgggccagggtatggcagggcagggacagggaggtccagggccagagtcaggtccaggacatggacaggacagggccagaaatatggcaggaccagaaaggggacagggcaagggcaaggccagagaaggaccatggaaaaaacacggccagggagggtccagggcaagggcaaggccagggcagaaccagagccagagcaggccaaaggcagggccagggcagggcaaggccagggtagggcggggccagtgtagggtgagggtagggccagggtgagttcagggccagggcaggactaagatagcacagggccaaggcagggccagggcagggccaaaaggaggggccagggccaagcatggccagtgtcagacctggggattgtcagggccagggtcagggtcaaggctgggccagggacagggccagagcaagggcagggccagggagaaagcagaaccagagaggatccagagcaaggccagggtcagggcagaaccaggaccaggataaggcaaagccaaggccagggcagggcaaggccagggcaaggcaagaccagggaagggcaaggccagagtagaaaaggccagtgtagggccaggcc

SEQ ID NO: 2555 - DNA, 1533 bp, Artificial sequence
  DNA replication origin
ccggcgccagcgctgtgtgcctttgcgagggcggagctgcggtctcctcagcacagacccggagagcattgcgagggcggagctgagttctcctctgcagacttcggagatacagcgaaggcagagcaatgttctcctcagcagagacccgggcgggcgggccggtggcaccgcgagggcggagctgcgttctgctctgcacagaccttgggggcactgcctcgctttgggacaactcagggccgcatggacagtgaataaaatccttcctgtttgcagccctgtttgtggttggtggcagcgatggacactgcagccagccagagcgtagaaaggcgtcggggtaagtgcactatccaggctgcactgtgggtggcctgggacgggttgggagccctatctcaggcgtcactgcccgtcttgggtggccggttgggtgtgctatctggggctgtgctgcctgcaccgggcggggggggggtggtttgggggccaaaccggggctgcactgcctttggtggggagccggttgggggcactatcccagactgtattgctggcaacagtgaggtgggctaagtgtgctatccggggctgcactgtgcggctgtcgggggggtggcggtttcgggttgagggcgctatggggtgctgtaatgcccatggtgtggggaggcggggcagtttgggtatgttgggtgtgctattgggggggtgacactgctggtggtagggggcagggtgggttgggggccatatcaggggctgcactgatggctttagctaggatttctggtactatgttaaacaacagtggtgacagggggcatccttatgttccagatcttagaggaaaagctttccatttttccccattccatatgattctagctgtgggtgtctttcctgtagtttttattacgttgcggtatgtttcttctgtgcccgtttctttgaggatttatagcatgaagggatgttgaatttcatcaaatgctttttcagtttcagttgacgtgatgatactgtttttgtcgtttatttggttgatatgatgtatcacattgtatgttgagtgacccttgggtcccagggatacatcccacttgatcatgatgaattatctttttaatgtattactgaatttgattcactggtattttgttgaggatttttgcatcaatattagagatcctggcctgtagtttccttctttgatgcttttgtctgattttggtatcacagtaataatggtctcatagaataagtttggaagtattccctcctgtttttcaaaatagtttgagcaggattcgtactaggtctttaaattgtttggtgtgaagccatcagcagtgaagacatcagttcctgggcttttctttactgggagactttttctgatggcttcaatctcattacttgttaccaatctgttctggtcttggatgttttcattgtttaacctaagtaggttgtatgcatctaggaatttgccaatttctactaggctttccaatttattggcatata

SEQ ID NO: 2556 - DNA, 1825 bp, Artificial sequence
  DNA replication origin
ggacagcggcggcgcggcggagagacggacagcggcggagaggcggacagcggcggagaggcggatagcggcggcgcggcggagaggcggacagcggcggagaggcggacagcggcggcgcggcggagagacggacagcggcggagaggcggacagaggcggagaggcggacagcggcggcgcggcggagaggcggacagcggcggagaggcggacagcggcggcgcggcggagagacggacagcggcggagaggcggacagcggcggagaggcggacagcggcggcgcggcggagagacggacagcggcggagaggcggacagcggcggcgaggcgcgcagcggcggcgcaggcgcggagaggcgctggcgccggctctggcgcggagaggcgcaggcccaggctccactccccagctgtgaaagggtaagaaccgagggtggctgagactcggggttgttcagggcggggtgggctctggacccagcaggcccggcacccaggtcagggctccaggggaggccgggtgggcgaaggccaagaaggggctggggctggtcaggaagggctcctggtgaccggagcactttgcgtgagccagcgtgggaggaaggtgggctggatgagccagggaggcgccgggaggggccttggcagaggcgaccccctccgtcacccccaggccactgaaccctgggtagcggagaaccgacaggggaggctgcagacagaggagtggaggctccccggctttgggggctctgagtagaagcatctagggtgtccctcaagaggcccccaaacgcttccccatggtgagaaaagaaggtgcagagaggggcacggcgctggtgcagaggggcacacagcgagatttgctgtgagttcttttattgccccaagtgtacctcatcttggtagatttctattggctttaaaaatgtgtgtgttttgctgttggggagtggggtattatacggatgtcagattttgctggttgactgttcagatcttttgtaaatccttgctccttttgtgcctagtttcactctgtcacttacactagagtgcggtggcacgaacatgactcactgcagccttgacttcctagggtcaagtacttcccctggcttaacctcctgagtagctggtactataggtgtgtgccgccacacctggctaaatttaaaattttttggagagatgaggccttgctatgttgcccaggctcgaactcctggcctcaagctatcctttgtttttgcctcccagagttctgggattacaggcatgagccactgtgcccggcctctgcctagttttaacagttgctaagaggaggatgttgaagtagatgtcttcttggtgggttaatccttttgtcattaagcagttgttatggtcacttcctcttttcaccccattggtgaaggaggggtccctgccctaaagtgtaggagatggctgaacacgacacctggcgtggatggatgcgattgacagcagtgttttagtcacatatacccacagctcagaggaggacactgcatgccacacagggtcagatgggcaccgcactctgtagtggagtgagggctgcgggctgaggaagcaggcgggcttggtagtaacaagagcacacgatgaccaatggttcccgagggggaatgcaattggcttgtttgaataaattcatgggctggcagacaggtgaagtgaaacttcttaggctgaggtgcaactgttctggctgataaaagaactagccaggtggggagcctttcctgttgggtggcggggtagggggtgtctggtagaaacagg

SEQ ID NO: 2557 - DNA, 1429 bp, Artificial sequence
  DNA replication origin
gcaccctgatgcgttcacatgcacgtacacgcgtgtgcacacgcacagtctttcacaagcgtatgacgcgttcacacaagagtgtgacgcgttcacacgcacgcacactccctctccctcgagcctggaaggcgcactgggctcataggggtggaaacctctaccgcggcagaggcatggcgccagggccaggatgctcgcttttatttcagacgtgaaaactgaggcccgaaagagacagccagtgtccaaccctgtccaacgtctctgctgattgtgcctcctgtgtgcggccggggccggtgtgagggctgcgggcccaccgcacgcctggcccgccccagggcctcgagccacttcctcaggagctgctggcagctgcagcgacagcgcgcccagagcccgagggtcccatggagccaggcttcccagcacacaggcgcggtggagcctcggggtgggcatacaccccgcgagctcgcgggggctgggcactgcgggtcctcgggtggggactctggagttcagtcttgaaggacacagtcactgagggtcagggaaccaggagggtagggagagtagggaggggtgcctaggcctagtgggagaagcatgtgaaagttccctaagagggctgggggtgaacaagcgctcggcccggcctctcccggtagactgctctggtgccctgaagcctcccttctccaaggccccatggacgcccccagaggggtgacgccctcgcccacgctgagctctgagtgctgcacgagaactcccagagccgtgtgcacacgcgctccccgtgttataactggcattaagtgcactcacattgtcgcatatcccctaccaccgtccatctccagaacgtcttcatcttcccaaaaggaaaccagacccattgaacaccaactccctccttttgttaaccattgctctttctgtatttgaatttgcccattctgggcccctcatgtaagtgaaatcgcaatgtatttgtccttttgtggctggcttattccatctagcacaatgtcctcaaggttcatgtgtgttggcacacctctcagaatttccctcctggctgggtgatattataggctcacgcctattatcctagctgttagggaggcagaggtaggaagatagcttgaacccaggagttcgagacctgcctgggcaatatagcgagactgcattttccacaaaaagaaagaaaaaaaagaatctccttcctggtaaaggttcagtaacagtctactgtatgcataaccacatttcgcttgcccatccactcacccatagaccctcagaatgcttctaccttttgactcttgtgaatcacgctgctttgaacatgggtgtgcaaatatctgtgagagtgcctgctctcaaaaaaatccacattcttggcaccatgaagaat

SEQ ID NO: 2558 - DNA, 822 bp, Artificial sequence
  DNA replication origin
cagtgacggcaggacacatgcatgggggtccaccttcccagagctggagcccacatagctccaggacctcaagggaagcccagggtctgaggggcccaggaggcccatccatgtgatggacccaaggagactttggtggcttctctgttaagatttgaagggggccaggtgtggtggctcacgcctgtaatcctagcactttgggaggctgcagcagggggatcacgaggtcaggagttcaagaccagcctggccaacatagtgaaacctcatctctactaaaaatacaaaaataaaaataaaaaattagccgggtgtggtggtgggtgcctgtagtcccagcagtttgggaggctgaggcaggagaatcgcttgaacccaggaggcagagattgcagtgagctgagattgtaccactgcactgcagcctgggagacagagcaggactctgtctcaaaaaaaaaaaaaaaaaaagatttgaagggagcccagggggcaggactgggtgggcacaggatggagacagtgacacccttggtcttgggtggcccctgccagccccagcatatcctcagcagatagggtgacaacagcgcctctacctctagtgggaggcgcaagagaaattcacgcgatgcacttgcctgggcttggtgagtggaaagctccccactgactcgagggctggtggtgaggatggagagggaggtggagatggaggcgacagcatgggcagagcaagagcacagccgtggaagggaggtcctcccagctagcctttgggaggcccatggccagtctcggggcaggaggaaagaatgt

SEQ ID NO: 2559 - DNA, 905 bp, Artificial sequence
  DNA replication origin
acgcccccaacaacctgccccgtctcctgtcacttcccgacgcccgccctcccctcttctgccccttcgtcctcagtcaaggtaccaccctgtccacttacccagcgccccaccccgctgacccgggattctacgagctcccttgcccactgcccctcactgggcaacgcccggggcagccatctgtcccctccgggacccacgcggaccgctcccggctcctgatccctgggacactggccagccctgccccgacactagcgcgtcctcccgcacctccgcccgcgcgcccggcccccgcccaccgtctgcagccctcactcctgcgccgacgcccacccacccagcccctgtcccggcgcctcagaaacgctgggtgacgagagatgcctcccagagtcccggggttgcggggctggggagagggggtcttccagagccagcccgaagtggggtgtgcgcggggggcgtggctgctgccaagtggggcgcacggggctccacaggggcgtgctatgctccgggccttccccgagggtctccgttggggaacccagaggtccaggtgatcctgcctgggtccgtgtccgagcgtccgatggtctgtccttgtccctgcgtatttctgtattgtcttctctgtgccggtcactctgtgtctggccgtctgttttcgggtgtgtctggttaggggtggaggagcgccagtcactggctctctgaattgggggaggggccgccttctgtgggtttttctgtttgtccatctggtgtgcctgtgtgtcggctgcgagacgcccaggcgcagaataagacctgagccactttctaagaaaagagaccatcccgcaccctcccccaaaggagcggcagccattctggacgcagaggagctggaatgaggg

SEQ ID NO: 2560 - DNA, 804 bp, Artificial sequence
  DNA replication origin
cgctcctccacccctaaccagacacacccgaaaacagacggccagacacagagtgaccggcacagagaagacaatacagaaatacgcagggacaaggacagaccatcggacgctcggacacggacccaggcaggatcacctggacctctgggttccccaacggagaccctcggggaaggcccggagcatagcacgcccctgtggagccccgtgcgccccacttggcagcagccacgccccccgcgcacaccccacttcgggctggctctggaagaccccctctccccagccccgcaaccccgggactctgggaggcatctctcgtcacccagcgtttctgaggcgccgggacaggggctgggtgggtgggcgtcggcgcaggagtgagggctgcagacggtgggcgggggccgggcgcgcgggcggaggtgcgggaggacgcgctagtgtcggggcagggctggccagtgtcccagggatcaggagccgggagcggtccgcgtgggtcccggaggggacagatggctgccccgggcgttgcccagtgaggggcagtgggcaagggagctcgtagaatcccgggtcagcggggtggggcgctgggtaagtggacagggtggtaccttgactgaggacgaaggggcagaagaggggagggcgggcgtcgggaagtgacaggagacggggcaggttgttgggggcgtggggtaggaatcggaggggagttgaaaaggggggtgctggttggcagaggcgtcggggcaaggacaggagccaggagcgcaggcggggcccgacggcagc

SEQ ID NO: 2561 - DNA, 1332 bp, Artificial sequence
  DNA replication origin
taatatgagaatccaagtggcaatgtgtgatgtgtctggaccacgtggtgtgaaatgcagtcggcttctcctgggaaggttactcagacagaagctttcttcacaagcatgctccccacggcctcctccctttcacctgcaccatgtctgtctcccattcaagactggcaaccccagccaggcacagtggctcatgcctgtgatcctatcattttgggaggccaaggcaggaggatcccttgaggccaggagtttgagaacaggagacaacacaacgaggctctatctgtacaaaatataacaaaacttagccaggcaaggccatgtgtacctatagttccagctattcaggaggctgaagtgggaggattgcttgagaccaggaggaagaggctgtagtgagctgtgactgtgccactgcactccagcctgggagatagagcaacattgtctcaaaaaaaaaaaaaaaaaaaaaaaaaaaaaaaaaaaaaaagatgtggcagccccttgagaaaggaagagctcctatcttgacgatttcagccaatgcccgtgagtaccagcaggagcctctatccctctctgccccaccctgcatccacgcattcattacatcattcatcccccctcattttctcaacacccacttgtgccaggccctgaggtggctctaggaccgagagacagggatcacagagctccccagtggagtggagggtacagacatgtcgacaagaacactggaacccagtgcgggctgggagcgtgcggtcagacctgcaaagcggggaagagaagggggtcggagaagcttcgcggggagaatggggtgaggcctgaggcctgtctcggaaagcagaggggcaggtgggagagtggaaaagacattcctggaggagggaaccaaaggtgctgaatgtgcagaggcagagatcctgcgacaggagagaaagtcctcgagaatgaccccagcataggatgagaacaaagaaggggatcaaaggaaacgggccctcggtggccgggtgctagaaggctctgagtgtcaggagagggagcgtgacctccctcatggggtcagtagggccactgtatggctttaagccagggaaggacaggagaggtttctgtaactgtggctgtaatgatggaagcgtctggaggcggagaggaggctcctgcgacgacccaggcttcagagagagagagagagaggaaagaaggaagggcagataggaaagctaggaaagatgcacagagagaccaaggcagaaaaggctgaagggaagacggcagtggtaggaagggggcagagccgtctcaggatgcagc

SEQ ID NO: 2562 - DNA, 864 bp, Artificial sequence
  DNA replication origin
gatggaaggatagatggatggatggatgatgaataagtgtggatgggtggatggatgcatggtggataaataagtgaatgatgatagaagctccagggaagaggatgatggttctgggaagttaactgcacttcaatataaagaagagcattccttggataaggatagactgagtagaaaaaagaagaaagaggaagaagaagaagaagaagaagaagaagaagaagaagaagaagaagaagaaggaggaggaggaggagggggaaggggagggtgggaagggggaagggagggggagggagagggggagaaggagaggagaaggagaaggagacacattctaaatgcaccaggctgggcgtggtgtctcatgcctgtaatcccagcactttgggaggcaaaggcaggcagataacctgagctcaggagtttgagaccaactgggccaacatggtgaaacactgtctctactaaaaaatacaaaaattagccaggtgtggtggcatgtgcacctgtagtcccagctaatcaggaggctgaggcaggagaatcacttgaacccaggaaatggaggttgcagtgacccatgatctagccactgcactccagccttggcaacagagtgagattccatctcaaaaacaaaaacaaaaacagcagaggagagaggaagagaggaaggaagagaaagagaggagagagggaagagggatagtggagggaaggctagaggaaggaagagaggaaggaagaatgaaggaggagaagagagaaagaaaatgaggaaaaaaataaggaaagggaggctgggcatggtgactcacactggtaatcccatcactttgggaggctgaggcaggcaga

SEQ ID NO: 2563 - DNA, 1091 bp, Artificial sequence
  DNA replication origin
gaggtctctggtcccctcattagcccagcctcccgtgggatcatagacttgacccctcaagtcactgcagagcccaagagtggagaaacacagcaccgtgtgccgggaaaaggtgcccacaggggcccttcatggctgaggcttccagagggtagtgggacggcaaccccgctccccaccagccgcccaccacagcgttcatgatacagcttcggagtgtgggtcggggtctatctgggaaaccagggcaaaggcggtggcagctggcagcacccacacccacagctggggcactgctcacatgagcccccatcagcaggccccttggttgtgccacaggcaggggtcctgccccagggagggggtagtccgggggggctcgagggtgtggcacaggccagctgtcactcctccctggagaggcagctggggacgcagctgggaggggagccaggagcagagacagcccggggccagcaggtgggtgacaggtggggcagcgggaggggcacgcgctgtccgcctggggctggggtgtagagacgggaacctgccccccaatgcctggtgctggcccagcctccccccggggtctctagcaccttcccagttgtgtctgcaccctcctgggcatggcgggggagggtgggggtcaacccctttccttgtagtcccgtgccagtgggcaagggagacgccccagtgagcaggagcctagcctctctgcctggggaggccaggtgatgagccacccggagtgggagggggccttgaacttgggtctgaaagatgagcaggggtttgctgggccgggtacaggcaagagctaatgcaggaaggcagagagcaggagcgcttagagggagtggctctgtgcagccggagtcagatgggtgaccctcactcaggaggaagcactgggaccctctctcctcacgctgggtcccccgcctccctctaggatccccacacccaggtccttctgggcctctgccacacagatcaggtctggaaggctccctggaggaggcggtgcctagacttggacataggcctgcagagctggtttccctcacaaccctgggaagaca

SEQ ID NO: 2564 - DNA, 906 bp, Artificial sequence
  DNA replication origin
ccctagagggcgctcaccatgagctgcgccgggtcccggagcgcgcggggacttctcttgcttcctgaagcgcctctggctcggtggccgtggtgcgcccctccagtctacgcgatgggcacaggaagcggctggtgcccgctgacagccagggctgttctcgggagtctgcggcgcgccacatggcagcgacagcggctgtgtctggttcggagcgagagaagagagcaagccgccactgaggggctggggcaggcagtcgccagcgccgggctggcactgcggcgctgccgcggtccctggccgctccccggccccgcgtcccgccccccgcgcctccgcgctggactccagccccacctgtgccttggcgccctagctcaccgcgctcggcgcgccagagtgtagtggtgatcccgcaggtcccaggagcgccccagcgccagaccctagccccgggccggggaaaattcttcccgggaagaccgaagggtgcttggtgtagccctggagccctagccctagccacgcttggggaacaagaggtggggtagggatgaggacgcgagggcttccggagggggaaagagcatttgaagtgtaaaggggacggccttggattgcccacagacctgagtcccaatccggactttattcctggctctgcaactttaagggccctacattactttacccggccttggtttccttctccacagcgtgggataatgattcctactcctagaacagtgtcagaactcagggaagccttctaggatgaggtgtccagtagacagtgtctcctaggaacaggctcccgcttcccccagcccctccctcaacaccatgaggctggggcttcacctgacctcttgggagactgtccttttccccaccaccgccccc

SEQ ID NO: 2565 - DNA, 1048 bp, Artificial sequence
  DNA replication origin
cgggtgaaaagtcgcgggggcaggggggaaaaatccacggcgggaaaaagccgcggcggcgagggggcaaaaagcggcggggtgcaaaaggcggcggggggcaaaaagccgcagcggcggggggcaggcaaaaagccgcggcgacaaaattcgcaacggcgaggggtcaaaaagccggggcggactaaaagccctggcgccgggggggcacaaagccgcggcgggcaaaaagccgcggcggcggtggggcaaaaagccaccgcggcgggggcgcaaaaagccgcagcgacgggtgggggcagaaagccgcggcgggcagaaagccgaggcaaggtgggggcaaaaagccgcggcggcagaggggcagaaagccgctgcgggcaaaaagtcgcggcggcggggacaaaaaggcgcggcgggcaaaaagccgcggcggggggcggggaagccacggcgggcaaaaagcctaggcgggatggggggaataagccgcggcggcgggggggcaaaaagccgcggcggcggcggagggtgaaataatggagatggagtggaaggccggcacagcttggcatcgctggagtgcgatgtgataggaaatgtgcagccaaagacaaaaagatgtaagtaggcttgactcattgaagctaagaacccagatgttatcttgagggtattaactaataagcagtttaaatcagaatggcacattctgatttgtttcttgtacgttcacatttggcaggcatagatactgtttgaagagagaaaagtcagtagagagaggtaacaaacttaaatatgtgccaagtctagaaacaagagaccagggggatagggacctttcaaaataaaatgcaagatttgaaaactgattggctgggggatgaggaaaaggcaggtctttaaggtccatccctgttttgctttaagttgttagggggtggttttatcacatgttgtagaatatgtcatttcagttttgaacatcttgagttaaattgtcctagcatatcttatgaatttgattttcttccctggaaagcta

SEQ ID NO: 2566 - DNA, 1343 bp, Artificial sequence
  DNA replication origin
ccccctcgctgccgcggctttttgcccctccgccaccgccgctgctttttgccccaccgccgccgtggctttttgcccgccgcggctttttgccatcgcggctttttactcgccacggccttttacccgccgcggctttttgcgccccgctgtcacggctttttgtccccctgccacagcgactttttcgccgccgcggcgttttgcccccgccgccgaggatttttgtccccgccgccacggctctgagggcgggagcggcagactcggctgccagctctactggcgtcctggcaagggcagcgctgaggggtgctcctggtccagctctcctggctcagggattccttgcctaggcgccggcgccccaggctccttgcctaggcccctgtggcctgcatagagtggcgctgcctgtggaggcgatgggagagaagaaggagggcggtggtgggggtgatgcggcggccacggagggtggcacaggggctgcggccagccgggcgctgcagcagtgcgggcagctccagaagctcatcgtcatcttcattggcagcctgtgcgggctgtgcaccaagtgcgctgtgtccaacgacctcacccagcaggagatacagaccccggaggtaaggggttcggggacccgggctgggctccaggagcggcccggacacctccttcggggccccagttcactcctggccgagttgcatctttgagcccacgtcacccccttggaggcttcccctccctcctgcactcgctgatgcggcagccagaggacccaggaccagccctcaccttgggcaggatttgtggagcgggtgcgtggtgggaactgggatggaggctccagggtcccgtgggggtgggggtgggctgcgtgaggacatccccttaccccctgaatttccatctggtccagccctctcatcttgtaggtgaggaaaccgaaggcctgagggagaaatgacttgccaggaacccctgttaaggaaaattaacaaagtgtggttattaaagaagaactgagttgggagtcagacctggaggcccgcacccgtggttaagacattataccaccttgagtctggcctgttgactgagggtgagccactccatcctcatgtgattgtggggtcttaacctcaaggggtttcctgcaggaagaagcaaatgggtttgctttcctagctctgtccagtacgttagggaccctgaggactgaagagattcttggagagccatctggtgtatgtcatgggtgggtctttttggaaggtcagtctgcccagtgggctggctcagcccaaatgaactgtcttgaatctttggagttgtct

SEQ ID NO: 2567 - DNA, 1123 bp, Artificial sequence
  DNA replication origin
tcctaaacgttcaagtctgcgcattaaaagacattatctgaagaagggtgcacaagcttcctgttggccgccagaagggttctctgcaggacacagatcaagtaccacagtcttagggggagaccagacgtgggatctctgcgcacctccccaaaggacaatggcaggaggaaaaggagaaagagacagacgtcacttcctccgccagctccggcagcgggttgatcggctgagtcggcggagggtggggcggaagagcagacggtgtctgggaaaggcgctgtcggtgacatcacggatagggcgatttctatgtagatgaggcagcgcaggggctgctgcttcgccactaaggagttcccgtgccgtgggagcgggttcaggaccgctggtcggacctgagagtcccagctatgtgtcagggctaggagggctgggggcggggggggtggggggggggggcgtgcgcggggcaagtgaccgtgcgtgtaaagggtgaagcgtgtgaggctgtggcggggcggaggtgcaaaagctcatacttacttggcgggggagataccatgatcacgaaggtggttttctcagggcgaggcttatccgttatgttccgggtgtactgacccctgccattttcccccaatgtgaggaactcgactgcataacttgtgatagtaggggactgcgttcgcgctttcccctggtgcttctgtggtgcgaatagtaggtgagccgtaagtgtttttgtaactcagggtgcgggctcgtgttttgtggctgtgttctgtccggtcagttgtttccgttcgcaacggttagttttcctttgtgaggccatgtttggggacagcttagaactatccacttactctcttgggaggcgaatttcagtctctgttggttggggtgttctcccaggttagctgccgcggtacttgctaggtggagctcagggatcaagggtcgggagctttctggtttgttcagtgctcccagggcttctaacatctcttaaaaactctggtgttttctgtcatcctcggagttacctcttagcctctgttttttttgttgttttttccccccctccctaagacaagtctcgctgtaccgtccaggctgg

SEQ ID NO: 2568 - DNA, 2351 bp, Artificial sequence
  DNA replication origin
tcaggcagttgcacctgcaggatggtgccagttctttccacgaaggctggtcagatacccagaaagtatttctccactactacctggacgatgtgtctctctgtcagtctccagggaatggggtctgaatcaagtatttagtattcagcagttactataccgtcacctaatccctcattttcaatattttgccatgccttccagtggcctaactggccaccatgccacagaatctttactttatgctctccagaggagacctctccattcaatgttttgtgatttgagcaatggaatagaatctgatactggtgggctgggggaggtccccggacactggtgggatctcgaccccagctgtggtgtccaggctcttgacaccatctcgagaaccaagtcaaggatgagtcagcaaatagtgaaagaagagatgtattgcaaagcagaaagtacacactcaagaaaggggagttcgggcatacccgagagagaacaatgggttctggggtttcatctcaatgggtttctttaaccaaggagtggaatattcgtgaaaattcctgggtaaaggtgatttctcggaactgtggtgccatccatttttacatcacatattggtctcagaactgtcatggcactggtgggtgtgtgatttagtatgttaataagtgtataatgagggcctaggtaaaacctacctcaaatctagcaccacattgggtccagtcagtcttagccagcttggtccacaccctggtttttcagcgtcttatcagcccatagcctcaagtcatgtaaatctgctgcctagaatttgttaccctgcggccaccctgtattattcctgcctcaaatctacttgtaaatattcaaatggtctttgacttgggaattccaactttacttacttcacagtgtttcctgcgttataatccaatgtaagaaaagatgatccagacatttgttaaacatctcaaataagatgtatcccaggtatttgtgtcaaatttggattattttggttttgtctttgcagaatataaaaaactaacgtgaggtaaacactaaggtctggagatggctgtgcaagagatgacaaagtccaacaccacgctggagagtgtccaatcatctcttctggggcagcatatttttctacaatactgaatttggaaaacaacagcaacaacaacaacatcaaaagcaaacaaataaacaaacaaaaacctacaagattcatgaaactggacaactgtctttataacattaccagtgataaaaccagtaaggaaggctggtttgcagtcatctgagaagcctctttcatttcataaatatggtttctctctgacattgaacggcttccaatttcaagcggaatgctacatgacaaggataaggatgtgaagagaaccggtttcttttgtaatcctaaacgttctcgtctgagaattaaaagccattatttgaagaacggtgcccaggctccagctggccactgaaaggttgctccgcagcgcaggctaaggaccagcttcttcgggcgagaacagatgccggggcgggagggaaaaaagggagagacagacgtcacttccccctgccggctccggcagcgggttggtaggctgagcggcagaaaggcagacggggactgggaaaggcactgtcggtgacatcacggatagggcgacttctatgtagatgaggcagcgcaggggctgctgcttccccacctgctgcttcgccacgaaggatttcccgtgccgtgggagcggattcaggaccgctggtcggacctgagagtcccagctgtgtgtcagggctaggagggctggggggggtggggctgcgcggggcaagtgaccgtgcgtgtaaagggtgaagcgtgtgaggctgtggcggggcggaggtgcaagagctcatacttacctggcaggggagataccatgatcacgaatgtggttttcccagggcgaggcttatccattgcactccggatgtgctgacccctgcgatttccccaaatgtgggaaactcgactgcataatttgtggtagtgggggactgcgttcgcgctttcccctgattttttgtagtttaaagaatagtctacacagcaagggttacttgttttttttactggcttgtgttttagtcttaatcgttactctcacagtcgaaggctgagaaatagtagtaatatgtcgctttctccccgccccgggagaaataagaatcgtcgacctttacacaagctagctagcgcgaaggccgcacagctcttcctttatctaggcggggctgctttttgcagagatttgtctgcccatggtctgcagtctcttggg

SEQ ID NO: 2569 - DNA, 1580 bp, Artificial sequence
  DNA replication origin
ctctgccgccgcggctttttgccccaccgccgacacagctttttgcacactcgccgccttggctttttgccgccgcggctttctgccccctcgctgccgcggctttttgcccctccgccaccgccgctgctttttgccccaccgccgccgtggctttttgcccgccgcggctttttgccatcgcggctttttactcgccacggccttttacccgccgcggctttttgcgccccgctgtcacggctttttgtccccctgccacagcgactttttcgccgccgcggcgttttgcccccgccgccgaggatttttgtccccgccgccacggctctgagggcgggagcggcagactcggctgccagctctactggcgtcctggcaagggcagcgctgaggggtgctcctggtccagctctcctggctcagggattccttgcctaggcgccggcgccccaggctccttgcctaggcccctgtggcctgcatagagtggcgctgcctgtggaggcgatgggagagaagaaggagggcggtggtgggggtgatgcggcggccacggagggtggcacaggggctgcggccagccgggcgctgcagcagtgcgggcagctccagaagctcatcgtcatcttcattggcagcctgtgcgggctgtgcaccaagtgcgctgtgtccaacgacctcacccagcaggagatacagaccccggaggtaaggggttcggggacccgggctgggctccaggagcggcccggacacctccttcggggccccagttcactcctggccgagttgcatctttgagcccacgtcacccccttggaggcttcccctccctcctgcactcgctgatgcggcagccagaggacccaggaccagccctcaccttgggcaggatttgtggagcgggtgcgtggtgggaactgggatggaggctccagggtcccgtgggggtgggggtgggctgcgtgaggacatccccttaccccctgaatttccatctggtccagccctctcatcttgtaggtgaggaaaccgaaggcctgagggagaaatgacttgccaggaacccctgttaaggaaaattaacaaagtgtggttattaaagaagaactgagttgggagtcagacctggaggcccgcacccgtggttaagacattataccaccttgagtctggcctgttgactgagggtgagccactccatcctcatgtgattgtggggtcttaacctcaaggggtttcctgcaggaagaagcaaatgggtttgctttcctagctctgtccagtacgttagggaccctgaggactgaagagattcttggagagccatctggtgtatgtcatgggtgggtctttttggaaggtcagtctgcccagtgggctggctcagcccaaatgaactgtcttgaatctttggagttgtctgtgtacttttaagggcttctcagccttgcaccaaaagatccccctggaaattaggtgggaaaaaccttaacttttgtggggccttgtgtttgtcttaaaagttcatgcacatagccaggtgtggtggctcccacctgttatcctttcctgga

SEQ ID NO: 2570 - DNA, 1000 bp, Artificial sequence
  DNA replication origin
gaaaaagccgcggcggcgagggggcaaaaagcggcggggtgcaaaaggcggcggggggcaaaaagccgcagcggcggggggcgggcaaaaagccgcggcgacaaaattcgcaacggcgaggggtcaaaaagccggggcggactaaaagccctggcgccgggggggcacaaagccgcggcgggcaaaaagccgcggcggcggtggggcaaaaagccaccgcggcgggggcgcaaaaagccgcagcgacgggtgggggcagaaagccgcggcgggcagaaagccgaggcaaggtgggggcaaaaagccgcggcggcagaggggcagaaagccgctgcgggcaaaaagtcgcggcggcggggacaaaaaggcgcggcgggcaaaaagccgcggcggggggcggggaagccacggcgggcaaaaagcctaggcggggtggggggaataagccgcggcggcgggggggcaaaaagccgcggcggcggcggagggtgaaataatggagatggagtggaaggccggcacagcttggcatcgctggagtgcgatgtgataggaaatgtgcagccaaagacaaaaagatgtaagtaggcttgactcattgaagctaagaacccagatgttatcttgagggtattaactaataagcagtttaaatcagaatggcacattctgatttgtttcttgtacgttcacatttggcaggcatggatactgtttgaagagagaaaagtcagtagagagaggtaacaaacttaaatatgtgccaagtctagaaacaagagaccagggggatagggacctttcaaaataaaatgcaagatttgaaaactgattggctgggggatgaggaaaaggcaggtctttaaggtccatccctgttttgctttaagttgttagggggtggttttatcacatgttgtagaatatgtcatttcagttttgaacatcttgagttaaattgtcctagcatatcttatgaatttgattttcttccctggaa

SEQ ID NO: 2571 - DNA, 962 bp, Artificial sequence
  DNA replication origin
agggaccctcgagccctagagggcgctcaccatgagctgcgccgggtcccggagcgcgcggggacttctcttgcttcctgaagcgcctctggctcggtggccgtggtgcgcccctccagtctacgcgatgggcacaggaagcggctggtgcccgctgacagccagggctgttctcgggagtctgcggcgcgccacatggcagcgacagcggctgtgtctggttcggagcgagagaagagagcaagccgccactgaggggctggggcaggcagtcgccagcgccgggctggcactgcggcgctgccgcggtccctggccgctccccggccccgcgtcccgccccccgcgcctccgcgctggactccagccccacctgtgccttggcgccctagctcaccgcgctcggcgcgccagagtgtagtggtgatcccgcaggtcccaggagcgccccagcgccagaccctagccccgggccggggaaaattcttcccgggaagaccgaagggtgcttggtgtagccctggagccctagccctagccacgcttggggaacaagaggtggggtagggatgaggacgcgagggcttccggagggggaaagagcatttgaagtgtaaaggggacggccttggattgcccacagacctgagtcccaatccggactttattcctggctctgcaactttaagggccctacattactttacccggccttggtttccttctccacagcgtgggataatgattcctactcctagaacagtgtcagaactcagggaagccttctaggatgaggtgtccagtagacagtgtctcctaggaacaggctcccgcttcccccagcccctccctcaacaccatgaggctggggcttcacctgacctcttgggagactgtccttttccccaccaccgcccccagtccttcagtgatttttcctttggggaataatttggaatgaa

SEQ ID NO: 2572 - DNA, 715 bp, Artificial sequence
  DNA replication origin
acggcgttgggcatcatgtggatgtaggcagctgcgatttccttgtggaagaccgtgtcttggttgtaggagatgagctcattgctgatgttcaccgtctccaccggcgtgcgggagcagacgtggctgcaccccagcagctgggcaaacaccttccggaagtcggcgttgaaggcatagtgactgggttgagtgaggagttggcccagcagaaccagatgaagacgtcgaatgtggtctcactgacgcaggggaagccggccggagggcctttggggtgtccactgcagaaagggaccatgcagttaaggatgaagaagggcagccagcaacacacgaagacccccatgatcaccgacagggtcttgagaacctcggtctccttcttgatggaaaaccgcaggctggtgtcgggcgcgcagcctgcgctgctccggcagctctgcacgtgctctgcggccctctccagggaggaaatcctgcggatctgcacctgggcgatgcggtagatgcgcgtgtaggtcacgatcatgatggccatggggatgtagaagctgatgagcgaggaagagatggcgtaggttcgattcaggctggagtcacagttctctgccctcacgtcgggctcccaaacggcctcctcccagggcgtccagttggccaggttgtttggcaggtccagcccacctcaagagaccgcctggtccctgtgcca

SEQ ID NO: 2573 - DNA, 1123 bp, Artificial sequence
  DNA replication origin
ccaccccgccctgaacaaccccgagcctcagccaccctcaattcttaccctttcacagctggggagtggagtctgggcctgaggtctcctgtgcgcctctgggcgcctgcgcccgcgctgtgcctttgcgagggcggagctgcgttgtgctcagcacagactcggagagcatcgcgagggcggagctgagttctcctgtgcacagacttcggagatacagcgaaggcggagcagtgttctccttggcacagacccgggcgggccgggggcaccgggagggcggagctgcgttctgctcagcacagacccgggggacaccgcgaaggcagagcagcgttctcctcagcacggaccttgggggcactgcctcgctttgggacaactcggggccgcatcgacggtgaataaaatccttcctgtttgcagccctgaataatcagggtcagaaaccagatagaagggttcagtgtggaaaacgggaaaccaaaagcccctctgaatcctgcccaccgaggttctccccagccaaggtgaggcggccgcagtgcgagatccacaccgcagcctcggaagacaaatgcagcattcctaatgcagacatggcactcaaaagatgacaccccccttgctcatgtaacaagcacctgtagtgctaatgcactgcctcgacacaaaaacattaatataagatccacaatcccctcgctgccgtgcagtcctaagacagcgatcataataatcaacattgacatagtcaatacaaacgtagtaacgaacctaggcttaaggttggtgttaggggttaagtttagggttaggggttggagataggggttggggtcagagttaggggttaggagtcaacatttagagttaggggttaagagaggttgggggttagggattaggggttagggttgggttagggggagggggagagttgtggttaggggttagggttagggattagggttaaggttaggggtcagggtcaggggtcccactctgttggctgtctatttactctactgactgttccctttgccatgcaaaagctatttagtttaattaagtcccagctatttatctttgtttttattgcatttgcatttgggttcttggt

SEQ ID NO: 2574 - DNA, 916 bp, Artificial sequence
  DNA replication origin
gcccacaggggcccttcatggctgaggcttccagagggtagtgggacggcaaccccgctccccaccagccgcccaccacagcgttcatgatacagcttcggagtgtgggtcggggtctatctgggaaaccagggcaaaggcggtggcagctggcagcacccacacccacagctggggcactgctcacatgagcccccatcagcaggccccttggttgtgccacaggcaggggtcctgccccagggagggggtagtccgggggggctcgagggtgtggcacaggccagctgtcactcctccctggagaggcagctggggacgcagctgggaggggagccaggagcagagacagcccggggccagcaggtgggtgacaggtggggcagcgggaggggcacgcgctgtccgcctggggctggggtgtagagacgggaacctgccccccaatgcctggtgctggcccagcctccccccggggtctctagcaccttcccagttgtgtctgcaccctcctgggcatggcgggggagggtgggggtcaacccctttccttgtagtcccgtgccagtgggcaagggagacgccccagtgagcaggagcctagcctctctgcctggggaggccaggtgatgagccacccggagtgggagggggccttgaacttgggtctgaaagatgagcaggggtttgctgggccgggtacaggcaagagctaatgcaggaaggcagagagcaggagcgcttagagggagtggctctgtgcagccggagtcagatgggtgaccctcactcaggaggaagcactgggaccctctctcctcacgctgggtcccccgcctccctctaggatccccacacccaggtccttctgggcctctgccacacagatcaggtctggaaggctccctggaggagg

SEQ ID NO: 2575 - DNA, 1130 bp, Artificial sequence
  DNA replication origin
agggggggctccatccacctcccaccccagcacaccccccccaccctcacagtcccaggctccacttcggggcccggcccccagccagggacaccagtatgcacagaaccctgaaggatgcctcgttctgagtggagctccccaagctcaggtctgttcctgtcggcctcgtccactgccaaccacccccaactcgggacactggcccttcttctccttcctccacagacctccccacctctacctcccagtccccactgagggcctgacaatgcccatcttcggcccagcactcccagctacccactgccgtccttcccctgcctggaagtgcagacacttccagaatgggtgtccggctcggtccccgtcctgactctgctccctacaggcagctcctgtggctgccccgcccagctgtcctgagcccagaggtcggctggagagggtcagtcctctctggggtcctggggagtcaggaggctctggtgaagagcaagggctgcagggaggatgtcgaggggaggaggagcttctcctccaggcctgaccacaggtctcctggacaccacagggagctggcgggaggactggggagttgggctgggccttccaccagggtggttcaggactccctgcacagcactgaggtctctggtcccctcattagcccagcctcccgtgggatcatagacttgacccctcaagtcactgcagagcccaagagtggagaaacacagcaccgtgtgccgggaaaaggtgcccacaggggcccttcatggctgaggcttccagagggtagtgggacggcaaccccgctccccaccagccgcccaccacagcgttcatgatacagcttcggagtgtgggtcggggtctatctgggaaaccagggcaaaggcggtggcagctggcagcacccacacccacagctggggcactgctcacatgagcccccatcagcaggccccttggttgtgccacaggcaggggtcctgccccagggagggggtagtccgggggggctcgagggtgtggcacaggccagctgtcactcctccctggagaggcagctggggacgcagctgggaggggagccaggagcagagacagcccggggccagcaggtg

SEQ ID NO: 2576 - DNA, 813 bp, Artificial sequence
  DNA replication origin
accccgacccacactccgaagctgtatcatgaacgctgtggtgggcggctggtggggagcggggttgccgtcccactaccctctggaagcctcagccatgaagggcccctgtgggcaccttttcccggcacacggtgctgtgtttctccactcttgggctctgcagtgacttgaggggtcaagtctatgatcccacgggaggctgggctaatgaggggaccagagacctcagtgctgtgcagggagtcctgaaccaccctggtggaaggcccagcccaactccccagtcctcccgccagctccctgtggtgtccaggagacctgtggtcaggcctggaggagaagctcctcctcccctcgacatcctccctgcagcccttgctcttcaccagagcctcctgactccccaggaccccagagaggactgaccctctccagccgacctctgggctcaggacagctgggcggggcagccacaggagctgcctgtagggagcagagtcaggacggggaccgagccggacacccattctggaagtgtctgcacttccaggcaggggaaggacggcagtgggtagctgggagtgctgggccgaagatgggcattgtcaggccctcagtggggactgggaggtagaggtggggaggtctgtggaggaaggagaagaagggccagtgtcccgagttgggggtggttggcagtggacgaggccgacaggaacagacctgagcttggggagctccactcagaacgaggcatccttcagggttctgtgcatactggtgtccctggctgggggccgggccccgaag

SEQ ID NO: 2577 - DNA, 927 bp, Artificial sequence
  DNA replication origin
ggatggaaggatagatggatggatggatgatgaataagtgtggatgggtggatggatgcatggtggataaataagtgaatgatgatagaagctccagggaagaggatgatggttctgggaagttaactgcacttcaatataaagaagagcattccttggataaggatagactgagtagaaaaaagaagaaagaggaagaagaagaagaagaagaagaagaagaagaagaagaagaagaagaaggaggaggaggagggggaaggggagggtgggaagggggaagggagggggagggagagggggagaaggagaggagaaggagaaggaggcacattctaaatgcaccaggctgggcgtggtgtctcatgcctgtaatcccagcactttgggaggcaaaggcaggcagataacctgagctcaggagtttgagaccaactgggccaacatggtgaaacactgtctctactaaaaaatacaaaaattagccaggtgtggtggcatgtgcacctgtagtcccagctaatcaggaggctgaggcaggagaatcacttgaacccaggaaatggaggttgcagtgacccatgatctagccactgcactccagccttggcaacagagtgagattccatctcaaaaacaaaaacaaaaacagcagaggagagaggaagagaggaaggaagagaaagagaggagagagggaagagggatagtggagggaaggctagaggaaggaagagaggaaggaagaatgaaggaggagaagagagaaagaaaatgaggaaaaaaataaggaaagggaggctgggcatggtgactcacactggtaatcccatcactttgggaggctgaggcaggcagatcacgaggtcaggagttcgagaccagcctggccaacatgatgaaaccccgtctctactaaaaatacaa

SEQ ID NO: 2578 - DNA, 1338 bp, Artificial sequence
  DNA replication origin
tctaatatgagaatccaagtggcaatgtgtgatgtgtctggaccacgtggtgtgaaatgcagtcggcttctcctgggaaggttactcagacagaagctttcttcacaagcatgctccccacggcctcctccctttcacctgcaccatgtctgtctcccattcaagactggcaaccccagccaggcacagtggctcatgcctgtgatcctatcattttgggaggccaaggcaggaggatcccttgaggccaggagtttgagaacaggagacaacacaacgaggctctatctgtacaaaatataacaaaacttagccaggcaaggccatgtgtacctatagttccagctattcaggaggctgaagtgggaggattgcttgagaccaggaggaagaggctgtagtgagctgtgactgtgccactgcactccagcctgggagatagagcaacattgtctcaaaaaaaaaaaaaaaaaaaaaaaaaaaaaaaaaaaaaaaagatgtggcagccccttgagaaaggaagagctcctatcttgacgatttcagccaatgcccgtgagtaccagcaggagcctctatccctctctgccccaccctgcatccacgcattcattacatcattcatcccccctcattttctcaacacccacttgtgccaggccctgaggtggctctaggaccgagagacagggatcacagagctccccagtggagtggagggtacagacatgtcgacaagaacactggaacccagtgcgggctgggagcgtgcggtcagacctgcaaagcggggaagagaagggggtcggagaagcttcgcggggagaatggggtgaggcctgaggcctgtctcggaaagcagaggggcaggtgggagagtggaaaagacattcctggaggagggaaccaaaggtgctgaatgtgcagaggcagagatcctgcgacaggagagaaagtcctcgagaatgaccccagcataggatgagaacaaagaaggggatcaaaggaaacgggccctcggtggccgggtgctagaaggctctgagtgtcaggagagggagcgtgacctccctcatggggtcagtagggccactgtatggctttaagccagggaaggacaggagaggtttctgtaactgtggctgtaatgatggaagcgtctggaggcggagaggaggctcctgcgacgacccaggcttcagagagagagagagagaggaaagaaggaagggcagataggaaagctaggaaagatgcacagagagaccaaggcagaaaaggctgaagggaagacggcagtggtaggaagggggcagagccgtctcaggatgcagccag

SEQ ID NO: 2579 - DNA, 840 bp, Artificial sequence
  DNA replication origin
agtgactggcgctcctccacccctaaccagacacacccgaaaacagacggccagacacagagtgaccggcacagagaagacaatacagaaatacgcagggacaaggacagaccatcggacgctcggacacggacccaggcaggatcacctggacctctgggttccccaacggagaccctcggggaaggcccggagcatagcacgcccctgtggagccccgtgcgccccacttggcagcagccacgccccccgcgcacaccccacttcgggctggctctggaagaccccctctccccagccccgcaaccccgggactctgggaggcatctctcgtcacccagcgtttctgaggcgccgggacaggggctgggtgggtgggcgtcggcgcaggagtgagggctgcagacggtgggcgggggccgggcgcgcgggcggaggtgcgggaggacgcgctagtgtcggggcagggctggccagtgtcccagggatcaggagccgggagcggtccgcgtgggtcccggaggggacagatggctgccccgggcgttgcccagtgaggggcagtgggcaagggagctcgtagaatcccgggtcagcggggtggggcgctgggtaagtggacagggtggtaccttgactgaggacgaaggggcagaagaggggagggcgggcgtcgggaagtgacaggagacggggcaggttgttgggggcgtggggtaggaatcggaggggagttgaaaaggggggtgctggttggcagaggcgtcggggcaaggacaggagccaggagcgcaggcggggcccgacggcagccacccccggggccagacttggcgcggg

SEQ ID NO: 2580 - DNA, 1112 bp, Artificial sequence
  DNA replication origin
cacgcccccaacaacctgccccgtctcctgtcacttcccgacgcccgccctcccctcttctgccccttcgtcctcagtcaaggtaccaccctgtccacttacccagcgccccaccccgctgacccgggattctacgagctcccttgcccactgcccctcactgggcaacgcccggggcagccatctgtcccctccgggacccacgcggaccgctcccggctcctgatccctgggacactggccagccctgccccgacactagcgcgtcctcccgcacctccgcccgcgcgcccggcccccgcccaccgtctgcagccctcactcctgcgccgacgcccacccacccagcccctgtcccggcgcctcagaaacgctgggtgacgagagatgcctcccagagtcccggggttgcggggctggggagagggggtcttccagagccagcccgaagtggggtgtgcgcggggggcgtggctgctgccaagtggggcgcacggggctccacaggggcgtgctatgctccgggccttccccgagggtctccgttggggaacccagaggtccaggtgatcctgcctgggtccgtgtccgagcgtccgatggtctgtccttgtccctgcgtatttctgtattgtcttctctgtgccggtcactctgtgtctggccgtctgttttcgggtgtgtctggttaggggtggaggagcgccagtcactggctctctgaattgggggaggggccgccttctgtgggtttttctgtttgtccatctggtgtgcctgtgtgtcggctgcgagacgcccaggcgcagaataagacctgagccactttctaagaaaagagaccatcccgcaccctcccccaaaggagcggcagccattctggacgcagaggagctggaatgagggaggccccagggtctgccctggggcaaccggcgcccaagcatctccaccagccccttccaaagccccggtgcctgccttgcacctgcctgctcccggaaggagactgcgtctgccagggcgccctgctcgggtgccattaagtggaggtctgggaagtttctgcagaagagcgttctaccggtcgggcgtggctgacaggaggcggt

SEQ ID NO: 2581 - DNA, 1096 bp, Artificial sequence
  DNA replication origin
ccttctgtgggtttttctgtttgtccatctggtgtgcctgtgtgtcggctgcgagacgcccaggcgcagaataagacctgagccactttctaagaaaagagaccatcccgcaccctcccccaaaggagcggcagccattctggacgcagaggagctggaatgagggaggccccagggtctgccctggggcaaccggcgcccaagcatctccaccagccccttccaaagccccggtgcctgccttgcacctgcctgctcccggaaggagactgcgtctgccagggcgccctgctcgggtgccattaagtggaggtctgggaagtttctgcagaagagcgttctaccggtcgggcgtggctgacaggaggcggtggaccccagccccccagctgcaggttggagaggggagttgggagcgagcctggggcgagcccccatcccaccatgcagcagcccggggctgggccccggaagacaccctctccctcttggtttaaggctcttgcagtcttgaaattcttaatttttgaacaagagggcccaggtttttgttttgcgctaagcgcagcaaattgcaatagcaggtcctgactagtaaaggaggggtggggagtcctgggccggcaagaagtcaacctgggggaccttgccttgccgccatcattcttccaattcatgcattcattcatttgatcaacacacatgtatgtgttgacctatgaatcatttgctggtctctgttgtaggcgctggggtttcagctatgaaaggctctgttcaggtggagctgatgttcaggtagagaaacagcaataaacaaacagctaatgagccttgactgggaagctggggagcgtgacctgtgagacttagccctcaacttctaagagcttgggggtggggacagagtaagcagcacagcacccttgagcagggctaccaccaggggcctgggaggagcccaggtctgcaggaaggctgcgaggttcagggaggaggcaacacctgcacagtcttctttctttctttattttatttttatcttttaataaggacagggcctccctatgtctcccaggctggaatgaagtggtgt

SEQ ID NO: 2582 - DNA, 2018 bp, Artificial sequence
  DNA replication origin
tggagtgcagtagcacaatctcatctcactgcaacctctgcctcctaagtttaggtgattttgttgcctcagcctccctagtagccgggtttacaggcttttgccactatgcctggctaattttttgtatttttagtagagacagggtttcgtcatgttgcccaggctggtctcgatctcctgacctggggtgatccacccgcttcagcctctcaaagtgctgcgattacaggcatgagccaccatgcccggccccaaaatgcacttttaacatggtctttgttattgcatgtttctaattttgttgcaccctggtgagagaatgtgatttgtgtaacagcaattcttgggaaaggggctgaggcttcctgctcctttagcacagctaaattttcccaaacgccatccatgagcttggaaagagcattgtactctgttgggatgggctcaaatctctctgtaaaaatgagtgttcttctgttgttgttgttctgttttttgtttgttttgttttgtttgttttttgtctcagtcgttttgtttgctcagatcttttgatgatccagatgatcttttaatttatgcaggatgtttctctgcttgtgcaggctggtgggattggggactggagagaggataagtgtctgcttgcccaggactggcaaactgtcacttgccctggttgtgccttgccaggagctcccgtgcctgtctctgagagtgtcatgagcgcagcggtggtagttgtgtggtggatgcatttcccctgggttggggggtgggtggctggtcctagctctgtttgttgttgccgatgagacacagcacacttctgcttcctgatggatcttgtcggtcatttgacttcttcctggtctgggctcctgagctggccctccgcaggccaagcaggaatggagctggctgctacaagagttccttcactagagggcatctctcctctctcctcccacacatgggaacacaagggtgggctttcctccgcccactgtgatccgcagcccggctttcccctcctcaccctctgctctcagacagacttggttttcgctggtgtctgtgagaggtgattcttcatggtgccaagaatgtggatttttttgagagcaggcactctcacagatatttgcacacccatgttcaaagcagcgtgattcacaagagtcaaaaggtagaagcattctgagggtctatgggtgagtggatgggcaagcgaaatgtggttatgcatacagtagactgttactgaacctttaccaggaaggagattcttttttttctttctttttgtggaaaatgcagtctcgctatattgcccaggcaggtctcgaactcctgggttcaagctatcttcctacctctgcctccctaacagctaggataataggcgtgagcctataatatcacccagccaggagggaaattctgagaggtgtgccaacacacatgaaccttgaggacattgtgctagatggaataagccagccacaaaaggacaaatacattgcgatttcacttacatgaggggcccagaatgggcaaattcaaatacagaaagagcaatggttaacaaaaggagggagttggtgttcaatgggtctggtttccttttgggaagatgaagacgttctggagatggacggtggtaggggatatgcgacaatgtgagtgcacttaatgccagttataacacggggagcgcgtgtgcacacggctctgggagttctcgtgcagcactcagagctcagcgtgggcgagggcgtcacccctctgggggcgtccatggggccttggagaagggaggcttcagggcaccagagcagtctaccgggagaggccgggccgagcgcttgttcacccccagccctcttagggaactttcacatgcttctcccactaggcctaggcacccctccctactctccctaccctcctggttccctgaccctcagtgactgtgtccttcaagactgaactccagagtccccacccgagga

SEQ ID NO: 2583 - DNA, 1199 bp, Artificial sequence
  DNA replication origin
ggagaggcggacagcggcggcgcggcggagagacggacagcggcggagaggcggacagcggcggagaggcggatagcggcggcgcggcggagaggcggacagcggcggagaggcggacagcggcggcgcggcggagagacggacagcggcggagaggcggacagaggcggagaggcggacagcggcggcgcggcggagaggcggacagcggcggagaggcggacagcggcggcgcggcggagagacggacagcggcggagaggcggacagcggcggagaggcggacagcggcggcgcggcggagagacggacagcggcggagaggcggacagcggcggcgaggcgcgcagcggcggcgcaggcgcggagaggcgctggcgccggctctggcgcggagaggcgcaggcccaggctccactccccagctgtgaaagggtaagaaccgagggtggctgagactcggggttgttcagggcggggtgggctctggacccagcaggcccggcacccaggtcagggctccaggggaggccgggtgggcgaaggccaagaaggggctggggctggtcaggaagggctcctggtgaccggagcactttgcgtgagccagcgtgggaggaaggtgggctggatgagccagggaggcgccgggaggggccttggcagaggcgaccccctccgtcacccccaggccactgaaccctgggtagcggagaaccgacaggggaggctgcagacagaggagtggaggctccccggctttgggggctctgagtagaagcatctagggtgtccctcaagaggcccccaaacgcttccccatggtgagaaaagaaggtgcagagaggggcacggcgctggtgcagaggggcacacagcgagatttgctgtgagttcttttattgccccaagtgtacctcatcttggtagatttctattggctttaaaaatgtgtgtgttttgctgttggggagtggggtattatacggatgtcagattttgctggttgactgttcagatcttttgtaaatccttgctccttttgtgcctagtttcactctgtcacttacactagagtgcggtggcacgaacatgactcactgcagccttgacttcctagggtcaagtacttcccctggcttaacctcctgagtagctggtactataggtgtgtgccgccacacctggctaaatttaaa

SEQ ID NO: 2584 - DNA, 2048 bp, Artificial sequence
  DNA replication origin
cctctccgccgcgccgccgctggccgcctctccgccgccgtccgcctctccgccgcgccgccgctggccgcctctccgccgccggccgcctctccgccgccgtccgcctctccgccgcgccgccgccgtccgcctctccgccgccgtccgcctctccgccgcgccgccgccgtccgcctctccgccgccgtccgcctctccgccgcgccgccgccgtccgcctctccgccgccgtccgcctctccgccgcgccgccgctggccgcctctccgccgccgtccgcctctccgccgcgccgccgctggccgcctctccgccgctgtccgcctctccgccgcgccgccgctgtccgtctctccgccgcgccgccgctggccgcctctccgccgctgtccgtctctccgccgcgccgccgctggccgcctctccgccactggccccctctccgccacgccggcgccagcgctgtgtgcctttgcgagggcggagctgcggtctcctcagcacagacccggagagcattgcgagggcggagctgagttctcctctgcagacttcggagatacagcgaaggcagagcaatgttctcctcagcagagacccgggcgggcgggccggtggcaccgcgagggcggagctgcgttctgctctgcacagaccttgggggcactgcctcgctttgggacaactcagggccgcatggacagtgaataaaatccttcctgtttgcagccctgtttgtggttggtggcagcgatggacactgcagccagccagagcgtagaaaggcgtcggggtaagtgcactatccaggctgcactgtgggtggcctgggacgggttgggagccctatctcaggcgtcactgcccgtcttgggtggccggttgggtgtgctatctggggctgtgctgcctgcaccgggcggggggggggtggtttgggggccaaaccggggctgcactgcctttggtggggagccggttgggggcactatcccagactgtattgctggcaacagtgaggtgggctaagtgtgctatccggggctgcactgtgcggctgtcgggggggtggcggtttcgggttgagggcgctatggggtgctgtaatgcccatggtgtggggaggcggggcagtttgggtatgttgggtgtgctattgggggggtgacactgctggtggtagggggcagggtgggttgggggccatatcaggggctgcactgatggctttagctaggatttctggtactatgttaaacaacagtggtgacagggggcatccttatgttccagatcttagaggaaaagctttccatttttccccattccatatgattctagctgtgggtgtctttcctgtagtttttattacgttgcggtatgtttcttctgtgcccgtttctttgaggatttatagcatgaagggatgttgaatttcatcaaatgctttttcagtttcagttgacgtgatgatactgtttttgtcgtttatttggttgatatgatgtatcacattgtatgttgagtgacccttgggtcccagggatacatcccacttgatcatgatgaattatctttttaatgtattactgaatttgattcactggtattttgttgaggatttttgcatcaatattagagatcctggcctgtagtttccttctttgatgcttttgtctgattttggtatcacagtaataatggtctcatagaataagtttggaagtattccctcctgtttttcaaaatagtttgagcaggattcgtactaggtctttaaattgtttggtgtgaagccatcagcagtgaagacatcagttcctgggcttttctttactgggagactttttctgatggcttcaatctcattacttgttaccaatctgttctggtcttggatgttttcattgtttaacctaagtaggttgtatgcatctaggaatttgccaatttctactaggctttccaatttattggcatatagtagccagttatgatcctttgaatttctgaagtattagttgtaatgtctcctttttttaatc

SEQ ID NO: 2585 - DNA, 1269 bp, Artificial sequence
  DNA replication origin
tactgatacattcttacgtttatacattctttcatatattcatatattcttttaacagtatcaatggtttggagttatgtgtacaaaaccatgacctatatgtaatacaactaataacaggcatttacaattcaaggcatattatatacaaagctttaacttcttatcaaaatattttgttttttttctttctgttttggcagatactatgaacactacattcaactcacagacaccatggagcccttactaagcataaagtactgtgaaaggccagggctaggacagaactgagacagggccagggataggacagaacaggggcagggtcatggccagagaaaaaccaggggcagggtcacggccagggacatgagaggaccaaggccagggccagaagcagggcagaaccagggccagggcagggacatggcagggccagggccatggcaggatcagggtcagcagaaggccagggcagggctagggtagtgcagggccaaggcagggcagggtcagtgtagagcaaggaacgggccagggtatggcagggcagggacagggaggtccagggccagagtcaggtccaggacatggacaggacagggccagaaatatggcaggaccagaaaggggacagggcaagggcaaggccagagaaggaccatggaaaaaacacggccagggagggtccagggcaagggcaaggccagggcagaaccagagccagagcaggccaaaggcagggccagggcagggcaaggccagggtagggcggggccagtgtagggtgagggtagggccagggtgagttcagggccagggcaggactaagatagcacagggccaaggcagggccagggcagggccaaaaggaggggccagggccaagcatggccagtgtcagacctggggattgtcagggccagggtcagggtcaaggctgggccagggacagggccagagcaagggcagggccagggagaaagcagaaccagagaggatccagagcaaggccagggtcagggcagaaccaggaccaggataaggcaaagccaaggccagggcagggcaaggccagggcaaggcaagaccagggaagggcaaggccagagtagaaaaggccagtgtagggccaggccagggtaggagaaggccatggtagggccaaggccaaggcagggcagggctagggtagcacagggcatggccaaaaacagggcagggccataacagtggcaggactagcaacagggccagggcaagcgc

SEQ ID NO: 2586 - DNA, 1000 bp, Artificial sequence
  DNA replication origin
cggcggcggtggggcaaaaagctggagcgggtaaaaagccgcggcaacaaaaagcctcggcggcgggggcgcaaaaagccgcggtgggcataaacccgaggcggcgggggggggggggtgcaaaaaaccgccgtggggaaaaagccgcggcggtggggggcaaaatcccgcggcgggcaaaaagccgcggcggcgaggggggtcacaacaaagccgcggcgggcaaaaagccgaggcggggtgggggggggggagggggggaagccgcggcggcggggggcgaaaagccacggcggcggggggtaaaaagccgcggcggtcaaaaagccgaggcggggtgggggggggggagggggggaagccgcggcggcggggggcgaaaagccacggcggcggggggtaaaaagccgcggcggtcaaaaagccgaggcggggtggggggtggggggggggaagccgcggcggggggcgaaaagccacggcggtggggggcaaaatagtggagatggggtagaaggacggcacagtttggtattgctggagtgtgatgtgataggaaatgtgcagccaaagagaaaaaaagatgtaagtaagcttgactcattgcagctaagaacccagatgttatcttgagggtattaactaataagcagtttaaatcagaatggcatattctgatttgttttttgtatgttcacatttggcaggcatagatactgtttgaagagagaaaagacagtagatagaggtaacaaacttaaatatgtgcgaagtctagaaacaagagaccgggggataaggacctttcaaaataaaatgcaagatttgaaaactgattggctggggcatgaggaaaaggcaggtctttaaggtcaatccctgttttgctttgttaggggttggttttatcacatattgtagaacatgtcatttcagttttgaacatcttgagttaaattgtcctaacatatcttatgaatttgattttcttccctgggaa

SEQ ID NO: 2587 - DNA, 889 bp, Artificial sequence
  DNA replication origin
acaccctccgcagccactggcccgggtgctaagtcccccattgcccggggccagcagggctggccggctgctccgagtgcggggcccaccaagcccaagcccacccggaactccagctggcccgcaagcgccgcacgcagccccggttcccgctcgtgcctctccctccacacctccctgcaagctgagggagtgggctccagccttggccagcccagaaaggggctcccacagtgcaggggggaggctgaagggctcctcaaatgccaccaaagtgggagcccaggcaggggaggtgccgagagcaagcgagggctctgaggactgccagcatgctgtcacctctcaatctgaattgttctaattaagatcacatactaggaatagggtgatttctccaagtttagaagaattgatttattttctgataaagatggtgcttggcaacattttttcctcaaataaccagtgagtatttattgattgaccagttctgtgcttgtacaaggcattggaaaatacaagagaagtttagggagtcattatgtggttggagagaagattttgaatacaggaagcaattagagcataaagcagtaatgatctcattaattggtgttatgtacaacatagatctgatgagaggtcagagatggttaaaggttctggaatagtctggaaagttgtcatgaagcaggtgggacctaggcttgagaggtagatttgtgtggcagaggagagaacagcaagtgcaggtgagaggaagcaggaatatttggtgatgagagggtgtaggggctagtgtgggatccagctttattaaagggaaggttcctaacacattcatctaactgatttccattgcacattccttgaactcctttgtgcc

SEQ ID NO: 2588 - DNA, 850 bp, Artificial sequence
  DNA replication origin
aaatctgcaggaaaaagcctgctcggcacgggacacatccaggaaaacaatgtggtcagctgaagcaggaaacgggttagaggatagggtcggagccgggaaaaccggggggcggcgagcggaaggcagccgtcgcctccctcaagctagggacgatagtgactataaatgccacccccaatatttttttgacacccaagctcagagatcccagatatcccacccaatcccaggctggggatgggaggaggtcggtgaggtcgcagtcctgactcctcgcaccaggcggtgcccgagaagatccggccccggacgaggcccagggggctggagggacgcaagcgggagcgcggagcccggcgactagctccctcgcgtgccgcagcggcgaccctttctacttggtctttccttttcctccgagcgccgggaggaggaagctcccgctagcgtctcccacttcccgcggctggaggaaggggccacgctgagggaacaagacagggagcagaggcggcggggttcaggcgagcgggaagcgggaagcgagaggcgggtgtgagatggggtcctgaggctggaagggagcccggggacaactggagttgcacacgctcggaaggcgggaggcggcaaggagaaggctgccttagaggtgaggggaattggggcatgatcatgggccgcgatgttgcgtgaagcgcaaggatgtcaggaactgtgggggccgagatgtggtctagggatgggagtgggcgaagagaagtccatcggggcgggccggggggtgggactcggggagagccccggaagctgcgcggaacacccatcctcctgggtcctaggctgg

SEQ ID NO: 2589 - DNA, 1682 bp, Artificial sequence
  DNA replication origin
cccgcggctggaggaaggggccacgctgagggaacaagacagggagcagaggcggcggggttcaggcgagcgggaagcgggaagcgagaggcgggtgtgagatggggtcctgaggctggaagggagcccggggacaactggagttgcacacgctcggaaggcgggaggcggcaaggagaaggctgccttagaggtgaggggaattggggcatgatcatgggccgcgatgttgcgtgaagcgcaaggatgtcaggaactgtgggggccgagatgtggtctagggatgggagtgggcgaagagaagtccatcggggcgggccggggggtgggactcggggagagccccggaagctgcgcggaacacccatcctcctgggtcctaggctgggacccgggctgtccgccagggctgggagacactggaggaggccggccgatgattacgcgcgatgccaacgacgactgccctacggtggaccgcggctgcccgtgtgcggaggaaagggagaggcggctgggtgccggctgcgctgcggtccgtgagccaggacagagtcccaggctgtacagtgatgggcggagagactcgcagtcctgagaagtattatgggctgtactgggagatttggagagggtggaggaggggcggtctgagggattccgggcggcaccgctaaggcgatgccgcgagcagcatccgcgccctctccttcccgccccagcccgggtttgttcagtcagggctccagcccggcggccgggaggaagaaaaggaagagggaaggagcctttacctggctctgacgcgacgggtcccaggcccccggctccgcttcccactcagagctctcctcccctctcttccccgccacccgtttctacgcagatctgtgccccagtccctggaggagcctccgccaactccgcaggaccccgccgggaagtagagcccacccctttaccaatcaccgcccgttttctatcgaccgatggggcccatagccaataggaagagctgatcccgagaggcccggaatgagggggaggagctggcaaaacttggaggtgtgactagcactgccgaggcgtggtcacagattaagctccaccccgggttgttgaacccctaagtagaactgatgggcgggattaaggtggaaccgacgaccaaacacaaactcttgagctgaggcacggccaattgggccggggtagagaggaggggtgttgcggggaattttaaccaataaagagtagagaccggtggagactgtagaccctcttccaataagaagcgggaagggcgtgccttgccactttcactagggctaaagcagggtttgccgaaacctcccgaagccggccaatgagatcggaggcggagccaagctcagccgaccagaaagccgaattgatctcagcaccgttactggggcggtgcctacggtcttcaagccactaagctctcgtgaggggaggccccggagccttccaatgagggactggggctaactctagttcttccaatcggtgcgcggcgctggcaattcaaactgataccgggttggagaggcaggaaaagcggaagagggagcgaaaaccaacgtgttcggtgacagaccccagcgccgactgagcctctaaagcgacttcagctctgccccaccaacaccaccgcgcgc

SEQ ID NO: 2590 - DNA, 867 bp, Artificial sequence
  DNA replication origin
ggtttgccgaaacctcccgaagccggccaatgagatcggaggcggagccaagctcagccgaccagaaagccgaattgatctcagcaccgttactggggcggtgcctacggtcttcaagccactaagctctcgtgaggggaggccccggagccttccaatgagggactggggctaactctagttcttccaatcggtgcgcggcgctggcaattcaaactgataccgggttggagaggcaggaaaagcggaagagggagcgaaaaccaacgtgttcggtgacagaccccagcgccgactgagcctctaaagcgacttcagctctgccccaccaacaccaccgcgcgcccgggaacagccgctccgggaagaaacctgaggggactgcggggggcacgagggacagctgagggaagggaggacgcgagagaaacagcgcgagcacgctgagggccgggggttgccaggagaggggcccgcggacccgcagagcggaggaaggtccgggagaaaaggggcgggacggaggagaatccgggatcgcctggcagaaaaagagaagggagtttctgaatcctgggaagaggaggcgtgggtagggacgcttagcccgagatccgacagcagggaaccggagcgctccgggggaggggcttaatgctggggaagggatgtcttaaaagaggagaagctttaaattagacgatcggagaaggctgagggaattgctatgaaggggcgggagctgaagtgtagaggactcctttagacagcagaaagggaaagccgttgagaagttcccttcaaactccacctgcctcctctccaattcaaactccactcccttctccaaaagttaaaaggaaagcc

SEQ ID NO: 2591 - DNA, 1103 bp, Artificial sequence
  DNA replication origin
tagtgaatatgactggacaatgaaactattttgtaatttctttcctgaaaggtaaaggcgttagaacatagaatctttcactgattctacagaatcttaagactccttcagagatggcagtcattcctaccgtgctgaacatcatgttgtcacggtgagaatcagaactaaattgattaagggtctgaaacagtttggcactcttgggcacttattctgataagaaagctgatgagacagggtaatgaaaagaggctgcaagaaatgaccattcatgcattcagccaacatttaggccaccctcctgtattccaggcactgtacgtggcactgagaatgcaaagcaaaacgagtcatggtctactggcgggagccttctcagcggagaaaagatcaacaagaaaagtgcctgctggagacctctcctagggcataaaccaatatagaggtggggcagctacgtcagcctgaggtgtccttaggcagaacagaaagtgagaatcagagcagtatctcatttctgaacacctggattgtagctttccctggactgactgtcaaaggaggtggttttaaaaagcaagccaaacaggtttccatcctttaggaagaccctggaacgtgccagttgattctgacaatttctcatgaacagaaacacctaggaagggagaactggtgagtcttttcaagaggaggaagtccctcaaaaggggctgtgtttcgcaaacggcgccccaaaagggctgaaatacttcgatctggaggaaaaagactcaggcactgagggaaggggagggtgcacatctggagtaatttcaaggctttttccgtgttatctgaggtggcaacaagtaaagatttgttcgttttattatttttttaatttttaaagattttcttttccccccttttccccctcccggccactccggtttgtgtttgccacaagactcataattcctttagaaagtggagtcgaattcataaaagtgacggggggagagcgcggagagggaaggctgggagccccagggagtcttcactacctacactgccgctcagctcccggcgcgagtggaggtcggggtggggagacgcga

SEQ ID NO: 2592 - DNA, 1607 bp, Artificial sequence
  DNA replication origin
agatgatccagtcatttgttaagcgcctcaaataagacatgccctagatgtttttttgtttgttttgtcaaattgggattatctttgtgtctttggagaatataaaatactaacatgaggtaagcactaaggttctgagatggccgtggaagagatgacaaactccatcaccatgcctgagagtgtccaatcgtctctgcgggggccacatatttttgtattacactgtatttgaaataacaacaacaacaacaaaaaacccttcaagattcataaaattggacaactgtctttgtaacacttctagtggtaaaaccagtaaggatggctagtttgcaacccatctgagcagcctctctggtttcatagatatgttttctctctgacattgaacggctttcaacttgaaacggaatgctacatcacaaagataaacaggtttgaaaggaaccggttttccttgtaatcctaaacgttcaagtctgcgcattaaaagacattatctgaagaagggtgcacaagcttcctgttggccgccagaagggttctctgcaggacacagatcaagtaccacagtcttagggggagaccagacgcgggatctctgcacacctccccaaaggacaatggcaggaggaaaaggagaaagagacagacgtcacttcctccgccagctccggcagcgggttgatcggctgagtcggcggagggtggggcggaagagcagacggggactgggaaaggcgctgtcggtgacatcacggatagggcgatttctatgtagatgaggcagcgcaggggctgctgcttcgccactaaggagttcccgtgccgtgggagcgggttcaggaccgctggtcggacctgagagtcccagctgtgtgtcagggctaggagggctgtgggcggtgggggggtggggtgggggggggggcgttcgcggggcaagtgaccgtgcgtgtaaagggtgaagcgtgtgaggctgtggcggggcggaggtgcaaaagctcatacttacctggaaggggagataccatgatcacgaaggtggtttttctcagggcgaagcttatccattgcgttccggatgtgctgacccctgcgatttccccaagtgtgggaaactcgagtgcataatttgtgatagtagggaactacgttcgcgctttctcttggtgcttctgtggtgcgaatagtaggtgagccgtaagtgtttttgtaattcagggtgcgggctcgtgttttgtggctgtgttctgtccggtcagttgtttccgttcgcaacggttagttttcctttgtgaggccatgtttggggacagcttagaactatccacttgctctcttgggaggcgaatttcagtctctgttggttgggttgttctcccaggttagctgccgcggtacttgctaggtggagctcagggatcaagggtcgggagctttctggtttgttcagtgctcccagggcttctaacatctcttaaaaactctggtgttttctgtcatcctcggagttacctcttagcctctgtttttttgttgttgttttttccccccctccctaagacaagtctcgctgtaccgtccaggctggagaagtggcg

SEQ ID NO: 2593 - DNA, 761 bp, Artificial sequence
  DNA replication origin
cgccaggagcgggccgaggcgcggcggcgcggctgccgtctggatgggaagttacggtttacagcgaagtccacccagcgtttccgaggtgaaggcgccgcgccaggccgggcgggcggtgagtccgggacccgcgggtacacagctgggtcgagctgcggctgtcgcaagctttgttgcgagcgacggagggcgaggcggggtggggggttggggggggcgtgtgttccggccccgccggggcttaagttccatgcgttggattcctcacttgccgctgccgcccgcagccctcatctcttgggcgctggggaagaaactcgctggcgggtgttctgtggcatcccagggggtggagggacgagcagcttcgggggcacgtcctcgtgtatcctgtggaggaccctgaccccgcaccccaccctcgaggccagacatcggttgcctctggggacctgagaggcgagaccactcgcgcccctgggttgcaaagttggggtctttattggcctccgggattctgctcctggcggtttctccaggctggtgatgggcaagccgggtgtaccaagtccatgatgcacatgaggagcatttgtagccatcactgaatcacctcatgactagcgggacaagcctcaaattcaccgcaggatttccggtaggttggattgtggggttggtgtttgcactccaaagaggtgctgtgatttccctgtgtctgtctgtctttctggcttgttagatcttctcatttggcg

SEQ ID NO: 2594 - DNA, 875 bp, Artificial sequence
  DNA replication origin
cctaaaaccggcgcgactttatcgtctctgctgtcggatccctgcaatacaaagaggtacctggtcactgattctctacttggaccttggatagaccattagaccacatctcgcgatggagtgcggctcaagaaatgacattcccggccgggcgcggtggctcacgcctgtaatcccagcactttgggaggctgaggcgggcggagcacgaggtcaggagatcgagaccatcctggctaacatggtgaaaacccgtctctactaaaaatacaaaaaattagccgggggtggtggcgggcgcctgtaatcccagctactcaggaggccgaggagggagaatggcgtgaacccgggaggcggagcttgcagtgagccgagatcacgccactgcactccagcctgggtgacagagcgagactccccgaaaggagagaagctgtggggtggggcggacacaagcagtggtggggaactggggcccagggaaaggggaggcatgtgaggaggaacccgagtgcagatgaggggagctgcggagaggggcctctgaccttcctgtcgaggaaggcccagtctttggtggtctcggcaaaatgaagaatgggccccaagtggagagcagcacgtccccaaaactcatttctatcagccctgtttgttttacactccaccaggcaaatcttccgtccacaggattctttttaatacttctctttaagcagtgtggtggggaggccatggcaatcattagctctggaggcctgaggaggacactctgaagaggaaagccccgcgatcatccggtttcacccctgttttcatctactcttttcctcagcgaagcctatatgggttcccgatgtcacatcgcagct

SEQ ID NO: 2595 - DNA, 991 bp, Artificial sequence
  DNA replication origin
aggagcccagggctgcccttggataccgcagactttcccagggggacgggggacatgggtgggagataaggaagggaggtttcagctcaacccagagaaggactttcatcattcatgggggtctgggctgctgtcctcaggcaagtggggactggaccaggtggtctgttcttcactcatatgtccctgatatgggccaggtacttgctgggcacgatggagccagggcccttccccccagggtgcgtgttctgccaacggcaaagtccccatgccccaggatccactctgtgctccaggcctctcctctcgacggtgactgcaggccgggctccagggatgggcggttctgcaggtgtgcagagtccctcttacgcaggtgtgcacagagtcccccttacacgcctttctcttcaggggtcccaccaggagggtcagtcggaggcttgatttcctgccccagcagctggaggggtgggggtccagggagagtgtggtggggacagtgagcggcagagctggaggccgtgaggctggggtgagctgtgtgagaagccttgaaggtcacagtttggggagtctcagcccaggacccagctctgaggggacagtgcgggagggatggggcaggtaggcagggcggcctggggacctgggactggccatgctcgtctctctccgtggtgctgatctttccagctctgcctgtgggtgggggatggaagggagggacacagctgtgtggtgtcgggggcacacgcccactcctgggaccatggctggcctgtgcgtggccaggcaggttgggctctcggggcgcatggctactttgaattttgggtctgtggctgttgggctgatggagcacagccagggatctgagatgggctctaaacttgctgtcagtatttaagaaggaactttcacgcaaaaaaaaaaaaaaaaaaaaaaaggacaaggccaatctttctgaacgtggaaactttgtacc

SEQ ID NO: 2596 - DNA, 1382 bp, Artificial sequence
  DNA replication origin
agcacctccctgatggggacaaaacgcccatgtccgagcggctggacgacacggagccctatttcatcgggatcttttgcttcgaggcagggatcaaaatcatcgctctgggctttgtcttccacaagggctcttacctgcggaacggctggaaggtcatggacttcgtggtcgtcctcacagggtaggcaagctgaggccaggaggcccagcgtgtgcggcccgggcgtgtgctctctgaagctcagttgcgccgtggagctggggcagctgcagtcccttcactggggtcccctcacagccctgctggagatgaacgaatgtgagacagtctgtttgccaccctgtgtgctatgggggtgcttctcccagaggtgccagtgctgtatttctcgctgacggaaggatcacagtgacctgtccccaggaggcgctggcttgcagagcgcacaggccaggggccaccagcttccatggctggcctgagccagcatggtgcctgttggaggtggctttgctgcccaggtgaggggcttcctagcgaggaggagggctggacttctggcctcacccaagcctgtggtctgggaggggcacttggcggtttgaattctgtgcctgcctgagacgctcacctgtggtgtccacctcgctcagagcccttgtgctgcctgggatgaggctgtgtgtgtcgagtgctttcacagttcctgtgccaggaaggtgcttcggcagtttctcctcaaccacttaccctaacaacagcttgtgattgccaaagtaaccagcacatctagaagatggacccaaggggcctggatgggagctcaggtccagtgctctgcaccccaccctccagggtgttaactccccaacctgtgcagtgggcactgtgaggtcccctttcctgcttccctgactggcaggcggaaggctgggctgggctgctgtggctctggtgtggagagtggtggctggggagtgagtgcttggggagttgcccccacagagcctgttagcgcttcagtgtcagaggccctgtgctgggccagagaccactgtctgctcttttctgagccttatggttccgaggctcagagcccagatggaagaggagggagcaggccccacagcaggcgagagctctccttccagagccccatcctcacccagtgactgccccaagatgcctggtgcacaggagggtatatggaggggtgtttgggctggtggcagaggaggaaggagatggctgtggagtcctcgagtctggggctcatgccttcaaggttctgtgtgtgtgaggaagaagcagtcggctacatggcctctggtctcttgggtgaggccctcagagggagcctcgcattgcctgcctggat

SEQ ID NO: 2597 - DNA, 1467 bp, Artificial sequence
  DNA replication origin
ctgtggagtattgtcagagtttggtgttgtattctacagattaaaagtaatctgttaagcacctcaaataaagtttcccccaaatatatatatattttttccaaatttggaccactttgtttctgtctttgcagaacataaagtgctaacatgaggtaagtgctaaggtctggagaaggccgtggaagagatgacaaactccagcatcatgcctgagtgtccagtgtgctctgctggggcagcatatttgtacattgctgtatttgaaagaaccctacaagattcctgaaattggaccaccgtccttataacactactagtggtaaaacaagtaaggatggctggtttgcagtcatctgagcagcctctctagtttcatagatatggtttctctgatatcgaacggcttccaatttcaagtagaatgctacatcacaaggataatgatgtgaagtgaaccagtttcttgtgtaatcctccatgttttagtctgcgcattacaagccattatttgaagaagggtggacaggctccagatttctgccaaagaggtcctcggcaacacaggctaagaactggcttctgggcagtcgtgatggctcacgcctgtaatctcagcactttgggaggccgaggtcggcggattacctgaggtcaggagttcgagatcagcctggccaacatggtgaaaccccgtctctactaaaaacacaaaaattagccgggcttggtggcgtgtgcctgtaatcccagctatgtggaagcctgaggcaggagaatcgcttcaacccgagaggcggaggttgcagggagccgagatcatgcgactgcactccagcctgggcgacagagcgagacggcgcaaaacaaaaaacaaacaaaaaactacaacagaaacacccgcttctttggggaagaccatgggcggggaagagagggaaaggaggcagaggcagacatcactgcccccgcaggctctggcaccatgttggtcggctgagtggcggagggtggggcagaaaagcagaccgggacgaggaaggcgctgtcggtgacatcacggatagggcgacttctatgtagatgaggcagcgcaggggctgctgcttcgccactggctgtttcaccacgaaggagctcccgtgccgtgggagcgggttcaggaccgctggtcggacctgagggtcccagctgtgtgtcagggctaggaaggctcgggggtgcgcggggcaagtgaccatgtgtgtaaagggtgaggtatatggggctgtgacagggcagaagtgtgtgaagtcatacttacctggcaggggagataccatgatcacgaaggtggttttccctgggcgaggcttatccattgcactccggatgtgctgacccctgcgatttccccaaatgtgggaaacttgactgcataatttgtggtagtgggggactgcgttcgcgctttcccctgaatttttg

SEQ ID NO: 2598 - DNA, 933 bp, Artificial sequence
  DNA replication origin
tcctcacagccctcgctcgctctcggcgcctcctctgcctgggctcccactttggcggcacttgaggagcccttcagcccaccgctgcactgtgggagcccctttctgggctggccaaggccggagccggctccctcagcttgcaaggaggtgtggagggagaggcgcgagcgggaacccgggctgcgcccggcgcttgcagaccagccggagttcagggtgggcgtgggcttggcgggccccgcactcggagcagtgagggcaatgaggggcttagcacccgggccagcggctgaggagggtgtactgggtcccccagcagtgccagcccaccggcgctgtgctcgatttctcgcggggccttagctgccttcccgcggggcggggctcgggacctgcagcccgccatgcctgagcctcccgccccctccgtgggctcctgtgcggccggggcctccccgatgagcgccgccccctgctccacggcgccgcccaccggtttttctgccacttttgcaagggcgaggtcagccccaaactaccggtaagagcgctgtgttctctatacttgggaacctcatagattcctggccccgatttcccggaactgggtctggagctttctgcacatcattgactccccggacatcggtctgccgaatacctgctgcccacttctaagccgccggccctaaaccctgggcatcacggcctcggccccgtacctcctgcccacctcttaattcatcctgggctgctccacctgacctcacctcttcacctcccgtgtccttaattttttttttttcttagcaagtttccctctgataactctcccctcaattttcttgcattcttttatacctggtctttttcctacgatgacctccccccacacttcttccactgtgtcttctcaccttcctctgtgtt

SEQ ID NO: 2599 - DNA, 1027 bp, Artificial sequence
  DNA replication origin
acctttcccccttctctgttccacaaaaccgccatcgtcatcatggcccgttctcaatgagctgttgggtacacctcctagacggggtggtggccgggcagaggggctcatcacttcccagaaggggcggccgggcagaggcaccccccacctcccggacggggcggctggccgggcggaggcaccccccatctccctcccggatggggcggctggctgggcgggggctggcccccacctccctcctggatggggcagctggccgggcgggggctgaccccccacctccctcccggaccgagtggctgctgggcagagacgctcctcacttcccagacggggcggctgccgggtggaggggctcctcacttcccagacggggcggctgccgggcggaggggatcctcacttctcagacggggcggctgccgggcggaggggctcctcacttctcagacggggcggctgccgggcggaggggctcctcacctcccagacggggtcgcggccgggcagaggcgctcctcacatcccagacagggcggtggggccgaggcgctccccacatctcagacgatgggcggccggcagagacgctcctcacttcctagatgggatggcggccgggcagagacgctcctcacttcccagacggggtgtcggccaggcagaggctgcaatctcagcactttaggaggccaaggcaggcggctgggaggtggaggttgtagcgagccgagatcaagccactgcactccagcctgggcaacattgagcactgagtgaacaagactccgtctgcaatcccggcacctcgggaggccgaggctggcggatcactcgcggttaggagctggagaccagcccggccaacacagcgaaacccagtctccaccaaaaaaatacgaaaaccagtcaggcgtggtggcgcgcgcctgcaatagcaggcacttggcaggctgaggcaggagaatcaggcagggaggttgcagtgagccgagatggcagcagtacagtccagcttcgg

SEQ ID NO: 2600 - DNA, 917 bp, Artificial sequence
  DNA replication origin
ggccgcccatcgtctgagatgtggggagcgcctcggccccaccgccctgtctgggatgtgaggagcgcctctgcccggccgcgaccccgtctgggaggtgaggagcccctccgcccggcagccgccccgtctgagaagtgaggagcccctccgcccggcagccgccccgtctgagaagtgaggatcccctccgcccggcagccgccccgtctgggaagtgaggagcccctccacccggcagccgccccgtctgggaagtgaggagcgtctctgcccagcagccactcggtccgggagggaggtggggggtcagcccccgcccggccagctgccccatccaggagggaggtgggggccagcccccgcccagccagccgccccatccgggagggagatggggggtgcctccgcccggccagccgccccgtccgggaggtggggggtgcctctgcccggccgccccttctgggaagtgatgagcccctctgcccggccaccaccccgtctaggaggtgtacccaacagctcattgagaacgggccatgatgacgatggcggttttgtggaacagagaagggggaaaggtggggaagggatagagaaatcggattgttgttgtgtctgtgtagaaagaagtagacatgggagacttcattttgttctgtactaagaaaaattcttctgccttgggatgctgttgatctatgaccttacccccaaccctgtgctctctgaaacatgtgctgtgtccactcagggttaaatggattaagggcggtgcaagatgtgctttgttaaacagatgcttgaaggcagcatgcttgttaagagtcatcaccactccctaatctcaagtacccagggacacaaacactgtggaaggccgcagggccctctgcctaggaaaaccagagacc

SEQ ID NO: 2601 - DNA, 916 bp, Artificial sequence
  DNA replication origin
ccctctgcccggccagccaccccgaccgggagggaggtgggggggtcaggtcagccccccgcccggccagccgccccgtccgggaggtgaggggcgcctctgcctggccgcccctactgggaagtgaggagcccctctgcccggacagccgccccgtccgggagggaggtgggggggtcagcccccccccccccccccccccggccagccgccctgtccgggaggtgaggggcgcctctgcccggccgcccctactgggaagtgaggagcccctctgcccggacagccgccccgtccgggagggaggtgggggggtcagccccccgcccggccagccgccccatccgggagggaggtgggggggtcagccccccgcccggccagccgccccgtccgggaggtgaggggcgcctctgcccggccgcccctactgggaagtgaggagcccctctgcccggccaccaccccgtctgggaggtgtactcaacagctcattgggaacaggccatgatgacaatggcggttttgtggaatagaaagcggggaaaggtgaggaaaagattgagaaatcagatggttgccgtgtctgtgtagaaagaggtagacatgggagacttttcattttgttctgtactaagaaaaattcttctgccttaggatcctgttgatctgtgaccttacccccaaccctgtgctctctgaaacatgtgctgtgtccactcagggttaaatggattaagggcggtgcaagatgtgctttgttaaacagatgcttgaaggcagcatgcttgttaagagtcatcgccactccctaatttcaagtacccagggacacaaacactgcggaaggccgcagggtcctctgcctaggaaaaccagagacctttgttcacttatctgctgaccttccctccac

SEQ ID NO: 2602 - DNA, 1202 bp, Artificial sequence
  DNA replication origin
tcctcacttcccagtaggggcggccgggcagaggcgcccctcacctcccggacagggcggctggccgggggggggggggggggggggctgacccccccacctccctcccggacggggcggctgtccgggcagaggggctcctcacttcccagtaggggcggccaggcagaggcgcccctcacctcccggacggggcggctggccgggcggggggctgacctgacccccccacctccctcccggtcggggtggctggccgggcagaggggctcctcacttcccagtaggggtggccgggcagaggcgcccctcacctcccggacggggcggctggcagggcagggggctgacccccccacctccttcccggacggggcggctggcccggcagaggggctcctcacttctcagacggggcggctgccgggcggaggggctcctcacctcccggacggggtggctgccgggcggagacgctcctcacttcccagacggggtggctgccgggcggaggggctcctcacttctcagacggtgtggctgcccggcggaggagcttctcacttctcagacagggcagttgccaggcagagggtctcctcacttctcagacggggcggccgggcagagacgctcctcacatcccagacggggtggcagggcagaggcgctccccacatctcagatgatgggcggccgggcagagacgctcctcacttcctagatgggatggcggccgggcagagacgctcctcactttccagactgggcagccaggcagagaggctcctcacatcccagacgatgggcggccaggcagagacgctcctcacttcccagaaggggtggtggccgggcagaggctgcaatctcggcactttggggggccaaggcaggcagctgggaggtggaggttgtagcgagccgagatcacgccactgcactccagcctgggcaccattgagcactgagtgaacgcaactccgtctgccatcccggcacctcgggaggccgaggctggcggatcactcgcggttagcagctggagaccagcccggccaacacagcgaaaccccgtctccaccataaaaatacgaaaaccagtcaggcgtggcggcgcgcgcccgcaatcgcaggcactcggcaggctgaggcaggagaatcaggcagggaggttgcagtgagccgagatggcagcagca

SEQ ID NO: 2603 - DNA, 943 bp, Artificial sequence
  DNA replication origin
ggctgagcttcccgcgacggcttcctacggctcccgctggccttctaggccgaggtggagcccaccgccctttctaggacgcggatcgccaccgaagaagacgcggaaaagcaaaaagcgcgtgccactctaccccagagtttcggcggcttccggggacgctctttctttcttctcgctggaagactggaggaccagcgaggggctgtttgtggagccggcgggcgggccgtttgtctctccttcctgcgcctctttggtgctgggaggcgggccgcagggtagctgttggcgccgccgcgtttctgggcctggccaactcacgtgaccgacgcgggctctgaagcggtgggccgcaccgaggcggcggcggcggcgacgactgcagctcgggaggtagcggcctggcgagggacgggccggctgccctctcggacggccgcggcggagggcaaaaatggcggaggcttcggcggccggggcggactcgggcgccgctgtagccgcccaccggtttttctgccacttttgcaagggcgaggtcagccccaaactaccggtaagagcgctgtgttctctatacttgggaacctcatagattcctggccccgatttcccggaactgggtctggagctttctgcacatcattgactcgcccgacatcggtctgccgaatacctgctgcccacttctaagccgccggccctaaaccctgggcatcacggcctcggccccgtacctcctgcccacctcttaattcatcctgggctgctccacctgacctcacctctttacctcccgtgtccttaatttttttttttcttagcaagtttccctctgataactctcccctcaattttcttgcattcttttatacctggtctttttcctacgatgacctccccccacacttcttccactgtgtcttctcaccttcctctg

SEQ ID NO: 2604 - DNA, 946 bp, Artificial sequence
  DNA replication origin
ccggtagtttggggctgacctcgcccttgcaaaagtggcagaaaaaccggtgggcggctacagcggcgcccgagtccgccccggccgccgaagcctccgccatttttgccctccgccgcggccgtccgagagggcagccggcccgtccctcgccaggccgctacctcccgagctgcagtcgtcgccgccgccgccgcctcggtgcggcccaccgcttcagagcccgcgtcggtcacgtgagttggccaggcccagaaacgcggcggcgccaacagctaccctgcggcccgcctcccagcaccaaagaggcgcaggaaggagagacaaacggcccgcccgccggctccacaaacagcccctcgctggtcctccagtcttccagcgagaagaaagaaagagcgtccccggaagccgccgaaactctggggtagagtggcacgcgctttttgcttttccgcgtcttcttcggtggcgatccgcgtcctagaaagggcggtgggctccacctcggcctagaaggccagcgggagccgtaggaagccgtcgcgggaagctcagccgaattggagttggagcccccggattgcgctgaccctgaggttagtggaaaatgctgtctgaacgtggcggcactgactggaccaagagaccacgtccgaaacgggaacctgtgtaaaggaagtgtagagctaggagccaagcgccttggaagccctttccgaggatggcaaaggatctgggaatgcttctccaaagatatgtggatggacgaaataggtctctggtgatactgaggcggggtggggacggggaggcaaagacttggcttcttaggaattggaagaaataagtaaacaatgtttggtagcaatttgtaataaggaagtaatcataaaattaactacgtccgtttctgattgtgtcaactttgtcaaggagtagaagt

SEQ ID NO: 2605 - DNA, 1527 bp, Artificial sequence
  DNA replication origin
ccgcgatcttgggggccatacactccctccggggctacgcgtcctgccaaccggccgcagacgtgtagctgctgggtcggctgtggagggaggggctcaggctggggcttgtccgaagccaggcgggcggggccgggaaggggaggtatagggggccggactgggcggagcaggcggcatttgcggccggcgccagggtggagagttgtgcgccggtccctgggcctgagctccggctccggctggggcgcctgcgatgtctcaagatggcggagctgggcgaattaaaggtaccggccccctccccccatccccatctggactcagcccggcggtacgccgtgtccgggaagcgaccgagactgggtgccggggctcgggtgggcgccgacgacgtggcaggcacgagctgctgaggatgggagagaagtagctgagagcgaggaaggggctgcggcggggctccgggggcggggctgcggggcagatgtaggggtggggccgaggggaattgcagctgttgggggctgaggcgcagggggcggggacgaggggtagaagtcggatttagtagtaggggcggttgttggggtagggccagggggaaaaggtgctgtagaggcactgggggcgagtcgatcaaggccaagagatgcaacagtagggggcacatgcagggatgggaccgcggggcagacgtaggggaggctccgggggaaaggcagctgagaggatagggtctttggggctactctcgggatccgagctttgggaaataccagtaggctgctgagatgcagggggcggggctgtgcgggccgatacctcgaggggtggggcagaagcatcctggaggctcagaggaaggtcctgccgtagtgaatcgcggtgtttgggaagaggcagaggcatgtgaaactatgggatagaaaggtgggaagttataggggaagctaatggagaaaaaaagacaggacagaggagataaggatggggagaaagaggagcaagtttctcatcacattccataaaaggggtccaagacaaagcctcctatgagaagaattgtgtagggctagcaagccctgcacatgacaggatctcctagagattcacagaagggagtcttctaaggagagcgctcccctcctgctacatagagtttggagggtgaccacatctgaggacatctcatagaacctcaaactaccgagttcatccgcctgcctcctggttttcttctgccctttgaaatgggagctatggtcctgggaaggctggaggtctagccactgggcccagctaccttcaggggatttgcgattctgtgccctgactcagaggcttttccttcatccacccagggtctctgtttagagctctgccctctcctcttccacccctataggggggcgctgtaagttgtagaggagtattaatttctctgtgtaggagagatgccagattatggttcctggcagatagagtaaacaggcaggatacttggactcagtgattcactgttaa

SEQ ID NO: 2606 - DNA, 1144 bp, Artificial sequence
  DNA replication origin
catttccaaataagggggctctctgtaagagatctctagagaagaagaagcaataccctccctaagccaccaccttctataatcttatgtttttttttttctgggagaacatggggaatagagtgacttctgctgggaactctgagtctgctctatcctcttctctcatcatcactttcccccacctcaaccaaggaaacagagagtatcattcctaagcaactgggcaagggttcaggaaatgaataatctggggaaaagcaggcagaaaggccttgagccttgactggcccaagaaccagtctgatgatcagacactgcagtgaactggctggggtggactctgcaggcaactcacccagtcctctggggagcagtcaggcaactgtgcatcctctggcagtgcctgtgaggctgaccagactgcaatattaactcacagcaagcaggcaggaggaaaagtgggactggcgaccactgggcagagtagggcagaggttggaggggagaacagaaggttgctgttgtgggagcatcaattggaaaaaggtttggagtgatgtttgaggaacagcagtgctggtgagagatgggagtgaaagtggcatggggcaggagggaagcaatgacagaggagattgtgaaaaagggttagcagaaggcacagggctgggagtgcttgttgaactaacaggaaacagcaaggatagagctacgtggaaggcaagattgcggggacagggcagggatgaaatatggggctctggggcatgacttggtggtgtagaatggagcttgaggccaggcaggggctgaggaagatgcttgggggaggtttggtactgggagacggagcagaagtagggtcagggccatgggaaggggacagagttgcagaaaacgaaccagaaatcgggggtgtagatgctaggaggacaagaaaggggccggggaaagggccttggggatggcagaggtgagcagggcaagtcagaagctgcagggcagggtcttgaggaaggcaaagctggcgggcttccttgcaagactagaagagctagaaagactgataaaaagaaaaggcgatgatgcattgagacgggactaaagacttctgtcaccacagagctgggatcccaacccc

SEQ ID NO: 2607 - DNA, 1051 bp, Artificial sequence
  DNA replication origin
gggaggctgaggcaggagaattgcttggaccgggaaggcagaggctgcggtgagtgagccgagattgtgccactgcacttcagtctgggtgagactctgtctcaaaaaataaaaataataataataaaaaaagaaacagtttgagtggctcttttgtgtgaaagtaatgagagatgggactgggaaagagggcggcagcatatgactcctgaagagccttgtaaaccacttaagaactttgggctttaccctgtaggttttcatatgcattttagtgagctctctccggcggggagaggagaaaagaaagacaggaagaccagttggctgcgactgactgttcaagaattaccaagagcctgaacttcaagggcagtggaaataatgaagacagttttttgtttggttattttttgtttctatgcgggggcgggggcggggggggcagcttaaaataaaattgctctcctcgctctctgctgttttctaattcagatgtgcgtttaaaaattgagcctgggccaggaatagtggtggctcatgcctataatcccagcgctttgggaggctacggtgaggagaatcgcttgaggcctggagttgaagaccagactgggtaacatagagacactccatctcttaaaaaaaaaaaaaaaaaattagccaggcgtggtggtgcatgcctgtagtctcagctactcgggaggctggagtgagagaatcccttaagcccacaagttggaggttacggtgagctatgatagcgccatgcactccagcctggccgacagagggacagattagagacactgtctcagaaaacagaaagaaaaaataaaattgaacctgatcacctttccttaggttttgtcccccaggttaccgtgggccgcgcattatctctgctctgcttaacactacaatctcctatttccgaactgctctcttcaaatgctcttttttgcttgggtttttggccggggaatagtggcgggggagaggcggggggagttggcgggggcagaggtaactttaccagtgattaaatgca

SEQ ID NO: 2608 - DNA, 1157 bp, Artificial sequence
  DNA replication origin
ctttgttcgtggtgtgtgtgtgagctggttctcccacctatcccattaaggtcctaatccccaccctccttggctcctctcactcctctcagcgccctggctccccaggcccacctagactctggaagccccccagcaggcggatctgctcagtctgcatggagtggcgtctcaccaatttgcgcttggtcctgggagagcctggcgccccggcataaggaggggcaggcaacgaaggcgcccgacctccgggttgtgggcgaatgtcagggatgggagggtggggactgacgttgagagggggtaggaaacccggccgcgtttgcgagatgtggtccaggagcaacgtccccgagcccctccgctccagcagccccggactccgcctccttccgcttagcggagatactgcccctggcagactctcctgggactggcgcggagagggagccgagccggctggagggagggtcaacggggaggcgctgtatcggcggcgctccagggacaggcggctggactcaggcgagtcagggcaaaggtgtccaggggtgtccagctccactggctccatgcggctcagtttctgcctcagccctgaagggggaccagactcctgagcttctggtgctgtgtttcggcgagagagaggacccccgctagtcactttctccgcccatgggggcgggtcctcagggccttcggtgctgtgacgtcgggaaagacggggtcgaccggtcagggtcaggccattgaattcggcagtcaagcgctcgatccccggtctcccttcagtgggtgggactggttgaggaggggccactaggccccagggctcggagttgagccttttgagtggttttgggggatggcgtggtggtttggggagcggctcggaaggggatgggtcatcggggggcttaggaagagggaattcaaatacgtcccgcttctcctcttcttcctgggcgcgaggggataacatcccacgccctcctcctccagcggtctgcagttggatttccgaaggcgacgtgcagaaccccgggctaggagaggcgggagcagggtcctccacccctggggatggtggagaattgagatactgccgggtcttcttggtgcctgagggcgaggtatcggtggtgatgatgatg

SEQ ID NO: 2609 - DNA, 1380 bp, Artificial sequence
  DNA replication origin
ggcgtggtggtttggggagcggctcggaaggggatgggtcatcggggggcttaggaagagggaattcaaatacgtcccgcttctcctcttcttcctgggcgcgaggggataacatcccacgccctcctcctccagcggtctgcagttggatttccgaaggcgacgtgcagaaccccgggctaggagaggcgggagcagggtcctccacccctggggatggtggagaattgagatactgccgggtcttcttggtgcctgagggcgaggtatcggtggtgatgatgatgacctccgtacccttggccttgcaggcgtccagcagtgtggcaagggtctcgcggtccccgcggtccagggcgtggacaagagccgaggcgcccgcgtgatctcggactgaggggtctgcgccgtgggcaaggagcagcgaggccaccgcggcgcccccacccccggcgcaagcgtgcatgagcgccgtgcgccctaatcggtctgcgatattggggtccgcgccttgctccaggaggtagcgtaccatgcgtgccttgttctgggggtcgtcgtagcgggcccgacaggctgccattagcgcagtctccccctgcgcatcaccctcattcacgtaggcgcctccctccagaagcaaacgggccaagcgtagcttaccctgacccaccgcccgaagaagagcgtggccctcggtgtgcaacatagctgcggctggggcgagggcacagatggagccgggactgagacctgccgaggatgactaggggtatggggagggggagtggctggcagaggcctgaggtctcagtgacgaagccgatccctgcaagagagacatctcattgatagattcggcaggaaaactgaggcacagatgcagggacccagcgtggggtggaggagaccttcacggcatacagtccttcctctaactcatgcctttgagccggcccttcccccgcagcgcatgcctgaggaggtgggaagggtgcacccgcactgaaggactagcgcgcgtgcaaatgcgttcgtgcacgcgcagggatgtccgcacccccaccctcaccccatggcttatcagacctttcctctgtcccccttgtcttatccacacttgggatccccctttctaggatgctgaacgccacccacccacatacatgcaccctacagtcacacatgtattctcattcctaacctgttttagcttgccacaaccccaaaaattgagtggggggagggaagcagcctgcatttgagacctaaaacgggtggagggagaattggggggttctattgcccctgcgatgttccccatcactccttgctctttcccctcccaggctgtgtgcccagatagatacctgaatgtcc

SEQ ID NO: 2610 - DNA, 1480 bp, Artificial sequence
  DNA replication origin
gcttcggagcgtagcgccagggcctgagcctttgaagcaggaggaggggaggagagagtggggctcctctatcgggaccccctccccatgtggatctgcccaggcggccgcggcggcggcggcggaggaggcgaccgagaagatacccgccctgcgccccgctctgctgtgggcgctgctggcgctctggctgtgctgcgcgacccccgcgcatggtgagtatcgggctgaggggcgctgtccgcggcgcccggggctgccacctggggcgacccttctccccctcggtccttctctgtgtgggaaggccaggctcggccgccggcgcggagcgaggccactcgctgggttcccgagagtttggacatcgccgggggcccctcccgtggtgccccgccaaccgccggggttccccgccaaccgccggggttccccgccgcctctgctccccgcggcccgggacccctcacacgcctcctcggcaggagggaggccggcagcaagtctcagaaactcctttttcgtagtgccagggtgcagggaggtgggcagttttgcccttcaggttccgcgtttcctggggtcgagcgagagccgacggcgggcctcggaggggctgagcgaaggaatgccagattctggcgtggagagcgggggcagggccgccaagccaaacggcctgcaccttcgcagccagcctcgcctttgccagggggcggcacatgggccgggtgtgtgggcttggtttggatggggacggggttttgcggcgcgcctgagttttgacactccaaccccaccgaaagtccggaggagccgggtgtgctgctcgcgtctttgaaaggtggaggcaggagaagtagggcaactggtgtggctgcatgctgaggcacatgatttaaaaatctcaactgctgttattctttctgaggcgcggagctctgctgctgtttcaggctgtgtccagacccaggaatgtggtgtgacgatcaccaattcctccaacctggcagcagcatttgctgctcctttggcatggctgggggtggggcacgggcgggtgagaaaaagtggatacgtcaattcaaagggcttccttagaaagcttctttgtggttggatgtttctaacacggttggaccaaggaaagggaatcaaatcatatcttccccatcccacccacacttttagattctacatttcttcagaccctttagtggaaataacttgggctttggagccctgctctgtaatcctggattcaaatccagctctgctatatgaactcaccaataaaatgggaatgaaattatccagctaataggattaattaaaataatgtatattaaacggatgacactccaaaggtgttcagaaagtcctttgagggccgaggctgtgttttactgcttctgagattgatgctcccagtgggatggtgtcttgtgcatatttgttgaacggaaagcagccccttctt

SEQ ID NO: 2611 - DNA, 1093 bp, Artificial sequence
  DNA replication origin
cctccgccgccgccgccgcggccgcctgggcagatccacatggggagggggtcccgatagaggagccccactctctcctcccctcctcctgcttcaaaggctcaggccctggcgctacgctccgaagcccagcgcaaatgcctcgactccccgcgccccgagtccgccgctcctcggccgccgcctcagccgccgcccgaagtttggctgaaactttctcgggtgtgcagcgaagcagcctcgtgtgtccttccgcctcagccgcctcctcccaccgcaagccccgccccactgtcgccgcggcctcggccccgccgccttgggcacccaggggtttcccgcaggaagaagcgccggcccgagctccgcgcggagggatctactacgagtcactggccccgtccgcatccttctccagcggccccgggggccgccgcgccttaactcgatcagggctgcagcggctcgctggcttgaccagtgcagaaggggcgtggaggtgagcggggtggggtaggactctgaacttcaagcactggagtttgccgggatcgtgaacttgcagggagaggcggtcctcatccagtgaggtctgtatcgccacctacacccacacatccacacactgctttgctagctagaggaatgctctggagtaggaccagtgctgtcaaagaaggaaagtgggccaaggcgccaaagtccattaaaaaggaatagagccatcacggagtggtgctgccccattcattcattcatttgttcatccgtgtagcgaatatttcttaagtgccttactttgcgtagctgtgtgcttggcagtgggatgataccaaagatgcacaagcaactttgagtaccaagactttgccgctgtgggctgggggattcagggaaggctttcccagaggagctgggatgaaagcaggatcttgaaaggtcagtaaaatttgtataagacaaggagaccagctaagctaaggatattcgttgtaacactgtaatagcaaaaccttgaaaacaacataaatgcccacccttagaggaatggatgaataatgtatggtatatttataaaatgaaatgcaacaca

SEQ ID NO: 2612 - DNA, 918 bp, Artificial sequence
  DNA replication origin
atggtctttgacttggattccaactttacttacttcacagtgtttcctgcgttataatccaatgtaagaaaagatgatccagacatttgttaaacatctcaaataagatgtatcccaggtatttgtgtcaaatttggattattttggttttgtctttgcagaatataaaaaactaacgtgaggtaagcactaaggtctggagatggctgtgcaagagatgacaaagtccaacaccacgctggagagtgtccaatcatctcttctggggcagcatatttttctacaatactgaatttggaaaacaacagcaacaacaacaacatcaaaagcaaacaaataaacaaacaaaaacctacaagattcatgaaactggacaactgtctttataacattaccagtgataaaaccagtaaggaaggctggtttgcagtcatctgagaagcctctttcatttcataaatatggtttctctctgacattgaacggcttccaatttcaagcggaatgctacatgacaaggataaggatgtgaagagaaccggtttcttttgtaatcctaaacgttctcgtctgagaattaaaagccattatttgaagaacggtgcccaggctccagctggccaccgaaaggttgctccgcagcgcaggctaaggaccagcttcttcgggcgagaacagatgccggggcgggagggaaaaagggagagacagacgtcacttccccctgccggctccggcagcgggttggtaggctgagcggcagaaaggcagacggggactgggaaaggcactgtcggtgacatcacggatagggcgacttctatgtaaatgaggcagcgcaggggctgctgcttcgccacgaaggatttcccgtgccgtgggagcgggttcaggaccgctggtcggacctgagagtcc

SEQ ID NO: 2613 - DNA, 1082 bp, Artificial sequence
  DNA replication origin
tctctctgacattgaacggcttccaatttcaagcggaatgctacatgacaaggataaggatgtgaagagaaccggtttcttttgtaatcctaaacgttctcgtctgagaattaaaagccattatttgaagaacggtgcccaggctccagctggccaccgaaaggttgctccgcagcgcaggctaaggaccagcttcttcgggcgagaacagatgccggggcgggagggaaaaagggagagacagacgtcacttccccctgccggctccggcagcgggttggtaggctgagcggcagaaaggcagacggggactgggaaaggcactgtcggtgacatcacggatagggcgacttctatgtaaatgaggcagcgcaggggctgctgcttcgccacgaaggatttcccgtgccgtgggagcgggttcaggaccgctggtcggacctgagagtcccagctgtgtgtgagggctaggagggctgggggtgggggggggtggggggggggggtgcgcggggcaagtgaccgtgcgtgtaaagggtgaagcgtgtgaggctgtggcggggcggaggtgcaaaagctcatacttacctggcaggggagataccatgatcacgaaggtggttttcccagggcgaggcttatccattgcactccggatgtgctgacccctgcgatttccccaaatgtgggaaactcgactgcataatttgtggtagtgggggactgcgttcgcgctttcccctgatttttgtagtttaaagaacagtctgcacggcgagggttacttgttttttttactggcttgtgctttactcttaatcgtttctctcacagtcggaggttgaggaatagtagtaatatgtcgctttctccccgcctcgggagaaataagaagcgtcgacctttacacaagctagctagcgcgaaggccgcacagctcttcctttatctacgcggggctgctttttgcagagatttgtctgtccatggtctgcagtctcttgggttctcagggtctgtgaaaatctacgtgtttttccctaacctccagtcacatttcacacagcgtctgcttctagccg

SEQ ID NO: 2614 - DNA, 1450 bp, Artificial sequence
  DNA replication origin
acatttttgtacattgctgtatctgaaaaaaaccctacaagattcatgaaactggacgaccgtctttataatactcctagtgataaaacaagtaaggatggctggtttgcagtcatctgagcagcctctccagtttcatagatacggtttctctctgatattgaacgacttccaaatgtcaagtgaaatgctacatcacaaggataaccgtatgtgaaaagaaccgtttttctttgtaatcctaaactttctagtctgagctttaaaagccattatttgaagaaaagcgcacaggctccagctggccgccaaaggggtcctttgcatcacaggctaagaacctacttctttgggagagaccagggatggggatgggagggaaaggaggtagagtcaggtgtcactttctccgcccgctcccgcagctggttggtcggccgagtggcagagggtggggcggaagagcagacggggacgggaaaggcgctgtcggtgacatcacagatagggcgattcctatgcagaggaggcagctcaggggctgctgcttcgccacgaaagatttctcgtgctgtgggagctagtccaggacctccggttggacgtgatagtcccagctgtgtgtcagggctaggaggacttgaggcggcatgggggcggggtgggggaatgcgcggggcaagtgaccgtgcgtgtaaggggtgaggcgtatggagctgtggcagggcggaggtgcgttcattcatacttacgtaacaggagaaaatacggccatgaagttggtgtttttcgggggcgatttctccattgtactcagtatgtgctgactgactcctgttacttccacatgtggggaaactggactgtaatttgtggtggtggggaattgcgttcgctttcttctggaggttgtagtgcaaaaagcagtttgtgtaccaagtgatactttcagcttttacaaatgctgagcaatatccatggtgtgttttcatgtcacctcctctcccttctttgttagaaaaaaatggaagagcacgtgggtgttttgagatgagaagaggtgcgttcaccaccttcgcctccgtgtaggcttgttattaagggaaagggaacaaaggagtctcacttatgtaagatgaccttacatgagaagaagaaattcgagttggtgaaaagaaagaaattcaatttcagccgggcgcggtggttgacgcctgtaattccagcactttgggagaccgaggcaggcggatcacgaggtcaggagatcaagaccatcgtggctaacacggtgaaaccccgtctctactaaaaaatacaaaaaaattagttaggtgtcgtggcgggtgcctgtagtcccagttactcgggaagctgaggcaggagaatggcgtgaaccttggaggcggtggttgcagtgagccgagatcgcaccactgcactctagcct

SEQ ID NO: 2615 - DNA, 1062 bp, Artificial sequence
  DNA replication origin
ccttgggctctcctgacacggcccatccggaccctgaggagccagcgggccgcaagcaagttgctgggcggcggttgagatagcggcggtgctgggaggggtaggtgagggtcgcgaggctgcctgagcttctgagtgagcctggtgattttgggaacgcgggacgggcgacctgcggcgccaggagcggggccgaggtacggcggcacggctgcagcctggatgggaagttcaagtttactgcgaagtccacccagcgttccggaggtgagggcgccgcgccaggccgggcggcaggtgagtctgggacctgcgggcgcacagctgggctgaggcgcggcgcgctgggccgccgcaagttttgttacgcgagcggggcggttgcgccgggcactgccgggctccgcagggctccgccggggcctaagttccctgcgcttgattcctcgcctgccgctgcagcccacagccctcctctcgtgggcgctggggaagaaactccctggcgggtgttctgtggcatcccagggggtggagggacggagcagcttcgggggcacgtcttcggaagtcctgtggagcacactgacttcgcaccccaccctcgaggccgttccttctgggaacttgggcaagagcgctcgcgcccctgacttgcaaagttggggtctttattggcctccgggattctgctcctggcggtgtctccaggctggtgatgggcaagccaggtgtgccaggtccaggatgcatgtgaggagcgtttgtagcgatcactgaatcacctcatgactagcggggcaagcctccaattaaccacaggatttctggtaggttggactgtggtgttggtgtttgcagtccaaagagttgctgtgatttttctgtgcctgtctgtctttctttgagacttcttagattatctcatttggcgtcctttcacccaagagttaaccaagcgaggaatggtttcctcgctttcttcctaccttttgctggtggagctgctttcgaaagaagcactttaagaggccgacgcgggcggatcatgaggtcaggaga

SEQ ID NO: 2616 - DNA, 992 bp, Artificial sequence
  DNA replication origin
ctattcgacaaaaccgccatcgtcatcatggccctttctcaatgagttattgggtacacctcccagatggggtggcggtggggcagaggggctcctcacttcccagacggggcggccaggcagaggtgccccccacctcccagacgccacagctggccgggcgggggctgccccccacctcccggacggggcggctggcagggcggagacactcctcacttcccagacggggcagctgccaggtggaggggctcctcacttctcagacggggtggctgccgggcggaggggctcctcacttctcagatggggcggccggtcagagacgctcctcacctcccagacggggtggctgcagggcagagacactcctcagttcccagatggggttgcagccaggcagaggcactcttcacatctcagacggggcggcagggcagaggcgctccccacatcccagatgatgggcggccgggcagtgacgctcctcacttcctagaggggatgacagccgggaagaggcgctcctcacttcccagagtgggcggccgggcagaggggctcctcacatcccagacgatgggcggccaggcagagacgctcctgacttcctagacggggtggcggccgggcagaggctgcaatctcggcactttgagaggccaaggcaggcggctgggaggtggaggttgtagcgagccgagatcacgccactgcactccagcctgggcaacattgagcactgagtgagcaagactccatttgcaatcccggcaactcgggaggctgaggctggcagatcactcgcggtcaggagctggagaccagcccggccaacacggctaaaccccatctccaccaaaaaatacgaaaaccagtcaggcgtggcggtgcgcacctgcaatcccaggcacttggcaggctgaggcaggagaatcaggcagggaggttgcagtgagtcgagatggcggcagtagtccagcctcagctca

SEQ ID NO: 2617 - DNA, 1236 bp, Artificial sequence
  DNA replication origin
ggtctagagaaggctgtggaagagatgacaaactccagcatgatgcctgagtgtccagtgtgctctgctgaggcagcatatttttgtacattgctgtatttgcaaaaaccctacaagattcacgaaattggacaaccatctttataacactactagtggtaaaacaactaaggatggctggtttgcagtcatctgagcaacctctctagtttcatagatatggtttctctctgatattgaacggcttccaatttcaagtagaatgctacatcacaagaataacgatgtgaaaagaactggtttcttttgtaatcccaaacgttctagtcagtgtattaaaagccattgtttgaagaagggtgcacaggctccagctgcccgccaaagaggtcctcagcaacacaggctaagaacccgtttctggccgggcgtggtggctcacgcctgtaatcccagcacttgcggaggccggggcgggcggatcacctgaggtcaggagttcgagatcagcttggccaaagtggtgaaaccccgtctctactaaaaatacaaaaattagccgggctgtaatctcagctactcggaagcctgaggcagaaaaaccgtctcaacccgggaagggaggttgtagtgagcggagatcgtgctactgcactccagcctgggcgacagggcgagactccggttcaaaacaaaaaacaaaacaaaacaaaaatcaaaaccctcttccttgggggagaccagcggcgcggaagggaggaaaaagaaggagaggcaaacgtcacttctcccgcaggctgtggcagcatgttgttcggctgagtggcggagggtgggatggaaaagctgactgggacggggaaggcgctgtcagtgacatcagggatagggcgacttctatgtagatgaggcagcgcaggggctgctgcttcgtcaccggcggcttcgccacgaaggagttcccgtgctgtgggagggagtccaggaccgctggtcggacctgagagtcctagctgtgtatcagggctaggaggcctcgagggtgcgcggggcaagtgaccgtgcgtgtaaagggtgaggcgtatgaggctgtggcggggcggaagcgtgcagactcacatttacctagcagaagaaaaatcgtgtttacgaaggtggttttcgcagggcgaagctaattcgtgcaacttccccaaatgtgggaagctcgactgcataatttgtggtagtgggaga

SEQ ID NO: 2618 - DNA, 1646 bp, Artificial sequence
  DNA replication origin
cggtgccctcactggccctagctcaggaaacccgctatcgggacctcccccgcgtccccgcgctcactgccaggggcgcccccactccagtcacctcgggcgatgcgctccctcctccaagggccactgatgtgatggctgttctgcagatcaggccaccaataaagttattgaaattgaagccgcacccctcgctggcgaccagcgattcctcctaaaatggctacaaggccggcggcgcggagtccgcccagtgcgcgttccctgcggcctgcagcctcggcgcccgggacccgccggcctctctagccgccgccgccgccgcctcgatggtgggcagtcgcacgcagcctccagcgccaggagggggcgccaggcagggcctgtcccgcctggggagactgcgcccgggataataggagcgcttggcctctgagactacccggcagaagggacgtccccaaatgacactcggaggccgcctccctgggctccggtgctcggtgccgggaggagcggcacggctttctaccccgcctcaggtgcgccagcacgttttctgggcagcatctgtgtgttaggcgaccggagaggtgggttccttatagggaataagaaaactgaaactgacttccaactgcaggcagaaggaagcagtggtcattgctggaggttaaaactgttctgaccgggcgcagtggctcacgcctgtattcccagcactttgggaggctgaggcgagcagatcacgaagtcaggagatcaagaccatcctggccaacaaggtgaaaccccggctctactaaaaatacaaaaattagctgggcgtggtggcgcgcgccggaagtcccagctacttgggaggatgaggcagaagaatcgcttgaacccgggaggcggaggttgcggtgagccgagatcgcgccattgcactccagcctggcgactcagcgatactccgtccccctctccccgccccaagaaaaatctgttcagtggggagcgacaaggaaggagctttcagcccgactggggtcgcagggaagaattcaagatggcgtgtttaggagctctagctccttgacaaattagtaaaatgttagtcttaggagaagaacgaaaaggctctcctaggctaagaaacagcatacacagtgagaaacctcagaagaaataaaattcaaggaagatagcaacaacgaaaacatcagaaggaacactaaaggtataaaaagggcaaagacagccctagggttgggagggatccaggttttttatgaaaattagtggaatccctaaggtacttacctttgtattataagtatttgcatgtctccttctagaaacgtttatcactctgtgttacacagaccagcagtgttggcgtcaactgggagcctgttagaaatgcagaatcaggccccatccccagggttctgaatctgcattttaacaagatcacattaaagtgtgtgagaagcaatgctttgacagctggcagagagcagatccagatttgataccttttcatattctgcatgtaccttatacagagtaggcttttgcatttgcggaatgaaggatacaggaatactgtttactgtaatccatttctaaccagatatgccacttaggcttaaacacgg

SEQ ID NO: 2619 - DNA, 1347 bp, Artificial sequence
  DNA replication origin
cacagacacggcaaccatccgatttctcaatcttttccccacctttcccccctttctattccacaaccgccattgtcatcatggcctgttctcaatgagcatgttgggtgcacctcccagacggggtggtggccgggcagaggggcttctcacttcccagtaggggcggccgggcagaggcgcccctcacctcccggatggggcggctggccgggcggggggctgaccccccccacctccctcccggacggggcggctggccgggcgggggggctgaccccccacctccctcccggacggggcggctggccgggcggggggctgaccccccacctccctcccggacggggcggctggcctggcaggggctgatccccacctccctcctggatggggtggctgctgggcggagacgctcctcacttcccagacggggcggctgccgggcggaggggctcctcacttctcagatggggcagttgccaggcggagggtctcctcacttctcagacggggcggctgggcagagacgttcttcacctcccagacggggtcgcagccgggcagaggcgctcctcacatcccagatggggcggcggggcagaggcactccccacatctcagacgatgggcggccgggcagagacgctcctcacttcctagatgggatggcggccgggaagaggcgctcctcactttccagactgggcagccaggcagaggggctcctcatgtcccagacgatgggtggccaggcagagatgctcctcacttcccagatggggtggcggccaggcagaggctgcactttcggcactttgggaggccaaggcaggcggctgggaggtggaggttgtagcgagccgagatcacgccactgcactccagcctgggcaccattgagcactgagtgaaccagacaccatctgcaatcccggcacctccagaggccgaggctggcatatcactcacggttaggagctggagaccagcccggccaacacagcgaaaccccatctccaccaaaaaaatacgaaaaccagtcaggcgtggcggcgcgtgcctgcaatcgcaggcactcggcaggctgaggcaggagaatcaggcagggaggttgcagtgagccaagatggcagcagtacagtccagcttcggctcggcatcacagggagaccatggaaagagagggagagggagaccatggggagagggagagggagagggagaggttgaggtttagcatttatatggaacatgttctgctacttgagataatgggaatacaaccgctctaggagcttggagggctagaagcaaggatccagcaagtctacacacattccagag

SEQ ID NO: 2620 - DNA, 1136 bp, Artificial sequence
  DNA replication origin
tctgccccgccgccccatctgggatgtgaggagcgcctctgcccggctgcgaccccgtctgggaggtgaagaacgtctctgcccagccgccccgtctgagaagtgaggagaccctccgcctggcaactgccccatctgagaagtgaggagcccctccgcccggcagccgccccgtctgggaagtgaggagcgtctccgcccagcagccaccccatccaggagggaggtggggatcagcccctgccaggccagccgccccgtccgggagggaggtggggggtcagccccccgcccggccagccgccccgtccgggagggaggtggggggtcagcccccccgcccggccagccgccccgtccgggagggaggtggggggggtcagccccccgcccggccagccgccccatccgggaggtgaggggcgcctctgcccggccgcccctactgggaagtgagaagcccctctgcccggccaccaccccgtctgggaggtgcacccaacatgctcattgagaacaggccatgatgacaatggcggttgtggaatagaaaggggggaaaggtggggaaaagattgagaaatcggatggttgccgtgtctgtgtagaaagaagtagacatgggagacttttcattttgttctgtactaagaaaaattcttctgccttgggatcctgttgatctgtgaccttacccccaaccctgtgctctctgaaacatgtgctgtgtccactcagggttaaatgggttaagggcggtgcaagatgtgctttgttaaacagaagcttgaaggcagcatgctcgttaagagtcatcaccactccctaatctcaagtacccagggacacaaacactgcggaaggcggcagggccctctgcctaggaaaaccagagacctttgttcacttgtttatctgctgaccttccctctactattgtcctatgaccctgccaaatccccctctgcgagaaacacccaagaatgatcaataaaaaaaataaataaataaatgctaaaccgtcacagctgtagatcatgagcctgctcttttgacccccacattctcaccacctgattctctgttggattaccaataaacagcgtgggctcccagagctcggagccttcgcagcc

SEQ ID NO: 2621 - DNA, 983 bp, Artificial sequence
  DNA replication origin
gcggcgcctcgctcgtaggtgggccccagcgcgcagtcgcgcgcccccgcgcgttgggaagttgggagggaggtgcgcgcttggccgcgcggggcggggcctctaccggcccgatggagcgcgcgggcgctactagccgcgggggccaagcccctggcttcttactgcggcttcatactgagggccgagccgaggcggcgcgggtgcaggagcaggacttacggcagtgggggctgacaggtgagcgggctccgggcggacttcggccaggcgggccaacctattgggactgcctcttgcgggccgggggcgcagcgggtgggccgcccggtgggcagtttacccgctcgcgccagggccttccttcgctcctgccgtgggcggagagaaactgcgcccgggcttggtggccacggcccccgcctgcgcggcgcgcggggccggcggacgccagatgaatgaggtcgcgggcccggtagccaggcctggcccctggcctgtggaggggaaacgtggtgagatcagcgccacctgcaggcctccgctgaagagttggacggcctggtgcaccaaggatgtaggtttccagttgctgttccggtgggtttgggtcccggcctggggagtttattggttgcttctgtaaaacgatcaactcatctcccagcttcagcttctccgtttactgtgcgcgcgcagttattggagaattcgccacggattaattctccggatcgagttacgtgcggtagtgagcggacaaactcaagcaaagcactgtttatgaagctatttttgtgtcttgagtcattcataaatactgactgaaccacgtactatatgccaacttagcttgtccgctcaccaccgcacgtaactcgatttattgacactagcccttacggagagtctgcaaagcgcgaaccttgcatgccccccagccctgccgctgcatggctgaccgtacttcctgcagctccgag

SEQ ID NO: 2622 - DNA, 1712 bp, Artificial sequence
  DNA replication origin
agattcccattaaaatgcaaatgccccctaaggagaagaacttctctgagtgttattagttaaccccttaaatgaggttgtttagcagctagctgggcacaacatcctacaactcaattaaacaaacgtttattgacctcctgccatggttaaggagccagacttgggaatagggagcaaaatcccacgaggtttctcccctcaagggggcttgcaatctagtacggtgagtaaaacaagtacaaaaaagacaggaagagaaatgcaacggcagaggtgcaaagagcaaagcctgttccgggggaggggcggctgggaagcaagagattcattcatgcgtgcattctagaaggactgactgcctgtggactccgggctaggtcctcagaacacagcctgagccaagttcactgcctagtgttcaaattaaacagataaaccacaagtaagctactgtcgttgggttctctcgggcgtataaagtctggagaagcacaggggagggagtgacttagcggctatgggggcggggaagagtctagaaagactgtcgttgtgatgaatgtggcacggagtaagtgacatatgagccgggtctagcagggtaagtttaggagagacggggttgggtggggagagaggagatatgtatatacatatatagagagagagagaaagagagagaaaacgaaccacattcctggaggaggtatgtgtaaagggcctatgctgagaaccatttcggtgtggtgggcttagggatagcggaggaaccaggcaggaaggcaggagatgggcctggaattgtaaaacagagcatcttaaatttaaggctaaggagtttgcatcttatccatttggaacaatcagaaaatgcttcacgaaggagatatttgagctgggccttaaagcatgagaaaaatttctacaggtggagagggggctgagagcgtttcagggtaaaagaacagcatagccgggcacaggggctgaagactacgggcttgggaaaagcctgcgagagcagtgtgtggtccatagggtcccgagcactgggatcacatggaggcctattaagggcgggtcccctggccccggagcagacccgccaaatcagaattgctcacggcaggcgcctgctagccaagctcttgatgcgcagtaaagttgttcagtggcttagtaggcgagaaggccaaaaaggaaggtgacctctgagtgcaggataagaatctgcacttaaatgggaaggctcctgagaacggacccagtgggagagtggtatttatcagagccttacttcaggaaggtttaccagacagaagaacttaggatggaaagtgtggggacccagttaaacggctattacagtagtccaggtagggggtaatgaggactgaattttggtagtgggagggggaagaatagggaagggacagatgtaagacatttgggtggcagaatctacatggctccctgggcaactgaagtgggtggaaaggctgagtcacacatgactttagggagctaagctgggctgtggggaaaacggcagagcttttaaaagaaaagcagagttaataaggtgagtttaggaaggtgatcagttgagagataaagtgccaagcacagagaggccaataatagtgatgatttttattttgcatcccactgtagttagtgggatacaggatggagcacaggtggtactc

SEQ ID NO: 2623 - DNA, 788 bp, Artificial sequence
  DNA replication origin
tgcggggtcagtgcacacagttgccgaagcagctaacttagatcaagaccccacaaggcacaaggacagaggtgtaacaacagtgtattctggggagggtgcagagcagacagatctataataacggttgttcaccgcagcaaccggggccacacagatggagcagaatagcccgaatctgagctttgattcagcaacatgctctaaccatgatgccgtcattttttccttctgagaaaaagtgtaatctaatgggctaccctctcacaacagcgccgggatactcaggctttgaccccttcagagcagaggtcttccgaaaaattaggggagctagcccggctgtgaagcgacgtgaggtcctggacagaggttccctctgtgggcaccaggcagcgatgcctgagccaggctgggctgggccggatgtgaaaggagacccctgcacccccggcgcatcagcgggactcctgcacttcgcagagggcggaggagagcgcagtcctgggtgggggctgctctcctgcgaggggagaaagccggccatggcccaggcggtgcagactcagaggtggagagaagggacaggaaagcggggtggaactgcgtcccgaaggtgtgaggaggtggccttgaaggttgagggctaggccgggacctgggcagcagggaagagtgagggaaagaccggctcttcaattcgtttctgtcaaaagatggccaaattccacgctgcccttccccctccgcgcctttcctggccccccgcccccctcggttgctcccag

SEQ ID NO: 2624 - DNA, 2032 bp, Artificial sequence
  DNA replication origin
ctgcctggtgggcagggccctgcgggaagctgggggcgggaggaggccgcggcgggttggtaccatcgcgcgcgtctggggagggggacgagcgactttccctgaaggggcacgagcgactttccctggaggggcgggcccttgctggtcgcggggccggacgctgaggcggggcggggcggtcccggttccccgcgggcgggacgtcgggccggtggggagggggcaccctccgctcgcgtccgaggcggggccggctgtacctttcgtggcgcggtgcggcgggggagggccgaagggagggaaggggcgggaccgggaggggggagccggaaagggggaggcgccggcggacaatggagcctatgtgtgcttgccggagtgggacggcgccgccgccgccgctgccgccgccggggggagacgctgcgccgccgctgccgctggccccggccccgcggggctgagagccgccccggacccaagcctctttccctgctccgcacctcctctcccctcccccactcctgcctccggggtaagtggcacctgggggagggggaggggaaggaccggagccgggggtagtgggggccaggtccgcgtccgcgtgttttgagccggtttgggggcaggggtagccacagccgcgaagagcggggtggaggggggcagaaaaggggcgggggccagggttgcggatttagtgaggcgagtctggaggaacctgtggggggaggtgggggtgcttcacgggcggtggagagagagggcatctcttctttttttcaaaggttgtgtcccaagcagtgcttggagaggttaaaccaggagagtgaggacagtcccagggtcctgggatgcaggagtgttggaggggcgagatggagagctaaataagggaattgggattgagtttgatgaggtctgtaagacccctgagatggatagaggtaaaggggactttgcaggccagtgacttgttgaagggtaggggaggtggaagctaggaagaatgtgtgagtagttaagggcccaagcaggtgaattggtgatgtctaggtcactgagtcattgtgggggtcttgggacacaccagtgatttccaaagtggagcctgagtcactggcctttgaaagttgcaaagactattaagatgtcactgatgagtgttgggtgagcctggtgaaatggagatatcctaagtaaaacaacagcagggttggttattatgtccagagggaaggagagggaggggccagaggcctgtaatagtattgctgggggccttatgggaaggctaccaagcatgaaggaggaggccagaaatctgtcctccaagaggtctgaaggagggggaaggaaaaatgggtttttagtgataggagagacttagagcctagattggagtccagctggggactaataaagttactagataagttagagaaatggacataactatctcttagtggagagtctgtaagatgggatagaattgatgcaaaatttgactttgattacagcaaacataggtaaatccctggcagtgatttcagtggggaaatgattttctatgtaaagagttacattttggtcaatgatgggtattggagtattagttagcacttgatatattcaggaattaaatgttcgttttggggcagagatttggatttgtgcactgagcaaagtgatgaattagaactaacagacagtaaggataaattgtaaaatcattgagagatgggaggagggggcaaaaggatgttggaggtaagactcatgtgggtttagaacctttgtggaaattgtgcaacatgattgtcctgttttgtgttttctactgaatactagtgattggaaagttttagcaaggagagatgtttgcgtgaataatgtgaaggccctacataaaaatttaagaaagacatccttattcactattgaaaaacacccaaactattaaagacacagatgggtttataagaggagctgttagttaaatggcataaggatgctttgagcaatg

SEQ ID NO: 2625 - DNA, 1112 bp, Artificial sequence
  DNA replication origin
agcccctttctgggctggccaaggccggagccggctccctcagcttgcagggaggtgtggagggagaggcgccagcgggaaccggcgctgtgcgctgcgcttgcgggccagctggagttctgggtgggcgtgggcttggcaggccccacactcggagcagccggctggccctgccggccccgggcaatgactggcttagcacccgggccagcagctgcggagggtgtactgggtcccccagcagtgccagcccaccggcgctgcgctcgatttctcgccgggccttagctgccttcccacggggcagggctcgggacctgcagctcgccatgcctgagcctcccaccccctccgtggactcctgtggggcccgagcctccccgatgagtgccgccccctgctccatggcgcccagtcccatcgaccacccaagaggtgaggagtgccggcgcatggcgtgggactggcaggcggctccacctgcagccctggtgcgggatccactgggtgaagctggctgggctcctgagtctggtggggaggtggagaacctttatgtctagctcagggattgtaaatacaccaattggcactctgtgtctagctcaaggtttgtaaacacaccaattagcaccctgtatctagctcagggtttgtgaatgcaccaattgacactctgtatctagctactctggtggagacttggagaacctttgtgttgacacgctgtatctagctactctggtggggacttggagaacctttgtgttgacaatctgtatctagctaatctggtggggaagtggagaacctttgtgtctagctcagggattgtaaatgcaccaatcagtgccctgtcaaaacagaccactcagctctaccaatcagcaggatgtgggtggggccagataagagaataaaagtaggctgcccaagccagcagtggcaacccgctccagtccccttccacaactgtggaagctttgttctttagctctttgcaataaatcttgctactgctcactctttgggtccacactgcttttatgagttgtaacactcaccgcgaagatctccagcttcactcctgaagccagcgagaccacgagccc

SEQ ID NO: 2626 - DNA, 1152 bp, Artificial sequence
  DNA replication origin
cgcctctctttagaggagaaggggagagagtatgattctgggagtgaggaatgccctacacttttggagctgggaggttagcatttctttcctttcaggttagtcctggtgcctattctgggcgctggatggttgtgacttgtgagaccgtgttttcctgtgctggcttatgcttagttcattggtgtgggcatagtggaaatcccaaaaaaggcttgttatgtgagtgaacaccctcttttttctgatgacgggaaaaggatgggaagagggatctcttgggcagtgccaattttcctgctgatgctccaggaaagccatggcctgggaagtctgaggcgacgcagcagaggggtgggcaggaagagacttagggaggtggtgcaccagcggcccgggggagaggcaatgtggaggactgctgtgaggacaaggacaacaggcagacagacagggggagggctgcagggaggagggggctctgcctccttgggggccagagaaggggagcacagtgagctgaggctacgaggaggtggagggaagaagacttttagagcaaagactctaagagcacaaaagagagagaggggagggagggattcagaggggaaaaggggtggagagagaaagagtaggaagaagtgggaggagggaaggcgacagatacgattaaaaagagggtggaagaggaacaactgacaggctcaagagcaaaaagcgtgggcagttggagaagaagcagccagagtgtgaagaagcccacggaaggaaagtccagggaggaggaaaagaagcaggtaagagtagacttgaatttgaacagctaaagctacaagtggatatgaagtagccagaggaagggagcttggattctaggctggataaaaacaaagctctttctttctacctgtgagtttattccttacccctcccgctatttcctgtgatagtgaggtatggatatattaaaaaggaaggtttagcgaagcagcagataaattacttccttgatttagagggagatgaagaattgcgagtggagggcccttggggttccagcctacttttgtggagttcagtcctctgggggcatcttagaagtgggtcaccagtccattcccaagaacttttcttagagggaattggccc

SEQ ID NO: 2627 - DNA, 958 bp, Artificial sequence
  DNA replication origin
tctctccgggaggtgaggggcgcctctgcccggctgcccctactgggaagtgaggatcccctctgcccggccagctgccccgtccgcgaaggaggtgggggggtcagccccccgcccggccagccgccccatccgggagggaggtgggggggtcagccccccgccccgtcagctgcccggtcctggagggaggtgggggggtcagccccccgcccggccagccgccccgtccgggaggtgaggggcgcctctgcccggccgcccctactgggaagtgaggagcccctctgcccggccagccgccccgtccgggagggaggtggggggtcaggggggtcagccccccacccggccagccgccccgtccgggagggaggtgggggggtcagccccccgcccagccagccacccggtctgggaggtgaggggcacctctgcccggccgcccctactgggaagtgaggagcccctctgcccagccaccaccctgtctgggaggtgtacccaacagctcattgagaccgggccatgatgacaatggcggttttgtggaatggaaaggggggaaaggcggggaaaggattgagaaatcggatggttgccatgtctgtgtggaaagaggtagacccgggagacttttcattttgttctgtactaagaaaaattcttctgccttgtgatcctgttgatcggtgaccctacccccaaccctgtgctctctgaaacatgtgctgtgtccactcagggttaaatggattaatggtggtgcaagatgtgctttgttaaacagatgcttgaaggcagcatgctcgttaagagtcatcaccactccctaatctcaaggacccagggacacaaacactgcggaaggccgcagggtcctctgcataggaaaaccagagacctttgttcacttgtttatctgctgaccctccctccactattgtcctatgaccct

SEQ ID NO: 2628 - DNA, 1558 bp, Artificial sequence
  DNA replication origin
ccccacctccctcccggatggggcggctggccgggcggggggctgacccccccacctccttcgcggacggggcagctggccgggcagaggggatcctcacttcccagtaggggcagccgggcagaggcgcccctcacctcccggagagacggctggccgggcagggggctgaccccccgacctccctcccggacggggcagcttgccgggcagaggggctcctcacttcccagtaggggcggccgggcagaggcgcccctcacctcccggacggggcggctggccgggcggggggctgacccccccacctccctcccggacggtgcggctggccgggtgtggggctgacccccccacctccctcccggacggggcggctggccgggcggggggctgacctccccacctccctcccggacggggcggctggccgtgcggggggctgatccccccacctccctcccggacggggtggctgccgggcagagacgctcctcacttcccagacggggtggctgccgggcggaggggctcctcacttctcatatggggcggttgccaggcggagggtctcctcacttctcagacggggcggctgggcagagacgctcctcacctcccagacagggtcgcggccgggtagaggtgctcctcacatcccagacggggcggcggggcagaggcgctccccacatcttagacgatgggcggccgggcagagacgctcctcacttcctagatgggatggcggccgggaagaggcgctcctcacttcctagatggtatggcggccgggcagagacgctcctcactttccagactgggtagccaggcagaggggctcctcacgtcccagacgatgggcggccaggcagagacgctcctcacttcccagacggggtggcgccgggcagaggctgcaatcttggcactttgggaggccaaggcaggcggctgggaggtggaggttgtagtgagccgagatcacgccgctgcactccagcctgggcaccattgagcactgagtgaaccagactccgtctgcaatcccggcacctcgggaggccgaggctggcggatcactcgcagttcggagctggagaccagcccggccaacacagtgaaaccccgtctccaccaaaaaaatacgaaaaccagtcaggcgtggtggcgcacgcctgcaatcgcaggcactcggcaggctgaggcaggagaatcaggcagggaggctgcagtgagccgagatggcagcagtacagtccagcttcggctcagcatcagtgggagaccgtggaaagagagggagagggagaccgtggggagagggagatgggggagagggagagggagagggagagcgataaaataattttaaacaaaaatgattcaatgtcataaaagagccaatgaaacaaggattggaaaatgttgaattttgcaaccaggggaaaacttattaccatagtgtcgtagtggttaaagcccagactctggagctagactgcacttgaatcctgactctgccccttttatctgtgtggccttaactaagttactt

SEQ ID NO: 2629 - DNA, 890 bp, Artificial sequence
  DNA replication origin
tatttggccctaaaaccggcgcgacttttatcgtctctgctgtcggatccctgcaatacaaagaggtacctggtcactgattctctacttggaccttggatagaccattagaccacatctcgcgatggagtgcggctcaagaaatgacattcccggccgggcgcggtggctcacgcctgtaatcccagcactttgggaggctgaggcgggcggagcacgaggtcaggagatcgagaccatcctggctaacatggtgaaaccccgtctctactaaaaatacaaaaaattacccgggggtggtggctggcacctgtaatcccagctactcaggaggccgaggcgggagaatggcgtgaacccgggaggcggagcttgcagtgagccgagatcgcgccattgcactccagcctgggtgacagagcgagactccccgaaaggagagaagctgtggggtggggcggacacaagcagtggtggggaactggggcccagggaaaggggaggcatgtgaggaggaacccgagtgcagatgaggggagctgcggagaggggcctcggaccttcctgtcgaggaaggcccagtctttggtggtctcggcaaaatgaagaatgggcccccagtggagagcagcacgtccccaaaactcatttctatcacccctgtttgttttacactccaccaggcaaatcttccgtccacaggattctttttaatacttctctttaagcagtgtggtggggaggccatggcaatcattagctctggaggcctgaggaggacactctgaagaggaaagccccgcgatcatccggtttcacccctgttttcatctactcttttcctcagcgaagcctatatgggttcccgatgtcacatcgcagctaccgca

SEQ ID NO: 2630 - DNA, 1506 bp, Artificial sequence
  DNA replication origin
tatatgaaagcaaaggacaggaaaaacttgcctgatagatttggagtctgtggagtattgtcagagtttggtgttgtattctacagattaaaagtaatctgttaagcacctcaaataaagtttcccccaaatatatatatattttttctaaatttggaccactttgtttctgtctttgcagaacataaagtgttaacatgaggtaagtgctaaggtctggagaaggccgtggaagagatgacaaactccagcatcatgcccgagtgtccagtgtgctctgctggggcagcatatttgtacattgctgtatttgaaagaaccctacaagattcctgaaattggaccaccgtccttataacactactagtggtaaaacaagtaaggatggctggtttgcagtcatctgagcagcctctctagtttcatagatatggtttctctgatatcgaacggcttccaatttcaagtagaatgctacatcacaaggataatgatgtgaagtgaaccagtttcttgtgtaatcctccatgttttagtctgcgcattacaagccattatttgaagaagggtggacaggctccagatttctgccaaagaggtcctcggcaacacaggctaagaaccggcttctgggcagtcgtgatggctcacgcctgtaatctcagcactttgggaggccgaggtcggcggattacctgaggtcaggagttcgggatcagcctggccaacatggtgaaaccccgtctctactaaaaacacaaaaattagccgggcttggtggcgtgtgcctgtaatcccagctatgcggaagcctgaggcaggagaatcgcttcaacccgagaggcggaggttgcagggagccgagatcatgcgactgcactccagcctgggcgacagagcgagacggcgcaaaacaaaaaacaaacaaaaaactacaacagaaacacccgcttctttggggaagaccatgggcggggaagagagggaaaggaggcagaggcagacatcactgcccccgcaggctctggcaccatgttggtcggctgagtggcggagggtggggcagaaaagcagaccgggacgaggaaggcgctgtcggtgacatcacggatagggcgacttctatgtagatgaggcagcgcaggggctgctgcttcgccactggctgtttcaccacgaaggagctcccgtgccgtgggagcgggttcaggaccgctggtcggacctgagggtcccagctgtgtgtcagggctaggaaggctcgggggtgcgcggggcaagtgaccatgtgtgtaaagggtgaggtatatggagctgtgacagggcagaagtgtgtgaagtcatacttacctggcaggggagataccatgatcacgaaggtggttttcccagggcgaggcttatccattgcactccggatgtgctgacccctgcgatttccccaaatgtgggaaactcgactgcataatttgtggtagtgggggactgcgtccgcgctttcccctg

SEQ ID NO: 2631 - DNA, 966 bp, Artificial sequence
  DNA replication origin
aggtgacagcgttctggcagtcctcacagccctcgctcgctctcggcgcctcctctgcctgggctcccactttggcggcacttgaggagcccttcagcccaccgctgcactgtgggagcccctttctgggctggccaaggccggagccggctccctcagcttgcaaggaggtgtggagggagaggcgcgagcgggaacccgggctgcgcccggcgcttgcagaccagccggagttcagggtgggcgtgggcttggcgggccccgcactcggagcagtgagggcaatgaggggcttagcacccgggccagcggctgaggagggtgtactgggtcccccagcagtgccagcccaccggcgctgtgctcgatttctcgcggggccttagctgccttcccgcggggcggggctcgggacctgcagcccgccatgcctgagcctcccgccccctccgtgggctcctgtgcggccggggcctccccgatgagcgccgccccctgctccacggcgccgcccaccggtttttctgccacttttgcaagggcgaggtcagccccaaactaccggtaagagcgctgtgttctctatacttgggaacctcatagattcctggccccgatttcccggaactgggtctggagctttctgcacatcattgactccccggacatcggtctgccgaatacctgctgcccacttctaagccgccggccctaaaccctgggcatcacggcctcggccccgtacctcctgcccacctcttaattcatcctgggctgctccacctgacctcacctcttcacctcccgtgtccttaattttttttttttcttagcaagtttccctctgataactctcccctcaattttcttgcattcttttatacctggtctttttcctacgatgacctccccccacacttcttccactgtgtcttctcaccttcctctgtgttcttttccactttt

SEQ ID NO: 2632 - DNA, 1431 bp, Artificial sequence
  DNA replication origin
tggtggggccggggccgcccccttggggaccctgagagcctcctcgggcgcacccgggcgctggaagctgcacctgacggagcgtgccgacttccagtacagccagcgcgagctggacaccatcgaggtcttccccaccaagagcgcccgcggcaaccgtgtctcctgcatgtatgttcgctgcgtgcctggtgccaggtacacggtcctcttctcgcacggcaatgccgtggacctgggccagatgagcagcttctacattggcctgggctcccgcctccactgcaacatcttcacctacgactcctccggctacggtgccagctcgggcaggccttccgagaggaacctctatgccgacatcgacgccacctggcaggccctgcgcaccaggtgagggcgaccctgggggcagctcagcctgggcacacccaagaggggaccaggcggggggccggggggcgggcttccctgggaggaaggtgggcggccctgcaggaggggagccacagtggatgcacagggccagagagccggacaggcgagcttgggtgtgcaggtgccgcctccacatggctgaggtgtggccaggcggtcctcccacaccctggcctgtggagccaggctccctgggaacccctggcctgaggatgggaaggggctgagcttgtcacaggggtgtggatgccacctggcgggagggagtgggtggtggtctgggggtctgtgcacgtgtggctgggagcccatcggctgaggcagcacttggggccaagtgaggcgaggctgctgcatccaggtccggaggactggcccatgaggccctgtggctgcggagcttggccatcctggggcagggcctacagggtaaggtgcagacccgcagcacacatccgaggtctgggccagcctcgattccagatccagccctcctagtcatccacgtccccagccctgtgcttgcctgggcccttcaccggtgtttgagcagcgcccgggccagtgctgctttggacgaggagacccggctgggcctctggtggcttttcctgctcgccatccactgggcctgtctcgtcctggccctgcccagcccactggtctgacctgctcccgcagggaccaggcacagctctgagaagtcagaggccctagggaggtggggtcgtcgttgccttggtgatatgcaggcagtccctgctgtgggcctgggagctggtcccctggcaccaccctggctccaggggcctcccggcagttgtgggacgctgacaccaatcaccacttcatgcggcttcctcggcccctcctgtctctactgcctgggccactggcagagtcacacctgccatggccagctctgagctctgtctgctcggccatctgtcctgctgcccctttgtcctgcaggaacctaggcccagagccatg

SEQ ID NO: 2633 - DNA, 1349 bp, Artificial sequence
  DNA replication origin
gcttttcctgctcgccatccactgggcctgtctcgtcctggccctgcccagcccactggtctgacctgctcccgcagggaccaggcacagctctgagaagtcagaggccctagggaggtggggtcgtcgttgccttggtgatatgcaggcagtccctgctgtgggcctgggagctggtcccctggcaccaccctggctccaggggcctcccggcagttgtgggacgctgacaccaatcaccacttcatgcggcttcctcggcccctcctgtctctactgcctgggccactggcagagtcacacctgccatggccagctctgagctctgtctgctcggccatctgtcctgctgcccctttgtcctgcaggaacctaggcccagagccatgagggggaggccagagcgtgcccagggcctccactggggatgtgtcccgttcgtttgagtggtgacatccaggtggcagctgggggctcctgcctgtagcaggtggcagggctgggctggctcagcacactactgaccatggctgccagggagcaggccggggaggccgaggcagagctggggccacaggcaccagccaggcagcatcctttggggcatgggtgagtggcgagctgtggagtgctgccaggaggctgggattccaggccagggacggggacagccctgctggtggagtccgaatgccaggcagaggggacgcacacctgcccatgctcctgccttgcaagagggcgtctgcctgggatcagagcctagagcgtgtgggaggagagttgtggggtcccggcatgggcagggtggcaggtgggtcccgcgtgcttgggactgggcacgaggaggccttgtaactggtgctggatcagctgggtcaggggccgcacaccaatgacctgggggtgagggtgcccctgggtgggagctggtggtgctgaggtggccgaggacttgtccactcccaagggaaggtgctggtgggagggggtgccacctccgcagccaccaccctcgatgctgacctgggttgcactggcatctcactgggcgtggggactccgagagtccaaaattgggtggagacatttggggacacagctgcctgaattcctcatggccaagggggtgggcaagggctgcagggaggaagagtgtccgctgtcctggccagtgcaccaggaacggctttctaacccgggcaggaaggtatgaagcattcaggatgtgggggccacacagttcccagtgtgcacctaggggtgaccaggaggaggagaggcgccagggcctcccttacccccgccccaggggcactccgtaggcaggatccctgcagatcctagct

SEQ ID NO: 2634 - DNA, 1027 bp, Artificial sequence
  DNA replication origin
gccagcgggccgcaagcaagttgctgggcggcggtggagatagcggcggtgctgggaggggtaggtgagggtcgcgaggctgcctgagcttctgagtgagcctggtgattttgggaacgcgggacgggcgacctgcggcgccaggagcggggccgaggtacggcggcacggctgcagcctggatgggaagttcaagtttactgcgaagtccacccagcgttccggaggtgagggcgccgcgccaggccgggcgggaggtgagtctgggacctgcgggctcacagctgggctgaggcgcggcgggctgggccgccgcaagttttgttaggcgagcggggcggttgcgccgggcactgccgggctccgcagggctccgccggggcctaagttccctgcgcttgattcctcgcctgccgctgcagcccgcagccctcctctcgtgggcgctggggaagaaactccctggcaggtgttctgtggcatcccagggggtggagggacggagcagcttcgggggcacgtcttcggaagtcctgtggagcacactgacttcgcaccccaccctcgaggccgttctttctgggaacttgaggggcaagagcgctcgcgcccctgacttgcaaagttggggtctttattggcctccgggattctgctcctggcggtgtctccaggctggtgatgggcaagccaggtgtgccaggtccaggatgcatgtgaggagcgtttgtagcgatcactgaatcatctcatgactagcggggcaagcctccaattaaccacaggatttctggtaggttggactgtggtgttggtgtttgcagtccaaagagttgctgtgatttttctgtgcctgtctgtctttctttgaggcttcttagatcatctcatttggcgtcctttcacccaagagttaaccaagcgaggaatggtttcctcgctttcctcctaccttttgctggtggagctgctttcgaaaagaagcactttaagaggccgacgcgggcggatcatgaggtcaggagat

SEQ ID NO: 2635 - DNA, 1709 bp, Artificial sequence
  DNA replication origin
gactttgtttctgtctttgcagcatataaactgttaacatgaggtaagcgccaaggtctagagaaggcagtggaagagatggcaaactccggcaccatgtctgcgtgtccagtgtgctctgctggagcagcacatttttgtacattgctgtatttgaaaaaaccctgcaagaatcatgaaactggacgaccatctttataacactcccagtgataaaacaagtaagaatggctggtttgtagtcatctgagcagcctctctagtttcgtagatatggtttctctctgatatcgaacgacttccaatgtcaagcggaatgctacatcacaaggataaccgtatgtgaaaagaaccagttttctttgtaatcctgaactttctagtttgcgcattaaaagacattatttgaagaagagcgcacaggctccagctggccgccaaaggggtccttggcatcacagactaagaacctacttctctgggagagaccaggggcgtggatgggagggaaaagagggagaggcaggcgtcacttcctccgccggctcccgcagcgggttcatcggctgaggtggcagagggtggggcagaagagcagagccggaccgggaaaggtgctgtcggtgacatcacggatagggcgattcctgtgtagatgaggcatctcaggggctgctgcttcgccacggaggatttctcctgctgtgggagcaagtccaggaccgccggttggacgtgatagtcccagctgtgtgtcagggctaggagggctgggggtgggggtggggggcggtggggggttgcgcgtgggaagtgaccgtgcgtgtaaggggtgaggcgtatggagctgtggcagggcggaggcgtatgatctcatacttacctggcaggggagatacgatgatcacgaaggtggttttcccagggagaggcttatccattgcactccggatgtgctgacccctgccgtttccccaaatgtgggaaactcgactgcataatttgtggtagtgggggactgcgttcgcgctgtcctctgaattttgtgctggaaaacgcagattgtatgtgaagggatacttttagtagtgcataatatgggtggtgtcatgttatttttacagttggatggctggggaacagaagtggcatgtcgttgtcctcgctggagaaggaacaagcgtcagccgttgtgagcctgtttatcacaagttaactagcgcgaaggctgcatagcttttccctttgaacataaggctgcttattgcaaaaattgatccatggtctccagtctcttggggtctcacgctctgtgaaaatcttcgtgttttcccctaggcccctgtcaccttttacacagcctctgtttcaggatttctgtgctagcgaggaatcagttctcacctcatagagccaggtggaaactacgcagacaggcactcttctttgggatgaaagcagggcctttggggctcttagtgtccccgttcggttgtagacataacacgcttgctttgtgtaggagaacggctctgccagcgcccaggtgtcctaacgcaattcatcgaggcccgcaggtcagaaccgcagtctcacttgtcttggcggaaatgcgctgcgatcctccctgcactacatgaacacgagaattccactacagaagaaaaccccagtcctagtgatggcggttctgggcattttgccagcct

SEQ ID NO: 2636 - DNA, 1388 bp, Artificial sequence
  DNA replication origin
tagtgtatattcctacaaaggaatacacatagaaacaaataaccatatgaataacatgaaaaattcatagacataagactgagtgaaagaagtcaaacctatgcctctgcttctgaaaccgcctttgcaaaagttacaactgggacaattatcacagtgaaagagatctgacctaactgattccatcttgtttctaacgtccaagctgtccttgttgattgctgggcacaggccgaaataactttgggaggaaattagtttatggtttagctgtgaaacaaagatgataatatcattttcccaaagcaaacccccttcctgcctggggactagactgcctttgcaggactaacaaagtagccctgagattagaaattatggtttaggagtcatgtagcctctggctgcaagattctaaacctccccaaattgttcctggagatcacatcgttattggaaaacctaagatcagtgcttgagatattttgccgaccctgcactcagtggatcagctggcaccagctagactgataacctggctcatctggtcttgtggcccccacgcaggaactgacccagcagaagaccacagcttcagctccctgtgacttcatctccgacctgaccaatcacaactctcaactcactggcccccaaccaccaaataaaaagtgcaggtctttattgcaattcccctgtgtcgaaaaattggctctgtctaggcagcaggcaaggtgaacatgttgggcagtaacactccccacaaaacccactacacactgtatgactcagcttatatgaaagtgaagggcaggaaaaacttgcctgatagatttgcagagaggggggtggaaaccattaataagtctgtggagtattgtcagagtttggtgttgtagtctacatattaaaagtaatcagttaaacacctgaaataaaatttcccccaaatatttttgccaaatttggatgactttgtttctgtctttgcagcatataaactgttaacatgaggtaagcgccaaggtctagagaaggcagtggaagagatggcaaactccggcaccatgtctgcgtgtccagtgtgctctgctggagcagcacatttttgtacattgctgtatttgaaaaaaccctgcaagaatcatgaaactggacgaccatctttataacactcccagtgataaaacaagtaagaatggctggtttgtagtcatctgagcagcctctctagtttcgtagatatggtttctctctgatatcgaacgacttccaatgtcaagcggaatgctacatcacaaggataaccgtatgtgaaaagaaccagttttctttgtaatcctgaactttctagtttgcgcattaaaagacattatttgaagaagagc

SEQ ID NO: 2637 - DNA, 1170 bp, Artificial sequence
  DNA replication origin
acatacccagtaatgggatggctgggtcaaatggtatttctaattctagatagaatgtttcctcttataactcatagtgaatatgactggacaatgaaactattttgtaatttctttcctgaaagataaaggcgttagaacatagaatctttcattgattctacagaatcttaagactccttcagagatggcagtcattcctaccgtgctgaacatcatgttgtcacggtcagaatcagaactaaattgattaagggtctgaaacagtttggcactcttgggcacttattctgataagaaagctgatgagacagggtaatgaaaagaggctgcaagaaatgaccattcatgcattcagccaacatttaggccaccctcctgtattccaggcactgtacgtggcactgagaatgcaaagcaaaacgagtcatggtctactggcgggagccttctcagcggagaaaagatcaacaagaaaagtgcctgctggagacctctcctagggcataaaccaatatagaggtggggcagctacgtcagcctgaggtgtccttaggcagaacagaaagtgagaatcagagcagtatctcatttctgaacacctggattgtagctttccctggactgactgtcaaaggaggtggttttaaaaagcaagccaaacaggtttccatcctttaggaagaccctggaacgtgccagttgattctgacaatttctcatgaacagaaacacctaggaagggagaactggtgagtcttttcaagaggaggaagtccctcaaaaggggctgtgtttcgcaaacggcgccccaaaagggctgaaatacttcgatctggaggaaaaagactcaggcactgagggaaggggagggtgcacatctggagtaatttcaaggctttttccgtgttatctgatgtggcaacaagtaaagatttgttcgttttattatttttttaatttttaaagattttcttttccccccttttccccttcccggccactccggtttgtgtttgccacaagactcataattcctttagaaagtggagtcgaattcataaaagtgacggggggagagcgcggagagggaaggctgggagccccagggagtcttcactacctacactgccgctcagctcccggcgcgagtggaggtcggggtgggga

SEQ ID NO: 2638 - DNA, 853 bp, Artificial sequence
  DNA replication origin
tcaaataagacataccctagattttttttgtttgttttgtcaaattgggattatttttgtgtctttggagaatataaaatactaatatgaggtaagcactaaggttctgagatggccgtggaagagatgacaaactccatcaccatgcctgagagtgtccaatcgtctctgcgggggccacatcattttgtattacactgtatttgaaataacaacaacaacaaaaaacccttcaagattcataaaattggacaactgtctttgtaacacttctagtggtaaaaccagtaaggatggctagtttgcaacccatctgagcagcctctctggtttcatagatatgttttctctctgacattgaacggctttcaacttgaagcggaatgctacatcacaaagataaacaggtttgaaaggaaccggttttccttgtaatcctaaacgttcaagtctgcgcattaaaagacattatctgaagaagggtgcacaagcttcctgttggccgccagaagggttctctgcaggacacagatcaagtaccacagtcttagggggagaccagacgcggggtctctgcgaacctccccaaaggacaatggcaggaggaaaaggagaaagagacagacgtcacttcctccgccagctccggcagcgggttgatgggctgagtcggcggagggtagggcggaagagcagacggggactgggaaaggcgctgtcggtgacatcacggatagggcgatttctatgtagatgaggcagcgcaggggctgctgcttcgccactaaggagttcccgtgccgtgggagtgggttcaggaccgctggtcggacctgagagtcccagctgtgtg

SEQ ID NO: 2639 - DNA, 1167 bp, Artificial sequence
  DNA replication origin
tcaagtctgcgcattaaaagacattatctgaagaagggtgcacaagcttcctgttggccgccagaagggttctctgcaggacacagatcaagtaccacagtcttagggggagaccagacgcggggtctctgcgaacctccccaaaggacaatggcaggaggaaaaggagaaagagacagacgtcacttcctccgccagctccggcagcgggttgatgggctgagtcggcggagggtagggcggaagagcagacggggactgggaaaggcgctgtcggtgacatcacggatagggcgatttctatgtagatgaggcagcgcaggggctgctgcttcgccactaaggagttcccgtgccgtgggagtgggttcaggaccgctggtcggacctgagagtcccagctgtgtgtcagggctaggagggctgtgggtggtggggggggggggtgggggggggggggcgtgcgcggggcaagtgaccgtgcgtgtaaagggtgaagcgtgtgaggctgtggcggggcggagagtgcaagagttcatacttacctggcaggggagataccatgatcatgaaggcgcttttctcatggtcgcggcttatccattgcgttccagatgtgctgacctctgcgatttccccaaatgtgggaaactcgactgcataatttgtgatagtggggggctgcgttcgtgctttcccctggcgcttttgtggtgcgaatagtagatgagccgtaagtgtttttgtaattcagggtgcgggctcgtgttttgtggctgtgttctgtccggtcagttgtttccgttcgcaacggttagttttcctttgtgaggccatgtttagggacaggttagaattatccacttactctctcgggaggcgaatttcagtctctgttggttggggtattctcccaggttagctgccgcggtacttgctaggtggagctcagggatcaagggtcgggagctttctggtttgttcagtgctcccagggcttctaacatctcttaaaaactctggtgttttctgtcatcctcggagttacctcttagcctctgttttttttgttgttttttttccccccctccctaagacaagtctcgctgtaccgtccaggctggagaagtggcgcgatcttcccatctcaggctcccgagtaggaca

SEQ ID NO: 2640 - DNA, 1567 bp, Artificial sequence
  DNA replication origin
ggaggggaggagagagtggggctcctctatcgggaccccctccccatgtggatctgcccaggcggcggcggcggaggaggcgaccgagaagatgcccgccctgcgccccgctctgctgtgggcgctgctggcgctctggctgtgctgcgcgacccccgcgcatggtgagtatcgggctgaggggcgctgtccgcggcgcccggggctgccacctggggcgacccttctccccctcggtccttctctgtgtgggaaggccaggctcggccgccggcgcggagcgaggccactcgctgggttcccgagagtttggacatcgccgggggcccctcccgtggtgccccgccaaccgccggggttccccgccaaccgccggggttccccgccgcctctgctccccgcggcccgggacccctcacacgcctcctcggcaggagggaggccggcagcaagtctcagaaactcctttttcgtagtgccagggtgcagggaggtgggcagttttgcccttcaggttccgcgtttcttggggtcgagcgagagccgacggcgggcctcggaggggctgagcgaaggcgtgccagattctggcgtggagagcgggggcagggccgccaagccaaacggcctgcaccttcgcagccagcctcgcctttgccagggggcggcacatgggccgggtgtgtgggcttggtttggatggggacggggttttgcggcgcgcctgagttttgacactccaaccccaccgaaagtccggaggagccgggtgtgctgctcgcgtctttgaaaggtggaggcaggagaagtagggcaactggtgtggctgcatgctgaggcacatgatttaaaaatctcaactgctgttattctttctgaggcgcggagctctgctgctgtttcaggctgtgtccagacccaggaatgtggtgtgacgatcaccaattcctccaacctggcagcagcatttgctgctcctttggcatggctgggggtggggcacgggcgggtgagaaaaagtggatacgtcaattcaaagggcttccttagaaagcttctttgtggttggatgtttctaacacggttggaccaaggaaagggaatcaaatcatatcttccccatcccacccacacttttagattctacatttcttcagaccctttagtggaaataacttgggctttggagccctgctctgtaatcctggattcaaatccagctctgctatatgaactcaccaataaaatgggaatgaaattatccagctaataggattaattaaaataatgtatattaaacggatgacactccaaaggtgttcagaaagtcctttgagggccgaggctgtgttttactgcttctgagattgatgctcccagtgggatggtgtcttgtgcatatttgttgaacggaaagcagccccttctttttctgagcctaatctgaataaagatttttaccttcaccaaaaaactagtacatgaactacatctgttttcaaagaaaaggttaggaagatgatgagcttcagaaaaatatggtctttgttcattgttaacagtcagt

SEQ ID NO: 2641 - DNA, 1063 bp, Artificial sequence
  DNA replication origin
gcgggcatcttctcggtcgcctcctccgccgccgccgcctgggcagatccacatggggagggggtcccgatagaggagccccactctctcctcccctcctcctgcttcaaaggctcaggccctggcgctacgctccgaagcccaggcgcaaatgcctcgactccccgcgcccggagtccgccgctcctcggccgccgcctcagccgcccgaagtttggctgaaactttctcgggtgtgcagcgaagcagcctcgtgtgtccttccgcctcagccgcctcctcccaccgcaagccccgccccactgtcgccgcggcctcggccccgccgccttgggcacccaggggtttcccgcaggaagaagcgccggcccgagctccgcgcggagggatctactacgagtcactggccccgtccgcatccttctccagcggccccgggggccgccgcgccttaactcgatcagggctgcagcggctcgctggcttgaccagtgcagaaggggcgtgggggtgaggggggtggggtaggactctgaacttcaagcactggagtttgccgggatcgtgaacttgcagggagaggcggtcctcatccagtgaggtctgtatcgccacctacacccacacatccacacactgctttgctagctagaggaatgctctggagtaggaccagtgctgtcaaagaaggaaagtgggccaaggcgccaaagtccattaaaaaggaatagagccatcacggagtggtgctgccccattcattcattcatttgttcatccgtgtagcgaatatttcttaagtgccttactttgcgtagctgtgtgcttggcagtgggatgataccaaagatgcacaagcaactttgagtaccaagactttgccgctgtgggctgggggattcagggaaggctttcccagaggagctgggatgaaagcaggatcttgaaaggtcagtaaaatttgtataagacaaggagaccagctaagctaaggatattcgttgtaacactgtaatagcaaaaccttgaaaacaacataaatgcccacccttagaggaatgga

SEQ ID NO: 2642 - DNA, 1774 bp, Artificial sequence
  DNA replication origin
gggtcgcgctggctacctcgcatgcgcagagccggaagcccgctgaccggactacagctcccagaagagccttgtggaggccgcagacgcgaagccgctggcgccatcttgaaatctgatcctccatccccgaggctttgcgtctgcgcggccggccgctgctgctccgggagcccagtctgctaaaaggggaggacgttgaggacgcggcggctggcgggagagacagctggggagagacatggcagggtcggagcgcggcctgcgcctctgtcactcagcatcctcttaggcgtttccacgcccgccccctgcccgaggggcggggctgacggctctggtacccggagtcggcgcgcggggcaggggcgcgcccctgcagagtggggaccccactgggctgtgccatgctgaccggagaccaccgaggcgggagacagagcgcggcgaagagccattgagtggtcacccagtagccgccgccgccgccgcctcgggaagcttgccacccgctaggagggaagatgaaggagatttgcaggatctgtgcccgagagctgtgtggaaaccagcggcgctggatcttccacacggcgtccaagctcaatctccaggttctgctttcgcacgtcttgggcaaggatgtcccccgcgatggcaaagccgagttcgcttgcagcaagtgtgctttcatgcttgatcgaatctatcgattcgacacagttattgcccggattgaagcgctttctattgagcgcttgcaaaagctgctactggagaaggatcgcctcaagttctgcattgccagtatgtatcggaagaataacgatgactctggcgcggagatcaaggcggggaatgggacggttgacatgtccgtcttacccgatgcgagatactctgcactgctccaggaggacttcgcctattcagggtttgagtgctgggtggagaatgaggatcagatccaggagccacacagctgccatggttcagaaggccctggaaaccgacccaggagatgccgtggttgtgccgctttgcgggttgctgattctgactatgaagccatttgtaaggtacctcgaaaggtggccagaagtatctcctgcggcccttctagcaggtggtcgaccagcatttgcactgaagaaccagcgttgtctgaggttgggccacccgacttagcaagcacaaaggtacccccagatggagaaagcatggaggaagagacgcctggttcctctgtggaatctttggatgcaagcgtccaggctagccctccacaacagaaagatgaggagactgagagaagtgcaaaggaacttggaaagtgtgactgttgttcagatgatcaggctccgcagcatgggtgtaatcacaagctggaattagctcttagcatgattaaaggtcttgattataagcccatccagagcccccgagggagcaggcttccgattccagtgaaatccagcctacctggagccaagcctggccctagcatgacagatggagttagttccggtttccttaacaggtctttgaaacccctttacaagacacctgtgagttatcccttggagctttcagacctgcaggagctgtgggatgatctctgtgaagattatttgccgctccgggtccaggtatacaaaacggctacatagtgcctttctgattatagctagctggcctctggcttcacgtgatttcggtctaggtggaggttagaaatattctggacttgagaaaattagtcatgaccccattt

SEQ ID NO: 2643 - DNA, 1364 bp, Artificial sequence
  DNA replication origin
tccagtgtgctctgctggggcagcacatttttgtacattgctgtatctgaaaaaaaccctacaagattcatgaaactggacgaccgtctttataatactcctagtgataaaacaagtaaggatggctggtttgcagtcatctgagcagcctctctagtttcatagatacggtttctctctgatattgaacgacttccaaatgtcaagcgaaatgctacatcacaaggataaccgtatgtgaaaaccgtttttctttgtaatcctaaactttctagtctgagctttaaaagccattatttgaagaaaagcgcacaggctccagctggccgccaaaggggtcctttgcatcacaggctaagaacctacttctttgggagagaccagggacggggatgggagggaaaggaggtagagtcaggtgtcacttcctccgcccgctcccgcagctggttggtcggccgagtggcagagggtggggcggaagagcagacggggacgggaaaggcgctgtcggtgacatcacagatagggcgattcctatgcagaggaggcagctcaggggctgctgcttcgccacgaaagatttctcgtgctgtgggagctagtccaggacctccggttggacgtgatagtcccagctgtgtgtcagggctaggaggacttgaggcggcatgggggcggggtgggggaatgcgcggggcaagtgaccgtgcgtgtaaggggtgaggcgtatggagctgtggcagggcggaggtgcgttcattcgtacttacgtaacaggagaaaatacggccatgaagttgatgtttctcgggggcgatttctccattgtactcagtatgtgctgactgactcctgttacttccacatgtggggaaactggactgtaatttgtggtggtggggaattgcgttcgcgctttcttctggaggttgtagtgcaaaaagcagtttgtctaccaagtgatactttcagcttttacaaatgctgaacaatatccgtggtgtgttttcatgtcacctcctctcccttctttgttagaaaaaaatggaagagcacgtggatgttttgagatgagaagaggtgcgttcaccaccttcacctccgtgtaggcttgttattaagggaaagggaacaaaggagtctcacttatgtaagatgaccttacatgagaagaagaaattcgagctggtgaaaagaaagaaattcaatttcagccgggcgcggtggttgacacctgtaattccagcactttgggaggccgaggcaggcggatcacgaggtcaggagatcaagaccatcgtggctaacacggtgaaaccccgtctctactaaaaaatacaaaaaaattagttaggtgtcgt

SEQ ID NO: 2644 - DNA, 1427 bp, Artificial sequence
  DNA replication origin
tgttcttgcgatagtttactgagaatgatgatttccaatttcatctatgtccctacaaaggacatgaactcatccttttttatggctgcatagtattccatggtgtatatgtgccacattttcttaatccagtctatcattgttggacatttgggttggttccaagtctttgctattgtgaatagtgccgcaataaacatacgtgtgcatgtgtctttatagcagcatgatttatagtcctttgggtacatacccagtaatgggatggctgggtcaaatggtatttctaattctagatagaatgtttcctcttataactcatagtgaatatgactggacaatgaaactattttgtaatttctttcctgaaagataaaggcgttagaacatagaatctttcattgattctacagaatcttaagactccttcagagatggcagtcattcctaccgtgctgaacatcatgttgtcacggtcagaatcagaactaaattgattaagggtctgaaacagtttggcactcttgggcacttattctgataagaaagctgatgagacagggtaatgaaaagaggctgcaagaaatgaccattcatgcattcagccaacatttaggccaccctcctgtattccaggcactgtacgtggcactgagaatgcaaagcaaaacgagtcatggtctactggcgggagccttctcagcggagaaaagatcaacaagaaaagtgcctgctggagatccctcctagggcataaaccaatatagaggtggggcagctacgtcagcctgaggtgtccttaggcagaacagaaagtgagaatcagagcagtatctcatttctgaacacctggatggtagctttccctggactgactgtcaaaggaggtggttttaaaaagcaagccaaacaggtttccatcctttaggaagaccctggaacgtgccagttgattccgacaatttctcatgaacagaaacacctaggaagggagaactggtgagtcttttcaagaggaggaagtccctcaaaaggggctgtgtttcgcaaacggcgccccaaaagggctgaaatacttcgatctggaggaaaaagactcaggcactgagggaaggggagggtgcacatctggagtaatttcaaggctttttccgtgttatctgaggtggcaacaagtaaagatttgttcgtttgtattatttttttaatttttaaagattttcttttccccccttttccccttcccggccactccggtttgtgtttgccacaagactcataattcctttagaaagtggagtcgaattcataaaagtgacggggggagagcgcggagagggaaggctgggagccccagggagtcttcactacctacactgccgctcagctcccggcgcgagtggaggtcggggtggggagacgcgact

SEQ ID NO: 2645 - DNA, 1107 bp, Artificial sequence
  DNA replication origin
ccagagcgccagcagcgcccacagcagagcggcgcagggcgggcatcttctcggtcgccgcctcctccgccgccgccgccgccgccgccgccgcctgggcagatccacatggggagggggtcccgatagaggagccccactctctcctcccctcctcctgcttcaaaggctcaggccctggcgctacggtccgaagcacaggcgcaaatgcctcgactccccgcgccccgagtccgccgctcctcggccgccgcctcagccgccgcccgaagtttggctgaaactttctcgggtgtgcagcgaagcagcctcgtgtgtccttccgcctcagccgcctcctcccaccgcaagccccgccccactgtcgccgcggcctcggccccgccgccttgggcacccaggggtttcccgcaggaagaagcgccggcccgagctccgcgcggagggatctactacgagtcactggccccgtccgcatccttctccagcagccttaactcgatcagggctgcagcggctcgctggcttgaccagtgcagaaggggcgtggaggtgaggggggtggggtaggactctgaacttcaagcactggagtttgccgggatcgtgaacttgcagggagaggcggtcctcatccagtgaggtctgtatcgccacctacacccacacatccacacactgctttgctagctagaggaatgctctggagtaggaccagtgctgtcaaagaaggaaagtgggccaaggcgccaaagtccattaaaaaggaatagagccatcacggagtggtgctgccccattcattcattcatttgttcatccgtgtagcgaatatttcttaagtgccttactttgcgtagctgtgtgcttggcagtgggatgataccaaagatgcacaagcaactttgagtaccaagactttgccgctgtgggctgggggattcagggaaggctttcccagaggagctgggatgaaagcaggatcttgaaaggtcagtaaaatttgtataagacaaggagaccagctaagctaaggatattcgttgtaacactgtaatagcaaaaccttgaaaacaacataaatgcccacccttagaggaatggatg

SEQ ID NO: 2646 - DNA, 1423 bp, Artificial sequence
  DNA replication origin
gcctgagcctttgaagcaggaggaggggaggagagagtggggctcctctatcgggaccccctccccatgtggatctgcccaggcggcggcggcggcggcggcggcggcggaggaggcggcgaccgagaagatgcccgccctgcgccgctctgctgtgggcgctgctggcgctctggctgtgctgcgcgacccccgcgcatggtgagtatcgggctgaggggcgctgtccgcggcgcccggggctgccacctggggcgacccttctccccctcggtccttctctgtgtgggaaggccaggctcggccgccggcgcggagcgaggccactcgctgggttcccgagagtttggacatcgccgggggcccctcccgtggtgccccgccaaccgccggggttccccgccaaccgccggggttccccgccgcctctgctccccgcggcccgggacccctcacacgcctcctcggcaggagggaggccggcagcaagtctcagaaactcctttttcgtagtgccagggtgcagggaggtgggcagttttgcccttcaggttccgcgtttcttggggtcgagcgagagccgacggcgggcctcggaggggctgagcgaaggcgtgccagattctggcgtggagagcgggggcagggccgccaagccaaacggcctgcaccttcgcagccagcctcgcctttgccagggggcggcacatgggccgggtgtgtgggcttggtttggatggggacggggttttgcggcgcgcctgagttttgacactccaaccccaccgaaagtccggaggagccgggtgtgctgctcgcgtctttgaaaggtggaggcaggagaagtagggcaactggtgtggctgcatgctgaggcacatgatttaaaaatctcaactgctgttattctttccgaggcgcggagctctgctgctgtttcaggctgtgtccagacccaggaatgtggtgtgacgatcaccaattcctccaacctggcagcagcatttgctgctcctttggcatggctgggggtggggcacgggcgggtgagaaaaagtggatacgtcaattcaaagggcttccttagaaagcttctttatggttggatgtttctaacacggttggaccaaggaaagggaatcaaatcatatcttccccatcccacccacacttttagattctacatttcttcagaccctttagtggaaataacttgggctttggagccctgctctgtaatcctggattcaaatccagctctgctatatgaactcaccaataaaatgggaatgaaattatccagctaataggattaattaaaataatgtatattaaacggatgacactccaaaggtgttcagaaagtcctttgagggccgaggctgtgttttactgcttctgagattgatgctcccagtgggat

SEQ ID NO: 2647 - DNA, 1355 bp, Artificial sequence
  DNA replication origin
tttcatctatgtccctacaaaggacatgaactcatccttttttatggctgcatagtattccctggtgtatatgtgccacattttcttaatccagtctatcattgttggacatttgggttggttccaagtctttgctattgtgaatagtgccgcaataaacatacgtgtgcatgtgtctttatagcagcatgatttatagtcctttgggtacatacccagtaatgggatggctgggtcaaatggtatttctaattctagatagaatgtttcctcttataactcatagtgaatatgactggacaatgaaactattttgtaatttctttcctgaaagataaaggcgttagaacatagaatctttcactgattctacagaatcttaagactccttcagagatggcagtcattcctaccgtgctgaacatcatgttgtcacggtcagaatcagaactaaattgattaagggtctgaaaccgtttggcactcttgggcacttattctgataagaaagctgatgagacagggtaatgaaaagaggctgcaagaaatgaccattcatgcattcagccaacatttaggccaccctcctgtattccaggcactgtacgtggcactgagaatgcaaagcaaaacgagtcatggtctactggcgggagccttctcagcggagaaaagatcaacaagaaaagtgcctgctggagacccctcctagggcataaaccaatatagaggtggggcagctacgtcagcctgaggtgtccttaggcagaacagaaagtgagaatcagagcagtatctcatttctgaaaacctggattgtagctttccctgggctgactgtcaaaggaggtggttttaaaaagcaagccaaacaggtttccatcctttaggaagaccctggaacgtgccagttgattctgacaatttctcatgaacagaaacacctaggaagggagaactggtgagtcttttcaagaggaggaagtccctcaaaaggggctgtgtttcgcaaacggcgccccaaaagggctgaaatacttcgatctggaagaaaaagactcaggcactgagggaaggggagggtgcacatctggagtaatttcaaggctttttccgtgttatctgatgtggcaacaagtagagatttgttcgttttattatttttttaatttttaaagattttcttttccccccttttccccctcccggccactccggtttgtgtttgccacaagactcataattcctttagaaagtggagtcgaattcataaaagtgacggggggagagcgcggagagggaaggctgggagccccagggagtcttcactacctacactgccgctcagctcccgg

SEQ ID NO: 2648 - DNA, 945 bp, Artificial sequence
  DNA replication origin
ccgagtcaaggggcggccccccaaaatcccaacgtcattgtttcctcggggccggcaggtgtgaaaacccggcggcagaatggaagttcggtagtctgcgagggcccgcggcctccccaggcgcgtagctgagtccctccaaccccgccccgggcccgccagctcccgggccccggcgcggcgccacctggcggccgtctgtggaggttgcagctgccgccaagccccggggatgctgccggcctcaggtgcgcccggccgagcctccgcggagaggaggattggtagatcacaggaaacgggaggacggcgctgggctcccagcaggcgccccattttcttggcttgtcgcaagagcagccggaggcggcggcggcagggagggagcgggtggggagtgggagaggccgcccgcctccccgtccagctcggaggacctcccagctggttccctcaccgtcaaaagcaggaagggagctggctcggcgggatcagcaagccagcgggcaagaaggctccaggctccgcaggggccaccccacatggactcgggaaccgccgagcttcacccacaagggcccacggcccatcctatcacggatgaaaagattacaggactgacaatgaggccctggagggatctgatgcagctggcggggagaaaggtgggtcggacttagaggggtggtggggtggaggaatctttcttctccctgggacctaccgaggcttcacctgtgagggtcttgggcccatccttcaatccgagagcttccaagccaaagcacagctccccagagtggacaagtggagcagaaccggcattaggttgggagggtgggtcgttaggggtcgttcttcaccttccaggctgggtatggagacctctaaattcatcctagggccacaagagcttctgtaagagttcaggcccgtttcagaaca

SEQ ID NO: 2649 - DNA, 1233 bp, Artificial sequence
  DNA replication origin
cctggagggatctgatgcagctggcggggagaaaggtgggtcggacttagaggggtggtggggtggaggaatctttcttctccctgggacctaccgaggcttcacctgtgagggtcttgggcccatccttcaatccgagagcttccaagccaaagcacagctccccagagtggacaagtggagcagaaccggcattaggttgggagggtgggtcgttaggggtcgttcttcaccttccaggctgggtatggagacctctaaattcatcctagggccacaagagcttctgtaagagttcaggcccgtttcagaacactcagaggttcctagcctgagaagtaatccccaaagcagaccaaccggtttggggtaaaacaggaagagttgggtccattctggatctttcctagctaaatgccttcaggatttaggaatattttcctaggagggccaaggattagctagacctgcccagcgattccagccctgagaaccagacagaatggaggtatagctgacagctggctgggagggggctgacggtcctcactgccaccaggcttagttggagacagattcctcgggctgtagagagacaacagtagaagcaaagagaccagttaggagtctaggtgagaggcagcggcagcctggactaacatggtaacagtggagctattgagagtggtcacatttggaagatgttttgtaggaagtgtcaacaaagtttcttattgattagatgtagggaatgtgagaaagagaaggggggggaacacgtagattttgggtcaaagcaataaatattccattgacagaattgagacagcaagttggtggaggaggggaacggggtagcaagaagcgaatgtttcatattggacattttaagattcctatttgacatttaagtgtaactcttgaaaaagcaatggatatatgaagaatcctagactagagatacaaatttgccaatcatcatatagatgtggtatttagagtcaggggactagaaagaacaatgtaagggggaagtacagatagaaaaaggtctaaggctgagccatgaaatatgccacattttagaggttgcgtagaagaggtggtagcaaaggatattgataaggagtaccagtgaggtaggagggaaaacagagaataaaacgtctcaagaaagagagatcaactatgtcaaattctcctgagaaaactattggatttggagtgggactg

SEQ ID NO: 2650 - DNA, 1370 bp, Artificial sequence
  DNA replication origin
tggcggttcggccggaggttccatcgtatccaaaaggctcttttcagagccacccacatcagcacttggaagaagctgtaccgcttgccctccgtgctcctccggcattagagcggggaaggcacttccgcttaggctcccaacaaaacggggtcgggtccccctgctgcggtgccgtcttgagctttgccgacttcggccaattggcctatccgcactggccgggctgcggacgctttcctgggcgccggctcgcgggctttggcggtccggctccccccgcgcgtgaccggggccctgcgtggcgggggggccggggcaggagagacggggcgtcgggcacgaggccaggggtcactagggggacgctcagggctcgcggtcctgagcgcggctggcctttgcggaagtggagcgccacacgcccgtgcttcgcgcccaaaccggcctcacccggcgcggccatccggctagggagggaaatgaccacctcggcctcgccggggttctgcggacaaacgtggggagaactgcgctggggctgccgttcagtccccgcgccacctccactagcacagtggtaacccccatatcctgcccctaagccaaaattcccgggggcacggggtgtgggcggaattttgtgaatctgggctttatcgagccgttccctgtccatgtccacagaaggagattcactattccagtgaaggcactcggtcctcttagaagctgcatggtatgtctggattttctgtccagactcagtagttcctttacgttgttttcgtcggacatgtgggcagacgctggtgcccgagttcagatccttgggaagacagtagatcagacaggaagaacgtgggcctccgttgggcaaatgaagctcttcgccttaggaaatcgtgacaggaggccacagaggtgatctctacagtctctgggagctgggaagtccaaggcctcttagtgggaaagtgaggcagggtcttgcagagcccactctacacacggccagatacaaatggctgtagaggtcttagataacaccttctcggtcatttatttgcacctcagaagaagccagggcttcggttttctgtttgtttcatcacagttgacaggttaaaagcattcactgcagcgatctatgagaattaagaggggagaaggggaaatggaataaaacttcgttttgtaaagctgccattttgcctttcctgaggcgtgttaagcgaggagagcagcgtaggtgagctctgctggggactgccacatgtttctgctccagggtcacagcaatttctagagcatgcctctgggtctctgccgagaccctcgtaacctgcttaggcccacaatgtatgggc

SEQ ID NO: 2651 - DNA, 894 bp, Artificial sequence
  DNA replication origin
accgagtgccttcactggaatagtgaatctccttctgtggacatggacagggaacggctcgataaagcccagattcacaaaattccgcccacaccccgtgcccccgggaattttggcttaggggcaggatatgggggttaccactgtgctagtggaggtggcgcggggactgaacggcagccccagcgcagttctccccacgtttgtccgcagaaccccggcgaggccgaggtggtcatttccctccctagccggatggccgcgccgggtgaggccggtttgggcgcgaagcacgggcgtgtggcgctccacttccgcaaaggccagccgcgctcaggaccgcgagccctgagcgtccccctagtgacccctggcctcgtgcccgacgccccgtctctcctgccccggcccccccgccacgcagggccccggtcacgcgcggggggagccggaccgccaaagcccgcgagccggcgcccaggaaagcgtccgcagcccggccagtgcggataggccaattggccgaagtcggcaaagctcaagacggcaccgcagcagggggacccgaccccgttttgttgggagcctaagcggaagtgccttccccgctctaatgccggaggagcacggagggcaagcggtacagcttcttccaagtgctgatgtgggtggctctgaaaagagccttttggatacgatggaacctccggccgaaccgccacttcttaagcccgctctccacggatgcggcgggccagctggatgtccttgggcataatggtcacgcgcttggcgtggatggcgcacaggttcgtgtcttcgaacagccccaccaggtaggcctcgctggcctcctgcagcgccatcacggccgagctctggaagcgcaggtcc

SEQ ID NO: 2652 - DNA, 1183 bp, Artificial sequence
  DNA replication origin
gcccgcgtctcgaaggggcacctgtgaactcaaaaggctcttttcagagccacccacgttttcaaataaaagagttgttaatgctggccactctcagtccagcgttcctcagtagtgaatagcgaacctggagctgacgggacgggacgggacgggacgggacgggacggggcggggcggggcggggtgtgtgtgtgtgcgcgccgtcttccatctggagcacgtaactgccttggctcttcgatgagtgggtccccagtcctaggacttcccagggcaggtgcaggcaccaaacgtcctgggcgccgccacggtccgctccacacagtcacaaacaccagcgccgcgggcagtacccaacgcgctgaagtgttgcgcgcggagcgcgcgcttccctagtggtttccgcaggctatggccggacacttagacctagtctggcaccagcgggacgtgctcctcgtccccacccccgatggggagggccctgagcgggtagtgctcgctagtgtggcggagctgggtcttggcttcactgagctgacttaagtcttagtttctgttttgttttccaaagcgccctggcggcggagagtaagggcctcggaggcggaatcttgcgtcctgggggcgggcacctctcccacccaaaaggcacccgacaggcgaaaaacgatccgccaagtagcaactgggggcggggggcaaatggaagaatgaggttccacgcgggagctgtagggcgcagcaagaaagggggggtattgcgggcagtgtgttctaaggaagcgaagggcggaaagggaacaatctgacaaagctgcaatggaaaatgactttcaccctgaaggaaaggggaaaaacaagcttgcgaaacttcgccaactggtaagtagaaagtgaggcggggtgggcgggattagggaggaatctgcccaagccaaccggtgactttaggacgggtgacgtcacagccaatggacagccagcgcgggattttcaattattgttccgcccaatcgggaaaagactgtgcttataaagacggctgcggcggggctaggagctcgtttttctccccgccgctgcgctggtaagcctgtgttttggttcgctatggcccgtactaagcagactgctcgcaagtcgaccggcggcaaggccccgaggaagcagctggcca

SEQ ID NO: 2653 - DNA, 1193 bp, Artificial sequence
  DNA replication origin
ccagcccggcccgcgtctcgaaggggcacctgtgaactcaaaaggctcttttcagagccacccacgttttcaaataaaagagttgttaatgctggccactctcagtccagcgttcctcagtagtgaatagcgaacctggagctgacgggacgggacgggacgggacgggacgggacggggcggggcggggcggggtgtgtgtgtgtgcgcgccgtcttccatctggagcacgtaactgccttggctcttcgatgagtgggtccccagtcctaggacttcccagggcaggtgcaggcaccaaacgtcctgggcgccgccacggtccgctccacacagtcacaaacaccagcgccgcgggcagtacccaacgcgctgaagtgttgcgcgcggagcgcgcgcttccctagtggtttccgcaggctatggccggacacttagacctagtctggcaccagcgggacgtgctcctcgtccccacccccgatggggagggccctgagcgggtagtgctcgctagtgtggcggagctgggtcttggcttcactgagctgacttaagtcttagtttctgttttgttttccaaagcgccctggcggcggagagtaagggcctcggaggcggaatcttgcgtcctgggggcgggcacctctcccacccaaaaggcacccgacaggcgaaaaacgatccgccaagtagcaactgggggcggggggcaaatggaagaatgaggttccacgcgggagctgtagggcgcagcaagaaagggggggtattgcgggcagtgtgttctaaggaagcgaagggcggaaagggaacaatctgacaaagctgcaatggaaaatgactttcaccctgaaggaaaggggaaaaacaagcttgcgaaacttcgccaactggtaagtagaaagtgaggcggggtgggcgggattagggaggaatctgcccaagccaaccggtgactttaggacgggtgacgtcacagccaatggacagccagcgcgggattttcaattattgttccgcccaatcgggaaaagactgtgcttataaagacggctgcggcggggctaggagctcgtttttctccccgccgctgcgctggtaagcctgtgttttggttcgctatggcccgtactaagcagactgctcgcaagtcgaccggcggcaaggccccgaggaagcagctggccacc

SEQ ID NO: 2654 - DNA, 883 bp, Artificial sequence
  DNA replication origin
aaaaacaagcttgcgaaacttcgccaactggtaagtagaaagtgaggcggggtgggcgggattagggaggaatctgcccaagccaaccggtgactttaggacgggtgacgtcacagccaatggacagccagcgcgggattttcaattattgttccgcccaatcgggaaaagactgtgcttataaagacggctgcggcggggctaggagctcgtttttctccccgccgctgcgctggtaagcctgtgttttggttcgctatggcccgtactaagcagactgctcgcaagtcgaccggcggcaaggccccgaggaagcagctggccaccaaggcggcccgcaagagcgcgccggccacgggcggggtgaagaagccgcaccgctaccggcccggcaccgtagccctgcgggagatccggcgctaccagaagtccacggagctgctgatccgcaagctgcccttccagcggctggtacgcgagatcgcgcaggactttaagacggacctgcgcttccagagctcggccgtgatggcgctgcaggaggccagcgaggcctacctggtggggctgttcgaagacacgaacctgtgcgccatccacgccaagcgcgtgaccattatgcccaaggacatccagctggcccgccgcatccgtggagagcgggcttaagaagtggcggttcggccggaggttccatcgtatccaaaaggctcttttcagagccacccacatcagcacttggaagaagctgtaccgcttgccctccgtgctcctccggcattagagcggggaaggcacttccgcttaggctcccaacaaaacggggtcgggtccccctgctgcggtgccgtcttgagctttgccgacttcggccaattggcct

SEQ ID NO: 2655 - DNA, 1320 bp, Artificial sequence
  DNA replication origin
ccacatcagcacttggaagaagctgtaccgcttgccctccgtgctcctccggcattagagcggggaaggcacttccgcttaggctcccaacaaaacggggtcgggtccccctgctgcggtgccgtcttgagctttgccgacttcggccaattggcctatccgcactggccgggctgcggacgctttcctgggcgccggctcgcgggctttggcggtccggctccccccgcgcgtgaccggggccctgcgtggcgggggggccggggcaggagagacggggcgtcgggcacgaggccaggggtcactagggggacgctcagggctcgcggtcctgagcgcggctggcctttgcggaagtggagcgccacacgcccgtgcttcgcgcccaaaccggcctcacccggcgcggccatccggctagggagggaaatgaccacctcggcctcgccggggttctgcggacaaacgtggggagaactgcgctggggctgccgttcagtccccgcgccacctccactagcacagtggtaacccccatatcctgcccctaagccaaaattcccgggggcacggggtgtgggcggaattttgtgaatctgggctttatcgagccgttccctgtccatgtccacagaaggagattcactattccagtgaaggcactcggtcctcttagaagctgcatggtatgtctggattttctgtccagactcagtagttcctttacgttgttttcgtcggacatgtgggcagacgctggtgcccgagttcagatccttgggaagacagtagatcagacaggaagaacgtgggcctccgttgggcaaatgaagctcttcgccttaggaaatcgtgacaggaggccacagaggtgatctctacagtctctgggagctgggaagtccaaggcctcttagtgggaaagtgaggcagggtcttgcagagcccactctacacacggccagatacaaatggctgtagaggtcttagataacaccttctcggtcatttatttgcacctcagaagaagccagggcttcggttttctgtttgtttcatcacagttgacaggttaaaagcattcactgcagcgatctatgagaattaagaggggagaaggggaaatggaataaaacttcgttttgtaaagctgccattttgcctttcctgaggcgtgttaagcgaggagagcagcgtaggtgagctctgctggggactgccacatgtttctgctccagggtcacagcaatttctagagcatgcctctgggtctctgccgagaccctcgtaacctgcttaggcccacaatgtatgggcggt

SEQ ID NO: 2656 - DNA, 1208 bp, Artificial sequence
  DNA replication origin
ccctttctcagtcgctcacctcctccccgcccctggcagaagcatctttgccttgccttgcagccattttatcctccgatgctttgcttatggggagggtgacgatcccctctctaggggtgaggggggttggtgggttggtggtggtttggggatggacatttatttcagttgtgctcttcaggacacacacacacacacgcatatgtataatattggtgaatggggaggaggggtgtttttctctaccttaaccaagtccccactatccccttcggagattaacgtggtggtggggttgtgaggtgggatgaggttccctcaaactcctatcccctcctcaccttgacgtccccccacccccaggatgaatgataaatgaccttggctggggctggagaatggatgctgcctcagtgtgcacgcctggacttgggtgggtggggggcaggggaagaagggcaggtgaaggatggagggaaggggagtgaagaatggaaatactggggagacagagatgtagagccgccaggtgttgggggcatggatggcgggggctggcggcagttgctccggggtggggggaagggatgttgagtgaaggtggacacttgtctagcagcaggaccaagggtggaggaggtgctcagagcagggatttagtcagttctgggggcttttcccttattccggagctgaggcaagatggggtgtgggggggtcgctgcaaatgctgataggggcggtctctatgtctgtgcatgcggaggtctctccctgcgtccccctctctgcctctccgtattcctcagtgtgcattctcagctgacaccctcatttttatccctcagaactgtgggtgctcctatcttcctaaccttggtaggatgtggggaggggaggcgcagtcttgatggtcctgggtgggggctgaagttcgatgaccgggctgtcatggggaaggggtgctcccgcacctcccacattctacccccgcccccgcggacgttttgataagtgattgctttttaatgaccttgtcacctgagctaggaaggcctggggatctgggtggaccccaaagtcaggggctttgactgggagggtggggggttctggacccagggctggatgagctgttctgaaagaaagcatttgctctggagtcccctgcctgtctccaccctctgcagaaaatctcctgggca

SEQ ID NO: 2657 - DNA, 1198 bp, Artificial sequence
  DNA replication origin
ggcgtcggagctgccccggcgccgccgctcctccctcgcgccctcccgctcccggactctccccttctttgtagctccggtttcactcaaggccggcctccctcgcattcgcactcgcacacacacgcacgcccgctccccgccccttggcgccctccatcccggcgcccacgcggcccgggtccccgagcgcacccccgccacccgcccgcccggcccagcgcggccgctcccccggcccggtgcgctgtgggcggcccagtccgcaccccgcagctccatccgcgggccgctgacgttgcgagttcagaataaagggcgaatcgcggagccgcagctcgggcgctccccccgcccccccgcctttgtttctgactcacggagggggaagaaggcggcttcgaagcggctggagaccgctccccagggggcagggaccctcgctccggcggcggctcgggcgacacgcggagcccgagagacccggccgccggccgccccggggcccagtgggcgggcgcggtggataatggagagacgtgcggattcgtgaagactggagatcgccagcctctacagcatcgccttacccgaccaaaaacaaaaacgagagcgggaaccgggagggcgcgccacccacaacccgcatcaggaattcacgctcctaggtgctagggtggcctgggcaggtcagatgctgggggaaagttttatgctccggaggggatcgacgtgttgggggatggggtgggacagaagttgctattaatacacgtttcttccagcgtacaatgcctcaggccttattgtagcttcaggagaataatcctaaggatgaggcggattttatgatctccatctcacagggagaaaacggagactcagaatagctgagggatttgcagacacagtgtcgatgctggcttttcagacacagtgtcaatgctggcaggaatagaactctgtctccaaaccattatcctttctaccaagtggctttcaatataagttccaggtgaggcttaaacttcctgccacctgggtatcttttcccgctatactgataggtaaaaaccccaccctctctacagcgctggagcccagtggagggaagggctgaacgcccagagaatgccctgactagagaagcctctgctgatccctcctacagcagatctgcctcagagcctccaggaca

SEQ ID NO: 2658 - DNA, 1620 bp, Artificial sequence
  DNA replication origin
cctgcggccgccgccgcctccgcgctctgacgacccccgctccgtcggcgccgcggcggcctgggagacccacggcccggccgcgcccccgccccggcggcccggtcccctcggcctcggccccgccaggcgcccgcgggggcttttgtttgtttactcgcctcggggggcttcaacttggctgagtttccccacgacccgcacctcccccgcccccgggcgccgggcgagcgtttgcctcgcgctccgccgtggcgaggagacaatgggagagaaaaccagagaaacgccgttagtccccgcgcggcgaggacggggcggcgggggcgcagggcctggagggaacctgggagcctctccgcgcccggccggcgcccctgccacttgcagccccggttgtttattcgggagcgggggaggggagcggggggagttcctcggagtgaaaacctttccgaagtgggagcgaacctggggcggccccccgccccccggccgcagccttcggaggagactgggccgccgaggcggtcgtgagagacggacggagaggaagcgccggctggaatctcctaaccgcccgcttctcatcttgtcctggggcagggacctcaggatggaaaccagcagcctgcaccgcccgagaaggtcggctgggtccggaaattctgcgggaaagggattttcagggagatttggaaaaaccgctatgtggtgctgaaaggggaccagctctacatctctgagaaggaggtgggtgcctcttgcctctaactctccgttttctcatagcccccactttgtcactccccaagggctcgcctagcttactccacccccgttttgttccaaaggcaagttcagtggtctcctctctacccccatctcatctgcagagaaaggccaccctttaatgagaagaccagagtgagaattagaagttgagttggccgcttactcagtgtttttttgtttgcaaatacctttctaacaacgataagcccctcccaagatgccccagaagttctaagtgtcccttgctgcctcccaccctaacctggcctcctgcatataggatttcttttctatttctgctgaaacagtttagcctattcgccaccccttcctgtccccccaccttaacccagccagcctcccctttcctgtctgtggcaggagcgtgcacaggtcctgtccgtggcgcatccgccctgaatcacagaaaacacgcaccccgccgtcaggcccctgtgacctcgggtgtgtgagtggcagttattttcgttgaagccagtgtccctaaccagtatgctctctgttccccacccccaccccatttaaaaaaggcaaggaacccattttctacccacttcctgcccacccctccatttgtatcagaagggagagaaatggagttaagaacccctgtatgtctttggatagctttggctgtgtagttaaccatgaaaaccacagtctacactgtgtcaagacctgagctatgataattgaatccagacccatctcccttttttccctaagtcttgggatcaataacgtgtactaatgtggagaaatcagaattgcccctacagtggttagaagtcattccattccctg

SEQ ID NO: 2659 - DNA, 935 bp, Artificial sequence
  DNA replication origin
ggaggcggagctcgcagtgagccgagatcgcgtcactgcactccaacctgggcgacagagcgagactccgtctcaaaaaaaaagctaaaaaaaaaaccttggcagaaatctagctaataggtttagcctgggaaatagaaagcaaggaaattgctcagggaaacttttcggttctgcgacgcatgcgttcagcctccaagaaagtggcaaatacggctgcgcgaattggcggcccggccctccttggtcacgtgttgggagacagcggcgtggcggcggcggtggcggtagcgacggcacgccgtagggcggtcagaaggtttccggttccggtgtaacgttcgggctccgtctcaggggctgaagtttgtgaggtgagtagtggccccgggcccacagagggtaattccagtccgcgccactgtggccggggactcagtccaaggggaggaccgaagcgggagggttcagcgggaaggagtgtgaaaggagtacctggtttggtgggagaagaggttggaatgagattgttgagaggaaaagggcgggggcgggaaggagaccgggttgggagaccagctctggggtgaggagtttaggtagaacaaggtagagtaagagactggttggagtgacggagagagtaaaaatgaagattagcgggggagtggggggctgcagagggaaactcaggttgtagcaaacaagagcacggagtaaggaattccttctgaagactggatttggattctgctgcctgctcattgagaggagagatcattgtacctcgctttccttccgcacccccactacccccgcacctcgcagttattgttgagcatttgattagtgacaaggctaattaccgtttgaaacttttttatccattggctgtttagtttgcacgtcatcttatggaggtaacagtggcacct

SEQ ID NO: 2660 - DNA, 1228 bp, Artificial sequence
  DNA replication origin
gggcagtcgggtagtattacatttaagatattaacgcccgacctggctcacaggagtgtgggaacaggggcggggaagggccttagcactgagagccgaaaagtataaaacgattagtttcggcgtcaggcgttttgaaaggctttgcaggtcctgttttctgcgtaatttttccgtgattactgactggtttaaacacgaccccttgaacaatattgataaaacctccgagacccgcagcccctccttgcagcgtgtaggagctgccagcgtgcccagcagctggtgttcccgtccgtacctccagaagagcccagcgcgtgcaccatccccaccccctagcttccctccccacctacggctttcacgcactcgcagtgattgttttgcccgctcccgccgccgccgccgccgccgccgccagaggagcagcagcgcttgtgcaaaccgggaagatggcggccggcggcggcggaggcagcagtaaggcctcctcctcgtcggcctcttcggcaggggctctggagtcctcgttggatcgaaaattccagtcggtaaccaacaccatggagtccattcaaggcttgtcgtcttggtgtatagagaacaaaaaacaccacagtactatcgtctatcattggatgaagtggctccggagatgtgagtgttgggggtgactagggaagggaagactggggaaatggaaggaagtgtggcctgaaacgcttggggttttcccacggagccgcagcatttggttggggttgttcacattaaaggtttgaccccagtggtcccaaacccagactccattcctagccaggattgtcctgaattgcaggagactcatttcttgggttttttagccattgaattgttgtgaccttgggccgttgggcccagatccatggagatttacgtatattgtttttaatatttcagagccttgtaaggtgtattgatttttccgaaccttcgcggaaattgtagcgtctgtttatttcttacaggccttgacgtgttaatgatttctggctttcctgatggtaggcgagctgtggttttaagcagtagtaaatccagtgatgtttaatgaggagtgccttgtctggatgaatgtatctaaaacttgtgatgtgtagtaaggagagccttacctggatgaatgttaagaagcagcatgagctctacatagatctgaggcaccaccgggttttccctgtacctg

SEQ ID NO: 2661 - DNA, 2568 bp, Artificial sequence
  DNA replication origin
ccggctgggccagcccgggctgcttaagtccctagtctcggccgggcacgaggacagcgcccgggagcgactgcagcctccgaccccggctgggccagcccgggcttcagctcacgcagccgtcggggggcgcccggcgcgcagcccggggtgggtggtcctggcgagtggggctgcgaggcagaccggccccaccccggggccgccgaggggcgcgggctggggcgcgtggcgggcggggctgggcgggggcgggcgcgagggcggagttgcggccgaggcggccgtgaccggagcgcggctcaggggccccagtggccgccgcggagcgaggttgcctggagagagcgcctgggcgcagaagggttaacgggccaccgggggctcgcagagcaggtagagacctccccgggaccccggccccggccgcccctctcccgggtcccgttagaccgcccgccccgcgcgcccgcgtcgtcccctctccctgcgctgtgcggtcgcgaccccgccacgaccccggacccagctccggtggcctcggacaatcttccagcccctggggtcgaattcctggggagggagtctgatcccgtggaactctggccccatcacccgggcggggagtgaaccaaaattcctcctaagtcacatagtaaagttggaaaacagacccatgacctccccgcgcggccggtgcctcctgccctctctctaggagggtgctctcggacggtgtgtcccccactgcactcctgaacttggaggacagggtcgccgcgagggacgcaggtgggtgcccttgatccagctcagcccgatggcagaagaggttgacaaaaaagaaagacacctgttggggtggcctgccagacccaggagtggagggctctgagggcccgggaattcggactcaggacagggattctccatggctaggcccagaaacacagggtccaaccactctccagcagggagacctgggggtgaaggggtgagccctgcgcaggtctctgttccttggtcttcactgggcagtgtggagaggtgtggccaggaggagcccgcgtttgtccagaccagggtctactctggcaccagagtgaccacctctgacctctcctttcctcgtcctgggccgggaacgacaccaaatgagggacatggaaaggggtgagaagcataaatgtgcgtgtgtttctgcagaggagggggcatgggcccctgccgggctgcgcaggggagggtggggtgggacttttccagagagggagccaggcctggcccgggccccgggagctcacgtcacccccacccctcacttctccagggaactgccaaagccaaacccagctcgggatgggattatgtgtactgggtagacccgtggagaggggctgcgagaagagatctcggtggcagagagaagcagaggcagagagggcatgaagaggggtcggcatcagagaaggggcaggcagtgactatcaccccatttcttcttccctcagctggagtaacaagagtcaggcagagcctgaagacttgggtggaacatgggcccttctctggagatcctggcctcccccgttcagtcagggtggagttgctgaccttagtggccggcccagccaggggaaggagtggccatcggcaacccccaccccaaccccaatccctgaggcgcccgctctggctcagccactctgacccctccctcaaattccgaaccctaggtctcagggagggcagtggggctgagtgtctgcccccaggcacattcctacccttctcttggtcattttctgccccagagctggcccacctcagcaatgcgagggctccctggattcctctcccgggtgcctttcagatccaacagaaacagattttttttttcctggaaagcagaactaagagtgggatgaggagcaggggtgggaaggactcaaagtgagaagaagggggcaaagagagtcaggcttggtggctggggtggcttccaagcctcacttctccagtgttcaaagctgaacttcagatggacttcccggctcttcagaatgagaggcctgtggctggggcatgaggcagccccggctgcacctctccttcccgcttccccagctggtagagacgcacaggaaacaagccctcactgaaccaactccagatgctggcacccagagtgggtgttacattgccggcttcttctctagagattaaaccgtcaacccatttagcttatcccttggccaaaaagtgtatgagatgtgcctggatgttccctaaagagcttatctaagaagggaagagaaagccgggaggcaagtaggacagagagatgactggggaaggtcttgtgtctggaagacccaaggaaggggcttctggtgggtcctcagagagagtgtctggcgcatcctcagtggagccttcctcctctactttctaggcacctctgggagggcaggagtgggagcagatgacaaccattttagaaggagccctctggctgggtgcggtggctcacacctgtcatcccagcactttgggaggccaaggcag

SEQ ID NO: 2662 - DNA, 1019 bp, Artificial sequence
  DNA replication origin
aggtggtcagatgccaaggcccttctccctcaggtgccaagcggaagctgaagacccagcttcagggcagggaagccacactggaggtcggggttgggaggggaggcccgaggagactcaccgcttggctgcaggctcttagctgttcactctccccagaacatcttggaatagggctactgggagcaaagaggctccagagggagctggcatgggggccgttgctcagcaggggcagccaggcgcccgggtgctgagggtcaggctccaggcggggcccgtgaggagtcccccccgttccccaaggcccttggccctgctggcctcggccccgagggaccgaaggaaaaggatcagggcgtctccctgctacctggggactggcccaaccctgggaacttggccttcgtggctgaggggatgcacggaagaagccaccttctcctaaggagtgcgtgggtgaggggggctctgtgccagaggcctgggctctggggtgatgccgtaggggggcaggcctggttctgggggccacctctgtctgagcagtttcagggcttagaggttctgcttggggggatggggtgtggacagacagttctgtgggagggagctcagtttgggggctgccgtttgcggagaatggctctgctcttggagtaggggacggaatagcctcttcccctctagaagagatcagggacagctcagatctgggtgggctccgagggtgcctgcggttccggtgcagtggcaatgcaaagggcactctcccataaccgaacattcctggcttgatggggtctcgaagccgggacctgagaaggtgtttcagatgtgggggcacagctctgaccacctctgaccctgtttccccagtttacttcctggcaccaaagacaagccctctgaagccacccgtgctcccctttccttcatgctaagcccccaccttgcccaaggcccacctcttccacccaggcctctcacctcctggccgctcgaatctcctgggtctc

SEQ ID NO: 2663 - DNA, 1560 bp, Artificial sequence
  DNA replication origin
tcacttccgcttccttccagtaaggagtcggggtcttccccagttttctcagccaggcggcggcggcgactggcaatgtttggcctcaaaagaaacgcggtaatcggactcaacctctactgtgggggggccggcttgggggccggcagcggcggcgccacccgcccgggagggcgacttttggctacggagaaggaggcctcggcccggcgagagatagggggaggggaggccggcgcggtgattggcggaagcgccggcgcaagccccccgtccaccctcacgccagactcccggagggtcgcgcggccgccgcccattggcgccgaggtccccgacgtcaccgcgacccccgcgaggctgcttttcttcgcgcccacccgccgcgcggcgccgcttgaggagatggaagccccggccgctgacgccatcatgtcgcccgaagaggagctggacgggtacgagccggagcctctcgggaagcggccggctgtcctgccgctgctggagttggtcggggaatctggtaataacaccagtacggacgggtcactaccctcgacgccgccgccagcagaggaggaggaggacgagttgtaccggcagtcgctggagattatctctcggtaccttcgggagcaggccaccggcgccaaggacacaaagccaatgggcaggtctggggccaccagcaggaaggcgctggagaccttacgacgggttggggatggcgtgcagcgcaaccacgagacggccttccaaggtaagggggttcattaatcgccaaggcctcactcccttttttccatctctccccggactcacccgccaagggtgggttggaaaccgaaacgagtcagtgttgaaacgtgtctcatcctattcctgaagccagaatattctggccatgagtcattgtttccgcccatcttgattcttttggaaatggcagctcttgttcaaagaccggaaagggtgggatgtcaatttcaagtggggtcaacctgagttctgtaaatcccagtagcgattttcccgccgcgggtgggcaggcgaatcttgcgccggtttagacaaaggaggccgtgaggacctgcatgcttttctttctcaggcatgcttcggaaactggacatcaaaaacgaagacgatgtgaaatcgttgtctcgagtgatgatccatgttttcagcgacggcgtaacaaactggggcaggattgtgactctcatttcttttggtgcctttgtggctaaacacttgaagaccataaaccaagaaagctgcatcgaaccattagcagaaagtatcacagacgttctcgtaaggacaaaacgggactggctagttaaacaaagaggctgggtaagtttgccttaaggatgaaaggggccttggagtggaagtagaatgaaggattttttttagagaggtggggatatctaaaggtttttatgacgcacggctgtttgcaggctctaactaaaggaccattgtttatttgatgttgatttaagtagtggatccttagagatagtggtatggcggtcttgaattgtatca

SEQ ID NO: 2664 - DNA, 1072 bp, Artificial sequence
  DNA replication origin
ccggcccccccacagtagaggttgagtccgattaccgcgtttcttttgaggccaaacattgccagtcgccgccgccgcctggctgagaaaactggggaagaccccgactccttactggaaggaagcggaagtgagaagtggcgagcagctcctttatcacggttttagggcggccagtcctacggggtggcgccagcgaactctttttttttaaaaaaagtattcccataaaaggggaaaggggcggcagcttccggagggttgcgcacggcacctaccagctgcccggccgggccggggcggggccggggccggggccggggccggggcctgagccggggcctgagcggggccttccggtcttcggaggctctgagtgccggttacgtaacggcggctccgagcgcctggggtcctcccagagctcctgggctcgagctctttccatgagcacctcgggccttctcgtggctacctctgtgcttccctgagacctgatttgtgagccctttttgctggttttcgccagaggttttttaccaaatcaaaatttcaaccattgactaacacaggggttgaaggaagaggacggggaagttcagtgatggatgggaacaacagtcttagatgatagggataattaagagggcatagttggggacttgtggttattttgcacagctctctactctcagtccaatgtttggaaatgaggatgctccacgtgctaccctaaagaaccatttatgtaagtggactaagctaaaactgccacagctaaactattcctgcctccctgcttgcttctcccatctctgttccatagtctttggtgctatttacatataggccttaatccattagaatctcgtctgagagtcttgacaccattttttgtttgttttgagacagtctagctctgttgcccaggctggagtgcagtggggcgatctcggctcactacaagctccacttcccacgttcagacgattcggtacctcagcctcccgagtagctgggattacaggcgtgcgccaccacatctggctagtttttgtatttttggtagaga

SEQ ID NO: 2665 - DNA, 1169 bp, Artificial sequence
  DNA replication origin
aagaagagagaaagagaggagagagagagggaaagaaggaaagaagagatagagaaagagcactttgggaggtcgagacgggtggatcacctgaggtcaggagttggagaacagcctggccaacatggcaaaaccctttctctactaaaaacacaaaaactagccgggcatggtggcaggtgcctgtaatcacagctactcgggaggctgaggcaggagaatcgcttgaacctgggaggtggaggttgcagtgagctgagatcatgccactgcactccagcctgggtgacggagcgaggaaaaaaaggaagagaagagaagggaggggagggggagggggagggggaggggagggggagggggaggggagggagggggaggggagagggggaagaggccaggtgtgctggctcatgcctgtaatcccagtgctttgggaggccaaggcaggtggatcatttgaaaccctgtctctactaaaatacaaaaataattagccagttgtggtggcgggtgcctgtaatctcagctaccagggaggctgaggcaggttaattgcttgaacctcggaggcagaggttgcaggaagctgagatcctgccgctctactactccagcctgggggaggggaggcgagggggaaaaggaaaaggaaagggaagaacgctggagaatgtggcactggtttattatccttttgaggccgactgtaaggtggtctacaaaaggcaaaggctgggactagaaagaggtgcttaaggagagcagctgtgagaaattgacaaggcatttggctccccatgaggactgccaagttaaggctggaaaccacatactggtaccagttccgactcatgattaactaatgctctcctataaaacagatgccaacactcagaaggagagaaaacacatctgtgtcctcaatacctagaacaactgttggcatatcaacaggccctcaataaatatttcttgaatgagcaaataaacataaagtttacattgatctagaactggggaggggtgaggtggttgggaccaaagaacaaaagacaaaggtaactgagggtgtggtaaaagtgtcttgagatcattgtccatgaagtccaaggtggataaggaaagaagtgaagccagaaaggatatggtagattggaactgtagtt

SEQ ID NO: 2666 - DNA, 922 bp, Artificial sequence
  DNA replication origin
gaggtgaggggcgcctctgcccggccgcccctactgggaagtgaggagcccctcagcccggccagccaccccgtccgggagggagatgtgggggtcagcccccccacccggccagccgccccatccgggagggaggtgggggggtcagccccccgcctggccagccgccccgtccgggagggaggtgggggggtgagccctccgcccggccagccgccccgtctgggaggtgaggggcgcctctgcccggccgcccctactgggaagtgaggagcccctctgcccggccagccgccccgtccgggagggaggtgggggggtcggccccccgcccggccagccgccccgtccgggagggaggtggggggggtcagcccccctgcccagccagccaccccgtccgggaggtgaggggcgcctctgcccggccgcccctactgggaagtgaggagcccctctgcccggccaccaccccgtctgggaggtgttcccaacagctcattgagaacgggccaggatgacaatggcggctttgtggaatagaaaggcgggaaaggtggggaaaagattgagaaatcggatagttgccgtgtctgtgtagaaagaagtagacatgggagacttttcattttgttctgcactaagaaaaattcctctgccttgggatcctgttgatctgtgaccttacccccaaccctgtgctctctgaaacatgtgctgtgtccactcagggttaaatggattaagggcggtgcaagatgtgctttgttaaacagatgcttgaaggcagcatgctcgttaagagtcatcaccaatccctaatctcaagtaatcagggacacaaacactgcggaaggccgcagggtcctctgcctaggaaaaccagagtcctttgttcacttgtttatctgctgaccttccc

SEQ ID NO: 2667 - DNA, 1316 bp, Artificial sequence
  DNA replication origin
acggggcggctggccgggcagaggggctcctcacttcccagtaggggcggccgggcagaggcgcccctcacctcccagacggggcggctggccgggcggagggctcacccccccacctccctcccggacggggcggctggccaggcggggggctgacccccccacctccctcccggatggggcggctggccgggtgggggggctgacccccacatctccctcccggacggggtggctggccgggctgaggggctcctcacttcccagtaggggcggccgggcagaggcgcccctcacctcccggacggggcggctggccgggcggggggctgacccccccacctgcctcccggacagggcggctggccgggcggggggctgaccccccccacctccctcccggatggggcggctggccgggcggggggctgacacccccccccacctccctcccggacggggtggctgccgggcggagacgctcctcacttcccagatcgggtggctgccgggcggagaggctcctcacttctcagacggggcagctgccgggcggaggggctcctcacttctcagacggggtggttgccaggcagagggtctcctcacttctcagacggggcggccgggcagagacgctcctcacctcccagacagggtctcggccgggcagaggcgctcctcacatcccagatggggcggcggggcagaggcgctccccacatctcagacgatgggcggccgggcagagacgctcctcacttcctagatgtgatggcggctgggaagaggcctcctcacttcctagatgggatggcggccgggcggagacgctcctcactttccagactgggcagccaggcagaggggctcctcacatcccagacgatgggcggccaggcagagacactcctcacttcccagacagggtggcagccgggcagaggctgcaatctcagcactttgggaggccaaggcaggcggctgggaggtgtaggttgtagtgagccgagatcacgccactgcactccagcctgggcaccattgagcactgagtgaacgagactccgtctgcaatccccgcaccttgggaggccgaggttggcggatcactcgtggttaggggctggagacccgcccggccaacacagcgaaaccccgtctccaccaaaaccagtcaggcgtggtggcgcgaggctgcaatcgcaggcactggtcaggctgaggcaggagaatcaggcagggaggttgcagtgagccgagatggcagcagtacagtccagcttcggctccgcatgagagggagaccgtgggga

SEQ ID NO: 2668 - DNA, 1043 bp, Artificial sequence
  DNA replication origin
gggcaccattgagcactgagtgaacgagactccgtctgcaatccccgcaccttgggaggccgaggttggcggatcactcgtggttaggggctggagacccgcccggccaacacagcgaaaccccgtctccaccaaaaccagtcaggcgtggtggcgcgaggctgcaatcgcaggcactggtcaggctgaggcaggagaatcaggcagggaggttgcagtgagccgagatggcagcagtacagtccagcttcggctccgcatgagagggagaccgtggggagagggggagggggagggggagggggagggagagcagttcaggcattctttacttgagagccacaactctcaaagtctccttggatagaattcagggaatttatgaatttgtatgggtaaaaaattccatttttatttttactaatgtaggggagaacatatgtttccttctatccatcctaggtttagggctgagatctctataacaaaagagagattagcaagagaaaagcatgcacatttatttaatataagttttacacgacacgaggggctccataaggaaataaaggcccaaagaaacagttgaacttgaatgttttttatagtaggtttgatgaagagcagccagtgatgtagaaatgtcatagggcaaagtgtgaacaagctaaatgtaataaactgggggaaactgagaggcctgtttgtttagattcctctttgtgtccctgtgcttttggaggtaaggatgctccttttctctgggtgccaggagagcacctcttacatgacagtcttatgatctacttcaggggaaggtcagaaaatccttcccaggttttatggctgcttctggggagaacagcaggcagaaggtcagagtcaccttcctgcttctgcaatttcctcaaatgccttcagcttaaaatattcaatatgtcaaagtgctgtattttgtgtagggtgtcctgaaccccgtcactaacctctaactgaaagttaggattttcttcaattctgaacatagttcataaaccacggta

SEQ ID NO: 2669 - DNA, 1282 bp, Artificial sequence
  DNA replication origin
agtacagaacaaaatgaaaagtctcccatgtctacttctttctacacagacacggcaaccatccgatttctcaatcttttccccacctttcccacctttctattccacaaagccgccattgtcatcctggcctgttctcaatgagcggttgggcacacctcccagacagggtggtggccgggcagaggggctcctcacttcccagtaggggcggccgggcagaggcgcccctcacctcccggacggggcggctggccgggcggggggctgacccccccacctccctcccggacggggcggctggccgggcagggggctgacctcccacctccctcccggacggggtggctgccgggcggagacgctcctcacttcccagatggggtggctgccgggcggagaggctcctcacttctcagacggggcggctgccgggcggaggggctcctcacttctcagacgtggcggccgggcagagacgctcctcacctcccagagggggtctcggccgggcagaggcgctcctcacatcccagatggggcggcggggcagaggcgctccccacatctcagacgatgggcggccgggcagagacgctcctcacttcctagatgtgatggcggccgggaagaggcgctcctcacttcctagatgggatggcggccgggaagaggcgctcctcacttcctagatgggatggcggccgggaagaggcgctcctcacttcctagatgggatggcggccgggaagaggcgctcctcacttcctagatgggatggcggccgggcggagacgctcctcactttccagactgggcagccaggcagaggggctcctcacatcccagacgatgggcggccaggcagagacactcctcacttcccagacagggtggcggccgggcagaggctgcaatctcggcactttgggaggccaaggcaggcggctgggaggtggaggttgtagcgagccgagatcacaccactgcacttcagcctgggcaccattgagcactgagtgaacgagactccgtctgcaatcccggcacctcgggaggccgaggctggcggatcacttgcggttaggggctggagactggcccggccaacacagcgaaaccccgtctccaccaaaaccagtcaggcgtggcggcgcgtgcctgcaatcgcaggcactcggcaggctgaggcaggagaatcaggcagggaggttgcagtgagccgagatggcagcagtacagtccagcttcggctccgcatgagagggagaccgtggaaaga

SEQ ID NO: 2670 - DNA, 955 bp, Artificial sequence
  DNA replication origin
gaagtgaggagcgcctcttcccggccgccatcacatctaggaagtgaggagcgtctctgcccggccgcccatcgtctgagatgtggggagcgcctctgccccgccgccccatctgggatgtgaggagcgcctctgcccggccgagaccccctctgggaggtgaggagcgtctctgcccggccgccacgtctgagaagtgaggagcccctccgcccggcagccgccccgtctgagaagtgaggagcctctccgcccggcagccaccccatctgggaagtgaggagcgtctccgcccggcagccaccccgtccgggagggaggtgggaggtcagccccctgcccggccagccgccccgtccgggagggaggtgggggggtcagccccccgcccggccagccgccccgtccgggaggtgaggggcgcctctgcccggccgcccctactgggaagtgaggagcccctctgcccggccaccaccctgtctgggaggtgtgcccaaccgctcattgagaacaggccaggatgacaatggcggctttgtggaatagaaaggtgggaaaggtggggaaaagattgagaaatcggatggttgccgtgtctgtgtagaaagaagtagacatgggagacttttcattttgttctgtactaagaaaaattcttctgccttgggatcctgttgatctgtgaccttacccccaaccctgtgctctctgaaacatgtgctgtgtccactcagggttaaatggattaagggcggtgcaagatgtgctttgttaaacagatgcttgaaggcagcatgctcgttaagagtcatcaccactccctaatctcaagtacccagggacacaaacactgcggaaggccgcagggtcctctgcctaggaaaaccagagacctttgttcacttgtttatctgctgaccttccctccactattgtcccatgaccctgccaa

SEQ ID NO: 2671 - DNA, 1316 bp, Artificial sequence
  DNA replication origin
atagatcaacagcatcccaaggcagaagaatttttcttagtacagaacaaaatagagtctcctatgtctacttctttctacacagacacagcaacaatctgatttctctatcttttccccacatttcccccttttctattcgacaaaaccgccatcgtcatcatggcccgttctcaatgagctgttgggtacacctcccagacggggtggcggccgggcagaggggctcctcacttcccagaaggggtggccgggcagaggcgccccccacctcccggacggggcggcggctgggcggaggcgcccccaccaccctcccggatggggcggctggccgggcgggggctggcccccgcctctctcctggacggggtggctggccaggcgggggctgccccccacctcccggacggggcggctgccgggcggagatgctcctcacttcccggacggggcggctgcggggcggaggggctcctcacttctcagacggggcggctgccgggcggaggggctcctcacttctcagacggggtggctgccgggcagaggggctcctcaattctcagacggggcggctgccgggcggaggggctcctcacctcccagacggggtcgtggccgggcagaggcgctcctcacctcccagacggggtggcggggcagaggcgctccccacatctcagaggatgggctgcggggcagagaccctcctcacttcctagacgggatggcggccgggaagaggcgctcctcagttcccagactgggcagccgggcagaggggctcctcacatcccagacgatgggcggccaggcagagatgctcctcacttcccagacggggtggcggccaggcagaggctgcaatcctggcactttgggaagccaaggcaggcggctgggaggtggaggttgtagcgagccgagatcacgccactgcactccagcctgggcaacattgagcactgagtgaacgagactcagtctgcaatcccggcacctcgggaggccgaggctggcggatcactcacggttaggagctggagaccagcccggccaacccagcgaaaccccgtctccaccaaaaaaatacgaaaaccagtcaggcgtggcggcgcgcgactgcaatcgcaggcactcggcaggctgaggcaggagaatcaggcagggaggttgcagtgagcggagatggcagcagtacagtccagcttcggctcggcatcagagggagaccgtggaaagagagggagagggagaccgtggggagagggagaccgtggggagagggagatggagagggagagggctaattt

SEQ ID NO: 2672 - DNA, 915 bp, Artificial sequence
  DNA replication origin
tgaggagcgcctctgcccggccacgaccccgtctgggaggtgaggagcccctccgcccggcagccgccccgtctgagaattgaggagcccctctgcccggcagccaccccgtctgagaagtgaggagcccctccgcccggcagccgccccgtctgagaagtgaggagcccctccgccccgcagccgccccgtccgggaagtgaggagcatctccgcccggcagccgccccgtccgggaggtggggggcagcccccgcctggccagccaccccgtccaggagagaggcgggggccagcccccgcccggccagccgccccatccgggagggtggtgggggcgcctccgcccagccgccgccccgtccgggaggtggggggcgcctctgcccggccaccccttctgggaagtgaggagcccctctgcccggccgccaccccgtctgggaggtgtacccaacagctcattgagaacgggccatgatgacgatggcggttttgtcgaatagaaaagggggaaatgtggggaaaagatagagaaatcagattgttgctgtgtctgtgtagaaagaagtagacataggagactctattttgttctgtactaagaaaaattcttctgccttgggatgctgttgatctatgaccttacccccaacccagtgctctctgaaacatgtgctgtgtccactcagggttaaatggattaagggcggtgcaagatgtgctttgttaaacagatgcttgaaggcagcatgcgcattaagagtcatcaccactccctaatctcaagtacccagggacacaaacactgtggaaggccgcagggtcctctgcctaggaaaaccagagacctttgttcacttgtttatctgctgaccttccctccactattgtcctatgaccctgccaaatccc

SEQ ID NO: 2673 - DNA, 1460 bp, Artificial sequence
  DNA replication origin
attacttacaggcgtgagccactgctcccggccctttctttctttttcttttcttttctttttttttttctgagacagagtctcgctctgtcgcccaggctggactgcagtggcacgatttcggctcactgcaacctccacctcctgggttcaagcgattctcctgcctcagcctcctgagtagttgggactacaggtgcgtgccgccacgcctggctaattttttgtatttttagtagagacggggtttcactgtgttagccaggatggtctcaatttcctgaccttgtgatctgctcaccttggcctcccaaagtgttgggattacaggcatgagccacctcgccaggccttttttttcctttttttttttgagacggagtctcgctctgtagcccaggctggactgcagtggcgcgatatcgactcacgcaagctccgcctcccgggttccgcctcctgggcctcccaaagtgctgggattgggattacaggcgtgagccaccgcaaccggccttttttttttttttttttttttttttttttttttttgagacggagtttcattctcgttgcccaggctggagtgcaatggctggatctcggctcaccacagcctacctacgcctctgggttctcctgcaacagcctcccgagtagctgggactataggtgcccaccaccacgcccagctaatttttatatttttagtagagacggggtttcatcatgttagcgaggctggtctcgaactcctgacctcaggtgatccacccaccacctcaggtgatccacccaccacctcaagtgatcaacctgccctggactcccaaagtgctggttttatagcggtgagccactgcacccggccattctcctgcctcagcctcccgagtagctgggactacaggcgcccgccaccacgcccggctaattttttgtatttttagtagagatggggtttcaccgtgttagccaagatggtctcgatctcctgacctcgtgatctgcccccctcggcctcccaaagtgctgggattacaggcgtgagccaccgcgcctggcctttttttttttttttgagacagagtttcattcttgttgcccaagctggagtgcaatggcaggatctcggctcaccacaacctacgcctctggggttcaagcgattctcctgcctcagcctccccagaggctgggattacaggcatgcaccaccacgcccggctaattttgtatttttagtagagatggggtttctccatgttggacaggctggtctcaaacactcgacctcaggtgatccgcccgcttcggcctcccaaagtgctgggattataggtgtgagccactgcacccggcccctttttttccattttaatagaatctgcggtcaaattacctttctaaaaggttgtaacaattattactctcactagcaaatctgaaagtgtttcccc

SEQ ID NO: 2674 - DNA, 1690 bp, Artificial sequence
  DNA replication origin
gagggcgggcgcgggccggcgggcgggcggaagagggaggagaggcgcggggagccaggcctcggggcctcggagcaaccacccgagcagacggagtacacggagcagcggccccggccccgccaacgctgccgccgggtgagtcggggcccccgcccggcgcccgagccccgcgcgggggtgggaaggggctgcggaaaagttgggagccccgggtgccgctttgtcgcggggccgcggaggggtcgggctgggaaggccgcggggccggggcgaggagggaggcggcgctggcggggggcgctgcgggcgctcatggcggcggccgccgggtaaggcgggcgcagcgcctcaagggagcggccggggccggcgggcctggcgccgcggtgtccgcggcagcgccgccctgagccggagaagctttcccgggcaacaggtagggcggaaggtggggacgcgggggctgcgggcgacggggccgagccgtgggcttccctttgttggggagtggaggagcttggtgaccattggcgcgagagcctccaccctggcagcggcccgcggggttgccctggcctggacgcgtcctgtggcttgggtgggaggagaggggagggccctgccccgttttcttcctaccggcccaccgtgcccacctcgcaggcgaggtcagagcttccatgtgcttaacgggaaacaggaaggagcggcccggagcgcctgccccggcccggtagggctaaggcataccgttatgaggtgtggatggctggcaagggagctcctggtggaactggctttctgggccgtagcttgttaatcactagaggcccgtggcaagtgggttgactgcaggtgtagagcactcatctttagcctgcagttggagtctctccctccctaagcctagctcctggcatcaaaacctggtttcagtcacctgagttgccaggcccaggttcagggggttctgaggatcgtggcgaatgcagtgagcccctgttcctggagaagtgagtccgagcaggcctccagcaggcagtcacccccatatctgtgctggggcaggggtgggtggcggttgctgccgcataccggagtcgggatgaccgcaccggggtgtgagtggctgcacatgtaaaggggctcctaagggtaaggacttgcctgcagtcctgtccctgaggacctggcgctgaccataccgtgatctgcacagtctgttccagagagggatccttttctcccctggtcccccacttccctcactggggcctctggccagattttcccctgggaggaagggcctccttttacccctgtcactggccataggctggctgatccctcactgtgtccttcaacaccgccccagctgtctctcaaacccaccggcgtctccctgcccctggggccatagtctcatgcagtgttttggtccgtggaggcctttggtgggactttgcagacaagctgtaggccagatgaggctgaggactactgttctgactgcctctcacccacctcttttttacaatctggcttattttgaggcccatcctgcagcctggagggataacacacctctcattggctccatccatggcttgtagacttctagtacatgacctgcttctgttgcctgaaagttttcaacaaggaagactattcaggacttcttcagtgg

SEQ ID NO: 2675 - DNA, 2761 bp, Artificial sequence
  DNA replication origin
ggggcacgtccagcctcagcggcgaggcgcactcgtggggcctggggctggggccgcccaagagggcgggggcgggctccggcgggagcgcccgcgaggttaaaggggcggggggctcggccccctttctgggcggctgcgggccgtgcaggtagcgcagcagttcctccagggtggtgacttccacggcctgcccgggacagccgggcggcggtggcctcaccagcacgcggggcgcgggcccgcccgccgcgtgcccgccccgtgagcggcccggaccctccttggcgttgttcctgttctggttccactcccaggggtccccggcggcgcggaggtgcttgaccggcagctccggcgtggactcgggggtgggcaggcaggccagctccggcgggggcacgccctccggaggcggcaggaaggtggtgtagagctgcggcgtctgcaccgcgtccccgtccttggagggcggcgggggctctgggcccccaccgtggagccgggccaaactgcggagggagagagggcgcgggagccccggagtctcgatgtccttgccccgacgtcggtgggcgcggcgacaagcacaggagaccaggaggccagagactgaggcgcccagggcaaaagctgcggccacactggccaggaggagtgggatggggacggagcgggaggccgaggctgggggcaggtcccggcgcacgcctgccgaccgagagggaggagggaggctcagccaaggggaggcggtgcggggtacctaggcccagaggcgccggcagttcccaggcctgacatcatcgtccctcccgctgctactcagcctcactcctacagcctccaccatcctcaggattcacctctcctgactcctcagcatacagcccacgcactacccctcacactcaggccagagcttgggcctggggattccccatcccacttctggcccctgtagccatgccaagagcaactgccaaaaactgctcgtgcaggagaactcggggctgggatgcccaattctggggaagggaggctccaaacaggcgttagtgagcaccaaacaccattcagtgaggggcttagaacgctccgagaatcagcagccccacacttcactcctatctctcccaagtagcccccttaccccgagtgtgaactccaagagtggaagactggggccgggggtgggcatcactgggaggactgggggtcccaggggaagggccaggacccggaagcactggtggcagagaccaggtcagagccagtgaggctcttgatctctacccctgacacccttccaggggtccttcctccctcctgtggaacccaggagtccagaacgccagcctctagtttcttctgggcctggggaagggctcatcatgcaggacattgatttatttgttcaaaaagtaccctactgtgtgccaagtactgagctacatgctgggtatctggaggatgccgacccttttccgatactcccagggtattcagaatgctgctctgctgctgctacaggacacacactcaggtatgtgggctgagcaagggaaggtgaggttgggacaagaggactcaccataagcagaatccccagggccagactgactcccagtagctccatctatgaagaagggacagggtgaagatggggggaaagagaagcttcatgaagaactgatggggtgactgtgccacagaaggagagaaggacaaaaggccaagcctgggatggtgtctgtggccatcatggccatgtgcagctttggctgcaacagcagctgcctcttctgtttaccttggcagtcaccatgctccatggattcctggttcccagcctgatccacatcagtcctaggaggaaaacgaagtggctatagaattctgtacgttgtccgtatctcccactctggccctcagcttgtcttattggtggggaattttatgctcaggaaacccaaggacccatcacttacccaccagatcccctgatatccacacagcccctggagctatgccatccacagtatgggtcctgagaagccaaacagctcctagggaaaacggaggtgtgtgaggctggatccctttctactccagtcactttccattctgctgccttttcccaccctggcttacaggaggctcccagcctcattctctcctgtccacctcagtctctccacaccctggttgctgcccaccttcagaatgcttgaggtacctaggcaccccacagccatcccctgtgttttcctgccaccccaaagacctgtgtttctgtgctcttgctggcccggggagcttgcccacacagggcctggcctcaggcccctctcacctctgacaggccccatgccgggcacaccggctgagagggaggtagacaatacagccagaaaaagccacaaaaagcctgtgaccctcagtgtccagctccagccctatgatccgtcgtgctgtttgggctgtccgcttcccactgcacctagggtgaggccagaaggaaccagagatggacagatgaggctaccttttccctgagtgagtggaagaacagaaagcggggaggcacacaagcaactgagcacaacccatggagctgccccgccctaccacactgtccagtcttctcgccaagcctgtctagcccagagctcccaccctgcaaaagccaatgttgatgtttccaacctattcccgaatctgcagctgctacctcccatcccctccctgctttgcaggg

SEQ ID NO: 2676 - DNA, 1140 bp, Artificial sequence
  DNA replication origin
gcggaggaaaacaatgcgaccgcccggggctctgggctcggccccagtggccccgcccgcctcccagccgggcccacctcctgcccgcctttgggtcgccgcgactaatcccgccctcggagggcggctagacaccgccttctcgtcacctctccgccaatagtgctgcccggggaggggcgccaggagcaccgtccacccagagggccaggccgggaggctgaactggagaccagagacagacgcgagatggagagacccacggacagtcgccgacaccgggcagaggaagaaatacatacagaagcagagacaggctggcacaggagaggctctggggagaaatttcccaagagaggaagaggagctgggaggagaaacagacaggaaacctgggagcctcgcggggctgggctgggctgtcagagcctgcgcgatccgtcctcccttcccctcctatacggcttgggcgaccttgctcccgagggcgcatcccgcatctccctgactctgcccccaactctctgttgctcctctctatgcgttgtccctctgtctccttatttctccccgtaggcctcctctggttcgtcctgacccggataaggaggcctagcatgcgcgtgggggctggaggcctgggaaaggaaaggaaggtgtcagcaggaggtttcccttgtttccatgatctcctcccctcccacctctacaaagcagcatgagtttgggccactatggcaagaactagctagcagtcaggctgttgggtaatggaagagggcaggtgagagaggctgaagccaaaacagatgtggaaatcaagactaactgactcagagaaaggcacaaagagtagcaacgctaagacttgataaagtaacccacacagccttcctgccccacagacatacgtcccacctttcctcagaggaccgtgacatccctccaaacagcaaaactgccccttctccctccccacccttcataaagcccctgggaatgtcagtgaggaggaagaataaactactacagacaggattgcttggtaccttggtattgcctggtaggattcttctctatgtggggctgggacaaaagacattctcaaaattctccaggaaagtgggtggcctgggagac

SEQ ID NO: 2677 - DNA, 1021 bp, Artificial sequence
  DNA replication origin
caggtgttttctcctagtccccgctggtcttcgttgtagcagtccacttttctgagtacctgagtggaaggtagctcaggcctctggtcaggagggaaccaggcttaggagccaggcctatagagacaagggtttttgtttaaacccagattctgcagaattgaatagggtgggggtgaggggaggactccccctttggttttgcccccaccccaaccttggtcccagcaatcccagctgccacttgctgggactgtctctagttacagtctgaagactggagagaggtgggagagctggctgggaaatggcctgcaacctgggcagggaatggatagggatagactctttagttgcttcttcgtagatacagaaacactcatggggagacactggtaggggacagacctgggtctcccacaaactctgagctggcctgcttgttggattagtgccacataattcttgtgggatttttaattttattttttgcacttggccaggttgaggctaggtgaaacttcctgggctactgttgccacaggaaaatggaaagggtgaggagttaaagttaggggatggaatggggtgaggagcttggagcagaaatgatgggtgagggttgagggagcctggctttttcccactgtggcagctgtgctggagaaatgtgtatgtatcttgggagttttagcctcgggaaagcaagatggggaggggtggagaaggaagggctggctaggggagggccaggcactctggggaaggtagtgagcgagcagcaggtgtttgtgacaggagaggtctaggctggggcccttgtgaccaggctgccatcaccattttcccctctgtctcttctctttgtctctttctgttcctgtgtcttattctttccatcttggtctcttgggtaatttccttgagtccttttctccctgctgaccaagctagatctccaggtgccagtgatggcccaggtgccctagacttgatcctgcatgacccctgactcttgcct

SEQ ID NO: 2678 - DNA, 1055 bp, Artificial sequence
  DNA replication origin
gggccggtacgcgcgggggtgggggcggggggccggcggtgcgcgcccccgcccaccgcgagtggcggcgcggcccgcggcaggggcggccgcggggtgcggcgcgcgagcgcgagtgtgtgtgcgtgcgccccgggccgcgggagccgcgcgaagggccggcggcggaggtccctgcctgccggctggccggccgcccccgccccccggcgcccgccgcggcgcgcgcgcgcgcactcgcgccccacggccccgcacacagcccgacgtccacacgcacgctcggcgcgaggcgtctcggaggagtgggcggcgcgggcgcgggcggtggcccgctggggaaggggcgggggcgggggcgcgggcggtggcgagacggcggggcgcggcgggaggggccggcgagggggcgaggccgtgcggcggaggggcgggcggcggcggagcggcccctgggggtgggggtgcgcggccctccccgccccattcccgctccgagaaggagtggggcgctcgttttgagcgggaggaggaaaatgagtgattgctgagccgatcccttgtgttatgtaatctctgcttggtctaatagtacatcctaagccttagtgcactgcagctagtttacgaagtctcctccctcggtccccaaatttcttttgggatggcgccgtgatttataaaatggaatgaggcggggaatctttattttctggtgattatgtcctgccgcggtgggcgccatgtttatcccggggactattttatttagattcttggcaccttttgcaaaggagtactgtcattgatctatttgttttccgtctttctgcgtgttgttcttatttccttcctctccagatgtgggattctctcaaactgctagtagcacttgtcttagacattcttagttcagaaaaaggtagtgctgatgagtccttagagtcatttagtggccagtctcattttcgaaatggaaactaagatgcagttggactatctcacagcagccgccgtcttgatgcaagcggtgtagcccgtccttccaagcccgt

SEQ ID NO: 2679 - DNA, 1229 bp, Artificial sequence
  DNA replication origin
attttcagaaggatttagtgattcttctcattcaaataatgaagtccttcctaagcatcctacactagtggaaatcactcacatggttttggtatgaaatggaatgaaactgggtggtggcagtgtgtgtatgtgtatgcacatgtgcacactcacacgggcaggtgcatacaatttggaatgcctacttccactgcctattttcagtctggtggtttgaatggagtgtgtatataaagagcacaaataaacatagttctggatttcccctttctgcaccaagtaccttgatttcacatttggtttgaagcaaatatttgtgtattgcttaaatagcaaacattttcaaatattcaaggaaaatattacatttttataatctcagaaggcaataaaggacaaaatttcttagctacctgaaaagaggtagtttttgtctggggaagaataaacaggtggatggtcgtttgagtggactaaccaatttctttgagccaacccatctcagccttgattggagcaaaaagcataaggatgtggagtgtgtgtggtttcttggaactggggatctctgctgaatctactcacaatgggagcaaagcagtttccatcacaataatcgctttaacaatcgtgtgccacttctttccaggatccagaagggcttgaggatcaaaatggcttttaaaagttcttcacttaaacaaggccgcagccacaaggttacttggccgagtgtctcttgagaaagagtgagtgccattttgttctttgttccaatgacagttgttggtgccactgggcctcaccacctggcctgtgtcatgaagtctccctcttgactgggtctaagccttgagtggaaagtgggggagcctcccaacacttccttggaaactcttggcaagtaaattggggaatattttctttggaagtctcatttttctcaccaaaatttagatatagcttctgaagctaattattcttttttcattacaaaaaatgttttcctttatttatttatttgcaggcccagccaaacttgactagaaaagaagcccgggcaggggtttggatgagcccatgacgtgcagcgcgctccgaccaattgggaggccgtgaaaaaggggagggcggaagtgacgagccgtatccctccgcggggcgagagggtcggtggggggagtcggcgtctctctcccccgcgccagctcccgtacacggagccg

SEQ ID NO: 2680 - DNA, 2233 bp, Artificial sequence
  DNA replication origin
cccttggagtaaacgggaggcaggaggctgttttctagcagagcccagaagatgctctggccgacggctcccgggatcttggccggcggtcactcgcgaccatccgcgacgcccccaaaatggcctccgcgcccctcgccgccccgccccgacgctccgcagcccgtgggtccacgtgacctggcccgcccttcgcggctggagaccccgggtcccggtccccgcaccggaggccccgccccctacgggaagcggaccaaccggagcggggaaaggcggggcgggcactgacggcccgcgggggtggagctccgcagcggagtaacaggttggtgggagggagagaaaggagggagctccgaggacgagggggagggccggagctgcgcgtgctgctttgcccgagcccgagcccgagcccgagcccgagcccgagcccgagcccgaacgcaagcctgggagcgcggagcccggctagggtgagtggacccggtgcgggccagggcacccgagaggaaagcgagccttcaggggtacctttgaggggcaggcatcgaggcggtgtgagatgcccctctccagggcaccggtgccgagtgggagacgggaggaggggagattggggcggggtggggtactgattaagagccgacccctaccctgaggtgccagatgcaggtggctaggaaggtgccaggcgaggggcacctggggcgaaggctgttcccagcgcatgaaagcgtttcagcgccagatgtctctggaggtcagacgccagccctaggggcagaatttctcttggagacagcggtggcgcggggaaggagttagttccagctgagtcgggaactgctgctgcctgaggtgcagactcgccaggggagggcatctgcaggtgctgctcgcctgagggtctttcctgcgtcctgcggtctcagctggccgttgtcagcaccctggtggctttgagatgactctgaggtgtgggattttttccccagcccttcacctccggccgaaggcagttgcgaatcagagacactgaggggcagatgagagggcaccctcatctcttcaccaggtgtacaaccattaggctttcactttgtgtcctttgctttcgtgccagggagaatcgttccttcttcctcttgagagagagagagagtactccccaagagagggatatgaggaagcaaagagccctgcctggtcctgcaaaatattgataaatattaatacttatttctcaggaggcccctttctgggggcggatgtcaaaccctttctccaagtacccacatattttttctgtggttctagatggggaccattggatgaggtttgggagcccaaccaatttccttgatgtctggaggaatccccattactccctgaacgccctccaggcatccctgactcctgaactgcggtggctgtcagaatggcagcaggcactattggggcaggaaataggcaggactcatcaggagaccacgagactagggaaattacaactccaaatccccaggacagatgaaaggtgcaccttggggcccagacaagactggaggcaaatttctttgccttaggcaggtaaaggaactagagtcaaccttagcttggcccctttgaagccctgcctgaggaaggttgttgtaattgggaaataattagcaaccgctatgtttgtagatgggctgcctacacatgcctatgcatctcttctttcatcctggatgtttgggagtctgggggctggctctgggggactgctaatccagagatttgcccgactctaagaggattctggcttcctagaacccttcctgtgtttcccaggctggcctgcatgccattccccttgtgggaggtgatgggggtgtagggctcttctctttgtgccagggaggggcggactgaggaccagggaggtggccaaagcaagtgtgggatcaggaatgcaactttgggaacctcaaagggaggggtggagggagacaaagtctccctgtcacatactggcctgtcaccaggttcctgttcatctgctcctcctgcctgttccctccctgccctctgtcctctccttcagagctttggctttgccatcaaggctggagagcccctgcctgtggtcttgcccctctgcctcctccgtggtgtggaatttctctggtctgctttacaagctgccagtgtagtttccccggccctccccttccccttgcct

SEQ ID NO: 2681 - DNA, 1350 bp, Artificial sequence
  DNA replication origin
cctcccggacggggcggctggccgggcagaggggctcctcacttcccagtaggggcggccgggcagaggcgcccctcacctcccggacagggcggctggccaggcggggggctgatccccccacctccctcccggacggggcggctggccgggcggggggctgaccccccccacctccctcccggccggggcggctggccgggcggggggctgacccccccacctccctcccggacggggcggctggccgggcagaggggtcctcacttcccagtaggggcggccgggcagaggcgcccctcacctcccggactgggcggctggccgggcggggggctgaccccccacctccctcctggacggggcgactggccgggcagaggggctcctcacttcccagtaggggcggccgggcagaggagcccctcacctcccggacggggcggctggccgggcggggggctgaccccccccacctccctcccggacggggtggctgccgggcggagacgctcctcactttccagacggggtggctgccaggcggaggggctcctcacttcccagacggggtggctgccggacggaggggctcctcacttctcagacggggcggttgctaggcagagggtttcctcacttctcagacggggcagccgggcagagacgctcctcacctcccagacagggttgcggcccagcagaggcgctcctcacatcccagacagggcggcggggcagaggtgctccccacatctcagacgatgggcggccgggcagagacgctcctcacttcctagatgggatggcggcggggaagaggcgctcctcgcttcctagatgggatggcggccgggcagagacgctcctcactttccagactgggcagccaggcagagaggctcctcatatcccagacgatgggggggcaggcagagacgctcctcacttcccagacggggtggcggctgggcagaggctgcaatctcggcactttggggggccaaggcaggcggctgggaggtggaggttgtagcgagccgagatcacgccattgcactccagcctgggcaccattgagcactgagtgaacgagactccgtctgcaatcccggcacctcgggaggccgaggctggcggatcactcgcggttaggagctggagaccagcccggccaacacagcaaaaccccgtctccaccaaaaaaaaaacgaaaaccactcaggcgtggcggcgcgcgcctgcaatcgcaggcactcggcaggctgaggcaggagaatcaggcagggaggttgcagtgagccgagatggcagcagtaccgtccagctttggctcggcatcagagggag

SEQ ID NO: 2682 - DNA, 983 bp, Artificial sequence
  DNA replication origin
tgcccggccgcccctactgggaagtgaggacccctctgcccggccagccgccccgtccgggagggaggtgggggggtcagccccccgcccggccagccgccccggccgggagggaggtggggggggtcagccccccgcccggccagccgccccgtccgggagggaggtggggggatcagccccccgcctggccagccgccctgtccgggaggtgaggggcgcctctgcccggccgcccctactgggaagtgaggagcccctctgcccggccagccgccccgtccgggagggaggcggggggggggggggtcggccagccgccctgtccgggagggaggtgggggggtcagccccccgcccggccggccgccccatccgggaggtgaggggcgcctctgcccggccgcccctactgggaagtgaggacccctctgcccggccagccgccccatccgggaggtggggggcgcttctgcccggccgcccctactgggaagtgaggagcccctctgcccggccacgaccccgtctgggaggtgtgcctagcggctcattggggatgggccatgatgacaatggcagttttgtggaatagaaaggcgggaagggtggggaaaaaattgagaaatcggatggttgccgggtctgtgtggatagaagtagacatgggagacttttcattttgttctgtactaagaaaaattcttctgccttgggatcctgttgatctgtgaccttatccccaaccctgtgctctctgaaacatgtgctgtgtccactcagggttaaatggattaagggcggtgcaagatgtgctttgttaaacagatgcttgaaggcagcatgctcgttaagagtcatcaccactccctaatctcaagtacccagggacacaaacactgcggaaggccgcagggtcctctgcctaggaaaaccagagacctttgttcacttgtttatctgctgaccttccctccactgtt

SEQ ID NO: 2683 - DNA, 1286 bp, Artificial sequence
  DNA replication origin
aaacctactgttttacaagaggcaacagaaggttgcggaaattacaattaaaatttataaaaaatgagaacgatttcaagtgggcaaatcgaaatatggagggagagagtaaaagtgtaaaaaaggaatgcacaacatagattcagtaagcagaaacacagcactgaagactgctgaggagaacggagacaacgcgagcacacaccacctgcaagtcaaccggcaatcactatccgaatttcaatacgaagtacaaaaaggcaaatgtaacacctagattagggtaatggaggcggtgtgcacagagattgcaagacaaggcagcatcccgcaagagcatggagggatgtggtgggggaggcgtatgaagggggagggactgcagcaggggagagagggtgggctgcagcagcagaaggcgccttaaaaaacagaagaaaggaaaagcagcctaggggagggaaagactaggacaaagtcaagtgtgggatcacaggaggatagagtagaagaggcagcagagacgggcatgccctaaaaaagcaaagcggtcaaagacccaaaaagggcttgaagtagttttgaaggaggaggagttacaaggggtctaccataaacctgactaggaggaggcatgagtatagagcaggagtgaaggcaggaggccagggaagggatgctctcagaggggtgtgctgatggagacgctagattccaaattagggtgtgatacggggccaaccgagaagagaaactacggtgtcaaatcccacgccccccaccccaaaggcatgcaagggtcagaaagcaaggtaaactcttggagtagaaatacaaaaaggaggggaggaaaggggcacacggtgggatggaaaaatttaggggcagcgtaaccatgaggagagggtaactaaggaaagaaaaaggagacgagcggggagggatggtgtttccggaggaaaagtaggagcagaccagaggtcctgcctacttggtctggagggcagaaggggcagtccacgggggcggaggggagtggtggagaacgaaactgcgatgctgaagatgagaacttgggggggacacggtactggctggatcagaaaacgaaacgccgtcagtaaggagcagatgaggttccttctgagcaagacgagggggagtgaggagcagaatgcagcacgccaaacgggaaggcaaaggggcggagaagagcccagagtaatcggggcacagggaggagcactgggggcgcaagggcatcagctggagacgacggggtggga

SEQ ID NO: 2684 - DNA, 782 bp, Artificial sequence
  DNA replication origin
tctgcctggccgcgaccccgtctgggaggtgaggagcatctctgcccggccgccccgtctgagaagtgaggagaccctctgcccggcaaccgcctcgtctgagaagtgaggagcccctctgcccggcagccgccccatctgggaagtgaggagcgtctccgcccggcagccaccccgtccgggagggaggtggggggggtcagccccccgccaggccagccgccccatccgggagggaggtggggggggtcagccccccgccccgccagccgccccatctgggagggaggtaggggggtcagcctcccgccaggccagccgccccgtctgggagggaggtcggggggtcagccccccgcccggccagccgccccgcccgggaggtgaggggcgcctctgcccagccgcccctactgggaagtgaggagcccctctgcccggccaccaccccgtctgggaggtgtgcccaacagctcattgagaacgggccaggatgacaatggcggctttgtggaatagaaaggcgggaaaggtggggaaaagattgagaaatcggatggttgccgtgtctgtgtagaaagaagtagacatgggagacttttcatttggttctgtactaagaaaacttcttctgccttgggatcctgttgatctgtgaccttactcccaaccctgtgctctctgaaacatgtgctgtgtccactcagggttaaatggattaagggcggtgcaagatgtgctttgttaaacagatgcttgaaggcagcatgctcgttaagagt

SEQ ID NO: 2685 - DNA, 1226 bp, Artificial sequence
  DNA replication origin
agaagttttcttagtacagaaccaaatgaaaagtctcccatgtctacttctttctacacagacacggcaaccatccgatttctcaatcttttccccacctttcccgcctttctattccacaaagccgccattgtcatcctggcccgttctcaatgagctgttgggcacacctcccagacggggtggtggccgggcagaggggctcctcacttcccagtaggggcggctgggcagaggcgcccctcacctcccgggcggggcggctggccgggcggggggctgaccccccgacctccctcccagacggggcggctggcctggcgggaggctgacccccctacctccctcccagatggggcggctggcggggcggggggctgaccccccccacctccctcccggatggggcggctggcctggcggggggctgaccccccccacctccctcccggacggggtggctgccgggcggagacgctcctcacttcccagatggggcggctgccgggcagaggggctcctcacttctcagacgaggcggttgccgggcagagggtctcctcacttctcagacggggcggccgggcagagatgctcctcacctcccagacggggtcgcggccaggcagaggtgctcctcacatcccagacggggcggcggggcagaggcgctccccacatctcagacgatgggtggccgggcagagatgctcctcacttcctagatgggatggcggctgggcggagatgctcctcactttccagactgggcagccaggcagaggggctcctcacatcccagatgatgggcggccaggcagagacgctcctcacttcccagacggggtggcggccgggcagaggctgcaatctcggcactttgggaggccaaggcaggcggctgggaggtggaggttgtagcgagccgagatcacgccactgcactccagcctgggcaccattgagcactgagtgaacgagactccgtctgcaatcccggcacctggggaggccgaggctggcggatcacttgcggttaggggctggagaccagctcggccaacacagcgaaaccccgtctccaccaaaaccagtcaggtgtggcggcgcgagcctgcaatcgcaggcactcggcaggctgagtcaggagaatcaggcagggaggttgcagtgagccgagatggcagcagtacagtccagcttcggctccgcatgagagggagacc

SEQ ID NO: 2686 - DNA, 816 bp, Artificial sequence
  DNA replication origin
tgaagcccatcttcgaacagtttggtcggatctttgagctgactgtcatcaaggacaagtacaccgggctgcacaagggtgaggggtcgggcaggctgaagaggcttcggggtgggctgggaggctgggggaagttaagccaggctggaggggtggagcggctgggaagggctgatgtggaaggagaagagttcaggcctgaggaaagtggatggaggagctgaaaaagaactcagctagagtgatcaggaaaccccggtgaaggactaaggagggcctcttttggctgaagagttgtcaagacggctgcaaagatgtggatcccagacatatgggtgtgttgatgtcatgggatgaactcaagaaagaatggagggacaagagagctggtttgggagataagcagctgggtaggggtgtgtgtgtgtgtgcgtgtgcagcaagactgagaatctgagcagcctcagataatattgggatgggggtcaggacacagggtcaggtgttcaatgtggaaagcgtggagctggactgggcagggcagctccaggactaaagagagggactaggaagcagggcatgaaggctggagattggtaaagatctggaaagtgtgggaggcttagaaagttaagagagtgggggagaagggagggtgctcctcaggcctatccaagggctgtgcggctaagtgggggcggtcagggtcagcacttggagagctccacacaccggggatcccaggggccacaccagctccccctccacctggcacagggaagaggcacttccggctaactaactgttcttcccttc

SEQ ID NO: 2687 - DNA, 670 bp, Artificial sequence
  DNA replication origin
atgggggaagggttattatcaacaggaccagctgctcttctgggggcgggaagggagtcagggaggatggagatagaaagagggcgtggctcgtgcctggattgtgcgtccctctccagggtagagaatttgtattcgacccctgagactgacatcactgatgtcaggggaaaggaggtgggagtggggaggggggtgtggaggggggaggtttttgttgaggagagcgcggccggagagcagagctccgggacccaggtgaccgggaaagcaggcagccccagcggcgggagcagccggcagcagcccaggcccggggactggggtgggggtgggaggggggctgaggggaggacctgaaggggggcggcagggcaaaagggacccctggagccctgccgccatcagagatcaagcatctggcatcagggatcttcggacccagcagaaggatccgccacaggggaggtgtcctcccagggaagccaacgagagattcacctgccccacatcaggagtgggccccccttactgacgctgctggcaaccatagcaggccccttaacccctcagtctcctccccatcaccctcctcaggccctttccccgcctccagctctcatctcaactcccagttcccagccctctaagccctagcacccccggctac

SEQ ID NO: 2688 - DNA, 1388 bp, Artificial sequence
  DNA replication origin
gcacatcttgcaccgcccttaatccatttaaccctgagtggacacagcacgtttcagagagcatggggttgggggtaaggttatagattaacagcatcccaaggcagaagaatttttcttagtacagaacaaaatggagtctcctatgtctacttctttctacacagacacagcaacaatctgatttctctatcttttccccacatttcccccttttctattcgacaaaaccgccatcgtcatcatggcccattctcaatgagctcttgggtacacctcccagacggtgtggcggccgggcagaggggctcacttcccaaaaggggcggccgggcagacgcaccccccacctcccggagggggcggtggccgggtggggactgccccccacctccctcccagacggggcggctgaccgggcgggggctgccccccacctcccggacggggcagctgccgggcggagacgcccctcacttcccagacgaggcggctgccgggcggaggggctcctcacttctcagacagggcggacgggcagagatgctcctcacctcccagatggggtcgcggctgggcagagacactcctcagttcccagacagggtcgtggccgggtagaggcgctccccacatcccagacgatgggcggctgggcggagacgctcctcacttcctagacgggatgacggccgggcagaggcgctcctcacatcccagacgatgggcggccaggcagagacgctcctcacttcccagacggggtggtggccgggcagaggctgcaatctcggcactttgggaggccaaggcaggcggctgggaggtggaggttgtagcgagccgagatcacgccactgcactccagcctgggcaacactgagcactgagtgaacgaggctccgtctgcaatcccggcacctcaggaggccgaggctggcagatcactcgtggttaggagctggagaccagcccggccaacacagcgaaaccccgtctccaccaaaatacgaaaaccagtcaggcatggcggcacgcgcctgcaatcccaggcactcagcaggctgaggcaggagaatcaggcagggaggttgcagtgagccgagatggcagcagtacagtccagcttcggctttcacaactttggtggcatcagagggagaccgtggagagagagggagagggagaccatggggagacggagacggagagggagagggagagggagcggccaaacattttaactgtttttctgtggctcctagtttgactgcaaccctggagtacgtggaagagaagacaaatgtggactctgtgtttgtgaacttccagaatgatcggaacgacagaggtggggatctgctgttcttccttgcttttcgcgctga

SEQ ID NO: 2689 - DNA, 2289 bp, Artificial sequence
  DNA replication origin
caaagtactatggttaaaaaaaaaaagtttcctctcctccctccctctttctgtccctataatcttcccttctctttatctgacccctcttttctattccctttcttgctttatttttctctgtaacatatcaccaagtagcattctttacattttaatggcttattttatcacttttctgatccccatgtctgtttaatcactgctgtatccaatgcctgccacctgatggaccttcccgaagtatttgttgaaggaatgcatgaatgaaggttctacggcctctaactttctttccagatactttcaaatgggcatcaaatccagtttctcaccaagggttgttatgggagaatttgggggctgaaatagaaatccagtactaggggtagacctaaatctataggtagacttcccagaattcaaacatgggattttaaactggcagggtacgaaacctttgcagagctaccatcttagggaaggaggccccttttagagtgacttgattgggaggcagcagctggcagtggggggtattatcttgaagtgattaagagtccacactctggagccagactccctgaattcttccctttactagctatgtgagtcctagttcttccctttactagctatgcgaggcccaagatcccattggataataatagtatttacaccctaatagaaggtgctgggaggaataaatggcttgactaattgttggaacagttcctcatgtggttataatccatgtgtagtagttagcacttaggattgtttggtcaatgccaccacctggtggacacctggagcaagagttctctggcctagggctgggtggtgcggacccaatcagggaagggagaaggaactggagagctgtctgaatgaagccgtgtgtgtgtgtgtgtgtgtgtgtgtgtgtgtgtgtgtgtctctgtgtgtgtgtctctgtgtgtgtgtgtgtgtgtgtgtgtgtgtgtgtgtgttggaatttaacgtgtccaggtgctgaggcttttgaggttttgtcagatcccgcaagcttagccctggtgcaggccacagctggcaccatgaaaaatgagaaagggcccaagggagagggagaaagaagttgggttagcctagtgcctacctcacttcctccctccctcctccaagcctggcctgagtccagaggaaccggctcctgggaaggtggagggagagagaagaaggtcactgctgacgtcagggacattcaggtagaggtaaacacaatgtgacctacaattatccacctccccccacccccacctccttctggctggaggaggctcttctggcattcctgagaacagttctcacactttggtagtaccccacctcccccctttcaatccctgggacattatatctcattcatttggtacccaagcacctctctggttcttggctccagacttgccccacccctcaagggacgcacaggtgtggaagaggcaagagggaagaaggaagactaaagggcactctgtgttcatctgacatcccctgactcactctcaagagccagaaatttcatctgtcttcaggacagatgtgggttttagaggggcacaggaagggagtgttaatttcctctgtgcagcctcaagtggaaggtggcttgtgttggtttctgtcagagtgactcagtgattgcagggctccctgattgttcgggggccttgttggccggggaccttaggacctacttggcccagatctactgaaggagcatctcatagggatggagcccaggaccctgcatatttaaaaagctcttccaggatttctgatgtctggttattctgatgctccttcaagcttgagaaccactgcttaaggtctgctctactcagaccgtctgaatgagcatcttccccccgcgtatggccgggatagagggaagatcggtaggctctatgcccgagcgtgtaaggtgccagtaaggggaaatatctggctaaggacaaggggacattttattagcaaaaataaatacaagccgggcagggtggaaagaatgtggactgcagacacagtggagacgtcctgaggaagccaggggctcaggctacaggctgagatgggtgggcgccagggatgacccgggacctagtcccccacccagcgggggcagcagcgcaatgaggggcgtctcgcactcccccagcagcacatccctgcgaagtcccgcgcccctgtctagcaccttggctctcaggctgcgggcggccaggtccggggggccgagcccgt

SEQ ID NO: 2690 - DNA, 1482 bp, Artificial sequence
  DNA replication origin
gaggcctggacacccggcgccggcccaggcctggccgcggggagccgaagggcgacgagtccggcgacgaggccgtgtcgctgtcgggggcccggcagaggcgcaggtccggggcggagacgtgcagccgggactgcgccgcggggagtcccccggccggggcaggtggcggcccgtggaacagggattcccgccggcgcgtgtgcgggctctcgggcaggaaggcccagccttcgcggcccgccaggtgaggcagcgagcaggtcgcggggaggccgcgccccgccacgtgccgccgggccgcgggcactgcgccgcccgggtccgggagccgaggcgggatgaagaactgcgggatgcgatccggggtgaggacgttggggcaggcgcttgtgggcgggcccggggcgcgacgcttggagaacaggccggaaggcgcccaacgggccgcaggctccgcggcccccaccttatagccagctttttccaagagccacatgcggtgggtggggtaatggaattccgaattccgcagggccgagagggtccaaatcccgtctcagatgggagtgctcggcggagcggggctgggcgaggagcgcagaggagtcagaggtgagtgatgctggcgtacaccgggcggtcagccaccgcgccccggtctccggacccactgggagcgcggacccctatttgagcagaaaaagaaagggcggcgcagtctggggggctggggagaaatggagggagcaaagggccagtcagtcacattttcatatacgggcctccgtcaccaagtacacagattctcccactggtactaaagatgccccattcaccttacagttagagggcccatatagtatccaccagaaccctagggtactattaggacaaataggataataaccgcattatagcaaaaggactcagatcccaacccccctgggacactgcgccctaggcgggctcacgccctcctcccccgcccatttcgaagacttgggttttcctctgggatccagtctggcgccccttgggacttcctccctttgccaggctgccccggctcaagcttctctggcctgagccatccctcagtcctagccccacctgcctcctctggctcctccttcccctcctcgagtcgctccaagccagaagaggactcacttctgctcctggcagccaggggacacacctggctgctgacctcaggacaccctgggctggtccaaggagacgcacctcccggggacacagaatcccacccccagtagccctgaccgtccagctcccgcgcctcccagccctaccgcatcccgcgtctgcagggcggggccgggccgttgggtcgcccctcctactctccactccttttctccctcggaaaccaccgagcacaaaggcagcattgattctccgccaccctcagagcggtctccggaaggctccgccaccacgcgctcgcctcacccctgc

SEQ ID NO: 2691 - DNA, 1541 bp, Artificial sequence
  DNA replication origin
agaacgctctgtctggggcgggcgaggcctctgcgaggcgggtccgggagcgagggcagggcgtgggccgcgcgcccggggtcgggggagtcgggggcaggaagagggggaggagacagggctgggggagcgccctgccgagcgcccgccaggctcctcccgctcccgcgccgcctccctctacccacccgccgcacgtactaaggaaggcgcacagcccgccgcgctcgcctctccgccccgcgtccagctcgcccagctcgcccagcgtccgccgcgcctcggccaaggtgagctccgcccggcccacgcgcccctcctgggtagtccccaggcccggacctgctgcccggggaaaaccctgcacccggcttcgcggggcgtccggagcaccgcggggctgggcggggagcggctggtggggaatccgctgctcagtgctccgggccacacccaaacgaggccagcagcgcccctccccggcccgggcgcggccgcccccagacccacgcggaccagaggagggggcacttgttctttaggaggggaccgtggtattggtgcgcctgaacctcttccctcctccctttatgtttgcgttgctttactcccacctttcctactttcccactcgtctctcgggttaccgaatccctcctacacgcccctgccctggctggcgtgtttcttggtgggttccgctcgcaggccgggtctgcatgttcgtagcctgctcccggctgtaccgcccaagtaggcgcgggtaggacgagtaggcagctggggcgtcccttccgtaacccttagtccgtcggccaaacaggcgtttctggtcggggcttcctgttgtctgctcgacggaaagggtcttcctgctgagggagggaggtccacttgttttctttctacagcagtttggctggggtttgtgggagagggccctgtgtgacgtggtttctctactgaaagggttcccttgctgtcttaataagtggaaccagaaagagatggaggaagagcaggcttgatgaaggatcttccaatcatagattaatttggcccggtgcagtgaaacagacagacgtgcctttggtacttggttcaccacctgtgctttggccgaaggaatggcgctgcccctagccgtggacactgctgcctgtccagcctcagtccagctctgcctaagtgaaaccaggagctctgccttgttggctggggtggaatgcagagcgctccaagccaggccagcacaggggagccctaagccagattctgggatgcattaagcccaccccgttttctgcccccacccagttccgtctctgcgggagcttctgcagggcgtggttagcacaaagggctccaggattctcccagtggtctgaggcctgtgactcagctgtgagaccatgtgggtgtggccggttgcagatactctcggtggatggtttggacagaacactccctgaaggaaaaggagaactgtgccatctcagagggcattttccaagaggaagtgagtcacacctggtctggct

SEQ ID NO: 2692 - DNA, 2621 bp, Artificial sequence
  DNA replication origin
tgaagcgcgaggaggagacggagaggcacgagcaggagaggcgcaagcagcagctgaagcgcgaccaggaggaggagaggcgcgaacgttggctgaagctcgaggaggaggagaggcgcgagcagcaggagaggcgcgagcagcaactaaggcgggagcaagaggagaggcgcgagcagcggctgaagcgccaggaggaggaagagaggctccagcagcggttgaggagcgagcaacaactaagacgcgagcaggaggagaggcgcgagcagctgctgaagcgcgaggaggagaagaggctcgagcaggagaggcgagagcagcggctgaagcgcgagcaggaggagaggcgcgatcagctgctgaagcgcgaggaggagaggcgccagcagcggctgaagcgcgagcaggaagagaggctcgagcagcgactgaagcgcgaggaggtggagagactcgagcaggaggagaggcgcgagcagcggctgaagcgcgaggagccggaggaagagaggcgccagcagctgctgaagagcgaggagcaggaggagaggcgccagcagcaactaaggcgcgagcagcaggaaaggcgcgagcagcggctgaagcgcgaggaggaggaagagaggctcgagcagcggctgaagcgcgagcatgaggaagagaggcgcgagcaggagctagctgaggaggagcaggaacaggcccgggagcggattaagagccgcatcccgaagtggcagtggcagctagaaagcgaggccgacgcacggcaaagcaaagtctactcgaggccccgcaagcaggaagggcagaggcgccgccaagagcaggaggaaaagaggcggcgccgggagagtgagctgcaatggcaggaggaggaacgggctcaccggcagcagcaggaagaggagcagcgccgggacttcacatggcagtggcaggcggaggaaaagagcgagaggggccgtcagaggctgtcggccaggcccccattgcgggagcagcgggagaggcagctgagggccgaggagcgccagcagcgggaacaacggtttctcccggaggaggaggagaaggagcagcggcgccgccagcgacgcgagagggagaaagagctgcagttcctggaggaagaggagcagctccagcggcgggagcgtgcccaacagctccaggaggaggaggacggcctccaggaggatcaggagaggaggcgaagccaggagcagcgccgcgaccaaaaatggaggtggcaactagaagaagaaaggaagagacgccgccacacgctgtacgccaagccagccctacaagagcagctgaggaaggaacagcagctgctgcaggaggaggaggaggagctacagagagaggagcgcgagaagagaaggcgccaagaacaggagagacaataccgcgaggaagagcagctgcagcaggaggaagagcagctgctgagagaggaacgggagaaaagaagacgccaggagcgggaaaggcaatatcggaaggataagaagctgcagcagaaggaagagcagctgctgggagaggaaccggagaagagaaggcgccaggagcgggagaaaaaataccgcgaggaagaggagttgcagcaggaggaagagcagctgctgagagaggaacgggagaagagaaggcgccaggagtgggagaggcagtaccgcaaaaaagacgagctgcagcaggaagaagagcagctgctgagagaggaacgggagaaaagaagactccaggagcgggagaggcaatatcgggaggaagaggagctgcagcaggaggaagagcagctgctgggagaggaacgggagacgagaaggcgccaggagctggagaggcaatatcggaaggaagaggagctgcagcaggaggaagagcagctgctgagagaggaaccggagaagagaaggcgccaggagcgggagaggcaatgtcgggaggaagaggagctgcagcaggaggaagagcagctgctgagagaggaacgggagaagagaaggcgccaggagctggagaggcaatatcgggaggaagaggaggtgcagcaggaggaagagcagctgctgagagaggaaccggagaagagaaggcgccaggagctggagaggcaataccgcgaggaagaggagctgcagcaggaggaagagcagctgctgagagaggaacaggagaaaaggcgccaggagcgggagaggcagtatcgggaggaggaagagcttcagcgccagaaaaggaagcagcgataccgggatgaggatcagcgcagtgatctgaaatggcagtgggaaccagaaaaagaaaatgcagttcgtgataacaaggtttactgcaaaggcagagagaatgaacagttccggcagttggaagattcccagctgcgcgacagacaatcccagcaagatctgcagcacctgctgggtgaacagcaagagcgagatcgtgagcaagagaggaggcgctggcagcagcgcgacaggcatttcccagaggaagaacagctggagcgagaagagcaaaaggaagccaaaaggcgcgacaggaagtcccaagaggaaaagcagttgctgagagaggaaagagaagagaagagacgccgt

SEQ ID NO: 2693 - DNA, 796 bp, Artificial sequence
  DNA replication origin
cccagccacccatcgtctgagatgtggggagcacctctgccctgctgccccgtctgggatgtgaggagcgcctctgccctgccgtgaccccatctgggaggtgaggaatgtctctgtctggccgccccgtctgggaagtgaggagcccctctgcccagcagccaccccgtctgggaagtgaggagcatctccgcccggcagccgccccgtccgggaggttgggggcagcccccacctggccagccgccccgtccgggagggaggtggggggcagcccccgcctggccagcaccccgtcctggagggaggtggggggaagcccccacccggccagccgccccgtccaggagggaggtggggggcgcctctgcccggctgccccttctgggaagtgaggagcccctctgcccagccaccaccctgtctgggaggtgtacccaacagctcattgagaacgggccatgatgacgatggcagttttgtcaaatagaaaagggggaaatgtggggaaaagatagagagatcagattgttgctgtgtctgtgtagaaagaagtagacataggagactccattttgttctgtactaagagaaattcttctgccttgggatgctgttaatctacaaccttacccccaaccccctgctctctgaaacatgtgctgtgtccactcagggttaaatggattaagggcggtgcaagatgtgctttgttaaacagatgcttgaaggcagcatgcttgttaagagtcatcacccctccctaatctcaagtacccaaggacacaaacactgc

SEQ ID NO: 2694 - DNA, 1181 bp, Artificial sequence
  DNA replication origin
gtttcagagagcagggggttgggggtaaggttgtagattaacagcatcccaaggcagaagaatttctcttagtacagaacaaaatggagtctcctatgtctacttctttctacacagacacagcaacaatctgatctctctatcttttccccacatttcccccttttctatttgacaaaactgccatcgtcatcatggcccgttctcaatgagctgttgggtacacctcccagacagggtggtggctgggcagaggggctcctcacttcccagaaggggcagccgggcagaggcgccccccacctccctcctggacggggcggctggccgggtgggggcttccccccacctccctccaggacggggtgctggccaggcgggggctgccccccacctccctcccggacggggcggctggccaggtgggggctgcccccaacctcccggacggggcggctgccgggcggagatgctcctcacttcccagacggggtggctgctgggcagaggggctcctcacttcccagacggggcggccagacagagacattcctcacctcccagatggggtcacggcagggcagaggcgctcctcacatcccagacggggcagcagggcagaggtgctccccacatctcagacgatgggtggctgggcagagacgctcctcacttcctagatgggatggcggctgggaagaggcgctccttacttcccagactgggcagctgggcagaggggctccttacatcccagatgatgggcagccaggtagagacgctcctcacttcccagatggggtggcggccgggcagaggctgcaatctcggcactttgggaggccaaggcaggcggctgggaggtgggggttgtagcgagccgagatcacgccactgcactccagcctgggcaacattgagcactgagtgaacgagactctgtctgcaatcctggcaccttgggaggccaaggctggcggatcactcgtggttaggagctggagaccagcccggccaacacagcgaaaccccgtctccaccaaaaaaatacgaaaaccagtcaggcgtggtggcgcgcgcctgccatcccaggcacttggcaggctgaggcaggagaatcaggcagggaggttgcagtgagccgagatggtggcagtacagtccagcttcggctgggcatc

SEQ ID NO: 2695 - DNA, 1526 bp, Artificial sequence
  DNA replication origin
ctgagtgaacgagactctgtctgcaatcctggcaccttgggaggccaaggctggcggatcactcgtggttaggagctggagaccagcccggccaacacagcgaaaccccgtctccaccaaaaaaatacgaaaaccagtcaggcgtggtggcgcgcgcctgccatcccaggcacttggcaggctgaggcaggagaatcaggcagggaggttgcagtgagccgagatggtggcagtacagtccagcttcggctgggcatcagagggagaccgtggagagagagggagagggagactgtggagagagagggagagggagaccgtggggagacgagggagacggagaggagagggagagggagagggagagggagagggagagggagagggagagcgagagcaagagccagatattgtattttaacagcaggtactcagtaaatgctcaattcaagttaggctcctactgccttagtaagtctcgtaataagttacctaataaaaatggtgtaaattcgttttcggcttggttctcaaagaaatcaggagacatgtcagcttcttaatgaccttatagctttttttaaggaacaatgaaatacataacaggaacaacggaagaacacttgtatatgctgacatcagcaagcaaaatgcatacagttcagccagtgattcacactgatgaaaatcaacagtagaaagaagggtttgtcattgagggatgattagagaagataagttttaaattggcctttcaaggagttgatggttaggaattgttgggtttgaactccaagggagaagaagaagtaaggaagtgtctaaggagtgagaaaatagaatggtcacaacctgggatcctacaattcagggagggcattggtggtgctgaggggaacctagctaccatttaggggtgtttaggggcttgttggtatgcagtgcacaggaaatctgagagagaaaaatgttgggtactgtgttttgggagaaagtgaggtgaatgaaagcaacattacccgtaggatatgacaatgggcatagaatggtggtgccgggcatggaggaaaagagtcatgatgtgatggagagagtctgttcagttgaatttgatttggcaagcatccaccaaatatttacctgaaatattctaggtgatacaatgaataaggcatgaaccttttcttgaagaaacgtgtattagttttgtgttgctgtaaaggagtgcctgagactgggtaattcattttaaaaaagaggcttatttggctcatggttctgcaggctgtacaagcagcatggtgccagcatctactctctttctggtgagaccctcaggaagcttacaatcatggcagaaggcaaagggagaacaggtgcaccacatagcaagagagagagcaagagaaagaggaggaggtgccagtctcctttaaacaacagctctcacatgaagtaacagaatgagaactcattcattacctgggagggcaccaagccatttatgaaggatatgctcctgtgac

SEQ ID NO: 2696 - DNA, 830 bp, Artificial sequence
  DNA replication origin
ccagcagccaccccgtctgagaagtgaggagcccctccgcccggcagccaccccgtctgagaagtgaggagcccctccgcccggcagccgccccgtctgagaagtgaggagcccctccgcccggcagccgccccgtctgagaagtgaggagcccctccgcccggcagccgccccgtctgggaagtgaggagcgtctccgcctggcagccactccgtctgggagggaggtgggggttcagcccccgccccgccagccgccccgtccgggagggaggtgggggttcagcccccgccccgccagccgccccgtccgggagggaggtgggggttcagcccccgcccggccagccaccccatccaagagggaggtggggggcgcctctgcccagctgccccttctgggaagtgaggagcccctctgcccggccaccaccccgtctgggaggtgtacccaacagctcattgagaatgggccatgatgacgatggcggttttgtggaatagaaaagtgggaaaggtggggaaaagatagagagatcagattgttgctgtgtctgtgtagaaagaagtggacatgggagacttcattttgttctgtactgggaggggttcttctgccttgggatgctgttgatctgtgaccttgcccccagccctgtgcttgctggggcatgtgcggtgtccactgagggttaaatggattaagggcggtgcaagatgtgctttgttaaacagctgcttgaaggcagcatgctcgttaagagtcatcaccactccctaatctcaagtacccagggacacaaacactgcggaaggccggccgcagggtc

SEQ ID NO: 2697 - DNA, 1119 bp, Artificial sequence
  DNA replication origin
gcagctgggcagaggcgccccccacctccctcttggatggggtggctggccgggcgggggctgaacccccacctccctcccggacggggcggctggcggggcgggggctgaacccccacctccctcccggacggggcggctggcggggcgggggctgaacccccacctccctcccagacggagtggctgccaggcggagacgctcctcacttcccagacggggcggctgccgggcggaggggctcctcacttctcagacggggcggctgccgggcggaggggctcctcacttctcagacggggcggctgccgggcggaggggctcctcacttctcagacggggtggctgccgggcggaggggctcctcacttctcagacggggtggctgctgggcggagacactcctcacttcccagatggggtggctgccgggcggaggggctcctcacttcccagacggggtggctgccgggtggaggggctcctcacttctcagacggtgcggctgccgggtggaggggctcctcacttctcaggtggggcggctgctggacggagggtctcctcacttctcagacggggtggccgggcagagacactcctcacctcccagacggggtcgcggcagggcagaggcgctccccacatctcagacgatgggcggccgggcagagacgctcctcacttcctagacgggatggcggccgggcagaggggctcctcacatcccagacgatgggcagccaggcagagacgctcacttcccagacggggtggtggtcaggctgaggctacagtcttggcactttgggaggccaaggcaggcggctgggaggtggaggttgtagctagccgagatcacgccactgcactccagcctgggcaacattgagcactgagtgaacgagactctgtctgcaatcctggcacctcaggaggctgaggctgctggatcactcgcggttaggagctggagaccagcccggccagcacagcgaaaccccgtctccaccaaaaaaatatgaaaaccagtcaggcgtggcggcacgcgcctgcaatcgcaggcactcggcaggctgaggcaggagaatcaggcagggaggttgcagtgagccgag

SEQ ID NO: 2698 - DNA, 1760 bp, Artificial sequence
  DNA replication origin
tggataaagtatactatattcttatattggaaagctacagtgcacctagaagaaaataactattatatatacacatagattttaaaaacataataactttgagtgaaaatcaagttgcaaactattaatatgtacactacattacataaattttaaaatgtagttacatattttatacatatatatacacatatatttatacacatacatcacacatatttaccaaattaattttggtggtacttctgataagaaaaaaaaaagattagaacttgggggtgagaaacacaggagacttaaatttacctgcaatgttttattcattttaataagacctgaagcaaatacaacaaaaagtttactactgtcagctctagatggtagccatgcaattactcaagataaaaataaaaagactattttttaagaacaggcttagtgggaacttaagagtaggagagctaaaaggccattctgtgtgatcaatgagtgacatttcagggttcacagcttcagaggtggagcagttatggttgatgacaaggtccagggggtggtcatttgaatagctggctgaggtagagtggaggtagagatcaatagagtgtaagaaatgatggatccagatgcatcaccaacatgactgttgaagttttccagaatgattataatagctagggtggaaagaaatagacagttgccaaagtcttcactgaagattatgtggttataggggaaggagatcagtcaaggaaaaagtaaggatggaaagagggtggaatgtatgtgcatcaatgaaggagtgtttattgaaagaagccacagtggtgagcaacaaaatcatgttcaacgcacctctagccacaacacaacagagggagaatgtgtaacctgtacttggaactgctgaaaagtagtatcattcaggaaaagtctagtttcggttaaggtgaggaggtagttacttcaaaaatcctactgaaactctaactttgtaattcattgacccaaagctatgggttcaatcagaaaggagcagtagattttaccaataagccaaaagaacaagaaggagaaggaggatcatgaagaggaggagggagaaagaaaagaggaaggaaggaagggagaaagaaaacaacaaatgaaaaaaaaagagagagaaaaaagaaagagagagaaagaaagaacaaatgaatgaaagacaaaagaaagaaagagagacagagaggaagaaagaacaaatggaagaaagaaaaagaaagaagaaaagaggagaaaggaagaggagaaggaggaggaggaagaaataaaggaaagaaaggaaagaaagagaaagaaagaggaggaggagaaggagaagaaagaaaggaggaggggggaggagaagaagatgaggaggaggaggaagagaagaaagggagaagaaaggaggggaaggaggaagagaagagggagaaaggagagagaaggaaggaggaagggggaaggggaaaaaggaagggggaagggagaaaaaagaagaagaaagaagaaggaagaagaggaaagaaagaagaaagaaggagaaggaggagaaggggaaggaggaggagggggaggaggaagaggagaagaagaaagaaagagaggaaagagagaggggaaagaaagaaggaaggaaagaaagaagggaggaaggaaagaaaaggaaagaaagaagggaggaaggaaagaaaaagaaagaaagaaagaaaagctctcgctctccctctccctct

SEQ ID NO: 2699 - DNA, 843 bp, Artificial sequence
  DNA replication origin
ctgggatgtgaggagcgcctctgccctgggatgtgaggagcgcctctgcccggctgcgaccccacctgggaggtgaggagcgtcactgcccagccgccccgtctgagaagtgaggagaccctctgcctggcaaccgccccgtctgagaagtgaggagcccctccgcccggcagctgccccatctgagaagtgaggagcccctccacccggcagccaccccatctgggaagtgaggagcgtctctgcccggcagccaccccgtccgggagggaggtgggggtcagcccccgccaggccagctgccccgtccgggagggaggtgggggggtcagcatccccccgggccagccgccccgtctgggaggtgaggggcgcctctgcccggccgcccctactgggaagtgaggagcccctctgcccggccaccaccctgtctgggaggtgtacccaacagctcattgagaacgggccatgatgacaatggctgttttgtggagtggaaaagggggaaaggtggggaaaagattgagaaatcggatggttgccgtgtctgtgtagaaagaagtagacatgggagacttttcatttggttctgtactaagaaaaattcttctgccttgggatcctgttgatctgtgaccttacccccaaccctgtgctctctgaaacatgtgctgtgtccactcagggttaaatggatttatggcggtgcaagatgtactttgttaaacagatgcttgaaggcagcatgcttgttaagagtcatcaccactccctaatctcaagtacccagggacacaaacactgcggagggccccagggtcctctgcctaggaaaaccag

SEQ ID NO: 2700 - DNA, 1273 bp, Artificial sequence
  DNA replication origin
ggacacagcacatgtttcagagagcacagggttgggggtaaggtcacagatcaacaggatcccaaggcagaagaatttttcttagtacagaaccaaatgaaaagtctcccatgtctacttctttctacacagacacggcaaccatccgatttctcaatcttttccccacctttcccccttttccactccacaaaacagccattgtcatcatggcccgttctcaatgagctgttgggtacacctcccagacagggtggtggccgggcagaggggctcctcacttcccagtaggggcggccgggcagaggcgcccctcacctcccagacggggcggctggcccggggggatgctgacccccccacctccctcccggacggggcagctggcctggcgggggctgacccccacctccctcccggacggggtggctgccgggcagagacgctcctcacttcccagatggggtggctgccgggtggaggggctcctcacttctcagatggggcagctgccgggcggaggggctcctcacttctcagacggggcggttgccaggcagagggtctcctcacttctcagacggggcggctgggcagtgacgctcctcacctcccaggtggggtcgcagccgggcagaggcgctcctcacatcccagggcagaggcgctcctcacatcccagacggggcggccgggcagagacgctcctcacttcctagatgggatggcggccgagaagaggtgctcctcacttcctagatggggtggcggccggacagagatgctcctcactttccagactgggcagccaggcagaggggctcctcacgtcccagacgatgggcagccagggagagacactcctcacttcccagacggggtggtggccgagcagaggctacaatcttggccttttgggaggccaaggcaggcggctgggaggtggaggttgtagcgagccgagatcacgccactgcactccagcctgggcaacattgagcactgagtgaaccagactccgtctgcaatcccggcacctcgggaggccgaggctggcagatcactcgccgttaggagctggagaccagcccggccaacacagcgaaaccccgtctccaccaaaaaaatacgaaaaccagtcaggcgtggcggcatgtgcctgcaatcgcaggcactcggcaggctgaggcaggagaatcaggcagggaggttgcagtgagccgagatggcagcagtacagtccagcttccgctcagcatcagagggagaccgt

SEQ ID NO: 2701 - DNA, 979 bp, Artificial sequence
  DNA replication origin
agtgtttaaagttgcccaggcctgtttcaagacactgagcgagagtgctgagggagcctgcggctctcaagagtctggaagcctccactctggggcctcgcaggagctgggcgaaggacagagaagtggcactgaagtgggaagggcggggaaagggcagcattatgaggggagcagccacagacagagccagcagggttccagagggcagaacaggcctggggttcagacccagggtcaggccactggctctgcgtgggtcagcagctatgacaggcaagctgagtcccagagccaggaaagaataagcccgcagatacaactctctgggcagacagagcagacccagaaagctggagaaggcaagaggaatcagacaacagagatgaggccagagagacagccacagaccagggaacaggacagagcccaccagacaggtgagactgtgactggatctggaactcagacccaggcaggtgccacccagactgtggagcaggacagcagccaccagacaggaagaaccagcaagcagacacaggaggccaccaatgaccagaacagagggactgagacccacggtcaaggcaggagccagaccagccaggctgtgacaggaggacatgctcagatacaggcagggacacacacccagacacccacccagaccgtggagcaggacagcagccaccagacaggaagcaccagcacccagacacaggagtccaccaatggccagaacagagggactgagatccacggtcaaggcaggagccagaccagccaggctgtgacaggaggacacactcagatacaggcagggtcacacaccgagactgtggagcaggacagaagccaaactgtaagccacggaggggctagagaacagggacagacccagacgcagccaggcagtggtcaaagatggatgcaagtgagcaaccctgaggcaggagagacagtaccgggaggacag

SEQ ID NO: 2702 - DNA, 1163 bp, Artificial sequence
  DNA replication origin
gcacatcttgcaccacccttaatccatttaaccctgagtggacacagcacatgtttcagagagcacagagttgggggtaaggtcatagatcaacaggatcccaaggcagaagaatttttcttagtacagaacaaagtgaaaagtctcccatgtctatttctttctacacagacacagcaaccatccaatttctcaatcttttccccacctttcccccttttctattccacaaaactgccattgtcatcatggcccgttctcaatgagctgttgggtacacctcccagacggggtggtggctgggcagaggggctcctcacttcccagaaggggcggccgggcagaggcgccccccacctcccagatggggcagctggccaggcgggggctgaccccccacctccctcccggacggggtggctgctgggcggagacgctcctcacttcccagacggggtggctgccgggcagaggggctcctcacttctcagacggggcagctgccgggcagagggtctcctcacttctcagatggggcggccgggcagagatgctcctcacctcccagacggggttgtggccgggcagaggcgctcctcacatcccagacggggcagcggggcagaggcgctccccacatctcagacgatgggcggctgggcagagacgctcctcacttcctagatgggatggcggccgggaagaggtgctcctcacttcctagatgggatggcggccaggcagaggctgcaatctcagcactttgggaggccaaggcaggcggctgggaggtggaggttgtagcgagccgagatcatgccactgcactccagcctgggcaccattgagcactgagtgaacgagactccatctgcaatcccggcacctcgggaggctgaggctggtggagaccagcccggccaacacagcgaaaccccgtctccaccaaaaaaatacgaaaaccagtcaggcgtggcggcgtgcgcctgcaatctcaggcactcggcaggctgaggcaggagaatcaggcagggaggttgcagtgagccgagaaggcagcagtacagtccagcttcggctcagcatcagagggagaccgtggaaagagagggagagggagaccgtggggagatggagagggagacggagagggagagggagag

SEQ ID NO: 2703 - DNA, 972 bp, Artificial sequence
  DNA replication origin
gataagatttgggtgaggacacagccaaatcttatcagtgccctaacaggaggaggggtgctttaacaaaagaagggtgtcctaacaggaggaggggtgctttaacaaaagaagtgtgtcctaacaggaggagatgtgtcctaacagtaagacatgtgtcctaaaaggaggagggggtgctttaacaggagaaggcatgccctaacaggatgagggggtgctttaatgggagaaagtgtgttctaacaggaggaagggtgtcctaacaggagaaagtgtgtcctaacaggaggaggggtgccctaacaggacgaggggtgtcctaacaggaggaggggtgccctaaaaggaggaggagtgttctaacaggaaaaaggggtgccctaacagaagaatgggtgccttaacagaaggaagggtttcctaacagtggaaggagtgtcctaacaggaggagggattttctaacaggaagagtggtgctctaacaggaggagggggtgggtctaactggaggaggggtgcactagcaggaggaggggtgccctaacagaaggaggggtgccctacagggtgaaggtggtgccctaagagtagaagcggtgccctactagaaggaggggtgcctccacaggaagaggattctctaaaaaggaggagaggtgtcatgacaggaggaggggtgctctgtaacaggaggagagttgtcataaagggtgaaggtggtgccctaagaggaggaagtgtgccctaacagaaggaggggtgtcctaacatgaggaggaatgccttaccaggaggaggaatgccctaccaagatgaagggtgccctaacaggaggagtgagtactctaacagcaggagggtgtcctaacaggaggcagggtgcgttaacaggatgaggggtgccttaacaggagaagaggtgccttaacaggatgaggggttccccaacagaaggaagggtgccaaa

SEQ ID NO: 2704 - DNA, 972 bp, Artificial sequence
  DNA replication origin
gaaactgcagctgctaattaagaagagtagagctcgaggaagccgccagctgccagcctggtgctgcctctcctgcaagtgtgaagtgtggctgcatccagaagcactggtgagcagggctttgcttggcctgtggagtgtaagatgctggcccagaaggaacttcatgctctgtttttcctgggggttcgcctctgatcacatgcccagggcttacttctgcttggacgtctggcactgctgagggggtgggcacttgggggcacagggctcctggcacttgggtgggggctggcaaggctgcttggtctgttggggtggggggcagtactgctgaggtggagggcagcactgctggggtgggggacagcactgctggggaggggggcagcattgttgaggcggcgggcagcactgctggggtggggggcagcactgttgaggcggggggcagcactgctggggtggggggcagcgctgctggggtggggggcagcactgctgcgggggagcacactgcttctgcttctgctgagacattctgggctggacttgcaactggaaacagaaagacacagaaatgaggaacacttgagccatagagagaccctaagcccaggtgaaccccctgccacattcctgtcctgctctgcttttaccttgccctgatcccttcacagatttaagaggagtgtgtgtgtgtgtgtgcgcgcgcgcatgtgtaaactttaagtgtttacaagttatttcaactcttttcaagacaaagaaacatggaaggaaggaaagataggaaaggaggaagggagggaaaacagaaatgttaggaggggttgaaaagaaagaaaaacataaaaaaagaaaagggagagagaggaaaaaaaagaggaagaatgaaagagcagactgttgtatcctattatagcaaaacctgtggcatctggaataaattgcctgggatctgagttctgg

SEQ ID NO: 2705 - DNA, 927 bp, Artificial sequence
  DNA replication origin
acccttgctagagagattgtgtggttgtttggaggaacaaagacaccctggcttcttgagttgtcagagttcttgtgctgattctttcttatcttcatgtgcttatattccttcaatctttgaagttgctgacatttggatgggttttaatttcttttatctcatttgataaccttgaggttttgattgtggtataatgtcaattcagatgactggcttcatctctgaaagattttagggtcccaacattcagctcccaattcctggactgcatgccataactctgagtgaagtgtgtcaggcttgactttgttctttggctcctccaggttaggaatccactgtgctatggaggctgaggtgctccctgacccctgttcactacactctgatgggtggtgtcagtcaaagtgttttgcagtgtggtggcagtggggtccattcttgtttgtatgtgtcaagagcagtgtcagcatggcagggtgcatactattgggctgggggcagggttcttgcaggtgctagggtacctgcctctgtggggatgttcacgacagtggtgaaggcattgtggcttggggctgtagggggtccctgctggttactgtgtgtgctgtcacacttgtagtgttgttggtatatgggtagggtgctggtgggtgcgggtctgtgtcttttttctgtgtgctgcagttaagggtggttgtttggggtgcaggagtttccattgttttcattgcctggtttcactcccattgttggcatggggtatacactggcatgggcggtgcattggcagggatggggttggctggctatgtgactgcaatggctatcaccagggagaatggactgactgtactgtcactgcagcagtgacagggcaggatgcacactctcacatctactgatgagaagaggaaagca

SEQ ID NO: 2706 - DNA, 1727 bp, Artificial sequence
  DNA replication origin
taatggtggtggaggtggtagaggtgttggtggtggtggtgatggtagtagaagtggtggtggtgaaggtggtggatgatggtggtggtggtgataatggtggtggaggtggtagaggtgttggtggtggtggtgatggtagtagaagtggtggtggtgaaggtggtggatgatggtggtggtggtgataattgtagtggaggtggtagaggtgttggtggtggtggtgatggtggtagaagtggtggtggtgaaggtggtggatgatggtggtggtggtgataattgtagtggaggtggtagaggtgttggtggtggtggtgatggtggtagaagtggtggtggtgaaggtggtggatgatggtggtggtggtgataattgtagtggaggtggtagaggtgttggtggtggtggtgatggtggtagaagtggtggtggtgaaggtggtggatgatggtggtggtggtgataatggtggtggaggtggtagaggtgttggtggtggtggtgatggtggtagaagtggtggtggtgaaggtggtagatgatggtggtggtggtgataatggtggtggaggtggtagaggtgttggtggtggtggtgatggtggtagaaatggaggtggtggaggtagtggtgatgcaggtaatagaggtggtagtggtgatgatggaggcagtggaggtgatggcagtggtagtgctggtagtacatgttggtgaaggtggtgaaaggtgaggatagtggtggtggtgggtggtggtgggtgatggtggtggaggtgggtgatggtggtggtagtggaggtgatggtggtggaggtgggggtcgtggtggtggaggttatgaaggtagaggtggtggtagtggtggtggtggaggtggtggggtagctgtgggtgatagtggaagttatgatcatggtgatgggtgatggtggtagtggtagagatggtggcagtggtggtgttggtggtacctgatggtggtggtggtagaggtgaggctagtggtggtggaggtgggcgatggtggtggtagtgaaggtgatggtggtgcaggtggtggaggtggtggtgatggtgggtgatagtggtgttggtgaaggtggtggtgggtgacggtggtaaaggtggtagtattaatgacaatcagaatgagtgccagtgccatgacagtagtcgtggtgatggtgatgatgacactggtagtggtgatggtggtggaggtcacaaaggaataagaaaacaatctattttaaagaaaaacaaaccactgtgcctacaacacagcgcagcacgttgacatggcagtgatgacaatggtagtgatggtgcaaaaggtagtggatgtgatagtggtggtagcaatggagatgggggaggtggtgaaagtggcagcgacggtgggaataagtgaagatcaaagtggcagtccttgtgattgtgatggcgatggcgatactggtgaaggtgatgaagttggtgcagctggtggaggtggtggtggtgatggtggtaagagtgagcagaggcaacagtgttagtggtggggatggtggtgacgattacggggcagatgataacaataaagtgttaggcatttggcacagaactgaaagtaatggcaagatagacatggtgaccatggtgatgatgaaaacaggttggtgatgatgaaaacagaggtgtttagttcaagcaggtgaaaagacaaaagcagctc

SEQ ID NO: 2707 - DNA, 1071 bp, Artificial sequence
  DNA replication origin
gcagccggagccgcccccggaggagccgccgctagagacgcctccgtagctctggcactggaccgcctggcccgagaagccgccgccgccggaggagaagcagccggagccgcccccggaggagccgcccccaccgctggagaagcagccggagccgcccccggaggagccgccgccaccggaggagaagcagccggagccgcccccaccgctggagaaacagccagagcccccgccggaggagccgccgcctccggagtacttgacgctcccaccggagccccctccgcagcctccaatgccgcccccgcccccgccgccggaggagcccccgccgcagccgccgccagagtagccaccgccgccggagtagccgcagccagaaccgctgctaccgccccctgagccgccgccgccgaagaagccgcagccaccaccgccgctgccgccgccaccgccaccgccgccagaggtcttcacgcagtccactgggggctgaggggtgggctgctttttctgataagacatcttgtctgagaaggaaggagagcctggaaggggagaagagagcatcgctggaccagctgcaagaggatacttacggaggcagctgcatccataggcaacatcgccatcctcccagggctccttcaggtgcccggagagccctcagcggggtttcttatgattgctgcttttggaaaagttgagttcctcattcccctgcagaaagccttcattatgctttaaacagcccagttagcagtgcccattctttctcccagctctgcctctgaccactgttgtgtgatttgagggcagatcacccacacgcccgcctctttctcatttcctgttaaatgaaagggtttgaacacttcatctttcaggcctcttccaatctcaacactgattctctgagtgcaaatagaaaactaccacaaacctctacctaggataggagattttacccattcccagcacaacagagagaggtttgtcggacttcattctattgagggctgttgcactccatcctctgcagaagctcttagttcaaactcttggtct

SEQ ID NO: 2708 - DNA, 1125 bp, Artificial sequence
  DNA replication origin
gctgcttctccagcggtgggggcggctcctccgggggcggctccggctgcttctcctccggcggcggcggcttctcgggccaggcggtccagtgccagagctacggaggcgtctctagcggcggctcctccgggggcggctccggctgcttctccagcggcgggggcggcggctctgtctgcggctactctggcggcggctctggctgcggcggaggctcctctggcggcagcggctccggctacgtctcctcgcagcaggtcactcagacctcgtgcgcgccccagccgagttacggaggggggtcgtccggcggcggcggcagcggcggaagcggctgcttctccagcggcgggggcggcgggagctccggctgcggcggcggctcctccgggattggcagcggctgcatcatcagtggcgggggctccgtctgcggaggtggttcctctggaggcggcggcggcggctcctccgtgggtggctccgggagtggcaagggcgtcccgatctgccaccagacccagcagaagcaggcgcctacctggccgtccaaatagatcccccagggtaccacggaggcgaaggagttggaggtgttttccaggggcaccgatgggcttagagctctcatgatgctacccgaggtttgcaaatccttcatgtcttaacctacctggaagaagccattgagctctccggctgcatctagttctgctgtttagcctctttggtttctgtacaactacctcccaaccccagtgcctcagtcaataaatttgcaaattcatgagaatttttaggtctccaagagtatttgtagtgttcaagttcatccattccattccattcttctcctttcctgcattcgctcattcacacttacattcattttacaaatgcacggactctattggcggaaaggtgagtggatagatgggagtcaccaggagagggaggaatggctggcaaacgaaggtcaaacatatgaacattctagtgtacggcttaaaatcatgacgtgatcccaaaacacaaagatcctgaggagagacttcagtaaacacctccctgtggattgagtagctactgtgggtctccttactgaactctgttttttaaaga

SEQ ID NO: 2709 - DNA, 1064 bp, Artificial sequence
  DNA replication origin
ccaaacactgctgaggaactgaggatagagatgaataaaatagaattcctcccttggagaaacttacaacccagaggagaggacagacatatctataaatcatatctataaataattacagcccttaagtaagggctgcatccaaatatgtaccagtccatgtgtgagcagagagggggggtgggcacactgacctaggtcatgggtgagggatgaagggtgggggcttccaggcagaaaacagggaaggctcaccaggcagaggcggggagagggggagagagagagagagagagagagagtgagaaagcaagaaagaaggtgaaaggaaggaaggaaggaaggaaggaaggaaggaaggaaggaaggaaggaaggaaagaaagaaaaagaaagaaagaaagaaagaagaaagaaagaaagaaagaaagagaaaggaagcaaagaaagaaagaagaggagacaggggttggggggagagagagagaaatgccacaaggaccagcccattgtctcgcctgactgaggaggtaagtgcccaggggagaggtaggtaaaagagaggggaagtctaaactcagaccaagagggctgtgaatgcccagctgtgaggtttgggggctcctggaggatgttggcaggaaaggacatgaccattcaaacctgagaaaggatgggctggcaggggagggggacacaaggtgctgagccaccttggctggtgagggttggagagacccagcaggggagggagggcagtctcaaagggagtggggcctccttcagtgcttgaaatgaggccaggtgctgatgatgttatacaaagcctgcccaggggacaggatgttgaccacgtcactgtggcccatcagcaggtagtttggagtcaggtacccctcaaccacggcacactggatcaggtcctgggccgcctccagcgctgcagcatttggaggcttttctgcaaaacacattttccccatcagtcattaggggctcaaagtttcttgattagggaagggacaagcacctagattccagtttctttcttcctccaccacgccc

SEQ ID NO: 2710 - DNA, 943 bp, Artificial sequence
  DNA replication origin
cggtggctcaagcctgtaatcccagcactttgggaggctcaggggggcggaacacgaggtcagcagtttgagaccagcctgaccaacatggtgaaaccctgtctctactaaaaatacaaaaattagctaggcgtggtggcacgcacctgtaatcccagctactggggaagctgagacaggagaattgcttgaacccgggaggcagaggttgcagtgagctgagatcgtgccacggcactccagcctgaaaaagagaaagaaagaggagagagagagagagagagggagggagggagggagggagggggagggagggagggagggggagagagagagagggagggagggagggagagagagagagagagagaagagagagagagagagaaaaagaaagaaagaaagtttattttgccaagattgaggacacagcctcaggaggcacccgtgacacagcctcatgacaggtcctgatgacatgtgcccaaggtggtcagggcacagcttggttttaaacattttagggagacatgcgacatcaatcaatatatttaaaatgaacattggttaggtccggaaaggtgggacagcttgaagcaagaagggggcggggcttccaggtcacaggtagatgagagacaaaggttgcattcttttgagtttctgattagcctctccaaaggaggcaatcagatatgcatttatctcagtgagcagaggggtgactttgagtagaatgggaggcaggtttgccctgagcagttcctagcttgattcttccttttagcttagtgatctgggtccaagatatattcctctcactgaaaaaaccacacatataatagttaaagtgagtgtccaagccaaaagagtctaggaagaggccccagagccctggccataggcatgccccttactctgttagctaaataacatccctggg

SEQ ID NO: 2711 - DNA, 1049 bp, Artificial sequence
  DNA replication origin
gctgcactccatttctcgccgtgtctcgccgcgcggcagggctcgggacctgcagcccgccatgcctgagcctcccacccgctccgtgggctcctgtgcggccgagcctctccgacgagcgccaccccctgctccacggcgcccagtcccattgaccacccaagggctgaggagtgcgggcgcaaggcgcgagactggcaggcagctccacctgcagccctggtgcaggatccactgggtgaagccagctgggctcctgagtctggtggggaggtggagaacctttatgagtagctcagggattgtaaatacaccaatcagcaccctgtgtctagctcagggtttgtgaatgcaccaatcgacactctgtatctagctactctggtggggccttggagaacctttgtgtggacactctgtatctagctaatctggtggggacgtggagaacctttgtgtctagctcagggattgtaaatgcaccaatcagcaccctgtcaaaacagaccactcccgtctaccaatcagcaggatgtgggtggggccagataagagaataaaagcaggctgccctagccagcagtggcaacctgctcgggtctccttccacaccgtggaagctttgttctttcgctctttacaataaatcttgctgctgctcactctttgggtccacactgtctttatgagctgtaacactcactgcgaaggtctgcagcttcactcctgaagccagtgagaccaggaacccaccagggaggaggaacagaactccagatgccccgcattaagagctgtaacactcaccacgaaggtctgcagtttcactcctgaggcaacaagaccacgaaccccaccaaaaggaagaaactctgagaacacatccgaacatcagaaggaacaaactccagacatgccgcctttaaggactgtaacactcaccgcgagggtctgcggcttcattcttgaaggcagtgagaccaagaacccaccaattccagacacaatagcctcccaggctgggtgcagtggctcacagtctgtaatcc

SEQ ID NO: 2712 - DNA, 684 bp, Artificial sequence
  DNA replication origin
cagagagacaaatggctcaccaaggttgcacagctggcgacaggcagagaggatcccacaagtttttcttctgggtgcagcttcctcgagttcagggcaggaggcagggtgagggcagtggtggtgaggctgtgggggcgcctctcagacctgcccctccctgctaaggcctagcttctccaagggctgagggcagagaagcacagggccaggctctccttgtgcaagttcctgcagggagggaggcttctagggcatctcatgggctggggcagactgggaccgagccatccctgggtgttggggataagaagaggtggcagataatctgagagtgcttaaggagccccacggtggggtgtgtgggtggtggggtaggatgctgtctctctgaggagtttacagcgatgttggggcaatgagacctctacatggggaaataacaacaggacagcagggggataaattaggaggggctggtgtggtctgggagggctactcagaggagggggagactgcggggcctgaagcctgatggaggttaagatgggtctgggaacagtctctgagaaacacagagggcagaggtgagctggggggctggcctggaactctgctgtgagccacacccttgttctgtgacagtgaggatggccaggcctctggagcaggcggtagctgcca

SEQ ID NO: 2713 - DNA, 1013 bp, Artificial sequence
  DNA replication origin
cacatttcccccttttctattcgacaaaaccgtcatcgtcatcatggcccgttctcaatgagctgttgggaacacctcccagacggggtggcggccggggagagggactcctcacttcccagaaggggcggccgggcagaggcgccccccacctcccggacgggacggctggccggccgggggctgaccccccacctccctcccagacggggcggcttgacgggcgggggctgccccctcacctcctggacgggacggctgccgggcggagacgctcctcacttcccagacggggcggctgccgggtggaggggctcctcacttctcagacggggcggctgctgggcggaggggctcctcacttctcagatagggtggccgggcagagacgctcctcacctcccagacggggtcgcggccgggcagaggtgctcctcacatcccaaacggggcggtggggcagtggcgctccccacatctcagatgatgggcggccgggcagagacgctcctcacttcctagacgggatggcggccgggaagaggcgctcctcacttcccagactgggcagccaggcagaggggctcctcacgtcccagatgatgagcagccaggcagagacgctcctcacttcccagacagggtggcggccgggcagaggctgcaatctcggcactttgggaggccaaggcaggcggctgggaggtggaggttgtagcgagccgagatcatgccactgcactccagcctgggcaacattgagcactgagtgaatgagactccatctgcaatcccagcaccttgggaggccgaggctggcagatcacttctggttaggagctggagaccagcccggccaacacagcgaaaccccgtctccaccaaaaaaatacgaaaaccagtcaggcgtggcggcgcgcgcctgcaatcgcaggcactgggcaggttgaggcaggagaatcaggcagggaggttgcagtgagcagagatggcggcagtacagtccagcttcg

SEQ ID NO: 2714 - DNA, 844 bp, Artificial sequence
  DNA replication origin
agtgaggagcgtctctgcccggccgcccatcatctgagatgtggggagcgccactgccccaccgccccgtttgggatgtgaggagcacctctgcccggccgcgaccccgtctgggaggtgaggagcgtctctgcccggccaccctatctgagaagtgaggagcccctccgcccagcagccgccccgtctgagaagtgaggagcccctccacccggcagccgccccgtctgggaagtgaggagcgtctccgcccggcagccgtcccgtccaggaggtgagggggcagcccccgcccgtcaagccgccccgtctgggagggaggtggggggtcagcccccggccggccagccgtcccgtccgggaggtggggggcgcctctgcccggccgccccttctgggaagtgaggagtccctctccccggccgccaccccgtctgggaggtgttcccaacagctcattgagaacgggccatgatgacgatgacggttttgtcgaatagaaaagggggaaatgtggggaaaagatagagaaatcagattgttgctgtgtctgtgtagaaagaagtagacataggagactccattttgttctgtactaagaaaaattcttctgccttgggatgctgttgatctatgaccttacaccccaacccggtgctctctgaaacatgtgctgtgtcagctcaggattaaatggattaagggcggcgcaagatgtgctttgttaaacagatgcttgaaggcagcatgctcgttaagagtcatcaccactccctaatctcaagtaccgagggacacaaacactgcggaaggccgcagggtcctctgcctaggaaaaccagag

SEQ ID NO: 2715 - DNA, 845 bp, Artificial sequence
  DNA replication origin
agtgagtaactctcatccttcagtctcagatgaaagccctcctccttagcaagcccctttcctgactgtacccaggtgggtgtgtggggccccccatggttctccatcatcacacctatttgtattaatagcacttactactacttgtaattatatattttccccctttcttctcccagttgattatatgctccgccagggcaggaaatatgtctgttttattcaccaatctctctgcaggctctatctagtccaatgtcagctcttaataaccatttgtcaagtacattaatagagaatgaattacagagttttatccttgagagcggtgttgaagagtttaaacgatgtggtggtctgtggagagacccaaaaggtttttgagcaagtgagtgacagaacaaagagctataatcacaatggatgaagaagggagagactggagtccaaggagaagctagccaggaggttgccaggaggttgctgtcccaggacaggctggctggcgtgaggcagtagctctggggacagagagaacgggtcagccaggcgagcttccaaggaaaacccagcagcacttggtgtgtgctcagtggctgcttggctggatctgggtttctacagagcaagacagagatgatacatgttggggcttggatgatgggatggagctggggtacgggggagcagtgagctcacaggcagagcctggggttggaagggcggagctggtggagtggagattcaaacgccttttaggagctgtgtaaaccgaggggtgtggccgggcgtggtggtgagtgcctatagtcttagctattgtgggtgggtggaggactgggggg

SEQ ID NO: 2716 - DNA, 1231 bp, Artificial sequence
  DNA replication origin
agatcaacaggatcccaaggcagaagaatttttcttagtacagaacaaaatgaaaagtctcccatgtctactttctacacagacacggcaaccatccgatttctcaatcttttccccacctttccgccctttctattccacaaaaccgccattgtcatcatggccggttctcaatgagctgttgggtagacctcccagacagggtggtggccgggcagaggggctcctcacttcccagtagaggcggccgggcagaggcacccctcacctcccggacggggcggctggccgggcggggggctgaccccccccacctccctcccggacggggcagctggccgggcagaggggctcctcacttcccagtaggggcggttgggcagaggcgccccgcacctcccggacggggcggctggccgggcggagggctgacccccccacctccctcccggacgggggtggctgccgggtggagacgctcctcacttcccagacggggtggctgacggagggaggggctcctcacttctcagacggggtggctgccgggcggagggactcctcacttctcagacggggcggttgccaggcagagggtctcctcacttctcagacggggtcgcggccgggcagaggcgcttatcacatcccagacggggcggcggggcagaggcgcttcccacatctcagacgatgggcggccgggcagagacgctcctcatttcctagatgggatggcggccgggcagagacgctcctcactttccagactgggcagccaggcagaggggctcctcacatcccagacgatgggcagccaggcagagacgctcctcacttcccagacggggtggcggccgggcagaggctgcaatctcggctctttgggaggccaaggcaggcggctgggaggtggttgtagcgagccgagatcacgccactgcattccagcctgggcaccattgagcactgagtgaacgagactccgtctgcaatcccggcgcctcgggaggccgaggctggcggatcactcgcggttaggagctggagaccagcccggccaacacagcgaaaccccgtctccaccaaaaaaatacaaaaaccagtcaggcgtggcggcgcgcgcctgcaatcgcaggcactcggcaggctgaggcaggagaatcaggcagggaggttgcagtgagccgagatggcagcagtacagtccagcttcggcttggcatcagag

SEQ ID NO: 2717 - DNA, 965 bp, Artificial sequence
  DNA replication origin
tgtgggaagcgcctctgccccgccgccccgtctgggatgtgataagcgcctctgcccggccgcgaccccgtctgagaagtgaggagaccctctgcctggcaaccgccccgtctgagaagtgaggagtccctccgcccggcagccaccccgtctgagaagtgaggagcccctccctccgtcagccaccccgtctgggaagtgaggagcgtctccacccggcagccacccccgtccgggagggaggtgggggggtcagccctccgcccggccagccgccccgtccgggaggtgcggggcgcctctgcccaaccgcccctactgggaagtgaggagcccctctgcccggccagctgccccgtccgggagggaggtggggggggtcagccccccgcccggccagccgccccgtccgggaggtgaggggtgcctctgcccggccgcctctactgggaagtgaggagcccctctgcccggccaccaccctgtctgggaggtctacccaacagctcattgagaaccggccatgatgacaatggcggttttgtggaatagaaagggcggaaaggtggggaaaagattgagaaatcggatggttgccgtgtctgtgtagaaagtagacatgggagacttttcattttgttctgtactaagaaaaattcttctgccttgggatcctgttgatctgtgaccttacccccaaccctgtgctctctgaaacatgtgctgtgtccactcagggttaaatggattaagggcggtgcaagatgtgctttgttaaacagatgcttgaaggcagcatgctcattaagagtcaacaccactccctaatcttaagtacccagggacacaaacactgcagaaggccgcagggtcctctgcctaggaaaaccagagacctttgttcacttgtttatctgctgaccttacctccactattgtcctatggccctgccaaatccccctct

SEQ ID NO: 2718 - DNA, 1354 bp, Artificial sequence
  DNA replication origin
ggacaaatgagtaaatgaaaaagggaatgaatgaatgaatgtgcaagagagtgaatgcattattgaatgagcaagtgaatgaatgagagtgaatgaatgagccaataaatgaatgagtaagcaaactcatggtgcctaagtgagcaaatgaattccaggtagatggaagggacacagagaatccatacttaggcttgacagtgggctaggctctggagagaacagtgaccaggagggacaggagtctagggacacatcccaacacttggaaaaaacttaagactccagaggtgtctgtggggtgagaagagaaggtggacttaggacggtgtggtggatgtttggagctccagacggaaggagcctggggatgctaggggtggttaggaggcatttggagggcgtggagcccagaacctgggggtgggagggtggggctggagtggctgggatccaggggcatggagtcagggcaatttgggcttttggagaagtcagcaagctgggctgaggtgggtggggtgggggtgggagactgcttgttgctcaatgatgaatcagccaaggggaagacaatgagaacattggggtagggctggaggcctgaggtgagagggcccattggaggacacgtggtcctcccattcccacatttctggaaggctcctgtgtacactgtccactcaggccaggatctacctgtggcagggccaatgcaggaacgacctcctgcttgacctttctaggaagcggctgatgggatagaacatctgcccgacccctgaaccaggagacccggggcctggctggtgggggaatggggcaggcgggaggagcaggtggcttgtggggtgggtggggtggcagatcctgtctcctggcctccaggggagggaggcagaggaggataacgatccctgcctgcctgctaccctatccttccttcagaaaaagctccagaaaagcacttgtcagatggttatctccagcactgtccattttaccgaaggtggggagcgggtggattcctgggaggaggggctgggagctgaagccctgaggcactggagctcccgctctgggtctcccagtactcctgggagcaggtggcagagtcatctctggggctcatctgtgtcttggccacttggctgctgccagaggccaagcaggggttgagtcatggtattgaggaaggccaggaggagacagctcagagaaatgactccaaggaggcaggtggtgggagaggtgggctagcttgtggggagagtggcagagggaggtgcaccacccatttccttccctcttcctctccctgaccgtttcccacaagatccctcatttagggaac

SEQ ID NO: 2719 - DNA, 968 bp, Artificial sequence
  DNA replication origin
aagcagggttttggggtgcatggagcttcactgatgtttgtgatgtcccctgccctcaggatgctcaggaattcagtgatgtggagagggccattgagaccctcatcaagaactttcaccagtactccgtggagggtgggaaggagacgctgaccccttctgagctacgggacctggtcacccagcagctgccccatctcatgccggtatggacggagcacaccccacctcagccagtaccctgacttcccaagcaagtgctccgggaccccacccacactggcacttgcaacccccagctcttcccccttgccagtgctaggtagcctctgctcctgctgtctgcccgtgggcagggtggggtgggaagattggaaggtgctgcatccctgagccatggtttcttcactcccctcagagcaactgtggcctggaagagaaaattgccaacctgggcagctgcaatgactctaaactggagttcaggagtttctgggagctgattggagaagcggccaagagtgtgaagctggagaggcctgtccgggggcactgagaactccctctggaattcttggggggtgttggggagagactgtgggcctggagataaaacttgtctcctctaccaccaccctgtaccctagcctgcacctgtcctcatctctgcaaagttcagcttccttccccaggtctctgtgcactctgtcttggatgctctggggagctcatgggtggaggagtctccaccagagggaggctcaggggactggttgggccagggatgaatatttgagggataaaaattgtgtaagagccaaagaattggtagtagggggagaacagagaggagctgggctatgggaaatgatttgaataatggagctgggaatatggctggatatctggtactaaaaaagggtctttaagaacctacttcctaatctcttccccaatccaaaccatag

SEQ ID NO: 2720 - DNA, 778 bp, Artificial sequence
  DNA replication origin
acctctgcgcaggcgtagctcaaatctttcccgccctctagtcgtgcgcggatctgacgcctgacgtaattgcgtagacgccattttagccggtcagacaagcactggacgtggcggccattttgttttggacaccgagcaggagctggcggccgctgcagacgaaaggcaggaaagggcaggccgggtgagcagacggatcggccgactagacagccaaccagcaacaacgaactgagctcgcatactaccgcttacgcatctaaccaaccgcccatctagctaacccgagcccctccaccgtcaactcaggttcggccggtccccggcccgcctgccggagccgtggtggcagccccgggaggagcactggcgtctgtttccttcggtgagtttcggtagtgagaaggagccgggggaggtgcggtcttgaggagcggaaggggccggcggacgcggaaagggggtggtggcatgtggacatagctacggtgttggagcgtggaggccccggggaggaggcggagcccctgcgaaggggcgggggaggggctgaactggaacctggtggcgggattgatggaggttggggtttgataggataaaaaggaaacttggcgggtagagcagaagtggaagtcttgacagggctttgaggatggtagggagattaagaagtacaagactttgaggaatgttggaaattaatggcggctttagggttaagttttgtggagggctctttgcgagctaattcccaggtgaatttagaaaacct

SEQ ID NO: 2721 - DNA, 1352 bp, Artificial sequence
  DNA replication origin
ccgaggggggcgcgcagggcgccgcggagcaggtgggtgccaggagaacgtcgggctggagaggacccgagtgtgaacaactgggagtgtgcgtgcgtgttagagagagagagagagagagagaaagggtgcgagtgagcgcttcgtgaagaaggatgagagagggcgcgcgagggaggaaagaggagtgtgtgtttgtagcgtgcgtgagcgcctgccccagggagtgtgccagaaggggcgtccggccggcccaagtctccggctatccggagggaaccgtggaggacccgagccaagctccgaaccctccctcccagccgcttcccctcccagactcagtgacagaagagccaatccaggatctttaactccttcctccccgccgcccagcccgcgcgcttccccgtggaccatcttccccggtctcggccgccccacgcctacctctttggaggacaggaccctctgaaggtgcgccctcgccgggatggaaaggacggctgaacggagggtgtgtgtggaagcaaccggggcccacttgcgccccaccttttccctcgcctcctacctggtctcctcgggggaagagggaaaggtgtgctggtttgggatcctggcaggaaactgagtgagtgcgtggatgtgtgtgtttgggtgtggggtggaaggtgacgggtttctggaaagtccgttaaagttgaaggtgagcccagagtgcttgttacccattccttctatgatctccctctctttccctccctgccaccttccagactgtgcagattagctgtgaaaaaatgatctggtgtcagagaggaattaaatctttagcgcccaaattgtaggaagatggggagagtgggtgggtgtctgggagggaggaggttcacacctcagggacgccccaagaaaatgactgttttgtgttgagggttgttaaaatgaaggctgtgggagatgaccactggaggcgtaaattggggagtgggttttggagcacttgacagctgggcccccggtgcagactgctgtggaatcagtgtgccctctaatggtcatcgggggttattgacggcattgcagcgccaacctctccaacgctgcgcctaagcaggacataagatcaccaaacttcaggtcagcaaacatttccagagaaccttcggtgcattaagcacccactaggtgccgagggcataaagatgaatatatatagtccgtgcctttgaggagctccatttgggacaaataaccgtaatgcaacatgcattaagcactacaggggagacatggataaattgctaaaggactcagatgagggctattcattctgcttggattggggccag

SEQ ID NO: 2722 - DNA, 878 bp, Artificial sequence
  DNA replication origin
cagacgcccagcgcgttttcgctgctgcccagcaccgtgcggaccgtccagcccggcagcaagtcggggcgcgccttcacctgggccagggccagctccacggcgggtcccacgcgcgcccacgaccaggggtacgaggtattggccagcggcagtaccacggctaccgtcaggttgcccgcgtggctgccccggagcagcagcagcagcggcggcagcagcaggagcaggagcaggcgcaggcgggagccagcggggcgccggggccccggcatggcctcagcgggcaccgcagcaggcgagcgctcctaccatggcctcctcggtccccttgggctcagcggccggtcccaggcatcaggcgcgtccctatgggaaggagcaggagcgggacggggacgctcaccccggggctcgaggccccctgtagctgcgacggtctgggccgagagcgcaaggggcgcgaccgaggggggcgcgcagggcgccgcggagcaggtgggtgccaggagaacgtcgggctggagaggacccgagtgtgaacaactgggagtgtgcgtgcgtgttagagagagagagagagagagagaaagggtgcgagtgagcgcttcgtgaagaaggatgagagagggcgcgcgagggaggaaagaggagtgtgtgtttgtagcgtgcgtgagcgcctgccccagggagtgtgccagaaggggcgtccggccggcccaagtctccggctatccggagggaaccgtggaggacccgagccaagctccgaaccctccctcccagccgcttcccctcccagactcagtgacagaagagccaatccaggatctttaactccttcctccccgccgcccagcccgcgcgcttccccgtgg

SEQ ID NO: 2723 - DNA, 1451 bp, Artificial sequence
  DNA replication origin
cgtctctgcttagctcaaggtcaaactggaccctatgccctgcatgaagtgatgcccattccaaagcaggggatccaatgggatgccttctccaagtcctgtccaggctgtgggactttatcctcctcccgcctcaagcccattttcttatctttttagcctgctggtggcgaagcgcccctgggcagtcccctgcccttcattgcctaattcccagtgagcatcaccaacctcttttctgttctgtgagttaccaggagtgcataaagaaacaaacagacaaaaacctcttttctggaattctttcagacgctgagggacacagtgcccagaaatgatgtgccacaagctgagacagcctgggcttcaaacctaggtactcacctgaaaggcctggcgggcactgacatcctgcccatcccctctctcccagggcctgcggggagcagggccctgtccaccttgcaggctttgcccaaagatatccaggtggaagaaaacgtagtcctccccacacaagccagcttccagggccaggagcatgagggttctgaaggcatcaggggagctgcagatgtagataactggagaaagacggagagtcagagagagaagcctaggtactgcgggagagacaggagtaggaaagctggggcacccaagggaggaagtttagagatagggtgcaggagagacccagtgagagttaagtggtaactcccggctcagcctaggccacagcaggagaaagtcgaagggtggaacgggcgggtgcggggcggtgggcgggaggaggaagggggaggcggaagggaggaaggaacgggtagggagagggggatagtggagctgaaggtggagaaggatggggccaggagggagagaggagggagagggagggggagaagagaggggatgaggcgcaatgagaggagaggatgaaagaagggagaaggctatagggaagagagaaaatgtgggagggaaaaagggaccggaaccgagctgtgctagggtgggagggaatgagtgggggtcggggagatgagaggatagagacgtggtgggggtggcggaagaagagagggaaatagaaactcagctgtagaaagggccagggagctgaaagtagaatgaagaacggcgaggagaaagaagagtgcccccagatgagagagaaagtcccgatgcctccggcaggtcagaggggaggccctgcggctaagcggcgggacggggtgtgccagcgtctcacctcggcctttgcgcggcatggtccgcagcagcctggtgtagtggctgaggtcgtcctcggcgaactccaggtggtccaccgtaatattgaggcggtcgcggacccgcatgaacagcccctccacgaggaagaagcagtgctcttcgtcacccggccggtaggcgtagagcatgagcgcttggcgctcccagcccag

SEQ ID NO: 2724 - DNA, 828 bp, Artificial sequence
  DNA replication origin
acacaatgatactacatctcaaaaaaaaacccaacaacaaaaaggaagggtgacacaaagataaggcaggataaggcagggaaataaagaccagagcacaagcaatcaggatgcagactgggcccaccggctgaccattcctcctgctctccctcctttcagagaggctccaattacggctccctgctaaccacagagggccagttccaagtctttgccaagacagcatattataaggtgggcctggggaaagatcactgggccttgggactggggcaggagtgtactctgatggaggactggtggggggttctgagggaaggagtaagctggtggggagcagcagatgggggccctgggggtgggctattgggaacaagtgagggtcctgagggcagggatgggctgtcgggagcagctggaattcccaggacatgggaccatgctcttcacagtgacagtctccattccatgcccagggcaacctcgtggctgtgaaacgtgtgaaccgtaaacgcattgagctgacacgaaaagtcctgtttgaactgaagcatgtaatgtggggagtgaggcagtggcatggagaaggggccctcggggacgcaagggagactggccaacagaactagttatggagggacctcagggtaccccaagaaaggggcagggactggagccctgggatggaccttcatcttgtgggtgggagtgggggtatcctaagctaggagaagagaccactggagataacctggaggaatcttgaggggccatatgtgatgtccctgggggagagagggcttaggatgcagagggagtaggagc

SEQ ID NO: 2725 - DNA, 1170 bp, Artificial sequence
  DNA replication origin
acccacaatgtcactgaagtagatggtaacactgtcaaaggcttcggcctgcaccgtctccccacgcttcagctgctcagccactgagctaaggggtcagggcaggtgcaggatcagagttgggggtcgggacaggggctttgtgttggggggggtccccagactcaggcactcactgaggcaggatctggtagagcagggcctcagccttgcgcttctcctccaggtatgcctgggtccgctcctccaccagttcctccagattgttcgcgtactgctccatgcgggacagcaggttgtccaggatgttgctgctgttctccctgggggcagagggtggcggtgggggtggtaagagaggagcagcacagcctaccgtgagcgcccgcccctaggcacttccccctccagactgcagtgaggtctctagagacgctcagggttgagggcatagcaggataccggggagcaggggaaaacagaaggaagaaagttcaattcttttctgagaccccaaggtcaagtatgaagcttcagacatatggacattttgttcatctttgttgaacccagtgagttagaaggaggtaaaggaggtggagaatgacaagggtcaattgcggacaaagtgatgtccacagaagggtgtgtctggaggaactgggcctggtgggcacgctggggaagggaaatcaaggggtggggcaggagctcccgtggagggccaagagcctacagggcaggaggcgggaggcccatctatcctacacactgctgagaagtctagaggccagcaaggcgagtgggcaggaagggtgtggggtgtcgatggtggagggaaggggcatgaatggcaggggactgtggggacagctgagtcatgctgtacttgcgaagagggtcatgaggctgtgctgagctggagctgactatgtacagggaggaggtgagtggtctccctctgccactgctgggataagccagagccagaagcattaggtaaatggtggctgtggaggaagggcctgggggatccatgacaaacaccagggacctgttaaatttgcgcaacgtcaggcggatctgctggaatggtggcctctcctgtgggtcctcagcccagcaccgctgcatgagcagccccaactcctccaggtgactctgcagggc

SEQ ID NO: 2726 - DNA, 1043 bp, Artificial sequence
  DNA replication origin
cccctccccaacttgttcctcttgccccccagtccctggcaatccagagatcccgatatctaggactgtccatccatccactccctgaccttttcccggctcctggctgcagccatggagttgcagaagggaaaaggggcggcagcagcagcagctgcttcgggagcagcgggaggtggaggaggaggagcgggagcaggagccccaggaggggggaggctgctactttcaaccagtttggatgccaaggatgagttagaggaggtaggtgtggggggagggaagggagttaagaaattgggttttggagggatactggagcggataccgggtgggaggacggggggtgggggcgggggtggaggctttcaagttttttgtgaagtaacacaaacactgctccagcttcctgctcctgagggaagaaatgtgggccaacttcctggacaggttgtcatagtaacagcagccactagtatgaaaatgggtggggggtgttggtgaaggaagggatacaacatccaggtttaccgaatttatttttgacattcctttcgacatacacaccccagctatttttactatcaaccctgtttcagacttaggtcaatatattgagttgagatgtaatgtatgtctgtgtagatgtttgggggctggtaagagctggcagtagaccttggaccctcctgttagatgctatcattgacttcgtgtagacacaaccaattgccagtgatgttaactgggcatctagaatgagtgaagacttaagaaaagtgagtagtgtttagtttggtggcatcagccactgtagtggggtgaatggtacctaggggattctccttcagaaccagatagcacacacacaggagagaacacatcgcttctgaaaaagaaggtggagcgaagaaatggaatggacctgaatgaggacttcaggggacctgatagttgcccctcctgtcctcttacccagctttctcattctgccatctcagagttgatcacgtatacctttccactcctacaaacgagaatat

SEQ ID NO: 2727 - DNA, 1320 bp, Artificial sequence
  DNA replication origin
gaagccagcgcaactgcggccagaggtgtagcttcagcagcagcagcggtagcaacagcagcaggggcagcagcaggagggcagccatggagcccgcttcctctatcggcaccgtctggttccagccgctcgcaaacatccctgatcctcccttccgaaaacctagggccgctcgttctagctgagacttctccttccagggagcgcgcgtgcgctggcacacgcccattcccacccaggcccccaccactccacacgggcggagagcagaaacccgggaggagtgcgggtgtggggcggccccggactcccagccctccccccacagcctacgctccgccctaggcgcgctccctcccggactgctcgcggctcgcaccctaccaggtcctgggcggtgctcgcgccttccctgaatcccagggttatgtctgtcttctaagttgtttctcggcttgggcggtttaggcatctggctaagccctagagtccaggcctgagagccagggcgtttggatcgcagtccatcttcccctcaatatttctcgttttcccgttaagggaaggtaccattgctctctcccaaaagaatgaacttggcccctggcccatttggttctgcaagtcccggcctgccagccgcaaccccaggggatgggtgggggctgagagttaaataggggaaaggtggaaacccagactgccagatttctgaggggtcacgacagaggcccctccctttgggcaagggtacaataattggggccagccagcaaatgctctccatcctggttttaattgggacagaggaaactggggaaggagagaggaaggaaaaagaagcctccagtggtttagactttcaaaggaagcaacagcagtgatgagggaggggagaacctggattctgtaaaaagacaaattttcggggtgaagaggagcagctctgtgcagttcgcccaaacttcactcctcagtccacctccattctccctggacagcgggggaacaacagcatagccaaggaactctcctctgctggttcacatggcccagcaagtggccacactgtggaaggaagagcatctctgtccctccctggtatccagactttatctccaggtacagttgtccctggagaccaagctggagcatccctcccgtcaagcagcgagtcctccggccattcttggtaggcacacagacttcaactggaggatgacagaccttttggaagcatcttgtttcttgagaaatgagtaaggacaggcctcatcctacgggggatggttctgcatagacagatcagtgcctggctcc

SEQ ID NO: 2728 - DNA, 1498 bp, Artificial sequence
  DNA replication origin
ccccagccatcactgtagtctttccctgggaagggcccactgtgggagtcacaccgtcaggaagccgtgctggccctctttcccctcccccggcccctgtccccagccttagaagaggtgaatgccctttccctacttcccagccccaaagatctcatcctccacactctcacttccttgtctctctctccctcttctcttacttgcctgttcctggactgacacagtccttccctgcctttgaccctgcagcctggagttatgtggctgtatggcccccctcaccgttcctcagtctgtaggtctaggcaggtgacattgccctattgtacagagctcctggtgagtagggctctgccccatccgtcctctagattatctaccctggaggactcacaccatagtacgtgcttaataaatgtctactggatgaattaatgaaggtggggttggggagactgaccaatgcccatgcagcccacgatgcccagcagggaaccggacatgtggtagagtgggagggcgaggtagatcacatcttcctggtggacaccacacagctgatagaagccctggcattgcaggatcttcagatgactgatccgagcagccttggggaggcctgtggggtggcagttatgggacgatcaggggaagggcaaactccaagctctacctatctgtttgcacccccgctgggtttcccacagaaagaggcggaggcaggacagaagctgaggaccgagaccaggctgtcctggaaatatgggtggtctgggggaggtggagaaatgagtaggaggtgaggagactggggagtgaaatgatggggagaaaaaggatgtgccaatgaaatcagcatcctctctgggggctttgaaggagtggtctgggagcagacccctgccttcctctgccttggtttcggggagctaagtatggtgcccggccctcacccgtggtgccagaggtgaagatgtacaggcacgtgtctgttatgctctggggggaagagaggtatcctggcactggcccatccacttcagcggacacttcagccagcaaatcgctaattccagcagggtgggttcctgggcctgcagcccacaggtggagccccatggctctcagggcgggcaggtccggctccagggactccagaaactctagaagggtgggaaagcacaacgccggggccctggctctacctagaagagcctatgacccatgtcccctccctatcccagcccacactgctcttggatgagggtgaagggtatggacattccatcttgggtctgaggcctggaactcgactccttggggatccttggggcaccaaagattcagcctcatcccttctcaaacccggagactcctatctccacccactttcgaaccccaagggatagtcggcttcttcccaggcccagggatgagaccaagcctttctgtggtctccgacacgcccccttctgtggctggccccgccttagtc

SEQ ID NO: 2729 - DNA, 1229 bp, Artificial sequence
  DNA replication origin
ctcacctcctactcatttctccacctcccccagaccacccatatttccaggacagcctggtctcggtcctcagcttctgtcctgcctccgcctctttctgtgggaaacccagcgggggtgcaaacagataggtagagcttggagtttgcccttcccctgatcgtcccataactgccaccccacaggcctccccaaggctgctcggatcagtcatctgaagatcctgcaatgccagggcttctatcagctgtgtggtgtccaccaggaagatgtgatctacctcgccctcccactctaccacatgtccggttccctgctgggcatcgtgggctgcatgggcattggtcagtctccccaaccccaccttcattaattcatccagtagacatttattaagcacgtactatggtgtgagtcctccagggtagataatctagaggacggatggggcagagccctactcaccaggagctctgtacaatagggcaatgtcacctgcctagacctacagactgaggaacggtgaggggggccatacagccacataactccaggctgcagggtcaaaggcagggaaggactgtgtcagtccaggaacaggcaagtaagagaagagggagagagagacaaggaagtgagagtgtggaggatgagatctttggggctgggaagtagggaaagggcattcacctcttctaaggctggggacaggggccgggggaggggaaagagggccagcacggcttcctgacggtgtgactcccacagtgggcccttcccagggaaagactacagtgatggctggggtctggaaagaggggcttgggctccccactctgctcctaatcttacctcccttcttcccccctgcccacttctggcaggggccacagtggtgctgaaatccaagttctcggctggtcagttctgggaagattgccagcagcacagggtgacggtgttccagtacattggggagctgtgccgataccttgtcaaccagcccccggtgcgtgggcacagatcctgggcagagctgctgacacagggctagctcacggggagcaggacagttgacaggagacagggagttggagggagaagcagcaagaagaaaatggcagtgtaagataaggagccagagatggcctaggccatctgatgcttacggcctctgaaggaggtcacagtaggagggggttctggggaatggggaacaggaattcact

SEQ ID NO: 2730 - DNA, 1054 bp, Artificial sequence
  DNA replication origin
cccagaacctgggctccccaaagcaagaccagggcccccacattgtgcgccaaagtgcggggtggagaatgcccacagcccaagggcccccaggctgaaggcaggagactggggctgctggagaagttgcccaggctgaggggccgtgcctggcagggacatggggctgctgctgctgctgctcccaggctggggtaagaggctgagccatgggggccatagggaaagccagggcagagggacggggaagaaaaagaggcaggcataggggtgggagagttgcggggcaaggttggggaagcagagggatggaggtggccggagtggagatggagaaaccctgaggacagcagaggagaggggtgagcaggaggggcaggcagggctgcgggagagctgtggggggtgctctaggagcccaggctttggggcacagtggctagaaggggacctgggggccacgtgaggcaagtggctgagcagactgcggggcatgcagaggcagggccccagaggcttacccacagatgtccctgagccaaccaaggctggctgagccccctgcccatgtgcccctcggaggctctgtctgcccgcctatccaccccatctgctgggggtcctggctcagccttacaggctgagttattgtatttatgggggtgtgtgggaagggaggctgtgggttcacagctctgctcatgcatttctgggcctgtgctgttagtgtctgtggccctgtgcttatgtatttgtgactttgagtctgtagggacatctatgtgtgacctgtgtttggggcctccttgagtgtgcatctgggatggaatctgtctgtgtctagaagacctggtggccagtgaggttgtgatttttaatccaagtgtgtgtgtgtccgtgaatgagtgtgtgtgagtgtaagtgtgttccttccctattcagaggccagggtcctggtggcgggagggggaagggggagagccaggagtcctgggaagctgaccctgcaggcagacaggcagatgggccggtgggggagggagggggcgatccc

SEQ ID NO: 2731 - DNA, 1498 bp, Artificial sequence
  DNA replication origin
cagctgcccaatcagcgtccttgtttgtgtggtgccgccgccgccggtgcagccgtcgccgccgccgctgcccccgtctgtaccgcagtgtctgctccgcccgcccgccccggtccggcccgcccccctcccctacccccgtccctagtcccgtcagcagggtctggatcccctgtgccgtcgcctcttcctttttcgacgcctccgccgccgcctgaggaggcgagctagccgggagttacaccgccaccgccaggtgaggagctttggcctaggccagcctggccgcccgcccgcccgggggcggtgaggagcgaggaagggaaggaggctgggaggaggcagtggtggcggaggtgggggaagggaaaggtggaggggcggggggaggggaagcgcccgcgagccgacgcccgcccgcgcgcccccgccttgcgtccccctccccccaccccggcacggcgcgcccccgcctcgcgctccttcttcacctcatcctctccccccttggcgcgcgcgacccggtctttcacttcggcctcgcgcgcccccagctcgtgtcccttcatttcgtctccttgtactctttctcccctccctcacgccccgtttcccccgccatccccgctttcactccctgcctcatgcccgccatgctcccctcctttcctctctagcgcgcccccccctttttttttttaactctctccacccccagtggtgccctcagggtgcgggggccgctccctgctcagtcttgtgtttgcgggcggatgggacgaatggggaatctaagggtaaaggaagcaccagataattatctttatttagggaaagggatcaggagcgcataaccttacccctttatttcgtcgtccaccgttcgctcgccctcccgtaggggaagagaattgtctcaggctatgtgggcacttagcttctacagcgactgggcttgtgggacacactggatctgtcttccagttcagttcctgagggtcggtggaacttacccttccctaaccacaccgggacttagagtacttttggcctccctgctctcaattacattgaggagcgagccactcatgcgagtgcagaggttcaggtgccattcgcgcgcccggtacagctttcccgtttcataaaggtatggtagcctctttggattcttccccagcatcaacttccaaacacaagatgttagctcatagggctggcagtgaggtggagatggaggcttggtggtgggtggcatgtggatgctaactgagctagctagcaaccttttctctgttgtcccctggaaaatcaggtagcctcctgagaaccagttttctcatttctgataaatgcttatttggggggcgtgtgtgtgtgcgtgtgtgtgtgtgtaagagagagagagagatggggggatacttaatacatttcagcagaggcgaaggatacttaatatatttcagcaaagggcaagagcagtgttttcaggccagac

SEQ ID NO: 2732 - DNA, 1324 bp, Artificial sequence
  DNA replication origin
agctgggggcgcgcgaggccgaagtgaaagaccgggtcgcgcgcgccaaggggggagaggatgaggtgaagaaggagcgcgaggcgggggcgcgccgtgccggggtggggggagggggacgcaaggcgggggcgcgcgggcgggcgtcggctcgcgggcgcttcccctccccccgcccctccacctttcccttcccccacctccgccaccactgcctcctcccagcctccttcccttcctcgctcctcaccgcccccgggcgggcgggcggccaggctggcctaggccaaagctcctcacctggcggtggcggtgtaactcccggctagctcgcctcctcaggcggcggcggaggcgtcgaaaaaggaagaggcgacggcacaggggatccagaccctgctgacgggactagggacgggggtaggggaggggggcgggccggaccggggcgggcgggcggagcagacactgcggtacagacgggggcagcggcggcggcgacggctgcaccggcggcggcggcaccacacaaacaaggacgctgattgggcagctgccaagcgcctcggctccgccttacccacacgccacgacgcccattgggcgacctaagccggccaccccgccctcatcttctcggccatgccagtagaagactagatgccgggacttcaccccacccttgaagaatgagtggccggagaagtgatgattggcgtgcttaaaacccaatcataaacggaggaggggggatggtctagcgggggcgcgttaatgggtacctctgccagtcccagacacatccgggtcttcgacagcccattaagtgtcgggggtcaaaaaatcgcttcaggctgcaactttaccttagagacgttttggtccccaggcagccgccgtaccccagtctctccaaaccgggattcccctttggccatctctcattctttcaattctaaagatggagactggcgaacggcgatggggtctgcggtgggcggtgtttcgtcgcgacagactctaggaaatttcacgatagaactagctttaggcgcttgagccttgccgtctttttggggtgtggcctgtctccgtctgccaaaggctttgagcttcctggtgttcatcgtacctccgcttggtcctgtcgtgactaaaccacgacagcaggaaaaaaaaaaaagcagctagccaagttgctgaggaattacggtgtgcagagccctcgcagctccttctcttgggaactcctggtctggttaggttctcagcgaggaaacagcctcccaccccgcccgattccacctaattaactcaagggcca

SEQ ID NO: 2733 - DNA, 1125 bp, Artificial sequence
  DNA replication origin
gtgctggcctgcccagaccaagtaccccgtgcccgtcttctccacctttgtgctcacgggtgcagctggtgataaggtgggtgtgtggagtgtggcaaggggtccaggctatgcagggcctgcctgactacccttctgccccctgccaggtgtatggtgccgccctgcagttctacgaggcgttcccaagggccaggctatcagagcgacaggcacgggcactgggcctgctgagcgccgtggagcggggtcgggcactggggggcagagctgtgcgcagccggcgtgccatcgctgtgctgtcccgctggcctgccttccctgccttccgcgccttcctcaccttcctttaccgctactccgtctcaggcccccaccgcctacccttggaagcgtgagcatggctcctctgccattgggaaggggttaggaagggataagggggccaggagagatgggagagattcagatgtgggtggggggagggctgggcacagggtaagggacagggctgcagtgtgtggttatacagtttatccactgtaaaaacgccacgggctgaggaggggagcagggcctgaaatccagtctaaacttactagttaggtcctggcaaagggctgtgtatgcccagggaggatttcttttctgatctgcacaaattatatgcataatggaggttctgttggctgataacaggtctcaaagtggggttcaggaaggaataaggttcttgagaacaagtgaaagagctgagaaaatgtggagggaggacagggatggacgggggagtatgctctgacctgtttctctgtcccccaggcacatctcccacttcattcacaacgttcccttcccttccccacagagaccccgcatcctagtgcaggtgagagctgaggctggggccgggctgatggaaggaggggagttggcatcattaccctgagccgtggctcttcttcccttccagatgtctccctatgacaacttgctcctctgtcagcctgtatcctcacccctgcccctcaggtatgtgatcagattgtggggaggggagctttaatgaccaaggacatggtaggtgctgggcaggtgggtgcagctgttgaggtttatgcaggc

SEQ ID NO: 2734 - DNA, 1176 bp, Artificial sequence
  DNA replication origin
tagagtttgacaaggctgtgggtacaaggcaagttcaggggattagataggcagatctggcaggattgggtctttgtcctctaccctgacctctcaacatctatctttgctctctgtgccaagggtgttgtatgaggggaaggaacgtcccaagcctggcttccaagtgcttgacacgacaccctacagccactcagcaaacctggcccctccaggccccgggcacccccgcacctacctcacttaccggcgggcagcagagggggcagggctgcatgccctgggcatcactgacctctgcctggtgctgcccagtaagggcgagggcactcctcatacttactgccggctgccccgcaacctcaaccctggcatggtgagtggggccaagagctgacacctggtcctcttggtgtaagagtgggtgtggacactgggaacaaagggcatcccaggaccaaggctctgaccacaggggtgagtccagaggggtaactctggtcttggggcactgggattaatgggagctttaaagacaaaagaacatttaggggtggtagagagaaagtggaccccagaaacctttgttagctatgtatctgcttgtctcttgccatttctggggtagtggggcccagcagtgtacctgtgctataaggtgggcctggcgaaggccaacacgctggtgtacgaggcaggtgagtggcccctttatccctccaatcctgtgaccctacatccctttgccctggtgcctcttggcaggcaccttaagtgtccccagagtttactttctctttgctactcgggccttctctgggatcccttggttcatttcccttggagtctgatggaccctgctccttttgggtacccccaactatgctgggggtgcagagctgctgggccgctacccggaggaggacaatgaggcgttcccgctgcccgagtcagtgcccgtcttctgcctgcccatgggggccactatcgagtgctggcctgcccagaccaagtaccccgtgcccgtcttctccacctttgtgctcacgggtgcagctggtgataaggtgggtgtgtggagtgtggcaaggggtccaggctatgcagggcctgcctgactacccttctgccccctgccaggtgtatggtgccgccctgcagttctacgaggcgttc

SEQ ID NO: 2735 - DNA, 1139 bp, Artificial sequence
  DNA replication origin
ttgtaatagccttccatgacatcattcatgctggccatgacatcataccaaccttacagtcttttcaagggtttctgaccttcctactctagttatgacaccataagaaccttgtgatcctgccaatgttcttaaagagcccactcctaggtttttaagaggaccccatgggtttctgagaaagcccacaaaacccaagctttaagagtcttttcaacgaacccaagtgtcctttctcctagcttaactccaccaatctggcccaaaatccagtgttctcacacctccaggatccttaggtagctcgttagatccaaagcagttgtgagagacaagtcccggccatcccacaccctccaccatggagcccagagacagaaacaggcccacaacagcctagttctcacctgcctccatggcccaaccccggggagtaggagccccaagggtcctgaggcgccccagggtgcagaagctgggaaaaagcctggtgggtagctcgcagcaggggcccagaagcgtggggggtgcttcagaggggaagggaggttacttcctgaaacagtggaggggaagctgcaactcagaggaagtcagcctatgggtgtgtgtggtggcggtggcggtggtggggttaccattgaaggtgccagcacagcattacgccaagttggaatctcagactataggatcctgagcaaggcagaggaggctcagaatggttccaggatgtgcagtcctgctaacctcctgctgttcccccagagaacagggaataaggaatctcatagagccaggctggctttcttcatcacctggcctctggacacacacacacacacacacacgcacacacacacgcacacacgtacacacaccaaccccagctaaatttagactccacttctgggaggtaaagccaggagtcagcgtcagcctcttgatttaattctggggcacagacctgtccctcatccactgagggcgaatgggagccctatgcccaaggcagcaggcagaggccattaggtgggaccttctgaggggcaagtgggtggcacccatccgcaggacctgcgcaccggggcctcccctcaccaagccagggaagagtcctgcagaaagcagccctttctccc

SEQ ID NO: 2736 - DNA, 1291 bp, Artificial sequence
  DNA replication origin
tggcgggccggcgggcggcggggctacccggccccagacatggcgcacccgacttgggcgccgctcccgcccgggcagtgagtgaaggaagaagaggcggccgaggaccgcagagcgcggggcgcagtggaaggagatccgggcggtccccgcgtccccgccgcgctgcgccacgcggggactgtgctgccgcgctgctcgctcggccggctcggtcctcccagctcccgcggcgccggggacccagcgttcctccgcgcgccccgctttctctactcccccaacccccgctccgggccgcgggcgccgccgctacccccacccctcctcctcggccggcggccgtgaccctggcaagcgtctgcccaaagcccagccgcctgcagcccgacccctggcggctgggagggccccctgcacccaggtagcttcccaccatccagcccgtgcctcaggacactgaccccaggcgacccagagggccgcggcgcgctcccttcccgcctgggtcctgcagtcagatgtggcaagcatgatgtgggcgcaggtgaagtcccgaaggtctagtctacggggacccaggtggctccccctacttccaggtttagggcacagggcattccctttggaccagaaccagaagctctcagttctcttttttgaaaatgacaagagctttggaaagaggaagagaggccaggactgcagggtgtggaatagagcagtggaggtgggggtaaggtaactgcggggctctacttttctcactatgcgggttgggggagtgaggggtgcagaggcccacacggctggtccaagggctggcaacccaatccagaaagagaaaaccttcagaacatgcatggcactgaaggatctgtttaattaaaactaaaatgaatgagtggtgaagagtggagagggtgaagtgaatgcatgcatagtgagggagtgaggatgaaggcttgcttccctgagacctaggagcacttcagacctgtgggctcagccagcaatcacctccttacccgactcactgccagacctagggttgaggaagaggaataacttgtctgatcagtcaaagcccccatctgatgctgcagcagggccctggacagacaggagggcacatgaagtgatttcctgctgccgtggaagcctacatccagctgggtacaaattccgaggctgtggggcccttccacaaagcacagtggtgctaagaagatgcaaaaagcctaatagataaaaagacccatggccctataactccctagatccccagcca

SEQ ID NO: 2737 - DNA, 1058 bp, Artificial sequence
  DNA replication origin
tgtggtgctaagtattttatgtatgttacttcatttgatccttatgaaccatccttgttttagaaatgaaaatactgaggcttatagaaattaaataacttgtccaaggtgactgctagtaagaggtggagccagggtttgaagctaaaaaagcttaaccacagcgtttgggtttgcactgtgaagcaagaggagacaagatggataaaagatggggcaggcggaggacagaggaatggaaggggatgagtatagagtaggtatttcaggaaaggagggtgggagggaaacaacatggcaggagaaaagggaagggagacagacatgcagggaaggcagccacgcatacctgagtgatggaagacaaggtgggtgacattgttggcgaaaactgtttgggcagctgctgttgggaccttctggcgtcggctgggcccgcgagcaaactcagggggctgaggggcacacggcggtggtggggggaggccccaggggtagaagcagggtaagagggggcgcccaaaacaggagatgaagtggaggaggaggaagaggaggaggagagagccggagcactgagtgaggggtggcccagggaggtggtgggcagtacatggcgggccaaggaggaggcaggcagagaggggtggctgtgggagccctgaagctggggctgaggactgctcagggaagcctggaggttgggattgcttagggaggactgcagggatgggtggctgagaggtgaatgaagtcctgcaggcacagacaaaaaaccagagatgccaacattactgatgggaactgagcccctttccacccagaatgggtggcagtgaccagactatgaaagcggcaacacaacgtcctccctactctatccctgacagcactgcccatctggggactgcccttcctcttctttctaggaaacaccacacctaccagttatcactggctgagaactgccgtgagggaatcctggggtgcagaggtgacaggcggtgtgggtgatcacagcaggatctcaggtgctcaaacctacctccccttcatcc

SEQ ID NO: 2738 - DNA, 1042 bp, Artificial sequence
  DNA replication origin
tagtgctgcgtgactggggatgtgaaggagtctcgtaaacaaactacaattcccggcggcccccgcgcgcaacaggtcagggctaggctggggccgggttcgcggtgctcgctgaggcggcggtggctacggctggaggagccgggccgaggccgcggcggaggccgcggctggtactgggagggtggcagggagggacggggaaggaagatggcgacgtcgggggcgaacgggcctggttcggccacggcctcggcttccaatccgcgcaaatttagtgagaagattgcgctgcagaagcagcgtcaggccgaggagacggcggccttcgaggaggtgatgatggacatcggctccacccgggtgaggggccgcgccggggagccggagcagagctgagcagttacggagcggagaccggagaggcggggcgggggcgggcgccgcagcgaaggaggcggaacagagcaggggacgcgggcgccgccgtttgggaggcgcaggttgagggccgaggggcaggaagaaggattttgccgggggagaccgaaacaccggagaggttcggggtgtagaggcgactgggggccgagtacgtgaggtgggagtgggcggagaggggagatgaagtccggcggaggtaggaggtgagtggtccttgtgcatccctgacggagtcccctcgaggacgctactgaagcatgcctggtattggggtatggcctgggaggagggctgcttgtctgtaacctggctcctctgagtttgtgatctcctccaaactggtccctctgccttctgcgctttggtgcccccgggaaagggccccttgagtggtttgaacgagcggtgctgtgtatagtggggcaggaagtcccctcctgcgtcccgtccttttgcttcctttttcaaatacttcttgtggtttcctgacgtgaatgaaggtgaggtccattgcttggtgttttgtcctggcctccttggaggagaggtagggttttgaatccgacaactgggtaaccgtccgaccataagttgtgtg

SEQ ID NO: 2739 - DNA, 1083 bp, Artificial sequence
  DNA replication origin
cagtctctgtctccccccagatattactttcacattcctcttctctgttttcttagagccctctactcttggtatcccacctaccctcctagtagagagtaaggaaaaaagtagctgaagccagtctatgtgaattaactagtgggccaaacttggcactaggaaagtctgaggctaaacaggattacttttgagacaattaggaaagaggggcatttttccttttcctttgtaaccagaattgtcgtgagactcttcctgtctatttcccaagccagaggagatgaagaaagaagagaagggaggaggggagacaatgttcttcttagtagaaacttgggcacctcccccaagcctgctgggggcccctgggaggaggatgagtcaccaggctgactcagagaccccaaaagtcccctcatttccacgttcctcaccaagctggctgcatattcatgatcacagtccttgggccaccctccagcacacccagccaccttgttccacccttcccaaacccttgttcagctgaggtgcagggagactggggcagggaacctgggaagtagatggtgaggtggggacacagtgggagagtttgaagctcagcaagacagaaagaggctagcatcggatcgggagaaaaagatgtggcggacagggatacaggaaacatggagataggatcgagagagttctaggtggtgggggtaggggaagaggggaacagagaaaaatagagaagagttcttgtggatttggggagactaaggcgatggtaccaagaaaatgaggagctggcagcagttgaagagttacctgaaggcctcagagaggtgagaggtttggttactatacagagacatgcacgggggaagggtcagagccaggggttgagggactagaatttaggagccttactctaaggggactgaaaagtggggtcactagtaatccgggagccggagaaggaggtcacaggagagtcggggtctgggacatggccagcgggctcaccgatggtggagatgtaagtgttgttgaagttgtcctctgcaaagcgaatgatcagacaagtcttgc

SEQ ID NO: 2740 - DNA, 1160 bp, Artificial sequence
  DNA replication origin
gacgcaggaaggcaagtgggcgggggaaggcgcgagagcgagcgcgagagggaaaaggagggagggggtggggaagagggaatcttatatcacgtgacaggggcggcgcggcccggggtgtcagtgtggaggagactgaggtaaagttgggagcgcagcggcgttggcggcggcggcggcggcagcggcagcgcggcggggccgggtattgtccgcggcccctttaaatccgcgatcccccttttaccctccctcttttctcccctgcccccgccgtatcccctccctcggtaggcccccccacaccgtgtgttcccccactgtacacccccccccgagtcatgcgagccctggcgccccccacctcgagtcggcccccggaggttttgtttatggttgggttcgcggcctagtgggccgcgccagagccggggcctcgatttgggagcgtggccggggcggggcttggagcagccgtaggaagggggggccatgcggctagagcctgagaggggagagcgagaaagagcgcgagcgagcgaggcctgggccttgcctgaggtagggctctctcttcaccccggccggtgcctgcggaggagagggcctcctccctttccacccactgcgggcctcctctgatccggatccggcctggtttgggggtggcgtgggggagggagggcgatggggtggagctcccccaaactcccccatgtggccctcagtttggtgtgcgaaggattaatttgttccggctgggaggtagggaggagattggccccgtgggctctcgatgtggcgctgaggggggtgagcctcccatcctccacccgtgggcttgcgtcccctctccgtttccaggctctttgtcagctcctcttattaccctcccttctttctcaccaacccagttcttggaatatgtttttgctgctgtctttagcttcctgtttatactgtagtttgggtaccccaaacaattgtgttatttgggaagctggacatggaggcccccatagggtgtatttacgcttaagggacgtcactagagcactggggtatttgttcactcttctcataatggtacaggaatgcccagtttcttcaaacccttaaccttgtggacagcccttaaattgctttgcaaactgatgtca

SEQ ID NO: 2741 - DNA, 1228 bp, Artificial sequence
  DNA replication origin
atcttgcaccgcccttaatccattcaaccctgagtggatacagcacctgtttcagagagcacagggttgggggtaaggtcacagatctacaggatcccaaggcagaagaatttttcttagtacagaacaaaatgaaaagtctcccatgtctacctctttctacacagacacggcaaccatccgatttctcaatcttttccccacctttcccccctttctattccacaaaaccgccattatcatcatggcccgttctcaatgagctgttgggtacacctcccagacggggtggtggccgggcagaggggctccttacttcccagtaggggcggcggggcagaggcgcccctcacctcccggacggggcggctggccgggcggggggctgaccccccacctcccgcccggacggggcggctgccgggcagagacgctcctcacttcccagacggggtggctgctgggcggaggggctcctcacttctcagaccgggcggctgccgggcggaggggctcctcacttctcagacggggcggttgccaggcagagggtctcctcacttctcagacggggcggccgggcagagacgctcctcacatcccggacggggcggcagggcagaggtgctccccacatctcagacgatgggtggccgggcagagacgctcctcacttcccagatgggatggcggccgggaagaggcgctcctcacttcctagatgggatggcggccgggcagagaccctcctcactttccagactaggcagccaggcagaggggctcctcacatcccagacgatgggcggccgggcagagacgctcctcacttcccagacggggtggcggccgggcagaggctgcaatctcggcactttgggaggccaaggcaggctgctgggaggtggaggttgtagcgagccgagatcactccactgcactccagcctgggcaccattgagcactgagtgaaggagactccgtctgcaatcccggcacctcgggaggccgaggctggtggatcactcgcggttaggagctggagaccagcctagccaacacagcgaaaccccatctccaccaaaaaaatacgaaaaccagtcaggcatggcggcgtgcgcctgcaatcacaggcattcggcaggctgaggcaggagaatcaggaagggaggttgcagtgagccgagatggcagcagtaccgtccagctttggctcgacatcagaggg

SEQ ID NO: 2742 - DNA, 963 bp, Artificial sequence
  DNA replication origin
agcccctctgcctggctgcctagtctggaaagtgaggagggtctctgcccggccgccatcccatctaggaagtgaggagcgcctcttcccggccgccatcccatctgggaagtgaggagcgtctctgcccggccacccatcgtctgagatgtggggagcacctctgccctgccgccccgtccgggatgtgaggagcgtctctgcccggccgccccgtctgagaagtgaggagaccctctgcctggcaaccgccccgtctgagaagtgaggagcccctccgcccggcagccgcccggtctgagaagtgaggagcccctccgcccagcagccaccccgtctgggaagtgaggagcgtctctgcccggcagccgccccgtccgggcgggaggtggggggtcagccccccgcccggccagccgccccgtccgggaggtgaggggcgcctctgccccgccgcccctactgggaagtaaggagcccctctgcccggccaccaccccgtctgggaggtgtacccaacagctcattgagaacgggccatgatgataatggcggttttgtggaatagaaaggggggaaaggtggggaaaagattgagaaatcggatggttgccgtgtctgtgtagaaagaggtagacatgggagacttttcattttgttctgtactaagaaaaattcttctgccttgggatcctgtagatctgtgaccttacccccaaccctgtgctctctgaaacaggtgctgtatccactcagggttgaatggattaagggcggtgcaagatgtgctttgttaaacagatgcttgaaggcagcatgctctttaagagtcatcaccactccccaatctcaagtacccagggacacaaacactgcggaaggccgcagggtcctctgcctaggaaaaccagagacctttgttcacttgtttatctgctgaccttccctccactattgtcctgt

SEQ ID NO: 2743 - DNA, 944 bp, Artificial sequence
  DNA replication origin
ccccatcctcccatcctgtacgcagacccccgctctgccccgtccccgggaacccgacagcccctcgtctccagtcggccgccatccccgccccgtctggccgcagctcccaaatcttggcccccggtgctccccagtctacacccgctccccggcccctccagccccgcggctgcggccgcatctccctctgccctcctggccccgcgctcccgggcgcccccgcttcgcctcgcctcgcctcacctcagcgctcagcgctcggcgcccgccccggcggccccgtactgcccatgccgggggctggggcggggggcgctcggctcggctccccacgggctcccgcccccccagctgcggccccgctcccccggggcctcggcccgctactttgtgtcagtttcggccacggcggggcggaagtgacggagccggcggcgggggccggggggcgggagggggttttggggaggggagaaggagcggggaggagggagcagccatctttgtgcggggcagtgggagggtcttagcccttccgagcctcggcgtggctgggctgggatgcccccacacgtacgtccatccgcatcttaaaagaaaaaacaattcgggaggctagatcgctctgagggggtatttttaattcggaagaagggaatagaggaacactgccttctctgcaaaacgagcatcctctgcagggagcggcaggagagctgtagaagtggtgaataaccagaattttccctggcgccaggttgccctcagcccgactctcgctcctcggagccgcccgccctccgttccttcaccctccctcctcgccctggctcatttcactgtatctcaactctccttgaatgaacgacacagcaccgagatgtctaggaacggtgcctcagtttcacagccttgctctctgtctctgtgccccgccgccc

SEQ ID NO: 2744 - DNA, 2075 bp, Artificial sequence
  DNA replication origin
ccttcttccgaattaaaaataccccctcagagcgatctagcctcccgaattgttttttcttttaagatgcggatggacgtacgtgtgggggcatcccagcccagccacgccgaggctcggaagggctaagaccctcccactgccccgcacaaagatggctgctccctcctccccgctccttctcccctccccaaaaccccctcccgccccccggcccccgccgccggctccgtcacttccgccccgccgtggccgaaactgacacaaagtagcgggccgaggccccgggggagcggggccgcagctgggggggcgggagcccgtggggagccgagccgagcgccccccgccccagcccccggcatgggcagtacggggccgccggggcgggcgccgagcgctgagcgctgaggtgaggcgaggcgaggcgaagcgggggcgcccgggagcgcggggccaggagggcagagggagatgcggccgcagccgcggggctggaggggccggggagcgggtgtagactggggagcaccgggggccaagatttgggagctgcggccagacggggcggggatggcggccgactggagacgaggggctgtcgggttcccggggacggggcagagcgggggtctgcgtacaggatgggaggatggggtgccgaaggggcgcgtggagagcaggagagcggcgcgagtgccaaggagaagctcgtgcagccttggccaggggagacccgcccagagagttgttgggcgagaggagtaaccgggacccgagggtttggtgcctggagaagggagtttgggctggtaggctttgtctcagtaaggtggaggtctatgcctgaggaaaactgagggtgtcaggaaggggcagtagctctgggagatgatagctgtgccgggagccctgagttctgtccttggtgagggaaggtggcccgagctcgtgttggtggccagtgagctggaggtctcgagttccatttcctcctgtttccctgacctgccatcctcctctgaaagaagtggccagcctttggggctcttgcttgtaagggagcagggaccggacctataggaggagctgttttcctccatggagcattgcctgcttgccggggctggctatttttatcccaaatgtggccgagagggggctggggctgggtgacggggcagggcaacgtggctgatgggcctgacctgctcagaaaacccaggctgtgtgagactaagaaggaaaagtgagaggggatcccagttcccaggtctctcctctcttccccttggaatgatggcccccccagaggggatgaggtctggggccaagcctgcttccagtctccccagggtctcagaggtagaacaactttcctggtccatatccagactcctgactcctgatggcgtgtgcagctcctacattaactctttcatgggactcaaactcagatgtttaggctgatagtgtttcttgatcccttcctccccaagggcggggctgcctgtagaacttgtgatgcccactcttgcatcctttaacctctccctgtgctccccaccctcccgtgactcatactcagactgggtggagaccctggctgggggccctggaggagggcttggcatctctaaaatatggatgaggtttttcttcctgagccaggcaccctggactgccatagttggagaaggtcagggatgaaaaggacttctggctttcaggattgcctgacttggtgtaagggcgggatctgagctagcgaagggagaactggtgtgggtgactgggttgtggccagaatctgtaattatagagcttagccagacaggcaattagtatctcttggggctgacaggttggtggggtgtgcctggtaggctaaaggcagagggaaccaaagaggatgaggaggtgaaaggccttccacccagacaaggaaagaggaggtgactgactggcagtttcctttgggccaggctggggagtaaggatgaggctctgccttgtaaggccaggccttgaaccttttaggagaaaggacatgggaaggcggaagcaggcagagg

SEQ ID NO: 2745 - DNA, 1550 bp, Artificial sequence
  DNA replication origin
agagggcttctttcggctccaagagggaggcgcctgggcccgggcccacttctcgggcatctccttggggaccgtcatgatcccggtttgagtgggggagggcagaccgtctatatgtccttggccttagtggcatcgacggggcggctccccggggaggtgcaggagccgcagccgctcagaggggagccccagccgtcgggcgcgcgccccacccgcagcccaggccatcctcccggccgccggcgctcggggacaccgcgagctcagctgcgccgccgccgccgccccccatgccccccggcggatgccagcgtgcgctgagtggccccggacacgccgagcacgcccagggttccgcccccgcccgctccccgactgcaggagccgcagcctgccagcgcgccgcgtaggcgaaagctcgcgcgcgagccccgcctcccctcccacccccgggccgggccaatgcgggtgagcggactgccggcgttgtcgggggcaaccgctttcacacacacacacccccgcccgcggaaaaaccaggagaaccggtagatggaaaaacgaggggagcagggaaggggtgagaggaccaagcagagatgagaacacagctccctaggccagaaagcaggagctgcaggtgcccgaagataagactgcaggtgtttcggggcgtggggctggtgctctgcgctgtcctggcagataacccagctttgggatcaagcggaagaattcggtttcctaggctgcccccaagctgggtaggggctgctgtaagctaccctccctcagacccataccagttgtcccttttccttttgctccctgagccataacaacacccactcttgatggttcccgggatctcccctccttgcctgtcttacctggggggcgcttttttgcacacactgccatctcacccagcaagatcccagcaatcccatgggagaccctgcaagaagtgacagacgaatgaggtcaggaagctgaggataacccttccctcccctcatgagacctcttttgaagaccctcttctccagctctgaccctgcccctcccccagcctccttctcccagtctctcctcttactgccatgatgggttcctgggaaagaggggacttccccaccacctcccatcatgcccctgccttgggtgacatggggggctgagactttacagaagcccatgcctgtagggaaaggagaagaggccagatattgaaaaaaggggaacagctctcaaggtatccatcccagggacaatggaggctctcatgtgttctggcggcaatgagtagtgcttgtgcttactagaaagcagtttccccaaagggtggggtggagggaacatgagccaggaaacacctggcagggcatcaggaaacagggtgggcaggctccacccttctcgaaaggcttataagttccctgccatccccaccccccattactagggcttccattatcacctcctccaggggagctcacattagaggcatggccctcactttctgcacagacagtccctaaacagct

SEQ ID NO: 2746 - DNA, 1263 bp, Artificial sequence
  DNA replication origin
ctgctcccctcgtttttccatctaccggttctcctggtttttccgcgggcgggggtgtgtgtgtgtgaaagcggttgcccccgacaacgccggcagtccgctcacccgcattggcccggcccgggggtgggaggggaggcggggctcgcgcgcgagctttcgcctacgcggcgcgctggcaggctgcggctcctgcagtcggggagcgggcgggggcggaaccctgggcgtgctcggcgtgtccggggccactcagcgcacgctggcatccgccggggggcatggggggcggcggcggcggcgcagctgagctcgcggtgtccccgagcgccggcggccgggaggatggcctgggctgcgggtggggcgcgcgcccgacggctggggctcccctctgagcggctgcggctcctgcacctccccggggagccgccccgtcgatgccactaaggccaaggacatatagacggtctgccctcccccactcaaaccgggatcatgacggtccccaaggagatgcccgagaagtgggcccgggcccaggcgcctccctcttggagccgaaagaagccctcttgggggacaggtaacgggaggcagcgcctggcagctctcccgcacccattatttcccccctccaatccctacattcacttgtccccagcctccccctacctgccttgatcctctttccagacccagagatcctggctccgaaggatccagtccctaccttcttcgtttgcatggtctttggtgattgcgcaggggacttggcccaagagagcccctctagggaagtttatgggagtgaagtggcttggtaggcagggggcactgtggcctgggttttgttactgcagtgtgctctgcaggggtcctggggtgtgtagaaagggttctggaatgctgtctttggctcccggacaggcttaaggcattaggtttgctgcctaaccaagttacccctttttgcagcatgaggtcatggtgacccccggggagacgggctggggaatctattataggacagctccttgttctgggacatgaatttgatgcctgcagtcccagacctgcagaggtttcagataggtttagctagataggtgtcactaactgagtgacagatgagccctttaaagctaaatgtgtgcagatggtacaaggaaggtccagttagagagcaactgtttcaattacatttcattcctccctcctctatctctatctcagtctgcatgacccatatccctgaaacgc

SEQ ID NO: 2747 - DNA, 1296 bp, Artificial sequence
  DNA replication origin
tccaggtgcgcccgaagcccttaccctgcgcagggcagcgccttggggccagcgccgctcccggcgcggccagcagggcagccagcagcgcgcagccgacggccagcatgcttcctcctcggctaccactccatggtcccgcagaggcggacaggctaatgggaaccgggcggcaggggtggcaggggcggggcggggcggtgggcgggcaggcgggctcaggccccgggggcagcccccatccgcaggagcccggctctctacacacactgcgagtccctcggccccgcgccgcgctcggctcctctccctctggcccggctcagtgtcagtgcgacttcccactcgcacatgactcagagcggcggacggtcctggcaacgcaggaaaacatttgaggaactcgcgctggagcgtctctgggccgtcccagggtgcggttacgaaagccggagcggatggcgcaacagccccgcgcaccggccgaccgagggggtggcttcctgccacagcgccgcacctgagcggggagaacaggggaccgccagccccaccagagcccttcctcccggttctgttgatgagaaaagggcgtatcagccaccagtgggcagtggcctagttttgatttttggtttcgtgaacgggattacgctgtgaaaggcacacctggagagccctcgaggaggcgatgttcctcttacccttagggtaaaacagtgcttggtagcccggttgcccactggaatcagccaggagccctaaaacccaccaatgtctgggtcgggtctccagagattctgatttcatcggtctggggtgaggcttgggcatcggaagactcaccaccgtaaaggcacagtctttctgcccagctgctcctcgcaggctgcagcagaggcaaggaaacggtttggactttgcagtcagatagacctgggtccccatttagacctaccatctactgtgtctgtgacttcggttcagaatctgagtctccatttcctcatctgtcagagataagaaagcctatgctgcccagggttattaggaaggttctgtggatggcacctaaacacctgacacacggtctgggccacacgtgctcagtagacatcagaacgttcatggctgccctcctgacttgacagacagacactaacaccaggggcagtggctcacgcctgtaaccccaacactttgggagagccgggtgggtggattgcttcagtccaggaattctagaccagcctgtgtaacaaagtgagacccccatttctataaaaaaatttaaaa

SEQ ID NO: 2748 - DNA, 1348 bp, Artificial sequence
  DNA replication origin
gcggggctgttgcgccatccgctccggctttcgtaaccgcaccctgggacggcccagagacgctccagcgcgagttcctcaaatgttttcctgcgttgccaggaccgtccgccgctctgagtcatgtgcgagtgggaagtcgcactgacactgagccgggccagagggagaggagccgagcgcggcgcggggccgagggactcgcagtgtgtgtagagagccgggctcctgcggatgggggctgcccccggggcctgagcccgcctgcccgcccaccgccccgccccgcccctgccacccctgccgcccggttcccattagcctgtccgcctctgcgggaccatggagtggtagccgaggaggaagcatgctggccgtcggctgcgcgctgctggctgccctgctggccgcgccgggagcggcgctggccccaaggcgctgccctgcgcagggtaagggcttcgggcgcacctggagggctggggcagctagcggctgggggaaaccgccttggtcaccgcagtctgtgggaggctggagggaggaaaggaggtgcgacggatccccttttctgtggctgccttgaggccccgcgggtacctagctgtgtggtcgcgggtagtggctcttgcgccccctgctgcgcttgctcccttggtccggagcgctccccggaatgcccggtgaagctgtgcgggaaccctgcggtctgtgtacaggactgtgtccttgcaaacctgactctcgagcttccttcccagtgcccccaggagcctttacacaaccgcgtcccaggttactctaaggggagactgcccgagagggcgcgccccagcggggtgatgtacccgcctggggagtcctttgtaccagcgcccctcttctccctctgcattgggggtccacctcgcctggtcctccccccacccccgcgggtgcatgtgtggatgacagtgccctgactatgaagggactgacatcacgggcgctgagtcacggatcttcccgctgcacggagtcactttggcagccaccaactctgggaagccaagtgccccagtcctgggaattgagtcgggaggctggcaagggagtgagacctcctggggctggcacgtgctggactcccctctagaaaagagaaggacccgtgagggagagggcagaggcacttactgctcccgttgactgtaatctgcccctggcaaaccaggcttttcttgggctctggccgcatgcccagctgcgtgtctagtctctcttctggaagagttgggcaactggctctccagaggtttattttagggtcccagtgcttctttgaggacacagcagaaaactaaggggc

SEQ ID NO: 2749 - DNA, 1268 bp, Artificial sequence
  DNA replication origin
cgcgcgtcgtgcctgtcgcctgccgtgtccggagcagaggctagcgcccgcccgctcggcgccccgagccgtgagaaccccaccctgccgggcgtgggcgacggccggccgggggcgcacggagcagccgtcgcggggcctcgccgcggcctccagcgccccagtcacggggaatgcagtggtccccgacccctggcgcctctgcgtgtctgggctgggcttcctcgctcgcctgctccacggccccgacgctcctgggccgagccggccggggccccctcatggcggccaagtggttcaaggagttccccctgaacctgaagaccgtgtcggagcgggccaagcccgggggcggcggcggcaaattgcgcaagaactcggaggcgggcggcgctgggccgggtcctggcaagggccgcaagaactcggcggccgagctggggagcggcagggccggcgtcggccccaaggacagccggctgtcccgcgacagcctgcagggtctgattcaggccgccgcgggcaagggccgcaaaaactcccgggccacggaggaggagccccaccggggtgcaaccaagagctcgggctgcagcacctacatcaacaggctcatcaaggtggacactcaggagaagaacgggaagagcaactaccccagcagcagtagctccagctccagctcctcttcctccgcgtcctcttccccttcctccctggggcccgagctggacaagggcaagattattaagcagcaagagacggtaagaatacagcctcccttggaccacctctcagtcgaaggggagccctgggcgcctgctaagccctaggcttctttagacctaagaggcagtgaggataggtttcctaaggtcctttctccctccaccatttgggaattcctgaccatttaaaattcttagactgttttttaattcttgaaaaactcttattttagaggtggggagttttgcagaaatgtactagccattgaattttgttagcagtttagaagagtcgttgaatgagatattcctgtttggttacatttgacccctttatagatgtggttcattttaattttgatattcaggggaattgcaaagctaggcttgtgtatgacttttatgcttcttgagcataaggaatggtaacctctcaagtgtgtagatatgcatttcaaagcttcaggaaatggtttaaccaacagtcttctccactgatttggaagttccatcattttctgcggttccaccgagtaaagg

SEQ ID NO: 2750 - DNA, 1055 bp, Artificial sequence
  DNA replication origin
ctggagaaaggggcggcggccgcacgtgcggatcggccgcgccccactgagcagagagcccccttctgccgccgacagcccgcgtctgcaccgagccggtctcggccgggcgctgccttcacacgcgcccaggagtgtcacgtgcgccgctcacccccgggaaggaagcccctcgcccacccactccgctctactccactctttctgcagacgttatttttggcggtagggcagaggttgcggcccgaggtccgggcgcagggacaacggtcgccagctcctgcgctagttccgttactcttcggtggcacacggtcctgggcagcgcgaggctcttcccgccgtggccgccggggattggctgccggcaagccccgccccgtgcccccgggctcagagggggcggagcgcggagggagaaggcgcgaaggctgggcgtcgcgatcgcaggtgcacgcgcgtggcccgcgagacgaggtatggcttgtcggccccaggtcccgggatgccaggcgagggttgggagggaggggcgtcggcaggcagccatgggaaacgccctcgtcccgactgatgggggaaaggggtcgctgttcccgcggggccgtcgctcgctcgcgccggttgggagcggccctcctagtctggatttgtgcgggcggggagtgccgtgtgcagaactgtggccactttaagggaaaagacgcctctgccattcctccctcccttcgaagccctttaaaagctttctgaggccgggcgcggtggctcacgactgtaatcccagcactttgggaggccgaggcgggcagatcacctgagatcaagagttcgagaccagcctggccaacatggtgaaacctggtctctactaaaaatacaaaaattagccgggcgtggtggtgcgcgcctatggttgcagctactcaggaggctgaggcaggagaatcgcttgaacccgggaggcgcaggttgcagtgagctgagatcaagtcactgcactccagcctgggcgacagagcgagactccgtctcaaaaagacaaaaaacaaaca

SEQ ID NO: 2751 - DNA, 978 bp, Artificial sequence
  DNA replication origin
tggagatatacaaatggccaataagcacatgaaaagatgctctgcaactttggccactaggaaaatgcaaatcaaaaccacaaagataacacttcatatcaatcagggtggctaaaagcaagagatacagacaacatcctctatctctaacaagtattgaggacatgaagaaacaggggccctcatattgctggtaggaatgtaaaatggtgcagccactttggaaaagtttggcaggctctcaaaaagttagacagggaattacgatatgacccagcaagtccactcctgggtaactattcaagagaaattcaaatatgtgtccacacaaagacttttccacaaatattcatagcagtgttgcttataatagccaaaaagtgaaaacaatccaaatatccatcaactgatgaatgaataaagtgctgtatagcaatacaatagaatattatttggcaatataaaacgaatgtagtagtaatacatgctatacgacctggatgaatctgaaaaatgatgctaagggaaagaaggccacatattgcatgattccacttctctgaaaagtcctgactagacaaatctatatagacagaaagtagattagtggctgtctaggactgggaaggcggagagggaaatgaggagtgactgctaattgacgggagatttcttttgggggtgatggagatgttctaaaattagattgttgcgatggttgtactgtaaacacaccaaatatactgaaaacacttgaggtgcacacttaaaacaggtgaattttatggtatgtgaattatatctcaataaagctttaaaaaaatgtcactacgcattttcaagaacgtcagtatgagcacgcatttcttcattttagctttcccacctcacaaaccaccacccacacaaatgaggccgtccacagtcgccatcattctgtttccattgtatatgaggactcagtgttggtcagcccct

SEQ ID NO: 2752 - DNA, 1533 bp, Artificial sequence
  DNA replication origin
gaaaaagatcacagtcctcaggtgattggattgtgggggcaggtgccacagcagggctccctgtttgctgtcactgttattctggtaagagatggtgagtactggggtggtgggtatggacacagagaaaaatgttcatgggctcgggtgtgtcttggaggaggaggtagcttggcttgctgatgaatttgacgtagggagcttgggagagagaacttgggtgaactgctctgtaggtagtgatgcggtaggctgagcacagtggctcatgcctggaatcccagcactctggaaggctgagggaggcggattgcttgagcccaggagttcaagaccagcctgggcaacatggtgaaaccccatctctacaaaaaaaaaaaaaaaaaaaaaaatgccgttcactcaaatggagaaagctaggctggggagggtctgctttatttgttcatgattgcaggctccttgggcgggtctgttgcagacatgctaagtctgtgtacctcttcactgtcctgtcaagtggacatcacatgtgagtggaattccagagaatgatgagggctggggctgcagctttgagagtccgtggtacattgttgatacctaaaaccgttgcactggagatggccttggagagaaggtggatggggagaggacaagtcctgggatgtgccagtgttgagcagttgaactgagaaggccagccagggaaagagaaggagaaccagatacatgtgatgccaagagatgcgtttctgcaaagagggagcagagggaatactgcaggtggattcagaacaggggagtgaccattggatttggcagtgtgactgttcatgctgacttttgcagggccattttggggaagcctgagaggagatgtgagtgtggaggtaaacagcacagagaccgtgaaactgtggagttgcagtgagaggagcacagaagcaggaattgggggagctgtgaggtcagtcagagtctttccaaatgggtgtcagagcctgcttgtttcctgtggaaaaggctcacacgggagggagacagtgctggaggagcagcagggtgggtctgcagggtgagggcttgagccagagcgggagggagcaggtccatgcaggggagggatggcggggagggcaggagcgggagaggggttggtggtgggggttgggagaagagggagtcctgtctcattgcttcctgtttgccctctgatgaagaggcaagttaatgggcaggggttgtgggcgttttgaagaaaggagaggacgtgaggtcctttggagagaaggaaagtcaaggtgcgtgggtggtggtggtaggatggaaaggcctggatgcagggcagtgggaagggggatagatacttgggtttccccagggttgggggtttttcaggtgagaacagtggagagagggagaccagcatgggttgggggctgcagggctgtggggagtggcagggcacccaggcttttctgtccccacccagccctgcaccaggtgaccgctactacttcttttcctccc

SEQ ID NO: 2753 - DNA, 1092 bp, Artificial sequence
  DNA replication origin
ggaggggggggcctgtcccggaggtggcggcggcgccatcttggcgaaggggggatcaggaagtgcggaccgcggcggcggcggcggcggcggcggcggcggcggagcccggagcgcaggccggaggctcccggcccgccggccccggagcggagcggagcggaggatgcagcagccgcagccgcaggggcagcagcagccggggccggggcagcagctggggggccagggggcggcgccgggggccgggggcggcccaggggggggcccggggccggggccctgcctgaggcgagagctgaagctgctcgagtccatcttccaccgcggccacgagcgcttccgcattgccagcgcctgcctggacgagctgagctgcgagttcctgctggctggggccggaggggccggggcgggggccgcgcccggaccgcatctccccccacgggggtcggtgcctggggatcctgtccgcatccactgcaacatcacggtgaggaccccctcgcgtgcgcctctgtgggggccccttgtcagggacccaggatcactccatccagctttttgctctcgaaggacctgggaggccgaagcccctctcagggctcagttctttctctccaggttacatttgtttctgctgcttgaggttatgcagtgcacccagaatctctaccattgaccccaatagcaagggacaccccgacatatggcgcctagactacccgtttccacgaacccacccacatcccaaggttcatgattttggctctttttggctactcctccacaactttaccttgccacctaggaatgcgtctttcttccccttactcttatttcaaggttttaggcctcggcactgaccctaactgcaaagacctggcctgaaactcactgcacatttcagcgatgcccccttctcagtagtacctctgacttaggaggttgccacctgtgggatccccgcctaggcatccctcatgcagaccctcttgctctctcaacttcaccaagtgatagtttgcaattcattgactcctcttccttctctcctttggattctttttctggtgtaacctctaactctcc

SEQ ID NO: 2754 - DNA, 904 bp, Artificial sequence
  DNA replication origin
cttcgccaagatggcgccgccgccacctccgggacaggcccccccctccgctcgctggcccccccagccgccggaagccgcgcgcccctcctcctcctcctcctcctaggcggccccgcctccgtccccctcacgtgacttccctgctctggcctcctccacgtgatctctccgtctttcccgcccccctgttctcgcctgccaccctccacatgtgacccggggcctggggcttgcctctgtgggcgcctcagtgcgagtttgcgtatgtcgtgcgtgcttgcgcgcgacgccccttcgcctgcgctcccctctcacgtgactcggtgccgcgtgctcccaggggctacccgcgcaggacgctgtttcctgccccgggcgccgcttcccccgcccccgagccgtggcgagcgtgcccggcactccatggacagagaagaaagaagtgctgtcttccccgtgcagtctttatcctgctcccacatgctggtcttcggcgcaggatcctggagcctctgctccccgtgggggtgggcatgctgtgtcttcacactcgggtgggtggtcggggtaggagccgggaaccggaatggaagaggcgtggattctcgtcccagccctggctctcatggcgttttgtgaccttgggttaaccactttcccgccgagtctcagtttcctcatctgtacaatggctctcatgagaatgatgcctgtttttcctattcccagggagggattcgatgcgaggacaccataaaatgaggaatgataatagatcactgctgtgttatgtacaagtgttagttaatatcaggcctttcgcgcttttcagaccccatgggtctggacgaggttgggggaaggacagcatgggcttcctccacagagtcatggaaggagt

SEQ ID NO: 2755 - DNA, 999 bp, Artificial sequence
  DNA replication origin
ctgctcttccagggaatacaattgggacggtgagggggaggagtctgcgccccggaggcggaaacgctgggtcccaggaaaaaaaaggggggtccccggctgggatagtcttcgattggttctgccgtggtagggtgtgcgtgaggtggaagaagggctgttcctccacggcacggtggaggagttctgaagtcctaaagttggggcaggacctgcagcatggtcggagaaggggcaagaggcccggcgggaagaagcagcaagagtaagacaagtaggtcagggcctgcttagtactgagggccagacggccagaacgagcgtcgggagacaggaggagtgtccggggttttcgccctccttttttctcttaccaaacccaaatggtcctgctccccaggtaggctgaggatacagcagagaaaatgtgtttagccccttaaagagatagggggctgtgggtttgctatttttaagaaagcaaacggctttggagtctaaaaggctaagcttcctgccctcccactgagggtctacctgaggaggtctagacttgcctgcaaagaaggtagacttgagggtaatagtggaaagacaagtagcccctattcatcggccttcctcacccccttctcttgactccagctgttggcttctgtgtgactagggagatcagagaccactcacagaggcctgatcaagagagaagctaacacaaaggagaccaaagatgagaaccctgaactcttagcccctttttttccttcagtgggttcgttgtcactttcaaccaaaagattcctgactaaagcagacttagcatacagcaaggctctgtcctgttttgtccctgcttacttcaacctcatctgggtcactccacccccagctccacattccaactattggcaaggtcttcaggatccttgaacatcttatccgtcccatcatcccccacacttcagggacttaaatgcatggttctcttgggctctttta

SEQ ID NO: 2756 - DNA, 907 bp, Artificial sequence
  DNA replication origin
acttactccttcgagtatgtctcgttcccagtccagcctcccaggtgctctctgcagtcccggggggctctcccctaacctccagcagactcccccacctctagggaatcccttcttccaccttccggcctagcaggggtgagtcagagggcggcgagtcttgggccgttggctggggtaggagaacctggccagtgcccgtctttcccttacctgagcacagccggaggaggccgaagccaaggagcagcgccacggggccgcagcgccgggccatgccgcgggcatagctcgctgcctcgcctacaccggctggagcgcgccgccggggggagggccgcgggtggggcgctgtccgtggtgctgaagccgcgcccgcctggagctgggtccaggtggtgccggccgccgcggtggttcctgggcctcagggagccggctgcgaggagaaaccagcttcttgcctatcctggtatgagcaggcggaggcttttccggctgctcttccagggaatacaattgggacggtgagggggaggagtctgcgccccggaggcggaaacgctgggtcccaggaaaaaaaaggggggtccccggctgggatagtcttcgattggttctgccgtggtagggtgtgcgtgaggtggaagaagggctgttcctccacggcacggtggaggagttctgaagtcctaaagttggggcaggacctgcagcatggtcggagaaggggcaagaggcccggcgggaagaagcagcaagagtaagacaagtaggtcagggcctgcttagtactgagggccagacggccagaacgagcgtcgggagacaggaggagtgtccggggttttcgccctccttttttctcttaccaaacccaaatggtcctgctccccaggtaggctga

SEQ ID NO: 2757 - DNA, 1706 bp, Artificial sequence
  DNA replication origin
gacttttcaaccctcctgtagggtgggacaggaggcttggaagggaagaagctctgccaggctgaggactaggaaggaactctctgaggggatggggaggggtgtgttcgtgcagagttgcagagggggatgcagtgtgccggggaggggcaggtacaaagggaatgcacaactgaatgagctttccacacctacaggccacctctaggggtgggctgctgtgtgtgtgaaacttggggctacatatatgcctgacccacagcttaggcagcccagctattccactccaacccagtgcctttagggagaggggaggatggcatcgtgaccacagtcacatgtcattacgtgaggcacataatgtcatttgcacatgtaaatggtgaacgggaacagttatttgtgtcccaccacacatacactttctcctcaatcggcaggagaaaggatgtgtgtggtgggacacaaataactgggacaaataactgttcaccttcactgccctgctaaacctcccttgagtcataggtatttgctggggaagccatggaagcagaaatctcaaactgccctctgagactttgggggaagagcaggtctccatgaatccttgcagagtgggttcttagtctcaagtcatctctgtggagctgtgtagactctttggtcagtggtctcagagaggggcttttctatgaagacattaatctggggcctccctggggttaatctaagcattttgcagtatccttagggatgtagggagatactggttgggcctggattgtcccatttgcctggggagggtgggatgctgggtgggctctccttgcctgcttactttcgtcctgcctttcccctgcccaggggtgtggggtacggatacagaggagcggctggtggagcatctcctggatccttcccgctacaacaagcttatccgcccagccaccaatggctctgagctggtgacagtacagcttatggtgtcactggcccagctcatcagtgtggtgagtagaggtcccaggctctctgcccagctactgaaatcagccccgccaaaatgtgttaatgcttgtgtgcttcctcccctggtgtttccaaggcttggggaggtgtgagagggaccctgggtggtggcagtgaccccacaggcttaggggccttctcggcagcctctcttcctccctgcagcatgagcgggagcagatcatgaccaccaatgtctggctgacccaggtaagcgtaagtgctctcttccacccacacccctggccttctctctcctcctttttccccatgtgcttttttctttcttaatctctcaaaacaggcagaaaggtatagagtttggagtcctaaacaattggatttgaatcttggcactcaccagccttgtgactttaaacatattaaactctccaagattcattttctcatttgtaaatgtagattctaatactgtaccttggcctagctgtgcaaattaaatgagaaagtaccacatgagccatacctgatgggcagagaagtcactgtggggaagaggctggcttttaaaaggtccctcaagccatatgggccccctctagttcgtttccttaaccttgagccccacccagggcacaagttggtactgcctccctctctcatttcccaggagtgggaagattatcgcctcacctggaagcctgaagagtttg

SEQ ID NO: 2758 - DNA, 1352 bp, Artificial sequence
  DNA replication origin
cacgttgagcacgcacacgctggtgacgatggagaaggtgacaagcaccatggtgaacatgaggtacttgccgacgagcggcacgtcgagggaggtgggaggcacgatcttggagatgagcagcaggaagaccgtgagcgccagcagcactgagatgcacaacgtcatcttctcgccacagtcggatggcaggtagaagacaaggatggctagcgaggtgatgagcacacaggggatgatgaggttgatggtgtagaagagcggcttgcggcgaatgatgaagtcatacgtgatgtccacgtacgtagagtcgtcggggttctcgttgcgccggcccggcagcgccacgatgtcccactcaccactaggtgtgaagtcgtccaggctggccacctcactcttcagcaccaagtcgatctctgtgcggtcgtaggtccacgaacggaacttcatggtgcagttctgctggtcaaatgggaagtgctttacttcaatcttgcatgcgctcttgtagatggcaggcggcagccagaagatgctgccatcataggagaccacggcattggaatagaaggacacctcgtacatgccgtcagcactgccaaaggatgggcacagtcagccctggcctaagcgttccttcctccttacccatcaacccagcccctaatgggaggagagcaaaaccagagggagacatggggaggggacacccagatctgagagtaaccatccaggagtatagagaggtggaattgagcaagaaggggatatggggaggggggggaaggttagtgaccagaagaagtgtcctggtcagaaggcctgtgtgacaccttgcaggtagaagggggtggtgggtggaggaaggggacacatctgctacttgtcacacattgtataagctggttgatcctcatgagggtggagaagtcaggggagccaggaggccagagtgaggagccccaagcaatggaaggggacagggcatggtcccatcagttgaggaaggtggctttgtaccctagagataagatggattattgcaggagacaggatagaacctggaggagaaactgggaccttaaagttctttgatccttcccaggcttccaggaaagcctgttcctgaatcagttgaggcgctgggggctgtcaatacttgtttgtatccccaccacatcatcaaatacatactgggagtcctaaccggctgggagtgggctggtcattgcccaggtcaccttggctgtccacgctgtacctcactggtctgggtctgtctgtctaggtagtgactacatatctattataagtccctcccctcccacagcataagtaatttctcttat

SEQ ID NO: 2759 - DNA, 1192 bp, Artificial sequence
  DNA replication origin
agtgctgctggcgctcacggtcttcctgctgctcatctccaagatcgtgcctcccacctccctcgacgtgccgctcgtcggcaagtacctcatgttcaccatggtgcttgtcaccttctccatcgtcaccagcgtgtgcgtgctcaacgtgcaccaccgctcgcccaccacgcacaccatggcgccctgggtgaaggtcgtcttcctggagaagctgcccgcgctgctcttcatgcagcagccacgccatcattgcgcccgtcagcgcctgcgcctgcggcgacgccagcgtgagcgcgagggcgctggagccctcttcttccgcgaagccccaggggccgactcctgcacgtgcttcgtcaaccgcgcgtcggtgcaggggttggccggggccttcggggctgagcctgcaccagtggcgggccccgggcgctcaggggagccgtgtggctgtggcctccgggaggcggtggacggcgtgcgcttcatcgcagaccacatgcggagcgaggacgatgaccagagcgtgagtgccgcaggctgggaccccgggcgtgagatatggggtctgccagggcccgggtatctggaaagcagcggcgttctatagacatgcagaggtagtaggagtgtaggggaggaaaatgtgagtcaggcctgtgttgcgggcctgggtgctggctagggcccttctgggttggcttccgggagattgtgcggcctaaattggagtcggtggaagatgaccttgctgcttcctgagggctagcacccagggcaaaatgcctgagctggggcatcgttatatgggcagggaggcctgaaacacgaggaggccctttagggttggcagccagcctgtggccgtgaccccgagagtccctccccaccccccgctgcttgcatgcccacatccaagttgttaacctgcagctcttagcacaagtgatgagtcttttgtgcaccacacaggcaggagggggcaacattgaggacagtaggagtggtgtgtattgggggaggggtggcgttggtggcggggttagagattccaggagcctgcttgtggtggagagcatggagtcctaaatcaatatccctgctcttctgagtcccaggggatggcctcctgaaatatttatggagatgggggtgggtgaaggggaaggctccttggccccttcctcaggct

SEQ ID NO: 2760 - DNA, 1145 bp, Artificial sequence
  DNA replication origin
ccgctgcttgcatgcccacatccaagttgttaacctgcagctcttagcacaagtgatgagtcttttgtgcaccacacaggcaggagggggcaacattgaggacagtaggagtggtgtgtattgggggaggggtggcgttggtggcggggttagagattccaggagcctgcttgtggtggagagcatggagtcctaaatcaatatccctgctcttctgagtcccaggggatggcctcctgaaatatttatggagatgggggtgggtgaaggggaaggctccttggccccttcctcaggctttctgcatacccggcttttggcttcttctacagggttccctgagagcttctttgagactgagccaagagttggggggagatatgataggctgacatccccccgaccccgcactttgggtaggggccggccccaccctgtggtcagtctctggctacctggctggttccaggctgaggctcagctgttgccatggtgactggccaggtttcctctaggacagctgccattctggctgggggatgaagaagggcactgcggtgtgggcctcagagatctgtttccctggacagcaggagatgggttggagctgaagcttggaccagggagcatacactagaggagatggggtgggaaccttagagccagctgaggccaagtgggagatgctgggattcagggactcagcaggctgtggttaccgcctccacctctcctgctgcagtcatgcatgtattgtgcatttaccgagctaggtgctgaggatgtggtgacctacttggatgcttcacaggcacctcaaactcaacatgctcaaaactgagtatttggtctacatcctaaccaccaacttgctcctccaccagtttttagtacacggcatcaccattcacttaatggctcagactgaaaacccagagggatccttgatcctgtcctttctcacctccctctctgtccaattcatcagaagtcttgtcctgtcacaaccccaaagtcattctcagcttcatctgtttttcagcatctccatgctaacaccctggttctaggacatcatcagctcttgcctggcctagggcagaagagtctcctaatagtctccctgattcagctcctgtgctcct

SEQ ID NO: 2761 - DNA, 879 bp, Artificial sequence
  DNA replication origin
aggcaggagaatcgcttgaacccggggggcagaggttgcagtgagccgagattgcgccattgcactccagcctgggcaaaaagagcgagactccgcctcaaaaaaaaaaaaaaaagtaccttccgtagttctcatgcagcggaggggttcgacttgtaaccggcctgaaaccaagcgtggcgcaagatttgctcaagcccctcctcttggccaaactttccggaggggaaggctttccgaggaaacgaaagcgaaattgaaccggagccatcttgggcccggcgcgcagacccgcggagtttcccgtgccgacgccccggggccacttccagtgcggagtagcggaggcgtgggggcctcgaggggctggcgcggcccagcggtcgggccagggtcgtgccgccggcgggtcgggccgggcaatgcctcgcgggcgcaatgaatccgcggcaggtaagccgggccggccttggaccttcgccgccgtctgggttcgtttacaacctcacaggctttgtgttgcagtgcgtagcgtgtgcgtcttgtgagtgttagagtgtgtgtgtgtgtgtcgtcttgccaagcagcattgctggtttaggaatttgtgcgtcttgtgagtgtgtgtgtgtgggtgtgtgtcgtcttgccaagcagcattgctggtttaggaatttgtgcgtcttgtgagagtgtgtgtgtgtgtgtgtgcgtgtgtgtgtagtcttgccaagcagcattgctggtttaggaatttgtgaatttgtatcctgctcattaattctgcagaatggagcagtgcgtgaagagggcttgggggaaaatgcgcccccgtctgagtaggaaggcctgagcccatgtcaaggcagacacatcgtc

SEQ ID NO: 2762 - DNA, 1128 bp, Artificial sequence
  DNA replication origin
gagagccacacattggctatccttaggtgaatctaggaagtgtgtgcttatataaagatgtagatgccgaggctcaggatggaatttggggatccctgtgtctcattcatgatggagatggggtggaggatgaaaaccaaatcctctgggtgttccaggcaggtggatcacttgagctcaggagtttgagaccagcctgggaaacatggcaaaaccccgtctttacaaaaaaatacacacacacacacacaaattagccgggtgtaatgatgcatgcctatagtctcagctactcaggaggctgaggtgggaggatcgcttgagcctgggaggtggaggttacagtgagttgtgatcgtgccactgcactccagcctggacgacagagccagaccctgtctcaaaaaataaaaataaataaaaataaataaatattaaaaaaaaaagaaagaagatgcagacctgaactaaggcaggtacagtgtgggttgtgaacaggggtggactgtcaagatgtttaagtgtagaactgtgaaactgtctggatgtgaggtggagagggagggcttaggttagctagatggtggaagcagtgccttcccctgaattggggaaacaccagaaaagaaccagtttgcagagcagtgtgttgaatgtttggtcccagagggagtggccagcaggcagtcagacatacaggcttggagctctgggaggccaagtgaggagttacacactaaggactcattgctgaaggggggtgtcagtggtgtgggtcagagaattgtgactatgtgtacagtgagaagagcagagaacctgaaatggtgccagggagaccactgactttaggatcagggaagagccagggagggagaatgggaaggagtggccagagagtttggaggcaacccaggagggtggtaatagctgcagaagtttgatgcacagcgcacactgaggaaggaggatgctttcaggatgaaaatggcttttatagctcgtagattgacagcactggtctcctgcctccagactgggcagggacagtcatcaatgcccaggcagaagtgggcaagtgggcaaggtcttcatgtgcccctctctggggtcagggctgacgacctc

SEQ ID NO: 2763 - DNA, 776 bp, Artificial sequence
  DNA replication origin
gagtggctagagaagggatggcaaaaatttgtcaaaggcatctctgagagttccaagacgtagcgactttgtatattagagccaccaggaggggaggaggagagaagctcagtttcaacatgttgagtttgaggtgcccttgaggaacccagctgggagtaaggagttgaccttggggatgacgctggagcaagataatggactggggctcactggcagagggaaggcaggtatgagcagacgggcaccaggctctcagagccctggcctcctgttgaggtgtctttgttgacagctgggggaccttgggcatgccatttcacctctctgtcctctcctgtaaaacgggcgtcatgatttttgccttgtaggggggaccatgagaataaaaatgttttgaaaatagcaaagacataactaaggtgaagcattactctcagagggatagttggagccacggggcgggtggcaggccagggccctatggaaggggagtaggcagagggaggaggccgaggctgtgtggccagggctggatgtccaggctgagagtgccctggagacaggctgtctgtggttggggtgggttgggcttctgtgagcagctgctgggagacgggtgtcgggggagtgtcaggggccagcgggaaaggccagaaaggcttgagagatgtaagtagttgtccagttgagagggcagctgcagggacaccctgggaggcataactgtgacccgtgggcacccaggggactttgttctcttgccttcttcccac

SEQ ID NO: 2764 - DNA, 1324 bp, Artificial sequence
  DNA replication origin
tggcagattctgatttgcaaggcaaatactgcttagaagagctggggtgtcagggagagaaggactggaaccaggcttggttctggaggctgctgcccagcacttgaaccttggaacccagccaaggctgctttctgcattctgcccctcctgaagggagctcccatccttaagagagctttcttctgcaggtggcagccacagcagcctcagggacctcagcaactatggcctcctgcccagactctgataatagctgggtgcttgctggctccgaggtaggaagagcgggcctgggaaccatgggggtggggttggggggtgtttctgcagtgctgggcttctttcttggtgggtccttttccttagtcctgatggtcacctacatcacttcctgctggctgttagaggaattccagtagcaggaagaagtagatcaggccccaggggtcaggtgttggcacttggaccatgccatgaaggaagggaccagttgggtaagctgagacaagtagggatggatttcgaatggagagaccaatgtgaacaaaggtcctgaggcgatagtggggaacgccatgctgggggagactgtgggacacccatgggtgatgtggagacgtgggttggagccagtgttggagtgaggttggggacagagcctgggaacccctggaagagaccggaagagcctggctgaggccttcaggcctcatcctgatgggaaatcagtgtggggctttgggttagagggatcaggacaatcattgtctcaggcagagggtgaagccactgtgcatgctgggtgggaacagggagagagtgtttcaaagaccccctgcagcagtccaggtagcagctggtggggcagaagcccactgaggagggagaagggggttggcaggatggggaactgagtggctagagaagggatggcaaaaatttgtcaaaggcatctctgagagttccaagacgtagcgactttgtatattagagccaccaggaggggaggaggagagaagctcagtttcaacatgttgagtttgaggtgcccttgaggaacccagctgggagtaaggagttgaccttggggatgacgctggagcaagataatggactggggctcactggcagagggaaggcaggtatgagcagacgggcaccaggctctcagagccctggcctcctgttgaggtgtctttgttgacagctgggggaccttgggcatgccatttcacctctctgtcctctcctgtaaaacgggcgtcatgatttttgccttgtaggggggaccatgagaataaaaatgttttgaaaatagcaa

SEQ ID NO: 2765 - DNA, 927 bp, Artificial sequence
  DNA replication origin
gtgccaagctgttggcatctggagtgcccccaccccgcccactgctgttcggggggaaactgggctggttcccattaacagcagcagccggggagcctgagtggggctcctggggaaaagcagtagaagcaggtggattcaagggcttccccccatcctcaccaccagggccaggaaagccagggtccggaccaggaaagggacttgtgttaggcggcaggctggggagcccctgaccaggtctctggagaggagaagggccaaaaggagcccctggctgagcaaatcgttgggacagagaaggtgggcccagctctgctctgggaggctgtcccatggtgggtgagatcatgggaccaaatccccccactgggcccggcatcatctgcccactgggaggactaaagttttgacccagaggctggttgaagggttggctgggaaagttcatgttgcctgggggtgggtagccaggaccctgggggggcatgttgaaagcagggcccataggattgggagggaaggggggtggctgtcgacggagtggctgggggccccctccacctccagtgctgtagcctgggggtacctggcccgccatgcccccctgcacacggaagcctccgaagggcacaggactgccaaggaatggaggggctgcaacccccactttgggggctccgaagtcatcttcaaaagggttggatgcaaccaggtgatccaccatgggagttgggggtggtgcaaactccgtcagatgtgagtatgcagggccctagtgagaaacagttgagggaaagagggtcatggagggaaacacagagctaaaccaagagagcactaccaacacaatacacattttggaggctgatactgtgggcagctcaggtctaaaatcaatatggaccacaggccaggtgcggtggc

SEQ ID NO: 2766 - DNA, 852 bp, Artificial sequence
  DNA replication origin
gccggtgagcgcgctgcgaggggcgggggctgaagaggcccaggacttgggaacctcagaggggagggatggtgggcggggggtgtttcacagtctgaaggcttgaagggaggctcaggtgaaaaggatgggtgggtgtaatcctccaggggttgggggcaggtgtcacacattgaggactctagggtttggagccacatggaattcagtactcacttggagcttgaggatatcgaaagatgggatatctttcatttaaaggaagacgtagctgagagtatgatcatcttcacaatctatttttcatattgcaccccttgttagcatttgttgaataaataagcaagtatgtattgacgttaaaggagttcctcagagcatggctgagagaaaagaggttggggaaacctcagggaaacttgtctgcgtcttccttttgccgctcttccaggtctgcaaatgaagagtccagaaaagaagcgaaggaagtcaaatactcaggtgaatggtggttggtggtgggtttggttcccagcagccccttggcggcacactgtctactctgccattccagtatctgtttgtatcttgtatcagctgcagggaggagagagaaaactgtctttcttgctttgcttcttgttctttcgctgaaccttataacaagtttaggggaaagtatcctctcctaagagatgattcgaccaaagttcttaccacgcagggttccagtctcctccatgtttcctgtcctggtttcctcctgatgataacgtaacacctaccacttactgatcctttttttagtgccagggattgcgctaacatgctttaacagtttggggagatagg

SEQ ID NO: 2767 - DNA, 926 bp, Artificial sequence
  DNA replication origin
ggtgagctggtgtgggccgccgctagcggagacgaccctttccactcgcgtggtgccgtggtaagcctcgtccctcgcccgccgcctgttttcaggcgtagcgtctcgtccggtccttgctccccctccccgcagcgctcagtggtggtggccgcgacgagttccggttccggttgctgccgccgctggcgggcggcgagtctggagagagcgcgcagtttgcgcggcggctcggcgcttccctgtcgtcgcactttgtggttgctgcagctcgggggcctgggctgcccctgacaccccttctgggcgatggtgcagcccaagggcgcctccatcccccgccgctgccgctaacccgggtcccccactccatggccgcctcggcgccgcccccaccggacaagctggagggaggtggcggccccgcaccgccccctgcgccgcccagcaccgggaggaagcagggcaaggccggtgagcgcgctgcgaggggcgggggctgaagaggcccaggacttgggaacctcagaggggagggatggtgggcggggggtgtttcacagtctgaaggcttgaagggaggctcaggtgaaaaggatgggtgggtgtaatcctccaggggttgggggcaggtgtcacacattgaggactctagggtttggagccacatggaattcagtactcacttggagcttgaggatatcgaaagatgggatatctttcatttaaaggaagacgtagctgagagtatgatcatcttcacaatctatttttcatattgcaccccttgttagcatttgttgaataaataagcaagtatgtattgacgttaaaggagttcctcagagcatggctgagagaaaagaggttggggaaacctcagggaaacttgtctgcgtcttccttttgccgctcttccaggtctg

SEQ ID NO: 2768 - DNA, 779 bp, Artificial sequence
  DNA replication origin
gttggaatgaatgacttcttgatctttcctccattctcctcccgctttctggagttgtcactccatcccagccaatgcctgtcggtcccctccaaactctctccccagtgtgtgaggtccttctagcctgccttttctttttctcctcattccctgttgtctttcaccttggttgtgggatgtagccacgggaagtgggcagaacttcttcctctttacttcccttagggaccatatgggtaaagtcctagggccctttgtgaaggggctggggtgggggagccgctgacctgctgtcctcttctccctccccttagtacatgggttgtgtggaggtcctccagtcaatgcgtgccctggacttcaacacccggactcaggtcaccaggttagtggggagggagtggattgtgggagtcctgggattagtgaggccatgggaaacagaggaggggagtgggtcacttgggtgctgctgctgggggctgatctttgcgtagtaaaggggattgagagaaagctgaggtagtgattccgcctcttactgaaaggaggcccctttggcccggatcctccttacctatccagccttgggagttgtggggaaggtggcagaagcagctggcaggtggagctggagtagaaaaggggggtagatggaaggttgctgctgcctttgggaagggaatgggacatttggtagctggaagggggtggggctatacccattgaggccctaacccaatcagccaggaagtggcctctcagtgtcatcaaat

SEQ ID NO: 2769 - DNA, 733 bp, Artificial sequence
  DNA replication origin
aggacctccacacaacccatgtactaaggggagggagaagaggacagcaggtcagcggctcccccaccccagccccttcacaaagggccctaggactttacccatatggtccctaagggaagtaaagaggaagaagttctgcccacttcccgtggctacatcccacaaccaaggtgaaagacaacagggaatgaggagaaaaagaaaaggcaggctagaaggacctcacacactggggagagagtttggaggggaccgacaggcattggctgggatggagtgacaactccagaaagcgggaggagaatggaggaaagatcaagaagtcattcattccaacacttattaagagcttctgccatgctgggcattgtgctaagcatgccagggtgggggtgggggagtgaaaagaaggaagggggcccaggcaaagctggaagggaaggggctacagaatcggggaagggatgagaaaggtttaggaaataggacactgaaacggggttgttggggaacagcaggaaaaaagagattccggccaagctggagtgagcattagaactggagggggtctgcgggggaatggagaggaggatgttcactcacccgaaccaagtaggaaaccccgggtcccatgactttgtcgttgggatgcagccagccccgcgtgggcttattgacaaagctcccgtggcgggtccactcctcgcccccaagctggcccccttccacc

SEQ ID NO: 2770 - DNA, 810 bp, Artificial sequence
  DNA replication origin
ccagggatgaagctgatggggaaggcagctcctccgggggggtggacccagaagccccttcctccagcgatgacagagactcattccggagtggattgtacttgggcttggggggcaggagatccatagttgaggtgaaagaggggctgctgcccagcctggcccccctgccagtttgggcaagggggccaggcagggggtatccccaggcccttagcctggttggacctctgtggcccaggagtcacagaagtcctggggagggagagggacaagtggcttccgctccccagctcagacccagacagtttcaggccccatccccgcccaacgtggagcctcttctctggctgagaagagaacaggctggacccagcgcttctggctcctccccaggggcggggagctaaggggagagaccaatcgtgaggacagtgctgactcacaggctcagaggggctgagcccccaccccgccccaacctcgaactggagcagggggtagggctatccaagcccctctcccctgccctatacaaacaactagtaatctggggagaagtaaagtgggggtgggagggaaggatggaagagtgggacggaaaggaaggagataggaggtctgggtcactcaaaaccggacacacgcaggccaaagggggcaggaagccaggcaggagtacaggggaatgagggaggaaacagaggcagctgggggtggaaaagggaggagatctcagagctcagcatttcccttcctgtcctggttggacactcgaattcccccaccctctctatgcccgaaagctgg

SEQ ID NO: 2771 - DNA, 809 bp, Artificial sequence
  DNA replication origin
cgggagaggggttccggggtgaaagagtgagtcacctaaggagaaaaaagtcaagactcaccagggcctcatggagtctccgcaccgcaccgcgggccgatttggtgccggatcacgccactgccagcttaggttaccgctccaactttctccccgggccctgcctccctggagaaactttattacactcacttccggcctcactaacccctgaccctctacctcagggtccctccttcacgcttcccactttcccgagttagccaatggcagcgcgagatcgcgcacaaaggcagtggtggccaataagacgcctacttttgacccacgctcgttcttgagaagcgtgagaactgccctccaataaggatccgaagagaagtaaatctaagccaatcggaggcttgaaagtagaggtgtcccgcctcgagccaaacggaccaataggaagtgcgggcggcgtgtttgaaagcgaggccaaagtgggtgggagcgcgtgctgttgggagttgcttggaggttggcggcgcggggctgaaggctagcaaaccgagcgatcatgtcgcacaaacaaatttactattcggacaaatacgacgacgaggagtttgagtatcggttagtgctggcgcgggagcaatagcgagggtcgtgagctttggccgctgagggcacaaggaattagtaacaggaactgaggcgatagaattggcgcatgcgtacgaggtgcgaacgggcaatggtgtgatattgtggaaggcgtaaggcgcatgcgcggaggtgggaggcgctcgtaaaacaaagtggtt

SEQ ID NO: 2772 - DNA, 858 bp, Artificial sequence
  DNA replication origin
ttcttcggcctcagttcctttccatcattcgccctcaggccttcgcctaccccagcttcaaagaagcgaccgtaacctcctagctggctgggttcgagaagccggggacctgcgcctcctggtggctgatcggaaggaggctgagtgcagaggggttgtcttgccttctctgggacgtggagttttggaaactgttcccctgagcttcctgaagctaaatttgcctcccccggccttggggggcgcagagatcccggcggcgattagcgctgcgcggcagccggctccaacccagaggcccggaataggcgcggagttataaatagtgccacccgcaggtgttggggggagtcggcgggaggggggtacccctggcggccacggccccttcaggtgggttgggcggtcgcggtgggagcgctggggggcggggggcgtggggggtctgcggtctgagcgcccccagcggtttcctgggcggcgggtttttcgagggaagcggaggcagcggaggatgggggggagcagcggagaagaggtgggcgcctggcgcatgctgacgctccgcttgcagctcagccccccacattccgaaacaggcccccagacccactcacgcaggaccccgcccaggcaaagcctcgcctttcttaacacctgaaggcctcattcccccaggttctgcaagcatctaacttctatgcttctacccttcggcgcacgtggcccggccagtccgcgcacctggccgtcattccgagtcgctgtccccagccccaggtattcagtcctcccactcggggctttcattcctctcttagggtaaacacttccttctctgggtatttgtccaactcg

SEQ ID NO: 2773 - DNA, 784 bp, Artificial sequence
  DNA replication origin
cctgagggctcaggccaaaccaaacagccccccaccccagacattatctcactggagaattaggggggctataggaaggaggaggtagcggcaggcatggggcgctctggctcgagtaatccgctccgggttttcctatcgtccctgacccccttgggtcgcgaggctgatcactgctccgggttttcttctcagccccgccggacagatcctggtccggaggggcccggagccgtccaggccggggttttccccttcctactccagccgtctgggtcgtgcaggcctggtgaagggctgtgctaggggctaggcggcagtgccacaagtgaaatggagagggggctgctttggggaggaaggaggatagccaaggaaagggggcggggggcagggggcggggggcggggggggtgggaacgtggcccggggagggcagagccagggcttccagaggcaatagaagggcgggctccctggcaccagcctttgggtacagaaactcgaaaggtgcccagtgcctcaggctcgcctcgcccaacttcccccatgtttgagggtcgcgttctgcgtctggctgaacatgactgatctttctgcggctagattgccactcctcacctcattcccaatggtcctggaacccgcagttagttcctcagtgacgcccaccctcccttgtctctctttttctcctggtgcaaatagctcccctccttactcagaaatcggagcggggaacccctacttgaaattccctcttaccccaacccctaaccacgcc

SEQ ID NO: 2774 - DNA, 1196 bp, Artificial sequence
  DNA replication origin
gctagcaccggcgcctctgcccctcccctgctccggacccaggctccccgcccccctgccccccagggcgccccgaggtctcaccatgtctcagccgccctttgatacgtgggggttgtgcggggcggggggcaggggacccgccctctctctaaacaccagcagggccggggcgcctgggcaggcacgtgtccgggcacaacccgctgcccacgccgcccccccactcccgcccccacctcgctctggccgggacacgtcgctctcttacttgggatggggtgggaggagggagagaaagctggaaattgaaagcagcgccccccacccctttgaatggcagccttctgccaggcgcactctgtaggttctacaacaacacagtagcgacccccactctgggctggggcaggtgcgccggcgccggtggggggacgggtagtaggtaggagaattcttcctagtcacccgccctcgctcttgggttctgtggtcatgagctggcgtggaaaaggtagcggcgggactggagcctgaaggaagggagtgggattgaggggcagggaagagagcggtcgttctatgtcggttcagaggttgttgctgagccccactaccgctggagagagcgcggctctggaagcgcaagaaaccgaatagtccagccggtaactttcccccaagccgcggctcctcctgcgcccccccaacccccatgcaactggcctggggccaatccaccgcgccagggggcgcggggtggggggggggtgcgcgttgtcctagttagagtccgtcagcgtttccattccctcaactcagtccggtctggggtctccccctaaagtcacgaaggagactgggggaacgctcagcgtcgcctcaccccctctccatcccgaagccgtctgtctgtctgatcccaggagaagtgcagataaactttctggggaccctccgcctagggttggggggcatccgcagttccttctctgtctttcatctcagttaaaaccaattccagagacccggggtgttgggaaagcacagggaaggggagtggtgggaatgtgatctgcatgcgtgtgtatctgggggtcccacttacaggacggacgaaggacactgcagtagtctcgagcctagtgaaccccgagccaggagacaaaagtggggtacactcacctctcagccgt

SEQ ID NO: 2775 - DNA, 703 bp, Artificial sequence
  DNA replication origin
ctacagagtgcgcctggcagaaggctgccattcaaaggggtggggggcgctgctttcaatttccagctttctctccctcctcccaccccatcccaagtaagagagcgacgtgtcccggccagagcgaggtgggggcgggagtgggggggcggcgtgggcagcgggttgtgcccggacacgtgcctgcccaggcgccccggccctgctggtgtttagagagagggcgggtcccctgccccccgccccgcacaacccccacgtatcaaagggcggctgagacatggtgagacctcggggcgccctggggggcaggggggcggggagcctgggtccggagcaggggaggggcagaggcgccggtgctagctgacccacaggaaacgagcgctgctgacctagtttgggacaccggaagtgggtgctggggagagggggagaccggcaggctgtccaggcttccgggccaggtggagggtgttcttgaattgacccccgcccgaatgccttggagacccctagctgcagccgagaatgggaatgagtcagcgcagctattcccccttcccccaacttattcctggaggagggagaccgcttatcagggacgggggaaccagattgggctgtgaggggttaaagcaggatgggaactgtctggtccctaagggagtatgtgtgagtgtggggatgaggcctggaggat

SEQ ID NO: 2776 - DNA, 1095 bp, Artificial sequence
  DNA replication origin
gggaccccagctcccccagcgtgcctctgttacatggttgctgtgggcacaacacaacctgctggcacccccagacactgtcccctcccttgggtaccacacacccccagccctggcacaggggtcaaaaaggggttaataccaccagaatggggctctggggaagaaagaaggcagtgcccactaggctcaggtgtcaaggagacaggcttgctctaatgggactctcatcactactcagttctggctgatgtagaccccagtgtctggaagacaggtgctgtccccttcttcttccccatggtgccccctggcacccagggcccccagctcctccttggcctagtgcctgcccagggagggtgcggcgggcagcgggggctgggctaacaatgcaccatcaggccctttgtgtgcctgcacttggcaccctggggaagggtgggggagggggcccagcaggcatggggggcggagcgctctggggtggggacagtgaaggctgggggagagaagcaaatgaaagcaggtggggaggaaagggaagtaggtcagatagggtgccagccccccattccaagccaaggctgagagaaccagcccctgatcctatggctgcctggatggcatcagactgagggacagcctaggactgggcatttggggtcagaagtcactgcccaggggactgctcagatggagaaggtttggcctggtactgcccccttcttaatggctgagagacccaattcttctggcccaagaccaaggccccaagatgagtagtgaatgggctccaggcagggcactgccctctgacagaagcctctgggcctgctgcggggcttcctgcctctgccccgcttggctccctgaccttcctgagagttaagactgccctgacaccaggccttagggcctatgcctgttttggcctagggcgggagagaacagtgggggaggaaggtggggacaggcagatggataggaccctggcatggggtgtgcccgccctggcctcttccccctccttgtgctgagtaaactcgtgagtaaacttgacgttttgcccggacagtttgaagttgcctcgct

SEQ ID NO: 2777 - DNA, 893 bp, Artificial sequence
  DNA replication origin
gtgaggacaggtagcatgtctcagcaagggagatggatgtcaatcataggtacacagcatcccatggcaatgcgatagcaagaataaagtggggggatgcagagggtacccacattccaacccatcccagttctgactttcaccttcatccagaaacacttccagactcagccaaattgagagctcaaggactacaactcccagtgtgcaccacaattgctttgtatgtaccttgggagttgtagtcccccttgagaagctctgggttctcctcttccccagagccttgctgatgggtgagaagggcagatgacttggtcatgaatctccaagggggctaggtttaagaagaggtaaaaggctaggatgtccatggtggaggaaagaggacccctgctcccaggcaaagggggaggaaaggaggaaggaaggaggagaggatgtctgttgaaaggggcatatgggtggggaggagttggggggacggtggaaacaggaaggaaactgaagccagagacatgaggtcgaaagtaagggcctgggggagccccactctgaggcctgtcagggactgggatggcatttccccatgtcattctgttggcctgggaggaagaagaggatcagtgatgtcaaaagatagcaaattgacatatttatgggggatcactgtttcatttgcctgccatcagccctcttttgcctggggcaccttcgacccctgaatctggcacaggtatttgctgactgggaagctctgaaggctgacctggttctggggaagatagcaggcaaaggaaggggtttggggagatcagggctaggcctgatggtgaatatggtagaggtatatgtggggttaggcccaggtgtggtcagggcaagtgctggca

SEQ ID NO: 2778 - DNA, 756 bp, Artificial sequence
  DNA replication origin
gcctccgtcccctcccctcccttcttccttctcctggtcccacctccagtagcctctcccattgctcctcctcatctctgtcctcctggactgtcccagctcctacctttcctacccctcacctttttcctcttttaggactgagtaaggacaggagtgggtgggttctgctggggcttcaggcaccacaggcagagactctgggccctctcccacgccgccagccctccggtaacccctccctccaagctggggggaggggggacagcacccagagggttaaggctgtaggggggaggggctgggccaggtcgtgggcggcccctttgaaggagggagctggagcggggaacagccaccctacctccccccaagcctggccctcccccacctgtcccaacctgctgcccccaggggccaggaggagttgccgccaggcccctcagcgttcaggtgagtaggccctgctctggcttgggagatcaggccccaggggggcttggaggcctagaattagccaagggtcagaggactgaaaaacaggtcaggaagagggtgcccagacttcacaagagagtttagggaactgagggcttgagaagcgggaatgtggggaggcctcagtgtttaaggggacccgagcagatcaggagaggcagaagaggggcctatagggactgagtgattgctgggccaggccaggaggctggacaggctggcagagagccgggctccggagatcgggctggggtgtcc

SEQ ID NO: 2779 - DNA, 795 bp, Artificial sequence
  DNA replication origin
ggtgtggggttaccagccagctcggttacccagccggagacactaggctgggggggagggggtgggcacagggcagaccctggcaccttgtgcggtctcctcaggccctaaggggagctggcactgtccaggcagaccctgctgagaatcctgatggccagagtctgtccaagtggacaattgcctggtccagggtgggcaccctccggggaaagtccagcagctccagggctggaaactctgacgggcagagaggcacaggttgtccccccacccccaccccacatccgctctcgctgcaaacccccctccaccactcattctccccaactggctcccaaattgtggtcccctgcttcatccaaaagtggggtgtgggtgccctaaactcaaccatcttttggcaagaccaggcattggaaggcaggcctggtccctgatttaattcctctgcggctctccacccctcatatgcctgggaagaagggaatggatggttggagcagggggccaatggagaaagtggagaagtttgagcaagagagaaccaaggggaagagaaaggagaggcagggacagttcctgggaggaggcctagggacactgatggggtggagaggatgcggagttcagggagggctgaaggaaggaaagcaaagggtggacttgtggagggaagacaagggtcggaggaggcaatgaggggacagaaccaggaggccaagagaggggcaagagtgagggctggatgatggcagggaatacccaaaggtggcggcgctaaggctgagagag

SEQ ID NO: 2780 - DNA, 845 bp, Artificial sequence
  DNA replication origin
cagcactgtctccagttgctccagacccacaaaatgtcagggctgaaggtctgagccattggggccactacttccaccccctccttgcacagctgaggaaatggaagcacagagagaaatgactttcccaaggtcattcagcaagacagtagcagagccaggatttaaagcaggtctcacccccttccaggccccaacccctgccgacacctctgccagccttggtgctctgcacccacctcctggctgctctgcacccacctcctgtggctgggccttggagggtaaaggatagagagcaggaccaaggccttctggagacggggctctcctggaatagggagggaggggtggcagtagctgagggggaggtggggggtgggactggaacttggcctattggcagtgggggagggggcgggggcgatgcttatctgtgcggggcaggaagcacccgcgccagccagtgacaccccagcaaagggtggctgctccttggccccatgggggaggggaggatgtggggggagggatgctgggagctgtgtttcccgtttggcctggagaagtgggggatctagaaggggagatgaacttttggtagccaggggaggggcaagaggaggaagaggatgatgcttggaagctgccttctcttgtttgcatatgttttacagtgtcctaaccgctttggagagcgataacttgagttaaagcacctgtctgtgcctggcctccagcagatcttggtccagtgtgagtctgaactctctcattggcctctccccaggttatgaggaggttcattacaaagactgttacctcacttttcaaatgactgaggc

SEQ ID NO: 2781 - DNA, 1048 bp, Artificial sequence
  DNA replication origin
cccatcccttgacctatgaggaggaggaggtggcgggcagagtgggcagcagtgggggcagtgggccgggggacagctacagccctcccacaggaactgcctcccctcctgagggtccccagagctacgaaccctatgagggtgaggaagaagaagaggagctggtatatcccccagcctatgggctggcgcagggtggcgggcccccgctgtccccagaggagctgggctcagatgaggatgccatcgatcctgacctgatggcctacctaagctccctgcaccaggacaacctggcaccaggcctggacagccaagacaagctggtgcgcaaacgccgctcccagatgcctcaggagtgccctgtctgccacaagatcatccatggggcaggcaaactgcctcgccacatgaggacccacacaggcgagaagccctttgcctgcgaggtctgcggtgttcgattcaccaggtgagcagcaaggggggaagggcccggcaggggccatgggtaggggacagggtgggaggagatggggaagaagttaggagacccgaggtggtggtaggtggtcctggagggactggggcatgggtgggttactggagtgaggagagcagaagaaaacaagccagcagggggtggatctggagcatggaggattcggtgcccaggagggcagtgctggaagcagaggagtggataatgacaaggcctagttaagctagaggtgagctagcagggtatctcctggggcaatagtggggtaacaaatggtgaggaacagggatgggacaaggccagggtgggatgaccaggaggagccagggatcccatcctgaacacctccctgcccctcacccctgcctgtgccaggaacgacaagctgaagatccacatgcggaagcacacgggagagcgcccctactcatgcccgcactgcccagcccgcttcctgcacagctacgacctcaagaaccacatgcacctgcacacaggggaccggccctatgagtgccacctgtgccacaaggctttcgccaagga

SEQ ID NO: 2782 - DNA, 808 bp, Artificial sequence
  DNA replication origin
tgtaaacgctggctctccttactgatgtttgttatggttgaggatagattgacaaaaatgagggaactcaggtctggttcctggagggcaggatccaaagagagcagagaggggaagactcagcattggtgtggtagcaagccatgggcagagagacaaaaaagcaggatgaggaggactacaggaggacaggcaggccaggcctgcacctggaggacaggcccggggaggcccctgaccccgtccactgttcaccagtgatggaggtttggtgccgcaatcgcatcccagtggaaggcaactttgggcagacctacgactccctcaaccagtctattcgtggcctggatggggaattttcagccaatattgacttcaaggtagaaggcaagggcgagggttggtggggggtagatagggagtgggaggagggcatgagggaatagagctagaggaaggacaagtgagagggcacaggaaagaggtgaccaggggtgagggagggggacaaggagggggaatgtcgctggtgttgagggggccctctgtttcccatctccacccccgaacacctgagatgggcaggggaggggaaaggtggtgaggaggggacagtgccaagcctgtggtttgtgcagacttggcctggggtgggagctatcagccagatatgagatgatgtcagctgatgtaggtgcaggggagcaagactgtgtccaggagggtggtgagcagaaggaagtgacaactcctagaggtcctgggagggccccagggacacaagtggggtactggggaacagatgtca

SEQ ID NO: 2783 - DNA, 1308 bp, Artificial sequence
  DNA replication origin
tgggagccggtgcccggtccgaccggcttgggcggcgcgccttcacccggcgccaggtccggacccctccctagtagcttcgcggcctccctgcctcctgtgcgcggcctggctcggagaggtcgggcgggcaggctttcccgactgcaggcgaggcagtgcgcggctcaccccagtccccgacccacgtgaagcgtacagggcattttattaaccgggaaggacggtgcggaagagcgagcaggacgcctcttcaccccgcgtaggcagtgtcgtcgttgctgtcactaaaggcggaggaagagagctcttcgcggggcgtgcagaccgggcaccgctgccgcatgtcgtcccagcacgaccagcagtacacggcctcgcagtccagcgtccggcacacgtaggactcgggcgtctcgggtgcctggcacaccacgcagcgccggcacagccagcggcgcaggagcgggcagccgcggtgcaggatatccgccagcgggtggcgctgttgggaggtgggcgttagcgccagcccgggagcgaggcgggaaagaaggggaactggacagcgtttcctgtctgaagtcgccaggcctgacaattcccgcgtgttggaggaggctgggttggacaaaggaaacccctggagggcgagggtgcctccctccccaactctgtgatggagaatgggaggatgcaccctccaggctctctccaagcggatatcagccacaactctcatttgcactttcctgtaaatcatcttatttggttctcacagtgaggctgagaagtgagcaggccagatcgactatcactgttgctatccccactttacagttgagaaaggtgaagtgactctcaaagtcacacagatagtaaacaatccaacttggctggaccccaggggccctgattccaaaccacaaacctagttcactatgctccctgccatccctcacgacatgtctctacacagttgtcagggattttccacaggccaccttacccaggaagcagccactctttgcccaagaaactccagaggccctgctgcctgccagacaggcagaactcttgggcttggccttcagagccttccctcacctggtccctttctagcctctttcctactttagccctccctgagagctgtctcttctgagccagtttctcctgagactagccctggcacttcgcattccctgtggactgagtctttgcacattctgcttggaatgactgtctggcacatttccatctgtgcattcacattcagtttgcttcacgaccctgtcaaggaatccc

SEQ ID NO: 2784 - DNA, 2054 bp, Artificial sequence
  DNA replication origin
actggggtgagccgcgcactgcctcgcctgcagtcgggaaagcctgcccgcccgacctctccgagccaggccgcgcacaggaggcagggaggccgcgaagctactagggaggggtccggacctggcgccgggtgaaggcgcgccgcccaagccggtcggaccgggcaccggctcccactccgcacagttgcggggaagcggtagcgctgagcagcgcgggcgtagtgggcggtgtccccgctcccgaggcacccggcgcgcagcggggcgggctttgccgggggcggagcttggcttggggccgggtgggagggggcgggccggggcggggcctggtggccgcgcggcgctgctgggttctccgaggcgacctggccgccggccgctcctccgcgcgctgttccgcacttgctgccctcgcccggcccggagcgccgctgccatgcggctggcgctgctctgggccctggggctcctgggcgcgggcagccctctgccttcctggccgctcccaaatataggtgagtcctccgcctggagtgggtcggggggcggactgggagggaggtgcaggaaagtcggaaggcattagggtaatggggccggacggagaccctgggagagcccagccagagcgcggcccgccctggtccgctgtcctgggcctagggcccggtgacttggcgatggggtgaaaagagaaggaggggggatgccggcgccccctgcctcctgcctggtcatcctctgcgcggtccctgcggacactttcaggctcaggtaccaggtaccgaggggcctgtccagcgccacttcaagatcgtgatgagagggtcgctgctccccaggactggcatcttcgctgctctggggcctagctaaccgttcgacccggtgccagggcgctgagcgggcatggcttgtagggtttagtgaagaggattctctctagcctctattccaggcctggggccgccaggcactcctcaccctggtgctgttgccaccagtgcctggccgagcgggaggggcccgagatgagccaggagaagggagaattggccaggaaagaggctgggacaccaactcctccttggaactttcacttcccgctgctgtcttgggccgggaccgagagggcaggcgcgggtggagtgtccggaggagagagggccattgtgtgttgggggggtggggggtgctcgaggaggaagcagaggctgtaggcagcgggtgtgcctgactgggcatgagggtgtttagggaggtgggggtgtttgcactgctcacccagaaatgggcgttcctggcatctccgatgtgagcgaaggggagggtgagcgggcacccggccacaaggcttagctcagtctcgagagggggcgttcctgaagtggggggagagtgattgggagggagtgggaaccggggagggtcctgtgagaacctgggattggccggaaggggacaaggagggccacaggctgcgcaagccgaaagtctttcttggggacttgtgaatgggttggtgggtggaaagccataaattagagagacaccctctccttccagtattcttctttaagtctcagcatgcaatgtggaagcccctcaggtacctaagggtcttgatgggctgggagctggtggatctgagggcacctgtcacccccagccctgctgtcgattccctcagtactgtcttggggtgtcctgggacctgcaggtggcactgaggagcagcaggcagagtcagagaaggccccgagggagcccttggagccccaggtccttcaggacgatctcccaattagcctcaaaaaggtgcttcaggtgagctctcactcccctctaataaataaacgaatccacacacgccccggtatagccaggtgtctcaaagccaaagcttggctgaggagctggtgggtagagctcactgtagtgggtctatcccaggcccagctgcctctcccaccacaccccagcacctggcttcacttatctccctctccctctgcacacacgtgtatctgtctgcctcagccccaccc

SEQ ID NO: 2785 - DNA, 778 bp, Artificial sequence
  DNA replication origin
cacttgggaggaactgaattgggaatgaggaggagacctggaaataactcaccatgttcacacctcctgagaagtcaggagaacagatggagttctgaatggccatgcccaccgtaggcccagagaatgaagtaccactgtgggacagagaggctaaagttcagggccagaagccacggtggtcagagcttcaggggctgaggtagggtgctgaaggggtgtgaatttggccaggacaggactggcctctctggctgagtctggggcccttacgtcaccagctgggcactgtcatggggcaatcgaggcagcaaatgtgccctgcgccagtggaggaagttttcgagggtgacagctgggtttgggctgatctccaccaggtcacgctgggtccaggcctccaggcccactagtgccactcgtacattcaggggccggaagaactgaaagacagctggggctcagaagaggggttgccatggtcaggggcctggggtgggggttgccctgtccagcactcactgtgtccagcaagagggccacttccagtgtgcggtttagcaggtgctggaagtcccggtatttctgggcctgtaggccaagagaggtgacatgaaaggcggcagggcagtgcagggggaggaggatgtgcaggggccagcaggctcacctccgagtgatcagccacaatcaccaactccacagtcttggtctctgttaccacatcccgcctctactatggacaagaagaattatcaggcaaacctgccgctcgcag

SEQ ID NO: 2786 - DNA, 2791 bp, Artificial sequence
  DNA replication origin
ctgagcagagacaggctgtgcggaccttcctcaatcccgtccaacccccagcccctccccaagcccccgctgcaactacgccggcaggtccgcagagtgttgcttgacagcgcgtggcggtgcccggagtcttaagacaccgccagtctctggcgccttcagtcatggtaggggactccagagggcacgcccgcctcttgaagccctaagtccggcttggaggcagcggaacctccggagaggtcagaggtagagcgaggacactgtcggaggcggtggcgctggtctggattgcgggaagccaagaaaaaagagtcagaggcccctttcccccaggtcactcgccccgcccacccatgcccagggctcctcctacctggagggtaccactaggggcgggattccagcccctgggccgggcaggtcacccgatgggcaccggccctgggggtcggcaggcagtggcttccttgggggtgggggcttggctggcccctgagactgagggagagaaggcaggaggccggcttaggtgggggggtgtcatgttgcccacccccaacgcactggtgctggggaacaccagcttgggggcagcaccagcggtcacccttgtctgcaaacaaacctgtcaccattaaaggcaccaccgggatatgtgccctcatgcactgagggggcatctcgccacggccaccaccgtcatggctaccagcaccacagccctaggtggggggagaggccgtgcccttctctccccccaccgttaccttcgggcttctcaccaccgggtcagcgggcagagggcgggtagggggattgggtcggtcagccagctcagcctgaacagagagaggggcagtggctgtgagagcataaccaggggctgtggacatgcacagagattccccagaggggttcaagtcaacatgcaaagtcagccagggggcaggagagaatgagggcatgcgcagagggcttggaggcatgccagctgatgtctcaggggaggaaggtgtaggtcaaccgcagtccctggccgactgcagtcccgccattgaccaccagatggtggtagaaaccaaggcaggaggctcaccctttgctgcttctggggctcagagtgtctgaaggctgaggggcaccccgatcacctaatgaagagcaccactggcagggagcagggatgagaactgcagttgggtaccaagcctcccacctgccttggctcagggcgggccctggcccagatttacctggagtctcttggacacagggtcaggcggcagcggcctggaagggggggccgggaagctgagagcactagcctgctgagagggcaggaggggcagataggcacagagggggaagaggaagcagagagacagagtgggcagggaagggtcagtgcccagggggggccagcaggggcccagggcagtgggtgctgtgcatgcagttatgcaggtgcatgcaggtggggagcgagtggggaggaggtgtgcacacactcccatcatccaagcagagggctcagggtggggatgctcaccagcccttctaacatggtgacctgggcctacggaaggccattctgagcaccactgcccttgtgccctcctggggtcactgctgggggcatggatagatccacctctcaaagccacctcttggccagcggacggagcccagcagctcctgctccagctggctgccctccccactcttctggactcagcttccctgcctgtagccaggggaggggagggcagggctggccctgactccttcgactgactcttgggcagtgctagcctttctctgagtctggagcctttaatgcgcaccccccagggcccaagctggatgcccggccaaggtggagtccccttcctctggcatccaggactcaccttagtgcctcgtgccagcagggccctctgcggaggtcctggccgttcagagggaccagattgggctgccctatgcatgaggaaaggcaagaagggagagggcccagcctcagaccctgttttctaccatatgccatccctgagtggggttaaccctttgcaggcacttatgtgtggtttaggtaaaattgtggtagggccggggtggggggcagtatttattagcttgagggaagaccctacttatccagcacaggggctcctggggagaaatggccctagcaatccagccaccccacaggggcacagctgtgaggtaaaaagctgtgggcacatatagggaagggaggtgtggggtatggcagtcagcaactttaaggtccaaggggcctggggctcagaaccaggtggcaggggctgcagaggtgaggcagccttcagcactgtccccagttgaaggaagtggtagcagggaggtgatgctcatacctgtactggcaggtgggtcccttgagctggcagagtcgctggtgcaggcgggcacggtaccagtagctggcaccaagcatcaccaggaccaataagaccaggaggctgaggagcagccctgtggtcagggagctggttgctgtgggcggaagtcaggtttaagggaggacggggctaagaactctagatccatgaaggcgcagggggcagggagtgaagtcaagtgatcagggagagtgaagggttcaaggggcacagactcagggaaccagcagcaaaggggggtcagaaagagagggccgagggggcaagataaagcatgagacgctttgccctcccagctgcccctgtcccccacccccatgctacctttgagctgagtggtgcag

SEQ ID NO: 2787 - DNA, 1520 bp, Artificial sequence
  DNA replication origin
aaagacccaggaccagttgtagcaaactgaactcaagaaggagagacgaggcacgcgctggtctttcccgagggggcagtacggtccccacctcccacgcgtcgcgcgctcccgaccggagcgggacggggcctgtcgggggcgcgccaggggcggggcttcgggggcgcgcccaggagggcggagggaagggctgggggcgtggcctaaggctgggggccgacggcggcggcagcagggagctgggaagcggagaagccgggagcgcggggctcagtcggggggcggcggcggcggcggctccggggatggcggcggctccgctgctgctgctgctgctgctcgtgcccgtgccgctgctgccgctgctggcccaagggcccggaggggcgctgggaaaccggcatgcggtgtactggaacagctccaaccagcagtgagtcggggaccctgggagtccgcgcgtcccgtctcagtgagagggggagccggtgggcccgagaagtcctgggggatcccggggtgggagtcctgggagaccagagctgggggctgggaggggacggagagggggacgcactctgtgggcgtctaggaaactcgggggtgtctgaagaggctgttgggctatagtaaggagcgctcgggccgtgtggaggaggctgctggaggggccccccaccccatcttggcttctctccgcacccgccgctggaatagcatgcccctgtcccatagtcccaccagttgggctggggtttgggggtagcgctgtgctggggataggccgctgcattttggggcccagggatgacctgtttttggccatgagggcttccaggggttctgtctaggactcctgcttttaaaagtggggtccagagctgaggcagggagtccgaccgagcacctccctagaaggaaggcgaatgggttgtcttggttgtgtggataagcccggctagggtgagctagggctgggtcgctgagttggggggccctgggaatgctgcttggttaggatgggaacgtggggtaccggcgagacggaaggcggcagagagatgtcggtgtgtcacacacgcacacacacgcccgggctggggacggcgaatggctccaagtgtgagcgggcgtgcgcggctgtcagtgtgcgtgtgtgtctgagtgtgtgatttgtgtgtctgcgtcggcgatcgtctgggggtgggagcgggctgcgggtcggggaaggggctgcggtcgctgtccgcgcggccagctgcgtctgggctggggtggctgttggcgccgccgcggtctgggcgggtgtcagggcggccgtgtggtttcccggggtgtgtggcgcggtggccgggtgctggctgcggggccgggtcctcattctgctcagtccttgctgcccttgtcttctcctccccgccaagccgccgtgtgtatctccctggccacatcagtgtgtgtctgtgtgttagtagggggagatccctggggacgcgggggtcactgtcacacctgcc

SEQ ID NO: 2788 - DNA, 1269 bp, Artificial sequence
  DNA replication origin
gcaattagggcaggtaaacagggtgtccaacaagaccagggagtagggaaaggatcccagggggccctgaacttgtcaaatcctcgccatcctccacccccagccccggtcttagacgccgggctgcagagttacaggggtggaggacgaatgtagacccgggttcctcttccctctagcgcgcgcccccgaggctgcgcgccgcccgctccagcaggcgaggccggaccacgtgtgcgcggcgtggggtccgcgcgcccgggctttgagggtggtggcggtggtggcgggaacgctggggggcggcggttgcacgctgacacctctgcgcccctcaggcgccctgggcctcggcgccccgcccgtcccagtctggacagcccaggtctgggcgcaaggcttccctgggccgcgtcgggtgggggagaatcagcgcgcccgacacctccgcccctcctccctgcgacagcggcggcggcggcggcgaaggtttattgatctgcagcggcggagaggagcgagagacctgccgaaagcgagacacagagacggagtgagggggagacacacaccgacaaggggagggtggcagaggccggattcactgaaaggggaaaggaagggagacacagtgcgagagagacgcagaaaccgagagaggcagggaagagaacgagaaccgagagtcttggagaacaggagagacaggcaggccagagaggcccacagacggcggagacggagacagagacgcaaaggagagaagcagggacagggaagggtgcaaggctgagactcagagactgggagaaaacacagagaaagaccatcagggacgtagtagagcctcaataaatatttgttgaatgaatgcatgaatgaaagagagatcagcaacagaagcatttcagagataggtcgagagacagctatatagaaagatgttcccgaagctccttgagaacggagcaaataccaacatccttgctcagttctgcaaagaaatgaaacacaggccagggggcatatatttggccatcggccgtcccaacccccctcaccaagttcgattcccggcttaggggactcctcgacctcatactctaatgcatcgctccaatacagtccccccatccctagtttctgggccagattgggaacaggtctctcctgttccacgggactaaatggaagtactgagtggggggcagagggctaggtcgcggccggtgtgcaaggcacagtccccaggtctgtcaaaggaggccg

SEQ ID NO: 2789 - DNA, 1862 bp, Artificial sequence
  DNA replication origin
cccagacctgggctgtccagactgggacgggcggggcgccgaggcccagggcgcctgaggggcgcagaggtgtcagcgtgcaaccgccgccccccagcgttcccgccaccaccgccaccaccctcaaagcccgggcgcgcggaccccacgccgcgcacacgtggtccggcctcgcctgctggagcgggcggcgcgcagcctcgggggcgcgcgctagagggaagaggaacccgggtctacattcgtcctccacccctgtaactctgcagcccggcgtctaagaccggggctgggggtggaggatggcgaggatttgacaagttcagggccccctgggatcctttccctactccctggtcttgttggacaccctgtttacctgccctaattgccccgggctgggggagaagtttgctccttccccgctccgcccgcctgccccctccgcggacactccgggttaagtggagccaggcgcgggccggcagggcactgaaagcgagagagaggtgtcgggatgcgcctcagaggctgtgagagccaggagagaccgaaataacggggtgaggggacaccccctccaaatggggtgtgtcggcattcgcctttctgcaagagaggcgagaggctataggggatgaagtggagcaagaagagagaacagtacgaaggggcagggcacaacccggtccccaggtcccagcccacccccacccttccgcaggaggcgcggccctagaggcggggttagctgcggagcttcgcgtgggcccagcggcacctctctctccgcactgctagggagaaggagggaggatgacagattcaattaaagtgcccaagccaagcagacacgttgggtctccaaagagttgtggctgggaattcctggctctcaccccgtttgtccccgtgccctctgtgtaccaactgggcccagccaccccaccggcaggtctttctctcacatgcccagccttgggggggcatttcaggagctgttcctgccacccagcgcaggagtacataacagatggcttcccttcacctgtggtcgccctgcaaccttttttataaggctagtcctgccctgttgaggaaatggaattacctgtaggaataccttgggtgttggcttcctccctgctggaatggggtgtgttgtagggggaactgggcggtacagcagggaggggctgcttcagagtgggactggaaacatgggtgaggctcaaagacagagatcccagtgtggctgtgcagctgctccagacctggcaccctcaccactggaggccccctccccaaggcctgaggggaggaacagactgtgggttggtgacggacaggcaagcctaggatggcagtttggagccaggcctggtctaacccgttttcctgctcccagtgccgcaggccgaggctcctgcccacctgagtgccagggcaagggaggggcctgagtgacccattaatcccatgggaacagagtggggctggtggcattcctgatgaccaaaggaggctgtgccaattcttactggggtacccaaacatcagctctctgcctgcctcactgtcaggcttggaatgggttgctggtggaggggacagcacaagcaaagccaaggaagtggggtcaggggggagggacccccaaggccccaccgtgtgcagaagcctccacgctcatttctttaatggatctaattactgtttggggaactgggtggtgcctggtgacatagggagccagtctctccccccagggagctcccagggactagggaccccgtggtatgacattttgccaaggaccccatgcctttctgtgtccaccactctccttgcactgccaagat

SEQ ID NO: 2790 - DNA, 1071 bp, Artificial sequence
  DNA replication origin
tcagatggaaagcggctttgctctggggtttcttctctctgagccgcttcctcttccccacagcctgcggcgagagggctacaccgtgcaggtgaacgtgaacgactatctggatatttactgcccgcactacaacagctcgggggtgggccccggggcgggaccggggcccggaggcggggcagagcagtacgtgctgtacatggtgagccgcaacggctaccgcacctgcaacgccagccagggcttcaagcgctgggagtgcaaccggccgcacgccccgcacagccccatcaagttctcggagaagttccagcgctacagcgccttctctctgggctacgagttccacgccggccacgagtactactacatctgtgagtgacggcggccgggcgggcgggtctgaacgcgagagtctgagtgacagccggggggtggagcccctaggctccggggcggggccggcgcggcgggcgccaggtctcgcggctgagaccagggaggaggcgtgggcacgggacgcctgaggggttcagctcagacgaggtcgtggggccaagagaggagtttggtgacagtcccaagtttgggctgcggagaatcgctgtttctgtgagggacattccggggttggaacatcagggatcccagtttcttgaggggtgggaccaaaggggcgtctagggccgacggcagagctaaagtgacccgtgtccaaagggtaggggagctcctgaaggagaccgcccgacggggacagtttggagggggtgagaaatagagccgtcgagggagggcacaggcacacattgggcgaaagtgactcaggcccggtctcctccccagccacgcccactcacaacctgcactggaagtgtctgaggatgaaggtgttcgtctgctgcgcctccagtgagtagaataggctccgagccgcgcccccatcctcagctccctgctttggggctcccctggcttcctgggggtgggggcggagggcacaggtgaggggggcttgctccccagccgtagcaaggggagggaatcctggccctgactctcccctcc

SEQ ID NO: 2791 - DNA, 852 bp, Artificial sequence
  DNA replication origin
gaataaagtgcaacgctttgtgtgatcgagtgtgtaacgtgtgcggccggggctaaggacgcctctgtccatcacatcagtgcctgcccgcaggagcgacacgcgggaccctgggctcgagagggggccgttcttattttagataagtcaaagagcgctaataacctgagtatatgtaacaacacacgcgtacaccgtgcgaacaggctcttgaatatggactgtgagaatctgggcatgaagggtgacaaactgtaaccacacatgaaatacgtgtgatggcgcgctagcatgaaagcatttgtgagtagtatcacagccgcgtgtgtggaagcgtgtgaaactctttgacagacgtatgctaatgtttgtgaacagcgtgtgaagaggaggggagacgcgtaccggcgtgcagcgggggtggggtggaacggaggggcgtttgtgcgcagtcctcaggctgcacagctggagctggcccagtctgagctggggctcccagtcagtcgggccccagtacccggctcaggccccctcccccgcgctgtgtaaacaaacccactggaatttgcctctcggggctcttctccccgcctggatctgctgccgtctggagagggcttggcgggcgggtgtcagctcctggggtggagagggcgggcaggtgtttgattaggctcacgagtgagcctggagtgggagagccgaatgctgtgtgtctgcgtgcgtttggtggtttacgtgtgtggttgtgtggctgtgtgcgcgccaggttggtgttgtgagtgtgtgtgcgcatcctcagccggcccttccctgcggctgcgcatcgcgggaagccacggacccggg

SEQ ID NO: 2792 - DNA, 1115 bp, Artificial sequence
  DNA replication origin
actccatagcgcggggcctggccaggccgagcggggacgcgggtctcctatgggtctgggttcccactggctttctccgcggcgcagtcagcgctgggctcacagatctggccccttcgcctagcgactccgccttttgggccggcgccgcccgacaccccgccccgccctcgccccgcccggcgcgcggctgcctgggggcttgggggctggggaggtggaggaggggcggggtggggaggcgaggaggctgggggtgcaggaaagagcgaagcgcgctcctctgcccccgcagatctgctcagagatgtgtgttcgctcacttgtgggtctgcgtggagctttgtgagcctgtcccggtggtgggcttgcgtccctgggcgcagtcgcgtgcgggagaagggaagaactcgcaagtgcgagtctgcgaacgcgggggtgcgggacacggctttgctgctccgcgcgcggaccttgcagggtgcgaggttgttgacatgccccgcacctttctgagcctcgcatgcccaggctcgggcgcccgcgttcccacactctcctcctcccccatccccttcccggactctgcgcttgactgcccctccccacacacacgcggctgtttgtttttgttgggtttgtcaatgttgtctttgttctggagattgtgtcatcgcctagatgccgggaataaagtgcaacgctttgtgtgatcgagtgtgtaacgtgtgcggccggggctaaggacgcctctgtccatcacatcagtgcctgcccgcaggagcgacacgcgggaccctgggctcgagagggggccgttcttattttagataagtcaaagagcgctaataacctgagtatatgtaacaacacacgcgtacaccgtgcgaacaggctcttgaatatggactgtgagaatctgggcatgaagggtgacaaactgtaaccacacatgaaatacgtgtgatggcgcgctagcatgaaagcatttgtgagtagtatcacagccgcgtgtgtggaagcgtgtgaaactctttgacagacgtatgctaatgtttgtgaacagcgtgtgaagaggaggggagacgcgtaccggcgtgcagcgggggtggggt

SEQ ID NO: 2793 - DNA, 973 bp, Artificial sequence
  DNA replication origin
ggggatgggggaggaggagagtgtgggaacgcgggcgcccgagcctgggcatgcgaggctcagaaaggtgcggggcatgtcaacaacctcgcaccctgcaaggtccgcgcgcggagcagcaaagccgtgtcccgcacccccgcgttcgcagactcgcacttgcgagttcttcccttctcccgcacgcgactgcgcccagggacgcaagcccaccaccgggacaggctcacaaagctccacgcagacccacaagtgagcgaacacacatctctgagcagatctgcgggggcagaggagcgcgcttcgctctttcctgcacccccagcctcctcgcctccccaccccgcccctcctccacctccccagcccccaagcccccaggcagccgcgcgccgggcggggcgagggcggggcggggtgtcgggcggcgccggcccaaaaggcggagtcgctaggcgaaggggccagatctgtgagcccagcgctgactgcgccgcggagaaagccagtgggaacccagacccataggagacccgcgtccccgctcggcctggccaggccccgcgctatggagttcctctgggcccctctcttgggtctgtgctgcagtctggccgctgctgatcgccacaccgtcttctggaacagttcaaatcccaagtaagcctcgagactcccgctggcagcctgggctcccggctggcactaccccaccgggataactgtcccggccaaaccctgagctgagcctagagtagatgaccgaggtaggagggcggctgtagattttcctcccctcacttctccgtcatatctgggagcaccccaccccggggcatgcttgtgtctacttgcatgggcttatatctgcccttcccttccttctctctggcacccctattactctaaagtgagggactcatgctgggcagttcctgccttcagcatagacttcgcccctggcagccagggc

SEQ ID NO: 2794 - DNA, 1264 bp, Artificial sequence
  DNA replication origin
cttttccccagggtgggggaggggcctggtaagcccagtttgggcgctggcacgctgctgcaaagcctggcctctcaggggtcatgctgattgggcagtgggtgcccacctccgagtcctctctgcctgactccttcctcgccctcccagccgtggccagggctttcagttcgaagcaacttagcgctaattctgctgggtctctagctggcagtgcctgggggaattagagaaactgaccagcttgcggggtcgggggaagcacttttccccctactgggaccccacccaggctggagccaggtgtctggagctggtggggaggggctggtgggcagtcaggctggagccggtggggccagggggaatgaactaggggaggggtgctggctccaccttgggaggaggggagaggaggggagagggggagaggaggagagaggggagagaggggagaggggagaggctgtctcaagctcaagctcagagctccagcatttcatctagggggaggtggaagtgtggcttttagagataaaaggacagggttgttttggggtgctctgagaaggggaaaaggagaccagtgtataactttgagtagctagaacgggaagatttgagggggctgaatgaattgatgagagtgatttaacttaaaggactggggcattatctgtgggcccgggtatactagcttcacttttgaggaaaagtgaagctgggaaatgtgagatctactcagtgggtccggggaaatgtgagaggagtaaggaaagtgaagacacagatgtgttggaggctccaggctagcatggtaaagagaaagggtttcctggattctgattacagaatggacctgtgggggtctcagattgaggcctaacagcatttaaaaggagcaactggtagaacagatttggggaaatatttatgggtagaagagaatgataagtgagctacagaaataggtagaagcccatctaaatatcaggtaagtatcaggggggttatggaaaatgctttggtacccgaaagatactgagtgaatgctatttgaaggaccaacaggagacagtgatggtgcaggggaatgtttagagatggcagagagaaatgtaagacatcaagatcagtacatattgggagttgaaacttcggaaaaatctcttggggtccagtgtgaaatgtgagaggtcatgtaaacattcagaggcccaaggatctggcctggcttctgaatgaccacctgcttcttccccct

SEQ ID NO: 2795 - DNA, 1087 bp, Artificial sequence
  DNA replication origin
tccagaaaaaaacttcccaaaccctgggcaactgaggttctgatgtggagctctggatggaaagcgtgctgaagtcttgttaaactagcaagcttttgtttggaggtccaccgccgaaggcgcacaggcctgtgggaacacgagcgttgagactgggggcgtctagatgatccaaggggtaggcagagtgtgagcagcggcaggtatcggggacacacccgcggagccctaggaaggggactgaccgggacatggaagaggtctggaccagggtactgggaaggcgctcggaggagaggggcgcgagttccggttcggcgtcggagggagggtggggcttcggcgcagtttccggagggacggcccgagcgtgcgggggcggagccgagtgcgcggggcggggctccagagccgcaggtctgggctgcagtaggtcccggcaaccgcaggctcgcggcgggcgctgggcgcgggatccgactctagtcgtaatggaggcgggcggctttctggactcgctcatttacggagcatgcgtggtcttcacccttggcatgttctccgccggcctgtgagagtgcggccgggctgggttggggaggactaggcagtcaggaaaggagagagaggggacagagacgtggccacagcacctggctcgtccggaaccgggatcaaagtgggatcgggtcgaggggaccggggtacaagggcgaggctggtcactaggcctgaaggagaaggcaggatagctggcgggggggagagggggcggggtctgcggtggtccggaaaggatgacaggcattgggcatccccctctagcactctgcttctcccttcccacccccacccctcccttcggggccccattacagctcggacctcaggcacatgcgaatgacccggagtgtggacaacgtccagttcctgccctttctcaccacggaagtcaagtgaggggccgacggctgcggtagtgggaaaggctaccagagggaggtgggggcggggcaggaggagcaagagtgaaagaggtttggccgggcgcggtggctcacgcctgtaatccctgcactttgggagg

SEQ ID NO: 2796 - DNA, 864 bp, Artificial sequence
  DNA replication origin
caccggggctggggcttcaggggaaaggccctgttatgagaagagggacgtgtgagcttggatattttccaagaaaactgaggacaggtgggggatgatgtaggagccgccccacagtgcagttcccaatttggacccctccccaagaccccaccccacgcacccccactcagggctgcttccgagcctgcggttgtcatggcaacccgtgcctggctctcccaggggcggtgccaaccgtgttcccccccaccacttcctccccccctccttgttcctccctcctttgtgtcagctgcgcccctgaccgggatggctgcgaagagagggaccaaggtgaggtgtgggggtggggcatagcctgaggacccccactctcgccaccaagagggggaggggacttccggtggggagggggcgagtaggcggggctcttgattcccccgctagttcggagaagggggtgccgctgaccgggttgcgctgcgggagagggcgggagggcctgatgggggcgaaggggaatgggttggtaagaccgatggggaagtgaaggatggggaatggaggctggagtggccgcaggccggagctgcggcaggaggacgtatggagcgagcaggatggagtgccaacctcgcctggctatcgggaggaatcacggcatgggggtgctgctagagaagggagtgggggtctgcatggagctgcagaatgggcggtgtccttgagaaaaatgccaggggcaagctgcccagagatgggggatggaggcaggtgagggggctgccagctggggctactgcagctggagaaatggggattgggcttgaggctggagcaggcacaagctccaaccgtccc

SEQ ID NO: 2797 - DNA, 725 bp, Artificial sequence
  DNA replication origin
ccagtgactttgtgacagattacagagataggtgcttagcattggaaaacccttcccacttccttttggaaacccacaatgccaggcacccccacccacctgcagcagcatgtccctccctccccaggccttggaagggctggctcaccttgggtcggaaggagagggtaggcagggtgggctcatgctgggccttctgggtgccccaggggtggaagagcttgaagcactcattgcagaaggtggcgcggcactctgtgcagcccttggtggcctctagtggtgggggcttgcacaactggcacaggatggcacctcccacactcacactctggcggtaccgctccaccacacgctccagggtcaggttccggaaaagccctgccagaccccgctccccaagctccacatcaccttggcaggctgggcacgggaacatgatcacttgggggtgcaaagcacctcgcttcctcccagggtatgtcccaaagcctgtgggtgaaccagggaggtagaggacatgagagttacagctggctgggtgtggggaagcctgtttaattaaattagattttcattgtgccagagctcagctctcattagagcctgcgtaagcagtatctccaccccccagaaagacagacagatgcctctgaccagtgatggacttcttccatcttcctgatgaatagctcagcgttcccatccccaccctacaggcccca

SEQ ID NO: 2798 - DNA, 885 bp, Artificial sequence
  DNA replication origin
agcgaggtggaaagtggggacaacagagggacagcaaaagctgagggcaggggttggaggtcaagggaaaggaagtgcaaggccagagggcaagggtcacaaggacaaaaggtcagaagggccaggattacgcaagcgcctgaagaaggcagaagggagacagggcattggtccagtgggaggaccacgaggtcggggcaaggcaggaaagagaaggaagcaatgagtggttggctgagatgcgtgggagcagcggggtgggaagggggcccggcggcgggcagggcccccggggcagggccgctgacttgcctggggtgctccggagcagagtccgcggtggccacagcctacaaacaaagagagggagaagcagcgctgagcgcggtaggacggtgtggcagggtgggctgggtgggaggaatggctggccaggccgggcaggaggccggggaggtccccggtaggcactgccccccgggcccgctgctggggaggaagggaagaaggctctggttgggcatggggcctggccatctccttacctcgcaggaagttaagctctgtcagcagcttcatctcacgtcccacgtcgagctggcaatggcggaaggaggagctggcagctggccggaatgtctggagggcttcagtggctcgggcaatcctgggatgggggcaagaaagggtcaggcactgccatgtgggcagtctcccttcccctcaattctgtcttgcttgcccctagagccttgggaactgctttgggagctggtatcagtttggcctcatgagaatccttagaatgccagttctccacctggcagtactgtagacattgtcctagatgttggtcacatccatgatgtccctgcccccctagga

SEQ ID NO: 2799 - DNA, 706 bp, Artificial sequence
  DNA replication origin
tgcgctgggtgtcaatgacgggggcctcaggcactgttggaagagacagcgggtgtcagtcagggcctggccactggcctggcatggagggcaggggcaggcaggaaaagggaaagcagcgggagccgggggggtgagtgtgggtgagagggagctggggaagggctcatctgggaactgggcacaggaggggtagggcagggcccaagagagaacgaggcaggaaagcgctgggctgggggtcaggacacctgtgtgctagttctgggctgctgctacctcactctggcctggaataagtcacttcccctttctgggcctcagtttcctcccctgtcaaatgagggtatcagatcaggtaagttctgggggcccttgcagctcagttattctatgaattaagaggagccccagggaggggcaggcaaaggccactggagcccacaggcaagagggcgctgagcaggaaggaaggggaccaggctcagaagagagatttaggaggcagcgaggtggaaagtggggacaacagagggacagcaaaagctgagggcaggggttggaggtcaagggaaaggaagtgcaaggccagagggcaagggtcacaaggacaaaaggtcagaagggccaggattacgcaagcgcctgaagaaggcagaagggagacagggcattggtccagtgggaggaccacgaggtcggggca

SEQ ID NO: 2800 - DNA, 1084 bp, Artificial sequence
  DNA replication origin
ttgggggagaagctgccagggggtaacaaccgggtgccaagaggtttgggggccagggcccaggaggaccccaggtctgcatgaggggcctggaaggctcagtccagcttggcgaagcccccaatggtgactttcctctcaggcttagtgcccactggctcctggagctgtactgcgccacccccgatgaagcaaaaggcagggcacacaggccctgagcagtccagggggcactccaagagcccacggaaggaaacagcatccaggaaggaaacccggccccgctcatagtccaggcagatgcccaggcggggtggcaggggcactgtgcagccggctgtggggccatccctccctgtcagccctgcgtttgagcttgcccccgaccccagcaggatcttgcccatgccaatggttaggaaagcgaagggtggcgacgcctccactgtggcatcctcggcaccgctgtcgtgcccgctgtccgggtcgtacctgcagaagcgggtgttggggacgagattgttgagggatggagtgacggatgaggtaccagagggagacgctggaaggatggaatgttaaggagcaagaggttgaagggatggattttgggtgttgagaagaaaacgctgaagaggcaggggttagagtatagggtcaggggtttgggtttggtggaaagagagcactgagaggaaagcacattggcaagagaggggcaggcggacaggaaagacatggcattggtatagcccgcggaaaggcattgagaaaaatggtcttggggaaatcatgctggggagatggttctgaggattagaggacattggaagaatccgagattagtgactaagaagagaaaggatgttgggaaggtgggtgtcgggagagagatgagggtggattggtgtcacaaatgaagggtgttagaggtatgcggggttggggacaatggggtttaggaggggtttgtgttggggagaaagcattttgaagaaataaggtgttgggggatagagtgctggggagaaggcttaggatgcaaagcattagtgggagggtgttaaatagggagttggggcca

SEQ ID NO: 2801 - DNA, 826 bp, Artificial sequence
  DNA replication origin
catcacagtttattgtttataaaccatgacaataacagctgttgctcagcacaggcctagcagagcccactgcagggggacggcagcgggcaccagaggccttgcctggcccaacccaatgggaacacccagactcagctgggtccccaagggagacttggcacattggcatgggtgtgggacaggtaaagcatgcaagagggagaagagggacataaggggcatgcggctgcggggtgttgggacccaaataaataaagcaggatgacagggtccccttcccctcaccaggaatgcctggacagcgtccagccccaaagcctgcctgtcccaaggctgtagttcagcatcaacagggcagggagcttggcagggcaagggcagagctggagatcatgcccagtgttccaggtgccctccctcccaatcagcctggggggcacaggacagggatggagaaggggctctctccatggcttgggtaacatgccaaaggcaggtcatagggcagactcagtgggggtgggggcctggctaacaagcaatggagagaacgggggccatccagagaggtgggcagaagagagcccctgggtcaagagaaaactgtgggaagacagacacgggagaaggagcagggccacatggtaggagagtttgggggagaagctgccagggggtaacaaccgggtgccaagaggtttgggggccagggcccaggaggaccccaggtctgcatgaggggcctggaaggctcagtccagcttggcgaagcccccaatggtgactttcctctcaggcttagtgcccactggctcctggagct

SEQ ID NO: 2802 - DNA, 1019 bp, Artificial sequence
  DNA replication origin
ggggctgattagagccaagaagagggagtgaaggagagcagagggaggagggcagccctgtttacagtcacctggctggtggggtggcaggtgctctctctgaattaaccctttgagagctggccaggactctggactgattaccccagcctggggtggcatccaggggctctaggaggtaccttttgctcctcaccctggatctcttttccttccacccaggtttctgcaggtaatggtggcagcagcctctcttacacaaacccagcagtggcagccacttctgccaacttgtaggggcacgtcgcccgctgagctgagtggccagccagtgccattccactccactcaggttcttcagggccagagcccctgcaccctgtttgggctggtgagctgggagttcaggtgggctgctcacagcctccttcagaggccccaccaatttctcggacacttctcagtgtgtggaagctcatgtgggcccctgagggctcatgcctgggaagtgttgtggtgggggctcccaggaggactggcccagagagccctgagatagcggggatcctgaactggactgaataaaacgtggtctcccactgcgccaacttctgatctttcatctgtgacccgtgggcagcagggcggtcagaatgtgtgtgagggggctgggggaggagacagggaggccaggaggcagtaaggagcgagtttgtttgagaagcaggagatgtgaggaggaggtgacattggggagtaggggtggcctgaggagccacctctggctaaccctggcagcacaagaggaaggaggaaacgaaacccaggcgggctttggagggctagcgtgactgggctccgtgactgagctctgtgtgccagtggctctcccctctcctcgcctggcccacgccctccttgccccctggcatggtgccccccaggtggctctattcttagctgtccgggtgtgaagtaaatccttgggcagtgataacagcccagagtcaacagggttg

SEQ ID NO: 2803 - DNA, 1102 bp, Artificial sequence
  DNA replication origin
ctcaccccagtttttgcagatttataaacaagggggttttctgggcctctccaatattaagttcaggtacagttctgggtgtggacccagtgtggtggttggagggtgggtggtggtcatgaccgtagggagggactggtgcacttaaggttgggggaagagtgctgagccagagctgggacccgtggctgaagtgcccatttccctgtgaccaggccaggatctgtggtggtacaattgactctggccttccgagaaggtaccatcaatgtccacgacgtggagacacagttcaatcagtataaaacggaagcagcctctcgatataacctgacgatctcagacgtcagcggtgaggctacttccctggctgcagcccagcaccatgccggggcccctctccttccagtgtctgggtccccgctctttccttagtgctggcagcgggaggggcgcctcctctgggagactgccctgaccactgcttttccttttagtgagtgatgtgccatttcctttctctgcccagtctggggctggggtgccaggctggggcatcgcgctgctggtgctggtctgtgttctggttgcgctggccattgtctatctcattgccttggtgagtgcagtccctggccctgatcagagccccccggtagaaggcactccatggcctgccataacctcctatctccccaggctgtctgtcagtgccgccgaaagaactacgggcagctggacatctttccagcccgggatacctaccatcctatgagcgagtaccccacctaccacacccatgggcgctatgtgccccctagcagtaccgatcgtagcccctatgagaaggtgagattgggccccacaggccaggggaagcagagggtttggctgggcaaggattctgaagggggtacttggaaaacccaaagagcttggaagaggtgagaagtggcgtgaagtgagcaggggagggcctggcaaggatgaggggcagaggtcagaggagttttgggggacaggcctgggaggagactatggaagaaaggggccctcaagagggagtggccccactgccagaattcctaaaagatcattggcc

SEQ ID NO: 2804 - DNA, 2126 bp, Artificial sequence
  DNA replication origin
tagactgggggggcggtggagcccggggccggcctggtgtccggggccgaggtgacaccgtgggctgggggggcggtggagcccggaaccggcctggtgtccggggccgaggtgacaccgtgggctgggggggcggtggagcccggggccggcctggtgtccggggccgaggtgacaccgtgggcttggggggcggtggagcccgggaccgacctggtgtccggggccgaggtgacaccgtgggctgcgggcgcggtggagcccggggcggacctggtgtccggggccgaggtgacaccgtgggctgggggggcggtggagcccggggcgggcctggtgtccggggccgaggtgacaccgtgggctgggggggcggtggagcccggggccggcctggtgtccggggccgaggtgacaccgtgggcttggggggcggtggagcccggggccggcctggtgtccggggccgaggtgacaccgtgggctgggggggcggtggagcccggggctggcttgttgtccggggctgaggtgacatcgtgggctggcggggtggtggagcccagggctggcctggtgactgggaccgaggtgacatcctgtccccaggtggcagctgaacctgaagctggttccgtggccggggccagagtgacatcctgtccctgagtggtggaggagcctgaaccggggctgtggctggagagtacgctgctggtcatactcacagcattcttctcagtagagctgggcactgaacttctctgggtagccgaagtctccttttctccacctggggtagagcttgcatgaccagaacccgtaacaactgttgcgggtttaggggctgtggtagctgtaagaagttaaagtcatagggttgggtctttatgaaggaaaaataagagcaagaagaaaatataagctctggccaccagagaaataataccaggaggactggggagtgggcagcctcagtaacccctgggttggccgcctccttccctgcagcagcctccttctctctgcccataggccttggctcatggcccctgcatttcttcccctcttaagccttccctctccctactctcttccccctagacttctctacaggacatttgcttgcccctggtacccactctcagggttgggggcaactcttctcagcctgtccttagcctctccctccttctggcacagacagggcagcctctgtctgcaattcttaccttaacttcatggtgccatctgccagggagcaaaacccacagaaagaccacgaagaccacctaagcagggcagcccactccccacctcgtgcccctcacctgtaagcactgtgaggagcagcagcaggaagaaaggagactgggtgcccggtgtcatggtggtggtgaaatgggtggggagggggcagaacagattcaggcaggcgctggctgcttgagaggtggagcgggcacaggcgcctaccgctttataccggtccccccactccccgcccgcccgccctaggcacagccggagcaggtgacaggtgacaaaaccccgccccctcccctacctcctacctcttcctcctcctccccaaccattcctgggtagggtacaagggctctaatcgctcaaccccctgactacccgtttgttctccagctggcctccccctttcaccaaccactccctggctccgggggaggggggaggggcagtctggaacttggggcccctgggctctagttttagcctcagggcaacaactaacgtggggatggggaacaaagccagctaggtcgaggtcctgtacagcaaggtcgggaagcccacccctaggtctcccactccacttccccgccctccccgggtccactgaagcagagcggggccgagaaataagagggctggataatgagtggactaggtgctagttttgggctccctccccccaccacttcccggaatagccccacccttctaaccgctccctgtcccgttccacacgcagttctaccctgaaacccacagtccccgccccagccggactttccagcagcctgggttccctccttggagaaagccaaggagggagtgggggaagaaatttccacttaagggagtaaacc

SEQ ID NO: 2805 - DNA, 1394 bp, Artificial sequence
  DNA replication origin
ggaagcccacccctaggtctcccactccacttccccgccctccccgggtccactgaagcagagcggggccgagaaataagagggctggataatgagtggactaggtgctagttttgggctccctccccccaccacttcccggaatagccccacccttctaaccgctccctgtcccgttccacacgcagttctaccctgaaacccacagtccccgccccagccggactttccagcagcctgggttccctccttggagaaagccaaggagggagtgggggaagaaatttccacttaagggagtaaacctgggctccgatgaaccctagggtccttccttgccactctccaccactggccaggagctcctcccgccctctagtggtcaccgggagccttgcggggctgggccgcgcaagctgaggggccgctcggaccgggcggagaggagtaagggcagcgctgcctaagtgaggcagcgagagcccgcgagagggaagcagggcccgggagagaagggtcactgccgtggccagggagggaggaacgcacagcatggtggacggctgggagctttaggagggggcactccgggacgcgtggtggtggcgtctggaggaaatggagctaagcgggtggggtcctgaggtatgtggaaggggcaccgaggtatgtgggagaggacgttggaacgtgggcgggggagttggacacgttctgtgtgggccgttatgtacttaagaggcagatcgggcgtggcacggtggctcacgcccgtaatcccaacactttggaaggccgaggcgagtggatcacaaggtcaggggttcaagaccagcctggccaagatggtgaaacctcgtctctactaaaaactacaaaaattagccgagcgtggtggcgggcgctgtaaccccagctactcaggaggctgaggcaggagaatcgcttgaacccgggaggcggaggttgcagtgagccgagatcgcgccattgcactccagcctgggcgacagagcaagactccgtctcaaaacaaaaaaggggggggcagagagtaggtggggtgacagaatgggatttacggacacagaactatcctttggggagcagagtggtattggggacaggtaggcacgtagcggggggcaaaagcacacgtgaggtgcgtaatgcgcgacagccaagaggtgtgtgcggcagcagtgcacgaggggaggaagctatcccaggccgcggcagcacgtggaacttgggtcccgcagtcgcaggctgcgctctaggccgacggaagcagttccgcctgtattcagaaaacagttctcagccccaaagacacaggttggaaagaacactttaaaaacacttcggcgaggcacgggattggagcgcatcag

SEQ ID NO: 2806 - DNA, 1272 bp, Artificial sequence
  DNA replication origin
cctagttggtggagatgaacaggaagggaggggaaatgggtctgcttagaggctggactttccatggccaagagcccagagtccaggaacctgggttggttcccctttaaggtgcctggggctgtggggtgccaggacaggggataaaagggggtggactagagcctgggaagcgggtgacttcaccccccagcccattgtgcttattgtcatggcaacccaatcctcgcttggaatgcggctggtgctttgagatgcaaaaggagctggacaaagagctaggggccccaggcctgagaaaagcaccccccttccctctccttcctgcctccctttccctccctcccttctctctcaggcctggtgagctcaaggggggctggggaaaagcaaggccccaggcatggtggcacagtgcccactggcaccctagcaccaatggatactcctatcctggaatcctggacagggtgaagctctatgagggaccccagcttgtggcggattctggggtgatcattgacacatccatgcgaggggggcgtcttggtgtattctgcttctcccaagaaaacataatttggtccaatctccagtatcgatgcaatggtgaggtggctgattgagatcaacctaatccttcatgccttgtgggagagccacatcctctgaccttacttatttccccttcttcagacacagtgcctgaggactttgagccattccggaggcagctgctccagggaagggtgtgaggaggaggccaccagattcagaattcagaattttagaccctttggccttggggtccatcctggagaccctgaggtctaagctacagcccctcagccaaccacagacccttctctggctcccaaaaggagttcagtcccagaggggtggtcaccccacccttcaggggatgagaagttttcaaggggtattactcaggcactaaccccaggaaagatgacagcacattgccataaagttttggttgttttctaagccagtgcaactgcttattttagggattttccgggatagggtggggaagtggaaggaatcggcgagtagaagagaaagcctgggagggtggaagttagggatctaggggaagtttggctgatttggggatgcgggtgggggaggtgctggatggagttaagtgaaggatagggtgcctgagggaggatgcccgaagtcctcccagacccacttactcacggtggcagcggcgacactccagtctatcaaagatccgccgggatg

SEQ ID NO: 2807 - DNA, 594 bp, Artificial sequence
  DNA replication origin
tcctgccaggtgagctaggcttcaggcgtggaaggaaaagggagggtctggggaaaggagtagggctatgtttagggcctgggttgggggtcttcataggagagaggtgggcctgggcccaggaactgtttggtggggagaataggacctgaagcagggaaaatatagggaggaggggagccagaccaaactgctagctcctaccctttgtgttgccctagtgtaacgtgggctgggctgggaatgggaacgtgtgtgggactgacacagacatcgatggctacccagaccaagcactgccctgcatggacaacaacaaacactgcaaacaggtgcagggagcaggcgggcaagggggcgtagtggggagcccaagctgggtcaggccagaactcatccatcctcttcccctgaactttaggacaactgccttttgacacccaactctgggcaggaagatgctgataatgatggtgtgggggaccagtgtgatgatgatgctgatggggatgggatcaagaatgttgaggtgactcccagactgccctgccccttgaagctcctctcccctcctcctgtcctctctgtgcctca

SEQ ID NO: 2808 - DNA, 792 bp, Artificial sequence
  DNA replication origin
ggtagtgagccggctgagaggcatggagacgcaggaacttcggggggccctggctcttctcctcctttgctttttcacatctgccagtcaggatctgcagggtaagcctgtctccatcctcttagaccgctctctgcttcttccccatttgccctcagcccaagtagcagagaacatgtgggcaaggggagaggggaagagtccagaaattgagccagaggaaaacttaagactgcctagagttggtgaaattatggcctggtggagaggagtgggcaccggagagtagtgggggagctggaacaggacagggtcaggcatgaggccagggcagaggactcaggaactggatgctcaggctgcctggctggggtggttcctgagcatctgtaggcaccctagggtctgggagagcagcctgaaggtgggcgtactgtaggtccctgggcttcgtccccctgggctcctggctgcccaaggacagggcgggggtggggaccaagaagcctgggctctcccggaggtctggtggtgggatgggccgatggatgtgggagaggtagctggagcagatgacacaggcatagattctttactggctggagggaaaaccacagattggccaggacacaggaggcagaggagctgggtcctacattcccgtgggagatagcccagatggtgggagggttagagtcctcagtgggcagctgttcttatccagagcgagtgtgctgcgcccctaggatgggaggaggggaactagggtgtggaacgagccaaacccaggag

SEQ ID NO: 2809 - DNA, 587 bp, Artificial sequence
  DNA replication origin
gccccccgccaccgcccctccgatcgttgcggtcagggggcctggggagatccccggggaggcgaggcttcttctggcccgactggcagctgaactgcgggggactgggccgcgggcctcgggggagggcggccgccggcccatccagaggtggcccacgtagcgggacagcgctgtcggcccggcgcgcctcggagagtcacggcgcctcgtccaagtggagccccgaacccctgaaggcgcggcaggctctggagagcggggtcttgtgcgcctgggccaggtctgggggctcttgccaaactgcacgtggcctgtactgctccagggccccttggggctcgtccccgagcggggactgcgggggggtcccccgagcagcatgttttccacagcgcgttatgtttggagcgggccctgcgccgcctgtcgccatggaaacaaaacaggggcggtggcggcggccggagcggaggccgggctggggcttgggtgggggaggggaagagaggctcgcaggctgtcgcttaggtgacgggaactcaggcgcccctctgcttcatccgggtcacggcccgtccgctagt

SEQ ID NO: 2810 - DNA, 807 bp, Artificial sequence
  DNA replication origin
gccccaaggggccctggagcagtacaggccacgtgcagtttggcaagagcccccagacctggcccaggcgcacaagaccccgctctccagagcctgccgcgccttcaggggttcggggctccacttggacgaggcgccgtgactctccgaggcgcgccgggccgacagcgctgtcccgctacgtgggccacctctggatgggccggcggccgccctcccccgaggcccgcggcccagtcccccgcagttcagctgccagtcgggccagaagaagcctcgcctccccggggatctccccaggccccctgaccgcaacgatcggaggggcggtggcggggggcgggcccaggcaggggagggcagaagcacacaaggaagtgtttccgggacagagggtgggcaagatggcggcgcccatggagctgttctgctggtcagggggctgggggctgccgtcagtggacctggacagcctggccgtgctggtgaggggtggcgccggcgccctctgctgtgccctgatgactggggagggggccgaactagccaagcatccaaaccttgccagggctactcagcacgggcgcagtgggggaaactgaggcagtcaaagagcgtacgtggccgatatggcctcagtgccctatgctgtagttttctaggcttaatgcagcaatgaaaagacgcctggttgggagttcaggtgatgggttctagtccttgctcatccattcactggctgtgtgaccttgcggagatcctttctctttgggcattttttttctccattcggaggtttactaggct

SEQ ID NO: 2811 - DNA, 943 bp, Artificial sequence
  DNA replication origin
ccgggcagcaggcatgatgccctcgcctagtgactccagccgctcgctgaccagccggcccagcaccaggggccttacccacctccgcctccaccgaccctggctgcaggccctgcttacgctggggctggtccaagtgctcctgggcatcctggtggtcaccttcagcatggtggcctcttccgtcaccaccaccgagagcatcaagaggtcctgcccgtcttgggctgggttctcggtgagttgggtgcacagttgttgggtgggggaggctcctcgggccccaccctccacaccagctgcaagtccacatgcttgcctctcctccctctcctggtcctctgcctccttacagggctgggtgcatcctgtggtgaggggctcactcaggagcctcccctgccaggctgagcctgtgcccactctgtccccagctggcgttctccggggtggttggcattgtgtcctggaagcggccattcactctagtggtaggtgccagggtccagtgcccactgggaggcaggtgcccagcacgcaaggggaagcccatttatgtcctcaagaagggaactggctccccagttggtgccagccgggtgggcacgaagtgtctgtgaaggagggggactctgtccgtggcagaggagtactcatgagggtcccagccctgagtctgcaccctgttttccccagatctccttcttctccttgctttcggtgctctgtgtcatgcttagcatggctggctctgttctctcctgtaagaatgctcaactggcccgagacttccaacagtgctctctggtgagatttgaggagggagagctggaaagaactggctgggggaggtgtgcaggacacctcagtttgtcctgactcaggctgcctcaccctccctgctccactcaggaaggaaaggtctgtgtgtgctgtccctctg

SEQ ID NO: 2812 - DNA, 771 bp, Artificial sequence
  DNA replication origin
ggagtgctccctccccaccacgggcactggacgggcaccgtgcccggggcgacgatgaggacgcgggggcaccggctcatcgcatctccctagggaagaggggcaccgagaagggccggtccaggagtgaggagggggcggcggcctggagcccagggaggggtggggagggtaaaagcgggaaggatggaaataagtctagagaagaggggaggggtcggcgtggggtgactctagaggcgcggtcggtgtgccctcagggcgtccagtaggatccggggccgcctggtggggagaggccgcggcgccgctgtctcctgtgtcgcctgtcccgctcccctccccaccacgctccgctccccgagctccggctgccgcaggtcggggactagagaagggggatgggaatggggatggtgcgggaaggaggggcatggcggcgagggccggcgcggtgcaccccgggagttgtagttcgggactgagaccctgtcggggttgggggatcccgcggcagggcgaggcagtcggataagcgctcctccagtccctgcctcgctctggaccctggctaggctgctagtgatcctttgggcctccacttgagccccatccagcttttcaggctccaggcccgcgtattccttggcgttcccggcagaggcggtggctcttccccgtcattaatggagaggggtggggagcagggctccctggcgtctccgggtttcgcgtttccgtggacttcccacctccttcctgcgccagcca

SEQ ID NO: 2813 - DNA, 731 bp, Artificial sequence
  DNA replication origin
atacttccaggatagagcgcagacagcactcttgacacatatagattgaagggaagaatgctgcatttggccaatctaaggtggcttcctggaggaggcatagaaccatggttgaaaggaggaagaagaatccccagatgagtgcctggaagagcttggagagctcagggctaatggttcagaaactggaattaaactatgaagagattagatacagtttgggattgtggtgcttggaatgctgctcgattgacagggagccactgctgatgggaagggtaggaacaggggatgctggtgacataaccagtggagaagctgaggagcccctcttcactggtacatccttccctttacagtggctggatctctgctctggtggtgccgaagggcaacacagcagtatccgtgctcatgctgctggtcgccctgctcttcactggcattgctgtgctaggaattgtcatgctgaaacgggtgagggctgtgtcgaaggtggggccgggatggtgagatcatgggtccccaggggcgtgggtggaacattcaggagcaactggcacaggtcaggctgctgggttgttctcagctaatggacctctggggtgtgtgtttctgtgtgtgagtgtgtgtgctgggcagcaggctgctgagtggtagtgatgctgttaggctggggtggggaaccagtggctggaatgggcggtaatgtctttgtcctctacttgcag

SEQ ID NO: 2814 - DNA, 718 bp, Artificial sequence
  DNA replication origin
agagaaggtggggaatgagctgagttggaagaaaaaaggggacagcaacctggggtggagatgaaggaaggggaacagatacagatggtcacaggggaagaaaacccctgcgtgattcccaccacctttaacccaggggccgtgagagctgggagtggacaacagaggtcaattctcaacagcaactcaaaccacccagataaacaacaccactgagaaaaggcaagaggctgtgactcaggttggcttgggacgttaggatggctatgggaccattacaggctataggattgttacgatttggcttgtacatcgctcttgtagccagtccccgacgtggtagatgaggtggccctcagcgtcgtcctctacactcttggctctccggctgctgtgctgctgtcggggggcagggggggtcggagcaagccaggtgtcggagcgggggccggagggaggcggggtgggtggtagaggggtcaccggtcacaggcgcccagccaggggggacagacgatgatgggggacagtggaagggaacacgtcagatgcagtaaggtggatcggtgtgagaagagagagcggcgcataatcccaagtccccaaacccaaaacaggaacagggagaggcatgggcagagcagagaagtggtgttgttgccaatgtcacccacaaccccatgctctacacaatgcccttccgggcagacacagatct

SEQ ID NO: 2815 - DNA, 965 bp, Artificial sequence
  DNA replication origin
ttggcttgtacatcgctcttgtagccagtccccgacgtggtagatgaggtggccctcagcgtcgtcctctacactcttggctctccggctgctgtgctgctgtcggggggcagggggggtcggagcaagccaggtgtcggagcgggggccggagggaggcggggtgggtggtagaggggtcaccggtcacaggcgcccagccaggggggacagacgatgatgggggacagtggaagggaacacgtcagatgcagtaaggtggatcggtgtgagaagagagagcggcgcataatcccaagtccccaaacccaaaacaggaacagggagaggcatgggcagagcagagaagtggtgttgttgccaatgtcacccacaaccccatgctctacacaatgcccttccgggcagacacagatctccccttgcccccacccaagcccgcctgccaagggggctacagagcccagggcttgggggaaaaaggcagttcacaagcaaggtccccattaaagagtggaggccgctggggcggagaagctgctcccaacacaataagcccaacatgccagggagagcactgggggtcacaaatgctccgtgcccatccatctccaaagcagatccagggcccttcaagagtcggagagcttccaagaaagtaggcaaactcagtgcccacctcagtgttcatgccccaatgttcagctgagaacaaggatactgctcacttaccagagtcctagagggcctgcagaagagtggggagaggaagggcctgggctggcactcaccgaagatgagcggctaaatgtccggctgcgcctcctccgccgtctgtgcttcctccggctgctgcgctggctgcggtaactgctgttctcccgctgatattcataggaatgccgatagtctgtgtcatagtaggcatctccccgatcccggctataatcgttgcgtctgtagct

SEQ ID NO: 2816 - DNA, 1219 bp, Artificial sequence
  DNA replication origin
ccgaggctctgacaggcggatgcctgccaactacgtgagcacgtggtggcgcgcgcggtcctgggggcggagcccagggggtagctgggaagcgacgcaggacgtcggtccgtgcgtacgtgctcgctcacggcggcggcggcggagcggagaggccagagccggagaccgagctgggatcgggccccgggcgggggcggtgcgagcggcgccaagcagatcttaggggcggggacggagccggggcgggcgggactgaagcggagcccgggaacggggcgggaggtcccagggtcccgggttgggggggtggagcagcatttcgtcgccgcgggggtgccgggactccggccgcagtgtcgccgccatcacggacttcctgtgggacaagcgcacgggcctcgccgccagaacggtgagcgcgcgggttggctggccgcgcgaaaagatggcgaccgcggggcgggcggggttaggcttgggttgggggcaagggacgggggcgagatttggagaggaggagagttgagacctacgaagcgacggagtagggagatgagggggaaggaggtcggcctgcgttagatgtaccaagaagacctgtaggaagcttgggcggaaccagactagaagggatgatagagtaaggatgggagtggttccagagatgtgaaggagtggaatatcaaagttggactcgggtccaatcaaagctggaggggaggaatacatcaccgtgtcacttggaacatgcaggaagaatttgcctgtaggagttctggattttctgagtaagaaaggaaaaagcaaaagatttcaaacttgagaaaggtaggctagtgatgttttgaggggacagtgctgtgaggccgtttgatggtagtatgtggtgagatggcatttatgtggctatgctgattaggataactatgctgggaaaatcttgtgcttgcagcttggtatgctaccggccccagttacaccaagaatgcatcaaataccaccctcctcaatttggggaggttgggaagaagtgatacagaatggtggtcagacatcggaatcattaaaccttttgcatacgcgattctcatacacccccaccaagacttatgtccctgggcctgtttcattttattgtgccttcctattctcatcttcctggattgtgacagtgatttttctcttttttccttgaaggaaaaaaaggatttgtgaa

SEQ ID NO: 2817 - DNA, 1229 bp, Artificial sequence
  DNA replication origin
gacttcacccgctcctgctcgatttccactgctttgtggctgccgaacacccgaagggagaacttgttgaccgtaggctggagcagcgtcccaaggtgcctcctcttaggctcaggcccagatttggggatcggacctgaggccgcggtcgcaggcgggggagcaacgggaggcaccgcctccagtccaggggtcgccccttcgctggcccccgccgccggccgctgctctgcctccatggcgcccaccccgcttacacgctcggcctcctagagccctctgtggccatcaggtacccgcaacccctccagagcaggagtcggcgcagccccgcgggctctagcggaggcgtcgtaggctcggaatcgccggcgcgcggggcggagggggtgtgtgctagactggcgggcggcgggcgggctgcgcggcgccccctggcgagggccgcgccaagaccgggcggggctgggacgccgggatcctggaggaactccgagaggggcgtggcttagcaaagaaggcggggagcgcagcctgagccagggagagggcgtggcctagcgttggcctttcatccactgagaaccagggaggaggagccccctgcagtggcgggaaaatcggacgcgggtttgtagcttgaaggacttgggagggagagggattggggaccaatggaagaagtggaaatggcttttgggattcttctccactctcgcccagggacttctgtcctgctcccgtcttctctcaacactgtcctaggcatattcttgtcttttggtctcctccgaactgcttcccctagtatttaatttcctaattcattctgtcagccttcaccaagtgcaactctgcctgtcattgagtggatgctgaggaaacaaaaatgaatacaaaagtcctagtcttagcatctccatgtagtaatggaaaacaacacaaaacaaaacaaaaacaaaggcctagccataaagccactgctcatctgtgcccaacgacagacaggtaaattgcagtgctatgcgaagtgctacaaattcctaaatatctcaaattctccccttcatctccaattcttattaccactgcctcatttcaagccctcagcattttttcacttaaattacttcggaaacctctaaaagagtcttcaacctcttccaggccaattcttcttccattccctgccagttaccttcctaaaatccaactatggctgtgtcact

SEQ ID NO: 2818 - DNA, 922 bp, Artificial sequence
  DNA replication origin
caccctccacggtcacttcatttccagcccggggtcccttggtggggcgggagagtcacttgcaccagtctagcctgggaattcctgggcgggtatcccctgccggaggtcctccgtgcctggacaggctgggggcaccagaaggggcaagcagacatcaggggatctccagagacctggatttcctctttcaggaacccgggaccccatccggaccaaaggaactaccagagtttgggacccctgcctcctccagtcctgcttgctggagatctaggaaattatattctaagtatcggggccagtctgagggagaagccgagctccgccatctcccatccccacacccgctccttagcacctgcctagttcagcatgacagactaccaggaaaaatagggacgctgaagggggcggggggtccagacctcagctctggtcgctgtccctagtgctgaaggcgggggcggcggggcggggccgagactcagagtgactgaggcggcaaagcaggggcaggaccaccacccaggtgactcccagagaaggaacagagggtgggggtggggccatttcacagtctccgtcagggtgtacctctacatcaaggtcgctaggggaagacagcagccctgtccttgggggaaatgaaggacagctcttggatgaggcagggatgtgtgcaaagcacctaacctggggaactaaagaagcagagaggaagaggtgtgaatctggagcctcgaaatacagttgtagacccagacattatcttgaatccacatatatacacactccctctatgtctctcttcctcccattgttcctttcactcctgtctttgctgcctcgttcccacccagccagtgcgccttttctagtctcctgtggatctcactctcttccctcagttcactcgcag

SEQ ID NO: 2819 - DNA, 1054 bp, Artificial sequence
  DNA replication origin
agcgagcaaggagggtggctggagagtcaggggagaggggcagagggccccgctgatgagtcagggcaatggccacattggaggtcacagcagctgcctgaaggggcgcatgtaccagtggctcccacagtactggctttccactaagctgagctcctgtgctcggggcccgaccccgaacaccccgagccatgtctctgtcatgttgcaccaagtgctgctccatgatgccaccactgctgcctggacttggctcggagcgcttccgctgcagtatggaattcttcttgcctagaagttgtaccgggagggagaagttaaggatagggaaggaatccaagatggatgttggatatcaaagagtatgagagtatcaggatggggtggggttgagggtaggggatgggagtcagtagtatggcaatggggctatgggggttgagatgggggttggaggaagagggtatgtatcagagacagcgagggtcaggggactggtactcaggggaaggaggactcaggacatgggggcttgggatgctatctctcctgggaaggacatgctgagggatagggacagtgggccacagtgttgaaagtcctgttagggagcatttgttgggactgaatggattgggatatgaccctggagccctaaagcctgggctccttgctttggaggtggggtgagagcacagtctggacccagagcagatggggtggacaggtctcaccgatgcggagcagccgatccatggccacagtctcaaaggcccggcgcatcatggggaactcctcaagcacagcattgaaatggtccacgctgagtgagtaaaggcggcagtaggtgtcagcccgaacactggctgtgcgccggcccctagttagcaggcagatctctgcagaaattgggaggaagcttcagaaccccgtccttgtccccagaactcctcttgctgagcctgcagcagtggacccaactttctaaggctcctccctagacttgggagaaaccattgattacctattacctccgtgccccaggaaccctaaa

SEQ ID NO: 2820 - DNA, 1138 bp, Artificial sequence
  DNA replication origin
ccccgcgtccggaacgcggggtccacagtcaccagcacctgggagcccttcaccagctccacttccgactctggaccctaaggagggagccagaggagatgtgagttctgagccccggagtccgggacccgcccctgcccacgcctgggcccaaccctacaggcgccgcctttccggccctggcccagcgagtcccagccccactgctcaccccctgcaggatcccagtgcggatctccggtcccttggtgtccagggcgatggccacgggccggtagctgagtggggaacctgcaaagctctccaccgcctcccggacgttggcgatggactcagcatggtactgggggagggagcggagcgagggtttcaggggaaggtggccaggacctcgaggcatcctcctgccccacccactgcccggcggcccgtcccgcacctcgtgggagccgtgggagaagttgagtcgcgcaatgttcatcccggccttgatcatctccttgaggcgctccacggagcgagatgctggccctagaaccagagattcacgttcagacaacgttcccccagaacatgagaggcaaccaaacccaacccattaccattctcagaacgcctcacgccacaggcgtcctgttacctgatctttattccctgatgcaacccctgcccacagatcacagactccccttccctctcaagccaacatccatccccttggggaggcagcagtgtggaaatcggaggggagtgccctccgccaggcctgaggtcactgtatgggcatgtatgggcactgtatgggcatgggtatgtaagtgctgcttgcccggctaccccagggtatggggtgtagggcaggggctgggagccaggtgagggcgtttgggtgcgggcttttagagctaggaggcctcatggactgaggagagctgagttctatcccatgcctgcactgctatggggcagctgctagccgagagcaggttggctcattcttcggtccctatctgtctttccacttgtgcactaggtctcctccttctcacctgctcaaggacataaattaagccattctgtggtcctctgtgacacccatgttttccttttctttttctttctttttttttgagacggg

SEQ ID NO: 2821 - DNA, 779 bp, Artificial sequence
  DNA replication origin
ggcaaccccggaaaaaaagcgaaaacggggccgggcgagagtgggcggggcggcccgcctgaggcgtggcccgcggggctagcccgggtccgtcttacgtagcctgggcggaggcgatgggctcctggtccagcgaggggccttcggcggacgaggttgcggtggcagcgggggggcgggtacctggcggggtgggggagccgcggcggggaaggtgctacttctgggaaagagcggggacagcagcagtgccagctcggggctggccaggcagggcaaggctccccgagtcggaggcgaataggctcccaccggggacaggcggacgggcagcagctgctcctctggggggctcggcgcccccagcagccgcagcccggcgccgggccacccggccagaggagccaggagcagagacccagctgcgcctgcgcccccaccctccaacagggggcgcccgtcggccgagaaccggaaaaccaggggccgagggagcaggaggggaccggctgcaggcgggattggcggggccaggcgcagagggaaggagggcagcgggatgggcagccaggcaagaaggggcgggaagaagagggagcaaacagttagtcccataacccaatgacccacccagtttccctttcccggagcgctccctggtagaaggggcggggaggatgggtgacacagaatggagggaagacagggggccgggttggaagcctaggaggcgtgagcggccgaagcccagccctcctcccgcttcttgcgacctctta

SEQ ID NO: 2822 - DNA, 1014 bp, Artificial sequence
  DNA replication origin
cagtcccactctgggcttctgccatccacagccgctgggctccggggacaccggcgaaggaccacgaactacggactggcgtaagggaagaagggcgcggtaacacttaccaagtgttattccgaggactccgggctcccgcacaagttgtctccggcgggtctgcagtgctgtgtccccgaagggtcttggggagaggaggcgcaggaccgcctgaagcacggggtagctcgacccgagccccggagtgaaatctcgcacacttcccagcactcgctgtcccccagccccatcccggttccctgtgccctccctcagggcacagcccccacctccaggatcccggaactccgggagcgggatggccgcgctcacctcccgcctgccctgctagggcctgtagggcgggagaggacggggcgcggggagggaggtgtagcccagcgcaccgccccggggcccagtcctgcctgcggagccccggggagcacgtgggcggcatggaccaatggaaagacagacaggggaaagggaggagacggagggaggcgagacccgaggattgggaggctggaaggcgccggaaaggggaaacccgggtcccgcagcagcctcttggcggagggtgccctcttcatcccgcgtgggactggactcgcggagagggcgtggccagaacctctagtgccaatgagctcccgggagcttcaccctccacccctccctagcaaggtcggggggcaggcccgagctgcacaggccaaggaattccacagagggtgtgacccaaagcccctaacaacagactcgctgggaccccctagacttggcatggaggctgggtaagcccgcgtccactatgcccaggtgggtctggagggagagggggccggcccacggagcaggaaaggcaacaacttccccctccagcactaggaacggggccagactccccaaggccgacaaacttgcttggagtcggcttaaactgaagggcgggactaagctgggcaa

SEQ ID NO: 2823 - DNA, 1275 bp, Artificial sequence
  DNA replication origin
tagggggtcccagcgagtctgttgttaggggctttgggtcacaccctctgtggaattccttggcctgtgcagctcgggcctgccccccgaccttgctagggaggggtggagggtgaagctcccgggagctcattggcactagaggttctggccacgccctctccgcgagtccagtcccacgcgggatgaagagggcaccctccgccaagaggctgctgcgggacccgggtttcccctttccggcgccttccagcctcccaatcctcgggtctcgcctccctccgtctcctccctttcccctgtctgtctttccattggtccatgccgcccacgtgctccccggggctccgcaggcaggactgggccccggggcggtgcgctgggctacacctccctccccgcgccccgtcctctcccgccctacaggccctagcagggcaggcgggaggtgagcgcggccatcccgctcccggagttccgggatcctggaggtgggggctgtgccctgagggagggcacagggaaccgggatggggctgggggacagcgagtgctgggaagtgtgcgagatttcactccggggctcgggtcgagctaccccgtgcttcaggcggtcctgcgcctcctctccccaagacccttcggggacacagcactgcagacccgccggagacaacttgtgcgggagcccggagtcctcggaataacacttggtaagtgttaccgcgcccttcttcccttacgccagtccgtagttcgtggtccttcgccggtgtccccggagcccagcggctgtggatggcagaagcccagagtgggactggtcagctgcaggagcagaagaaaggtagggcaccctgactcccgaccccgcgcttccgaataaactgcccttcgcccccggccctgctctcaggctgtccgaaggcagtctctccacgcccctcgggcaagcctgggtaggggcgcggcctcctagcgtcttccctttcccactcctcccaggtcttctgatagccgtcagcgtctccgttgataaaatcatctcgcatttcggggccgcccggaacttggtgcagaaggtgaaggtggctggggggaggctgttgggatgaggagagtaatggagctccgcggggggtgcgggaatggttggcgggaggtggctgggaggtgtctggagggatctctggagccatcggcatcgcgccacctccaggcccagttgggtgatagccggctgagcccggatgtggggcacctggtgctgaccac

SEQ ID NO: 2824 - DNA, 1199 bp, Artificial sequence
  DNA replication origin
caggggcaggtggtggtggtgctcaaagagcaggtccaggtggaaagtgagcaccgacaatggctgcagcaggagcagcagctctgtggacagggagggacaaccaccgcgggccagggagaaaaatcctgttggcaggtacaggagggagagcaggcctggaaaagagcaggccaacatcagctcctgccctggacctagtcccagaagaccccccagagcagcccaccagtcagcacacatcttcccaggcctcactctgctgggcactggggcagagaggaggaaggatgtggtgggctataggactgacatccccgcctgcatggaacctagcccaaataggaagacacacacagcaagtggtgacaagtaacagagacagtgcaaaggctacagaggaggaggacaggagagccatagaagcacatacaaaatgaggcgtgggggttggcctagtccgagggtagaggtagggcctcactggggaaggactcaaaggatgaatgatagttcagaggaagcaggaggggcagaaggtagaggaacagcataagcagggccctggagcaggaagggccaggcgggaagactgttggcaagaccctccaaggcaggggaagagggcagaggccagacagccaaggctttgggtctttcatcctatgggcgatgggcctccttagaaagttttaattagaagagtaataagatcggagatctggattaatggcattctggcagcagtgggaaccagcaggagagaactctttccttcccatcctcccagcccatcagccccatcctctaccatctgaacctctgacctgcatcttcctggagactggaaaaccacagctccaactgcttggtgctaggggagaaaagagggaatggaagttcagggaggtggaggactccagtcctctctgggtggaggatgggagatgagattggaagagggggggccttctctggggatgtgaggcactactactgtgtcccacccatgacgctcctgcagtcccaggtcgtgggaagggcactggaaagaaggcaactcacttgaggaggcccaggataaaggcatggaagcggctacggctgctgctcagcggggctagacggctgacctggctatacagggttccaagggagcgggtgctggagcctgagaacgtggggtgcagtcagccaag

SEQ ID NO: 2825 - DNA, 1201 bp, Artificial sequence
  DNA replication origin
cgccgccactctgctgctgccgccgccgccgccgccgctcccgccgccattttgggttcgctttgcggaggggagacgatcccagtctcggttgcgggacccgcctcccctcagtttgccccctttagccttccacctttcccttctcctctctcgcatttccgccagtcagcttacccgctggccgcctcctgacaagcgggagggatccgccgtggacccagggaagcggaggagcctggcggccaccccctcttccccacttccctgcactctcatcgctctcggcctcggcctcggcctccgacacggtgagtagaacgatttgggccggcattcgggcctaagcactctctcagcgattgaatcctgggctttctgggagccactgtcatctcccggacctggatctctgagagagcagtggtgaagatgggggaggggagagcagggagggggatcctgagcctaccgggaagtccctccaggcggggtgaaggggtgtccctgacaggcagactcccggagggggctgggaagtaagcgagtggaggcggagtcggctgtgcccctgacaggttagtttgtgtttgtaggcatgatcggagcctcccccatagtccagtttgtgtgtgtttaattaagggataagagtggtcgaggacacgatcttgagaggggattttacctgtgtgacaaggtctgtggtgtccctgccgcgttgaacggtatgtgggaacgacaggatgatctcagtgttgtaagtttaataaatgtcactggttagtttgtacatggaaagagatgtttttggtctagcagacagatggtctgttggtgtgtagcggctgtgttggtgtgtgtatgtgaggatggcaagtgtttccgtaagagtttgcctttatttgtgtaagtgtaatggagttccccttataagttagcttatttcttgaataaatgttgggaggttccttgcaggttgatatgtgtgtgtattttagggattgggagcccctagttacttgttgggaaagagcggcaatggtagtgttctgtacagcatgtgtctgtgaggtcagggaggggagaaacttggcatagccagttgtggtcttaagaatagtttgtgcctttggttagagtgagttgtgtaaatgtgaagggccaaaatatctttaacagaatcattactacaaagttg

SEQ ID NO: 2826 - DNA, 744 bp, Artificial sequence
  DNA replication origin
gaggggtggagggtggtagggggggctggcggcggcggcggcggccgtggcggcggttggtggccgtgggggcggggaaggggggggaggagagaagaggaggtggaggaggaggaggaggaggcttgggcttgcgccgttgaaggtacgcgtgagggcctgcgccggcgccggcttgacagggcctgaggggtagtgagggactggacgagggggttcctgtgggtgagcgcgtacgggctggctggcgcgcggggcggccgaaggtggtggttggtgggagcagccagcgacgagcccgtagacactcgtacgcgtgcgggcgggcgtgcgcgctacgcggacggagtcgggcggagcgggggacggtgggaaagaacgcaaggaggaaggagtggaaggttgaggggggcgctaggcgcccttcgctccctccctctggaggagctgccgccgccaccgccgccactctgctgctgccgccgccgccgccgccgctcccgccgccattttgggttcgctttgcggaggggagacgatcccagtctcggttgcgggacccgcctcccctcagtttgccccctttagccttccacctttcccttctcctctctcgcatttccgccagtcagcttacccgctggccgcctcctgacaagcgggagggatccgccgtggacccagggaagcggaggagcctggcggccaccccctcttccccacttccctgcactctcatcgctc

SEQ ID NO: 2827 - DNA, 1131 bp, Artificial sequence
  DNA replication origin
cgccagccccccctaccaccctccacccctcgcgcgtgcgcctcccacaatcccccccgcgggactgttccattcctgtcggctgcaggggcaggagaggaagggacgggccgagcgggtcggggcttgccgtttgactggaattgccagaatggcggaccgagccccacgacaacctacctccctgggctcctcgccgcagcgctgcggctcgcctccctctgctcctcctcctccgccggatcgcggcgagcggatcgaggactgcctagcgcccctctgcccaccggtggttggaggccgcggcggctgcgcgttgagtcgtttcctgccggttgacctgagcctacttcgcagtagcaggaccgctgctgtggagctggtcgcaggcggtgtgtgccggtcgcctagtcaggagaactagtcctcgactcacggtgagggaatggaccgacacgggtattgtaccgctgagggaaaggagcgggactccggacctccaggaggtagggagtgaggccagtaggaccggcgcgcctccggggggattcctcccgggcgttgagttgccaacctgggacccgaggaagatcggcgtggtggtgtgctttttgttgttgttaaccctcctcggatttctcgaatttcacaccactgtccatatgcgatgatgtttgtttgcccttgacgcacttactcatggatggtacttcttcagcctcgttagacagcctggtgatggaggatgaagaaaccatgtgcttttcattcagttctggacttagtctcccttttcttccttcagcaagttatttttgttagttccttatcaaaaagtgtacataaaaattaggcaactccaaacatgcctccagggttaatgtgtgaaataataagataatatatgtaaagtggaattagctcctaggcatagggaaagtgcagaatattgccgtgttgtcatttacagttctgttgatgtcgataacgtttgtgggtgtaattggtagtgttctgtccctccaaggagttaataaaacaaagcaaacataggcctgttaggtttctgtggctactgaatatttgtttctcaaaacacttgactgatatttgataattgaatgcagcaga

SEQ ID NO: 2828 - DNA, 1192 bp, Artificial sequence
  DNA replication origin
cctccctctggaggagctgccgcggccactctgctgccgccgctgccgccgccattttgggttcgctttgcgaggggaaacgatcccagtgtcggttgcgggatccgcctcctctcagtttgcccctttagccctccacctttcccttctcctctctcgcatttccgccagtcggcttacccgctggccgcctcctgacaagcgggagggatccgcggtggacccagggaagcggaggagcctggcggccaccccctcttcctcacttccctgtactctcatcgctctcggcctccgacacggtgagtagaacgatttgggccggcattcgggcctaagcactctctcagcgattgaatcctgggctttctgggagccactgtcatctcccggacctggacctctgggagagcagtggtgaagatgggggaggggagagcagggagggggatcctgagcctaccgggaagtccctccaggcggggtgaaggggtgtccctgacaggcagactcccggagggggctgggaagtaagcgagtggaggcggagtcggctgtgcccctgacaggttagtttgtgtttgtaggcatgatcggagcctcccccatagtccagtttgtgtgtgtttaattaagggataagagtggtcgaggacacgatcttgagaggggattttacctgtgtgacaaggtctgtggtgtccctgccgcgttgaacggtatgtgggaacgacaggatgatctcagtgttgtacgtttaataaatgtcactggttagtttgtacatggaaagagatgtttttggtctagcagacagatggtctgttggtgtgtagcggctgtgttggtgtgtgtatgtgaggatggcaagtgtttccgtaagagtttgcctttatttgtgtaagtgtaatggagttccccttataagttagcttatttcttgaataaatgttgggaggttccttgcaggttgatatgtgtgtgtattttagggattgggagcccctagttacttgttgggaaagagcggcaatggtagtgttctgtacagcatgtgtctgtgaggtcagggaggggagaaacttggcatagccagttgtggtcttaagaatagtttgtgcctttggttagagtgagttgtgtaaatgtgaagggccaaaatatctttaacagaatcattgctacaaagctg

SEQ ID NO: 2829 - DNA, 911 bp, Artificial sequence
  DNA replication origin
ggtcagccccccaacccggccagccgccccgtccgggagggaggtgggggggtcagccctccgcccagccagccgcgccgtctgggaggtgaggggtgcctctgcccggccgcccctactgggaagtgaggagcccctctgcccggccagccgccctgtccgggagggaggtgggggggtcagccctccgcccggccagccgccccgtcccgtccgggaggtgaggggcgcctctgcccggccgcccctactgggaagtgaggagcccctctgcccggccagccgccccgtccgggagggaggtgggggggtcagccccccgcccggccagccgccccctccgggagggaggtgggggggggtcagcccccctgcctggccagccgccccgtccgggaggtgaggggcgcctctgcccggccgcccctactgggaagtgagtagcccctctgcccggccaccaccccgtctgggaggtgtgcccaacagctcattgagaacgggccaggatgacaatggcggctttgtggaatagaaaggcgggaaaggtggggaaaagattgagaaatcggatggttgccgtgtctgtgtagaaagaagtagacatgggagacttttcattttgttctgcactaagaaaaattcctctgccttgggatcctgttgatctgtgaccttaccctcaaccctgtgctctctgaaacatgtgctgtgtccactcagggttaaatggattaagggcggtgcaagatgtgctttgttaaacagatgcttgaaggcagcatgctcgttaagagtcatcaccaatccctaatctcaagtaatcagggacacaaacactgcggaaggccgcagggtcctctgcctaggaaaaccagagacctttgttcacttgtttatctgctgacctt

SEQ ID NO: 2830 - DNA, 879 bp, Artificial sequence
  DNA replication origin
gttatagcaacagcctctgattacgacatggctgagatcaccaatatccgacctagctttggtaagtagactcgggaaaactaagcttgaggtggtcagaatggttgcaaggccaagggggcccagcggcagggcagagaatgcagcccagaccagagccttcaaaatgccagccccactaaaatcgggcctgtggtggtgggtagtgggtagtgggcagttgacagtgcatgaacttgagctatgggctgcagggactggcagggcctgagccacaccgagggtggggaagtccaggatgctaaaaccttgtatggtgcactgtcagcactgctggaggtgagaaacagcaagcgtgcggaggatgtgaacccctccttctgggggaggagaggtggggtaggccaagccctcccccttggggcacacagggcggtgccccttcctccccctcccattcctaagggctgcgggggagggaagtgacaagggggatggggcatcaagatggcagcttggagactgtgggccgtgtggctggcagccaggggaggcggcggcctctggggaaagaggggtgcggggtggggagcaaaaaggaagccactccttaagccggtcagctggatgctggggctaggaggaaacgtgagccctgcaagctccattccgcatcgtaatggtggggtccctccgatgctaccaaatggcgcttggcgctgctgggctgggggatgacgtgatgtctatttctgggcctcctggcagcgccgacgctctccttccggggcctttgttccctgtttccctgggccgccttttcaaaaagggggactgaccagcgttgatgctggcgggggcgcgatccaggccggaggg

SEQ ID NO: 2831 - DNA, 1083 bp, Artificial sequence
  DNA replication origin
aataatttactttctactcgtgattaaatacccttgtctgtgagtgcatacaccctaggttgggtaggtgaccagaggaccttcagcggtgggtcccggaactgggttttagggacctgggaggggcgggaagagggcggggcaggctgtgggcgtcactgagtggccccgcccctccttccgcgactcgggcgccggtggcgccatcttactcggttgcgggaggggtcacaggtcagtgccggagcctccgcgagtgaaggaagacgaagtgcgtgacccgaccggctgtggtgttccagtccccactgaccagtaggagcagcagggcgtcggcttgtgaggtagaggggtggggagtctggcggcggagcagcagctgggggtggggagggggttcggaggagaatggggagggggcggaacctctgggtaccgcagacgtgagagaacccctgcggcctaaggggccgcatccctttcttcccaaaactttctccttgtccctactgtgccgagacgtaaatttatttgtatctttttatttttctctttggaaaaagtaaaacctgtgatgtgtcatgtgactgaactgtctaggagggagggtgaagatgggggggtttcttagggccacccgaaagggtgcagtggtgagcaagagggacaggccagagtaagagggacaggccagaatatgtatggaaaggtaaggcactggcttgagggctgtcgccgtggtgtctccatcctggattaagcatttcctcctccttttctaggtggcttttcctcggggcaaccgaggaaggccccaagaggacaatggattctggaactcgcccagttggtagctgctgtagcagccccgctgggctctcacgggagtacaaactagtgatgctgggtgctggtggtgtagggaagagtggtaggtaacattttccatttgacaggaagcatggatgaaaagtacttaaatgaccagatgggatacttgctatcttgcaatgttaatacttaaaattctctctgtgggtcacctttgtgaggatttgacttttatttcttcttttgaagcca

SEQ ID NO: 2832 - DNA, 739 bp, Artificial sequence
  DNA replication origin
ctttctttttatactgtggtgggaagtagaggggcacccgctggaaaagacattatttgaagaagatggtgtcccctgctacctccttggggggatgggtcacagctaagccctgacacctcagcccctccccattccttgcctcattccctgggagctcctcctaggaggaggaatgtaagtttaacctgcccctttctctgtcccatcctcacaggatctctctgtgtagccccctccatgcttcctttttcttttcactccatttctgttctcccaggctgtcttcagtcctccacctcctctgttctctctgctctacttcctacctccacaagccccaaacctcacaggtcccctttctctctttagtcccctgttcttccctttctcctttcccaaaccccaaccatcatatcccttagaacaaagggtccttttctgccaagcagggaccagaggtccagggatggctgtggaggctgggggtccccttggaatctctgtggtgggcaggtggagtggggagtgtgcagagcgactatttctttgttctgaggaatggagaggtggctggctttgtgtgcaggactaggagtgcagtggagaggagagctgggggagcccaggagggagctgagagggctgacggtgttggaggagagtggaagaatggggggtcctcctggtggctgaggcttctggggacatagacaaaaattctaggggtcgtggaggt

SEQ ID NO: 2833 - DNA, 1332 bp, Artificial sequence
  DNA replication origin
ccaacctgagtgccctactaccctggtgccagcctatgctgatcaccaacttcagccaagggagcagtaccccttaggagtccttaagggtgatggaaagccctcccctccacctccctggtagttcctagccaggctacctgtcttgatgctaaactgggagagacagaggttccatcctgggttgggggtggagggccagggaaagcagctttaaaaggactttccttagggggttgggattagattttgctatctggaaagcaactggggattcgagtagggcctaagacaaacagagggccggggtgaggtggctgaagtgtggtggaacagtggggtggcagacaggctcttcacagcctgcgccagcccaggccccagctccaaaagtctgtttattttttcaaccgtttgagctgagaccctggagtagagccaaggggggcgggggaggttttttgaaaccgcagaaatttggttccaccctaaaaaggaaagccatgggggagctggttgggggaagacctggctagggggtatagagagcggttctgtgggggcaggtagctactgggatcccttttccattattgtggggagctgggacgtcagacatctgggtgttcatgctctgtttttgtttttgtttttggtggtggggggactggctcttctttctactatgggggctggctgtgtggggcaggtaatttgggaatctggctggcagcagggagtcgggggctgagtgggtggatctgagagggcaaagaggccaccggagaagggtggttgtcagtttgggccggtcggaaggggagggccacctccggaaaactgtggttacagaagggggagttggttcttagccaacaaaccctggatcccctctccccctccccccagcacaccagctgtctcctttctttttatactgtggtgggaagtagaggggcacccgctggaaaagacattatttgaagaagatggtgtcccctgctacctccttggggggatgggtcacagctaagccctgacacctcagcccctccccattccttgcctcattccctgggagctcctcctaggaggaggaatgtaagtttaacctgcccctttctctgtcccatcctcacaggatctctctgtgtagccccctccatgcttcctttttcttttcactccatttctgttctcccaggctgtcttcagtcctccacctcctctgttctctctgctctacttcctacctccacaagccccaaacctcacaggtcccctttctctctttagtcccctgttcttccctttctcctttcccaaacccca

SEQ ID NO: 2834 - DNA, 1716 bp, Artificial sequence
  DNA replication origin
ttagccgcggagggggcggggaggctttgggctggaggggaccgcggcacggctcgggcgggcagcgttgggtcgcggtctcccggggcagtccgccctcgcccccgcaatgaagggcacgccccttccccctcccagaggccccccaggggcccccgcctggcgagaccctggccgggctccggacctggggcttggccctgggcggaccccgctgcagtggcccccccggtccgcccggggcgctgtggctgcggctggtccggagggggcggtgaagcctcggggaggggaggggaggagagaggaggggaggggaggggaggggagaggtggagagaggggagtgttggaggcgcagaagccgagccgggccggccgggcgggcggggaggaggaggagccgggcgggctggcgggcggccgggtggcggcggcggcatggcggagccgagcggggccgagacgaggccccccattcgggtcaccgtcaagacccccaaggacaaggaggaaattgtgatctgcgatcgagcctcggtcaaggaggtagtacagcaggcggggggcggggggagcgcggaggaggggtctgcgaagagatggggggcctctctgacggtccggcgtcccggagggccccggagaggagggcgggggccggctgggactccgaggagctgaaggcaaggagaggcgggtagggggcgccctgcgaggggagatctgggggagcgtggcgcgtgttgaggggcgggttttgccttgtggcctgggggcgtggtggagagtgaggaggggacaccttgcaccgggaagggggaaggaccctgggtttgaggggagtgtgccggagtgggggcccgggctaggtgctaactgagagaacgggccgggggcaggcggagagcgccggcgcctactctgtgcctcagagaacgcccagtgttctctgagcgacggggctgtcgggggaggatttccctgtgcccagatccttcccactctttcaaatcgacgtggttacatttggttctcagctcttctgagatttacacggtgtgcagtaggtgctcaataaaatcttgttgaatgacggactgttgcctgtgttcgccaccccctgtggccgctccataatttcacataggcggggcttaagataggccatctggttggaagagagggatctggaagcagcctctgcttaacaagtgcactgtttttacttaaagtgtgtgttgtgttttgttttgtgttgtgttttggaggggctggtagaatttgggaagtctaactccatccttgctccctccctaaccacatagaattactaaatttcagaatttaaatactgtatgttccctacaaagctgaatttgaaaacggctctcattgagaggcagtgtgtttagttaagagcctggactttggtgtcaagacctgagttctggtctgcctggggcaagttaccttacctcgctgatcctcagttttctcatctttaaaatggagatacggctgggcgtggtggctcacacctgtaatcccagcactttgggagtctgagtctggtggatcacctgaggtcacgagttcaagaccagcctggccaacatggtgaaaccccgtctctactaaaaatacaattagccaggcatggtggtgtgtgcctgtagtcccagacactcgggaggctgaagcaggagaatcact

SEQ ID NO: 2835 - DNA, 889 bp, Artificial sequence
  DNA replication origin
ggacacgttgattcctttctccccgaaggggttaaatgtccttccagcgctgctgctgtcctttcactcccgttcttttccgccccccaacaaccgcgtggtcggcttggaaaggcgaactataattcccagggtgcctcgcgaggccacaaagaactacgattcccagagccccccgcggtggggcggggttgagtcggaaccacaatagccaggcgaagaaactacaactcccagggcgtcccggagcaggccaacgggactacgggaagcagcgggcagcggcccgcgggaggcacctcggagatctgggtgcaaaagcccagggttaggaaccgtaggcatgctgcgccccaaggctttgacccaggtgctaagccaagccaacactggaggcgtccagagcaccctgtgagtgcagaccacggacccgagcggcgagcgctgcagtggggcggcgcgcggctccctgagggaggggtggggaaggatcaccaggaagggaggaagcggcagagggggcagcggctggggataccggccgggaggtcccctgtcgaaaagggaagccggtgtgctgggtgcttagggcatgttccgggacacgctcaggccagagccttgctggatgtgcccttggtgggacttgggatggaaacccagacgttttactccccgctctgagcacatcgctatccctccccgcccctcaccaggctgctgaataacgagggatcactgctggcctactctggttacggggacactgacgcccgggtcaccgctgccatagccagtaacatctgggccgcctacgaccggaacgggaaccaagcgtttaatgaagacaatctcaaattcatcctcatggactgcatggtatggagag

SEQ ID NO: 2836 - DNA, 1523 bp, Artificial sequence
  DNA replication origin
acatcaggtgggacacagactccatgatttgcatggaggattcaagctaataaggattcaagctaataaggattcaataaaggttcaggtcaggttgagaggggtgcagggagtcgggcactgcatgggaggagcagctcttccctccaccagtctctcctcctgcctcacgccctttcctgctcctttaaatagcagacacactactctggcgcccccacttccacaaccagaaaatccagcccaagaactactccctaaatataatgcccatagtgatgaaggtgggggtttgaccctttaccccagtattagtcccctcctcacattttcactgagaatggggatacattccatcaataatttgagatgtttctttggaggagtgggggagagggcctccagatgcctgaagaggaatggagggaccatccaaatattcctccccctacttctccccagaaggatggtgtccccaaagctgggctggtaggggcaggggcagggggaagggaagaaagacaaagacaaggaacaagacagagctgggagtgacagccaccaaaagaaagcaaagcaaagagctggagggaaaggaaagagttgaggaaagggaagatcccaaaggaagggaagataggcggagagagtgaagggaaacactgcaggggacaggggcagagaggaggactcctctccagattcctctagcccagctttgtggggacagatggcttctgagcctttcagccacagaaacgattgacatgcttctctccccaacccctagaagatctatgcaacttctgataggactccaactcccttacactgctggaaactggtgacagtttcccaaacaggatatgggggtggggtgggaggtaaagggtcatgttaggaggtcggaggtcaggaccagagggcttagggattgcaaagagcacctctagatacaggtggtaattctccctctcccttttacccaccccctcctcggaagaaggggtggagtgacacacagcgggggaggtgggcagagggcgtcagaatgccttagtggccacctctggcaaaacaaaagtttctcttagctgcttccagatttaagggtgtgttgaggtatcagagttgtaactctagtaaaattttcagtctggccccctcccaatctttccaggacagggtgaccagaggctctgaaagtggcgcaccctccagccaccactgcctccctccccccttccccagcgagcgagtatctctaagcaccttgcccctcaaatcaccgctttccaaaaggctttagtggaaaacaggtccagggtgggcccagtggagtgggccccggaggcatggggcacggggcttaggagaatattcggatggcttgcgtggctgtgatgtggcagacgggacactctgggtccgtcctctcgcagatgcgtactgcacactccatgcagaacaggttgtgtccgcagggcacaagggcggcagtcacttcgctctcaaagcagacc

SEQ ID NO: 2837 - DNA, 1241 bp, Artificial sequence
  DNA replication origin
agggaagaggaaggtgggtaaggaggagagggacttgtccagacccccaggtcggcagcttttagaaacagaatagcccttacttttctctctagccttctccctctttgtctctctttgtctcatttttcttctttctcttcctgcctttccctaacctcccagctttaactcacttctacttcaaagcaggagtgtgggtccaaaatacctctccctcaccgtactcagccccagcccagctcagctgtcttgcccccaggggacagggggacaagagtgacacggggttgggcactgttccctcacacagaagtttaactccatactcctcctttcctccttgaacttatgattgtcagacctttcccagtcccctacactctactcgttgctgcaaactcgctatgaatttgaggcccactgagagaaactactgagtggaaggcatgtggggcggtcatagagcagatagacttcagtggtccctgggtagtttggaggacacttttaatgatcaagggtcagatgagtagattatgaggttactgagcacattggggttctgtggaaagatcagggtcagtgacagatgtggggggtgattaagtgatttggaagtttgtgagtagccaggaatcagtagagaaattgaaggaagagcaaatgttgggagaaaggagtgtagtttgtgaatggatttgagttaccagcttgtatgggagggtcagtgattatttgggggttttgaggagtgaatgaatttggagggccctgaatggaactcagggaaagttagtacattttgaaatctgtggctgagagagacattaggcacatctgagatctgataaatggtttcttcaagtcagggtggactgtgtgtgcagcagtgggcatttcaaagggtagactgaagtgttcctgggaggctaggtatttgggtaaggatcaggaatttattggtcccagcacaaaccttgctgtgtgcgtttctttgtctctctccttccccgccctatcccaggctgcaagattaaggccttgagggccaagaccaacacctacatcaagacaccggtgaggggcgaggaaccagtgttcatggtgacagggcgacgggaggacgtggccacagcccggcgggaaatcatctcagcagcggagcacttctccatgatccgtgcctcccgcaacaagtcaggcgccgcctttggtgtggctcctgctctgcccggcca

SEQ ID NO: 2838 - DNA, 2277 bp, Artificial sequence
  DNA replication origin
tctcctcttttcccttccaccacctctctctctctctctccctctctctctcccccagcttttgtttcgccatgcctagtctagtggtatctggaataatggaaagaaatgggggctttggagaactaggatgtttcgggggaagcgctaaggaccgagggctgctggaagacgagcgcgcccttcagctggctctcgatcaactctgcctcctgggtttgggggagccccccgcccccacggcgggcgaggacgggggaggtggggggggcggcgcccccgcgcagccggccgcccccccgcagccggccccgccgccgccgcccgcggcgcccccggccgccccgacggcggcccccgcagcgcagacgccccagccccccaccgcccccaaaggggcgagcgacgccaagctctgcgctctctacaaagaggccgagctgcgcctgaagggcagcagcaacaccacggagtgtgttcccgtgcccacctccgagcacgtggccgagatcgtgggcaggcaaggtaagcggggcgccgggaccactgagagggactgtagtgggggcaccctcgtccctagcgcggaaagttcatttcttcccttcttgcccgcctccggctctgtcccttccccacaaagggggacccgccccctaccctgatttcaaagtgccacaaagttccccgttacccctagtcgggacggttctccagatccttcctcccccaggactctgcctttagacaaagaaatatcctcgcactggaagagggaaaggggaggggatcggtctcccaatccagggaggctgtcctgagggggtgtccactcctaaccagaaaaactgacggaatgtgcaaagagttactcagaagcctgtactctggtatctgctcctaggctggggagggggcatccctggggcccccagccgcctggagttacagactttgggggagacctggccctcgaagccagactgagtatctgtctctttgttgggctgagtgtaggaatggaagggggtgtggcccaggggagggtcccagcctggggaagaggcggtgaggggggctgctgagaggagggggtcctgtggtcacccacaccccaaagttggattgtctctggggttttggaaggggtgtctccaaggaagtgctacgtcctggcttggacctctcctcttccctctctggcttttgttctgggctggccacggccttgggccagaggcctagagaggggtctctggtagtgaaagagtaggacagggtaggagggggaatgctggggggtaagaaaccttcacctggaaatttggtggagggcgtgtgtctgggtgtgttgggagggggtgcagaattaatccagcgtagtatgtctggtaccacaccctctgctgctccagcatccctgggtgggtgagtgggggtgttggtgaaggtccaaattgagcagacgggatcttggggacccttccctctcctggcttctcaaaggagagtgtggggggcaggatttggaaattgcaaagaggctgggctggggaggtgtggggtgggggaggagctgtcccacagtggggaacaatagaggagctgcattccggctgggagtgcgggaggaggccagcttctggcagaggaaaaggggaggcgggccaggggggcccctactccacatcccaccttatccactgggagtgctgggggttagggggatttcacggagagatccagaatggaggaggggaagatgccactcccctgcacagccctcatccccctggggcactccatctcttgagatttctgatttagaaagttggatttcctcttgtcagaaactggggatccaaagccctggaattgggtggggacggacattgctatcttttcttgggtgtgggggtggtcttgggaggccccggaatttaatggagtcattctttcctcttctgcctccgcatcagatgggcttgtccctcataaaagtaaggggatttttattcacaaaagataagcctgcccctcagtcaagtatatggaagtcctccctcttgtctaacctccctcctcctgctgcagtgttagtgctcctctgtttgacctctaggaaggtgaagcccagtgggtcttcccttcaagagatgcttctttggggttgcagaacccaggaagagacccaccaccagctttgcacctccaggcctctagcgtttcttcttactcgatgccttggcctgtcctcctcaccccaaccccaaccgc

SEQ ID NO: 2839 - DNA, 742 bp, Artificial sequence
  DNA replication origin
agaaccgtcccgactaggggtaacggggaactttgtggcactttgaaatcagggtagggggcgggtccccctttgtggggaagggacagagccggaggcgggcaagaagggaagaaatgaactttccgcgctagggacgagggtgcccccactacagtccctctcagtggtcccggcgccccgcttaccttgcctgcccacgatctcggccacgtgctcggaggtgggcacgggaacacactccgtggtgttgctgctgcccttcaggcgcagctcggcctctttgtagagagcgcagagcttggcgtcgctcgcccctttgggggcggtggggggctggggcgtctgcgctgcgggggccgccgtcggggcggccgggggcgccgcgggcggcggcggcggggccggctgcgggggggcggccggctgcgcgggggcgccgccccccccacctcccccgtcctcgcccgccgtgggggcggggggctcccccaaacccaggaggcagagttgatcgagagccagctgaagggcgcgctcgtcttccagcagccctcggtccttagcgcttcccccgaaacatcctagttctccaaagcccccatttctttccattattccagataccactagactaggcatggcgaaacaaaagctgggggagagagagagggagagagagagagagaggtggtggaagggaaaagaggagagaggaggggaggggagaggagaggagggg

SEQ ID NO: 2840 - DNA, 704 bp, Artificial sequence
  DNA replication origin
tgcactccttcaacctctgcacttcatcactccaccgccctcccgaccccctccaccgagcagaaggacgtgaactaactcacctcccagtcggtgcctctgagatctccgagactgggggggcggggggcgggcgaggggagatggcttgctgtttagggatgaggggaccccatcctttgccagggggttccagccccagcctggcaccctttcctggcccccacaacacgcagagcccagctctccccccatcgctgctgcgggctttgtcttctctgccgagaacctctccccgcggccgggctccgggatcgactctgggagagcgggagggggaagcggagagtgagcgcggcagggagcggggagaggggagcgagagagaaagccgcagtgagcgagcggggacggctcccggctccccgcccccggccccggccccccctcctcatttccataaaaaagcgggcccccaggaccggccggcgcggggcaggagcgggtcctgggagggggcgcgcggcgttagccagcttcatacccgctctgtttccgcatactaccccttctccccgcaccctccccttaaaaaattagggacctcgacttccatcccactcctagcttgccccggagctgcgaggaaagaccgaaggccacatccctatcctcctcgggtcaaggaatttgtccccgcgccc

SEQ ID NO: 2841 - DNA, 1024 bp, Artificial sequence
  DNA replication origin
gggggcgcgccgggggcgcccggggcatgccgggagttgtagtttcccgcccttgggggcgcggggacaaattccttgacccgaggaggatagggatgtggccttcggtctttcctcgcagctccggggcaagctaggagtgggatggaagtcgaggtccctaattttttaaggggagggtgcggggagaaggggtagtatgcggaaacagagcgggtatgaagctggctaacgccgcgcgccccctcccaggacccgctcctgccccgcgccggccggtcctgggggcccgcttttttatggaaatgaggagggggggccggggccgggggcggggagccgggagccgtccccgctcgctcactgcggctttctctctcgctcccctctccccgctccctgccgcgctcactctccgcttccccctcccgctctcccagagtcgatcccggagcccggccgcggggagaggttctcggcagagaagacaaagcccgcagcagcgatggggggagagctgggctctgcgtgttgtgggggccaggaaagggtgccaggctggggctggaaccccctggcaaaggatggggtcccctcatccctaaacagcaagccatctcccctcgcccgccccccgcccccccagtctcggagatctcagaggcaccgactgggaggtgagttagttcacgtccttctgctcggtggagggggtcgggagggcggtggagtgatgaagtgcagaggttgaaggagtgcagggacagaactgggggtcggacggagagtgggcaggcaggaaaagtcttaaaggcctggggtgacttaaccgtttggggtgagggccttgagctttggatatgacaggagggaggagagaccaggatggactgggaacccaggcttccttcaggcctgggctgtgaatacagcttggggtgatctgtcctttagcactcatcgtaatttccactctgtttcctccacctctctcccattgaaaacctattcagggccgggcgcg

SEQ ID NO: 2842 - DNA, 873 bp, Artificial sequence
  DNA replication origin
ggagggcggtggagtgatgaagtgcagaggttgaaggagtgcagggacagaactgggggtcggacggagagtgggcaggcaggaaaagtcttaaaggcctggggtgacttaaccgtttggggtgagggccttgagctttggatatgacaggagggaggagagaccaggatggactgggaacccaggcttccttcaggcctgggctgtgaatacagcttggggtgatctgtcctttagcactcatcgtaatttccactctgtttcctccacctctctcccattgaaaacctattcagggccgggcgcggtggctcacgcctgtaatcccagcacttcgggaggcagaggcgggtggatcacctgaggtcaggagttcgagaccagcctgaccaacaaggtgaaacctcgtctctactaaaaatacaaaaattagccgagcatggtggcagacgcctgtagtcccagctactcaggaggctgagacaggagaattgcttgaacccgggaggcggaagttgcagtgagtctagatcgcagagtgagactccgtcccccccacaaaaaaacaaaaacaaaacaaacaaacaaaaaaacccattcagtcccgtttgactccggaaattcggtgagaatgaaaataagtttttaaggcttggagagttaggcacttttagagtttcaggaaggtggagtgtaatgcaattttttcttctccctttaccccatattttctgcatttattttatatcaccctttttatgtctggatctttcccaagggaagaagggatggcactgcagcttgagggctcgaggtcagacttgaagaagaacttccataaagagttttataatagtgggtgggtgagccaca

SEQ ID NO: 2843 - DNA, 1982 bp, Artificial sequence
  DNA replication origin
gccctctcactcccttcctgcggccggccaggggcgccggcccgccgccctctccactccccgccaggcacgcagccacctgggcgaactcaccgcgctttcagctccttaaactcctcacgcactttgctcagctccagctgcaggcgggcgcgctccttggctactgagtcaagggtcttgcgggcatccccgagctcggcctcgtaggcggccttgatgccggacacctcgcggctgaccacctcttcagactcggtgatgcgaaggcgcagccctgcgttctccgtttccagcgagcgcacacggtcgatgtagaccgccaagcgatcattgagctcctgcaggtcctccttctcctgcagccgggtgatgcgggtgggcgacagcggagtggagctggcctgcgccccgctgcgggtggcgcgccgctgggacggggtctccatggccggcaggttggcagcgctgcccgcggggcaggggtcccggaaagggcgcggggctcgggtcgaaggacagagactgctcggagtcggagtgcgccggccggctggctctcggcttgctcctggcaggcgtggggatctgggccgggcgctgtcggacctcgggatctgggttggctggtgtaggtgcggcgctcccgcgaacactgagtcaccgacgccggggcaaaggctctaataggtcctcctctgaagggaggaggggccactactcttaaaggggcagtcccagatccattgggggtgggggcgggagtggtgaggagggggaaggaccgttggggtgtggcggagtcgggccccaccctctccagcgcacccctaactgcgtgaggctcaagcttcccctctcttggctcctgcctgctcagcactgtcggctccaagcttgcccccattgcctcagaccttctgggctagagggcagagccaaggagggagagtgggtgggcaaaagggtcggggagaaagagagggaagtgggcgcaaagcaagggagagggtcaggtaggcagggctgggagccaggaaagtggggggagggctgaggctggtgcccatcagtgtgactcacccttcttccaccactggctccccctgtcctcccagtagtaatagtgagtcaccccaacccccctccacacgtgggcagcccattcagagctgcatctcagtgtgccaggagtggggtggagaaggaatgcctgggttccctggggggagcaaagttctggaacctgagttcctttatgcccccagtttggggccagggatcaaggagtttggggggtccctttttttctttcttttgccccaatctatctctcttcaaagccaagcattcgtttttagacccaagcaacaagccacagtcccctaaagaagtcccctaaagaaagccaagaataggagccaggcactgccccttccatctcctgtccccttcctttggacccaagcactgcctgggttccttcccccttcagtccctttctactgcttaccgcacccagtcaacttatttttttcccccagaactgtacttattttaatggataatttaaaacagataccagagctgtgcatgcattcattacgttgccaagacactaggtcccagatttctgtggttcccagaggggcctgaaaggggaagcagggctgggggctggacagccaatattgggtctctatcctggtttcagccagaaagaaggtagtggggggcaagaaggtagtgggggacaggaacagcaaagaccccacagccttgctggctgcaaaggccagcaccatactcatctctactttcctctctggccaggtccattctgcagctggctctggggaggggccaggctctctcacaaaacgagatcactcaggtccccagggttcgctacctcaggctctggagcctccatcctcaggcctcaccaaggacccttttgataagccttccactcccctccc

SEQ ID NO: 2844 - DNA, 1433 bp, Artificial sequence
  DNA replication origin
gtccttcgacccgagccccgcgccctttccgggacccctgccccgcgggcagcgctgccaacctgccggccatggagaccccgtcccagcggcgcgccacccgcagcggggcgcaggccagctccactccgctgtcgcccacccgcatcacccggctgcaggagaaggaggacctgcaggagctcaatgatcgcttggcggtctacatcgaccgtgtgcgctcgctggaaacggagaacgcagggctgcgccttcgcatcaccgagtctgaagaggtggtcagccgcgaggtgtccggcatcaaggccgcctacgaggccgagctcggggatgcccgcaagacccttgactcagtagccaaggagcgcgcccgcctgcagctggagctgagcaaagtgcgtgaggagtttaaggagctgaaagcgcggtgagttcgcccaggtggctgcgtgcctggcggggagtggagagggcggcgggccggcgcccctggccggccgcaggaagggagtgagagggcctggaggccgataactttgccatagtctcctccctccccggaactgcccccagcgggtgactggcagtgtcaaggggaattgtcaagacaggacagagagggaagtggtggtctctgggagagggtcggggaggatataaggaatggtgggggtatcagggacaagttggggctggggccggcctgaattcggtcagattgggatttgccaactatttggagccggggggaggggcttgagcaaaacagaactagccctgccagctcgaagaactctgggcacccaggacacatcggagtggcagaaagggtcctgttagaactttgttagcgggcttggcactgtgctagctttgcccaagctggctctgaacacatgatgcccactaagacataactctcaagttggcatctgtccagcgtgttggagcgaggtcaggaaggcagggcaatcccccttttccctcccaagggcttggcggtggccccccctcagcatgaccttgtcctgggttctaagggttgggaagttctccctcactctgccactctgcgtgtctgggaccttccttgggctctgacaggcccaccaaaagagctccgggagatgagagatcggctcccccgcagctcccacagcccttggcctgcttggcccaggaatgcaagggagggagggaggcagagggcagaggctcccagctcaggaagttgtgttatgcccaggtctggccgcactcctcccttggccctctgcctagtgtcttcgagggttgggggcactgtccttccctccttggggtgagccactttcattttcccagcggggccaggcagtctttgctcgggcccatcctcttagctgctgacgttttgatctttgtcttattgaagtgctggaatacagtgacat

SEQ ID NO: 2845 - DNA, 1543 bp, Artificial sequence
  DNA replication origin
tccctcagaagtcaggatactgtaaatagaagagggctccttggggttcttaacagagtctgtcccttggcttatttgcatagttgcatagatatttgtgggctcattcgtgtcctcattggcaaactgaatttgcatggggttgggctgcggtccagctgtgtcgccccggcatatacacagttcccggggtagagggaaacccagaggaactggttgtaaagaggaatgggccccagctgaccccctgaacccaggtggtgacatgtgcacggtggtgcctgctgaaggtgggcaagggagctgagcagggaccgggggctactgtacctccttttcacctcctcccgcatctggagcccctcctcctccacatgtgcgaatccaggagccacagaaggtggggcgcagtgggacatgggtaggaggaggaagaatatggggagattctagtccctcccacttagagatgcggtcgccatggtgactgaggaccagtgaggcgggatggggttgagaatgggggtgggggtgtggcaggggctgaggcactgagagaccggaaagcctggcattccagagggagggaaacgcagcggcatccccaggctccaggtaagggagcgggggagctgacagttctgaagggagggggcggggccattgtctggtgctggctctgccctaaagagggggctgacagaggggtcgggctattgtgtgtgatactcagcgcagccttccagagctagtcagactggaggaggggacctgggaagctctgggtaaggggttaggagggactgagctggtgggtggcaaaaaggctgggagacagtggggatgggaagaggtggagggacacagggggcgtagaggcttggggacgtccctagtgcctatacacgctaggcactcaatacatataagttgacttgacttgcctgtgaccataacaagagggcagatgagggccagggcaggtggagctaaggcagggaagtcaggaggcaatgttccccagaactggactcttctgtgggctgcccctgaagctgaaagggaggaggtgggggaaactggacctgccagatcactcgtgaagccaggagttgcttctctcctggctccaggagctgctcctttagtgcagcatccgtgttctgcaggggctcagaagagactgagcgtctggggctggttgaagctcagaggtagcatagagtcggggcgggaagcaacctctccatctcccctcccacctccacatctagacctttcctctgcacaatagaacctggcaggaaggggctacatcgcatgctgtgtaagggttgcaggggaggagctggactctggcagggcagagggtgcactcagtgttgttgtcatggcaggacccagggctgggctccagggcttgtggagaaatgggctgggggaaaccccagattggagctgtgaaaatgacacggcccctgtgggcaggtccctgaacatctgaccccttcccactgccaccccacctgacctgctgcctgac

SEQ ID NO: 2846 - DNA, 1148 bp, Artificial sequence
  DNA replication origin
caggcaaacccagggcatgcaggggctcagtccctaagcccatctgcccctcccccgcagatgacgcctcctttgtggcagccatcccttcgacccaggtcgtctacttcttcttcgaggagacagccagcgagtttgacttctttgagaggctccacacatcgcgggtggctagagtctgcaaggtccgcggcctgggcggggggcggggctaactggaggagaaccaatagggagatggcaggggcaggactgagtggtgggcccccagtgagagcgggggagcggggcggggaacaagcgggcctggcggggtggggcgggggacagcggggctgggcgggtggggcgggggacaagcgtggctgagggggcggggtggggacacgcggggctggcggggactggggggacacgccgagctgcggggggcggggaggacacgcggggctggggggtcggggcgcccggggcgccccctgactccccctgtgcccccagaatgacgtgggcggcgaaaagctgctgcagaagaagtggaccaccttcctgaaggcccagctgctctgcacccagccggggcagctgcccttcaacgtcatccgccacgcggtcctgctccccgccgattctcccacagctccccacatctacgcagtcttcacctcccagtggtgagcagcagggctggaccatgggggctggacacgggacttgacgccagtgaggccccagctcgtgagcggaggcaggaattgacatgagccagcacctactcagcactttcacataggaaggcattaaatcgtcaccacctctcaggaatttgactcatgccctttttgtaaatgggaaaaataagacgcagagaggttctaactagtttatattctgcctagttccaaaagggataggaagcattttacaaaaggcaaatattaaaatcgataaaatagatacagaaatgggaataaaaggagaatatgagaagccaagggtaaggccaacacactacaaatgcttgtcataagatgtaggatagtccctggatgccagccacaaatttagctctgcatttcctaatggccagggcaaacagggaaacgctatccgtatcagaagataaaaataaagtcggccgggtgcgg

SEQ ID NO: 2847 - DNA, 950 bp, Artificial sequence
  DNA replication origin
cgtgagcggaggcaggaattgacatgagccagcacctactcagcactttcacataggaaggcattaaatcgtcaccacctctcaggaatttgactcatgccctttttgtaaatgggaaaaataagacgcagagaggttctaactagtttatattctgcctagttccaaaagggataggaagcattttacaaaaggcaaatattaaaatcgataaaatagatacagaaatgggaataaaaggagaatatgagaagccaagggtaaggccaacacactacaaatgcttgtcataagatgtaggatagtccctggatgccagccacaaatttagctctgcatttcctaatggccagggcaaacagggaaacgctatccgtatcagaagataaaaataaagtcggccgggtgcggtggctcatgcctgtaatcccagcactttgggaggccgaggtgggcagatcacgaggtcaggagatcaagaccatcctggccaatatggtgaaaccccgtctctactaaaaacacaaaaattagctaggtgtggtggcgcatgcctgtagtcccagctactcgtgagcctggggcaggaggatcccatgaacccgggaggcggaggttgcagtgagccaagatcgcaccactgcacgccagcctggcaacacagtgagactccgtctcaaaaaaaataaataaaaataaagtcattgcttgaaggttgagaaaggttaaccaatttgtccaaggtccccgagtcatggtctggccccacagtgtttaggtacctgctgacaatgtgtcaggtaccaaaggtatttggggtaagtgggatctggtatccacaggatccagaattgagagcctggtgtatacagtagtcagcttcaagagagcagagaaacagacctcctgtctccacagaccagggttgaggaataataacagtctggtag

SEQ ID NO: 2848 - DNA, 2117 bp, Artificial sequence
  DNA replication origin
atgagttagaatatgcggtgtttggttttttgttcttgcgatagtttactgagaatgatgatttccaatttcatccatgtccctacaaaggacattaactcatcattttttatggctgcatagtattccatggtgtatatgtgccacattagagccccccgggagcggaggcgggccggccggccagcgagtcgatcggccctggccaactccccactccggggaaggggcggcggacaacccagcggagacgagaacgcctgacacgcacggcacggagccagtggggtggggttgtcgcggccgccccgggcgcccgcagcggagagcgcacgggggcagggtagccctcgccgccttccccgccgcccccgggtgggtcagagacccggacccgggccggcaccgggagtcgggacgctcggacgcgcgagagatcagcaggcccgcgggccccagcaggcggctcaagcaggagcacggccggctagccgggtcaccggtaggccagagccccgcacgcatccagagtcccaacctctccagcgacaggtcgccagaggacagcgtgtcagctgctctctattcctttacactgattttattttattttatttatttttttgagatagagtctcactctgttgcccaggctagaatgcaatggtgggatcttggctcactgaaacctccgcttcccaggttcaagcgattctcctgcttcagcctcccgagtagctgggattacaggcatgcgccactaggcccggctaatttttatatttgtagtagagatggggtttcgctacattggccaggctggtctcgaacttctgacctcaagtgatccacccgcctctgcctctcaaagtgctgggattacaggtgtgagccactgcgccaggctcaattttatttttttttaatggtaccagaatgtctactccaagaagattggaaccttgtccatcttgatcactgccttatctccagcaactagaaccctactagaactagaacaaatttattgacactgtcaatggtcagtaaatatttgtgttataaataagtggccgaggcaggcggatcacctgaggtcaggagttcaacaccagcctggccaacatggcaaaaccccatctctactaaaaatacgaaaattagctgggcatggtggtgcatgcctgtaatcccagccactcgggaggctgagacaggagaatcgcttgaacccaagaggcaggggttgcagtgagcctagattgtgccattacactccaacctgagcaacagagcaagaccctgtctcataaataaataaatgggacgggcactgtggctcatgcctgtaatcctagcactctgggaggctgaggtgggaggatcacttgagcctcagagcttgagatcagcttgggcaacacagcaagacctcatctctaaaagaaataaaaataaataaataaataaataaatggggggacatataactaagagaaagtggggactatgggaggggagacaagggcaagaatgagtagggaaaaataaatacaacaggggagggaccgtgccaggacatatgatgatgacgtgccatgattggttcataaaagtgattacaaattattttatcaaattcattattatggcaaactaggccctgcatgataaggctgttacctgcctctccagcctcatctcattttactctgatcactatgctgtagccaagaaggtctctgccagttcctggaatatctgatcacctcagggactttgcacaggctgtccccttttcctatacattcgttctgtaattcttcaaaaaggtggttccgcctgggtgcagtggctcatgcctgtaatcccagcactttgggaggcagaggtgagtggatcgcttgagctcagttcgagaccagcctggccaacatggtgaaaccctgtctctactaaaaaatacaaaaattagctggccgtggtagcaggcacctgtaatctcaactactcgggaggctgagggaggagaatcacttgaacccggcaggtggagactacagtgagccgagatcgagccactgcactccagcctgggcaacagagctagacactgc

SEQ ID NO: 2849 - DNA, 1676 bp, Artificial sequence
  DNA replication origin
gttgtccgccgccccttccccggagtggggagttggccagggccgatcgactcgctggccggccggcccgcctccgctcccggggggctctaatgtggcacatatacaccatggaatactatgcagccataaaaaatgatgagttaatgtcctttgtagggacatggatgaaattggaaatcatcattctcagtaaactatcgcaagaacaaaaaaccaaacaccgcatattctaactcataggtgggaattgaacaatgagatcacatggacacatgaaggggaatatcacactctggggactgtggtggggttgggggagcggggagggatagcattgggagatatacctaaggctagatgacgagttagtgggtgcagcgcaccagcatggcacatgtatacatatgtaagtaacctgcacaatgtgcacatgtaccctaaaacttaaagtataataaaaaaaaaaaagaaaaaaaaaaaaggaatagagagcaatggggaagaggggtcagggtgaggaggaggttaaggaagtggcatttgactgtatccttgtaaaatatgttatatttttgtctgtgtatgttttaaatttatatgaatgatattgtgctacatatgccattttttactcaacaacattgttttcaagatctaaccatgtcaggccaggtgtggtggcttacgcttgtaatcccagcactttgggaggccgaggtgggtggatcacttgaggtcaggaatttgagaccagcctggccaacacggtgaaaccccgtctctactaaaaatacaaaaattaaccgggtgtcataatgcccaccagtaatctcagctacttgggaggctgaggcaggagaatcacttgaacccaggaggcggggaagttgcagtgagctgagattgcgccactgcactccagcctgggcaacagagctagtctccaactcaaaaaaaaaaaaaaaacaaaactaaccatgctctaaaagtgcacatgcacatggttcatagcttcttagtgctgcctgtcagtccttgatatgcatccaccacttacccatttcctatcagctcctcatccataaattattccagggtgaatatccttgtacatttccacaggagctagtgctagaatttctctgagacatgtaactgggagagggatcactggatcctagagtttacacctacctctgttccatcagattactttccagaaaagctgttcttgtctgccaccttctcaccgtcactgggttttttaccattctaatatttgtcattctgccaggtgtgaaagcggtatcttgttttaatctgtgtgtccctgattcctggcaggtttgggcatttcttcatgtacttagtcattttggcttcctcttctgagaactgcctgctcatttcctccagcctttcattttcagaacttttttaaaaatgggttttttatcttgttgatttgctagagttgctagtatagaaggaaatatctattgggtgataactttgttgatgatgtcctttgaggaacagaagtcttcaattaaataaaaagcagcacacatttcaactgtttccattttcccttaagaggatgacacagaagggaaatgcagttatgcctgcagacccttcatgaactgcatggatcctcctgactccttttc

SEQ ID NO: 2850 - DNA, 1249 bp, Artificial sequence
  DNA replication origin
agcgatgaggaggggcatgcctgaccatggtgcgggcgggtctagggggaatctgccagggctatttgggggtcatccgccccagctccgtaggccaaaccccaaaggatattgtggttgggagctgcggctgctgggccaggggcccctgggagtgatggagggtgagccacaatcagactgcccggctcttgacactgcctctggcccctctctcaggggacagccccagacccctcagctccaactcactcttcctcagagacccccagcctcaggttgagcactggctgagctctaggggagtctaaagaggaagcggggatcagagacctaaaataggttcaagcagagctgggctccagctgtctcacagcctgtgatttctactgtcagccccgtgggcaggagccaaacccagggaggggatgcctcgcaatgcccccgttcacccggtgagtcaccaaaggcagcctgctgtgggtgcagctcgacggctcaggccctgccctgcgcatccggacaggagaaagggtcgggcagcacaaacgccaaaagccaaagccaatggaggtggggccgggcaggagatgaggtcagccggttggtttctgggacacgccaggtggctgtgactgccaggtacacaggcacagggaagggaggcaggcactgaggtggggacccccttccctgtgtccttagcaggcagggaggcagggcctgtgaggagcacgaagatggagtgtgcctctgccctcctggccccacgattctcctcctgaccctgcagcctccagtgttaaacaccctggggagggacctgccctcccgtagtgctccgataagtaataggaaggcctatcctctacggtacagaacatcccagcctgaaaaccccatcccacacctgagagcctccactgcctcaggtcagcccagagagggaagacatgtcctgggaccttcccctgtctaacctgtctcctcactcacccacccaccaaccagggcttgagaccatctgcccaacctgacaagtaaacaaagcacccgacggggcaggcctgacagaagcagggcatttggatgcttgaatgccacagctccatggtgacaaggtgggcagagggagactgagccaagtgccgtttatgggaggggggtgggaagttgggaccacctgatgcttgcctgtgtccccagtgtgcctccagcagacctcaccaaggctctcactagggaaaag

SEQ ID NO: 2851 - DNA, 1428 bp, Artificial sequence
  DNA replication origin
tgggaaaggtgtggctctgacctgcccatcctctccacaggccacagccaccagttattccacatctgtgcagtgctgggcacccacttccagctggaggcagtgctggctgatatgggatcacgcagagcctggctggccacacaggaacctgccctgggcctggcaggcacagtggccacactggtcttggctgcagctgggaacctactcattattgctgctttcacagccaccctgcttcgggcccccagtacatgccctctgctgcagggtggcccactggaggggggtacccaggccaaacaacagtgaggccccatccctgaccctgtcctggagggggcagaggccaggccccagtgctgacgaggagcccagatttgggcctaatcaggtggggacgcatctcagcctggaaccaacaggggctgaggagagagggcacaggagagagggcagagaagaggaggggtgtctagggggactggcagagtgtgagagggaccgtgagggggctcttgatgggagtggaagaagtgctgagggtctgagaggggagatgcatgcgtgtccaggctgaagatgcccctatattctgtcaaaggttggcggggggaggtgttggggtcctttcatctggctccgtttctggtgcttctggaagtctctgctcagcacagggaagaactaacacgactaacctaggcctaccctgaatgcttcttgctaaccaggccgagaggccacacacttgcccccccatccccacaaaccaggtaatgccagtttgccagcagctatttgcctatagagatgagtctgtcctggtcataactgtgtgctcaaggtgtccaggcttttgggggtgggcctatctgggtgcattatggatggtttggtggattgaggtgtggggaggagggtcctaggctagagggggtatccctagttagactttgggaagccaccttcaacgttttctggaacaaggcaggtacaaataaaaaaataaaactttggaaagcactttctagaactgaagaaggtaaaacctcctcacccccatcctcctgacacctccctcccacactccataaactggacagactcacaggcccacagattcctcttctggagtttatttgggagcagctgggatgatggggaccccacatccatagggctgggaggtcagggcaagggcaaggggaagaggaaagaagggtgcctggagaggagcagaactggggttgccggccaggccagcagagcgacaccctagaccgggccgtagaagcgccgataggcctcctgaaagccgatgtggtcagccaactcgtcacagtccggattgagctcacacacctccctcctgggctccaggggatccgggtaggggactggggctctgagacacccgacgtg

SEQ ID NO: 2852 - DNA, 1102 bp, Artificial sequence
  DNA replication origin
gggcctgctactcccccataaattgagaataagaaaccctgactcccagagtgactgaaaggaatgaatgagcatgtgtgcatgtggccccagcacacatgctactagttttgctacctgagaagtggcaggtggaggacccttccagtgatgctctcgttataggaagacagggaagtccctcctataatttgcctccatcctggggctgtaatacccatttacccagttcattctgtgctctgggaaggcatctgcccctgcctcttcccgggccgggccaggcgtgccctcaccgatgtaatcaaagcgtcctggtgccagcctttcaggcaggtgggaggcgaagaggaagccagtgagcagcgcgcagaagagatggtagccatggctggtgctcagggcctcctgcccacagccgtggcccctgccccagcacagcccgagctgtcaaaggaaaaccaaggctgctggggagggactcgggagccgaaacatggggtgtgtctgggatctggtgaggacgcagagcgggcgggcacagctaggcggggtgctggaccccaagagaggcggctgggctgaggcagggactgagggggcagggctggaagtgggcaccttgagggtcaggacaggaaagcaggagtctgggcaggggccctaggcctccttacccgataaaagagtgggaggttgtcgaacaggaatggataggcgaaggctcctgtgcggaggaccttactgagcccagggctttccagctccaggaaactgggaggcgggaggaaaaggccggtcaccatcgctgtgcttggggtaggggtcagagaaaggcaagaggacttgggcaaagatggaatatcagcacagcctgcagctaagaaaaccgttagggcatatgacctcctgtgtaaaggaccacatctgtatgtggggataaagggtctgacagaggaagtcctcagtacatggtcccgatgcctccagtgctgttcgagagcagtgaggtgtgtcctctcctgtgcctccgccttccccgtccccactggaggggcctgggaacccaccgggagtagcaggagaggccggtgcacaggaa

SEQ ID NO: 2853 - DNA, 1305 bp, Artificial sequence
  DNA replication origin
cggcataggggaaggcgcagcctgcggtgaggtgggggcgtgcagctgaggcctgaggggcgcgcccctatgtcccgcgtcccacccctcgccccgctccgggacgcccagaccccgcgctcccgcgcctgtccggctcacccagactgtagaggctgagcgcgccgtagtcgaggaagtagcagatgtggcgcatgcggggcgacatggagctgaaggtgtgcgcgcagcacgacgcgaaggggtagaggcaggcgggcagcaggaagaccagcagcggccagtggtacggctccgcacggaagccggggccgcccgccagcgccaggagccgccacaggaagtacctgcggcgggcgcgtgctcaggccgccgcggacccccgcgactgccgctgcagcccgtgggcctggacggtccctgcccgcctgggtaccccctctgagctcaaggccgcggcctggggcggagcctcccctcaccaggtgggcaggaagtgagtccagatgttgaccgtctcgttggtcatctggaaggagctgaggacacagtccaaagccgagctggtggggcggcggtagccagacatgatgccatcttcccagaacacctagggtagtggtgggagaggaagggcgtcactgtgcccggaccctttccctccatctgagatctctggaagcagggtcaaagaggctgggctggagatcaacgtggcccccaagccaaactaaatctgatctgatgttaccacaggtcccagtacccacaacccacaaaacaaataggaaaccgaagagccagattggggtgggatgggggtggagcgcagcacacagggcgctctggggaaggggactccagatggagggccacaagcttgttcctcagagaacagaggaagagtctcacactggaatgggagggtaagagttcgcctgcaggaggggctgccccaatagctaaaagagaagaacgtcagcccctagtcagtcctctagggaatgggggttggtgggtcagtgggtggagcccctcacccgggggacctggtggacttgaagaagttggggcagcttgagactgagcatggtggcctggtacctccacgttgacctagagacagagtgggaggtaggggatcagataactgcccccatccacaggcccctttcacctgggttcagccgcaggatgggctgtgcgtgtgggaggcagatggcaccctccctcctggagctgcttccttcaggcctggggaagctggtccaccttccccagcccttgcaccacttaactccaacc

SEQ ID NO: 2854 - DNA, 1052 bp, Artificial sequence
  DNA replication origin
accaacatttaccaaaggcagtttgctctgagccctaggcagcaccaggtgctaagaggcagcaaagcatggtgagagatggcttctgaaatctgttctgcatttggggatttgggttcctctgccagcctaaggcagagctgtccccaactgctgggagaacctggaacgggaacactgctctgagtcgccggggggactctacagcaccatggccacatcctgccttgggcccctaccctgttctagccagtcagcacagggagtttgggtcgtgctggaggagctggctgtgtgcaggcggccgagtgagctgcctgctaatggggctgggccaccccgtgctgctccctggaggctggacaaggctgggattgttccctggctcccctttgtctccccactccccgcccaggcctggcccgcctgcctggccactcttcctccatcagcctggctggcagcagccttggactccgcccgtggagccctgggcctgttgacccaccagcttaggagcacccaccaagctctgggtaaggaagctcaccttctggggctcttctgggaaaatagaggtaaagcatcttgctccagccacccctcccccatttccatagcaactgcacacactccactccagagatctccaaaccctactactaagggaaggcaccgtgagggcagctagaccccagcgtattcctcactcctcccccagatagatgggcagcactcagggtaggggagacccccgaccatcccacttgtgggagcgagcaagggataccctgggaggccctcatccatctttgttctgctggggtgcagggactagggccaggtttgcctttgcccagcagggtctccagcacccatctcgggcagaggctgggggagtgactgctggtgcaagccccaaagtgcatgcggcaaaaacatggatgcagagctggtggcaagaagaggggctaagttatagagttgctgcaaagttttggcctggggaggtggggggagtgtcctagtcctcctcctggggcggctccgcc

SEQ ID NO: 2855 - DNA, 1353 bp, Artificial sequence
  DNA replication origin
tagctttgccaataaagtttttcgcaagggtttggagaagccggaaagacgccatgctgcccagagttagttctggcaacttcccgggagggaaaacgagtttcgcgagatttggtagcagcaggccactggtccgcaactgtgcggctgccatcgcgagatttggcaggcggaggaggagctgtcgcgggcagccgcctcacagcgatggcggccgagcagggccggtggcggcggcggctgcggctacggccggagacggcagtgttggcggtagtggtgggtggcaggggcctgtgaccgggagctgcccccggacccgggcaccatgagccaaggcccccccacaggggagagcagcgagcccgaagcaaaagtcctccacactaagcggctttaccggtgagaggggccagggcgtgagagcagccaccgagggaagtggggagacggcgaggggcggggcctcccgggcgggcggggcccgggtgtcggggtgaggtgcgggtgaggaaggagggtgcaattttggaggcggggcggggtcccgtagtaactcgggatggaactgaaaggaggaattgggtaggtgggaggtttggagggaagcacgtggaggaatcccctctgcagtgagctttcttggggcgggcactaagcttggtggagttggggtaatagggtgggaattgaaggctggaagggttgggtaggtgaaggtggggtcacaggtgtagaaaaacccggaagggaacggtgcttggaatcctgggggatttacaaggaagagtcttggactgaagtccgtggagctaggttcaggtccatcctttgccactctctcacggtgtgaccttgggcctcagtttccttatccttaaaaagaacgatttgaattggatgtgctctaaagtcccatacggctctaattttgaggagtccgaatgagaaagtcttggcctggaagggtcacgaacgacttttgtgtccagagcgttcttgggatttgggaggcaattccgggcacctggggactcctgagtcctgccttcctcccagcctcatgactgtagtctcttgccaggcaacttccgttcctggtttctgatttccataatgccacccacgctccacaagtcacatcttcagcccttcagccctctgttggcaacaggcccgaatgagctcttcccatcaaaggtggagaatttgttgggtaggtcaactggaacatgggctccgcaactgggtcaaaataggatgaagcgtggaaactgagttttgtgccttctactacagagtagagtttggggttttcatttagctcaggctttatagaacacggatatttgc

SEQ ID NO: 2856 - DNA, 1260 bp, Artificial sequence
  DNA replication origin
aaggcagaagaatttttcttagtacagaacaaaatgaaaagtctcccatgtctacttctctctacacagacacggcaaccatccgatttctcaatcttttccccacctttcccgcctttctattccacaaaaccgccattgtcatcatggcccgttctcaatgagctgttgggtagacctcccagacagggtcgtggccgggcagaggggctcctcacttcccagtaggggcagccgggcagaagcgcccctcacctcccggatggggcggctggccgggccgggggctgacccccctacctccctcccggacggggggactgaccccccccacctccctcccggacggggcggctggctgggcagaggggctcctcacttcccagtaggggtggccaggcagaggcgcccctcacctcccggacggggcggctggctgggcggggggctgacccccccacctccctgccagatggggcggctggacccccacctccctcccggacggggtggctgccggacggaggggctcctcacttctcagacagggcggttgccaggcagagggtctcctcacctcccagacggggtcgcggctgggcagaggcgctcctcacatcccagacggggcggtggggcagaggtgctccccacatcccagacgatgggcggccgggcagagacgctcctcacttcctagatgggatggcggccgggcagagaagctcctcactttccagactgggcagccaggcagaggggctcctcacatcccagacgatgggcggccaggcagagacgctcctcacttcccagacggggtggcggccgggcagaggctgcaatctcggctctttgggaggccaaggcaggcggctgggaggtggttgtagcgagccgagatcacgccactgcactccagcctgggcaccattgagcactgagtgaacgagactccgtctgcaatcccggcacctcgggaggccggggctggcggatcactcgcggttaggagctggagaccagcccggccaacacagcgaaaccccgtctccaccaaaaaaatacgaaaaccagtcaggcgtggcggcgcgcgcctgcaatcgcaggcactcggcaggctgaggcaggagaatcaggcagggaggttgcagtgagccgagatggcagtagtacagtccagcttcagctcggcatcagagggagaccgtggaaagagagggagagggagaccgtggagagggagaggggagaggggag

SEQ ID NO: 2857 - DNA, 1030 bp, Artificial sequence
  DNA replication origin
gcttctctgcccggccgccatcccatctaggaagtgaggagcgtctctgcccggccgcccatcgtctgggatgtggggagcacctctgccccaccgccccgtctgggatgtgaggagcgcctctgcccagccgcgaccccgtctgggaggtgaggagaccctctgcctggcaaccgccctgtctgagaagtgaggagcccctccgtccggcagccaccccgtccgggagggaggtgggggtccagccgccccatctggcagggaggtgggggggtcagccccccgcccagccagccgccccgtccgggaggtgaggggcgcctctgcctggccacccctactgggaagtgaggagcccctctgcccagccagccgccccgtccgggagggaggtggggggggtcagtccccccgtccgggagggaggtaggggggtcagcccccggcccggccagccgccccatccgggaggtgaggggcgcttctgcccggctgcccctactgggaagtgaggagcccctctgcccggccacgaccctgtctgggaggtctacccaacagctcattgagaacgggccatgatgacaatggcggttttgtggaatagaaaggcgggaaaggtggggaaaagattgagaaatcggatggttgccgtgtctgtgtagagagaagtagacatgggagacttttcattttgttctgtactaagaaaaattcttctgccttgggatcctgttgatctgtgaccttacccccaaccctgtgctctctgaaacatgtgctgtgtccactcagggttaaatggattaagggcggtgcaagatgtgctttgttaaacagatgcttgaaggcagcatgctcgttaagagtcatcaccactccctaatcttaagtacccagggacacaaacactgcggaaggcagcagggtcctctgcccaggaaaaccagagacctttgttcatttgtttatctgctgaccttccctccactattgtcctatgaccctgccaaatccccctctgcgagaa

SEQ ID NO: 2858 - DNA, 1174 bp, Artificial sequence
  DNA replication origin
aacttggcctcccacagtgtggggttacaggcatgagccaccttgcttgcccaaaattaaatattgaaatagataaatacttattgaatggataagtgggaatgataatattgtttacaaattaatccggctgagaagaaaggcaagtgaagagaaaacaatcagccagggagcacagcccagccaagagagtggggggcaccccttcccgtcggccaccaggggagttggagagggaggacgtacccttccccaccctgctccctcccccagctcacaagctgtgggctgatgcggccgctggtccctgctctcaatacctgaatgaactatttggctgaaagcctagggtgaggtgttcgggggacggagagcagggcgtggacttcgctccgccgctaggtggcgggctggctcaggacaggtgagcccggcagagagtgccggagggggaggagcccagcagggaagggcagaggggcaccctggcggtgggaggggatctgcgtaggacctcagcaacgttgggggacatttcccttgggtggagtcaaggatgcgacatcgttcaagaaaatatttcattcaggagttgggagcagagaccatgctatgcccagtatgaggggaaggggtgagggagtgtcacctcaaggcaccccccgtccagagaaaggggtggaagtataaatcccagtggggtgccctgtgctctaattaggggagaaaatgcagcaaggagtccaaaggcaggggtagtttcctaaggaatcatatttgaggtgcgccttgcaggcggagttctgttttaacagaagcagcatgtgggtaacagcctgaacaagtacagagcctggaaaatgactctttcaacccggagggaggaacaggctgcgttggggaggggtcttctcagttccccgctggagatgggcctgccttcttctgtcagaagggtttggtggctggaggagagcgaggtgttggggggtgtggggttgtgtgtggcgtgtgtctgaattgcaaagaggagtgaaggcttccagcgacaccttgaccacaggctggctctccagcatctggaggaatcagaaggagaagggacgttctaaaatgatcatggagggccgggcgtgttggttcacgcctgtaatcacagcactttgggaggcca

SEQ ID NO: 2859 - DNA, 1824 bp, Artificial sequence
  DNA replication origin
agctagtgatggggcagccaaaatgggggccaccatggccaggtcccaaagtcaaggctcttcggggagaggagtaggtatgggtggaggggacagatgaccacctctctgcgccccaaggcctagttccggtcaccctccgccttcctcccgggctggctgactccactggctatcagacgactgcagcacagacaatggcgctctgtcccgggcgctccgggacaacagctcatccctatgcagtggccgcctcccccacccaggcccggccgccagcccttttcaggccgtggaagcccaggcggcggcgaaggggattctcacaggccgttgggcatttgcatagccggctcgcccgcccggagacattggcccgcattgttcctgggcggcggcggcgggcgcacgggccggggcgcgcggggcggcgcggcggaccggctgggagtgggcgggccagacaaaggagaaggggcgcgcagggccggaggcggcggtgggggagttcccgacggtgggagcggaatatcggggtgaggtggggggacgcggcagccgcgctcgtctgccccgggacggccaccgccccgcacttgggacactcacgccgtgtctaattcctccccgagttggggccgccgcgtcgtgatgtgaatcccaatagcggggaatctcaggcctttcccaggctgcgcggggttcggagtgccgggtcctccagaggtcagaggagcagcttctaactcctggccgagggggctctggccacacagggcagaagcacctgggggctcctggggaccttgggcctcttatccagatgtccctgggcaggaaatcctgctgtcgtccacacgcacttgcgccaagccagaacagcggctgcttccggagaaccttccctcaacgccgctggccccgcgggcttccaccctgaccccagcgcagcctgtctccccgcaacagtcttctctgggaggcaggcaggggccgtgtcctcgtccatcattgtccccagagatcaggcattggggttggatagacagagttcatgagcgggcaagtgtccgattgtcctgcactgacagaaataatggtgctgatcagaggggctgtccctgaggggcagaggcctcattgtcctgaaggggtgaggaaggagcccccttggcctctgtccctaccacctccttgacctactagttgtccccctgttgacccagcctgaatagatgggccaccatgtgggggacaatgctgctgaggcagggacttcaggggagggaagggcttggtcgcatttgagcaggggcgctaagggtacctgtctttcctgccctctgtgctccctgactgaaatcagtggcgggataatcacccacacccagaccacaaagaatggctcagtcctatgaagtggaacaaggtctggagggcccatgatgagacgatcccagcactcaaggtaaagtagtgggagggagaggaggaaatagagtgaaaaaccaagggcctagcttaggaaagttcagtcctgggcagacagtcccctgaataagaatgcgatcagggtgcaggggcttgaggcagggatcagcatcattgcctgggctatgggaggcttcatggaggtgatagagcttggaactatctgtctacggggcacacagggccacctcttatgggttagctctctccctgcccctttctcaggacatcttgtcaggctatgatgagacctatacccttttgtcctgtggaacctggctgggcaactgccttctcctaaagagggctcagttgttccttttccaggaagcc

SEQ ID NO: 2860 - DNA, 2109 bp, Artificial sequence
  DNA replication origin
tgtgtggccagagccccctcggccaggagttagaagctgctcctctgacctctggaggacccggcactccgaaccccgcgcagcctgggaaaggcctgagattccccgctattgggattcacatcacgacgcggcggccccaactcggggaggaattagacacggcgtgagtgtcccaagtgcggggcggtggccgtcccggggcagacgagcgcggctgccgcgtccccccacctcaccccgatattccgctcccaccgtcgggaactcccccaccgccgcctccggccctgcgcgccccttctcctttgtctggcccgcccactcccagccggtccgccgcgccgccccgcgcgccccggcccgtgcgcccgccgccgccgcccaggaacaatgcgggccaatgtctccgggcgggcgagccggctatgcaaatgcccaacggcctgtgagaatccccttcgccgccgcctgggcttccacggcctgaaaagggctggcggccgggcctgggtgggggaggcggccactgcatagggatgagctgttgtcccggagcgcccgggacagagcgccattgtctgtgctgcagtcgtctgatagccagtggagtcagccagcccgggaggaaggcggagggtgaccggaactaggccttggggcgcagagaggtggtcatctgtcccctccacccatacctactcctctccccgaagagccttgactttgggacctggccatggtggcccccattttggctgccccatcactagcttgcgggcctgcacaagtctgaacctgtgtctcttggggtttaaagctggtcatcgttggtgcttttcttaccctccctccctcttaaccccctcccggcaaactccatccatttatacacatcatattgacccaaaagattttgacaggtgtctctgaggccaattctttccagagccctgagagaaatacttgtggtgtccccaaagcaaaagagattactgggcagagatgccccaaggccgagtccaggccttctttctttcttttctctgccatccaccaccaggtaaggagccccaactttttactgggagaaaggccagctatggcaggatgaaaataaacttctccaatgacgcagaggtgggggcttgtcacacaaagtccctcccacaagcaaaagaagtgcatccctctaccccagcacagaagactgtacccatctaacagaacgcaccggtcaaatgcttgagaatacccgggcagcgggcaggggagctctttgctcagagcaaagcctgttccggctgggaacttggcactatggacttgagcgcttccaggctgagctccagtgaatgggctggagtctttgcaaggcacaggacctgagttcaccttttctaaacccacgctgagactcaggagcaagggcttctgccactcaagtgagatgctgtttttgagatggtgcttgggcccttgaagcagtgatgcttccaggactcataatggctttaggggcaacaccaaaatgaggactgtcccaggatctccaggtcttcagtggcaggaaggcgggagaggctgaatgaggggacgagggaggagggtaggagggcaggcagtcttctggaaggcagggccccaccgctgggctcagaggcctgttcctttgtgctctggcccagccttccacctgagatgcagctcttcccctctgtccccctgccctctataaagatccaggtgcagcatgcatgccagccattccggggtgaggcagtggggcctggcttctggaatagtatttggaggactattagatgagaggaaggttgggagcagggaccaggcctaggagctgaggcattttgtgggtggaggaggcagccagagctctgttcacctctacttggggtagtgggcctttctgcagctcctcatccagccactctcctatccagggcactgctggtccaacctggaatccctgcacagcattctgacctggggctgcacagcctcatggaaactcctccagagaccccaaaagccacctctgaaagaaggtgatccagcatccccacccctctcctctgcccacccgag

SEQ ID NO: 2861 - DNA, 889 bp, Artificial sequence
  DNA replication origin
aaagttttctcaacaaggcaatttacttctatagcagggtgtgtctagtggatggagcaatggtgagagcacaccagacaagggaggagaagggggtcttatccctaatgcagctagtccctactgctatgtcttttccctattggctaaggttggaccgcatagtctaagctaattccgattggctattttaaagagagcgagagtggccgggcgcggtggctcacgcctgtaatcccagcactttgggaggccgaggcgggtggatcgtgaggtcaggagatcgagaccatcctggctaacaaggtgaaaccccgtctctactaaaaatacaaaaaattagccgggcgcggtggcgggtgcctgtagtcccagctactcgggaggctgaggcaggagaatggcgtgaacccgggaggcggagcttgcagtgagccgagattgcgccactgcagtctgcagtccggcctgggcgacagagcgagactccgtctcacaaaaaaaaaaaaaaaaaaaaaaaaaaaaaaaaaaaaaaaagagagcgagggtaggagccggagtggtggggtgagtagttttggcgggaaggacggttacagagcaggtgactaaggatgactaaggacagagcaggtgactaaggatgactaaggacaaagcaggttactaaggacagagcaggtgatagaggctaggagggagttgtttactgagactaggggcaaggagacaaagaatgaggaagttaaactttaaaatggagaacaaggccgggtgctgtggctcacgcctgtaatcccagcactttgggaggccaaggcgggaagatcacctgatgtggggagttccagaccagcctgaccaacatggagaaaccccatctctacta

SEQ ID NO: 2862 - DNA, 1077 bp, Artificial sequence
  DNA replication origin
gagtgggctgagagggaaatagaagtcattgtaaaagggccagtgggagatgcttcccagaaaacacaaagaaaccaggacaagaggagaccaagggagaagacaaagggtcttcaggcatctcaacaattgtccccaggccaggaggcacactgtggggatttcagccctgcttgcaggggagcctccaggtggaccagcacggatatctgaggccactgcccatggagaaagagacagagcaacagatcttgctcttcccgggactgagaggcctttagctgggaaaggggctctctaccaagagaaccccttaattggggaaagagagagaaggaaaggggctgtgcagggcaaaaaccctagagccagccccgccatctgagggagattaagggattataattaaaaggtgtttgaggggctccaagcaggtgggttggggcgggtgctaatgatctaattgctgcttcaccagggcttcagccagggcctggctgctggggctctgtaatgagtcgggtgtttttttaagggaggtggaagaggagaggcggagctgaagggccaggagggaaagtctttttcttcactttgagccctcagcgcacatgctcacatgctctggccagtccttcctttaatggcctccctggaaaaccaagatgaagcctgcagcctacggagtcatgggaggcctggagaagacttctgggagctgggcgtgaacaaagagggtgcttagatccccacagagagaggacactgagacacgggatggttacgggaaagagaggctctccttggaataattataacagatgttggaagtaaatgctcggtgccgcaaaatgaaaatagcactcaggcaaaagttttctcaacaaggcaatttacttctatagcagggtgtgtctagtggatggagcaatggtgagagcacaccagacaagggaggagaagggggtcttatccctaatgcagctagtccctactgctatgtcttttccctattggctaaggttggaccgcatagtctaagctaattccgattggctattttaaagagagcgagag

SEQ ID NO: 2863 - DNA, 1157 bp, Artificial sequence
  DNA replication origin
actgcccacaggcttgcatctagccaagaacagctttcaggcttggctttgtcctgggctgtgcagacaggcagataaaacaatccgatggggcctgatgacgaaactggtcatcccctggagcacggccctggtggcctagtgttcaaggatccctggttataggagctggcccaggttaatctggctgacagactccaggtatctgagtcatagtttttttttagtaaggcagtggagagtagagtgggtagaagggtggggtggcttgggaccaggaattggaactgctccctggcagagctcaggtaggggcccacagctcgttcttccagctctactgggcagcgggattcggatcctgcctgccgccgagtatctacctctcaaggttgagactaggcattattcagccctgattcccagcgcagaggccgagccaggaatgtcgcgctgggccagataaggagccaggtcggtaaagtcccagacggaaccttgctggagggcgatcctcctcccataaccccagctctccagacacctggagctggaccatgggctagaggtcagagtctcaccatgttgaggaagggcaagaaggcgctagcaagggcctccatggctggatgaaaatctgtgggtcttgtcccggctgatgccagctggaatcctcaccccagcctcccctacctgtaactttggtgctgcgaacacattcaagagatattccagtttctgcaaggcggaaaaggaggctcagcaccgctcaacccccgcatctccctgtaggaatcccaaacttccaggatctttccctcattgttttgggttgaaaaccagcaagacaggttcctgcccattctaaaaggttaggatcacagtctgctaaggatcagaacccgagaagcacaaagaatattctgatgggaggaggcgataggagtagagtctgcagtcatctggttctttctgaggggctttcacctgacctcttttccatctttgtgccctggtgttggtgcagcatacctagggccaaaatggaaaatgtagaacctacaaaatgagtgaggttggagatcaaaaccacaaatggcaatggattggaggtggcaggcgggtctcgggggtgagtgaggcagcaagaggctgag

SEQ ID NO: 2864 - DNA, 1274 bp, Artificial sequence
  DNA replication origin
gcctcggagccctttcctagccctgttgtttcttcgccttttctatcacttagtttaacaactttaacgtttttagtatgtctcctttttatttcatttagcgttactttatcctttttgttgtaacgttttctttcttttcgagtgggttttgtttttccttttttatctgtttccgatggattctcttttcactttctgctcacttctcacctcagctccggagcccgcgctttcgtttcctcttccccgcgcacccgcggctctgcggctggcgtcggcggtgctcgcggtggtccagctcgggcgagggcgagggcgagggcgagggcgagggcgcgagggtcctggttccacccggagctcagtccgcgcgcccagcgagtccgcgccgggtgctgctgcggagctgagactttgtcgaaagcgggagtccgaatcgctgccgccggcaagaacggagagagcaggcagaggcgcctcgggggccctgccggcgggttccagcctggttttggcctggccccggggcacacagaggacccagacctgcagtccccacggaggccgcaggcccacgctcactgagactcaggggcctgcaggccatcgtgcacgaaccacacagacacccaccgagttacccgtgagcctcaccgccaactcaagggcgcaggcacacccagcacgcactgacaaacacacgcataacaaatatcacacacacacacacacacacacacacacacacgcagccccaaaccacacacatacaaaacacagagtgtggacatacacatgatcacgggacacatacacgagaacagcatacatatgactgcacattgcagatagacaccacacacagacacgtaagcctacttgccaacactctgccaccgcggggtgttttaagcccaactcagtccatcaaggtggtgactcttaggccagtgtcgggcagctggaaggggacctgcctggtctcaccagcgggcacagcagtaacctagcaactataaatacagccccccagagttcagtacctctgcctggactgaggttgccgaggctcccacactggctgcttgtttagctgagggatgcagccaaaatctaagagcctgagccccagaaatgagcatcagacctacagaaccctatttgaagcagataccagtactgcaccaagaaatggcaccagggtacagagtatgaagcagacatgccatacatgtgccagtatgtgttccgtgccacatgcatcgtacgcg

SEQ ID NO: 2865 - DNA, 1809 bp, Artificial sequence
  DNA replication origin
aagaaacaacagggctaggaaagggctccgaggcgcccgcagggaagggggccctagacggggcgatgaggcttttgggagcctccggccgcgggcgcggcggggtccggcgggtgcgcagcggccggggctcctccgcgcgctgcccgccgccggcacccggctcgggcgaagagccggctggacggtcagccagccccacccacagagagtcgcgggagcccgagggccgggagctgcgggactccttcgcccccacctctgccgcccgccgaacccgaccccgggaaatcctcctagccgccgcctcccagcgccgggtctccccgagcgtgtgctctcggctgcgaggccctgcatgcgcagtgtctgggttcgcggcgtcaagcggagcctcggtccagcctgggcagccgagagcgcggggactgctgaacgcggtccgctccccgccagccgttcgggaccccagcctgggggaaagccgacagcgtccctctccgcgcaaactccacgcggcagcctggactgggatgtggggccagggggctgaataattaacaaccaggagaagccggggagagcgggaagcctggcaagccagggaaagggaagatgagacagagagacatagagagacagggacagagggagacagagagggggctaagagcgacgcgggcgagagaggaagaaaggctggggagaaggaaaaatgagataaataaaggaaaaaagagaagcgaagggcggtgggagaggcagccgggcctctctgggagcttagccagaggcgcccgtacccccctcccctgcgcgtttgctgggagccgctccctttcccttttctttccaagctgccgaattctgtccctagacgctacgttcccagtagagggtagggccaggatccaaagatgccgaccgtggccgtggctctctggaagcaggcaaatgggatggagaatctgtgggctatagagaagctgtgacattgtagggcacagaaaaaaggcctccgagaagggtccagccagcagacccccaccccccaacccccggatccagggccgcttctggaatcacattagggagaggctggcctggttcagagctcgcccatcctaaacaagataaataaataattccccgctggcctcagtgtgggaggaatcaaagaaccagaacaaatacctcccacagcctccctgcccaccctccaccccatccccggacaggtggggaaagggctgctatgaccagctttgtggccttggtcaagtcacttcctccatccctttttgcctttataaacggagagccttgggctggaagccatggaagtcgctccagtggaaagacggtcagagctgggaatgaatgggacgtaggagtcactccaaatgagaccaacccagatttggtgggtcagttaagctcatcccagaacattttggacctcgtaggtaaacatattgtgtattaatgcgtggctgggtgtgggccaatctgaaagaaagcaatcggctgagtgggtgggaggcgaggagtgggctgcttctgtgagagaagcccaggagaacagggagcaagagggcttcccaggagggtccccgacatgagatcaatgaccagacagggtgctgcggcagaagaggatggcataaaggccagacagcttggtggagggtgctggtgctgggaagagcacagtttgaggctggccgtgtgactccaagccaattaaactctccgacctccttctgaacaggcaaaatggaggagcggaaaccaatttccctgggttgt

SEQ ID NO: 2866 - DNA, 946 bp, Artificial sequence
  DNA replication origin
tcccagctactcgggaggctgaagcaggagaatcgcttgaacccgggaggcggaggttgtagtgagccgaaatcgcgccactgcactccaacctgggcgacagagcaagaccttgtctcaaaaaacaaacaaaataaaaacaaagagcactgaatggggagttgggtcgccagggttccaggccatttcaccttgaccggcagtgtccttggactcgtccccttcaccttcctgagcgtcagcttctttacttgacaacctgttttttgttttgttttgttttgtttttttgtgaggaacttctgagacaatggatataactcacttcgtaaactgcgaagcatcctcctcaaatcaatgttcgtgccatcgttggttccccgctcctagaggggcctctgcacaaagacccaggccagtgactcgctgtgtttggggacggtcgtgtcgcccccaaggcaggggccaagatgcttcctttcttctggatctcccaggcagcgccaggtcccgaggcagtattgactgaggttaggagttcaggaaaacggccaggaggacagagggcgctgtcccctctagaactgagcagggcgttagatttagaggaggtgttcgatttacgcatgcgcaccctctccgggaagacctggcaagacctggcaagacccagccaaaattggctctctcggctcggtttttccccatctagggctacatcttctgggtgcgcatgcgtcctgcccgggtgcggttggctgatgattccgtctgccactggcagagccagcgcagtgaggctgaggccccgcttcccgcccattggcaggggcgcggagagtggactggggtctttggccgcacccactgcagtgttagacgagcggattgaggacacttcccggccgcgggccgcaggcttggaagcgttggttggccgaaccca

SEQ ID NO: 2867 - DNA, 1520 bp, Artificial sequence
  DNA replication origin
ccctctccccatagggccaggattctagtggcagggccagctgtgaggggaagaagtcatcgagcagaaggactgatgctggagggagggagaagatgggcctttggcaggggtgaaggggtgttggtgctgccctagaagggctggcggaaggggtagccggccacaaggcctcttgggtgggaaataaaacaggttagggggcacgcggggcagtccctgggtgtagcagacactggcagacaggagaggtgatgctacagtacccaggtatcaagccgcatcctcttcacagctgagccctcagcctcaggctctggggctgggcgcagcaggcccagtgtgggcccgaagtccccccgtccgtcatcccggtctcccgtctcataggatcccccggctgggctgctgagaccatcgccaggctcagggcgggcagctgggaacacagctggagggggaggcgcagggctgcgctcacggcttggggacaccggttctgacttgatgctgatgtgggggtgggtggtgactgtgagggcagcacccacgtggggcagggggctgcccgggctggaggcaggcaatggaaatggggtacaagggataaaaacagagggggtgagtgacagaacaagtgataggacaccagacagaaagtgagagagaacaagaggatgagaatatgggggatggggtgttggggagaggcaattggatggagagtgatcagaagagggtcgaatgaagggaagagaagggaaataagaaatattagttctctttccatcccatgtcatcttctgcaacacagggccccccacctcccaccccctaccctggggctggctctcagaaggggttcagggtgagcctcttgggtctgtacaagagagcccaggggtgccactgttgcctaacagactgtgcagtgcacagcctcataggatgtccactagaaccctgcagggaacccagctcccaagaggtccctcctcttcccgttcaattctcccttcccacacactcacatgcagtctccccaggactcacatgaggttgctgagagatacagggaccaggtgggactgttgctgaggtggctgttgcggctgctgaggctgctgtggctgtggctgctgtggctgcggtggctgctgctgtggaggctgtggctgctgcggctgctggggctgctgtggctgttgccaggcagtgacattgcctagcgacagccccccaggtgaactaaaggctggtaaggaggagagctctgcactggtcaactggtaatctgcatggaggaaaagtgaggatgaacctggagttggggagagcacacaggctcctatgagggagctgcctccaggaggactgtggggatgaggggacagggagtgtgtaatgacagatgtaaggaattcaagaagaccacaaaaattcagtgaagacggtactcagagttaaagaaacctaagtcataataaccatgaggtgctgtgttttaacaggatgaaaag

SEQ ID NO: 2868 - DNA, 1592 bp, Artificial sequence
  DNA replication origin
gagaaaaataatgcgcctgccactttaagaggccccctcccccacccggtccaggggttggggtggagggtggtctagaccgtccccctgaggggtgggatggggcagcccccgggccgggaggaactcgcgaagcgggccgtgttttcgtgtggcgttggcggggattacctaggggactgtttgtgtcagggagtctgtcgtgggggacaagtggagtgggctgcaattcccttgggtgttgggagtacggggtggggacgggcggattgggggcgcgcccgcctgttcgtgtagggggtttacgacggcctccgagcggtctgggacggggcgccatcctccgagggggtctccggtgacagtcgggagcgactgacattttaacagccggccctccctccctctccctcctctcgccgcctgttccctcctccttggcccgaaatggtgcagaagggggcctgggagggcggcgggagggtggaggcggggggagccgcagctgtttgggaagcgggggagggaggggggatgttgttcagatgacaccggggtagtgggttggggtgtgtgagtgtgtgtgtctccggggcccgtgtttgccgggtgcctgtggagttgggacgcggagtcgccacgaggtgggcacgcaggacccttccttgagacctcctagccccgcttccgagacccctgatgtggtttgtcagtaaccccaactggagaactccctggccagaagtttgcagctgttcaacatctgggcaagagttctctagtcctttccacctatggcaggcggagctgggctgcgagcgggggtttagggagtttgggggggcttttgggaggatgggccaaggagaccaaaatgcttttagtcccccactccaatgccagcttctctcctaccaggttcgggtcttagggggatggggaaaggggccccctccccctagtgaatcacgctgtcctctcagcagccttccgaggactcctcctgaaaggaaggcactctagaagccaccgaccgggttatcccaggtttgcccttctgaatgggagcctccctctgcctcccattgcttggtgcattgttgatgggttgggggagggtatagcgggttgggggggatcctgtgtccctctttgctgtgcccaacccccatttgagttttcctcagagtcctggtttctttgctttggggtggaggtggcccttatccactcctcctcctatcccttcagtgggtctccgcagcaattcagggtccagcctagactatgggaagtttgccgtctggggcggtgaccttgggctgctctggcctggagataggaggggagcgcaggtcagcctgagattgggtgttttggcgtttgggagctgtccacctcccactcctctcccaaccccaacaggaaggtctcagtagctgaggagagcattgaaaaggcacatgtcagtgttcacagatgtccacccgcttgtggccacggggtcacacccgccccaggacttagtctggctgtcccagctcccacggccctgcctgggaatgaatttccttcctgtggtttcccagtgt

SEQ ID NO: 2869 - DNA, 837 bp, Artificial sequence
  DNA replication origin
ccacaggtgcctcccattggcccccacgcctgtccgtcacccctttccccccacccctcaagctaggctgagctgtgcctacgtcggcctcgactcccgggggctggaggagttacctttggagcccgaaaggaggaaggaagcaaaatatcaacaacagccgaggcggctcaggcgctcggccccggttccccgcttgcctgccgcccgcctgctggcccccgcgcccacgacgggggcccaggcctcacggcgccgcccagggcccgcgcggacgccggcctcatttattattctccccgcccggagctgcggcttcccggtgttgaagatcccccggaccaggggcgagggctacccgctctttgccgtgacaacaccgttcccccagccgggctggtgagtagagaaaaataatgcgcctgccactttaagaggccccctcccccacccggtccaggggttggggtggagggtggtctagaccgtccccctgaggggtgggatggggcagcccccgggccgggaggaactcgcgaagcgggccgtgttttcgtgtggcgttggcggggattacctaggggactgtttgtgtcagggagtctgtcgtgggggacaagtggagtgggctgcaattcccttgggtgttgggagtacggggtggggacgggcggattgggggcgcgcccgcctgttcgtgtagggggtttacgacggcctccgagcggtctgggacggggcgccatcctccgagggggtctccggtgacagtcgggagcgactgacattttaacagccggccctccctccctctccctcctctcgccgcctgttccc

SEQ ID NO: 2870 - DNA, 860 bp, Artificial sequence
  DNA replication origin
gaggtgaggggcgcctctgcccggccgcccctactgggaagtgaggagcccctctgcccggccagccgccccgtccgggagggaggcgcggggggggggccggccagccgccctgtccgggagggaggtgggggggtcagccccccgcccggccggccgccccgtccgggaggtgaggggcgcctctgcccggccgcccctactgggaagtgaggagcccctctgcctggcgagccgccccgtccgggagggtggtgggggggtcagccccccgcccggccagccgccctatccaggaggtgaggggcgcctctgcccggccgcccctactgggaagtgaggagcccctctgcctggccagccgccccgtccgggagggtggtgggggggtcagccccccgcccggccagccgccccacccgggaggtgaggggcgcttctgcccggccgcccctactgggaagtgaggagcccctctgcccggccacgaccccgtctgggaggtgtgcccagcggctcattggggatgggccatgatgacaatggcggttttgtggaatagaaaggcgggaagggtggggaaaaaattgagaaatcagatggttgccgggtctgtgtggatagaagtagacatgggagacttttcattttgttctgtactaagaaaaattcttctgccttgggatcctgttgatctgtgaccttatccccaaccctgtgctctctgaaacatgtgctgtgtccactcagggttaaatggattaagggcggtgcaagatgtgctttgttaaacagatgcttgaaggcagcatgctcgttaagagtcatcaccactccctaatcttaagtacccagggaca

SEQ ID NO: 2871 - DNA, 932 bp, Artificial sequence
  DNA replication origin
catcgggtgggggaagttgtgcaggtgctggagaaaagccggaggcttgccgagaggagcactgagaggcgactgctgggtgagaccttcgggcagggaaggcatgggatctggggagacacagagcctgatgatactcagagggctgggtttggggaaccctggaggagtcgataggggctgtaccagcctcatttatatctggtctggctaccagtgaccctggctattccctctagggcacctctataacgatctaggcctgggctactcccagctccagctgttcccgctggccgtggaggccttcctgcaggccctgcccctgtgctgggtgccaggagagcaggccacagtgctaagaaacctcgggatggcccacaatgccctcggcaactatcaggaagctcgggagtttcaccagaaggctgctgacctacacggtgggtgcctggggccggggaatgggactgggactaagacactaagaaggggttccaaaaggggcccaaggcttaagggtggatggccctttgggaccacttatggagcctgaaaatccagaaccagtgggggagagctggaagtgcaggagatgggacagccagacaggacagagggttgtgggcccagaggccgaggcctcagggttgggaaggcagcagtgggcagggggaagggtactggctgcgagaggaggcctgaagcggagtccagcccctctgctgattgtttgtgtgacattgaggaaccactttcactctccgagcttcagtttccacatttttaaaaacggggccattaacacctgccttgcctgcatcacagggttgttgcctgactcaaactagccaggtggaggcactcacaccagaactcaggatggggccaggctgggtgtggagggttcaggcctctcggatgcatctgga

SEQ ID NO: 2872 - DNA, 863 bp, Artificial sequence
  DNA replication origin
tgctgggcctcgggctgctggttgcgggctcgcgcgtgccgcggatcaaaagccagaccatcgcctgtcgctcgggacccacctggtggggaccgcagcggctgaactcgggtggccgctgggactcagaggtcatggcgagcacggtggtgaagtacctgaggtaggcacgggtctcgggtggcctgctctgccccggggcggggcctgggacggccgggccacctgcgcgacagagaacacgaggggcgggactcaggccgcgggttttcctcagccaggaggaggcccaggccgtggaccaggagctatttaacgaataccagttcagcgtggaccaacttatggaactggccgggctgagctgtgctacagccatcgccaaggtcagtggcacaactctcgacctttgggagcagccagggaggagtcactgtcccagccccctggcctaggcacaaaggggtgggagagacagctgggccaatatggtctattaccgcctgaaaccccgccgaaccacccttgactctgccttcaggcatatccccccacgtccatgtccaggagcccccctactgtcctggtcatctgtggcccggggaataatggaggagatggtctggtctgtgctcgacacctcaaactctttgtgagtatgtggggaggggctgtgggggaggagggcgtgagggctctgggatctggggttgaattaccactttcttcctagggctacgagccaaccatctattaccccaaaaggcctaacaagcccctcttcactgcattggtgacccagtgtcagaaaatggacatccctttccttggggaaatgcccgcagaggtaggtggctccagtt

SEQ ID NO: 2873 - DNA, 1226 bp, Artificial sequence
  DNA replication origin
ccggctgggttggtacggaaacaccacacctagggggtggcggggatcctggggagggccagcggatgggagcggagggggaggaagggcggcgcggcctgggagagggagctggggtccccaggggtgcggaggagatactgggaaggagccctgggagacccaggcgaggcggacccgctgctacacaggaatggggcgggagcggaagggcctcaccctccaagctcaaggtcagcgccacgctctcgtcctcgatgccgttgatgagctcgcagcggtaccggccctcgtcctccaggcgcacgcccgcgatgaccagggaggcgtctagtcgatgccccctccgcatcctggcgcgccctcccaggggcccatacccccgggcgtgcagtccgttggtgatgaggatcagcgtttcccggagctccccaggctccaccttgctccagcgcaccttgtagctgggaggcgtggtgcccaggacgcagggcagcgtggccgtggccccacgatgagagtgaatgacctcgtggatggggggcaggaggtagtgggggcccgggtgggatgctgggcagagggggccacagtggcaggaacccccaatcctcactgccccaagtgcccatcagaccctgctccccaaatgctttctccagagccccccaaccctctcctccattgccttctcagcaatgactttcagtccctgggtacctgcaacaactgccctttcccctttccccacccttgcagtctccccaagcctcccccagattctggcctgggctggggtcttacctgggtctccttgggctttgtggaagatggtgaaggcccaaagaaggaagcggcagagtgtggggagggtgagccagcctggcatgatggggggtcagcccggcaccgtctgcagggcacaaagagtgggcagttcttaggactggggcaaaagggtggggaagagcagggttgtgggtgaactcccatcagagatcctagaagggactgtccagctggaagccactggggcagagaaaaggggttggtgacaaaatgaaggtgatgaggggaagaaggcagtagcaatccccttcctctccctctcttcctctgtcacatcctctcagcctgcaggtactaatttagcatcttctctacctgtccccctcatcacaagtgctacttcccaagcttgccatctggactgccagctcgtctct

SEQ ID NO: 2874 - DNA, 1051 bp, Artificial sequence
  DNA replication origin
agccgcccgggcacgaagaacacttggcctggggaccacagcgggtcaccgaccgagggcagggtgggcggagaggggcggctgacacccaggaggcggagttggggtgcgggaccgcagaggtgctggatcgagcttgggtaagaggagttgggggatcgaggcaaaagtgcagggagggtttggagaggtgagctggagcctgggcgggcgggcgggctgatgggggggcggtgccttggagggacccggagaccctgccctgatctcaagctgaggtccactcctcgtcccccacatttttcagacccctccccaagaccctgccttcgtcccgcgcctcacccgccagcgcggaggtgaagcagaaggcgtcgtagcggtcgcgcatccggtcgcggggtccgtagctgcggatcccgggccggcctcggccgccgcacggggcgcgtgcggtgagcacagggtagcgcacggagccctcgagcagccagcccgcgttacaccagtccagaccctcggtccaagctggcgggagacggcggaggtcggggataagaggcgtcataggcaggagccagactgagctcgcctggcgccctctctcgggcccctgagacagctccgcggggcttgggaagtgctgggttcggccgctcaccctggtagagctgggagtaggtggccaggcgtccgtcctgctcctcgcacgcctgcttcgcctcgtagtaattgaactggtaccggccccggctgggttggtacggaaacaccacacctagggggtggcggggatcctggggagggccagcggatgggagcggagggggaggaagggcggcgcggcctgggagagggagctggggtccccaggggtgcggaggagatactgggaaggagccctgggagacccaggcgaggcggacccgctgctacacaggaatggggcgggagcggaagggcctcaccctccaagctcaaggtcagcgccacgctctcgtcctcgatgccgttgatgagctcgcagcggtaccggccctcgtcctccagg

SEQ ID NO: 2875 - DNA, 822 bp, Artificial sequence
  DNA replication origin
tctgcatctcgccgccggaggcgcccccgcctcccctccccgccgccgggccagccggggtccgaggcccgcagcccccggctgggaaggcaggtctggagaggccgctccgggtctggagggaggggaggctctccggaaaggggtggcgagagacccccgccacgactcccaagcttcttcgcgcgcgctggaggggacacggtgggcgcctaattctcggcgtagcagtaggtcccataggctgcctgttggggcctggggaagccgaaactgcgcactccgggatccgggagccccccgcagcgcggcctcggcgtggtgattgggaagcgcacactgccgtcagccagccagccgccgtcgcactggtctagccccgaaaacttccaggcggcgtagaggtgcccaaccttggccaccacggcgccgcgtcgccggcacgccgcgtgggcttcagacagcgtcagccgcccgggcacgaagaacacttggcctggggaccacagcgggtcaccgaccgagggcagggtgggcggagaggggcggctgacacccaggaggcggagttggggtgcgggaccgcagaggtgctggatcgagcttgggtaagaggagttgggggatcgaggcaaaagtgcagggagggtttggagaggtgagctggagcctgggcgggcgggcgggctgatgggggggcggtgccttggagggacccggagaccctgccctgatctcaagctgaggtccactcctcgtcccccacatttttcagacccctccccaagaccctgccttcgtcccgcgcctcacccgccagcg

SEQ ID NO: 2876 - DNA, 905 bp, Artificial sequence
  DNA replication origin
ggctgacgctgtctgaagcccacgcggcgtgccggcgacgcggcgccgtggtggccaaggttgggcacctctacgccgcctggaagttttcggggctagaccagtgcgacggcggctggctggctgacggcagtgtgcgcttcccaatcaccacgccgaggccgcgctgcggggggctcccggatcccggagtgcgcagtttcggcttccccaggccccaacaggcagcctatgggacctactgctacgccgagaattaggcgcccaccgtgtcccctccagcgcgcgcgaagaagcttgggagtcgtggcgggggtctctcgccacccctttccggagagcctcccctccctccagacccggagcggcctctccagacctgccttcccagccgggggctgcgggcctcggaccccggctggcccggcggcggggaggggaggcgggggcgcctccggcggcgagatgcagaggtgaccctcggacccgctgccgttcgcgaaccctagcagaggactcagccaccgccggggggagggtgaggcggccgggggcattaactgacctctgagtacagcaataaaataacctggggatcttttgtgttgggtggagctgtaagagctgcgaggcgtggaggggtgtgtgtgtgtgtgtgtgcacgctcatgtcggggctgatgacccgggatcctgcgtgcccactgagcacctaagacagggtaaggggcagggctgttgctgttaagggatgggtcagcggaagagcgggagtgcggccggagggcaccaataggccaagggagagagagaagtggagacgtagtgggcgcctggcccaggacccacgcagaacccagcatgttgttgcgccaggcgccacgcgggggcgccgcacactcacct

SEQ ID NO: 2877 - DNA, 825 bp, Artificial sequence
  DNA replication origin
ttttagtagagatggggtttcgctatgttcactaggctggtcttgaactcccgacttcaggtgatccgcccaccttggccttccaatgctgggattataggcatgagacaccgcacctggctggcatttttcttggtaaggaaatttaccatctacccctccctaccccccaggtcttcttttcctgtccctacagtagatgggtctctgggaaggggccagaatcttccctttagaccctcaaagatttggagtgggtttttatgtgaggttctcaaagccctttggaaccaagtccatggcactgggagtgaaagccaggcagtggtgagtgggggcgttggcacattcagtggggagcagtccagagttcccaagagggacctagggtgcagtctagatggaaggctggggatctgccttgaggttgcatttgcattgaatgcaccttactttacttggggtattttgaagatgctgtggagattatgaggatcaaagccctccaaagctatccttggtgccaatattggtatccaggggagggaatctaggcatctggctgtcctgcccactgtccgtgccaggggctttgcctacagtcccaggagggaggagggaaaagcaaagagagcctgggaaaggagagggaagcagaggccctggagctgggggaaaggagggtcattggtattctgggcgctgaggagttcctggctgggcagcactcaaggcccaccccctggcatcaggctgcacattcagcatcgacagccctggccagtaggccttctgggctcccagcaacgcctgcattttgcacat

SEQ ID NO: 2878 - DNA, 1084 bp, Artificial sequence
  DNA replication origin
tctgcctggtgctatgcatttgtacaggagttttaagatactaaacactctcaaagcacatggtcctatctcaactcatgagatagtaatgatgatgcttttttataagtaagaaaataaaggctcagagaaggtaaggagcttggcttaggtcacacagtgagttgactaggactcgggttttggttctgagaagaaatcacttgctgggaagatggggatcagaaacagagagtccatggtgatgtgaaggtaggggacttctggagccaggatatgtgtgaacccacatgggtgtggtagggagcaggggggaagtccatcctgaagtctaaccccatctttccttctcatgtccctctgtcagcctgcagcatggcccagctgttcctgcccctgctggcagccctggtcctggcccaggctcctgcagctttagcagatgttctggaaggagacagctcaggtaagcaaccccacttggggtcaccgtctctgtcttgttcagccctaaccaactgcttccaggcttaggggccccaggaagagagagaattggagggctgtggggaagcgtccaggctggaacacttggaaataagggctgagctgtgagcatctggtgggttggagaaatcatggggcaggactagggaagggcactgggtgcaaggctttgggcccctaaggtggaggataggggatcctgaagctaggaggtgggaaaggggtggaactgggagaaaccctgaaggaggccctaaagggagcagactgggaaactgggctggaggactcagggggcgaggttggaggaccctggggtgtggtctaggaattttggagaggaagtggaagactctgagagcagggcaaggaatcctgggggctgaattgactgggagactttgggggatgggtctggagaccgtcggggtggtcctggaggacctagaggtagggctgcaggaccctggcccctggcccctggcccctggtcctaggggggccggggaatcctggggccggaaggagggatcctggagcggggcttggaggccaccgggtgggactctgagggtcg

SEQ ID NO: 2879 - DNA, 1569 bp, Artificial sequence
  DNA replication origin
gagcggggcttggaggccaccgggtgggactctgagggtcgacagcgttaagttccagccggctccacccgttcacagaggaccgcgcttttcgcgtgcgcatcgcgggcgacgcgccactgcagggcgtgctcggcggcgccctcaccatcccttgccacgtccactacctgcggccaccgccgagccgccgggctgtgctgggctctccgcgggtcaagtggactttcctgtcccggggccgggaggcagaggtgctggtggcgcggggagtgcgcgtcaaggtgaacgaggcctaccggttccgcgtggcactgcctgcgtacccagcgtcgctcaccgacgtctccctggcgctgagcgagctgcgccccaacgactcaggtatctatcgctgtgaggtccagcacggcatcgatgacagcagcgacgctgtggaggtcaaggtcaaaggtgagagggcagggaggttccagagggagggagggagggagggaagggaggactcttgccttcggggatcccacagtgtgagagggaagcaaaggtagctggaaggcgcagcctgggttggaaaaagagtgaggagacacgggcctttgttgtctcctttctctcttcaggtggaggacattctacccacaatctaacttaagtccctcatgctgtagagtgagcacaattgaactttatttacccttgtgtacagaggagtgacaaggagggtgaggggaggccagcgtgctgggtgctcacctggctcaggggtcctctctgccccacaggggtcgtctttctctaccgagagggctctgcccgctatgctttctccttttctggggcccaggaggcctgtgcccgcattggagcccacatcgccaccccggagcagctctatgccgcctaccttgggggctatgagcaatgtgatgctggctggctgtcggatcagaccgtgaggtgggcaggggctgtggattggggcttctattggcccctgaggtggccatggccccccttctgctgggtgctgcctgctgtgtcaggctggacatgcagggctttttgcctctgggggatgaggctggtctgaggaggggaggtgaggaccctgagcatgtgcatccctgcagtgctagaaggacagccagctgtcagcaagtgtctgcactgtggtggcagtggggttcaatagaatcaatatgggctggctccctggtgaaagcatctgtactaagtgattctgtccttcctccctaggtatcccatccagaccccacgagaggcctgttacggagacatggatggcttccccggggtccggaactatggtgtggtggacccggatgacctctatgatgtgtactgttatgctgaagacctaaatggtgattaggagtgagaggttcccaggggacaatttcctactcccatgctgcccataggtcctcccggggcctctgcaggaccttactatccctcctgagtttaagggggcaagcaggagtaaggagacaattggtgtccctctctccaaacactgtcacagaggcaagctcatgaccaaag

SEQ ID NO: 2880 - DNA, 897 bp, Artificial sequence
  DNA replication origin
cccagaaggacgtcaggggaggctactgggacgctggaaggcgctgttgatccccccttccagccccatgccaggtccctagggggcaaggccttgaacactgccggccacagcactgccctgtcacccaaattttccctcacaccctgcgctcccgccaccacaggaagtgacaacatgacgaggggtggtactggagtccaggtgacagttcctgaaggggcttctgggaaatacctaggaggctccagcccagcccaggccctctccccctaccctgggcaccagatcttccatcagggccggagtaaatccctaagtgcctcaactgccctctccctggcagccatcttgtcccctctattcctctagggagcactgtgcccactctttctgggttttccaagggaatgggcttgcaggatggagtgtctgtaaaatcaacaggaaataaaactgtgtatgagcccaggcaagttggatgcttctgtgtgtatgtccgtgacagacagagagaggtgtggttgggcagggcatcataggatatatagagcttcggggtttattcgcttccaaaggtcagagacgtccccaagatgtcagcaagtagaacagtgccagaatagctgccaggaagtacttatggaatgaaggaaggcacaggggttgggggacagctggagtgatgcagcatgtttgcaaagagatggagtgccctgagtgcctaagagtcaagtgaacgtcaatgagttctgtcctgggagggagaagggctggggtcccagagaggaaggcagaggttggtgccttggtgtcccagttctgagcttccggaagggccggccttccctcatgggggtgtgagagtgagggtgatgggagagctccgctggcact

SEQ ID NO: 2881 - DNA, 1045 bp, Artificial sequence
  DNA replication origin
gtttctttttttttttttgagaaggagtctcattctgtcacccaggctggagtgcggtgatgcaatcttggctactccaacctctgcctcctgggttcaagcaattctcttgcctcagcctcccaagtagctgggattacaggcgcccgaggccacgcccagctaatttttgtattttttgtttgcttgtttgtgtttggagacgggagtctcattctgtcacccaggctggagtgcagtggtgcgatcttggctcactgcaacctctgctcccaggttcaagagattctcctgcctcagcctccagagcagctgggattacaggcacctgccaccacacccggctaatttttgtatagtagagacagggtttcaccatgatggccaggttaatctcaaactcctgacctcaggtgatctgcccgcctcggcctcccaaagtgctgggattacgggtgtgagccaccgccccctgcccaggtttgcatttcaagtcaaactctctggctgctgtgtggaaacgggttggtgtgggcaggagggcttcagggaggctcctgcctgccacagtgcaggcaggagacagtggtggtggcagtggtggtggagaagagacacgtgaggaaagggaatctcaggacttggtaatccacggtagggagggggataggccagcagagggtcccaggtttttggcctgggcagctgggagacgtaggactattttctgagcagcagagtccagcaggaaattgtgacctccaggaggaggtgcctggggtgggtggacacatggaactggagcacaggagagagggccaggttggagacaagaattagggggtcactggcctagagattccccagagagagcatacaggatgaagagagccctggacagagctccagaggagctcctgacagacaggagatgaccgggaaggagctggaaaaggaggccagagtaggagcaaaaccaggagactgcggggtctcagacatgttgtcatcatgggaatttctgggatagcaagacctttgtcct

SEQ ID NO: 2882 - DNA, 768 bp, Artificial sequence
  DNA replication origin
ccacacagggcccctgatcgcctatagagttaccaaactggccattgctgccaataatctcaaacagggtagaagcgaggacttccctaaggatatatgtcgtggaaggcgtgttctctttggaagtgattgtctgtcaatgcagcaagaggaatgagggttggacagtaacagggacattcctggtggtgagaacaggagtagtcatcatttgttaacaactatttactgagcatctactacatgccatgcgctgtgcaggcactggggagccaagataaagaacaatgtgcttcctcactcaggcagctttacctaccagttaaacaagggcttctcagtggaaatcatatctgaaaacggagaagtgccctaggttatgggagcagagtgcaggggacctcgcctgacctgggctggggggtgtacgggagggggtagacagggaaggctctcctgagaacctgaaggatgagcaggagtggccagtgggggaggagggggaggaaaatggttctggtcagagggaacagcacgtgcaaagttcagaggcaggaagagagcctgggcaactgaggaagagaaggaaggctcctgtgccagacggtggaggagggaagagaaagttcatgatgagactgaagagagagccagggttcggggacagaggtctcattagataggcaggaaacaaagaattcttcgtatttggaggcaatgaatgaattctgaagtgagagcttctaaagggttgtaagcagaggtgac

SEQ ID NO: 2883 - DNA, 1070 bp, Artificial sequence
  DNA replication origin
gagaaggaccaagaactggctcaggaaagccctcctgggatggctggagtggaaaatgaggatgaggcagagctgaatctgagggagcaggatggcttcactgggaaggaggaggtggtagagcagggagagctgaatgccacagaggaggtctggatcccaggcgaggggcacccagagagccctgagcccaaagagcagagaggcctggttgagggagccagtgtgaagggaggggctgagggcctccaggaccctgaagggcaatcacaacaggtgggggccccaggcctccaggctccccaggggctgccagaggcgatagagcccctggtggaagatgatgtggccccagggggtgaccaagcctccccagaggtcatgttggggtcagagcctgccatgggtgagtctgctgcgggagctgagccaggcccggggcagggggtgggagggctgggggacccaggccatctgaccagggaagaggtgatggaaccacccctggaagaggagagtttggaggcaaagagggttcagggcttggaagggcctagaaaggacctagaggaggcaggtggtctggggacagagttctccgagctgcctgggaagagcagagacccttgggagcctcccagggagggtagggaggagtcagaggctgaggcccccaggggagcagaggaggcgttccctgctgagaccctgggccacactggaagtgatgccccttcaccttggcctctggggtcagaggaagctgaggaggatgtaccaccagtgctggtctcccccagcccaacgtacaccccgatcctggaagatgcccctgggcctcagcctcaggctgaagggagtcaggaggctagctggggggtgcaggggagggctgaagccctggggaaagtagagagcgagcaggaggagttgggttctggggagatccccgagggcccccaggaggaaggggaggagagcagagaagagagcgaggaggatgagctcggggagacccttccagactccactcccctgggcttctacctcaggtcccccacctcccccag

SEQ ID NO: 2884 - DNA, 1664 bp, Artificial sequence
  DNA replication origin
gggagaagcacgcggccgaggtggcgcgcgacaacctggctgaagagctggagggcgtggcaggccgatgccagcagctgcggctggcccgggagcggacgacggaggaggtagcccgcaaccggcgcgccgtcgaggcagagaaatgcgcccgggcctggctgagtagccaggtggcagagctggagcgcgagctagaggctctacgcgtggcgcacgaggaggagcgcgtcggcctgaacgcgcaggctgcctgtgccccccgctgccccgcgccgccccgcgggcctcccgcgccggccccggaggtagaggagctggcaaggcgactgggcgaggcgtggcgcggggcagtgcgcggctaccaggagcgcgtggcacacatggagacgtcgctgggccaggcccgcgagcggctgggccgggcggtgcagggtgcccgcgagggccgcctggagctgcagcagctccaggctgagcgcggaggcctcctggagcgcagggcagcgttggaacagaggttggagggccgctggcaggagcggctgcgggctactgaaaagttccaggtgaggaggttgagggcctgggtgagagaaagtcccagaaagctccagaaagtcccttatgaagctcagagaccttctgggaagggagtggggctagctggctgctgaatcaggagccagttctcagaaacctggtgccacaagtcctagacttttacagcccgtctagtgtaggatgcgaatggtggggcttctcgaagcacatcccgggtgggcagtcaggcccaagacccgttgcagcagccccgccactctctggatggcaccttctggctctgatgatgaccggggctccgggtcccttcccaggctctggtattactaggaggacacccagcactgtcgcctctgcgctgaatctggtggcctggccactcagaatcaccaagttcctcacagccctccttctcctgaggggaggagtgaggggccgtgaatgaatggctaccagccccctcccatgtcatggcttctcggctccctggagcacattccagaggcccataacagctgctccttctcacagggcacagatgtgaccagcagctgagaaaacagcttcttgcctgggccacacagaggtgccatggccacctccccatccctcctctcagaggagacagaatccagaacatgtgggaaatgggggtggggcgggggtgagagcctgctgtgaggagcaggagacagttgtgggagatgggaccaacgggggacgggggctgtttgccttccagtcctgcaggctccaggcatcttgattaatcgtttttccttctgctttcgcttttttttccccctcttctctctccataacccatctcgtctcctccctcacctccccttcctgtgggagctgtgttctgagcaacatgtgctaccatttaatcagcatcctcagaggaggagcaggccatgggagagagctgagagtgctgacaggggccctgggctcatcttggctgatccagagggggctctctgggcagggaatagggtaggggaggcgggggtctgctacacagataagtcagccagggagcaggaggtgcttcccgggcagcggcagcgggcaggaggcaggttggttcacag

SEQ ID NO: 2885 - DNA, 2418 bp, Artificial sequence
  DNA replication origin
gacgtctccatgtgtgccacgcgctcctggtagccgcgcactgccccgcgccacgcctcgcccagtcgccttgccagctcctctacctccggggccggcgcgggaggcccgcggggcggcgcggggcagcggggggcacaggcagcctgcgcgttcaggccgacgcgctcctcctcgtgcgccacgcgtagagcctctagctcgcgctccagctctgccacctggctactcagccaggcccgggcgcatttctctgcctcgacggcgcgccggttgcgggctacctcctccgtcgtccgctcccgggccagccgcagctgctggcatcggcctgccacgccctccagctcttcagccaggttgtcgcgcgccacctcggccgcgtgcttctcccgccagcgttggtcaacgagggcccgcagggccgccagctcgtcgtcggcatgcgcccgccaggaggtgtccgcggattgtgcccggagccccccgagctccgcgctgagcagctcattctgctcctccagcgccttgacccgggccaggtaggcctccaggcgccgattgagctcccacatctgaaacgactcctcccccatgcagccctccatcctgctcgtctgacccactgaggatggacagacgcggggcaccgggagaagggagcggctcgcagagcttttaggacggaagagaaaagagaccgacggggacaatgacggggcggggcggggtgggagtagcctgagcgactgagagtcgggagtgggagcgaggctattcatactcccgccaggcgggcgggaagaggggcgggacccaggccttaaccccttagaggtcagagagtggcagcagcctctgttcctgcttccccagggtgctggagagtggaaccaaagaagaagctgtaccatggagaatcggatctgatggtggtggctttctgagggaggaggctgtgaagaagggtcacaatccccgaaaaaggcagataatgcacagaactgagcctgtgggggtgggagtaccaggacgttccagcctgggagggagtgcagtctcagttactcaacacatccgagagaggtatcacttactgaattcctctaagactcagtttcctcatccataaaatgtgagcaatgatggaaatcgcatggctgctgaaaaaaatggatgtggccaggtttttgtttttcgtttttgaaatagcaaatgctcctcctcctgaaatactggagagagtactacagcattgcagaaagaagctagagagacgctgcctggaaaacaagaacaaatgtctgatattaggacacacggatacacacacacacacacacacacacacacacgcacacacgctattgcctgagtctccatcagaaaagggagcgaccaggttaagggccgtcatgggcttaagaacgtttgtccatccttcctacaagtcttctgtataactgcgaggttcaaacatccgctttaggaagttctgttcttggggaagggccccttctcccgcaccccctgccagggaatgttgggtagtggacgccctctggcggctttcagaagtggaagcagcaggaagaggccattcttttccttcctaacgactagcccaagtttatccagcctttatgatgtgcccagtcgtgttccaatattttacttccatgatctgacttaatcttcaaaacaaccttttaaagattctacagtttatgaagtagagagctcaccaagggtgagagtagtagggaaggctttctggacggagtgcatccttgagctgggaggtaaaggacaggtgggatttgggggatttacagtgaaggagaagtagggctggggaggagatgcagggataatgagacggaggggatctttggggaaggcgtttctgatcaagctgctaaatccaatttagctcaagtgttaattgagtacctactatgtgtcagcaccaaagagattgcaggaactctgtcccagccctggaaatgcttatagtttggtgatgtgaggtcaacagtgatgggcactcatagtctgttggtggaggtaaacataaaaagatgactacaatacttaatcagcctccaaggtgctggggacagagccaggcagcacagaggatggagagggttttctgagtagagggtacagccgggtcaataaccaggaagtcatccctccaatatcccctccccttgaggagtctctcaaggaccccatccctgtccccaggccaatggggctttggaattcaccaccaatatgtagaatagaggccagggaggggttagtgacaggacattgactgagagtcagtgcaggccgggaggctgaggatctgggatgcccaggctccttcaaccttgcattacctcataaatcctgctgtttggtttg

SEQ ID NO: 2886 - DNA, 894 bp, Artificial sequence
  DNA replication origin
gtctggggggcaagaacaggatggaggcggtaagtggggacaggcctttgttgggcctagtgtgagtataggacacagccttaactctttccacaaaggcttccaggaggaggtgcttgtgagccgggcaggacgaggcgggagggtggggggcgggggttggcggggaaagggtcctagctccctttgggagaagttgacccgaggttttgcctcctgctccagccctcccccctcctgcacagagccctgcctgcccggccagtgggtttaccccggggctaatccgacagaggtgggtctcaaatcactcgtgagactgggcacctgggtgggggtgggggagaggcgggaaaaggaaggagtgagtggctgagggagggtctggggagggggcccagcatggcagcgactggtgccactcagcctgtgctgtctctgctgcagtcctcccagaaaaagagctgtgtggaagagcctgaaccagagcccgaagctgcagagggtgacggtgataagaaggggaatgcagagggcagcagcgacgaggaagggaagctggtcattgatgagccagccaaggagaagaacgagaaaggagcgttgaagaggagagcaggggacttgctggaggtaactgctgcctgcccagggcctgggcccccctcaacattccccatggggtatcccacaggagcagggctttgcctcaggggtgcccagtctgagaggtcgatccagcccctagtcttggggagtccccagctgaccagatgggacacagaaggcatttcagctagtagggttggggaaggactgtgggtgtcagcctgggaaggagccccggaggagaggagtgggtggctggtggcctccctctccagcctcagccca

SEQ ID NO: 2887 - DNA, 730 bp, Artificial sequence
  DNA replication origin
tgggagctagctggtaacaggacccaggcgtcctggctgaggaccgactcctctgtccctgctccaggtctggcttcctgagaaggacgccccctttcgccccgtaccccctgcagcggtaatccagccctagctgtggtttccagcacagccggggacccaggtgccagactgcaggcttgggggtggggtgtgttagtgtcccttcctccccaatccggagagaaggcggcggggcgggggggggggggcgggggggaggggggaggggcggtcacattcctggttgctgagtggccccgggggcggggttgcgttgtcatggcgatggggatcgtgtttgtagggggaactgcgtgcctttccaccccctgctctcacacccagcgtctcctggttgtgggaagggcccagtttgtgctgggccttcctgggggggaagggctggacctctgtccccagaggccacggggcaagcggggaggtgcccaaaagcctgaagattccaagtctggagcaagatgcccctcagattcatgcccagggccccaccccttctcctgggtgtgtctcagcgcattcccatccaccctgtctccccaggcccccagttgggccctctgtccctgtctctgtgtgttaatcactgccttggcctttctgtctctcctgtttgcgcctggggccccagtcatcatggccacctggcctctgtccggcgggaagcctg

SEQ ID NO: 2888 - DNA, 929 bp, Artificial sequence
  DNA replication origin
ttcgtggattgtcgcccctaattcaaactcttctcttcgtggataaatggttaagaaggatcccaacccggagagggctagatggaggcggagttcgcttctaggaaactttggtttggggcatctgtaagaggtctaaagttggaaaggtcgaaggatcgttgggggcggcgtaaggggatctacctggcttggaaattatccgtcagaacccatcagccctcagctccacagaaatattcctccatatgctgccaactcaaatttaggattgaggtggcagattcccttgtggtattaggaagtccagtacagactgcctcttagtaggggttaggggagcccaagttccttcccccgctcagatgtgaagatcttccgccagaacggcccagtctctgccatgtggttaattcagccagccagtatgagccccccccacaaccccagcacctggccaggtgggagggtggggccctgcagccaagcctggtgtgctcatcatgtttcccctaaggactgagacaggttaagtaaggaggatgggaggttgccagttgctggaggaaaggaggggggatgcgggggcagtgcatttggcaacttaaagttggtgtagaggggcctttggttttgggcgagggcatgactcagtatcctagagtgtaggactcctgtagagtaaaatccaagggcagaaggactgcatatctttggggtgctcttctcagtgtaagtctgtgtctgtctggcccaggcttattcagggtatcaggccaactttggggccactcagaaaactcagagacccttcctcgctctgtacccactcctcaggagtgtgcctaatcccacatgccttgagctcctggttccgtgaaactttcagatggatcaaatgaggaccggcttccgctattgggagtgaa

SEQ ID NO: 2889 - DNA, 1173 bp, Artificial sequence
  DNA replication origin
gggagcaattgaatttcaaacacaaacaactgcacgagcgcgcacccaccgcgccggagccttgccccgatccgcgcccgccccgtccgtgcggcgcgcgggcggagacgccgtggccgcgccggagctcgggccgggggccaccatcgaggcgggggccgcgcgagggccggagcggagcggcgccgccaccgccgcacgcgcaaacttgggctcgcgcttcccggcccggcgcggagcccggggcgcccggagccccgccatgtcgcgatccaaccggcagaaggagtacaaatgcggggacctggtgttcgccaagatgaagggctacccacactggccggcccgggtgagcagcgcggcccgccgccccctaaccccctgcgggcttgggttgcataacaccgggaagggcacgagcgctccgcgcggagcgggcagaggtgggggcagggggcttgtaggtctccggctctttctctgtcgcttccaagcccacccgccggttatataatggtggaggcgggcgggggtgggggtagacacctggcgggcacggcgtccgcgcgtagtggcgtgttcacggcgtggggatccgagggcgccggtcacttcccggcccccagctccgcgtgctcagttccgcccccagcccccatactcccagaggtttcgagcgcgaagtctggctttgggccagtcgtgttattccttcccccgaccccaggcgccgccgccaccccctttaagacccccttagagacccctagtttgttcgtggattgtcgcccctaattcaaactcttctcttcgtggataaatggttaagaaggatcccaacccggagagggctagatggaggcggagttcgcttctaggaaactttggtttggggcatctgtaagaggtctaaagttggaaaggtcgaaggatcgttgggggcggcgtaaggggatctacctggcttggaaattatccgtcagaacccatcagccctcagctccacagaaatattcctccatatgctgccaactcaaatttaggattgaggtggcagattcccttgtggtattaggaagtccagtacagactgcctcttagtaggggttaggggagcccaagttccttcccccgctcagatgtgaagatcttccgccagaacggcccagtctc

SEQ ID NO: 2890 - DNA, 1544 bp, Artificial sequence
  DNA replication origin
gcacggacggggcgggcgcggatcggggcaaggctccggcgcggtgggtgcgcgctcgtgcagttgtttgtgtttgaaattcaattgctccctcctctgcgcgaggcctcttcctccaccccccgcccggtccccactcctcctcctccctcctcccggacccactcctcctcctccccccgccccccaacctcgcgctccctcccgcggcggtttgatgcgtgcagcttcttgacgcccagggcctgccacggcccaacgcccaacccggagccgcctgacggcgcgtggcggcacaggcataaggagccgatcgccgagcacgccgagcaggctttgtgtgcccgcggtcggtgggtgcccgcccgcccgggaggagctggcgcccggctggacggagcggcccccgcccttcccccgactccgcggagcgctcaccaccgcggccccagcgcagttaagtgtggacgtctgtacacggtttccgcctgccctctgctccatctcaatccacaaatatttactgggcacccgcggttcttggcagcgtgctaggcgccgagggcgagaggagtgggcgccgtgccgctccgcgcactggggtcctctctggacctcgccgtgcttaccgtatggggggtggccctggaaacgtcggggatttgagccctacgtccgcctttgctaaggaggaaacgcttgagtttggtagccaggagatggccaaggagttgaggcacaaattggccaccttccgggtgcattcgatctcgtttctctaagctactgtcttgccaaggagacttggactcaacggctagctaaccccgcaaagatgagctcagttctagtcggttacggtagaatgccaataaacccaaccccttcagtaaactgtgaagaccgaggggccaggtgctacctcttttcggaggtggggaggggggtctgggaaggcttcacaaaggtgatgactgaactgggcattaaagaatgagtagaattttgccaaattctgcgagactacattttggcctaggttatatgctaagaagtgatagaaccaaaacttgaactcaggtctcttccattaagctaaataagactttattgtaattacatctttgatttgctgtcactgtatttgcccacattccagacacctatgttcccttagaaataagatatttggatcttatgttacggcatatacacgtccttaaaatttagcaacaaaatatgctaggtttgaataggtaaaacatatgcatgtttttcttcccacgtttcctgatcctatttcaaagcatatgcaaagtctccctgcaaggaagtccaggatgtagccaaaagttccaaacccacatcctaccctgctgttcatctgtcctgagaacttggacaacctcctgaactctaagcctcagtttcctctgctgtaagatgggataacatgactgccctggtaactaacaacagaggcatagaatggctgcttgtcactaggggatgcctgcagttgttcccagagtcctgcatgacac

SEQ ID NO: 2891 - DNA, 989 bp, Artificial sequence
  DNA replication origin
cagagatactggcgggtgcaaaccccaggaggcttgaaaccacttggtgagtttagagaaatgtgaatcattctaggagaatgggagtggctggtggtaaggctaaggaggtgagaccccccacccaacccaagtctagagtgcttcatgggccaggcagctgcttcagcaagaccattctggctctttggtgcagagtggatcagaagtggcaagaatggtggttaggaaaccagttaagaagctcttgggagccaggtgaggtggctcgagcctgtaatctcagctgaggtgggaggatcacttgcacccaggagttcaagtttgcagtgagctatgattgtgccactgcactccagcctgggtgacaaagccagaccccaatgatgggggctggagctgggggaaggaaaaatatacttaggaagagatccagcaggaatgagtggcttactgggggagtaaagagggagctgtgctgagggagccctgggattctggcttggctagctgggtagctggagagttagcaatcaggacagtgaacatgggaccgagctgtttggagggcaagggtgagagcgctgttggccgtgttgagtttgaggggctcagggatgctggggggaactgaccagaagcttggaaaaaagtttggacggagatatggacaggtgacgttagctctaggacagcagacgttggcaggggtgtgggtgagcgcgagcaggctcaggctgagcagggagcctggggcaccagcaaggagggaggatggggaagggtctgaggagggaggctggggaagggctttgggagggccgcagaggccgagggagagggtgggatggctgctggggctaacccatggcatgaggtactgacttgaagggtaggcaagaagacttagggctggggagaaggaagagggagacagggagtacacagaagcaggctgggagagcagggtccccctcccctgagctcac

SEQ ID NO: 2892 - DNA, 846 bp, Artificial sequence
  DNA replication origin
caagggtgagagcgctgttggccgtgttgagtttgaggggctcagggatgctggggggaactgaccagaagcttggaaaaaagtttggacggagatatggacaggtgacgttagctctaggacagcagacgttggcaggggtgtgggtgagcgcgagcaggctcaggctgagcagggagcctggggcaccagcaaggagggaggatggggaagggtctgaggagggaggctggggaagggctttgggagggccgcagaggccgagggagagggtgggatggctgctggggctaacccatggcatgaggtactgacttgaagggtaggcaagaagacttagggctggggagaaggaagagggagacagggagtacacagaagcaggctgggagagcagggtccccctcccctgagctcactgagatgacataagggaacccaagtgctctttttctccaggacagcagggccgtgaaggccaagggagagagccagagaggcacggggtggggtcagccccaggtgcgtctgaagagggcctgcaggacaagatggacgcagatcaaaaaagcctcgatgtgggaggtggaggggcaccctgcctgggggcctctgttttctgtgtgagataggagggcatgggggcttgacaaagatgaggtctgagcgactctggggagaagagggggcagcctctgggcctggagaagggaggctggtgcctggatcattctgttcttcccacatcacctcacacctctgccccttaccctgccccaggcatccactctgaacaccttcttcaccttcccccatctacctgcagggagaccttcttgcacctac

SEQ ID NO: 2893 - DNA, 1149 bp, Artificial sequence
  DNA replication origin
aagtaatagaaatccagggtggagactgtgattcaagaagaaatacagggtaccatttagcctagcaggcagcggtgcacaagttcaggcagtgctgagggaccactgtgtgccacgcaactttctgcgcactggaaaaacaggagtgaatgtaaatgacctgaatatctctgccttcaagagcttccattctagaaggaggagacagacgagtgagtaatatggataacaagcaaagaagacagagtctgtctagtaatgatgagtacacactgacaagaaaaccaaagagctccaccagcagctccaccttccaagcagacccagcctccaccctcctcatgcctcctggaggcacctgcctctgctacactggcccaggctgccatcatttcatgtgaaatattgttgaagagtgacaggattggggctgttctacacagggtgtcagggaaggccactcgggtaagcggacatctgaatagaggcctgtatgaaataggagaagagccatgcagacaactggaggaaaagcattctcggcagcaggcacagcaggtgcaaaggccctgaggcaggaggagacttggtgtgtctgaggaatgatgggagcagagaggaagttagcatgggtggatccggtgactgagggatagagaggtaggagatgagatcagaggggtgagggaggggggccctgtagactcttgtatgcatttgaagttttattctgagcgagacgaggtggcactggagacttacaagctgaggggtgacatggcctggcaagtttcgggaggagcaatatttcacatgaaatgatggcagcctgggtcagggtagcagaggtgggtgcctccaggaggcatgaggagggtggaagtctcctcagaaggtggagctgctgggtttttgtgggattggatgaggagtgtgaaaagatggacttgtcattgactgagttgagaaaagttctaggaggaacacatccaggcaggaggcaggtgatcaggagttctgttttctacacgtgcagttcagcatggagatgtcaagtaggcagctggaattcagagtctggggactgggacaaagggatgggctgcagacaaatattgagagtcaccagcacttagatggactctaaaa

SEQ ID NO: 2894 - DNA, 1293 bp, Artificial sequence
  DNA replication origin
gcatgcccgagtggtgtttcgggatgagaaagtgcctggtgccgcgtcctgcgcctgggctctgagcgggaggggcgctggcccgagaccctgggctctctggtcagggtctggggcgcgtacctgtcgggcgaggggctcggtgagcgtctccccgtaggggctgagcgggtgcgcggtgtagtgcagcagcaggtcctgcagccgcgcgtgggcgctgtcctcgcccagcaccacgtggcgcccgtccctgagctgggccagcaggaagtggcggcagcaagtccggctcctggagggcgccgttagggatcagactatctcccgctcctcggccagggtcaccagcgagaggcgtgatccccaccttcagcagcccggggaatgagctaagagcccggctcctcacgggatcagacccaagccccgcccctcccgagccccgccttgtgtcgcccggcgcggggcctcgcccctcacctgtaagtcagcacgaaggtcaccgcgctctcgctgaaccgcaccaagtagcacccctgaggcttgggctccagcagcctctctgcctccctgtgggtgacggagagagggggccgaaccctgctctgacacttccagcctcgcctctgtctccccggctctcacgaggaacccctacccccaagcaagcatgctggagcggctagagaaaggctagggcggagatggggagagagagcacgtgggcgctgctctcccgctgcagggattaggcgtggacaggggccaggggtcccattcaggagacccccgcatcctcccctggcctcatcctgaaagggcagcctgcaggggctgctactgcagctacagggatgggaaagtagttggacttccagatttcagaagtcaaagctgaactgaggaggtgaacaaagagttagggagaaatgaggctgagaaatggaggagggagattctgcaagggtggaagaagagagggctgggagataaagatggagtaagcctggagggagagagaggtggaaaataccagcattcgaggccttagggacaggaggataatggggcctagagaggggaagctgaggtacacagagggctggactggagcctctccaatgatctcccctggagagatgcctcagtgaaaggctaggaaaactctgggagtgggagcctggagtgggcgcctccatctactccagactggtagaagtgggagccttcatctattcctggcaggtggcaggacccagacccaggacttgccctgcccctgtctgggccaat

SEQ ID NO: 2895 - DNA, 738 bp, Artificial sequence
  DNA replication origin
accagatgatgacaattatagccaactgttatagagttatatgtgactgtaatttatattgtatatactgtgttccaggcattgttttatgtgctttacacataacaacttgagtaatattcaaaacagtcctgagaagtaagtaatgttatattagccctattttacagatgagaaaactgaagaccagagaagttaacctacttagagtcacacgcctagtgagtagcaaaattggttccagagcccattctcttcaccactgttctgggagtgttggaggaaggagtgtaatagaaggagctggtcagaggcctaacccttacccatccaccatggcgtctccccggattagtttgaggttcttgaaaaagcccagggacacgagggcaaaggagtgcttgattttgaggaagccagtaatggtttctaccagccccaggctgtgctgcagctgtggctccaggttgtctagggatgggaagacagggctggagtaggagcaaggaaggtgatgggtctgtggggcaagggggctgaatgggggccccgggaaggtgggccctcaggactgggacccaggatgatggaaaattgtgctgagttgggtcattgtaagggttgtgtctgggaggaagggtatgaccaggaggaggggtgtggccccaaagtaggtactgacagccctggcgaaggttgaggatgaggcttccctccacatgcgtgcagcccacaaga

SEQ ID NO: 2896 - DNA, 1161 bp, Artificial sequence
  DNA replication origin
gggatacctcctaatccttccctttttgaagcttccaccctcagctctttttcctctttccaccaatcccccagcacctccatgagggtcatttagtctatatagtccccccacccctcctctctaaaacgtactgatgggcagtatctagcctgggggacaggccctggggtgttgaggaagagcagtcttcccccaaaaccagccttcctccctgtagggattgggccctaagaggggggacacaggacagggccctggaggcaggagctcaggacccagtctagctttacccttagttctcagagctgcagtttcctgtcggcaacattgcctccattacttaatggtgcctggttctcagctacctatcccacccctgcctcttcccattcagtggccctagagatgacttctaacactctcacggcctcatttgggttttcaggcaagcttcactgggatcacagtttcactagtagggacggaagatatctacttgtccacgttttgaagctcttctcatctctgagggagctgagggaaaaacacctttatgtggggaactaactgcttttcctgctgggcagttctcctgagcgctaaccccaacccccatgttccagtgcagagtaagtggaggtgctgtggctgcaagctcagttttttggcctcccagctggctgggagggaggtaggggtctgggagccagttctggggactcaccctctactgtatccaggccaaatcccaaggagaggaagatcacaggcaggcatgctccccagggccacagactaggcactgccattgtcccagccctggcttgtgtccagtcccggctctcctcccggtgactctggggagaacggtgtgataagccctaagggacacagagaccagggttcagataggagagggagggcaggggcagagagacaaggaatcccacacagagacagcaggagacagaaaaaaagaaatgagagtcacagagacacaaagacagtgacaggcagttggagacagagagactcagcatgagattgagagatggggacagagatgcagacagtgacagggagagtctcgggcctccagagggagaaaatgacacagggttctgagcaaaaggcaggccgagaggccagccaaccctg

SEQ ID NO: 2897 - DNA, 1246 bp, Artificial sequence
  DNA replication origin
gcgcgtgcctaggggagtgagcatgtcacttggagtaagttaggtagaacattctccgaactctaggaagaaaacgaaaaggactaccaaaggatcaatcgcagaacctggggaggaagacacagacggggcagagaaagggaaggggtcgcctaatccggccgaagggagtccggagagccaagaccgcgcctccaagagaagccacagggtggcgcgagaagcccgcgcgcaaaggcgcgagctccccgcccgcgctgggtgcctgggggtgcgatctgcagcccccagtgagcaacgcctcaggtctcagcttcagtccctgaccccggccagccagcgccggccccggggcaggatagggcaaggcagggcagggctgacatcgatcgcctccctgacaagagcatcgatttattcgtgaagaaattaatagatcttctcttagctcctcggacgcaggagccgcccgcgggtggagctgaggaccgcgcaccttggaggccgagcacctggaaagccccgggatccccagcacccagggcagcagaaggctggtcccaacccctcccaccgcgcaagcctccgtggctgcactaacccatccgtctcaagctggggagagcgaagggaagaggggtgtctcttggcggggagacaggcaaggccccagggagcgggggaaggacgacctcctagaggctcacggttctctccgccaaggccccagcacggatggccccccaagtccccgagacagggacacacagaccgaccgagcagcctgagctcaagaaggtgaccagacggaggcagagccctacacagtgatcgccttcttcctcgggatcttggtcagaaccaagggactaggcggtgacggagcctggcgctaaggggtctccaaagaggacaaggaggcctcctaggaggctgagaggggctcccagaggccaagggctgtccacgttctcccgggtcgaggctgccagaagttaccccgcagatgtcaaggcaccgggaagcagaatctagacacagcgctccccagaagcccgggcgcgctggctgcccctccggcggtgcagccccacttggaagaagcctgtggtggggacaaagggttggcgggagccgctgcagccgcagcgggatttgaggaagctcagttcttggcccaccctccccccgtattttggccttatttccccaacagacctgtcctcccctcagttgtcaggctaaa

SEQ ID NO: 2898 - DNA, 1025 bp, Artificial sequence
  DNA replication origin
ggtctttaacaccgcccagcgcacatgtcgggggaggcctggcagctgcagctgggagcgcacagacggctgccccgcctgagcgaggcgggcgccgccgcgatgctgcgaggcggacggcgcgggcagcttggctggcacagctgggctgcggggccgggcagcctgctggcttggctgatactggcatctgcgggcgccgcaccctgccccgatgcctgctgcccccacggctcctcgggactgcgatgcacccgggatggggccctggatagcctccaccacctgcccggcgcagagaacctgactgagctgtgagtgtccggcgggcggtgggggggcgcggggacaggcaggcattgcagtgccccgagggcgcggactcgctgcttgtttgctggtcaggcaggacgagcacggcggaaggctggcaccacgcagccttcggcgctgcccgggcgttcctccgcagccgccgctgccctagcaagctttatggtcagtgcctggatgtcccctagtgttcagggcagctgggccgccggcttcagggagatcgaagggggaaatctccgtggaccaggtctgagagagcctagccgtctagaaggcgctttctggagctcagccagaagcccctgctctgtcctacagagaaggatggttaccagcagagaagtccccagtttgtcacccttactgcctttttccttttctaggggcaagccagcccccgcccactttcttgttatgaggaggcaaccctagcttttcttctggaattggggattgagctggctggcattggtgggaggcggtgaggagctgagtggttgagctctcctctttccatttttaccattccttcccccagaacccgttgatttggatctgggaaatgggaccccctcctggattttctctccccactcccatctccctctccaaccttgtctctctacctggggcggggagtcagggcccttgctgagagaccctcctccctttggtacacgaagctggga

SEQ ID NO: 2899 - DNA, 873 bp, Artificial sequence
  DNA replication origin
gctgaactgatccctgagagaccagctggggccagggttggggggttactggaggctacagtgtgtgtcaaggctcacccctcctgccctgtgtccctacagacactaacagcacatctggagacccggtggagaagaaggacgaaacaccttttggggtgagataggaagtagaagcttgtgcagactttgggaccgggaggctgggtagaggctcatctgcatgtcatttctggtcagagcagggagatcactaccatctggcctgagctctgacggccacccgcacagccactgcaggggtccccaggggaggatgaggcaggtctggagacctggctccgggctcccatgcaggatgaaaaaatggcttactacaggaggctctgagagtacaggaggagcccctggatctaactacccctgtcccccaccaggtctcggtggctgtgggcctggccgtctttgcctgcctcttcctttctacgctgctccttgtgctcaacaaatgtggacggagaaacaagtttgggatcaaccgtgagtcggggctgcagagggctgtctgtctgtctgttctcctggctttgtttcctactggctcttcctgactctgtctctggggggctgtgcacatgggagttccagggcgtgtgagtgtgtttggggtataaatgaaggcctggctgtgaggcttgtgagtgtgagtgtgtgtgggagcgtgtgtcgggctggtgctggggtagtttcagaggcggcagctgctaattggtggctggattgtagtcaagcattaagtgggtctgggaggtctgggctctgtgggggtggagggggagttctttggtgcccatggggccaggggtgggacag

SEQ ID NO: 2900 - DNA, 1615 bp, Artificial sequence
  DNA replication origin
ccaggggcttagggaacaacctcgctagcatttcatctcatttacatgttcattacggaagggaacccccaacccatcctctctggccccctccactgtccccttcccctccttcacgtctctctccatcagtccctcttttctacactcctgggtctggggcctcagactccagtcgaggagggggacctcagggaccgcaagccctttccccggggcagggtggtctccggggccgcaccaccgggcctcccctgccagggggcgcgcagtcactcacctgccttggggccccgtctcccctgcggcctggggtaggaaccgccggggtctgcgaggaggaggactggacagccgaggacggggcgagggtccccacttcgagccccagcctgactgcgggagcggcggggaggcgggacgctgctgatcgcagggccgggaggggcgccgaggggcggggggcaggaagggggtgggaactcgggccctcgccaaggcaggaagttttgacaaggaaacaggagccgggggaggggagatccaggcgcccgggagggaaaactgtattctgggtgggatcacagaggccgactctgcgcggcctgggccaggagcagagggggataagaaggggatgaggaggggaggtcagcgcaggggcccagggccccagtccctccctagcttcccctcgttgtgcggcctgggttacttaccctctcgtgcctcagctttcctatctgcaaagtggggttgtgggaaggaatcaatgagatcgcctacgtcgggcactgtccagtgctgcccagcaaccgtgatcttattaagacccctcccgggcaccgcatcccactagtctcggagaggctgacagggcgaggcccccctctcctcctgccgcccctaatcgcactgcggaaggccgggcgcggtggctcatgcctataatcccagcactttggaaggccgaggccggccgatcgtggagcccagagtttggagaccagcctggccaacatggcgaaatcctgtctctactaaaaatacaaaaattagggccgggcgccgtggctcaggcctgtaatcccagcactttgggaggccaaggagggcggatcatttgaggtcaggagttagagaccagcctggccaacacggtgaaactccgtctctacgaagagtacaaaaaaaattgccgggcgtggtggtgggcgcctgtaatcccagctactgggggaggctgaggcaggagaatcgcttgaacccaggagacgaaggtggcagtgagccgagatcgtgccactgcactccagcttgggcgacagagcacagctccgtcaaaaaaaaaaaaaaaaaaaaaacgcgccaggtgtagtggcgcgcacctgtggtctcggtttactggggaggctgaagaggaaggatcgcttgagcctaggaggtcgagactgcagtgagccaagatcctgccactccactccagcctgggcgacagagcgagaccctatcttaaaaaaaagaaagaaaaaaaaaagaaaagaaaaaagtcacaccgcgggagggtgtgaccctgggaagcattctccgcctctgcccgccccgcctccggccc

SEQ ID NO: 2901 - DNA, 1246 bp, Artificial sequence
  DNA replication origin
ctcctcatccccttcttatccccctctgctcctggcccaggccgcgcagagtcggcctctgtgatcccacccagaatacagttttccctcccgggcgcctggatctcccctcccccggctcctgtttccttgtcaaaacttcctgccttggcgagggcccgagttcccacccccttcctgccccccgcccctcggcgcccctcccggccctgcgatcagcagcgtcccgcctccccgccgctcccgcagtcaggctggggctcgaagtggggaccctcgccccgtcctcggctgtccagtcctcctcctcgcagaccccggcggttcctaccccaggccgcaggggagacggggccccaaggcaggtgagtgactgcgcgccccctggcaggggaggcccggtggtgcggccccggagaccaccctgccccggggaaagggcttgcggtccctgaggtccccctcctcgactggagtctgaggccccagacccaggagtgtagaaaagagggactgatggagagagacgtgaaggaggggaaggggacagtggagggggccagagaggatgggttgggggttcccttccgtaatgaacatgtaaatgagatgaaatgctagcgaggttgttccctaagcccctggtccccggactttgtgagtcaggggcagcctggctcactgccccctcccagggctgggaagagaagactgggtgctgtccttggcttgcaagggaagtgtagccacaagagcatcgacactggagccaagactgcctaagtgccaccctccactctgcagcttactgtctgtggggtcttggtcaagaggcctgacctctgtgcctcagtttctcatttctaaaggagaataatatagggcctacctcatgggttgtgaggcttaagtgagcaaaaacgtgtctcctgctttgaatgacgctagataaacagattatcagtgtcatctctctgtccagcggcaggaatgtttgagggaggatgtaggggaaggacccaggtttgcaggtccctggctctcacatctttgccagttatgaggactgggggttcagcttgaggtcccgggcaactggatcctcagaaaacttggcaggctgatgatctgaagttgtgctaagggccaggtgggtgtgtggggggtccaggagcccaggccccagcaaggcaacccttcacccccacccccgtctccagcctccagtagctgctctccactcccc

SEQ ID NO: 2902 - DNA, 1160 bp, Artificial sequence
  DNA replication origin
gggttaaagtggtgaggaaggcagagaagtgccctgtccctggggagctccagtccagtgaggcagactgactttaataaaagcataatgactcataggatgggagccgcgaggaaacacccagggggcacccagacccgctcacagagccttggagaggaataagatttgagggagtccaacctggtggggaaaccagactcacaaaccagcaatcacagatagggtatccatcagcctaatcagcccagcagacttggagtacgtcgggggctgtgaacccctgggttggcctgggtgagttccgcttgcttccagaggaggtacactggtgccaggactttggctggggtttggggaggtgtggagcctccagggacaggtgcatgtccagctgggagccagcctcagggcattcagggggaagagcaacccccggcctccttgaggccacgcgggtctgtggtgactgtgtgttcctgagagcctgcaggaaggcctggagagcagggaggagggcgtgagcctggagccactgaggggcttcttggaagcggctggccttgaggctgtgtagaacctgggcatttcaggggtggcctgagccatggtggcggtgtggtgagaggcatgtggggtcagcggctgtccagtgtgatgggagcgcaggggtagaggtaatgaagctggacccccttgtaggggctggccccctgggggttctttcttggggtgtaggcagccacagagtgggagagggggcagtggccagagcactttctgaaggtaatctcggggtggcgatgagcagggtgggcctgagggggcactgctccctagtctatgtcacccagggtttacctccccacactgctttgtcctttgaagcagatttgaatcctgctcttgcccctggcagccagacagcccttggcaaggcattttacctgagaccctccactgtgctgcctaccaaatggggatgacaatcaccagcaccttccagggtggcggcgagggttgggactggcactggcaacaccctctgggaggggtgcgatagatgtgtgaatcaggatccctgcagctgccccatttcctgatgagtaaacaggtcggacctaggaccctctagcttctgtttcctgagccacagagaa

SEQ ID NO: 2903 - DNA, 830 bp, Artificial sequence
  DNA replication origin
ggagcagggcagggtgggaggggatggtttggggacattgggagaagggatgactctatttgggagtggggatgtgtctgggtgatgtgggggtggagctctgggacagactctggggagtgtctctagggcactcctgactgtggcctctccccttcagagggggccacagtgtcagctctggagacaagctgccagaaagaggcttctggtcatggccctcccgtatgctacccactgcgttcaggatggtgggaggatggagccacccccgtcacgctccctgctgtcccccttcctagccaggctctgtttcctgttttcaggcttcatatcctgaacgctgggatcccccaggacattccctggcccccaggccccaggtcccaggccccagggctgagctgtgggcaggccccacctggtgagttacttggggactgaggatggataggaggaagcacagaggaggctagaggctgagattcgccctgcgggaagtgtgatggggcatgcggctgggctgcactggaggggtgggtagacgctggcactgggaggataggtgggccagcatcctggatgaaaggctggagatttggctgctggagggttaaaggtgaaggaggaacatgggcggctgagatggggttaatttaggagcctagacctggagggaaggagcggctgcccttcttggggctgagagtggctttggggaccctgggagtgtgtgggtgtggggtgtggggtagggccaggcagcaacattccagagatactcaggggggtaaggggccagcaaccgcgacctttctctcgtctcagaa

SEQ ID NO: 2904 - DNA, 1045 bp, Artificial sequence
  DNA replication origin
tggcagcaatggggctctggcgggtaatcgccctggggtcctaagcccctgtgccctggtagggagggtgtacctgagggtcctgtggccctgaaggcacaagaggccactccctggggtcagtagccactcaccactggaacagtcgtcgccccgccagcctggcacacattggcactgattgggtgccacacaacggccatggacacactcctgggcacagagcgctgggacagagatgggtgtggtgagatgtgtccacccctgcccctacccagcttttatcctgcaaagcctaaccccaccttcctccaaaaccagggacctgaagttctccaagccccaattctgcctctaagataaagactgaggggcagcaactcagggggagaacttagcaagatgccagtgttctgggttcccctgttcctttttgtgaaattgtctgagcaccttgttgggaaaatgctttgggggagatcctcaaaaggggactgaacatggacactgtccagagagagggcaggtggcggtcggggttctctggagagcagtgtttgcagaggctcgtgatgggcagtggctgagggaagtgggaggaagaggaagacaggctccagtcattacagggtgctgggaggggggtgcagtgggcaggagagactggatagtgacaagtcagagaccaatagcaacagagagtcagggagaggaagagacagaggcagacccagacaccaagtcctgagacacacagtgacagagagacagagacagcccaaagacagaacaagagctctagggcagacagcgatgcagagacactgttgagggacatggagagatggggtgggagacacatggggccggctggagacaggggtgtgaagtggtgatggagagggaagtgctgatccccatcctggggacaaggccagggagaggagaggaggggggaacccaaaagggcagaggagtaaccccattctagcgggggccgggagggactcagaagagtaggctaagctccccgcattccattgcc

SEQ ID NO: 2905 - DNA, 1033 bp, Artificial sequence
  DNA replication origin
cctggtcccagtggatcctattcctcacgagtggagtgaccttgagcaaatcattgactcgttgtgggcttgtttcctgtctgtaaaacgggaatagtattgtctacatggcagggtggctgtgaagataacatgaggtagcacgtgtgtgaaggcatgctgcaaagtgaggctgggacaaggacccagagaaccctgttgcaaggcagggtgcagggggagctggggagtcccgggagggagaaggtagacctaggtggaaatcaagatcacgctttgtggaggcgctcgtggagttgagcctactacagtagcacagatgttccccgagagtgaacagaccaagccaaggtgaggaggtgggggcgcccgagaggcagacatgccacccgtggctctttgctcacccccacctgccggtgccagggtgtccctgccatttccagtcctggaaacctttgctttctgactcgacagtccccagcaggaaagagcaagtgtgaatcactaagtcctgaggtgggggttgtgggggcagtccttggaggcaagagaggaagcagttattgcttgtttgcacattgactccacccactctgtcctgcagctgtgacgtgtcctgttcccagggcacttctggcttcttctgccccagcacccattcttgccaaaatggaggtgtcttccaaaccccacagggctcctgcagctgcccccctggctggatggtatggagggtggggcctgtgggcatggggtgtgggtctggggagaattctgtgggtggtgctaagcagggctccaaggtgagtgaggggggtgagctctgtggttatgggggtgtcaaggggtcctgtggccttggggaggaggctgggtgcctggggccctgttgacctcttatccccacagggcaccatctgctccctgccctgcccagagggctttcacggacccaactgctcccaggaatgtcgctgccacaacggcggcctctgtgaccgattcactgggcagtgccgctgcgctccgg

SEQ ID NO: 2906 - DNA, 790 bp, Artificial sequence
  DNA replication origin
ggtgtcaaggggtcctgtggccttggggaggaggctgggtgcctggggccctgttgacctcttatccccacagggcaccatctgctccctgccctgcccagagggctttcacggacccaactgctcccaggaatgtcgctgccacaacggcggcctctgtgaccgattcactgggcagtgccgctgcgctccgggttacactggggatcggtgagtggcgtggggcgggcgggagacgggagggaggaggtggggcgccgccaggctcactcagctaggtgcccaggtgccgggaggagtgcccggtgggccgctttgggcaggactgtgctgagacgtgcgactgcgccccggacgcccgttgcttcccggccaacggcgcatgtctgtgcgaacacggcttcactggggaccgctgcacggatcgcctctgccccgacggcttctacggtctcagctgccaggccccctgcacctgcgaccgggagcacagcctcaggtgggccgcgggacatgtggtcaaaggatcaggaggccaatggggaggtcttcctggccgaagtcaccacagagccagggccatatccaagggggacaggtgtcacagaaggggaaagggagggacctcaggggccgggaggggcctggggtaccgctacttgccccaacccagttttcagaatagcgcggagcctccctagtgacccccttaccccagcgatgtgcgaatcccactgaccacgcggaggggtcgggaagctgccctgcccctgcccagctcagaccgcgc

SEQ ID NO: 2907 - DNA, 1171 bp, Artificial sequence
  DNA replication origin
cgaccgggagcacagcctcaggtgggccgcgggacatgtggtcaaaggatcaggaggccaatggggaggtcttcctggccgaagtcaccacagagccagggccatatccaagggggacaggtgtcacagaaggggaaagggagggacctcaggggccgggaggggcctggggtaccgctacttgccccaacccagttttcagaatagcgcggagcctccctagtgacccccttaccccagcgatgtgcgaatcccactgaccacgcggaggggtcgggaagctgccctgcccctgcccagctcagaccgcgccacgcccccgcctctgcccccagctgccacccgatgaacggggagtgctcctgcctgccgggctgggcgggcctccactgcaacgagagctgcccgcaggacacgcatgggccagggtgccaggagcactgtctctgcctgcacggtggcgtctgccaggctaccagcggcctctgtcagtgcgcgccgggttacacggtgaggcgcgcccggctgcaaggaagcgaggcaggtggagaggccaaggaatgggccgcccctctcacccgctcaccctctttcagggccctcactgtgctagtctttgtcctcctgacacctacggtgtcaactgttctgcacgctgctcatgtgaaaatgccatcgcctgctcacccatcgacggcgagtgcgtctgcaaggaaggtaatagggtggagtttcccagagagaagacttgggggatggccaagggaagaagggagagtccaagagtatgggtgggccaagggcaggggagcggctgcagggtaagggtggaggggcagcagctggacacagggaaagtatccaggctactttcttcctggaatatccactttgcttttcttcaaccacaaagatcctacctgtccttaaaggctgaggccaaaagccacctcactggcgaacgtccctcaccctcagtcatacggaaacacaattaccatgctgggaagggcctcacatctgccagagtgacacattggcaacctttaggctggactcggatacagttgtgctttgtttggctaacaagtctcccatcttcagtccccactactccctgttgtctggcacatcctctgtataagtcatttagttacctgatggggcccct

SEQ ID NO: 2908 - DNA, 901 bp, Artificial sequence
  DNA replication origin
cccccacgggaggcagaacggtcgctggcttctctttggccgcgcgctctccctttttggtcaccgcgccagaagacttctgggtccccggacgcggggccctgggtgaggcccccggcgcgctctgctcgctcgacatgctggtgttgtccgcagcgtctctgggaccttcgtcggggcaggaaggtaagaacgcactctacggggctcagtctgggggtggctgaatcaggggatctctgttccgcgtccagggaccggatccgacccgtccgcggtggcgtagcctacgcgtccctctccaagacaaccgcgcgaggcgggcgggcccgagggaaaggggcaaccgcagagagcacgcggggccgacagggggcgccgcagggcagagcaaggcgaggggagagcccacgagggcgggtggcggagccagaacccgaggggcgggccaggcccggcggagcaggcagggcgaggccggccagagatcgcaggagctgatgggtcccagagggccagggctggccgagcctgtgctaagagagaagggctagggtgacctaggacctgagcggagccatggcgaaggaaacgagtggatcttaggacgggagcggggacagggatagggcgagggcgggcaatccaaagtcatcctggaactgggcctgggggatcggggcggagcctgggggagtggggtagtgggcggtcggaggatactagggagaatccaggtgggggcaggtccactctccagagtccaccccgctgtccagtaaggagagagcacctggtgaaaggcgtctagagaaacccatctagttggtgtggtgctaggtttatattctcgacctccatctgtttagcctcctggaggtctctggggactcagttaatc

SEQ ID NO: 2909 - DNA, 911 bp, Artificial sequence
  DNA replication origin
ggggtttacatcctctgggaaaagaaaatgagtagaatggtataagtagaggtatggccctttttgttgcaagtgatagaaccccaatcaaactaagcatgaaggggaaatgtatccgaagtcttcttgatacaaatctgccagcttcgtcatcacggggacaagaacttgctgtctctggaatcgaagtaaaacaacttgggaaaaagatctgatcatccagcattagccaggtactatctctttgtcagtgctggtggatggggagaaggaattataggagctggagaaacaacatcttctggaagggaagacaagacagtatacaatcccctacaggtacgaagccagttacattcaaaacacacacacacacacacacacacacacacacacacacacacacacacacagacatggctgctgtatagaatacagggtggaaggaggcaaacagatgagttaccggactatttcaacagcctagtctggggacagtgggagttgggatagggcagtgagaatggtgaggcttggttgagttaggctcctcagagaaacacttttgaggtagaagtaataagagttggcgaaggactggacagggtagggagtgagtgacagagcaagaaagattctgaggcttctggactgggcactgggtgggaggaagtgccattcatggagatgggaaaggccaaaggaggtgcatgtaagggaggagctctaaggggtgatgccagctggacagctggacacatgggtcagcagtgcctgagaggttaggggtggagttgtgactttgggtgaagttgtgactttgggagctgctgatgttctggcataattaagtcctggcaatgaaagagacccctcaaggaggcagggagtataattagagaagaggagag

SEQ ID NO: 2910 - DNA, 1014 bp, Artificial sequence
  DNA replication origin
cggcgcctcccctctggcggtgtcctccaatcccacccgggcacccgtgggccggcccggcgtggggccctggaggtggctgttcccctccctcctcacctctgccttccagacgatccgcggctgtcggggtcctgcagcctcaatagcctggagagcaaatacgtgttcttccggcccaccatccaggtggagctggagcaggaggacagcaagtcagtgaaggaaatctacatccgcggtgagccccgctccccccacccgccccagctccctcccgctcccctggagcctcccaggtctgaggcacctgcctcctcttggcccgcaggttggaaggttgaggaacggattctgggtgtcttctctaaatgtctgcccccgcttacccagctacaggccatcaagtgagaggcactgaggggatgggcgggggaccagagtgggagttggggctcctggtggcttgggagagagaaccaaggggcatgggagaccctggcgacggtggggaggtcgggggtgggggatgaggaagggcaccgctgggagaacggtgtggggagggttttccagtaggagggggcgctctagctctgtgtttctgcacttcccgcccacgacagcttgtggaaggtggggctgaccgataagaccctgaccaccttcatcgagctcctgcctctctgttcatccacgctcaggtcagcagactgggaggccccctgtgcctgggaagcctggctgggcgggtggtcagaggggagcagtgtggggatggaagtggcaggtcccagctcctgtgggcctgcctggcatccctgtggaagcagaagcaggcaatgtctgttggatcatgatacctccattagacaagaagccaggtccgcttttctgcccacaccagcacccaaagagcctgatcttcaggggctcaacctgtctcccctgcattagtctcattaccctccactccctccccagaggttctcgctctccttcctggctgcctgg

SEQ ID NO: 2911 - DNA, 962 bp, Artificial sequence
  DNA replication origin
acggcaaagggttgtggggggcagggcgcgcagggaggccgggacaggggcgggccggtcggcgggagtcgcggccgcgggaaccgaggcagggaaaggcggtcagcttcccgcccccgcccccggccgccgcggcgtgaggggaaaggccggcgggcggcgggcagcgcagcgaggaggaggagcctgcggccccgccccgcgggagcgagggaaggagaaaggctcgcagggaaggagggagggaaggggggcggccggccgggcctgcgcccgagcgagcggcgaaccgagggggaaggggcccggaaggaggcgagcgcggccgcgacgccggcagtcggacgcccgctcgtgccggcctgccgcagccgccgcagccttccctgtgcgccgagcctggcgtcccgagcggccgcgaaggccggaacacggcggtcgggcgcggggcgagcggcgccgggagcccgaggcccggccgggcgtcctgcgcgaggcactgcgggctcctgcctgcgagattaggcgaggggcggaaagggaggcaaggagaggccgagaggagacaggcgatcggattttccaggagtctggtgtggaagaaaaacccacctcgaactcaaatccacaataataatccgaacgaataataagggagccgtctttctggccgggcgagagagagggagagagaagggggaacgggaggaagcgaaatctccgtttcatggaggctgaggcaagagaaaatttcggagcctggatgtggaggagcccaacagcagaactaactcaggaaattgtctttcagaaaaaggccgaacgtaggctgggtctgagaatcaggctggggtaggtggaggaacctgcaagtttaaaggaaaaagaaaaggagagaatattttcagagattatctctggtttgttatcattactaccatcttaaaggtaaaaagcattgc

SEQ ID NO: 2912 - DNA, 921 bp, Artificial sequence
  DNA replication origin
caagggcagtggggctccagtgggcacagggaccagggtgcatggatgcagccttcaatgaggctttgggcttagtggaagttgaaggttcttgttaagattggggttggggttgaggctggaagtggacatgagggttgagggttggggattgagtcagaaggtatcagaggcccccagctggggagaatggcctcagatgcctgcttctcacgctgctgtcctggtcccagttactcagccccatgctggccctgccagctcatccagctcagctgtttgctaggagctttcacttcctctgcctctgacctgctcctctgccacgtcatcgcctgctggaggggatttcttgtctctgtgttggggggacaaagggaaggatcagggggtgtccaggcagggggctcccccaggcacagctgatgggaatgaggttgccactaggggaaggtcgaggggcgcaggggggatctgaggaggaagtaggggagtggggtggtggtgctataagggcagggcagggaagctgggaggcctgtggtcagtttccttctccaaagcatggatgagagatggggggcaagagaggaaagacagacaaggaaacagaaagcaacaacaggagacagtgacagagacagcaaaacagagagcaccaggctgggaaagaagtgttgagacaggcaacactccagaggagggaaatgggcattccaaggggcaggataggtagggcaacaaagagaggccataggatcggcagacacaggaagtaaaggcagaaatggagagaccaagagaaactggcagaggagaggacaggggagaagagagacaggagtggaaaaatacatggcaaaatcaataatggtggggaagaaaggccaagagaaggttgctgggtgggaagtggaaaga

SEQ ID NO: 2913 - DNA, 1210 bp, Artificial sequence
  DNA replication origin
tgcgggccgggaggagcgcgcagggggaggagtgcgggcggaagtcggcgtctgctgaaaggagaaaggaaagggagacgctgctgggtgcggcgaggtgaggctgggaaccggcgggagggcgcctcctcctcccccgccctctctgctgaggatggaagtgacgaaagcagccgaggaggtcacttcctgctggggtggatgaggaggagccggagacgccgcggaggagaccggaccgaagacggaccgtgccgggaagaggtgagtcccggcctcgcctcggccgccggggtgtctgggttggatccgggaccctggcggggacggcgtccctggaatcggggccggccgccaggccgcgtacccacccagctgggcctcacccagtgcggggggcgggggagggtgggatcccgtgtctgtctgaggggcgacagggacccagggcagcgttcatgcggtggccccgcgcagccctgaggccacggttaagggaagcccggcccgggaggtgaatggcaaggaggttctgggggctgtggaagccaggacccggagctgctgcgggaaacccgcagcgccagactgtgcatgcctcactcttcggggagtggtcgcgatcagaggaagggcaggggtcctgtggtttgcagagttgagacgagtggccctacttggatggaagtgtccttgcagtgaatatgcgaaaggcgtgcagaggcgccccagggctcctgggaaagggacttttatggggaaaattggagagctggagtgtcaagagagggtttccttgtcaggttatcgttgcaacgggatttggaccccagggtcgtgatggttggagggagttctgtggcagggtaaaaggcctcgcgatctgacagcgcatcctaggagttaagagtccagggcagcttcctggagcagtggggaaattcgtgtttttcctccctcattgtcactaaggtggaagaggaagctcctgcctcagccccggtgcctcgttattatgtatctcgtgtgtgtgtgagagtgtgtgtgtgtgtgtgtgtgtgtgtgtgtgtttttccttgtctgctccttcctttggggtgtttatcttgtcctcggccgctagtagttttgtagactgacacttgctggtctccttaatgtgtttggtgagaaaaaatattcaaaagatctagagaaatcctaggttagg

SEQ ID NO: 2914 - DNA, 1643 bp, Artificial sequence
  DNA replication origin
ccaggttcctgcgcctcctgagctggagattcagctcgtcagggcacctgaggttgcgtctccaggatccaccctgcgtctgggtgaccgccgagctaggtgctcccggccgccggttcccgggcccgcagtccgctcccgaaagcacccccctggcagggtctcaagctggacgaaggggagccccaggtcaccctgagcgctggggccgcagtgggaacttgcggcgatgtcacccctgccctgcatgtcagcccaggcctggcgaaggcctgagccccgccccaggctgcacagcgcagcaggagcggctgcgggagcagcggtgacggcagtgggtcgcctgtgccccatgtccccaaggcagctgactgtgccatccccactttcgcaagccggggcaggaccagctcccaggccgggagcctcggctgctgcctcgatctggctccctgcggtgacctgggagcccaggaacacctggccaaaggcgcagccgggactcgcgggactggccagcgtgggattcatttgtgcggggttggtctgggccactgtgccacctgcacctagactgcctcagctgtggggaaaggcagagaaggggcactggggtgggggtagggggttgctgcactctgcagagccagggacaggtgggagccctgcccctccggaatctgcagggtgggagctccccaggccagctgcagcagcccaggttgtggctgtgggcctgggcatcatggtgctctcctctctagcctgtcctctcccacttcctggcaccgctctgatcttggagccgggttagggtgagcttgggggttgttgcagctccacagggtgtatgctagggcagtgctgatgccctgaccccctgctgccttcatacccccagactttgggtgccaaggagcaggggagggaggctgagatgggcagctaggcattggcctgaggcctccttggcaccagtggcctaggtgccatgggtggctgcaggaggtagacaggctcctaggcaggaagaggcaggtgtgggtgaggccccactttcaggacagggaaggcctgaaggctggcagctgggtttccagtcccactgaccagagtggggactagtggtgccttgtctgggcttcccatggctctccatgggccaactggcatgcacttccttccctctgagccccataatagctcagggctcagccagagtagaggagaggatggagaggcgaggatggagagacaactagatgaccagctactctttgcagagcctcctctttgctgagagctgtagattgggaggaccaactgcagaccaggagctaccctctgctgagaggtgagcacttgtccggatgacctgcctacagagaagagctacccactgctggtctctgaggtctgtgctgttctaacacttaataaagctcctcttcctattgctcaccctccacttgtctgcatacctcattcttcctggatgcaagacaaggcctcagacaaaggcgccactgaccacagaggtttccagccagaaaaagcaacaccccacagaaaaagcaaaaccccaaagatcctgtgacagtgatatttatcaagatagggagagggggctggaggaggggtca

SEQ ID NO: 2915 - DNA, 1381 bp, Artificial sequence
  DNA replication origin
cgagtggggtttggagcgcatgaggagaattcgaaaagtagagcaggattggcagagggaaggatgactaaggagagtaaagaaagcctgaacataaggaatctcagaccacttcccattgcggtagcaaaagttgtcttaagtctccgagcacgtgggagttgaaagtgccatttttgggccattgagagccacggtctaatttgcattgaggccatgcggtattgaagtaaaaaataagcctcttagggcagatttctgaacggaggccgacagccttgagattgcgaaggagacatctaagctgggtagttttaggagtagactgagaggctctcatagcgaatggagcgtggtgggcgggggtgggtggtagaggaagagacttctggtggtgacaaggacgacgggagagcttgcccggaatagaggaggtaaccgccgtgtcgggcgtccctgaaatggagggaccagagagaggcccggaggccagaggaagcccttggcccagcgctggggttttcggaaacggagagacggacgggttccggggaagggcaacagtctctttttactcaccctggcggaggttttgatggtggatgaggtcgccagcaaagggagaacctaggagattctctgggtcttcggcaggttggggaaaggtgagaatggccaggagagcggtgatggggagggagagagaggagagagtgagtcccggccagagtctatccccttccgggctttcggcaccagaatgtaagggcagccgagggaaggaagaatagacccaaagtcaggcgagtaactttgttgaaccagccgggctactccaccacactcagaggaggtagcgccaagcttacagaatgaggggtttatactggggagggagtttgagggagttttttggtacggccgcatcctgggggtgtttgctggttaattttgccaaatatcacctggtgacatttatgatagcaggaacttacaggagggtaaagtttgtttatgcttcccacgacctccccctgtgtggtccggatagtttgtaattggggtttgctcacagcagcggggtctgataagtgaagtttgctggcttcaccgcaaagtttgctggcacccagataagggcttagaaatgtaaacaggcttgagggaaagagtggggcggcatggaaaggagttgcagagtggggagcggagggcagcacggagacatttcaagaagctttttgggggcagtttgtccctaacacctgtataaggcacttaccatgaatggagcttgtaggactggaagttggtctgagaagtgggtgagtcgtgagtgaatgtgaagacctggacattactgtacactattgtaggcttt

SEQ ID NO: 2916 - DNA, 1391 bp, Artificial sequence
  DNA replication origin
gagccacgcacctactttcaggggcagaaattgagaaaacttggcggggagtgttagagacccaggagatctgggatctgggaggaaagaagtggagacctctttggaccaacacattactgtaaaattgtgcaattccagcaacttctctgtccattccctagggtccagacctctggctacccgagcaatcctgtgagcagaagtatctggtcaggggtgagaagaggagctggttgccaaactgggcccttaagaaagtggagatccctcctgaatgctctcatgattctcaggaattcccttccttcctagttcctccatgtccctaccccaaaagatctcaaactccagcgtgcttagagatctgactggtggctgtcttctcctctggcttgcattcagggaggtgaggccaggtcttggcccttcaaagccatccagttggctaccttctccttcgggatgggtggaaggctaagatgaacaaaggaagggtcaactgtgcctcttccaggccgctgagtcctccaacgcctagctgtgctcaaccttgactgggtgaagccaaggcagggcctcaaggcaggtccaagaggcagctcccattctccagttctgggttttataggtggggagaggcatgtatgcccctcccttatccaagcattcattagtcaattgagaattcttaatttggggaatctaggggctagactttgggtgtggaatttaaaaagaaaggtctttatgtttatttaactccctgccccccaccccactcctagacacacacacggaaacacacacacacacacacacacacacacactccccatcacatcctctgagctagaggctgatgtccctcagcccatgttcctcctccactgcttagttccatagcccgcgaccaagattgcgtctataaataggagggggtggggtggccaggggtcccgtcgtgcctgccccagaacccacgacggtcacatttttcacccccttttgcctttgccctcaattcctttccctctttgctctccttccatctcagttccagcgaggggggtatgtgtgtgcgcgcgttgtgggggggcagggggagggctcgtggagggaggcgccgtcggagggagagtagacgtcaggcggagggagggaggcaggcaggcagggaggcagggagggagagagggaaggaagagaaggggagagaaagggggagcaaagaccgaaagagacccagagagatacagcttgagaggagaaataattaaagggggagggcgaccaggaggagaaaaaggtctgggaggaaagagagataaagagaatcggagggcagggaaatgagtttgtgcgcgtgagtgtgcgcgcgcgcgtgtgtg

SEQ ID NO: 2917 - DNA, 788 bp, Artificial sequence
  DNA replication origin
ttaaagggggagggcgaccaggaggagaaaaaggtctgggaggaaagagagataaagagaatcggagggcagggaaatgagtttgtgcgcgtgagtgtgcgcgcgcgcgtgtgtgtgtgcaggggcgggcgcgggcgggcggggggcgggctcccgggctcccgggctcccctcctccccagcccgctcctctggctcgctcgccaactccgggccccagccgcgggcgggcgcacggcgggcggacagcatgctgagcctcctcgtctggatcctcactctctccgatactttctcccaaggtaagggcccccagcccacccccggacgctcggcttccccccggggccggggcactgcttccccggtgggagagtgctggagtgccccgcggcccgcggccagtccccgggtccggacgccacgaggcgggggctcggtccgggcgcagagccctgggggagggggcgcggagtaacgaggggctggggagaatgagtttgccgttgatttgcccaagttgtttcctctggctgcgcgggagaaccgagcaatggggccgcgagggctggaggtccgagtaaaacggggaaccgaacgctttctcttgagcttctggcagccctaccgaccctcgccctctgaggccggggttccggacgcctgagtccagcctaagggcaaggctgggaagagggtgggatttcggatttcgggcgagggggtgagcgaaaagctgggtcccacctcccgaagatgttgccaaggggatccccctactccagccc

SEQ ID NO: 2918 - DNA, 1286 bp, Artificial sequence
  DNA replication origin
ctctggctgcgcgggagaaccgagcaatggggccgcgagggctggaggtccgagtaaaacggggaaccgaacgctttctcttgagcttctggcagccctaccgaccctcgccctctgaggccggggttccggacgcctgagtccagcctaagggcaaggctgggaagagggtgggatttcggatttcgggcgagggggtgagcgaaaagctgggtcccacctcccgaagatgttgccaaggggatccccctactccagcccagcccctcgggggtctgagtctgaatcacggctccagcctgcctggggctgccccctctagaggaagggaggggtgtctcggcgcctctagtggggatttggaacccctgcccacggaggctctgggtggagagtggagttccacatacagcttcaggcccgcttgatacagagggggggaactcacgggggcgggggcagaggcggtggggggagggggctgacactctacttgggctcaggaaagtgttgctgtctggggcttatttgacactggcaggggagaggctgggaggtgagggaggtggttgggagagatgaggatgtcagtgtatcctgggcagggctggggttgggggagggaagagggctgagggaaccaagggtccagactgcagcagggactggggtctgtgggagttggttcttgcctcccaggtctgactctaaggaagactgaatcctgctgaactccttccctccccaaaaatggagctgacacacagaaattgacacacaaacaccgtaaaacactcacagacactgagacagactactcacctactgagagagagacatccccacaaacatcccccacactgagacagacacatatacacaaagacacggagacatctgaggaagacagattcctcccccagatcggcacacactcacgcattcatccacccgaacgttacaactatacacagtacatgtatgcaggcgtttacaaggacaggacacacgctctcacagaaaccaaccctctagcaaacaaagaaacttgaacagacattcatatgggcagacacctatggagatgtacagactgcagatggaggaggtgtcctcttttagggggtgtctgggaatggatctgggtagaacagcctcaggcattattgccctgctttctgttcccttcctgcgtttgtaggtggtgtgttatgctggacctttcctctccttgtcgggtctcttcccagttccgaaggcaaagcctggctgagttggtgggggca

SEQ ID NO: 2919 - DNA, 1248 bp, Artificial sequence
  DNA replication origin
ccaaccctctagcaaacaaagaaacttgaacagacattcatatgggcagacacctatggagatgtacagactgcagatggaggaggtgtcctcttttagggggtgtctgggaatggatctgggtagaacagcctcaggcattattgccctgctttctgttcccttcctgcgtttgtaggtggtgtgttatgctggacctttcctctccttgtcgggtctcttcccagttccgaaggcaaagcctggctgagttggtgggggcacgtcttgattcatttctccccacagggcacccatgccagccccccagcacacactatgatatgggaagggcacacatctgtggtgtgagccaggagtgggaggtggtgctaggggaaaggaggaggcctggccctggggttggcaggccaggccagccacttggcagaaagttgggaagatgacttaagttctgactttgttcagccaggctgttggtgtcggggaggaagggggtgggccatggtggtggtggaggggggtcatgttggtggtggaggaggcccctgggtcagtattggtctatgttgggggcaagcttatgtctgtccctttcttacagcccttacatgtcagcatcatggatacaaatgagtgttaaggaacaaaagcagcagttagcaaacaggagagacatgtggattgaattggggacagaaagaattgtgtgttgtgtgcctttctctctttggaaaggagcgagtggctagggaatgctgagctcccacttctctgctccaacaggggtgaaagcaggacctggtgaaagtgtctggggttgggggagaggataccagagaaaagaaagggagagactagacaggaggggaggggaaatcactagtgagtgttgggggaagcttggcaagggactggggaggaggcagagagggaaggagtaggggtctggggagactgggacacacatgggggtggagagcttggcaggaccccctttccttagcctccatcctcagaaaggagctctaggtcagggactggggcagtgagagaggaaacggaggggggcgctacaaaagggaggaggaatgatggtgggggaatagggatgggggagtaggtgtcagcaggaagccatagaattgaggggagcagagaggagaggggaaggggagattcagcctaggctgagaaataaaaatcgcattttaaagaatttcaatgggcttcatcaatcttcatttt

SEQ ID NO: 2920 - DNA, 1223 bp, Artificial sequence
  DNA replication origin
ggcaccgagctcttggtgtggttctcctgggataagcccacagtcacaaacttgtgcaggaatgggggtaccgggaagcagcccggtgttccaagccttttgagattctccggacctgcgcgccgcccgctcggcagggggctcggcaggcgcgggcggcgggtgggggcgggaggctctgcccgctcggtggctgccgcggcctcctccgcgctgctctccacgcctggcttattatgcacgaggcaggcaatttgccttcctccccggggacccatctcggagacaagaaggtagtttgttctctgtaatggcttctgctggagtgcggcggggcccaggcgcgagcgggggcacgggcggggagttggcagcgaaggatgcgcccggcgccccccggcggccgcccggagcccgaggtcggcgcgggaggagcgctgactccgcgggccgagccctcccctgccctcctctgctcctccgtaactcctgagctgtggcctgcctttctgctgcctccacgtccctactcttcctttctgccaccccgtttgcttcttaaaggttgtcctttgtttctgccatttcccctgtctttcagcttcatattcgttgggtgcccccatccatttctccacatcactctcttcttagtgctggggacctgggggtgaggaaggaggcaggagggatacagggatgactaaaataggcatctcttccttcacggaactcagcctggcggaaacttagctggctccctgcctgtcctaggccatctctccttttccttcttgtctcttcatcgtctgtttctcagtcgaccctggcctctgtccctatgcccacagaaagacacccccatcacccctcccatcgtttccgggtgatgaagattgtctgagacagattcctagaatgaacaaccttgtctcctgaggtctcgcccgttgcctcctcattcaccagaaatgtttccttccctgaagcagagagagagagagagagacagagagagacagagatccaaagacagccaagccgggccaacatcttctggggagttctttggagtgtggggtgactgatgcatccagttggccggttgactatcttcccaactgtaagattcccagaatggctcagaaagaagctgaggagtgcacacaaacatttaaaaaattggccagtcgtggtagctcacgcttgtaattccagcactt

SEQ ID NO: 2921 - DNA, 1164 bp, Artificial sequence
  DNA replication origin
agcaggagcaggagcaggagcgaggcggctggggcccccatcgcgcttcccggccggctccctggctgggcgctggcgagcctgaatccccgggggctggggatggggagggggtggactacgatgttgaccgaaagggcgcccccgagccgcttcggagcccggggccgaggtggggaccgggagggagccggcgctgctgcagtcgcggggattaaatagggcgctcggagcaaaccatttggttggaggtggagggggtttggcggggggctgggctggtcgcgggggggccaggctgccgcattccccacaccccccgcctcccacaccccctccttgccttcgtggtgccttccaccctctcccccgggagctcggccagccgggctcgggtgtggatcagagggagggagctggctcagcagtgggaccctgcgctcacccctcttaggcttggggtggagggaggggagtcggacagggccatgggccagctggcgagtgcagccactgcaggcctgggcaagggcgtgctcactagcctgaggtcctccagctccgccctccatcctttggcaactggggatccccttaagccctggggtcccccaccaaccatgtacccagggacatctctccagtggataactactaactctcagccttctcctaaacgctaacatccctaattcctcttacccaagagcccatagttatctgtccagcaacaatttgtggcccctggccttaagccctggggtccccctatcaacagtgtacccagggacacctgtccagtggataattgctaactctcatcattttcctaaaccctaacatccctgattcctcttacccaagagcccatagttatctgtccagcaacaattcgtggccccaggcaatctcccttgaaaggcattttccaacaaactcccaggccttgggaaccaatgtctccctcaatctcatgtcaaggaaataactcaccctctgaaaacatgatttcaccccagactcttgcccaatctggcagcctaacaaagcaactcagtcgttttctttcttaaccctccctattacatctctttaacccccggtccctttctccaatacgttttcttctttcttgttcttttgcagatctcgcccatctcaagt

SEQ ID NO: 2922 - DNA, 792 bp, Artificial sequence
  DNA replication origin
ctccgagcgccctatttaatccccgcgactgcagcagcgccggctccctcccggtccccacctcggccccgggctccgaagcggctcgggggcgccctttcggtcaacatcgtagtccaccccctccccatccccagcccccggggattcaggctcgccagcgcccagccagggagccggccgggaagcgcgatgggggccccagccgcctcgctcctgctcctgctcctgctgttcgcctgctgctgggcgcccggcggggccaacctctcccaggacggtgagtgagggagggggcggcgcctggggaggtggggagtgacccgaggcgggggctgggatcgggagtctcgcggaaggagcctgttggctttgtttggaaccggggttaaagtcaccagccgctgctaatacccttgtgtctgtctctgagcatccgtgtctctgtggactgtgggtgtgccggtgtgtgcacccttctgtgtacaccactgagcgtgtgtctgcgtgtgcaccggggtttggctctcggggctgatgtccgttaggagcagcccggggtctggatgtgttgctgtccgtgtgcgcgcgcgtctgtgttggtgtctggctctgcgtttctgtgtcagtatctgtgtgtatgtctgtgtcagtgtgtgttgggggcggagtgagatttgtcgctgtttcagtcagggcgtgtgtcgggtgtttgtgtatgtatgtctgtaggggttgggtagccagtgcaatcccccaaactgctgtatgcaaacatttctgctcccccgc

SEQ ID NO: 2923 - DNA, 872 bp, Artificial sequence
  DNA replication origin
aaaagaaagaatcaagatatttggggaggaggatgcatgagaaacccaaagctttcctgggctaagcactgattttcccaaatttgggatggggtagcatacctagcccctttgccccagtctggaactcaaaccttcgctggttcctaatggtagagagatgaaggaagggagtcgggggagaaaggaggcggggccaggggtgaggggacttggggaagagcccctcccgccctgggccgggctatgtaggtcagcgctgtgggggcacctcagctttcttaaaggctactaacggttagtgggatgccagaggggcagcctgtagggaaacccggaaggggtccacagctccgagcctcaggtccctgaggagggagggcaggctgtgaagagactgaaggaatgcatcctcctccccccaccgccctgtcggaagaggaggagggctgggatggaggaagggggagagggaacaggacctctgtggagcaaagggaagtggggagagtgaagggggagggtggtggctatgcccggccagatgccaacgaaaaacagaaagaaccgcaggggaggagaaaggggaggtggctcctgggcgatggacccagtggccagcagggatgggcacagggcggggcgggggtggagaggggaggggttgaaactgggaaggatgatgtagagaatttcatctgaggaaaacaggcgaagagccagggtgctggaggaataatcgctccacctcgcctgacctcccccatccctgtctccatcgtgataaaggagcttcccctggtatggggaccctggggatcccctccctatagttggctggctggcttactccttctgccctctacccatca

SEQ ID NO: 2924 - DNA, 1095 bp, Artificial sequence
  DNA replication origin
acctgtctgcctattcctttcttggttactggaattccatttccaagaaatacccaatggcctaagtccctagcccaacctgaagaggcggagggacaaagaaaccggccttgcgaatcttttcagggtctcccgccgcagcgccccgaagtagccaatcaagtgcgcaaaattcagtgagctcatccgctgctgagcagagcccagagctgctacgtgtccgggctttggagtcccgggtgaacttcgccagtcgtcccagcgcgactcagagccagctggggagaggcaggtgggggaggagaggggagaaaggggcgctaggaccgagagagggcgcgcgggggccgggaggtcgagattacaaagaaaagtgggacgtgggcttagggtccctgaggaagaaaaggacaggactagggagagaattgcctaatcagaagcaaagggaaagagaggcgaggggcgagaggagaggggagaggggagggagaagaggaggggtacaggataaagagggggtggagagggaagggagagaatgggaggccggagaggggagggagtcaggcaggaagcaggcagcgttagagagtcctagcatgggaatgggactctgagacagctgcggaggttccctggcctccatggaggcacctcccctcttctctgctcctcacagacagcttccaggagattttaggaattactctgttcttaaatgggagaagcgctaatgcccaaatgctgagaaggagtaaagcggagaaaacagagaaaaacagtcacaaatagagagaagtaggcaggaaaggcgggaaagggaactgtcgataaaagagaggcaagcaggatgagaatgagagaaggaaagggggctggggagagggccaggactgtcacatccagcaggggctctccctgagtgccccacactcaccctactaccttctgtgcacatggaggatggaggcaacctgaaggtggtgagtgctcatattgtttttccggttgtgtgttcgtgggtgcactgtgtcaacgtcaacacacagtagggaaccaaattggttgtgccaaggtgtgggacggcagagg

SEQ ID NO: 2925 - DNA, 1245 bp, Artificial sequence
  DNA replication origin
gactcttaaggagcatgctgccttcaagcatctgtttaacaaagcacatcttgcaccgccctaaatccatttaaccctgagtggacacagcacatgtttcagagagcaccgggttgggggtaaggtcatagatcaacagcatcccaaggcagaagaattcttcttagtacagaacaaaatggagtctcctatgtctacttctttctacacagacacagcaacaatctgacttctctatcttttccccacatttcccccttttctattagacaaaaccaccatcgtcatcatggctcgttctcaatgagctgttgggtacacctcccagatggggtggcagccgggcagaggggctcctcacttcccacaaggggcggctgggcagaggcgccccccacctcccggacagggcagtggctgggcgggggctgccccccacctcccggacggggcggctgctgggcggagacgctcctcacttcccagacggggtggctgccgggcagaggggctcctcacttctcagacggggcggctgggcagagacgctcctcacctcccagacggggtcgtggctgggcagaggcactcctcacatcccagacagggcggcggggcagaggcgctccccacatctcagacaatgggtggccaggcagagatgctcctcacttcctagatgggatggcagccgggaagaggcactcttcacttcccagactgggcaccgggcagaggggctcctcacatcccagacgatgggtggccaggcagagacgctcctcacttcccagacggggtggcggccgggcagaggctgcaatctcagcactttgggaggccaaggcaggcggctgggaggtggaggttgtagcgagccgagatcacgccactgcactccagcctgggcaacattgagcactgagtgaaggagactccgtctgcagtctgcaatcccggcacctcgggaggccgaggctggcagatcactcacggttaggagctggagaccagcccagccaacacagcaaaaccccatctccaccaaaaaaaatacgaaaaccagtcaggcgtggcggcgcgcacctgcaatcgcaggcactcggcaggctgaggcaggagaatcaggcagggaggttgcagtgagcggagatggcagaagtacagtccagcttcggctcggcatcagagggagaccatggaaagagagggagagggagacagtgggcagagggagactgtggg

SEQ ID NO: 2926 - DNA, 1287 bp, Artificial sequence
  DNA replication origin
gaggcagagctggaacttgaacctcagcctttgaagtgtggtctattttgccacagttatcccctcctcatcctgtttctcttctcacttcaagtttcttggtttcttgccagtgaaggtttttagaggacgtgttgcccctgaggaaaattcctgctagtctggagtgtggctcatcgtatctggtcctgcacagcctctcgcctgtcaatcaaactggacactgagctttggactcagccaggaactaggcatataggatggggtgggggtgggtggtgagcaggaggattttgggataaggtttttgccctccaggtactcacaaccaaaatgtagagataggtacaccaaggaaagtgaagggttatctgcagacagacaccactttgtgcaaacaggtagtcagtcctcagaagtgggtgggaaagagggcttcgcggatctgggcaggggacgcttcttgagaaggtggaatttgagctgtgccttgaagatgggcatggtttagataatatgaggaaaggagagagccagaggttgggggtgggctctgggcaggaggggagagcagagcgtgcagggatgtggctgtgggaaaataccaagtaggctccacagaggacaagggacagcagacaggaatcctttagggctgggtgggaagaatggaaaaggaggttgggggcagattgtggaggccttgaaaactgggttaagttcttctggagactagtggctctcaactgtgttcagcacttggattctcagagatgccatcagggtgagctagggcccaggaatctgtggttgtaacaagcaccccactcagcgtgagtctgtggctggtggactgggggaccgctccggaagcactgcttgaagagaggggctgttgcatgttttaagtaggagtgggaggacagcaggcagggcaggttggagagaacaaaggggccagggaacctgaacaacagctgttgtctgttgtgatggtcctgtgagaaggagaagggactgcatatgaaggaaatgtctagagtactgaggaaagggcagaactgggaagctgcctgtcatgggggtggagagggcaagggagggaactcatttacgactccattgccaattccgtcattcattcctcaggcatttattgagcatctacttaggtgccaggacctagggacacagagatgaaaggctcagcccctgaccttaaggagttcacagaagatggtatatataaaccaataattataaccagtgtagcaagaacaatgtcag

SEQ ID NO: 2927 - DNA, 1763 bp, Artificial sequence
  DNA replication origin
ggacagtaggtcgaggccgagggagagagacgagggcaggtggagggaggcgcgggagacaagaggttgccaagagcccccggctctgcccaggccgtgcccacgccccgctgcggagcagcccgctcacccgcccgcctgttgttttccacagagaggacgccgtggcgcccgggtgcaaggccagcgggcgcggcagccgcgtcacccacctcctggggtacccgacgcagaacgtcagccgctccctgcgccgcaagtacgcgcctcccccctgcggcggccccgaggacgtggccctggcgccctgcaccgccgccgccgcctgcgaagcgggcccctccccggtctacgtcaaggtcaagagcgcggagccggctgactgcgccgaggggccggtgcagtgcaagaacggcctcttggtgtgagcgcgcgcgccgggccgggctgcgccccagccaggaggagggcgcggggctctctgtctgcagctggggacacgtcggggctggggacgacctcgctcgccccaggctgccaggcggctgggggtgaaggcatttccctaaggaaatgcgtagggaggcagagcctcctccccaaaagtgggaaggggcgggcgagggcggaggaaggcgatcctgagccttctccgcacccccgggaccgaaggcttgggggagagggagggaggaggaggctgagtgtcctagagcggctgaggccggaggcctggtgtccccagcctaagcagagggccccgggggccgggtgggtgggggtctgtctggacgaattgttctgtgtgtgaggtctgagctctgaggcagcagtgttagcacaataaagaaacattgagacgtgagtccgaagtggctgtccgcgttccacggaggttgggcacggggtggcgaaccctgcccagggccggggagggttgcttctgtcgctcgcctcgaccacgccccctctcctccctcctgcttagatccctggcagtcagagctggaaggggccatccagggcaactcctctgaacaacatacaaagtgcagataaaaggaaaacaaagacaaaaagaattagctcagaatatctacgaccgtaaaataaactgaggaaccgacaaagtgcaatacacttgccatttctaaatattcaaagttttcacatgtcaagattttctattgagaataatgtgctctgaaggtctagggagtctttgtatgttgctgaaagctaaaaggaaaccagtccttggagcacagaaggcacaggcatccggtgagacagaaacaaggacatgtgaaaataagactacaacctcttatattaaaaaactaagtgccacagttctagggtgctgggtgaagtgcaggaaggagggggaataatatttatatagcatatattatggaactcggagagtatggtaaatcccttcacctagatgctgctggtgttttagaacaattatttttgtggttcttttttttttttcatttgtctgcagttggtcaacttgtgcagagcccattctgcaggagatgtttgagaaataccaagtgaatgagtgtggcagcattactttatgctagaaaaaaaaagtttttagatattttacagttactgccttatgatggaatattctgtggtgagaatctaggcctttctgagatccagctccacgttcttacaccctgaagtagtcagccactcctagatagggattaattgagctatttagtatttaccagcacttg

SEQ ID NO: 2928 - DNA, 1378 bp, Artificial sequence
  DNA replication origin
tattagcactattcttattattagctcttcttaaataataatgtcagagttcttaccggcgcagtacaggggaaacgtgaaaaaacataggccctgccctccaggagcttacagtctagacaagacagacaggtgcgtaggcaggagggaaatggaaggcagggagcagaggtgaagactggggtggcagggggaggggaaagccatgagttgggtggcaggtcgacatgccgcagtcccagcactccgtggcgatggcgggcagggttggggtggggggcccagccggccggtggcaggcaggagtgaggtgggcagggcgccggttccctgccgcacagcagcatgcagcatgcatcaggttttacctgatctcactagccaagtcgccgcaggcccctccgccgaccccgccgccgttgccgtagccgaaggcaccgcgggcgccgccagccccggagcccccgcagcagcagcagacgagcccccagatgcctacggccaggcagcccagcgcgagcagagagcccaggacgatgccgatgatcacgcctatacgccgggagtctgtggagagaagtggaggcaggtcaggctttctcacagcctggcaggtgcctgagggaacagcaccaggaggtgccaggtcaggggttaatgggaaagagggagagggacccagggggtctcttagccctggaacacccagtggggaagatatggggagatgcaagttaacccctcgtgtcagcatgcttctcccagggcttccagctgctctgggctctagagctcagagtggaagctgtgctgggcgagcttgacccagctcaatagggtcaagatcgtacccactgatcttggcccacttgtaggaaaggggctgggagcccccactggcaaatggatggcagtggaaaggcagaagcagctgaggctccaaaccagagcccagcctcctccagttcaaccctcccaaccacccagccctcaagactgctgcacctacctgagaccttcacctccaccacacaaacactgtagcccacgttgttggccactgtgcactgatacagcccatcatctgctctggagatatccttcaacaccaggtccccattgttcaggcctgaaagtgaagtggagagaggcctggtctctgagagctcccaccccaacctcagtccctgtggggtgggggatgggacacccactctagaagaagggaaggcttatgcatgtgtgtacacccacacccacacacacacacacacactccactctccaggtgagtcaccttccccctgctgtgaaagagatgcaagaaaggacctctctcccagcagcaagacagggacaccattaattcactctgacc

SEQ ID NO: 2929 - DNA, 932 bp, Artificial sequence
  DNA replication origin
tggaaatgtggagcgcgctgagcggaggagttggggagaaagggatgccccaaccctctccccgttgccattacagcggggcctctgtggaccaaagattgtggatgtggtgtgggaaaaagcactggtgggccgggcgcggtggcttacgcctgtaatcccagcactttgggaggcagaggcgggcggatcatgaggtcaggagatcgagaccatcctggctaacacagtgaaaccccgcctctactaaaaatacaaaaaattagccgggcgtggtggcgggcgcctgtagtcccagctactcgggaggctgaggcaggagaatggcgtgaacccgggaggcggagcttgcagtgagccgagatcgcgccactgcactccagcctgggcgacacagcgagactccgtctcaaaaaaaaaaaaaaaaaaaaaaagcactggtgaggaggccagataatgggtcgtggtacctgttttgccactaactagcaaggtgactgtgggtaagtcatctaatgtgcccgagcctcaggtttttcttctgttagcagggctttgtatccctcagtagttagtcaataaatatttggcagtgaatgaatgaatgaataaatgagtgagtgagtgaggagggtctcaggtttgcaaggcccgggagagagattgggacaggactggcagcctggggtttgctgggatggggagggctgtcagggtactgagggctgagaaggccagcaaagcctgggaggaaccatgaaggggatgcctgggcttgagtgtgttggtcccagaggggaggggaagggcagatgataagtgttggagtcttgggttattggaactgacctagaatgtctggggcacaacaggtggcaaaggttgctacttggatgtacttgtggacagacttcaggcccaggggctgcatt

SEQ ID NO: 2930 - DNA, 847 bp, Artificial sequence
  DNA replication origin
ttctctcctgctgtggaactggtttgtcctgatcctgctggcttctctgcagactacactcatcaggggttggcttggcgcctcctgggcaatggggcaagagtaatcatagcaacctaggtgaagtcccaggggaaaactgtgaccctgggccaggctcctggggccgctgacagttagaaccccctcggcccatagtaagttctttaggttcgggttctgaccgaaaagtttggccaaagccaaagtggagagcagggcacgccagggcgggtcaatccttcagagccgcggttgggctggagcgtggagctgcaacggttggagcgacgggctccggttcctaagccaccagcacaaggcaactgcccgctggaggtgggaggggcggggccgggggcggggcctgagccgaagaacgcgggctagtggttgccaaggtaacgcgtcaacactagggccttggcggcgccgaggcggcagcagaagtccggagtcagggcgtgtggctgaggagatggtgagggagaacctcagatgggccccttgtgtcctgaattgggtgggggctctgagtggggaaagtgggggcctaggggaggtcacagttgggtctaggggtcaggagggcccaggagtaaggagaacacctctagaagaagcaagggagatcctgaggtgggttcaaaagaggaattagggatagcatcgataacgattggaaatgtggagcgcgctgagcggaggagttggggagaaagggatgccccaaccctctccccgttgccattacagcggggcctctgtggaccaaagattgtggatgtggtgtgggaaaaagcactgg

SEQ ID NO: 2931 - DNA, 1097 bp, Artificial sequence
  DNA replication origin
ccctgggggatacaggaggggtttctggagaacgaaggaaagatgaggtgggacagcgccgggtatccatgtaatctgggggtgcagcagggctgggctcctcaagcgggggccagtccccatccacattcatctctcggaagaagggcaggctcaggtactggagcaggggtccaggacctggcaagggactgggtggggctgctggagggggtgccacagggctgatgtcttcaatgcagaggggctggggtgccccactggggctgctgctgctacagtcaaaggaccgggccagacgctgggctggagtccgaggttctgcctgctcccggcctgacctttcctggggggccgccacagtgggccccatcacaaagcgcccgtctgggccccggcaaatgggctccagaggtaagggtccccggctagatggaggatccgggtgggggctgggagttccggcaggatccccccagagcagactctggcgcaggctggggactggggatccctggagcttcagcttcgccacgctgtcaggactgcctgagcccagagcagagctggggaaggacaggagatcagggtctgtggtaggggcaggtccccctcccaggagccagcgtcaggccttgagaggtttggtgaacaacagagcagagctaggaagaacaagcgaggaaaggaccaacaaggtggaggggtggagggaaggcacaggccatactggaacggcctcaggctggggccactgcacaccccttcttaccctctcccacttttgttcctccccaacacccaacatccccctggtaaagatgcaaaaaaggaagcagaagatactggcacgtacaatggaaaggcagaagaaagccaaggaggtggaggcacttacggtgcagctgacttcccggtcggagagaagataagaggtggatctggaagggcatgagaatagtaggtgacacaggcaaaaatcaaggccctctaggcggagactctctcacccaacaccaggcgcccaaccccatccggctgggaaaagcgtaggcaggaccagatgcaggactaagagaatgcacctggatcacaca

SEQ ID NO: 2932 - DNA, 869 bp, Artificial sequence
  DNA replication origin
gctttgcccaagggtgccaatgtctcctgggagcctggctttgatggtggttatctgcagagattcagtgtctggtacaccccactgtgagtgacctgctcctgccatttctctgtgccaatcttgcctcctttcctctcctccttgaacctatctggccttctgccctttcttctgtccctctatccctcaccagtcctggctctgcttccctgtttccagattctgaggcattcagggccaaggtcctgagaccttggatggttgagcagaggggaggtggttagatctctggaccccagatcttctggtcttcctagctcacgaggtgccccccatgtcctcatgtctcccagggccaagcgtcctgaccgaatgcaccatgactgggtgtccttggcagtgcctgtgggggctgctcacctcctagtgccagggctgcagccccacacccagtaccagttcagcgtgctagctcagaacaagctggggagtggtcccttcagcgaaatcgtcttgtctgctccggaaggtgagaagcttctcgtcccagaacagcagagacaaggatggggaagggctgctgggagagctgggatatgggaggccctgggtgggaaggggcagaggtgctggccagcttggggtccagaggggtgtgtggaagatgatttgagcttgtcttcaggggttctgggagaagagttgggcactgggagttgtggaaggccaggggaggggcgctgggaatccttgctctgacctgcctttctgtcccacgcagggcttcctaccacgccagctgcacccgggcttcccccaacagagataccgcctcccctgtcccctccgcggggtctggtggcagt

SEQ ID NO: 2933 - DNA, 1106 bp, Artificial sequence
  DNA replication origin
ggcttgcaggctcccccagcttttatagagcggcccaaggaagaatatttccaagaagtagggcgggagctgctcatcccctgctccgcccaaggggaccctcctcctgttgtctcttggaccaaggtaaggctcctgagcccgctctgcctgtacccacgcccactacacccctgcctctcgtgccccagccattttgtgggagggagggtgtgggaaggagaaggctgtcagaggcagggtggggaggaactggagctgcctggagagatgaggggcgcctttggtgaggggtggctgcgtgtgtcctcagggctcaccagtggttctgtaggtgggccgggggctgcaaggccaggcccaggtggacagcaacagcagcctcatcctgcgaccattgaccaaggaggcccacgggcactgggaatgcagtgccagcaatgctgtggcccgagtggccacctccacgaacgtctacgtgctgggttagtggctggagagagggccaggggctgggagaaactacttgggaatcgtttttggaggcccagaaagaggatcatgggtgtgggacccctgggatgatgatgggtgaaggtcagtggccctggggcccctgctactctgtacactccctcaggccctgaccaccatccctccattcccccctgcctaggcactagccctcatgttgtcaccaatgtgtccgtggtggctttgcccaagggtgccaatgtctcctgggagcctggctttgatggtggttatctgcagagattcagtgtctggtacaccccactgtgagtgacctgctcctgccatttctctgtgccaatcttgcctcctttcctctcctccttgaacctatctggccttctgccctttcttctgtccctctatccctcaccagtcctggctctgcttccctgtttccagattctgaggcattcagggccaaggtcctgagaccttggatggttgagcagaggggaggtggttagatctctggaccccagatcttctggtcttcctagctcacgaggtgccccccatgtcctcatgtctcccagggccaagcgtcctgaccgaatgcaccatgactgggt

SEQ ID NO: 2934 - DNA, 1742 bp, Artificial sequence
  DNA replication origin
aggagatcggatgagcccgggacctgggtggatcccctgggaggagggcggggagtcatgctccccgcctggttctcctacccccaggctcagatttcaaccctcgctgccgcctctgtggcgcgcccgttcggggagcggagagggtcgcccgtaggttccgaaagaaggacggcgtaccagtagcctggcaaggggccagctcccgcagccctggagcgcgagccggaccctgctgcccctcttgctggcggcgggaagcggcccaccggcctttccacgcttggctgtgcagaggtccacgagggggcgacctgagcccacgtgcagccgagctcttccctcctgaaactacaactcccaggccgctcaggggtcccgcccgcctcgccgtgcctctggcggctccaattggccgccgcgggagggggattggcggtctccagggcgacgggaggcgctcggggcatccgaggcggggaggcgggtccgccccctattgtgtagcggcgagagtggagccgagcggtgcggagcaggtgagggagggggcgtactggaggtatagaagtggtggtgctggtagtgcggagttatgggggacaggagaaagcggggagttctagagagaagtggaattcgttgcaggagtagaactaggggagttctggggagtgaagtggaattcttggcgggtgggtgggagttcccggagaactgcaggagttctggaggcaatgtgggggagttcttggtgggttctaagagaaaggaggagttccaggggaccagagaatgcgagggagaaaggaattgttgggggtggggtatcagaattgtattgtgggctgatgcaggagaatcccagggaggggaattatcgggaggagaggatggggagaagtggctggggggtggggagaccagaagggagttctttatagtgcaggagacctgctgcaattggagatcaggtgcgagaagctggaattgtggggggattgtgcgtagtagcgataactgggaagggagtaatgggaggacgagggagtggtgtgtggggagactagaagggtgaggaaatagtggaggccgggggagttggaaagatattaagagactgggaggaattctagggatgcctagttactcagagtctcggaaaacaaccaggagagaactagggggttcctatatacttggaaaaaggtttttcagggaagtgtgggagagctgcctggaggcagtgggaaacagggggcttggttgctagtgaattgccagaagttagacatacaggatcattaagtagaggcaaggatcagactctgtggaggatgttttatagtctgtcctgaactttgcggccaagagtgggttggaggactcagagcagagtccacttggcagtgccaggccctggcatggaccctctggctctctgagactgccctaggatctgtggggctgtcagaagctcctaccctccatgccccagggttaattttgtacacttcagggactcacaggcttttttttggaccatgcctctggggttggggaagaaagagcttgacaaaccctggcaccccgaagatattggaggggagtgagtgggagggatttgggtgaggtccttgggtggtggtgcctggcagggggagggctgcttggcagtatcgtgaggaagtggcgccagctgccagccccgggacctgtccagacctggaggatgctgcctg

SEQ ID NO: 2935 - DNA, 1132 bp, Artificial sequence
  DNA replication origin
gcagcctaaagcagtcccagtggggagaaaaaaaattcaaacaccacagcaagagcagactggccagacatctttagtcagaatttgtattggtaagcaacagaagcaggctttaagcactggcctctttggggtccaaatctgcaccagcttcttccccatctgcctcaccctgcctggggcactcactggaattaaacttcaagacaccagaacccaccctcactttttcccagtgttgtccttctacccattcctgggttcagctctcctcccccaaatcaggaagttccatccttcatctgttccctaacacaggtgccctgggttagttctgatgagaggaggaatggaatgggaaggggcgtctccatctggagggtgagtttatagaacccaatctgcccttctcactctagcagaagtggccctgctcctttccttctggaaatcccagtgcgaaacagctggggtgagggtgaggggccatgaggagggatgtcttaaaatgggagccactcagaatagaaggaagagattgggtgggcaggggtctggagcacaccaggctttggtggctccccggtttaagctgccagtatctgtttttctccccatgtgggaactagcgatcatgggtgtcactatgtgattgtcactgtatggggagtgggggaggggctggggatgggagtaacctgtccatatggggaggagggcgcactgtctgttgtgcctgtgtatggggtgcctggttatgtgtggttgtcactgtattaactagaggagcagggatgcaactgctggtctgcccagtgggagggggcatcgggaaagccccttccttagatgaaagggctgaggtgaccagcctggctagtttcctcgtggggagcccttcccaggaggctccatttgggactgcccaaggcgggaggcaggggaacaagacggtggtaccgctgaggccaggcagggtagggactgaggatctgggaccccgatgtctctggagagttagggggacaggacccggccggggcggcagaactccttcatcagggccagggtcttaccttgggtccgaggtggagtggccccttggatgggccgcggggcagcgggacagatg

SEQ ID NO: 2936 - DNA, 949 bp, Artificial sequence
  DNA replication origin
ggggagcccttcccaggaggctccatttgggactgcccaaggcgggaggcaggggaacaagacggtggtaccgctgaggccaggcagggtagggactgaggatctgggaccccgatgtctctggagagttagggggacaggacccggccggggcggcagaactccttcatcagggccagggtcttaccttgggtccgaggtggagtggccccttggatgggccgcggggcagcgggacagatggacggacggggcgggcaggagttaggagcagagctgtgcgacgggccgggccaggactcttaaacccggagctgggatcagataagggcttgtccgggggccggggccggggtcgggccggccgggggcagagctgggccgggccgggccgccccctccctccgcagcgccggagccaaactttgtgtgaatggaggggcccggaggggggccgggcaggcgggggcggggggctccgaacagaccaatgggagagtggagcgccaggctcgagccgccgagattggagggtcttgggcagggggcggggcgtgcggggcaaggaagcggagacccagacagctgcaggcgcagagagaaatatccaaagacagagacccagacagacccggggagaaagagagatgaagagacgatatgcgaaacgataggagctgagctggcagggtgacaggggaagggagaaggaagaaaagggaggcggtcctgtcagcgatgggttacgagagctggagccggggggcgggactgggaccgagttaacgaagtggaaatgaattcaggaccggcccagtggccctgcaggcagcgccgaaggcggcgcctggaagtgagattggggcggagtaggcctgggctccctgagccacaggactgtatctttgggcacaattcccgtgttgttcaccgtctcctaagtccccgg

SEQ ID NO: 2937 - DNA, 1619 bp, Artificial sequence
  DNA replication origin
ttactcttcctgaggacatctgagcttcagggaaggaaaaggaagcccattgttgggggcaggggaaaccctaatcttccattgccatggggctcttggaccctgtgtcccctgactccatggacaataaatgcagggggtgcccctaagctcaaagccatttcattttgatttctcttcctaccttctctaccccaagacacacaaacacacacacacacaccctctccagagtgctgactgcagaggacctcaccccagaacataagatgctggagtgctaggtttagagtcacatacccaggcagtttctccccaggacctggtcaaccatccaggccatctgtggttcctatggcacactcctccatcccccacccactagccagcccacgtttccgtggagtgggaggagaggatcattcccaggaaagagaagggaaggtggaagagtcccaaatcctattctaaacctttccctgtatggtccatatctcctagaggaccctgggtgctttggggaagggctctggacctctctcagagcagattgcagctcagagagctcctcagaggcaagcatgtgaagaaaaatcaggtgggcttcgcttggaatgtgggctttggggcatatggcaggtgggggcggggctggtgttaggatagtccatgggaagtaagaggctgggggaaaatataactagagggagtggggaaataaatgtgggtgcttagtgcttcacctgatctgattccatgtctctcatgaagaataggatcccagagggatacgagcctaactctttataactctgggcttcctttcccaggcttctgtgttgggatcttccagttcccctccccatttgcaggctgtctccactaggagaaaaaacccaagggaaatgaggctggcccaagagcagcagtgatcgtgggtaggtctcagggaggatttctagtgggaatttcctaatgttccacccttgtgcactggagggtttccactgactttccacagctttcatttctttctcgtttgtaagcatgttgaggggagggaatggagcggagtgagtgaggtccaaggagggaagaatgagaaagactgtgtatcagtcttggggtgaacttcaaaacagcctgcgaggagagccattggtggctgcactggctacagctggggaagggatggtggaagtccttagggcagggagggctccattacccgcctgcccccctccccaaaaagcccccagtctattgatttcaggaaatcactagggggatctgggcctgggtctttggccccggggctgcccctgaggtgctgcacaccccagctggaggtgatggcaccaaaatatctggtacctccttcccctgaaaatcatcgtggaacttgcacagttctatccagttcaggtacatcattccatttgaccctcacaactttctgagcctggggggcagttagggctgaatgtgttattcccagaaatagaggccaggcaacacgaagggactcgcccagggccccccagggctcggtgctggccctgatgccccgtgcctccccatctcccgaggggccactcattcggcaaacctttattaag

SEQ ID NO: 2938 - DNA, 976 bp, Artificial sequence
  DNA replication origin
ggccttctgcggcgttgctcggttccactcccgcctccgacccctgtctcacctcactgtctcatcctccaccagcccctccatccatcctccccagctcccctggcccctagtctcgcccctgccttcctcggtcccgcccaccctctgccaaccccgctcccctccccaggcctgctcgcacccgtggcttccaccatgccctcgaggataacgacgatctcgaagtcgtccctctcgagggcacggcgcgacgcctcccagaaggggctggcggcgtcgatctcgtggctgataaccagcggcgagacgaggaagaggcggtcgtctcccgtgtcgaagcccacgctgaggtcggtctggtgcagcgggatgaactcgccctccagcgtctggcgcgagcggatgagcttggcgcggatggaggcctccactatgtgtgaggagcgcaagtcgcccacgcggaacatgaggcagaggcgcccgtcgcgcagcgacaccacggcgtgcgaggagaagacgagcgtggctgcgcgcttgttgggctgcgagatcttgacgaacatgcagcccaccatgaaggcgttcaccatggagcccaggatggcctgcagcagcagcagcacgatgccctcggggcactggtcggtgatgacgcggtgcccgtagccgatggtggtctcggtctcgatggagaagaggaaggcggccacgaagccgttgaggttgttgacgcacggcgtccacgcggtgtcctccaggtgctccaggtcgccgcggccgtaggcgatcagccaccagatggcgccgaagaagagccaggtgagcgcgtaggccaggacgaagaacaacaggctgaggcgccactgcaggtccaccagcgtggtgaacaggtccgtcaggtagcggtatgtctcgcgcacgttgccctgctgcacgttgcaccggccatccttctccacgtagcgctggcggc

SEQ ID NO: 2939 - DNA, 1702 bp, Artificial sequence
  DNA replication origin
caccgcgtcatcaccgaccagtgccccgagggcatcgtgctgctgctgctgcaggccatcctgggctccatggtgaacgccttcatggtgggctgcatgttcgtcaagatctcgcagcccaacaagcgcgcagccacgctcgtcttctcctcgcacgccgtggtgtcgctgcgcgacgggcgcctctgcctcatgttccgcgtgggcgacttgcgctcctcacacatagtggaggcctccatccgcgccaagctcatccgctcgcgccagacgctggagggcgagttcatcccgctgcaccagaccgacctcagcgtgggcttcgacacgggagacgaccgcctcttcctcgtctcgccgctggttatcagccacgagatcgacgccgccagccccttctgggaggcgtcgcgccgtgccctcgagagggacgacttcgagatcgtcgttatcctcgagggcatggtggaagccacgggtgcgagcaggcctggggaggggagcggggttggcagagggtgggcgggaccgaggaaggcaggggcgagactaggggccaggggagctggggaggatggatggaggggctggtggaggatgagacagtgaggtgagacaggggtcggaggcgggagtggaaccgagcaacgccgcagaaggccaagagaaagcttggaggaattctccgaaatggcactggcgtggggccctgggcccagaggaatgtgtcacttggaatagggacagtaataatagctagtgctcgcccagtattcaccctgtgtcatgcgcagttccaaagcactttctacctctgagtcgatttaatcctaacaagaaccctctgaaggtaacttcttgttattgtgctcactttttagagatgagattgctccaatgagaaattaaggaagttgtccactttcctaagccaataagtggccatgcctggattggacacaggcaatgtggcttcaatgtttagtggtcccgagttggaaggaggggttaggttcaggggttttctcactgcagtcaggttcaggcccctggaatttgacggtgaaggttttccattgcctgagttatttctaggccggatcttgaggggagtttaatacctagtctcacttgtacctcggtttcccaattcatccatttccactgacaagggatatagatgatgttaccttttctagctcttttccaaaaggaactggcaactcatctgtgatgtcaataagtccaacccagacctacacagtgaaggctttgggagcaggtgaaaaaagaccagtgttacaggagtcgcaaaggaggtcacttaggacttgagatctagaggatagatgaggatgaggaaactgcgggtggaggaccaaaggcccactagggggcgccgcagtccctcctctgacgccagagctgctgatgctccctgccggcttcgctgacaagctggtgccttcagatcctttccctggcccctttaggctgagactccgcttcacaccccaaccccagctccgcatcactgttcccattcctgcttcaccccgactctttcctcttcccccactcaccccgttccctttcctctctctccagctgtcactccttttctgccagtatctcaggcaggcccctcaccctccagggaagttgctgcccggccctcttttctctttgtacccccagccct

SEQ ID NO: 2940 - DNA, 847 bp, Artificial sequence
  DNA replication origin
agaagggagggtgctgggagtagggttgtggaatgagaagaggagagggaagcctggagctgagattccccctgaccggtgcccctcctcccaggaatgacatgccaagctcggagctcctacctggtagacgaggtgctgtggggccaccgcttcacgtcagtgctgactctggaggacggcttctacgaagtggactatgccagctttcacgagacttttgaggtgcccacaccttcgtgcagtgctcgagagctggcagaggctgccgcccgccttgatgcccatctctactggtccatccccagccggctggatgagaaggtggaggaggagggggcgggggagggggcgggtggggaagctggggctgacaaggagcagaatggctgcctgccacccccagagagtgagtccaaggtgtgaccagcttcctccagacccctgtggcagaccgggggccagacacagatacatggggaactgcatatcggaggtggtggaggaggaggaggaggaggaaggcaaagcccctggaaatgtgctaaagttggaaagtccccgtcccccagaacctcaagtctagaaaccagtatggaagggaggggtcctgatttcagggaaatggagggtggggccgggtgaaaatgccagtctgtgtttgaccttcacatttgttcatgagtggatggatggacagaatgatggacttttgggggttggatgggaagatggtagcagataaagacagctgacagatacatagatggaccagtagacaactggtccactcagggctgccactaacctgtagaacacccctgtgcaaattttaaaaaggaaccct

SEQ ID NO: 2941 - DNA, 610 bp, Artificial sequence
  DNA replication origin
ggaaggggaggcacgtctcccattctgggtagtgggaggtcaaataaattaaaggaagagtggacagagggagagggtgtccaggcaaccagaggagggcttggagctgggccggaagacagtcgacacctgcaagacctgaaaagggtgcccggtgtgggctaaggacagagagccctgagtggggctccctcgcggcctccaccccttaacagggccctgtggatctgagctgcctactcctcctccaggtggggcctgggagggagcagcttggttcaggacttgggggtgggaagcccaatgaaaacaaggttggggggttcttttccctcacctggggagtaagggatcaccgttttcgaagcctcttcatgaagcagcaagtgatggtaccaaggacagtggcaccagtgactagggccacccctgtacccaccagcagaggcacaaatagggtgtccagggctgggggagagaggatgactgttcagagaggatgccatcatcctccacccatacacttgcctctgcgctttccccatcaagttctctgaacccaccttctccattcacagacacccccatccctgcccacagcctgccccct

SEQ ID NO: 2942 - DNA, 1177 bp, Artificial sequence
  DNA replication origin
ggattcggcagctccagttcagctcgctcggcgcacccacgcctcgctgccccgcttcctgccctcaacctgggcatgcgccccccacccttccggccccccagaacccgcgccatcccccggagcctccccagagctggccgcgcaggatgggcgccctcaggcccacgctgctgccgccttcgctgccgctgctgctgctgctaatgctaggtaagccaggcccccgttccggttcccggccctgccgggcaggtgcctgccatccagcacccccctagcatttcggggctcctcacatcctcctccgtcaggggtacctccagcctccccggggtcggcgtccagctgcgctttgtggctgtccgccgagccagtcttgggaagagtgcaggctccccagctctaagccagggactggggcgtagagaggacccactaaggtgctgccccaggcactgctcggcctcccggggcaggccacacatctcagctagcatacccacgtactggggtcgctgcaccaaatgctgcgactcctttctgccccacactcagctccaggcctggccttgggtgcccgccctacgagggcagtgcctgcccagcttcataattgccccagagttggctggaggcccagaggccagttctgcccacgatctttgaagtaagtctctcccagttgcgctccacgcacttcatcaactgggggcagttccctctctcacccccatctccaccctgggttgggtccctctttgcccttcttcctgtctcccaaatggcacttggctctgcagccacccatcagttttcacaccgcttagttccagcttccttgcctcaggagaaaccaggttccatggagactgatcctgggatctccaagcaccttgtgcctgctgtggtgggtgttcatggtggggtgttctgggccaatcttgcatggatgcatggggataatgacagtggaattgtttttggcctgaactggagggctccctgtaggaggtggtctggggaagagtatggcatggagacagtgaaactgccagtacagatgttgatgaggctgaagcccttgaaatgagagtgaagcgtgggggtggggatggtgacttcagagctgctgtcgtcaaggcagaggctgaaggtagccccagctgcctgtttc

SEQ ID NO: 2943 - DNA, 1495 bp, Artificial sequence
  DNA replication origin
ttcaatgttgaccttaagcttaaagagtctataagataccccaggaaagacagatgttccagtgaacattggagtatggtttagagctcatgaaagatggtcaggactggagatttgaatctcattagcacaagggtgcaaactaaaggcttatagtatgttgtattatattgcccagaaagagcagacaggtcaagtgaagggaggagaatgaaatcctgtgccaaaccaacatttaggcacaagaggaaccagtgaggaggggagagggtggtaggaaccaatgccatttaatcttcatgaccacctagaaaggcaggaatcatctctgcattgtgctgagacctcagtgcttcacttgcctaaggtgctgtagctggagaaggtcggtgtttaaacttgagcccctcattcaactccaaagccactgcttcttccatcctactaggctgccaccctgagaggctgggaaagagcatgcagaggagtggagggaaaacaggaatggaggagtatgtggaagccaggggagggcagggtttcaaggagaagaggtcaacggtgccaaatgcctcagaggggtcaagtaggatgaggacggcaaagacacttttcatttttcaattgagaggcccctgtggcctttgggtggcagtttcagtgaagtggtgggagtggaagataaggcagtggggaccatggaggcttccttttcagtatccataggacttgccctgcaagcccacacatgcaaatgctatcctaacccaactctgctcacctcatagcctcttagcccatcagatgccagccaccctccccatcccaactccattcactctgcaacaatagcaatgaacattatggtgaaggtagggaccaccgtgctcaccagggaggatgtcagaggcagatgctcaaggtggtggaggcaggggtgttgtctccatcttattcctgttctgtccattacattgctgcagtgatcaatatttgacactaagaacctcatgtcctatatccaggtccctgtgcatttgagcaaattgtagcccctctctaagccttggtttcctcatgtgtaaaataaaggagttgttaaagggtccttccagctctgactgccttgaatcccatgaaatccaaaatcctaaaatatctcctaaataatcctaaagatttgaggcttctcttccaggggatcctcatgaacttgttactctgttatggatactttcctgcacttaagcaaactatctctctctaaccctctgaacataactcaacttgccattatctttcctcctcacccacccactcaaattcacacagacacacacaaatccccacctcacatacacacacatcccacacacacacatagacacacacaatccccaccccccacacacacatctcacacacacgcacacatacacaaatccccaccccacatacacacacacacacataccccacacacacacacacatcc

SEQ ID NO: 2944 - DNA, 1892 bp, Artificial sequence
  DNA replication origin
aacttgcctggggttgggtttaacatgagaggggtgttagatcatctaaagcccctcttcagctctaaatctatggagtgggaggagccgggggggggggcaggtagggagtgccagcacgtaggaagggaccaggtcagccatcgattctgggagaggaaactggaggacagcttcaggacatgaggcagaaccaatacagctgcggggaggagaaccttgctgtcgaaggtggcgaagaaggggatgtagggatgaaactcctcagctgcatcctcgaaggctttgtaatctggggggtggaatgcagagtcagtctctggggaaaccagggtctgcccgggaatcatcccccactatcgtccccaattctttgcaggcagggttcattttgagacccaccccttctagttcttcgagagtgaggggaaggtggaatactggaggtgcttgtctgggaacccccagagtacagggaggtcagagctgttgatggtgctgaccacggctggaggaagaggtgggaagtgcagaggtagaggctgagacactgggtgatgtggggaggtgggaggacaggtgagatggggatccagagaggggcacagtggagtctgagggttacccacgctctgagtctttgctcttgaagtagccaatgagtttgatctcatcctcaatattctcaaacgcctgcagctctcgttcaccttcaatcaattccacagggtcctctaggacctgaaagaggaggacattgcaggaagagagtttctatcctcaagtagaaccagaaagggacctagggaaaagaaggctggggaactggaggagggggctagatgttgacagtgtgtgggtgtgtgtgtgggggattgcatgtgcgtgtgtgtgtatagtgtgtgatgtgtgcagtgtgtggtgtgcatgtgtggtgtgtgtgtgcatgtgatatatatgtatggtgggtgtgtggtatgtatatgatgtgtgtgtgatgtgtgtggatggtatgagtgtggtgtgcatgtggtgcatatgtgtagtgttcggtatgtaggtgatgtgtggcctactgtgtacatgtgtggcatgtgtgtgatgtgtgtgaatgtgtggtgtgtgtacgtgtggagtgtgcatgtggtgtgtgcatgtgtgtagtgtgtgcatgtgtggtgtgcaggtatgtatgtgcatgtggtgtgtgtgtgcgcatgtacggtgtgtgtgcatgtgatatatctggtgggtgtgtggcatgtatatgttgtgtgtggtgtgtatggatgggtgtgtgtggtgtgtgttgtgtgtgtggtgtgcatgtggtgcatatgcatagtgtgtggtatctaggtgatgtgtggcctattgtgtgcatgtgtggcatatgtgtgatgtgtgtgcatgtgtgtagtgtgtgtgtacatgtgtggcgtgtgtggtgtgtgcatttgcgtggcatggatgtggtgtgtgtgcatgtgtggtgtgtgtttgttgtgtatgtgcatgtggtgtgtgatgtgtgtggagtgtgtggtgtgcatgtggtgtgtgtgtgcatgtgatatgtgtgtgatgggtgtgtggtatgtatatgatgtgtgtgtggtgtgtgtagtgtgtgtggtgtgcatgtggtgcctatgtgtagtgtgtggtgtgtaggtgatttgtgaactattgtgtgcatgtgcatgcatatgtgtggtgtgtatgcaggtggtgtgtgtgtgtatgtatggtgtgtgtgcgtgtggtgtatgtatggtgtgtgtgcgtgtggtgtatgtgtgtgtgtgtggtgtgtgtgtgcagtgtcaggttggggttggtagggactagggggcaggcagtggagttttcaagcaaggccgtcaggtcca

SEQ ID NO: 2945 - DNA, 999 bp, Artificial sequence
  DNA replication origin
cgcctccagcacacgctcggcgctcgggacgcaccgaccgagggacggaccccgtgaggcctgacacaaagtggactcgtccggggtccccacactccccgtctggcccccggtgtcccagatcgttgcccctccaagcctagaccccgaaatctgccccttccccgcgacatgtctcctctccgcccctctcaccgcctctggagctgagcgctcagggcgcgggcactcctgagtccccggttcctaagcagcgtccggaacctcctcctcggctcccgccgccgccgccgccgcttctgccgccgccgccgcctcttccgcccgcggagccggagcccgagcccagcgccgctcactccacccggctggccggtgatgtcagagccggggaggggcggggggcggggaatggcgggaggagggggagggatggagaggcaggagggggcgggggaccgaggggctggggttctggaagactcctaggatgggggacagaattgggcggagggctggagcggagacggtctcttccccctgaactgcgaaacaattctcatatttaattcttacccagtagggcaccctcctccccttttgacctttggatgaccacggtgcctaggacccctgggaggcacagagtaggtttggtttagggggttggaaagcctttgggggctggattctcttagctgctggctttaatatttgtaaaaacttcttgccttgccttaagggtcaggggcgcagtggaaaatgactgatcagacttatccacattgggagtgaggggttggggccacatggggacttgaggagccctggatcttctctttccaggatgatgccttcaggccctcttgcgtgcctctcacctttcccaaacatgccccactcctgccttccccctaccatgatgtaattttattttctggggagaaaaagagcagcagtgagctcagcatgcaaatatagacaacttgcaaagccaca

SEQ ID NO: 2946 - DNA, 812 bp, Artificial sequence
  DNA replication origin
tgagtacaactggaagggaaagcgcagcaggagacaagaagaccctgccccagtggaggaaactctggggccaagccctcagctggaaaagggggcaggattgggggttatacttccctgctttcatatggaaggagagtttgtaaatattacagatcctgcgggaggaaagagtgcatctgtgtgtgtgtctgtgtgtgtgtgtgtgtgtgtgtgtcgggaggagttcagatttagggctttgaatctaaaacagatctacagaggaggtaggcgggaagagattaatgtgtgtaacacactcacccacaaagacttgggggcagtgggtaggagctttctaagagagtgaaagatacaaggaggcccctaagagagatgggggtaggaatgttaaagtggcagaggagaaatgtgtgtgtgctcggatcttatggatgctaatccccgggttgtgggcacagctctggaggaggcagtggctgggtatctgtgggtgtgtttggatgttctggtaatggaggtgtatgtgccagcactggatatatggctgtgggtgcactggctgtgagtatctgtcatgtgtgtgtttgtatgtgtctaaaccagccaagagcatgtgtaagaaggcatataaccacaggctcacatccagaggggtgaggggagcctacagaatggagaaagagagctggagttgggagacagaaagagactaaggctgcaaatgaggcatggggggcgagggggaggagagcatacagtccacaactatagaaggctgtagcctcatctcatctgttactatagca

SEQ ID NO: 2947 - DNA, 1260 bp, Artificial sequence
  DNA replication origin
cgcagaatctcaatcttggagagcttcttgtcggggggcagcgtaggcagcagcttgcgcagctcggcgaaggccaggttgaaggcttccacgcggatgcgttctcgcgtggcgtgggccgtgcggtacttggctgtggcgcggcgccggcgccggcgctcctcgcggctcagatgctgcaggtctttccggccaggctctcccggctctgggcctcgggcctggccccctcccggacccccaggcccggcaccatcagggcccgccccgcccccacagtcactgaagcccgactcagtctctgagtgggtgggcggcaggtccagctccatggtgtctgagttgagcatcatgatggaagccccctgccctgtgagatcaggatcccctccccacccctccctctgggagcttgaaagctggtggtgggagggggaggaagggggaggaagggtcgtggggtctgccactgagctctagaagtcactgccacttcagggttccatggtcagggtgccagtctgaagcctgaaaaagagaagagagaagtgatagcagcggagggaggagggaatgctcagctcagaggtgggaaagcaggtttgagatgggctgggaggggtaaggaactgtgaatgtgagggaagaacagcagaaactggtgggggtcggggggtggggagaggccgagagacagagaggcaggtggacagggtgaaaggaagaggaggacgaaaggtagtaagaagggaagagaaaacgagtaacaggaaaggaacagaagtgatgagaaggatacaccaggcaggttaaaactgagcaagaggattaaagacttaaaaccataaaactcctagaagaaaacatagggagagaccttcatgatgttggactcagcagtgatttcttggaaatgacaccaaaagcacaggcaacaaaaagcaaaaatagaaaaaacgggaccacatcagactttaatttattgacgaacataatcaacagagtgaaaaggcaatctatggaatgggagaaaatatttgcaaattatatatctgataaggggttaatatccagaacatataaataaatcctacaactcaacaacagcaaaaaatcaaataacccaatttaaaaatgggcaaaggagggattgggaggggcgtgaaatgagaaattacagaatgggtaccgtgtatgttattcaggtgatggacatcctaagagccctgacttgaccattatgcaatctatgcatgtaac

SEQ ID NO: 2948 - DNA, 1613 bp, Artificial sequence
  DNA replication origin
gcagcggtctgggacggagcagggggtgaccagactcaagaacccccccctcaacatcccccatcgcgcgcgctgcctgtccaggagcgccgagttcggagcgacccggagcgctgcggatacaaaggcgacgggccgagcggggcgcccgcggagcccacccggcagttcgcagcggcgggtgagtgccgggccgcgggggcgcgggcaaagtttgaaaaaaaaagaagaaagaaagagagagaaaaaaagaaatggaaaaggaggaaaatcatgcaaggggccagggggtgcccgaccccagagcgagcggggtggcttatgggggaaggggggctggactccgggcaacccccttccggtccgcttccccactgcacagcggagtaccccccccaactttggggaggggaaggggctcgtggggagggggcggagcccaggcctggagagccggggactttcctgggcccgggcgggggccttaatgatcccaggggagccggttgaagccggagacggggagcttgtgttggaggtggggggagaggcgtggaaggatcggagtctggaggtattggaagccaagggtgttttggggtgcatacacccctcaggagcgtggggagggacggaggcaggtatgcgttaagggtgtagagtggagtcaggggggcgggttgggcagagtagatagggtgtatgtacagaccgaggatggggctggaggcggtagactgtgtataggggccgaggggacaggcgctggcatccctctccccactcatatttacccatctgggggactgtgggctctgcgttagtgagttttgaagggttggtggaggatccgtgtgcatgattctttgttttggtgtgtgtgcacgccttgacgtgctgcatgttcctgcaggtgggcccctggtttggatgtgtaggtgtttttctgtgcttgagtgtgtgtgcacccagggagcggctgaccatgcatctgctgtgtgtttggatatgtgtttatatgtatacttaggggagggcgtgtatgtctatgtgtgtgtactgggagaggggttcacgggaaagaggtgtgtaggtactgaggaaggtgggtgtgtaagagcagaatggagtgtatgtggataggtgtgtgtgcacctgtgtactgggaaggggtgtgaatctgtgttctcttgtgtgtaacctgtgttgatgggtatcaatgtgtgtgcctgccttagctggtatgtatgtttctgagtgtgtgtcgggggtacctctagactctgcaggcagattttcctggcaaaaatcccgaaaagaaggctgtctgcaggattttgagacttcgtggatggcctcgcctgggtttaggggtagtaccttaagtatctgagacctatgggtgggagggaatgagttgtcttatgaagtgcctgtttttgggggatgggtttttctggaagagggcgtgtgttgtggggaatagggaacaaggggtctggttgtagtcctagaggaatttggaagattggcggggtcagggagaagaataagaggaacttcctcccccatcgtcataggctgggttccagcgcttggagaagctacactct

SEQ ID NO: 2949 - DNA, 1101 bp, Artificial sequence
  DNA replication origin
ctctattccacaaaaccgtcatcatcatcatggcccgctctcaatgagctgttgggcacacctcccagacggggtggcggcggggcagaggggctcctcacttcctagacggggcggccgggcagaggcgcccccccaccttccacacagggcggcggctgggcggaggcaccccccacctcccggacggggcggctggccgggcaggggctgccccccacctcccggacggggcggctggcagggcgggggctgaccccacctcccggatggggtggctggctgggcgggggctgccccccacctcccggacggagtggctgccgggcggagggggcttctcactttccagacggggcggctgccgggcagaggggctcctcacctctcagatggggcggccgggcagagacgctcctcacctcccagacagggtggcagccgggcagagaggctcctcagttcccagacggggtcgcagccgggcagaggcgctccccacatcccagacgatgggcggccgggcagagaggctcctcacttcccagactgggcggctgggcagaggggctcctcacatcccagacgatgggcagccaggcagagacgctcctcacctctcagacagggtggcggccgggcagaggctgcaatctcggcactttgggaggccgaggcaggcggctgggaggtggaggttgtagcgagccgagatcaccccactgcactccagcctgggcaacactgagcactgagtgagcgagactccgtctgcagtcccagcacctcgggaggctgaggcgggcagatcactcacggtcaagagctggagaccagcccgtccaacagggcgaaaccccatctccaccaaaaaatacaaaaaccagtcaggcctggcggcgcgcgcccgcaatcccaggcactgggcaggctgaggcaggagaaaaaggcagggaggttgcagcgagcggagatcatggcggtacagtccagcttcggcaacagagggagaccgtggaaagccggagaaggacagagggagagggagaccgagcagaaagcgggagaaggagagtgagagggaggggggagggggagggg

SEQ ID NO: 2950 - DNA, 899 bp, Artificial sequence
  DNA replication origin
cagccgcccagtctgggaagtgaggagcctctctgcccggccgcccatcgtctgggatgtggggagcgcctctgcccggctgcgaccccgtctgggaactgaggagcctctctgcccggctgccaccctgtctgggaggtgaggagcgtctctgcccggccgccccatctgagaggtgaggagcccctctgcccggcagccgccccgtctggaaagtgagaagccccctccgcccggcagccactccgtccgggaggtggggggcagcccccgcccagccagccaccccatccgggaggtggggtcagcccccgccctgccagccgccccgtccgggaggtggggggcagcccctgcccggccagccgccccgtccgggaggtggggggtgcctccgcccagccgccgccctgtgtggaaggtgggggggcgcctctgcccggccgccccgtctaggaagtgaggagcccctctgccccgccgccaccccgtctgggaggtgtgcccaacagctcattgagagcgggccatgatgatgatgacggttttgtggaatagagagggggaaatgtggggaaaggagagagagatcagattgttactgcgtctgtgtggagggaggtggacgtgggagactccagtttgttctgtactaagaaaaattactctgccttgggatgctgttaatctataaccttacccccaaccccgtgctctctgaaacatgtgctgtgtccactcagggttaaatggattaagggcggtgcaagatgtgctttgttaaacagatgcttgaaggcagcatgctcgttaagagtcatcaccactccctaatctcaagtacccagggacacaaacactgtggaaggctgcagggtcctctgcctaggaaaaccaga

SEQ ID NO: 2951 - DNA, 1211 bp, Artificial sequence
  DNA replication origin
agtgctaggattacaggcgtgagccaccgcgcccagccagtaatactttttataatcccctttctcttctccctcattttctccaatcccgctcccctaacccacagaatccagttgcgcaccctagttcccagggcgggtccccagccctcggctctttgcaatgtaaattaagtcagcttccccgtaaataccttgcgctggcctctcccaggcttttcagttctgccctttctataattctgcatcacaaaagttcagaaccagtctggccaggatctactctcccagagatgggaagtgggacgcagtcgctgcaaggtatcagaaatggggtcgggacaggaggcgcagcttgcagtgagccgagatagcgccactgcactccagcctgggcgaaaaagcgagactccatttcaaaaaaaagaaaagaaaagaaaaaaaaagaaatggggtcgggaagcctggaggaggggacgcggcggcgcccctgcactcacccacacctccaaaccctgcgcagggaacatccccgcgcgtccccgctgccccgcttcaagcctagcgcatggctcctccccgtgccttgaagatgccacggggctgagccaccttgcacaaaaagatttggaacccacaccttcttagaatcaaggcctggggattaaagcccctccacgattaggtcttccgccccaagggagagcaagaagacgagcggccactcggtgtccccctgagccgtatccagggccactcggggctcagccagaccgcgaggtcttggtgttcgttcctccctaacttggccgtggggcggcacagcaggcttcctggccccagcgcttccccttagggccagattggcctccgagtgtagcaggactagccacagacaaaactcctcagacaccgagttaaagaaggaaggggtttattcagcgagggccattggcaagactcctgtctcaagagccgagatccccaagtgagcaattcctgtcctttttaagggctcacaactctaagggggtgcgtgtgagagggtggtgattgattgagcaagcagggggtacatgaccgggggctgcacgcactggtaattagatcagaacaaaacaggatagcgattttcacaatgcatttctatacaatgtctgtaatctatagataacataaccgattaggtcaggggtcgatctttaactacc

SEQ ID NO: 2952 - DNA, 1513 bp, Artificial sequence
  DNA replication origin
ggcagaagaatttttcctagtgcagaacaaaatggagtctcctatgtctactgctttctacacagacacagtaacaatctgatctctctttcttttccccacatttcccccttttctattcgacaaaaccgccattgtcatcatggcccgttctcaatgagctgttgggtacacgtcccagacggggtggcggccgggcagaggggctcctcacttcccagacggggctgccgggcagaggcgccccccacctcccggacggggtggctggccgggcgggggctgccccccacctcccggacggggcggctggccgggcgggggctgccccccacctcccggatggggcggctgccgggtggaggggctccccacttcccagacggggcggctgccgggcagaggggctcctcacttctcagggcggcctgtcagagacgctcctcacctcccagacggggtggcggcggggcagagacactcctcagttcccagacggggtcgcggccgagcagaggctttcttcacatctcagaaggggcggcggggcagaggcgctccccacatcccagatgatgggcggccaggcagagacgctcctcacttcctagacgggatgacggccgggaagaggctctcctcacttcccagactgggcggccgggcagaggggctcttcacatcccagacgaagggcggccaggcagagacgctcctcacttcctagacggggtggcggcgggacagaggctgcaatctcggcactttgggaggccaaggcaggcggctgggaggtggaggttgtagcgatccgagatcacgccactgcactccagcctgggcaacattgagcactgagtgagcgagactccgtttgcaatcccggcacctcgggaggccgaggctggcagaccactcgtggtcaggagctggagaccagcccggccaacacggcgaaatcccgtctccaccaaaaaatacgaaaaccagtcaggtgtggcggcgcgcctgcaatcccaggcactcagcaggctgaggcaggagaatcaggcagggaggctgcagtgagccgagatggcggcagtacagtccagcctcggctcggcatcagagggagaccgtgcaaaggggagatgaggaccgtgcaaagggcagaggcagaggcagaggcagaaactttcttaaaacattataagatttgtgtgtgtgtgtgtgtgtgtgtgtgtgtgagtctggagtgcagtggcacaatcttggctcactgcaacctctgcttcctgggttcaagtgattctcctgcttcagcctctcgagtagctgggactccaggcacttgccacaatgcccacctaatttttgtatttttagtagggacaccgtttccccattttggccagactggtctcaaactcctgacctcaaataatccacccgccttggcctcccagaatgctgggattacaggtgtgagccactgcactcagccagtgttagtgtattttatgtgtagccc

SEQ ID NO: 2953 - DNA, 779 bp, Artificial sequence
  DNA replication origin
cgtctaggaagtgaggagcgtctctgcctggccgcccatcatctgggatgtggggagcgcctctgccccgccgccccttctgagatgtgaagaaagcctctgctcggccgcgaccccgtctgggaactgaggagtgtctctgccccgccgccaccccgtctgggaggtgaggagcgtctctgacaggccgccctgagaagtgaggagcccctctgcccggcagccgccccgtctgggaagtggggagcccctccacccggcagccgccccatccgggaggtggggggcagcccccgcccggccagccgccccgtccgggaggtggggggcagcccccgcccggccagccaccccgtccgggaggtggggggcgcctctgcccggcagccccgtctgggaagtgaggagcccctctgcccggccgccaccccgtctgggacgtgtacccaacagctcattgagaacgggccatgatgacaatggcggttttgtcgaatagaaaagggggaaatgtggggaaaagaaagagagatcagattgttactgtgtctgtgtagaaagcagtagacataggagactccattttgttctgcactaggaaaaattcttctgccttgggatgctgttaatctatagccttacccccaaccccgtgctctctgaaacatgtgctgtgtccactaagggttaaatggattaagggtagtgcaagatgtgctttgttaaataggtgcttgaaggcagcatacgcgttaagagtcatcaccactccctaatct

SEQ ID NO: 2954 - DNA, 1213 bp, Artificial sequence
  DNA replication origin
caggaggtgcaggactccttctccttcctagaggactcaagcagctcagaacctgagtgggtgggggcagaggatggggaggtggcccaggcagaagcagcaggagcagccttctcccctggggaggacgaccctgggatgggctacctggaggagctcctgggagttgggcctcaggtaaggagagccgtgctgggtttgggggtggcatggagtcaagggtggacagggcctcctggtcctgagtcacaatgctgtgcctacaggtggaggagttctctgtggagccacccctggatgacctgtctctggatgaggcacagtttgtcttggcccccagctgctgttccctggactccgctggccccaggcctgaagttgaggaggaaaatggggaggaagttttcctgagtgcctatgatgacctaagtccccttctgggacctaaacccccaatctggaagggttcagggagtctggagggagaggcagcaggatgtggaaggcaggctctgggacagggtggggaagagcaggcatgctgggaagttggggaggacaagcaggctgagcctggaggcaggctagacatcagggaagaggcagagggaagtccagagaccaaggtggaggctggaaaggccagtgaggatagaggggaggctgggggaagccaagagacaaaagtcagattgagagaagggagtagggaagagacagaggccaaggaagagaagtccaaaggtcagaagaaggctgacagtatggaggctaaaggtgtggaggaaccaggaggagatgagtatacagatgagaaggaaaaagaaattgagagagaagaggatgaacaaagagaggaagcccaggtagaagctggaagggacctagagcaaggggcccaggaagatcaagttgctgaggagaaatgggaagttgtacagaaacaagaggctgagggagtcagagaggatgaggacaaaggacagagggagaaggggtaccatgaagcaagaaaagaccaaggagatggtgaagacagcagaagcccagaagcagcaactgaaggaggagcaggggaggtcagcaaggaacgggagagtggggatggagaggctgagggagaccagagggctggagggtactatttagaagaggacaccctctctgaaggttcaggtgtagcgtccctggaggttgactgtgccaaagaggg

SEQ ID NO: 2955 - DNA, 1070 bp, Artificial sequence
  DNA replication origin
tgaggacaggggtaagtctggggagatggggggagctctgctgagggtgcacaaggccctggctctacacacatccctgtcttacagaggataaatccaacaaggggacactgcggccagccaaaagcatggactcactgagtgctgcagctggggccagtgatggtgagtataggggtgcatttctgtgtgtatgtgtgtgtgctatgtgaccagcgtgggcttgtgtgtacatgcagccaactgtgttcaataatttcaaaaaatatttaatgagtgcctattatataccagccacattgtaaatgtagctgaatgctacggtgagttgattgtctaatctatgactttgttgatgagtgttcgtatgggatgggacagcatgggtatgtggtggtggtggtggtggtggtggtggtggtggtggtggtggtggtggtggtggtggtggtggtggtggtggtggtggtggtggtggtggtgacaacggccagtgactgtatctgcagggaaggaagggagttccctaggtatgtgaaggtgaggtgatctttgacctactggctgggtgaaaagtttgcagtagtgatcaaaagaagctgggcctggtgccttccaggctatcgttgctttcaagcctgagaaagcagagagcattctccagagccttcttgagatgtctaggccccttggagtttaggctattgcctacctggccctctttttcctccacagagccagaggggctggtggggcccagcagcccccggccaagcccattgctgcctgagagcttggagaacgattctatagaggcagcagagggtgaacaggagcctgaggcagaagcactgggtggcacaaactctgaaccaggcacaccacgagctgggcggtcagccatccgggctgggggcagcagccgtgcagaacgctgtgctggtgtccacatctcagacccctacaatgtcaacctcccgctacacatcacctctatcctcagtgtgcccccgaacatcatctctaacgtttccttggccaggctcacccgtggccttgagtgccctgct

SEQ ID NO: 2956 - DNA, 842 bp, Artificial sequence
  DNA replication origin
agctgcactgcttcctgccccctaaagctgagcggggcgaggagggcgagtgccaggctgggccacgagacacaggacacaatttcttgccagggtcctggtagcttcctcttcaacagccacttccgtgtggccggggccccaggggcaggagctgctgcccgttgcccaggccaccctccacccccaattgggagccctgcccccctggggccgggccaagcccagcagctggctgggatcccatgggggactggtagggcacaggtcttgggggatagaggtgaccgggccagtgccctggggctctggccatgaagtctcggcagaaaggaaagaagaagggcagcgcaaaggagcgggtttttgggtgcgacttgcaggagcacctgcagcactcaggccaggagggtaaggaggccggctcagcttctgcagggtgggtggggaggcactgggcatctgcagcccgatccagcctgaagggcagaagcagtttccggtgctcctggggaaggggcagtggcctggggtcaccattcaagagaactgtaagtgggcaagacaggaaatgtggctcagtgaagaaggcagggcggctcccttgtgtaactttctggggatggggtggctgaggggatgagaatgtgagtacccaggtagcagtgagggggaggatggagagactggaaaccgaggaggagtggatgaaacagcgggcaggtgactgggaacaggagagggagggtgaggcgacagggtcaggagaggagtggctgaaggggaaatgattatccttaggtctgaatgaaaggagacagggaaatggccccagaagggtc

SEQ ID NO: 2957 - DNA, 1040 bp, Artificial sequence
  DNA replication origin
cccaatcgtacggcctggcccctagctgggtcgaaaaccaccgtatcgctgctgggctctctcgctcctcctgctaggagaccacctacgagatagaaccgtccccgcagttcggtgcatgaatggaaagctctagccaaaagcgcgtcccgcgccactggcctccaggcccagcctgagcctgcggcccgacccgggggcacggccaccgccatgggccccggggagagggagggcggtggggtctgcggcttggaacgagcccctacatggcaggccaggcacctcgccttccgcgggcttccccgggaacctccccctaccggacgccagccggggttcccacctcaagtcccggctttctctccgtggtcgcccagcaaccactgcagcggctgcagcgcgaccgctgcaaaccgaaggtcgcaaagcagcagttaccgtggagacaggacacctgggtggctatcgggaaccgtatggtggtgccaccaaggctacgggagctgtatcaggtcaataaaaatcctgcaagattgttaacctcagaaagtcggaggacagtcgggtccttagaataaacccctgtgatctccgctgtgaactgatttgcgattttgacatttgaggtgcaggtgctgctccactagggccgggagggatcatttggcttcagggtttcttactcgggctaaccaccccagggatgagcaaggaaggagaagcaaaagtcagagggtggggaagtgaaagtggactgaccactggcccgagagacaggagacctgggttctagtcccaactatgcccctgaccctcaaaggcattgtttctctctaggccttctcagttttgtcattcatcaaataggctgttcgtttattcccaaaggcttgaaggtcccgattgattgggtgggagagtcctttcagctctggccactagagggtagcagaacccagtctctcaggtgacacacacacacacacacacacacacacacacacacacacagagagagagagagagagagagagaga

SEQ ID NO: 2958 - DNA, 2369 bp, Artificial sequence
  DNA replication origin
gaatgctatcctcttcgatcccttattaccgccctaagcagccgtcaagacaaaccggcgttgccagcttgccccaaagcaagatggctgccaatctctatctctcctcccgaagtgaagctatccactccccgattaatgccgctgccaggctgccctcacttactatggctactccggctcatgtctcactatggcctcgaagccgccactaaccggccgggttccgggaggcgccgttcaggatgcagccacccccgcccgcctgtcccctcccccacggccgcggcggcggcggcggcggcggctgctggagcccggatgcggcgccgtgaggcaggcccgggagagcggcgcggatggatccaacatggcggcgccgagcctgagccgagagtgaggcggaggggcggccggagtggggagagggagtcgagcgggacggggcggggccgggcggggccgcaaagggcttggggaaggaaagtggagggggaggcggtggcgacgtccagcctgagaacctcaagagagggaggtgacgggacgctgagaggtgggggaggggagctgccgaggggggcgtgcaggggagatggcaactgcgggagagggcaggggtcgagacggaggagtgagggcatggggaggggcgtaaacaagggctgagactgggcccagccaggggtattagagaggccgaggtggggagtggggctgcgatccgctcgtattgaagggggtaggagcaggagggagaggctgagggtgtgaaggggaagggggctgtggcatgtggttggagggaggactggactctgatgaggggtgttgcgaggaggtgggtaaaggtcagaattggagttaagacgtttctggggggcttcgaaagtgttaaattggaggtgggagggggaagggcctaggggagaatttgggtggaaaaggagagaacggaggcttggggaatggagagagtgtcggtgggaggaggtaatggagaaagtgagagactgggaggaagaaagtttgggaggaaggggagtggaatgggagataggacagtggagctgcacgggtgatagaggttcgggggtttccctttccccggtggagaggaggagagaacagagttaagcagcatcagttgcagccaattctaattgccaggcccttagcttttaagagggtgggaagggcagaagggaatggtcatgtgggtttgcagaattggggttggatgagaattcaactgggtttgttttccaaaagactccctagcttactgttcccttgtttttcctgcttgggaaaatggggaagccggtgtcgcccaagtgtggaggagcaaaggacttttctagtttttagcattagcaatacaagagtgggggagcagacatggctatattggaaccctatatgctaaggtggaggctctggaagtctgaggagggaaagagaaaagatagagtggcatctagacaggttaattaaatgagtgctgtagtttccagacccttttgctgttttaagtctggaagggagggggtaacatggatactgtatgtagaaaaacttttccctggtgaaacatagacgtatgagtggatgctgcgccattagatattttgttctcattgtgtgctagttaagggaaagggccaaatgtagaatttggaggatagtgctggtctgctgtaaccactttcctcccagttttttctaaaggtgaaagttaacgttaatattgtaacaaaataggaataaggaattgtggaggaagatgagaagctgccagagggtaattggttttcccagaagttcttaaatttgggagctgtcttgccgcaagccattgagactggaaattcttggagttggtattgtttttgtaaattgactaatagagagttagggaagcctggagacttgttgggggtgagttctctaaatggttttaggcttgtctgtgtacttttgcaacgagattgtctaattctatgggcctctgaggtttcaaagtaaaacttgaaaattaattattttcccctccttatttgtttttgttttgctgctggctgtgaaacttgtgctaggaagagacctgggaaattaagtttcttgcggaggtaagtctggaacttttttattgttttcaaacaatggaagggaatggaaatagcatgggagttattttgaggttgggtccattaatgaggaggagaatgccagggaaaatgagttatcattcatccatctgagtgcatgagatctgttgtaatcactgtctttagttaattggagataggaggtgaaagagaaggagatttagatgtcttgggacaatcccccagctttggtttgtt

SEQ ID NO: 2959 - DNA, 891 bp, Artificial sequence
  DNA replication origin
agggagactgaaagcaccccgtcttccaatcgtttcccagcgccccgaggtgggagctttcctaggagggcagtggggcgcccctggagggttcttcgcggctccggtctgcctcgctctccctcgcctccctgggatcccgagccgcagcaccctccccgccgcagccctgccgacagcgccgggggccgcaccgctcacctcgctcatctccgcagccggacagggcgcgcgaggcgctgcacgcacaggtgaggcgagtggccctcggggctccgcgggcgacagctgaaagttgccgggctctgcggcaggggttacagctgaccaggagaggagagttagtgcggagagccgctgctctggtgctggcacccgggattctcggagcccagctccggccaggcgaccccctgcgacccgtcctgtcagagccgctcagctcgccgcctccggccccaccttttatactcagctcggtacccgcctccagcccgaccaatagaagctcctcctaccgtagaatgacagcctcttgcatccaatgctggcaggtttagaggtctgctgcatttccaaactagggtaagacagagagcgggaaggagggggagaccatcgggggatgcggggacggaaaatgaagtagggggagcaaagaaagagagggagaaaggagatgtacacgaagaaggcaaggtggggagtggaatggaaggagtgtgtgagtctgagaaagagaaggcctggaaagaaatcaagagggtacacggaaaacaggaaacagtgaatgaaaggggtaaagccaagagatgttgcagattaagatttcctagtagaatagcaccctggaggtcgggcgcggtggctcaagcctgtaattccagcact

SEQ ID NO: 2960 - DNA, 896 bp, Artificial sequence
  DNA replication origin
cgtctgagatgtggggagcgcctctgccccgccgccccgtccgggatgtgaggagcgcctctgccccgccgccccgtccgggatgtgaggagcgcctctgcccggccgtgaccccgtctgggaggtgaggagcgtctctgcccggccgccccgtctgagaagtgaggagcccctccgcccggcagccaccccgtctgggaagtgaggagcatctctgcccggcagccaccccgtccgggagggaggtgggggtcagccccctcctggccagctgccccgtccgggagggaggtggggatcagcccccgcccggccagctgccccgtccgggagggaggtggggggtcagcccccgcccggccagccgcccagtccgggagggaggtggggggcgcctccgcctggccagccgccccgtccgggaggtgggggcgcctctgcccggccgccccttgtgggaagtgaggagcccctctgcccggccaccaccccatctgggaggtgtacccaacagctcattgagaacgggccatgatgacaatggcggttttgtggaatagaaaagggggaaaggtggggaaaagattgagaaatcggatggttgctgtgtctgtgtagaaagaagtagacatgggagacttttcattttgttctgtactaagaaaaattcttctgccttgggatcctgttgatctatgaccttacccccaaccctgtgctctctgaaacatgtgctgtgtccactcagggttaaatggattaggggcggtgcaagatgtgctttgttaaacagattcttgaaggcagcatgctcgttaagagtcatcaccactccctaatctcaagtacccagggacacaaacactgcagaaggcctcagggtcctctgcctagga

SEQ ID NO: 2961 - DNA, 1039 bp, Artificial sequence
  DNA replication origin
ggcccgttctcaatgagctgttgggtacacctcccagatggggtggtggccgggcagaggggctcctcacttcccacaaggggcggccgggcagaggcgcccccacctcccggacggggcggctggccaggcggaggcgccccccacctccctcccggactgggcggctggccgggcgggggctgaccccccacctccctcccggacggggcagctggccgggcgggggctgatccccacctccctcccggacggggcagctggccaggagggggctgacccccacctccctcccggacggggtggctgccgggcagagatgctcctcacttcccagacggggtggctgccgggcggaggggctcctcacttctcagacggggcggccgggcagagacgctcctcacctcccagacggggtcacggccgggcagaggcgctcctcacatcccggacggggcggcggggcagaggcgctcctcacatcccggacggggcggcggggcagaggcgctccccacatctcagacgatgggtggccgggcagagacgctcctcacttcctagacgggatggcggccgggaagaggcgctcctcacatcccagacgatgggcggccaggcagagacgctcctcacttcccagatggggtggcagccaggcagaggctgcaatctcggcactttgggaggccaaggcaggctgctgggagatggaggttgtagcaagcggagatcatgccactgcactccagccggggcaccattgagcactgagtgaacaagactccgtctgcaatcccggcacctcgggaggccgaggctggcggatcactcgcggttaggagctggagaccagcccgaccaacacagcgaaaccctgtctccaccaaaaaaatacgaaaaccagtcaggcgtggcggcgcgcgcctgcaatagcaggcactcggcaggctgaggcaggagaatcaggcagggaggttgcagtgagccgagatggcagcagtacagtccagcttcagctgggcatcagagggag

SEQ ID NO: 2962 - DNA, 796 bp, Artificial sequence
  DNA replication origin
ggagtgaacgggacttggctggaacacgtccacgcacgagtatgaggtgaggtatgcaggtcaatgggaacgccactcccctcgggaaggacacggcacagtcttttcgtcctcctggggctgaacccgggacgtcaacacgaggctaacgggacagctgtttctccgctccctcgtcacagcccgcgcgtgctccgctccgcttcccttcaaccgacgtattgccagtaccgtctccgtcttgtccagcccccgctgtcgggaactgagagcaccctttcccagacttccggtcttgactcattgctgacgggaaagctccggacctctgcgagccgtggggcggggcgcggcgagaggaggggcggggctcacgagtgacgaagggcagaagggcggggcgggacgagaggaggggaggggcgagcggaggggagggacgagaggaggggcgggacgagaggggggcgggacgagaggaggggcggggctcacgagtgacgcagggcagaagggcggggcgcaagagagactgagagcactacgcgggtgagaggaggggcggggcgtgggagtgacggggcgtgggagtgactgggcgcggagaggccggagccggaggcgaggcgaggcgtgagagtgaatgagggaggagggctgtgaggggctggagcgcccctgggtgtccttgagattgcgggaaattcgggtcactttttccccaggcctcaggcctgccgcgtcgaatttggggtcttcgctaggcctgcaaggttggccgacgttcaggatcggt

SEQ ID NO: 2963 - DNA, 762 bp, Artificial sequence
  DNA replication origin
gcggggctcacgagtgacgaagggcagaagggcggggcgggacgagaggaggggaggggcgagcggaggggagggacgagaggaggggcgggacgagaggggggcgggacgagaggaggggcggggctcacgagtgacgcagggcagaagggcggggcgcaagagagactgagagcactacgcgggtgagaggaggggcggggcgtgggagtgacggggcgtgggagtgactgggcgcggagaggccggagccggaggcgaggcgaggcgtgagagtgaatgagggaggagggctgtgaggggctggagcgcccctgggtgtccttgagattgcgggaaattcgggtcactttttccccaggcctcaggcctgccgcgtcgaatttggggtcttcgctaggcctgcaaggttggccgacgttcaggatcggtgcccaggagatgggctgccttctctggggctgggcaagggactctgcctggcagcgcgcctggaccggggcgggagcacagggctggatgcggggcacctcggcgtgattcgcggcggcaagtctcttttgcatccctaccctgagttcccccattctctttccccgaagcaaccactgttagggtttttgcgtgcccttcctagatgatctccagtcgtccctcggtatccgcaggcagattagctccaggacagcaagcaccccatactaaaatctgcggatgctgaagtccctcctataaaatggcatagtatttacctacaactac

SEQ ID NO: 2964 - DNA, 1727 bp, Artificial sequence
  DNA replication origin
ccccacctccctcccggacggggcggctggccgggcgggggctgacccccccacctccctcctggacggagcggctggccgggcagaggggctcctcacttcccagtaggggcggccgggcagaggcgcccctcacctcccggacggggcggctggccgggtggggggctgacccccccacctccctcccggacggggcggccggccaggcagaggggctcctcacttcccagtaggggcggccgggcagaggcgcccctcacctcccggacggggcggctggccaggtggggggctgaccccccccacctccctcccggacggggcggctggctgggcggggggctgaccccccccacctccctcccggacggggcggctggccgggcggggggctgacccccccacctccctcctggacggagcggctggccgggcagaggggctcctcacttcccagtaggggcggccgggcagagacgctcctcacttcccagacggggtggctgctgggcggaggggcttctcacttctcagacggcgcggctgccgggcggaggggctcctcacttctcagacggggtggttgccgggcggaggggctcctcacttctcagacggggcggttgccaggcagagggtctcctcacttctcagacggggcggccgggcagagacgctcctcacatcccggacggggcggcagggcagaggtgctccccacatctcagacgatgggcggccgggcagagactctcctcacttcccagatgggatggcggccgggaagaggcgctcctcacttcctagatgggatggcggccgggcagagacgctcctcactttccagactgggcagccaggcagaggggctcctcacatcccagacgacgggcggccgggcagagacgctcctcactttccagactgggcagccaggcagaggggctcctcacatcccagacgatgggcggccgggcagagacgctcctcacttcccagacggggtggcggccgggcagaggctgcaatctcggcactttgggaggccaaggcaggctgctgggaggtgaaggttgtagcgagccgagatcacgccactgcactccagcctgggcaccattgagcacggagtgaacgagactccgtctgcaatcccggcacctcaggatgccgaggctggtggatcactcgcggttaggagctggagaccagcccggccaacacagcgaaaccccgtctccaccaaaaaaatacgaaaaccagtcaggcgtggcggcgcgcgcctgcaatcgcaggcagtcggcaggctgaggcaggagaatcaggcagcagtaccgtccagcttcagctccgcatcagagggagaccgtggagagagggagagggagaccgtggggagagggagagggagaaaaagacattcctataggtttctaacatgtgcctgaggtggttgaggcgtctgtcctaagatcttttctcagaaggtgctgcccacagtgtcaccagccctccctggtggtctagtggctaggattcggcgctttcaccgccgcggcccgggttcgattcccggtcagggaagtttgcttttttcctttctgatatcactgcagtggtttccaccaaagccatgttcagtgatcttcagttcaaggcggtgaacactgcatgtgcctttcaacctctcccagatgatcctgaagtcagtcttgaaaaccgcg

SEQ ID NO: 2965 - DNA, 1066 bp, Artificial sequence
  DNA replication origin
cccgtccgggagggaggtggggggggtcagccccccgcccagccagccgccccgtccgggagggaggtggggggggtcagccccccacctggccagccgccccgtccgggaggtgaggggcgcctctgcccggccgcccctactgggaagtgaggagcccctctgcctggccggccgccccgtccgggagggaggtgggggggtcagccccccacccggccagccgccccgtccgggaggtgaggggcgcctctgcccggccgcccctactgggaagtgaggagcccctctgcccggccagccgctccgtccaggagggaggtgggggggtcagcccccgcccggccagccgccccgtccgggagggaggtgggggggtcagccccccacccggccagccgccccgtccgggaggtgaggggcgcctctgcccggccgcccctactgggaagtgaggagcccctctgcccggccaccaccccgtctgggaggtgtacccaacagctcattgagaacgggccatgatgacaatggcggttttgtggaatagaaaggggggaaaggtggggaaaagattgagaaatcggatggttgccgtgtctgtgtagaaagaggtagacgtgggagacttttcattttgttctgtactaagaaaaattcttctgccttgggatgctgttgatctgtgaccttacccccaaccctgtgctatctgaaacatgtgctgtatccactcagggttgaatggattaagggcggtgcaagatgtgctttgttaaacagatgcttgaaggcagcatgctccttaagagtcatcaccactccctaatctcaagtacccagggacacaaacactgcggaaggccgcagggtcctctgcctaggaaaaccagagacctttgttcacttgtttatctgctgaccttccctccactattgtcctgtgaccttgccaaatccccctctgcgagaaacacccaagaatgatcaattaaaaaaaaaaaaaaaagaaacctataggaatgtctttaagaatattttgcaatgatgtgtatagtactggatg

SEQ ID NO: 2966 - DNA, 964 bp, Artificial sequence
  DNA replication origin
cctgtggctgcgtgcctgtgcgccggggaaggaggcttgcggtgtttggagggtgtgctacctacctccacccatctgtccttttggcctggctgacgccaccttcgcaacatcggctttgcagctcttccttgtcatgtgctcacctcgctgccactgtttctcagcggccaagcccactggccaggtcaggctttctcctcggattgtcgccaggtgacccaccaccaccaccagcagcaccctcgcactctcttctggccacggaatgctccagtagtgtggagcagagcggcttccgccagtccaagccgggtggctgaggggccacttctctctcggctgagggggatctacgcctaatgattgggccacccgccagagccactcatgccagcaagctcactggcttttccaaggcatgccagaccctgagcgcgggatccctgattgggctccacgggtgtcagcggctttggtagaaatggcagcagaacttgaggagccgagaccacgggctatggcgctggggagggagagctgtgacaatcactcttgtagcatgactatgtttttcttcatgcagacatgatattggtgggattcctgtgacatgtggtgatgcttgtacattgcgtaatgatccatgatcaactgaggggttgtacagtatctgtgggtatccatccagtgggtatctgtcatctctacctgttggaaacaactcatgtgctgtcttccagctctttggaaacacactctaatacatcgttgttacctctagtcgccctagtctgccatagaactttagaacgtattccttccatctacccacatgctcatacccatttcgccaacctctcttcaccccagtcacctacacagcctctccagcctctggtgtctatcgttctactctctacctccacaaggtgaactttttgtgcagccacgatagtagtga

SEQ ID NO: 2967 - DNA, 811 bp, Artificial sequence
  DNA replication origin
tggtagcggcagccgggaggcctcctctggccctgcacggcgcccaacgagctgccggctcaaagtggttgtcggaagaggctttctgcgacacacggggccctgcgcccggtgggaagcgtaggagtggggaccctgccggcgccggccgtttcccccccgggcacctgttggggaagggctctgggggcccgaggcggcgagtgagcgagagcgcccccagaggcaggcgggcgtaacgggtcagccgcgctggccttgcaccggtggggcgcggggcggcctttggagaggccgcggcagcgcggagctgcgggcgggcggacggaccgggcgtcggggccggcctgccccgggcgtcggcggcgcgctggtgggagccccgggccggcgcggcggggctgcccgcgccgtgcggcgttggtggtatagtggtgagcatagttgccttccaagcagttgacccgggctcgattcccgcccaacgcatcgggcggaccttttgcggagatcccgcgcgcggagctcgcgtcgcagcttggcctgtggctgcgtgcctgtgcgccggggaaggaggcttgcggtgtttggagggtgtgctacctacctccacccatctgtccttttggcctggctgacgccaccttcgcaacatcggctttgcagctcttccttgtcatgtgctcacctcgctgccactgtttctcagcggccaagcccactggccaggtcaggctttctcctcggattgtcgccaggtgacccaccaccaccaccagcagcaccctcgcactctcttctggccacggaa

SEQ ID NO: 2968 - DNA, 951 bp, Artificial sequence
  DNA replication origin
agcgggcaagggctcaaggcaggaagcggccaaaggtgctccagggttgccatgggcgttgccctccggcgggcgggccaaaaggtcggcttgtcaggagtgggattcgaacccacgcctccaggggagactgcgacctgaacgcagcgccttagaccgctcggccatcctgacggcgcgccggggcgcttcgccgctggcatggctgggacccggcgcgaacgcctgcgcccttggccggcgcctgtctgggttcggtgcgcaaccgacggaccgcgcggggggagcgggcgccaagtgaacggagccggctggcgttggcgtggacgcccccgcgtccccaccccggacccaaagggtccgcgtcgggccggccgccgccggcgcacgccccagcccccgcgcctccgctcgccgaaccccgcagggcgtgcgcccaccgcgtcctaggagcagcggcctgactgtttcgcccgcgcctcctcctgccccggcgcgatccccgcgttggagacagcaggcagggcgcgcggggaggttccacgccgctccggtacctgtcggggtccggctccggctccgggtcccagcgggatcgcagggtgctttgttgggtgtcggggtaggtcgtgccaacggtggcggggggcgggtggcaggtgacgggtggcgtgtggcgggtggcgggcggcgggcggcgggtggaaggcgagcacgcgcccggcccctgccgtcgggggaggggatcaaggcagggctaggcgtccgcggtcggagtggggtctggcgtcccggcgaccgtcgccgtcgtcctcgttagtatagtggtgagtatccccgcctgtcacgcgggagaccggggttcgattccccgacggggaggcagccgtgctttttgggccgccgcctcggacccagcctgtgggccctccttctccttcctccgccctc

SEQ ID NO: 2969 - DNA, 1454 bp, Artificial sequence
  DNA replication origin
gaatgcccgtgtgggcagatttgctgtggcgggccttgctgagcgcggatccccggcacagacccagagtttttgtgttttgtttttgttgtttctttctgtctttctttctttctttctttctttctttctttctttctttctttctttctttctttcgtgtggtgtttttttttttcaccaccgtggggccagccttctcacttgtgtcaccagcaggtgagaggcgggatgggtgtgtcagcgagcgggggcggcgatggggaacgggtctcgcagccgtggcgtgcggctcagaaacgcagaccaggtccgtgggcgcctcgctcctgcgctctgacccacgccaccggctcgcacttggggtccggccccctgggctggtagggaggctggagcgcgagaaaggagcggaggagcgcttcggcagagccgcagctggctgaccctggagaaggcgcgctgggtgtggctgggacggcccaggccgcggcttcccgcgtggggatgcgctgtggcgcagagctggtcccggcggggccaggcgtttgtgggcgggtgacggggatctagggcttccgctcgtgattcctcttgggctgtctttccgggtttggactcgcctgcccggctgtgtgcagggttcccgctgcctctggccggcaggcgtccgggctgcaggtgggccggcaggcaggtgttagcgggaagggagcacaggtagcgaggtgggatcggcgacctggctagggtgtcggcagaatggaatgcgcggccggggtccgaggggtcggaggaaaggacaggatgttggatggcgtgcctctggtgggagacgtgtgtgcggctccacgagcgagtcgctcgctgctgctcagcggtcagaagttggagggtgaaaccgggcgggctgttcaggccaggacgcctctgggcagcgcagcggcgattcaaggcggtgggcggtgggcggaggccggtgggaggaaggagggaaaaggaggaataggggaagaatctgggctgtgtctgtttgggcgagtgaggagaaggcgggcggaggagataggcagggaagagcgtggaaggtggtcgcggtcgctcgctgtgtgtggggccagggaagagggcgtgtgaggtggtggggagggcgtctgtccgaagggcaattggtagagggtcgcgggcgctggcgcatggtcctgggctgtttctgcgacagccggcgggtgggcaggaagaacggacgtgcctgagaagcggcggcgttttggaggcttgcttcaagggggctggagtctggagagcgggcaagggctcaaggcaggaagcggccaaaggtgctccagggttgccatgggcgttgccctccggcgggcgggccaaaaggtcggcttgtcaggagtgggattcgaacccacgcctccaggggagactgcgacctgaacgcagcg

SEQ ID NO: 2970 - DNA, 2229 bp, Artificial sequence
  DNA replication origin
acgggcattgaagcgtggagatgcagcagttcgtggggaaaacccaacggccaggctgaccaaagcgcatgtgcggggttggggttcctgacagacttctagccgaagtttgcttcccattgcctgacctacgctctctatcgtctctccaaatgtcaaggaacatgtggagatggtacctatccccagcgccaagattcgctgtgggacttttttcccatcccctccttagcacagatgagcccagttctccaacctctattcaacccgtactgatcttattgtttggctgattccccaggtcaatggcagaagtcagtcgacttcttgccaaaacccctctgtaggggcaaagtagacgtccaaccaactgcacaaacctgtcccgtgtcattcgtgggatcttggcacagtcggatcacctgcagggaccagaccctatcggggatagagatgtttgccatccccacgggaggctggcttgcttgccagcgtgttgtgggtggatgtcagtgggtgacagcgacggaagaaggtgtccgatcccgtggctggcgtccaccctagcccggggcaaggggctgacaccaaggaaaggagagaagcatgtcgcgtgctgggagctggaagaaggagtccagggtgtccagggggtgcacagggctggctggccaggtctgggagtgaggctgtgcagtcaaacggaggttgtgcagatgcctggggcgttagggcacctcgcgggctgcctatgccataggtcggagggatcccagctggtggcggagctggcgtgagtctgaagaggctgaaggaggccagggctgggggatatgagtcgtctgagagaggggcattgacggcgagacggagagttggctgtgtgagacagagacagagagatagagacatagagacagagagagagagagagacagagaaagacagagagtgagagagagagagagtgagagtgtgagtgtgtgtgtgtgtgtgtgtgcgcgtcagagtgtgtgtgtgagtgaaggggtgggtggcgtgagacaaaggtgggggagggagggctgagcctgaaggctgctgggaacactacattttcagccggttggtctgggcaggaacgaagtctgtgtggtcaaaggggacccgcgccggcgagactgggatgctgcttgggctgggcggtcagagtatggagtggggctggggtgaggtggcaagcagcccagggtgggagagacatcgtgacagagcgactggaggccacgtcccacgtcccaaaagggtagggaatgcaactggacccgagacataaataagccgtcttcaggacgcacattcacgtctcaggcatgtgtctggggctgagatgaaaagaggtccgagggggagaaacaaggcagcatcctcgactaaagtggtggattggggttaggttgggagttgcgacatggcggtggtggtgccggcagaatgaggggagagagtgtggagtagccggaacacggtgaatatagacggtgcacatgccacgcgtacactcgtgtggtcgcgttaaggactgtgtgaccaactaggggaaagtgatgagttactccctggagtcgcgacttccttcctactggaagggcaaccatggcatcattttctggatgtggggagccagcgaggggtgggggggagagagacagagagagagagagagagagagagagagagagagagaggtcgaggcggtgaaatgtgaagagaaggggtggtgcgagtggctgcaagcccgtggtgcctggcggtgttccgtgaagtgaaatgcgtcgggcagaggcggtggcagggcaatgaagagaaacaggaccaggaggctgccaagttctggtgtctggcgcgctctcgtgtctggaggggttgttgtcaccaaggtgtgtgggtgcggggggtaggctcatccctaagtcagtcgagagaggcacggaagaaagggcagagggccgtcgcgcgtgggagcgcagccggtgccggactcgctcgcgcgccccgagtgtaaggaggcggcagaggcgagcgcagctacgccttggtgctgctgcagcaccaaaatgggagggcgtgctgcatgggccgggaatcgaacccgggcctcccgcgtggcaggcgagaattctaccactgaaccacccatgcaccgatggcaaacgccaacggaagctggcacagcggaactcgccacca

SEQ ID NO: 2971 - DNA, 2132 bp, Artificial sequence
  DNA replication origin
ctctctgtctctgtctcacacagccaactctccgtctcgccgtcaatgcccctctctcagacgactcatatcccccagccctggcctccttcagcctcttcagactcacgccagctccgccaccagctgggatccctccgacctatggcataggcagcccgcgaggtgccctaacgccccaggcatctgcacaacctccgtttgactgcacagcctcactcccagacctggccagccagccctgtgcaccccctggacaccctggactccttcttccagctcccagcacgcgacatgcttctctcctttccttggtgtcagccccttgccccgggctagggtggacgccagccacgggatcggacaccttcttccgtcgctgtcacccactgacatccacccacaacacgctggcaagcaagccagcctcccgtggggatggcaaacatctctatccccgatagggtctggtccctgcaggtgatccgactgtgccaagatcccacgaatgacacgggacaggtttgtgcagttggttggacgtctactttgcccctacagaggggttttggcaagaagtcgactgacttctgccattgacctggggaatcagccaaacaataagatcagtacgggttgaatagaggttggagaactgggctcatctgtgctaaggaggggatgggaaaaaagtcccacagcgaatcttggcgctggggataggtaccatctccacatgttccttgacatttggagagacgatagagagcgtaggtcaggcaatgggaagcaaacttcggctagaagtctgtcaggaaccccaaccccgcacatgcgctttggtcagcctggccgttgggttttccccacgaactgctgcatctccacgcttcaatgcccgtggccaggttggtctgactaatgggacctctcaagattcattttcacatccagaataggcgagaatctcaaacctgtcgacggtgagcgggagcatgtgtacgcacatgcacgtgtacgttgcgggaagtcagggaccccgaacggagggagcggctggagctgcggccgaggcacgtaaattgtgaggatttcatttcaatacggacattcatcagttcccaaataatgcttttataatttcttacgcctgtctttactttaatctcttaatcctgttatcttcgtaagctgaggatgtacgtcacctcaggaccgctgtgacaattgtgttgactctacaaattgatggtaaaacgtgtgtgtttgaacagcatgaaatcagggcaccttgaaaaagaatagaataacagcgacttttagggaacaggggaagacaacggtaaggtctgactgcctgcgaggtcgggcagaaagagccatatttttcttcttgcagagagcctatgaaggacgtgcaggtagggaagatgtggctaagacaacctaagtgtccatcggccgggaaatggattaacaaaaatgtggcatatagacaccatggaatactctttggccatagaaaagaacgaaatcctctggtctgcagcaacagaggcggagctaaaggtcacgatggaacatcaaacgagccgggcacagaaagacagagagggcaggttcttactccaatcctgggagctcaaaatgttcaccttgtggaggtagagagtagaacgatagacaccagaggctggagagggtgtgtgggtgactgcggtgaagagaggttggtgaaatgggtccgagcatgcgtttggatggagggaatacgttccaataatgttctacggcggagtagggcgactaggggtaacaacgatgtattagtgcttgtttccgaagagctcctggaagacagcacctgagatgctcccaacaggtagagatgacagatacccacgggatggatgccctacatcccctcagttgaccatcgatcactacgcgatgtacacgcgttaccacacgtcacaggaatcccatggatatcatgtccgcatgaagaaaaacatagtcatgctgccagggtgattgtcgcagctctgcctccctagcgctatggcccgtggtctcggctcctcaagttccgctgccattactaccaaagccgctgacacccgtggagccca

SEQ ID NO: 2972 - DNA, 1096 bp, Artificial sequence
  DNA replication origin
gccggcccaaagtgggtgtcggaagaggctttctgcgaggcacagggcccggcgcccggtgggaggcggaggagtggggaccccgtcggcgccggccgtgtccccgccgggcacctggtggggaagggctctggcggccccgggcggcgagggagcgagagcgcccccagaggcaggcgggcggaacggggcagccgcgctggccttgccccggtggggcgcggggcggcctttggcggggccgcggcagcgcggagctgcgggcgggcggacggaccgggcgtcggggccggcctgccccgggcgtcggcggcgcgctggtgggagccccgggccggcgcggcggggctgcccgcgccgtgcggcgttggtggtatagtggtgagcatagctgccttccaagcagttgacccgggttcgattcccggccaacgcagcgggcggaccttttgcggaggtccccgtcgcggagctcgcgtcgcagcttggcctgtggctgcgtgcctgtgcgccggggaaggaggcgcgcggtgtttggagggtgtgctgcgaacagggccagagctgctcgtgagggcaggccggttgccgccggcgtcgcgggggctggttgcggtgtttgttttaaagcgaagcaggggacaggcgccaaggtagcgcccagtgctggggccagaggcgctggggccaggaggcgcaagccgggccctgaagccgcctctccctggtggtctagtggttaggattcggcgctctcaccgccgcggcccgggttcgattcccggtcagggaagccttccttcgttggctctgcctgccaactgccaggccccttcacacctccccttttgaccaacaggctggctcgcttctcccgcgccccagccacaacctccctcggcttccacgtgcgccgccccaacgctccccgcctacctccacccatccctccttttggcctcgctggcgccaccttcgcaacatcagcttcacagcccttccttgtcaggtgctcgcctcgctcccactctttgtcagcggcaaagcccactggccaggtcaggctttctcctcccatggccgccaggtgacccgc

SEQ ID NO: 2973 - DNA, 757 bp, Artificial sequence
  DNA replication origin
ccggcgcctgtctgggttcggtgcgcaaccgacggaccgcgcgggcggagcgggcgccaagtgaacggagccggctggcgttggcgtggacgcccccgcgtccccaccccggacccaaagggtccgcgtcgggccggccgccgccggcgcacgccccagcccccgcgcctccgctcgccgaaccccgcagggcgtgcgcccaccgcgtcctaggagcagcggcctgactgtttcgcccgcgcctcctcctgccccggcgcgatccccgcgttggagacagcaggcagggcgcgcggggaggttccacgccgctccggtacctgtcggggtccggctccggctccgggtcccagcgggatcgcagggtgctttgttgggtgtcggggtaggtcgtgccaacggtggcggggggcgggtggcaggtgacgggtggcgtgtggcgggtggcgggcggcgggcggcgggtggaaggcgagcacgcgcccggcccctgccgtcgggggaggggatcaaggcagggctaggcgtccgcggtcggagtggggtctggcgtcccggcgaccgtcgccgtcgtcctcgttagtatagtggtgagtatccccgcctgtcacgcgggagaccggggttcgattccccgacggggaggcagccgtgctttttgggccgccgcctcggacccagcctgtgggccctccttctctctccttcctccgccctcccgctagtcgcagggcgccatctcgggcctggccccttg

SEQ ID NO: 2974 - DNA, 1397 bp, Artificial sequence
  DNA replication origin
cgcgcccgaatgcccgtgtgggcagatttgctgtggcgggccttgctgagcgcggatccccggcacagacccagagtttttgtgttttgtttttgttgtttctttctgtctttctttctttcgtgaggtgttttttttttcaccaccgtggggccagccttctcacttgtgtcaccagcaggtgagaggcgggatgggtgtgtcagcgagcgggggcggcgatggggaacgggtctcgcagccgtggcgtgcggctcagaaacgcagaccaggtccgtgggcgcctcgctcctgcgctctgacccacgccaccggctcgcacttggggtccggccccctgggctggtagggaggctggagcgcgagaaaggagcggaggagcgcttcggcagagccgcagctggctgaccctggagaaggcgcgctgggtgtggctgggacggcccaggccgcggcttcccgcgtggggatgcgctgtggcgcagagctggtcccggcggggccaggcgtttgtgggcgggtgacggggatctagggcttccgctcgtgattcctcttgggctgtctttccgggtttggactcgcctgcccggctgtgtgcagggttcccgctgcctctggccggcaggcgtccgggctgcaggtgggccggcaggcaggtgttagcgggaagggagcacaggtagcgaggtgggatcggcgacctggctagggtgtcggcagaatggaatgcgcggccggggtccgaggggtcggaggaaaggacaggatgctggatggcgtgcctctggtgggagacgtgtgtgcggctccacgagcgagtcgctcgctgctgctcagcggtcagaagttggagggtgaaaccgggcgggctgttcaggccaggacgcctctgggcagcgcagcggcgattcaaggcggtgggcggtgggcgcaggccggtgggaggaaggagggaaaaggaggaataggggaagaatctgggctgtgtctgtttgggcgagtgaggagaaggcgggcggaggagataggcagggaagagcgtggaaggtggtcgcggtcgctcgctgtgtgtggggccagggaagagggcgtgtgaggtggtggggagggcgtctgtccgaagggcaattggtagagggtcgcgggcgctggcgcatggtcctgggctgtttctgcgacagccggcgggtgggcaggaagaacggacgtgcctgagaagcggcggcgttttggaggcttgcttcaagggggctggagtctggagagcgggcaagggctcaaggcaggaagcggccaaaggtgctccagggttgccatgggcgttgccctccggcgggcgggccaaaaggtcggcttgtcaggagtgggattcgaacccacgcctccaggggaga

SEQ ID NO: 2975 - DNA, 2438 bp, Artificial sequence
  DNA replication origin
catgtgcggggttggggttcctgacagacttctagccgaagtttgcttcccattgcctgacctacgctctctatcgtctctccaaatgtcaaggaacatgtggagatggtacctatccccagcgccaagattcgctgtgggacttttttcccatcccctccttagcacagatgagcccagttctccaacctctattcaacccgtactgatcttattgtttggctgattccccaggtcaatggcagaagtcagtcgacttcttgccaaaacccctctgtaggggcaaagtagacgtccaaccaactgcacaaacctgtcccgtgtcattcgtgggatcttggcacagtcggatcacctgcagggaccagaccctatcggggatagagatgtttgccatccccacgggaggctggcttgcttgccagcgtgttgtgggtggatgtcagtgggtgacagcgacggacgaaggtgtccgatcccgtggctggcgtccaccctagcccggggcaaggggctgacaccaaggaaaggagagaagcatgtcgcgtgctgggagctggaagaaggagtccagggtgtccagggggtgcacagggctggctggccaggtctgggagtgaggctgtgcagtcaaacggaggttgtgcagatgcctggggcgttagggcacctcgcgggctgcctatgccataggtcggagggatcccagctggtggcggagctggcgtgagtctgaagaggctgaaggaggccagggctgggggatatgagtcgtctgagagaggggcattgacggcgagacggagagttggctgtgtgagacagagacagagagatagagacatagagacagagagagagagagagacagagaaagacagagagtgagagagagagagagtgagagtgtgagtgtgtgtgtgtgtgtgtgcgcgtcagagtgtgtgtgtgagtgaaggggtgggtggcgtgagacaaaggtgggggagggagggctgagcctgaaggctggtgggaacagtacattttcagccggttggtctgggcaggaacgaagtctgtgtggtcaaaggggacccgcgccggcgagactgggatgctgcttgggctgggcggtcagagtatggagtggggctggggtgaggtggcaagcagcccagggtgggagagacatcgtgacagagcgactggaggccacgtcccacgtcccaaaagggtagggaatgcaactggacccgagacataaataagccgtcttcaggacgcacattcacgtctcaggcatgtgtctggggctgagatgaaaagaggtccgagggggagaaacaaggcagcatcctcgactaaagtggtggattggggttaggttgggagttgcgacatggcggtggtggtgccggcagaatgaggggagagagtgtggagtagccggaacacggtgaatatagacggtgcacatgccacgcgtacactcgtgtggtcgcgttaaggactgtgtgaccaactaggggaaagtgatgagttactccctggagtcgcgacttccttcctactggaagggcaaccatggcatcattttctggatgtggggagccagcgagggggggggggggagagagacagagagagacagagagagagagagagagagagagagagagagagaggtcgaggcggtgaaatgtgaagagaaggggtggtgcgagtggctgcaagcccgtggtgcctggcggtgttccgtgaagtgaaatgcgtcgggcagaggcggtggcagggcaatgaagagaaacaggaccaggaggctgccaagttctggtgtctggcgcgctctcgtgtctggaggggttgttgtcaccaaggtgtgtgggtgcgtggggtaggctcatccctaagtcagtcgagagaggcacggaagaaagggcagagggccgtcgcgcgtgggagcgcagccggtgccggactcgctcgcgcgccccgagtgtaaggaggcggcagaggcgagcgcagctacgccttggtgctgctgcagcaccaaaatgggagggcgtgctgcatgggccgggaatcgaacccgggcctcccgcgtggcaggcgagaattctaccactgaaccacccatgcaccgatggcaaacgccaacggaagctggcacagcggaactcgccaccagccgccgttcactggtcaccgcctgccgtgggcctccgtcctattgcagcgtccacgagaggctggcccgatggggcgagcagaaggggaggctctcgtcacgtcgagggacctgaggcggggcgcggagggagagcggagggagagaggccgactcgtcccatcttgcgctttctctgccgcccagggtcgagagactgcccgccggggtctccaggggaaggaccggccgtggcccgcgcccgaatgcccgtgtgggcagatttgct

SEQ ID NO: 2976 - DNA, 2119 bp, Artificial sequence
  DNA replication origin
actctccgtctcgccgtcaatgcccctctctcagacgactcatatcccccagccctggcctccttcagcctcttcagactcacgccagctccgccaccagctgggatccctccgacctatggcataggcagcccgcgaggtgccctaacgccccaggcatctgcacaacctccgtttgactgcacagcctcactcccagacctggccagccagccctgtgcaccccctggacaccctggactccttcttccagctcccagcacgcgacatgcttctctcctttccttggtgtcagccccttgccccgggctagggtggacgccagccacgggatcggacaccttcgtccgtcgctgtcacccactgacatccacccacaacacgctggcaagcaagccagcctcccgtggggatggcaaacatctctatccccgatagggtctggtccctgcaggtgatccgactgtgccaagatcccacgaatgacacgggacaggtttgtgcagttggttggacgtctactttgcccctacagaggggttttggcaagaagtcgactgacttctgccattgacctggggaatcagccaaacaataagatcagtacgggttgaatagaggttggagaactgggctcatctgtgctaaggaggggatgggaaaaaagtcccacagcgaatcttggcgctggggataggtaccatctccacatgttccttgacatttggagagacgatagagagcgtaggtcaggcaatgggaagcaaacttcggctagaagtctgtcaggaaccccaaccccgcacatgcgctttggtcagcctggccgttgggttttccccacgaactgctgcatctccacgcttcaatgcccgtggccaggttggtctgactaacgggacctctcaagattcattttcacatccagaataggcgagaatctcaaacctgtcgacggtgagcgggagcatgtgtacgcacatgcacgtgtacgttgcgggaagtcagggaccccgaacggagggagcggctggagctgcggccgaggcacgtaaattgtgaggatttcatttcaatacggacattcatcagttcccaaataatgcttttataatttcttacgcctgtctttactttaatctcttaatcctgttatcttcgtaagctgaggatgtacgtcacctcaggaccgctgtgacaattgtgttgactctacaaattgatggtaaaacgtgtgtgtttgaacagcatgaaatcagggcaccttgaaaaagaatagaataacagcgacttttagggaacaggggaagacaacggtaaggtctgactgcctgcgaggtcgggcagaaagagccatatttttcttcttgcagagagcctatgaaggacgtgcaggtagggaagatgtggctaagacaacctaagtgtccatcggccgggaaatggattaacaaaaatgtggcatatagacaccatggaatactctttggccatagaaaagaacgaaatcctctggtctgcagcaacagaggcggagctaaaggtcacgatggaacatcaaacgagccgggcacagaaagacagagagggcaggttcttactccaatcctgggagctcaaaatgttcaccttgtggaggtagagagtagaacgatagacaccagaggctggagagggtgtgtgggtgactgcggtgaagagaggttggtgaaatgggtccgagcatgcgtttggatggagggaatacgttccaataatgttctacggcggagtagggcgactaggggtaacaacgatgtattagtgcttgtttccgaagagctcctggaagacagcacctgagatgctcccaacaggtagagatgacagatacccacgggatggatgccctacatcccctcagttgaccatcgatcactacgcgatgtacacgcgttaccacacgtcacaggaatcccatggatatcatgtccgcatgaagaaaaacatagtcatgctgccagggtgattgtcgcagctctgcctccctagcgctatggcccgtggtctcggctcctcaagttccgctgccattactaccaaagccgctgacacccgtggagcccaatcacggatccca

SEQ ID NO: 2977 - DNA, 1104 bp, Artificial sequence
  DNA replication origin
gtattagtgcttgtttccgaagagctcctggaagacagcacctgagatgctcccaacaggtagagatgacagatacccacgggatggatgccctacatcccctcagttgaccatcgatcactacgcgatgtacacgcgttaccacacgtcacaggaatcccatggatatcatgtccgcatgaagaaaaacatagtcatgctgccagggtgattgtcgcagctctgcctccctagcgctatggcccgtggtctcggctcctcaagttccgctgccattactaccaaagccgctgacacccgtggagcccaatcacggatcccacgccttgggaaagccagtgcgcttgctggcatgagtggctctggcgggtggcccaaccattaggcgcagatcccccgcagccgagagagaagtggcccgtcagccactcggcttggcttggcagaagccgctccgctcgagagtcctggcccatcccgtggccagccgagagtgcgagggtggcggtggtggtggtggcgggtcacctggcggccatgggaggagaaagcctgacctggccagtgggctttgccgctgacaaagagtgggagcgaggcgagcacctgacaaggaagggctgtgaagctgatgttgcgaaggtggcgccagcgaggccaaaaggagggatgggtggaggtaggcggggagcgttggggcggcgcacgtggaagccgcgggaggttgtggctggggcgcgggagaagcgagccagcctgttggtcaaaaggggaggtgtgaaggggcctggcagttggcaggcagagccaacgaaggaaggcttccctgaccgggaatcgaacccgggccgcggcggtgagagcgccgaatcctaaccactagaccaccagggagaggcggcttcagggcccggcttgcgcctcctggccccagcgcctctggccccagcactgggcgctaccttggcgcctgtcccctgcttcgctttaaaacaaacacccgcaaccagcccccgcgacgccggcggcaaccggcctgccctcacgagcagctctggccctgttcgcagcacaccctccaaacaccgcgcgcctccttccccg

SEQ ID NO: 2978 - DNA, 967 bp, Artificial sequence
  DNA replication origin
gaagcggccaaaggtgctccagggttgccatgggcgttgccctccggcgggcgggccaaaaggtcggcttgtcaggagtgggattcgaacccacgcctccaggggagactgcgacctgaacgcagcgccttagaccgctcggccatcctgacggcgcgccggggcgcgtcgccgctggcatggctgggacccggcgcgaacgcctgcgcccttggccggcgcctgtctgggttcggtgcgcaaccgacggaccgcgcgggcggagcgggcgccaagtgaacggagccggctggcgttggcgtggacgcccccgcgtccccaccccggacccaaagggtccgcgtcgggccggccgccgccggcgcacgccccagcccccgcgcctccgctcgccgaaccccgcagggcgtgcgcccaccgcgtcctaggagcagcggcctgactgtttcgcccgcgcctcctcctgccccggcgcgatccccgcgttggagacagcaggcagggcgcgcggggaggttccacgccgctccggtacctgtcggggtccggctccggctccgggtcccagcgggatcgcagggtgctttgttgggtgtcggggtaggtcgtgccaacggtggcggggggcgggtggcaggtgacgggtggcgtgtggcgggtggcgggcggcgggcggcgggtggaaggcgagcacgcgcccggcccctgccgtcgggggaggggatcaaggcagggctaggcgtccgcggtcggagtggggtctggcgtcccggcgaccgtcgccgtcgtcctcgttagtatagtggtgagtatccccgcctgtcacgcgggagaccggggttcgattccccgacggggaggcagccgtgctttttgggccgccgcctcggacccagcctgtgggccctccttctctctccttcctccgccctcccgctagtcgcagggcgccatctcgggcctggcc

SEQ ID NO: 2979 - DNA, 1273 bp, Artificial sequence
  DNA replication origin
tttttttttcaccaccgtggggccagccttctcacttgtgtcaccagcaggtgagaggcgggatgggtgtgtcagcgagcgggggcggcgatggggaacgggtctcgcagccgtggcgtgcggctcagaaacgcagaccaggtccgtgggcgcctcgctcctgcgctctgacccacgccaccggctcgcacttggggtccggccccctgggctggtagggaggctggagcgcgagaaaggagcggaggagcgcttaggcagagccgcagctggctgaccctggagaaggcgcgctgggtgttgctgggacggcccaggccgcggcttcccgcgtggggatgcgctgtggcgcagagctggtcccggcggggccaggcgtttgtgggcgggtgacggggatctagggcttccgctcgtgattcctcttgggctgtctttccgggtttggactcgcctgccaggctgtgtgcagggttcccgctgcctctggccggcaggcgtccgggctgcaggtgggccggcaggcaggtgttagcgggaagggagcacaggtagcgaggtgggatcggcgacctggctagggtgtcggcagaatggaatgcgcggccggggtccgaggggtcggaggaaaggacaggatgttggatggcgtgcctctggtgggagacgtgtgtgcggctccacgagcgagtcgctcgctgctgctcagcggtcagaagttggagggtgaaaccgggcgggctgttcaggccaggacgcctctgggcagcgcagcggcgattcaaggcggtgggcggtgggcggaggccggtgggaggaaggagggaaaaggaggaataggggaagaatctgggctgtgtctgtttgggcgagtgaggagaaggcgggcggaggagataggcagggaagagcgtggaaggtggtcgcggtcgctcgctgtgtgtggggccagggaagagggcgtgtgaggtggtggggagggcgtctgtccgaagggcaattggtagagggtcgcgggcgctggcgcatggtcctgggctgtttctgcgacagccggcgggtgggcaggaagaacggacgtgcctgagaagcggcggcgttttggaggcttgcttcaaggggactggagtctggagagcgggcaagggctcaaggcaggaagcggccaaaggtgctccagggttgccatgggcgttgccctccggcgggcgggccaaaaggtcggcttgtcaggagtgggattcgaacccacgcctccaggggagactgcgac

SEQ ID NO: 2980 - DNA, 2340 bp, Artificial sequence
  DNA replication origin
cgtctctccaaatgtcaaggaacatgtggagatggtacctatccccagcgccaagattcgctgtgggactttttttcccctcccctccttagcacagatgagcccagttctacaaccctctattcaacccgtactgatcttattgtttggctgattccccaggtcaatggcagaagtcagtcgacttcttgccaaaacccctctgtaggggcaaagtagacgtccaaccaactgcacaaacctgtcccgtgtcattcgtgggatcttggcacagtcggatcacctgcagggaccagaccctatcggggatagagatgtttgccatccccacgggaggctggcttgcttgccagcgtgttgtgggtggatgtcagtgggtgacagcgacggacgaaggtgtccgatcccgtggctggcgtccaccctagcccggggcaaggggctgacaccaaggaaaggagagaagcatgttgcgtgctgggagctggaagaaggagtccagggtgtccagggggtgcacagggctggctggccaggtctgggagtgaggctgtgcagtcaaacggaggttgtgcagatgcctggggcgttagggcacctcgcgggctgcctatgccataggtgggagggatcccagctggtggcggagctggcgtgagtctgaagaggctgaaggaggccagggctgggggatatgagtcgtctgagagaggggcattgacggcgagacggagagttggctgtgtgagacagagacagagagatagagacatagagacagagagagagagagagacagagaaagacagagagagagagagagagagagagagtgtgagtgtgtgtgtgtgtgtgtgtgcgtgcgcgtctgagtgtgtgtgtgagtgaaggggtgggtggcgtgagaccaaggtgggggagggagggctgagcctgaaggctggtgggaacagtacattttcagccggttggtctgggcaggaacgaagtctgtgtggtcaaaggggacccgcgccggcgagactgggatgctgcttgggctgggcggtcagagtatggagtggggctggggtgaggtggcaagcagcccagggtgggagagacatcgtgacagagcgactggaggccacgtcccacgtcccaaaagggtagggaatgcaactggacccgagacataaataagccgtcttcaggacgcacattcacgtctcaggcatgtgtctggggctgagatgaaaagaggtccgagggagagaaacaaggcagcatcctcgactaaagtggtggattggggttaggttgggagttgcgacatggcggtggtggtgccggcagaatgaggggagagagtgtggagtagccggaacacggtgaatatagacggtgcacatgccacgcgtacactcgtgtggtcgcgttaaggactgtgtgaccaactaggggaaagtgatgagttactccctggagtcgcgacttccttcctactggaagggcaaccatggcatcattttctggatgtggggagccagcgagggggggggagagagagacagagagagagagagagagagaggtcgaggcggtgaaatgtgaagagaaggggtggtgcgagtggctgcaagcccgtggtgcctggcggtgttccgtgaagtgaaatgcgtcgggcagaggcggtggcagggcaatgaagagaaacaggaccaggaggctgccaagttctggtgtctggcgcgctctcgtgtctggaggggttgttgtcaccaaggtgtgtgggtgcggggggtaggctcatccctaagtcagtcgagagaggcacggaagaaagggcagagggccgtcgcgcgtgggagcgcagccggtgccggactcgctcgcgcgccccgagtgtaaggaggcggcagaggcgagcgcagctacgccttggtgctgctgcagcaccaaaatgggagggcgtgctgcatgggccgggaatcgaacccgggcctcccgcgtggcaggcgagaattctaccactgaaccacccatgcaccgatggcaaacgccaacggaagctggcacagcggaactcgccaccagccgccgttcactggtcaccgcctgccgtgggcctccgtcctattgcagcgtccacgagaggctggcccgatggggcgagcagaaggggaggctctcgtcacgtcgagggacctgaggcggggcgcggagggagagcggagggagagaggccgactcgtcccatcttgcgctttctctgccgcccagggtcgagagactgcccgccggggtctccaggggaaggaccggccgtggcccgcgcccgaatgcccgtgtgggcagatt

SEQ ID NO: 2981 - DNA, 2172 bp, Artificial sequence
  DNA replication origin
tgtctctatgtctctatctctctgtctctgtctcacacagccaactctccgtctcgccgtcaatgcccctctctcagacgactcatatcccccagccctggcctccttcagcctcttcagactcacgccagctccgccaccagctgggatccctcccacctatggcataggcagcccgcgaggtgccctaacgccccaggcatctgcacaacctccgtttgactgcacagcctcactcccagacctggccagccagccctgtgcaccccctggacaccctggactccttcttccagctcccagcacgcaacatgcttctctcctttccttggtgtcagccccttgccccgggctagggtggacgccagccacgggatcggacaccttcgtccgtcgctgtcacccactgacatccacccacaacacgctggcaagcaagccagcctcccgtggggatggcaaacatctctatccccgatagggtctggtccctgcaggtgatccgactgtgccaagatcccacgaatgacacgggacaggtttgtgcagttggttggacgtctactttgcccctacagaggggttttggcaagaagtcgactgacttctgccattgacctggggaatcagccaaacaataagatcagtacgggttgaatagagggttgtagaactgggctcatctgtgctaaggaggggaggggaaaaaaagtcccacagcgaatcttggcgctggggataggtaccatctccacatgttccttgacatttggagagacgatagagagcgtaggtcaggcaatgggaagcaaacttgggctagaagtctgtcaggaaccccaaccccgcacatgcgctttggtcagcctggccgttgggttttccccacgaactgctgcatctccacgcttcaatgcccgtggccaggttggtctgactaacgggacctctcaagattcattttcacatccagaataggcgagaatctcaaacctgtcgacggtgagcgggagcatgtgtacgcacatgcacgtgtacgttgcgggaagtcagggaccccgaacggagggagcggctggagctgcggccgaggcacgtaaattgtgaggatttcatttcaatacggacattcatcagttcccaaataatgcttttataatttcttacgcctgtctttactttaatctcttaatcctgttatcttcgtaagctgaggatgtacgtcacctcaggaccgctgtgacaattgtgttgactctacaaattgatggtaaaacgtgtgtgtttgaacagcatgaaatcagggcaccttgaaaaagaatagaataacagcgacttttagggaacaggggaagacaacggtaaggtctgactgcctgcgaggtcgggcagaaagagccatatttttcttcttgcagagagcctatgaaggacgtgcaggtagggaagatgtggctaagacaacctaagtgtccatcggccgggaaatggattaacaaaaatgtggcatatagacaccatggaatactctttggccatagaaaagaacgaaatcctctggtctgcagcaacagaggcggagctaaaggtcacgatggaacatcaaacgagccgggcacagaaagacagagagggcaggttcttactccaatcctgggagctcaaaatgttcaccttgtggaggtagagagtagaacgatagacaccagaggctggagagggtgtgtgggtgactgcggtgaagagaggttggtgaaatgggtccgagcatgcgtttggatggagggaatacgttccaataatgttctacggcggagtagggcgactaggggtaacaacgatgtattagtgcttgtttccgaagagctcctggaagacagcacctgagatgctcccaacaggtagagatgacagatacccacgggatggatgccctacatcccctcagttgaccatcgatcactacgcgatgtacacgcgttaccacacgtcacaggaatcccatggatatcatgtccgcatgaagaaaaacatagtcatgctgccagggtgattgtcgcagctctgcctccctagcgctatggcccgtggtctcggctcctcaagttccgctgccattactaccaaagccgctgacacccgtggagcccaatcacggatcccacgccttgg

SEQ ID NO: 2982 - DNA, 1146 bp, Artificial sequence
  DNA replication origin
cttgtttccgaagagctcctggaagacagcacctgagatgctcccaacaggtagagatgacagatacccacgggatggatgccctacatcccctcagttgaccatcgatcactacgcgatgtacacgcgttaccacacgtcacaggaatcccatggatatcatgtccgcatgaagaaaaacatagtcatgctgccagggtgattgtcgcagctctgcctccctagcgctatggcccgtggtctcggctcctcaagttccgctgccattactaccaaagccgctgacacccgtggagcccaatcacggatcccacgccttgggaaagccagtgcgcttgctgacatgagtggctctggcgggtggcccaaccattaggcgcagatcccccgcagccgagagagaagtggcccgtcagccactcggcttggcttggcagaagccgctccgctcgagagtcctggcccatcccgtggccagccgagagtgcgagggtggcggtggtggtggtggcgggtcacctggcggccatgggaggagaaagcctgacctggccagtgggctttgccgctgacaaagagtgggagcgaggcgagcacctgacaaggaagggctgtgaagctgatgttgcgaaggtggcgccagcgaggccaaaaggagggatgggtggaggtaggcggggagcgttggggcggcgcacgtggaagccgagggaggttgtggctggggcgcgggagaagcgagccagcctgttggtcaaaaggggaggtgtgaaggggcctggcagttggcaggcagagccaacgaaggaaggcttccctgaccgggaatcgaacccgggccgcggcggtgagagcgccgaatcctaaccactagaccaccagggagaggcggcttcagggcccggcttgcgcctcctggccccagcgcctctggccccagcactgggcgctaccttggcgcctgtcccctgcttcgctttaaaacaaacaccgcaaccagcccccgcgacgccggcggcaaccggcctgccctcacgagcagctctggccctgttcgcagcacaccctccaaacaccgcgcgcctccttccccggcgcacaggcacgcagccacaggccaagctgcgacgcgagctccgcgacggg

SEQ ID NO: 2983 - DNA, 996 bp, Artificial sequence
  DNA replication origin
ctcaaggcaggaagcggccaaaggtgctccagggttgccatgggcgttgccctccggcgggcgggccaaaaggtcggcttgtcaggagtgggattcgaacccacgcctccaggggagactgcgacctgaacgcagcgccttagaccgctcggccatcctgacggcgcgccggggcgcgtcgccgctggcatggctgggacccggcgcgaacgcctgcgcccttggccggcgcctgtctgggttcggtgcgcaaccgacggaccgcgcgggcggagcgggcgccaagtgaacggagccggctggcgttggcgtggacgcccccgcgtccccaccccggacccaaagggtccgcgtcgggccggccgccgccggcgcacgccccagcccccgcgcctccgctcgccgaaccccgcagggcgtgcgcccaccgcgtcctaggagcagcggcctgactgtttcgcccgcgcctcctcctgccccggcgcgatccccgcgttggagacagcaggcagggcgcgcggggaggttccacgccgctccggtacctgtcggggtccggctccggctccgggtcccagcgggatcgcagggtgctttgttgggtgtcggggtaggtcgtgccaacggtggcggggggcgggtggcaggtgacgggtggcgtgtggcgggtggcgggcggcgggcggcgggtggaaggcgagcacgcgcccggcccctgccgtcgggggaggggatcaaggcagggctaggcgtccgcggtcggagtggggtctggcgtcccggcgaccgtcgccgtcgtcctcgttagtatagtggtgagtatccccgcctgtcacgcgggagaccggggttcgattccccgacggggaggcagccgtgctttttgggccgccgcctcggacccagcctgtgggccctccttctctctccttcctccgccctcccgctagtcgcagggcgccatctcgggcctggccccttggccccctgggcctc

SEQ ID NO: 2984 - DNA, 1391 bp, Artificial sequence
  DNA replication origin
tgcccgtgtgggcagatttgctgtggcgggccttgctgagcgcggatccccggcacagacccagagtttttgtgttttgtttttgttgtttctttctgtctttctttctttcgtgaggtgttttttttttcaccaccgtggggccagccttctcacttgtgtcaccagcaggtgagaggcgggatgggtgtgtcagcgagcgggggcggcgatggggaacgggtctcgcagccgtggcgtgcggctcagaaacgcagaccaggtccgtgggcgcctcgctcctgcgctctgacccacgccaccggctcgcacttggggtccggccccctgggctggtagggaggctggagcgcgagaaaggagcggaggagcgcttcggcagagccgcagctggctgaccctggagaaggcgcgctgggtgtggctgggacggcccaggccgcggcttcccgcgtggggatgcgctgtggcgcagagctggtcccggcggggccaggcgtttgtgggcgggtgacggggatctagggcttccgctcgtgattcctcttgggctgtctttccgggtttggactcgcctgcccggctgtgtgcagggttcccgctgcctctggccggcaggcgtccgggctgcaggtgggccggcaggcaggtgttagcgggaagggagcacaggtagcgaggtgggatcggcgacctggctagggtgtcggcagaatggaatgcgcggccggggtccgaggggtcggaggaaaggacaggatgctggatggcgtgcctctggtgggagacgtgtgtgcggctccacgagcgagtcgctcgctgctgctcagcggtcagaagttggagggtgaaaccgggcgggctgttcaggccaggacgcctctgggcagcgcagcggcgattcaaggcggtgggcggtgggcgcaggccggtgggaggaaggagggaaaaggaggaataggggaagaatctgggctgtgtctgtttgggcgagtgaggagaaggcgggcggaggagataggcagggaagagcgtggaaggtggtcgcggtcgctcgctgtgtgtggggccagggaagagggcgtgtgaggtggtggggagggcgtctgtccgaagggcaattggtagagggtcgcgggcgctggcgcatggtcctgggctgtttctgcgacagccggcgggtgggcaggaagaacggacgtgcctgagaagcggcggcgttttggaggcttgcttcaagggggctggagtctggagagcgggcaagggctcaaggcaggaagcggccaaaggtgctccagggttgccatgggcgttgccctccggcgggcgggccaaaaggtcggcttgtcaggagtgggattcgaacccacgcctccaggggagactgc

SEQ ID NO: 2985 - DNA, 2150 bp, Artificial sequence
  DNA replication origin
gggttggggttcctgacagacttctagccgaagtttgcttcccattgcctgacctacgctctctatcgtctctccaaatgtcaaggaacatgtggagatggtacctatccccagcgccaagattcgctgtgggacttttttcccatcccctccttagcacagatgagcccagttctccaacctctattcaacccgtactgatcttattgtttggctgattccccaggtcaatggcagaagtcagtcgacttcttgccaaaacccctctgtaggggcaaagtagacgtccaaccaactgcacaaacctgtcccgtgtcattcgtgggatcttggcacagtcggatcacctgcagggaccagaccctatcggggatagagatgtttgccatccccacgggaggctggcttgcttgccagcgtgttgtgggtggatgtcagtgggtgacagcgacggacgaaggtgtccgatcccgtggctggcgtccaccctagcccggggcaaggggctgacaccaaggaaaggagagaagcatgtcgcgtgctgggagctggaagaaggagtccagggtgtccagggggtgcacagggctggctggccaggtctgggagtgaggctgtgcagtcaaacggaggttgtgcagatgcctggggcgttagggcacctcgcgggctgcctatgccataggtcggagggatcccagctggtggcggagctggcgtgagtctgaagaggctgaaggaggccagggctgggggatatgagtcgtctgagagaggggcattgacggcgagacggagagttggctgtgtgagacagagacagagagatagagacatagagacagagagagagagagagacagagaaagacagagagtgagagagagagagagtgagagtgtgagtgtgtgtgtgtgtgtgtgcgcgtcagagtgtgtgtgtgagtgaaggggtgggtggcgtgagacaaaggtgggggagggagggctgagcctgaaggctggtgggaacagtacattttcagccggttggtctgggcaggaacgaagtctgtgtggtcaaaggggacccgcgccggcgagactgggatgctgcttgggctgggcggtcagagtatggagtggggctggggtgaggtggcaagcagcccagggtgggagagacatcgtgacagagcgactggaggccacgtcccacgtcccaaaagggtagggaatgcaactggacccgagacataaataagccgtcttcaggacgcacattcacgtctcaggcatgtgtctggggctgagatgaaaagaggtccgagggggagaaacaaggcagcatcctcgactaaagtggtggattggggttaggttgggagttgcgacatggcggtggtggtgccggcagaatgaggggagagagtgtggagtagccggaacacggtgaatatagacggtgcacatgccacgcgtacactcgtgtggtcgcgttaaggactgtgtgaccaactaggggaaagtgatgagttactccctggagtcgcgacttccttcctactggaagggcaaccatggcatcattttctggatgtggggagccagcgagggggggggggggagagagacagagagagacagagagagagagagagagagagagagagagagagaggtcgaggcggtgaaatgtgaagagaaggggtggtgcgagtggctgcaagcccgtggtgcctggcggtgttccgtgaagtgaaatgcgtcgggcagaggcggtggcagggcaatgaagagaaacaggaccaggaggctgccaagttctggtgtctggcgcgctctcgtgtctggaggggttgttgtcaccaaggtgtgtgggtgcgtggggtaggctcatccctaagtcagtcgagagaggcacggaagaaagggcagagggccgtcgcgcgtgggagcgcagccggtgccggactcgctcgcgcgccccgagtgtaaggaggcggcagaggcgagcgcagctacgccttggtgctgctgcagcaccaaaatgggagggcgtgctgcatgggccgggaatcgaacccgggcctcccgcgtggcaggcgagaattctaccactgaaccacccatgcaccgatggcaaacgccaacggaagctggcacagcgga

SEQ ID NO: 2986 - DNA, 2125 bp, Artificial sequence
  DNA replication origin
ccaactctccgtctcgccgtcaatgcccctctctcagacgactcatatcccccagccctggcctccttcagcctcttcagactcacgccagctccgccaccagctgggatccctccgacctatggcataggcagcccgcgaggtgccctaacgccccaggcatctgcacaacctccgtttgactgcacagcctcactcccagacctggccagccagccctgtgcaccccctggacaccctggactccttcttccagctcccagcacgcgacatgcttctctcctttccttggtgtcagccccttgccccgggctagggtggacgccagccacgggatcggacaccttcgtccgtcgctgtcacccactgacatccacccacaacacgctggcaagcaagccagcctcccgtggggatggcaaacatctctatccccgatagggtctggtccctgcaggtgatccgactgtgccaagatcccacgaatgacacgggacaggtttgtgcagttggttggacgtctactttgcccctacagaggggttttggcaagaagtcgactgacttctgccattgacctggggaatcagccaaacaataagatcagtacgggttgaatagaggttggagaactgggctcatctgtgctaaggaggggatgggaaaaaagtcccacagcgaatcttggcgctggggataggtaccatctccacatgttccttgacatttggagagacgatagagagcgtaggtcaggcaatgggaagcaaacttcggctagaagtctgtcaggaaccccaaccccgcacatgcgctttggtcagcctggccgttgggttttccccacgaactgctgcatctccacgcttcaatgcccgtggccaggttggtctgactaatgggacctctcaagattcattttcacatccagaataggcgagaatctcaaacctgtcgacggtgagcgggagcatgtgtacgcacatgcacgtgtacgttgcgggaagtcagggaccccgaacggagggagcggctggagctgcggccgaggcacgtaaattgtgaggatttcatttcaatacggacattcatcagttcccaaataatgcttttataatttcttacgcctgtctttactttaatctcttaatcctgttatcttcgtaagctgaggatgtacgtcacctcaggaccgctgtgacaattgtgttgactctacaaattgatggtaaaacgtgtgtgtttgaacagcatgaaatcagggcaccttgaaaaagaatagaataacagcgacttttagggaacaggggaagacaacggtaaggtctgactgcctgcgaggtcgggcagaaagagccatatttttcttcttgcagagagcctatgaaggacgtgcaggtagggaagatgtggctaagacaacctaagtgtccatcggccgggaaatggattaacaaaaatgtggcatatagacaccatggaatactctttggccatagaaaagaacgaaatcctctggtctgcagcaacagaggcggagctaaaggtcacgatggaacatcaaacgagccgggcacagaaagacagagagggcaggttcttactccaatcctgggagctcaaaatgttcaccttgtggaggtagagagtagaacgatagacaccagaggctggagagggtgtgtgggtgactgcggtgaagagaggttggtgaaatgggtccgagcatgcgtttggatggagggaatacgttccaataatgttctacggcggagtagggcgactaggggtaacaacgatgtattagtgcttgtttccgaagagctcctggaagacagcacctgagatgctcccaacaggtagagatgacagatacccacgggatggatgccctacatcccctcagttgaccatcgatcactacgcgatgtacacgcgttaccacacgtcacaggaatcccatggatatcatgtccgcatgaagaaaaacatagtcatgctgccagggtgattgtcgcagctctgcctccctagcgctatggcccgtggtctcggctcctcaagttccgctgccattactaccaaagccgctgacacccgtggagcccaatcacggatcccacgc

SEQ ID NO: 2987 - DNA, 1165 bp, Artificial sequence
  DNA replication origin
ctcgcccgcggcttggtcgcccgcagccgggcggcctcctctggcccccacggcgcccagagagctgccggcccaaagtgggtgtcggaagaggctttctgcgaggcacagggcccggcgcccggtgggaggcggaggagtggggaccccgtcggcgccggccgtgtccccgccgggcacctggtggggaagggctctggcggccccgggcggcgagggagcgagagcgcccccagaggcaggcgggcggaacggggcagccgcgctggccttgccccggtggggcgcggggcggcctttggcggggccgcggcagcgcggagctgcgggcgggcggacggaccgggcgtcggggccggcctgccccgggcgtcggcggcgcgctggtgggagccccgggccggcgcggcggggctgcccgcgccgtgcggcgttggtggtatagtggtgagcatagctgccttccaagcagttgacccgggttcgattcccggccaacgcagcgggcggaccttttgcggaggtccccgtcgcggagctcgcgtcgcagcttggcctgtggctgcgtgcctgtgcgccggggaaggaggcgcgcggtgtttggagggtgtgctgcgaacagggccagagctgctcgtgagggcaggccggttgccgccggcgtcgcgggggctggttgcgggtgtttgttttaaagcgaagcaggggacaggcgccaaggtagcgcccagtgctggggccagaggcgctggggccaggaggcgcaagccgggccctgaagccgcctctccctggtggtctagtggttaggattcggcgctctcaccgccgcggcccgggttcgattcccggtcagggaagccttccttcgttggctctgcctgccaactgccaggccccttcacacctccccttttgaccaacaggctggctcgcttctcccgcgccccagccacaacctcccgcggcttccacgtgcgccgccccaacgctccccgcctacctccacccatccctccttttggcctcgctggcgccaccttcgcaacatcagcttcacagcccttccttgtcaggtgctcgcctcgctcccactctttgtcagcggcaaagcccactggccaggtcaggctttctcctcccatggccgccaggtgacccgcca

SEQ ID NO: 2988 - DNA, 1020 bp, Artificial sequence
  DNA replication origin
ggcaagggctcaaggcaggaagcggccaaaggtgctccagggttgccatgggcgttgccctccggcgggcgggccaaaaggtcggcttgtcaggagtgggattcgaacccacgcctccaggggagactgcgacctgaacgcagcgccttagaccgctcggccatcctgacggcgcgccggggcgcgtcgccgctggcatggctgggacccggcgcgaacgcctgcgcccttggccggcgcctgtctgggttcggtgcgcaaccgacggaccgcgcgggcggagcgggcgccaagtgaacggagccggctggcgttggcgtggacgcccccgcgtccccaccccggacccaaagggtccgcgtcgggccggccgccgccggcgcacgccccagcccccgcgcctccgctcgccgaaccccgcagggcgtgcgcccaccgcgtcctaggagcagcggcctgactgtttcgcccgcgcctcctcctgccccggcgcgatccccgcgttggagacagcaggcagggcgcgcggggaggttccacgccgctccggtacctgtcggggtccggctccggctccgggtcccagcgggatcgcagggtgctttgttgggtgtcggggtaggtcgtgccaacggtggcggggggcgggtggcaggtgacgggtggcgtgtggcgggtggcgggcggcgggcggcgggtggaaggagagcacgcgcccggcccctgccgtcgggggaggggatcaaggcagggctaggcgtccgcggtcggagtggggtctggcgtcccggcgaccgtcgccgtcgtcctcgttagtatagtggtgagtatccccgcctgtcacgcgggagaccggggttcgattccccgacggggaggcagccgtgctttttgggccgccgcctcggacccagcctgtgggccctccttctctctccttcctccgccctcccgctagtcgcagggcgccatctcgggcctggccccttggccccctgggcctcctgggcccccttggcc

SEQ ID NO: 2989 - DNA, 1885 bp, Artificial sequence
  DNA replication origin
cagacctttgtaatcagtgttacaggacttcaaggcacagcggatgcaaagagtgaagaacagcaagattttttgcatagagcgaaaaaccaaaccttccaaagtgtagaagaggaactgagtcggttgccgctgctggctgccgactgctgggttgggcagcctacctttattcccttatctgacctcatccgcattctgacccactgatcactgcctgccgtaggcctccatcctattggagggtacaagacaggctggcgcgatgaggagggcagaaggggaggctctcctcacatccaggcaactgaggttgggcgcggagggagagcggagggagagaggtcgactcgtcccatcttgcgctttctctgccgcccagggtcgagagactgcccgccggggtctccaggggaaggaccggccgtggcccgcgcccgaatgcccgtgtgggcagatttgctgtggcgggccttgctgagcacggatccccggcacagacccagagtttttgtgttttgtttttgttgtttctttctttctttctttctttctttctttctttctttctttctttctttctttctttcgtgaggtgttttttttttcaccaccgtggggccagccttctcacttgtgtcaccagcaggtgagaggcgggatgggtgtgtcagcgagcgggggcggcgatggggaacgggtctcgcagccgtggcgtgcggctcagaaacgcagaccaggtccgtggtcgcctcgctcctgcgctctgacccacgccaccggctcgcacttggggtccggccccctgggctggtagggaggctggagcgcgagaaaggagcggaggagcgcttcggcagagccgcagctggctgaccctggagaaggcgcgctgggtgtggctgggacggcccaggccgcggcttcccgcgtggggatgcgctgtggcgcagagctggtcccggcggggccaggcgtttgtgggcgggtgacggggatctagggcttccgctcgtgattcctcttgggctgtctttccgggtttggactcgcctgccaggctgtgtgcagggttcccgctgcctctggccggcaggcgtccgggctgcaggtgggccggcaggcaggtgttagcgggaagggagcacaggtagcgaggtgggatcggcgacctggctagggtgtcggcagaatggaatgcgcggccggggtccgaggggtcggaggaaaggacaggatgttggatggcgtgcctctggtgggagacgtgtgtgcggctccacgagcgagtcgctcgctgctgctcagcggtcagaagttggagggtgaaaccgggcgggctgttcaggccaggacgcctctgggcagcgcagcggcgattcaaggcggtgggcggtgggcgcaggccggtgggaggaaggagggaaaaggaggaataggggaagaatctgggctgtgtctgtttgggcgagtgaggagaaggcgggcggaggagataggcagggaagagcgtggaaggtggtcgcggtcgctcgctgtgtgtggggccagggaagagggcgtgtgaggtggtggggagggcgtctgtccgaagggcaattggtagagggtcgcgggcgctggcgcatggtcctgggctgtttctgcgacagccggcgggtgggcaggaagaacggacgtgcctgagaagcggcggcgttttggaggcttgcttcaagggggctggagtctggagagcgggcaagggctcaaggcaggaagcggccaaaggtgctccagggttgccatgggcgttgccctccggcgggcgggccaaaaggtcggcttgtcaggagtgggattcgaacccacgcctccaggggagactgcgacctgaacgcagcgc

SEQ ID NO: 2990 - DNA, 1171 bp, Artificial sequence
  DNA replication origin
aactgcacaaacctgtcccgtgtcattcgtgggatcttggcacagttggatcacccgcagagaccagacccgatcagggatagagatgtttgccatccccacgggaggctagcttgcttgccagcgtgatgtgggtggatgtcaacgggtgacagtgatggacgaaggtgtccattcctgtggccggagtccaccccacactggggcaaggggctgaaaccaaagaaaggacagaagcatgccacatgctgggaggtgggagaaagagtccagagtgtccagggggtgcacaggctgactagcaagatctgggaccgaggctgtccatccagaaggaggttggtcacatgcctagggcattggggcatgttccaaactgcctgtgctggctacctgtgcggtatgagggatgccagctggtgacacaacctgaagcagcccaggactgggggatgtgagtcatgtgagacagggtcattgactgcaagagggagagttgcctgagagagagacactgagagtgagagagaaaaacagagagacagagagagagtgtgtgtgtgtgtgtgtttgtgtgtgtgtctgtgtgtgagtgaaagagcagatggggtgagacaaaggcaggggagggagggctgagcctgaaggctggatggaacagtactttttcagagggttggtctgggaaggaatgaagtctgtgtggacaaaggggacccccaccagcgagactgggatgctgtttgggctaggctgtcagagtatggagtggggctggggtgaggtggcaagcagcccagggtgggagagacatcgtgacagagtgactggaggcgacatcccacgtcccaaaggggtagggaatgcaactggacccgagacataagtaagccgtcttcaggatacacattcacgtctcaggcatgtgtctggggctgagatgaaaagaggtccaagggagagaaacaaggcagcatcctcgactaaagtggtggattggggttaggttgggagttgtgacatggcggtggtggtgccgacagaatgaggggagagagtgtggagtagctggaacacgttgaatatagatggtgcacatgccacgtgcacactcacgtggtcgcgttaaggactgtgtgaccaactaggggaaagtgatgagttactcccc

SEQ ID NO: 2991 - DNA, 1180 bp, Artificial sequence
  DNA replication origin
tctcaactgggcgggaaggtgcgggaaggtgcggaaaggttcgcgaaagttcgcggcggcgggggtcgggtgaggcgcaaaaggataaaaagccggtggaagcggagctgagcagatccgagccgggctggctgcagagaaaccgcagggagagcctcactgctgagcgcccctcgacggcggagcggcagcagcctccgtggcctccagcatccgacaagaagcttcagccatgcaggccccacgggagctcgcggtgggcatcgacctgggcaccacctactcgtgcgtgggcgtgtttcagcagggccgcgtggagatcctggccaacgaccagggcaaccgcaccacgcccagctacgtggccttcaccgacaccgagcggctggtcggggacgcggccaagagccaggcggccctgaacccccacaacaccgtgttcgatgccaagcggctgatcgggcgcaagttcgcggacaccacggtgcagtcggacatgaagcactggcccttccgggtggtgagcgagggcggcaagcccaaggtgcgcgtatgctaccgcggggaggacaagacgttctaccccgaggagatctcgtccatggtgctgagcaagatgaaggagacggccgaggcgtacctgggccagcccgtgaagcacgcagtgatcaccgtgcccgcctatttcaatgactcgcagcgccaggccaccaaggacgcgggggccatcgcggggctcaacgtgttgcggatcatcaatgagcccacggcagctgccatcgcctatgggctggaccggcggggcgcgggagagcgcaacgtgctcatttttgacctgggtgggggcaccttcgatgtgtcggttctctccattgacgctggtgtctttgaggtgaaagccactgctggagatacccacctgggaggagaggacttcgacaaccggctcgtgaaccacttcatggaagaattccggcggaagcatgggaaggacctgagcgggaacaagcgtgccctgcgcaggctgcgcacagcctgtgagcgcgccaagcgcaccctgtcctccagcacccaggccaccctggagatagactccctgttcgagggcgtggacttctacacgtccatcactcgtgcccgctttgaggaactgtgctcagacctcttccgcagcaccctg

SEQ ID NO: 2992 - DNA, 2030 bp, Artificial sequence
  DNA replication origin
cgctgcgccgcccggctgactcagcccgggcgggcgggcgggaggctctcgactgggcgggaaggtgcgggaaggttcgcggcggcggggtcggggaggtgcaaaaggatgaaaagcccgtggaagcggagctgagcagatccgagccgggctggcggcagagaaaccgcagggagagcctcactgctgagcgcccctcgacggcggagcggcagcagcctccgtggcctccagcatccgacaagaagcttcagccatgcaggccccacgggagctcgcggtgggcatcgacctgggcaccacctactcgtgcgtgggcgtgtttcagcagggccgcgtggagatcctggccaacgaccagggcaaccgcaccacgcccagctacgtggccttcaccgacaccgagcggctggtcggggacgcggccaagagccaggcggccctgaacccccacaacaccgtgttcgatgccaagcggctgatcgggcgcaagttcgcggacaccacggtgcagtcggacatgaagcactggcccttccaggtggtgagcgagggcggcaagcccaaggtgcgcgtatgctaccgcggggaggacaagacgttctaccccgaggagatctcgtccatggtgctgagcaagatgaaggagacggccgaggcgtacctgggccagcccgtgaagcacgcagtgatcaccgtgcccacctatttcagtaactcgcagcgccaggccaccaaggacgcgggggccatcgcggggctcaaggtgctgccgatcatcaatgaggccacggcagcagccatcgcctatgggctggaccggcggggcgcgggaaagcgcaacgtgctcatttttgacctgggtgggggcaccttcgatgtgtcggttctctccattgacgccggtgtctttgaggtgaaagccactgctggagatacccacctgggaggagaggacttcgacaaccggctcgtgaaccacttcatggaagaattccggcggaagcatgggaaggacctgagcgggaacaagcgtgccctgcgcaggctgcgcacagcctgtgagcgcgccaagcgcaccccgtcctccagcacccaggccaccctggagatagactccctgttcgagggcgtggacttctacaagtccatcactcgtgcccgctttgaggaactgtgctcagacctcttccgcagcaccctggagccggtggagaaggccctgcgggatgccaagctggacaaggcccagattcatgacttcgtcctggggggagggctccactcgcatccccaaggtgcagaagttgctgcaggacttcttcaacggcaaggagctgaacaagagcatcaaccctgatgaggctgtggcctatggggctgctgtgcaggcggccgtgttgatgggggacaaatgtgagaaagtgcaggatctcctgctgctggatgtggctcccctgtctctggggctggagacagcaggtggggtgatgaccacgctgatccagaggaacgccactatccccaccaagcagacccagactttcaccacctactcggacaaccagcctggggtcttcatccaggtgtatgaggttgagagggccatgaccaaggacaacaacctgctggggcgttttgaactcattggcatccctcctgccccacatggagtcccccagatagaggtgacgtttgacattgatgctaatggcatcctgagcgtgacagccactgacaggagcacaggtaaggctaacaagatcaccaatgacaagggccggctgagcaaggaggaggtggagaggatggttcatgaagccgagcagtacggggctgaggatgaggcccagagggacagagtggctgccaaaaactcgctggaggcccatgtcttccatgtgaaaggttctttgcaagaggaaagccttagggacaagattcccgaagaggacaggcgcaaagtgcaagacaagtgtcaggaagtccttgcctggctggagcacaaccagctggcagagaaggaggag

SEQ ID NO: 2993 - DNA, 952 bp, Artificial sequence
  DNA replication origin
tcccatgtctacttctttctacacagacacagcaacaatctgatttctctatcttttccccacatttcccccttttctattccacaaaaccgccatcgtcatcatggcccgttctcaacgagctgttgggtatagctcacagacggggtggcggctgggcagaggggctcctcacttcccagaaggggcagacgggcagaggcaccccccacctcccggacggggcggtggcagggcagagtcgccccccatctccctcccagatggggtggctgccgggcagaggcgctcctcacttcccagacggggcggctgccgggcggaggggctcctcacttctcagacggggcggctgggcagagacgctcctcacctcccagacggggtcgcggccgggcagaggtgctcctcacatcccagacgtggcggcggggcagaggcgctccccacatctcagacgatgggcagccgggcagagatgctcctcacttcctagatgggatggaggccaggaagaggctctcctcacttcccagactgggcagccgggcagaggggctcctcacatcccagacgatgggaggccaggcagagacgctcctcacttcccagacggggtggcagccgggcagaggctgcaatctcggcactttgggaggccaagtcaggcggctgggaggtggaggttgtagctagccgagaccacgccactgcactccagcctgggcaacattgagcactgagtgaacgagactccgtctgcaatcccggcaccttgggaggccgaggctggcagatcactcgcggttaggagctggagaccagcacggccaacacggcgaaaccccgtctccaccaaaaaaatacgaaaaccagtcaggcgtggcggcgtgcgcctgcaatcgcaggcactcggcaggctgaggcaggagaatcaggcaggtaggttgca

SEQ ID NO: 2994 - DNA, 1012 bp, Artificial sequence
  DNA replication origin
ccgagtttgtgccactgcactgcagcttgggcgacaagagcaagaccatgtctcaaaaaaagaaaaagaacaagaaaaaaagaaagaaaaagaaaagaaaagaaagcggtgggagatggcggggaagggagggagaggagttaagaggagaaagctggaaggctgtgagagtgggagatctccagggctggactttctgtggagtcaagcgtgtctgtggtgtctgtcgcagattggctgattctgcaagtgccctatgcgccagtgttcgagggtgagccgctagtcctgcgctgccgcggctggtacgacaaggtggtctacaagcttcactactaccacgacggccaggccgtgcgctacttccactccagcgccaactacactgtgttacaggcgcgtgccagcgacagcgggcgctaccagtgctcgggcaccatgcgcatcccggtggagagcgcgcccatgttctccgctaaggtggctgtgacagtgcaaggtgggagagaccaggggccccgggagggaggcaaatgagcattgagaaattctgggacaggagctcggcgagaaaagaaggggcggaagttcaaatagctgccacttggagggtttctcttagactatggacgctgtctcctctcctttgccgtgaagcagcgcttgatccgccgcctgcttggaggctggtccctttccccgacgcacatcctggcttctcactctggctggggactcccacagagagggcagctctggcaggggcaggggccactgtgggactgggacgaaggagcgactccctagcgtcctgcaaggcaggcgcagcgtctcctattctaggctgcagaacccgagctgagtgtcagtcgggatgtgacatgaagcgtctggcctggtccctcttcctttcaagctttccccgtccctcgtggactcggtccccctgccccacatttcagaaggctccccttccccctccacgtggacacacggcctcctcccctccccc

SEQ ID NO: 2995 - DNA, 984 bp, Artificial sequence
  DNA replication origin
aggacagtctgagggagaggacagtcttgggggagaggacagtccagtgtaagaggacagtccggggggagaggaaagttcatggggagaggacagtctgagggacaagacagtctgggggaagaggacagtccagaaggagaggacaggacagtctgagggacaggacagtgtaggaggacactccagggggagaggacagtctgagggagaggacagtccagtgtaggaggacattccagggggagaggacagtctgggggagaggacagtctgagggagaggacagcctgagggagaggacagtctgggggggagaggacaatctgagaaagaggacagtccaggggacaggacagtccaggggagaggacagttcgggggggaggacagtcttggggggagggcaggtgtagggggacgacagtccagggggagaggacagtccaggggaggggagaggacagtctgagggagaggacagtctaggggggagggcagtcgtgggggggagagggcagtcttggggaagaggacagtccaggggagaggacagtctgggggataggacagtctgggggagaggacagtccagggcgaaaggacagcctgagcccaggtgctgaggggcctgccatgctacggaagagtgaaactggctggtagatacactcagcatcatgaagcacttgatgttgacattagctttgaataaacccaaatggttcacctatcttgacactgtcaggaaaacagttccactggtggggagcactgattgcaggctgggctggtgagggtcttcatacctgctccaccctgtgctgtcccactagcaaagatgggacctgcccgcccactcccagggcacactgagaaccgaggggccgtgtcatgggctggtattttgactttgctgatggcttgtcatagcaggtgggttacaatcacacccacttgtgaggcgtctcctgattttgtaca

SEQ ID NO: 2996 - DNA, 946 bp, Artificial sequence
  DNA replication origin
tgggtgaagggaaaggggacatcagggatgacctaggtttctggctcagttggtggatggtgtgccatggctttctctgggacagtaaatacaggaggagcaggctgtgaactgaagcaaatgatttccattttcagtcctttaagtttgaggagccatgaggacatccagaaagaaagtgccttgtaggtagttggatggattcacggtgctcagaatcaggacctgggctgagttgttggcaggagctgagtctgcaggaagaatgaggagggaggaggctgaaggtggaactccagagggtggcatttgaaagcaggcagaagaggaagcactagccaaagagctggagaaggccagaccaggcaggtgggcgggaccaggagagagtggtggtggaagctgggggaggaaggaaatgccttctgaggtgggtgggtgggtgtcagcgggggtggggggtggctacctcagtttccaagcaaaaaacagaggcttgactagaataagaggactggagaacaccccaaggggcagcagtcgggttgaggggctgagaggcattgctgacgaggttagttggggagcagacgcccaaggaccctactggggaagcttgccaagtaagcaccagagctgagagctggggagagccaggaaggctcttgcttgctgatttatttcttttagaatgctgagatttgaggaggtttatatgctgaggggaagggccccttcttttcagaccctggtaacgtttgaaacaggaccagctgtctcccaggactgttggttaaacgacagaatacatagaaagtgcgtagtaaatgtcagtgtcaccggcatccttggcagccctgctctgggaaaacctaagatgagatgcagactgcactctcctgtctgcagttcctttgaactttctcccatctttctgtcatccccc

SEQ ID NO: 2997 - DNA, 945 bp, Artificial sequence
  DNA replication origin
cttgcctaacgctgcccctctgctacctcttgtctcccctgcagtgggctcccaggacagcttgctggagatcaccttccgctccggagccctgcccgtgctctgtgaccccacgacccctaagccagaggacctgcattcgccgccgctgggcgcgggcttggctgactttgcccaccctgcgggcagccccttaggtaggcgcgactgcttggtgaagctggagtgctttcgctttcttccgcccgaggacaccccgcccccagcgcagggcgaggcgctcctgggcggtctggagctcatcaagttccgagagtcaggcatcgcctcggagtacgagtccaacacggacgagagcgaggagcgcgactcgtggtcccaggaggagctgccgcgcctgctgaatgtcctgcagaggcaggaactgggcgacggcctggatgatgagatcgccgtgtaggtgccgagggcgaggagatggaggcggcggcgtggctggaggggccgtgtctggctgctgcccgggtaggggatgcccagtgaatgtgcactgccgaggagaatgccagccagggcccgggagagtgtgaggtttcaggaaagtattgagattctgctttggagggtaaagtggggaagaaatcggattcccagaggtgaatcagctcctctcctacttgtgactagagggtggtggaggtaaggccttccagagcccatggcttcaggagagggtctctctccaggactgccaggctgctggaggacctgcccctacctgctgcatcgtcaggctcccacgctttgtccgtgatgcccccctaccccctcactctccccgtctccatggtcccgaccaggaagggaagccatcggtaccttctcaggtactttgtttctggatatcacgatgctgcgagttgcctaaccctccccctaccttta

SEQ ID NO: 2998 - DNA, 1113 bp, Artificial sequence
  DNA replication origin
caaggtcacagatcaacaggataagaatttttcttagtacagagcaaaacaaaaagtctcccatgtctacctctctccacacagacacggcaaccatccgatttctcaatcctttccccacctttcccccctttctactccacaaaaccgccattgtcatcatggcccgttctcaatgagctgctgggcacacctcccagacggggtggtggccgggcagaggggctcctcacttcccagtaggggcagccaggcagaggcgcccctcacctcccggacggggcggctggccgggcggggggctgacccccccacctccctcccggacggggtggctggccgggcagaggggctcctcacttcccagtaggggcggccgggcagaggcgcccctcacctcccagacggggttgcggcggggtagaggcgctcctcacatcccagacggggcggcggggcagaggcgctccccacatctcagacgatgggcggccgggcacagacgctcctcacttcctagatgggatggcggccgggaagaggcgctcctcacttcctagatgggatggcggccgggcagagacgctcctcactttccagactgggcagccaggcagaggggctcctcacgtcccagacgatgggcggccaggcagagacgctcctcacttcccagacggggtggcagctgggcagaggctgcaatctcggcactttgggaggccaaggcaggcggctgggaggtggaggttgtagcgagccgagatcacgccactgcactccagcctgggcaccattgagcactgagtgaaccagactctgtctgcaaccccggcacctcgggaggccgaggctggcggatcactcgcggttaggagctggagaccagcctggccaacacagcgaaaccccgtctccaccaaaaaagtacgaaaaccagtcaggcgtggcggcgcgcgcctgcaatcgcaggcactcggcaggccgaggcaggagaatcaggcagggaggttgcagtgagccgagatggcagcagtacagtccagcttcggctcggcatcagagggagaccgtggaaagagagggagaccgtggggagacggagagggagag

SEQ ID NO: 2999 - DNA, 1386 bp, Artificial sequence
  DNA replication origin
gcccagctgccaccccgtctgggaagtgaggagcgtctctgcctggccgcccatcgtctgggacgtgaggagcccctctgcctggctgcccagtctggaaagtgaggagcgtctctgcccggccgccatcccatctaggaagtgaggagcgcctcttcccggccgccatcccatctaggaagtgaggagcgtctgtgcccggccgcccatcgtctgagatgtggggagcgcctctgccccgccgccccgtctgggatgtgaggagcgcctctaccccgccgcaaccccgtctgggaggtgaggggcgcctctgcccggccgcccctactgggaagtgaggagcccctctgcccggccagccaccccgtccgggagggaggtgggggggtcagccccccgcccggccagccgccccgtccgggaggtgaggggcgcctctgcctggctgcccctactgggaagtgaggagcccctctgcccggccaccaccccgtctgggaggtgtgcccagcagctcattgagaacgggccatgatgacaatggcggttttgtggagtagaaaggggggaaaggtggggaaaggattgagaaatcggatggttgccgtgtctgtgtggagagaggtagacatgggagactttttgttttgctctgtactaagaaaaattcttatcctgttgatctgtgaccttgcccccaaccctgtgctctctgaaacatgtgctgtgtccactcagggttaaatggattaagggcggtgcaagatgtgctttgttaaacagatgcttgaaggcagcatgctccttaagagtcatcaccactccctaatctcaagtacccagggacacaaacactgcggaaggccgcagggtcctctgcctaggaaaaccagagacctttgttcacttgtttatctgctgaccttccctccactattgtcctatgaccctgacaaatccccctctgcgagaaacacccaagaatgaacaataaaaaaataaataaataaaaataaaaacaaacaaacaaacaaacaaacaaaaaaacccctgcaaaccatttcccctttcacttacagtaaaagtcaaatgctctactaggctacgaagccctgatgatctgttccactgccccgctcctctctggcctcatctcctaccctccctcttgctcactcagcctcagccaccctggctgcccagtccctcttaagcacacttggcgtgcctcagaaactaagccttcacactggctgttcttgctgcaggatggctccttctgcagattcacatagctaattctctcacctcctttaagtctttgtttaaatgctgtcatctcaatgagtcctgcctagactgctcctctgaaaattgtagctcccc

SEQ ID NO: 3000 - DNA, 1491 bp, Artificial sequence
  DNA replication origin
aggatggggtgcgactgcggggcgcacgggctggggtgtgtgtctgcgggcgagcgggaggctcctcggcgtgtgctcggctgcccgcgctgtgcacgttcgtgcgacgcgtgtccacgtctgagcgcgtggccgtgtgtgcggtggggccaggccctccgcccgcccgggtcccgagccccgccgtctcctcgctgggctgggagcccctcacctttctcggcgcgaccgcagctacgaccgtctccagctccttccgcgcggccactcatcggcgtcccgcgctcgctccgaatatataccctcatccggggggccgcggcggcggggcgggccgggagcgggggccaagtggagcgccagccccggccaccccgcccctctcgccacgactagtggctgccgacgcctgaaggagtggaagccgaccgcccagacacgtcagcgccgggagcacagacgacgacgcggacgcggaggcggccgcggcccggggcgccggggcggggctagggatgggggccgggcatgaaaggagtaacccaccgggccggggcggggcctagtgcgtcactcattctctggcccaatgggaatagttctggagcgcagtcggctggcgtcccggtccctcctgcgcactaactgagggtgaaggatgtcggttgggtctgctaggaggggccaggagccggccggcagagagcggctcgtgggtcccaggacccctgacgtccctaggttgtactgggaggtgcgagcccgaggctcttagtcggcccagcggcacggggcacaagcgggccacagagatgggcagggagctgtgtccccagggtggcggatttccgagccacccacgcgggtggttgggaaagggcggtggattttcctgcggagaaactttcagggcgggcctggcgcgctctctgaccttgggctagttattttgtgtgcagttcacaagatgcctggccgggctccaaactcgctctctgtttggttgtgttttggctcccaagaaggcgaagccaggccttttttcttttgcacaaacagacaggaaaggagagaggaaatgcaagcaaaggtagtaggtaacctaaggtagtataagcccggggtcatctttgtgagtttgcagacttaacgtcgctaggcctcagtactctgcagaaagatggtggaggacctagatgacctcccaggccattccaggaccagtgtttacagtcctgttacataacctagtgtgggtgtgcacacacaggttattatatgttcagcactgtgcccttggaagctatgtttacatttaaagttgtgttgcattttgcagcttttgcaagaagtggaatatgttgaaatacgaaaatacctagatttaacataccacctatcataaagagattcaggcgcctttcttctactttcttgggtgcaaaggccttttcattccctttaccaattgcataatcacccactgcctca

SEQ ID NO: 3001 - DNA, 968 bp, Artificial sequence
  DNA replication origin
gtccgcgtcgtcgtctgtgctcccggcgctgacgtgtctgggcggtcggcttccactccttcaggcgtcggcagccactagtcgtggcgagaggggcggggtggccggggctggcgctccacttggcccccgctcccggcccgccccgccgccgcggccccccggatgagggtatatattcggagcgagcgcgggacgccgatgagtggccgcgcggaaggagctggagacggtcgtagctgcggtcgcgccgagaaaggtgaggggctcccagcccagcgaggagacggcggggctcgggacccgggcgggcggagggcctggccccaccgcacacacggccacgcgctcagacgtggacacgcgtcgcacgaacgtgcacagcgcgggcagccgagcacacgccgaggagcctcccgctcgcccgcagacacacaccccagcccgtgcgccccgcagtcgcaccccatcctccgccaccccgcgagagggtgtgtgggctgggcagccgggtggatggcggggccagggatggaatgagcgcgccccagatggactgggggcgttgtgggaggaggtctgggccagtgtctgagtccgagggggtcgtgtaggcgtgtggggttgggagtggggcctctcccgggtgggcagtagagacctcgaggctctcaggctagggccttgtggacagttataccaagtgtgggggcctgtagtgggacaggagatcgttggcactgtcaggtggaagcgagttggtgtgtcttgaatatatgaggaaaagatttgagaggtctgacaaagacaggggatacatttggaggacaggacagtgggacaaaacctgtttgcttgccacttttttctttcttttttttggtttggtttgccatgatactggtagtgagagagaattgaaatttctgggtttcccctctcttggccaagcagaaggatggtattgg

SEQ ID NO: 3002 - DNA, 972 bp, Artificial sequence
  DNA replication origin
tcacttcccaggcggggcggccggacagaggtgctcctcacatcccagacggagcagcagggcagaggtgctccccacctcccagatggggcggtcgggcagaggcgctcctcacctcccagacgaagagcggcccggcagaggtgcccctcacttcccaggcagggcagccaggcagagacgcccctcacctcccagatggggcggcggccgggcagaggcgctcctcacttcccagatggggtggcggccgggcagagatgcccctcacctcccagacgggacagccaggcagaggcgcccacttcccagacggggcggccaggcagaggcgctccccacctcccagacggggtggccggtcagaggcgctcctcatttcccattcagggcaactgggcagaggtgctcctcacttcctcccagacgtggtggccgggcagaggcacccctcacctcccagacggggcagccaggcagaggggctcctcacatcccagacgatgggtggccaggcagagatgctgctcacttcctagacggggtggcgggcgggcagaggctgtaatcttagcactttgggaggccaaggcaggtggctgggaggtggaggttgtagcgagcgagatcacgccactgcactccagcctgggcaacattgagcattgagtgagcgagactccgtctgcaatcccagcacctcgggaggtcgagatgggcagatcacccgaggccaggagctggagaccagctaggtcaacaccgcgaaacaccgtctccaccaaaaatacaaaaaccagtcaggagtgggggcgcatgcctggaatcccaggcactcggcaggccgaggcaggagaatcactggagcccaaggcagggaggttgcagcgagccaagatcatggcagtacagtccaggctccacaagagagggagaccgtagaaggagggagacggagagctagaaggagag

SEQ ID NO: 3003 - DNA, 1433 bp, Artificial sequence
  DNA replication origin
ttgtgtgctggagatgtggctggggtttctctcacagtggaggcaagtaattgcaactcttctctattactgtacaccttgaaggcgaggttaattaagtcctgttgcagggtttgagggccagaatttaatttttggagttttatttaatgtcaggagtggattgggtaataaaacgtatattgagaataagagggccttttgatcttttagggtctagggctgtaaagcatctcagggttgctgccaaatgagccatgagctgggttgagtttttatatttgatgaaaaagagcctaaacactaactgatttgagagaggtcggataaagaaaaaggagcattaaccttgactatgcctttagctccagccacgtttttaagaggaaattgctgggcaggtgggggagggtagtcacagaaaaaactgtaagccagactgggtgtgaggaggggaggtgataaaaggattatagggtgggggagcggaggctgaggaagaattgggacctggcttggcctggtgaggagcagcctggggaggaggggagaggtcagatgggtctgtgaaaaaggaagattggaaagactcagcaacacttggggttgggactgaggggacaggtgggagggaaagaaggaagatttgggatgagttgcattgggaacagagactagggagggactgatgtgtaaaagaatgcctggacatcaggcacctcagaccatttgcccattttatgacaagaattatctagatcttgtaggatggaaaaatcgaaagtgctgttttctggctatttggaaccattgtcgagtttgtattggggttaagcagcattgcagaagaaaataaggcatttaggttttaggtcaagtgtgagttgaagaggttttcagttcttgagaacacaggctaagggagaagaaggtggaaggttgcctgtagagaaggaggccagtccagagaaaagagagggtagagatatggagagaaggggtgaggggtgcttgccccccaggaaagtggagaaggggtgggaggtgcttgccccccgggaaagtggaaaaggggtagagacacagagagaaggggttgggtgagcagccctgcgctgcaatatgggtgagcagccaaagcaggcgtccccgcaataattaaacaccaagggaagactgtcttcatgagtccgtgaccagcaccagagttttgagtccacggataaaatgtgtctcctttgtctctaccagaaaaggaaaggaactgaaattaagagaagggagagattgaagtgtggcgccaaggttgaaaggagaaagaggttgagggatagtgagagcttggagaagacagtaaaaagcggccgcttacccaatttaaaattggtgagatgtttcttgggctgattggtctgaggaccagaggttgtagg

SEQ ID NO: 3004 - DNA, 1232 bp, Artificial sequence
  DNA replication origin
ccaggctgggccgggacgtggtcgcgagctgccggccttcccgggacgtcctaccagcccgcgtcgctcctcagcgggaggagagggccagttgcttctccaaggctaggagggaaggcagaggcccagggtcctgggtgcgagtcggccctgcttcgccggggcggatcctgcagcttctgacaggggccgcggcgctgcgtgcgcggcggcggagagggggtggggtgcgctgggcggggggctggcagcgcgtcccgtggcggggccgtggtgctccctttcccagcctggctgcgcggccaccacacggccgctgccctctgagcccctccgcctctgggagctctcggacacgctaagtttcctcccctccacgtgtaactgttacctcggggcgctctggcccggtcgccccccagtgcccctcaccccgactgggcctttgcggagatgtcggcgcctcctggacagcggtgccgccacgaggattcccccgccgctctccaactgctgctataaaagcgctgcaatccttacccgggccccgggaagcgctgagaagctgtttagcgccagtagatgtgggcccagcagctcctagctcctcaaacccctcatcacccgagggctcatgccagtttccaacttcctttaaggtcgaaccatattcactcatggggcgtacagaggccatgggactcacggcctaagaatcatgctcttgggagacactaggtgggatctgccccccagatgatgaacttgcaatgacactcaacaggaaatcaggtaaagggacattgttaggggaacaaagtatctggggagaaatgtgaattatctgcacctcctaactttaatttacaataacagacctttagccccctccagagcaggaataaggccttatccgtctgtatagcccaggaggtaagcatgttgtgtgaccccaagtggatgctcaataaataaattacaatgctggctagcgtttatcgtttattttgtgccagctttgttacacagtcacctcatttaatctttacaacaacccccatgaagtggagacaattgttgtcccaatcttacagttgagggaaatggaagggaattcatggaatccgagtcccatcatctgaataccatgggaaggttcagttcaattcagtgtgattctctggggcaccttcagttcctaaactgaactgaactgagatgaaattggcagg

SEQ ID NO: 3005 - DNA, 1178 bp, Artificial sequence
  DNA replication origin
ccggagccgcgctcccttcccggcttctgtccctgggcggcgcatgtggccggcggccgcgggccgtgtcagttgcggcagccaccgcgtggcccgcgcgcctccgctcccggccgcgctccagcgccgagtgcgccccgcgcggcctgggggcgctgcggcgggggcaggcgaagactcgggccttgggggttccgggggtacgcggccacgatcgcagggcgggagtgctcctccggcttttctccccccgcgttaataactcgtggccggggtcctatgggggaagggcagggaagcggatgcttattgttttgcaactccagtgtcgggggagagggctttccgcaggatcccccactaacccccgatggactccctcaagccccggtctggcacagacgtgctcgccccgcggcgcagcctggtgccgagggcggagcgagccgggaagcgcggccgagagggcgagggtggcgggaacgcgcgaggcggcatcccggggaaggggagcccagtgtggggctgcacgcaagggctggggattacaggggtttccgggtaaaagtctgagagccaaataggtgccgtgacatcaatgaaacgataatagtaggggcttctgttttttaaggttataagaggaaacgtggtcggcttcaatgagaaagttgtactggctccaagctcttcggtgtccaggacgtacgcgtcttggatccacggaagggggtcatcgtatgggtgtctgaccctcttaggagcctgtttcctttgttttatccgcaaggcaaggagagacaagggaaatgacttcctagctttacccggggttttttctgcaggtggagaagggtggagtcctcccagatggttctttctttgctcccctaacagcctttaagatgtggctacttgtttttcccaccgtttaacaccctccaacttcatttggagcacgggttcctcaagggatcctgagagctgggtgctgggtgctggtttggagaggcaggatgatgcttctcccggctggggagagcagagcaggaaggctggttggcgccatgaggaaagagccacgaggttttagctcccgaaccgactcgtcagtagcccctcctccatgttggttttacatttttccctcctggtctggactactttagcgcaaggag

SEQ ID NO: 3006 - DNA, 1379 bp, Artificial sequence
  DNA replication origin
ctgcacgcggggggcagccgtggtgcagaggttcatgcagcggcggcggcggcggcggctgctgctgctgccgccgcggaggcagacagaccgggcgctgccaccgccgccctcccccggctccatgccgccgccgctgccgcctcctcctctccggcgaggggcggggggctccggcccggggtgggcaccattcctcgcagcgccgctcccctccctgccctccgcccgggcgctggagccggcgagggcacccgccgcctcctaggagtgcaccctccgcgcgccctgccggagcgagggggcgggcgtgggcggacgtcggggcagcggggaccccgcgcggctgcaagaggagggggcttccccaaggatgcccggcggctccccgctcctaggtgcgagctgagtctgaccgggagcgagcggcgcgtcgccatgccggcgtgacgggcgcccccggctgcccgcgcgggcccccgcgctgccccacgccgcgccgtgccggcaccgggctgcaggatgggctgtatccaaagcatcacctgcaaggcgcggatccggcgcgagaacatcgtggtgtacgatgtgtgcgccaccatcgaccagtgccccacgcgcatcgaggagacctcgcccatcgtcctgcgctacaagaccccctacttcaaagcctccgcccgcgtggtcatgccccccatcccccgccacgagacctgggtggtgggctggattcaggcgtgcaatcagatggagttcttcaacacctacagcgacctgggcatgtaagcgactcgccgcgcggcacgggagcggactctgggcccccagctctgcttgccaccttgacccccctccccagctccttcctactgctgtccccatcgtctttctaaaccttcctcccgcctcctctcccacctccctcctccctacgcttttgtttcagtgacagggcgggtgtagggaggctccttgcgaaggcattttctcgtggtttgcttctgacttcccagaaacgcgaggagaaaggtgcggggcgggaagaacgcgacaaggagggttcgagaggcggaggtggggatggctggcgagtgcctggcgagtttcagggcgccgtctgtgctttgtggggctccccgggaagagtttgggggaaaccatagaggagtggagtggagtgccgggggcgcatgggctgtgccgcgcgtcctttggagaaaccggagcgggcttggaagagcaggtcccgggcatccgagcgggagttggtagttctgtccttgccctcgcgactgttgaagtttcgaacccttgtcccccgggccagggagcccggaggcgtttccgtctggaaccacaagccggacacagttgcc

SEQ ID NO: 3007 - DNA, 1241 bp, Artificial sequence
  DNA replication origin
gccgccgccgccgccgccgctgcatgaacctctgcaccacggctgccccccgcgtgcagcgcacccagcggcgggcgagcgggcggcccaagaggcaggcggaggcagcagcggcggcggcggcgaccggagctcccgccggccccgccccgtagccggaccacaccgacactcctcggcccggctgcctcggcccggggggcgccaggaggctgtggcccggggtggagagccccaacggctggagcagcacaggacgtgctccgcggaggaaactggctgtacgccatgagttttgtccctattcggctgccgtccgggtggggggggggtaatgtgtaagggtgggggtgtttaaagggccgctagcgccggggtggggccccgcacgtggggctgaggcggggcggggccctggtaggtggtgccctggggtgggggtgggggactagggcgggcccaagcgccaccgggtgggtgaggccgagcagggcgcggcgctgtccagagtccagtggggaacccggtagcccagtaggggctgtagagtgagtgtttcgggcagcagaagggttaggggaacagctttatcagagattggtcgttattcagaatatagcttgttggattagatttaggcttgagcccttttagtatcctaccttcagaaagggtgaagggcgggctccagcagcgttactaaatgcagtgtatttgcctctttgcctgactgggtttgttctggaagctcttctttccaccactgtgtgtagtggggataccggaagaatccctccgtactccagcactaagtctctcatatgccagagttttggcagacattgggcattgtgtacagtatgaccacggtcatgtgtctgatactgcagtctaatgtgccaaacaggaagaatatttagcagatgcttttactaggcatcttcttacatttttattttcaaagccaatagcttctaagtatttcttctgcgatcattgaacatttgctggatctgctgcccaagtgtgaaatactgactaacaggccgcaggaggtgctagagttagtctttagctaggacaggtgtgacgagtaatttaaaaattgattgagatctaaaagcactcttcatccttgttttaactgttctgacaccttggttcactttatagttaacaaaaaagcagtttttccctttgatgactcgtctctctcattttaccgtgtagccacagacctc

SEQ ID NO: 3008 - DNA, 1324 bp, Artificial sequence
  DNA replication origin
aggggcttagcaccttggccagcagctgctgtgctcgatttctcaccgggccttagatgcctccccgcagggcagggctcgagacctgcagccagccatgcctgagcctccccctgctccccctgctccccctgctccccactccccatgccgccgaccccccctcaccgccactccccccacgcgcccccgccccccccacgcgcccccgccctccccgcctcccggccacgcccccattcccccacccccgtgccaccttgctccctgcccccactctcccccgccacccccgcctcccgctccctccccccaccccccacccccgagcggtggtgggctcctgtggggcccaagcctccccaacgagcccaacgctccctgctccagggcacccagtcccatccactgcccaagggctgaggagtgtgggtgcacggcgcaggactggcaggcagctccacctgcggccctggtgcaggatccactgggtgaagccagctgggcttctgagtctggtggggacttggagaatctttatgtctagctaagggattgtaaatacaccaatcggcactctgtatctagcacaaggtttgtaaacacaacaatcagcaccctgtgtctagctcagggtttgtgaatgcaccaatggacactctgtatctagctactctggtggaggcttggagaacctttatgtctagctgagggattgtaaatgcaccagtccgaactctgtatctagctcaaggtttgtaaacacaccaatcagcaccctgtgtctagctcagggtttgtgaatgcaccaatcgacgccctgtatcttagctactctggtcgggacttagagaacctttgtgtccacactctgtatctagctaatctagtggggacgtggagaacttttgtgtctagctcagggattgtaaacgcaccaatcagcaccttgtcaaaacggaccagtcagctctctgtaaaatggaccaatcagcaggatgtgggtggggccagataaggcaataaaagaaggctgcccaagccagcagtggcaactcgctggtgtccccatccacggtgtggaagctttgttgtttagctgtttgcaataaatgttgctactactcactctttgggtccacactgcttttatgagctgtaacactcatggcgaaggtctgcagcttcactcctgagccagtgacaccacgaacccaccagaaggaagaaactccgaacacatccaaacatcagaaggaacaaactccagacacgccacctctaagaactgtaacactcactgggcgcgtccacagcttcattc

SEQ ID NO: 3009 - DNA, 948 bp, Artificial sequence
  DNA replication origin
gtggggggggcgggggcgcgtggggggagtggcggtgagggggggtcggcggcatggggagtggggagcagggggagcagggggagcagggggaggctcaggcatggctggctgcaggtctcgagccctgccctgcggggaggcatctaaggcccggtgagaaatcgagcacagcagctgctggccaaggtgctaagcccctcactgcccggggcttgcaggccagccggcccctccgagtgcggggccgctgagcccacgcccacctgcaactcgggctggcccacaagcactgcgtgcagccccggttcccgctggcgcctctccactgacacctccccgcaagctgagggagccggctccagcctgggccagcccaggaaggggctcccacagtgcagctgggggctgaagggctcctcaagcgtggccagagtgggcgccaaggccgaggaggcgccgagagcgagcgagggccgtgagggctgccagcacgctgtcacctctcatcagttttcatggagtagagttatgttttagaattatgtattatatttgagtttaacatttgatagattatggatagatagatagatagatagatagatagatagatagatagtattggtcagagttccccagagaaataaccaataggatgtgtatacatataatatagagagaaagatttactttaaataattggctcatgtgattgtggagggtaggcttgtagtctggagacccagagaagagttgcagttgagtccaaaggcagtctgctggcagcatttcttcttgtctagaagaggtcagtctttttctctgttaaggccttcatctggttagataaggcccagcctcattatggataaagtccaccaatttaaattcaatctcatccaaaaaacaccttcaaagcaatctccagaataatgtttggccaaa

SEQ ID NO: 3010 - DNA, 1385 bp, Artificial sequence
  DNA replication origin
ccgggcggcgagagccggcgccgcccgcctccccggcgggcccgcaacaaaggcggcggcggcggcggcgcagcctcggcgcccccgcctctgccgcggcccagccgcccgggacccgggggaggggccgcgccgccgccgcccccgcccgcgcgcactcaccgccgggcccagcggccagggcgcggggtggggacgcgagggctccggcccggctgtcacagcgccatcctttccgcctctccgtcctcccgtgcgcgcggcccctcgggagggagcggggaggacacgtggtgggaggagggagggtccggcccggagctgagggtgttgggaggcgaggggaggagcgcggctgatgtcagcaggcctcggcggcgccgggggacggcgcccgcgcgagctccggggccctcctctaggcgcggcttccggccggtccgggcagtccctggcgggcctgggtagccgtgccctcggccttccccgccccgcccgatgcaggccgcttccagtgctgcgtgtgacctcggcgtggacgaggcaggaagagcccagattgattttaaccgagcgtagcgtgggcgcacagttccatgtgctcatttgcagtcaccagcgggttgcacttgcttggacgagctctccaggcgttctcgccgtgcttcaggcaatgaaaggctagaccggcaagagcgtgtaggggcatgaggaggggtctttggggaagagtattcgtattctggcagcgggctcctgtccagaacttcgtcatatacatggagaaggaacttcctgatttttgtagctgttgcttaatatcccaagcatgtaattccttggatgaagtgggtgtatagaaggacctttcttctccaaaacgtccaaaggagttgtttactctcagctctgtgggcaatacaacaaaagtgacctgagaagccctgaagcccttttcattccagaaaaagattctgggtatgggtttttgttgagaacttgttgaagaaaaaattattctgacacttgttaaaacagtaaggaagactttatacagggttattgctataggtgtaaagatgatcacactggggggagagatgaggtctaacacggaatacagtaaggacagctggggatgtatagccaaggagcagaacgaaggggtcagtagatggaaagttactgatacgagacatcaagcacctagagggattcttgctgaacccacttaacaggattcttgctgaaggcaggctagggcgatcagatatcaagggtgggggaatgagaaatttgatcagatatccagggtgatcagatatcaagggtggtgatttctctctaacctaacttagcagggttcttgctaaaatagagctggg

SEQ ID NO: 3011 - DNA, 1216 bp, Artificial sequence
  DNA replication origin
ggccggagccctcgcgtccccaccccgcgccctggccgctgggcccggcggtgagtgcgcgcgggcgggggcggcggcggcgcggcccctcccccgggtcccgggcggctgggccgcggcagaggcgggggcgccgaggctgcgccgccgccgccgccgcctttgttgcgggcccgccggggaggcgggcggcgccggctctcgccgcccggcaggtgcgctggggccgggagggggccaggtggggaggcgggccgggcggagggggcagcggaagcgctcccggcgcggttccgcggagaaagggaaatggggcaagatggctggagaaatccgaacgcgcccgggggcgcggcggcggtggcgcaggcggggcagggcgggcggcggccctggttgcggcaccttagcgcggggaggcggcccctcccacctctgccccggagccggcagggagaccgccgccaagttcgggccccagctgcaggcatctgaagcctagacccatccatgccgcgttcgcctatcttttttggaaatatcgaaggaaccgactttgaactccagagggatcttttctttggaggttccccgatgcagccctcaagatgcatccgcactccacacctaggaattgcccgcgcccatagagggcaggagtgcggccctttgtactggccaagagtcagcgaatagagaatttgcagcccagaggcaatgggttatttccctgtcggggtgggccccagccgatttctgcacctttttgggtatccaggcataaccctcactatgtttcactgactcctgcgtttgcaaagtcccttaaggtagaatgaccctattttctgaaccagctcgtggacagaacctttgaatttggaaaatccaggcaatgggcctactgagccaaccgctccgcccatgcttaactggcttctagcacccattccagttgagtaagtgtccaatctgtgttcagacaccttcactgataggaaatcagcacctttcccctgcctctgattcctgtttgggtggcactggctgtgagaaagtactgcctttctcactgcttaaaaccttttccaggagtatttatccactggccggcctctgttctgccgtccagtctctacaaaccagtctgggttctcttccccagatagctttttaaatatttgaaggcagccagatacgttatctacccacagcc

SEQ ID NO: 3012 - DNA, 1192 bp, Artificial sequence
  DNA replication origin
gacctgctgccggtggccaagggtatcatcccgggccaaggctccaggttgggacgcggagacccacgaccctccttgggatcccgggcatcctggaggaaaggtgagggcgcatcaccccctggcggcagccgggcagactccaaccggccgaggtgatgctgcgctcagggccgtctcttcttcctctagcgaaggcaagcggtgctgctgcagagacatttcgctcgcgccggggccagctctgcattctcgcttcgtttctcggacaacagccgctttagtgctaagagcagcaccgtgccgcccgcccatcccgaccccaaagccaactaatcctcccacacccgctttctgcaggcggcggggttttccagctgagaggccgtgagcgcctagagttgggtgaccacagggagagtccttcctgagggacaagggccacccgcgccgcccgcgccgccagagccggtgagttcctgaacctgagagaacctaggacgcacctgggcaggtgcctgggtggcggcccttgagagtcaacataagtcaacgaggccaagaccgaaccagccggcctgaaagtgcgcgatgtccttcctgtcctgagtgagtgggcattatccaatctgttgagggcttgactagaacaaaaagaaagaggaaaggccaattctctctcttgagctgagacgtcgtctccttctgctcactgcccatggtctggggcttcctgctccttagccttaggagtgcaggacttatagccgtgtcttcaccttcccgcagtcgcctccattcctcgggcctttggactaggactgaattataccaccagctttcctgattctctagcttgcagatggcagatggtgggacttcttagcttccataatctcatgagcgataataaacacacacacactttttttctattggttctgtttcttggcaaactgggaatagagggtgactttccaaatgtacaacaaacatcatacttcctggtgaaatgtgaggagtgccatgaaagccaggtgctctgccaagaggcccaccgtgagtaccaatgctctgcactgcaatggaagttctagtcttgagctgttgaatactgttgccactagtcacaggtggttatttaaatttaaattgaattaaaaattcaattcctgagtctcactaactgtat

SEQ ID NO: 3013 - DNA, 1206 bp, Artificial sequence
  DNA replication origin
gaggacgcgcacctgccgcggctggtgagccgcacgccaggcaccgcacccaaatacgaccactcgtacctgggcagcgcgcgggagcgccaggcgcggcccgagggcgccagccgcggtggcagcctggagacgccatccaagcggagcgcgcagctcggcccgcgcagcgcctcctactacgcttggtcgccgcccggcacctacaaggccggctcgtcgcaggacgaccaggaggacgcgtccgacgacgcgctgccgccctacagcgagctggagctgacccgcggcccgtcctaccgcggccgcgacctgccctaccacagcaactcggagaagaagaggaaaaaggagcccgccaagaaaaccgtgagactgcgtctgcctcccctcctccgaggggactgagcgggagcctccaggcagggcgagcagtgtcgctgtctgggggccggggaggtggcgaggcgggagggtccttgccggagaggccgcaggggcctgcctgggcgagttcgtccgcggatgctaggccgggggctttttcagcctcactctgtccaaggccagatgaaggaaggaagcaagggctgggagagttgaaaaacaggcagaaagttgaaggcgtgtatatggttttacagggagcattaggtatttaaccaactcagaagcctttagcatcagggatctcgggagccatcaccaccaccggcctttagtgggcttctgaggtctgtgtgcagaatcttcgatgcatccttctatgtgcattcctccccagccctgcttggggcgagggtttgtaacttgcatccgatttccaagaacccacatcccagagaaggctaagagccactgctgtttgcaaaggacaactcatgtctgtcctcttttgatgttttattgagtgtaaactgcattgtgcccgtatatgtgaaggaaatcctttggtccctatccagttcattgtctcttttgtaagtggtcttatatagacttcattattttcaaaatgccaagagctgcctactccatccacagccccaaaatgggagccctggacctcagagaaatgttgggggacagtcacaaatgtccgctgtggggtaccaagggcctctgacccccatgctttggagatcactctccaagcacaactgcttctcccccttcgcaattaccctgcctccccaccattccgtt

SEQ ID NO: 3014 - DNA, 1237 bp, Artificial sequence
  DNA replication origin
ccgcgatggtcgctccccgctcggcgcggcccgcggggcggcctcccccgcgcctctcgctgcctgccacccagagaccccctctctccgcgtggcctcaatcactccacgctgacctttgggccgccgggggccagcacgtgaccgagaaactttggcagtcgcggcagcgggcggcggggcggaggcgcgggaggcggtgcggcggccgagctcccccgcgcggcgggctctgcggcggggagacgctcgccccgtgccgcgctgcctgggcatgcggatgcgccgccgagcgctgcgcggaccccggaagcccgcggcagcgcgcgctcagccggcggcgcgatccagcccccggccccgcctgcgcggccggcccggcgggcgctgcgcccagggacgcccggtgcccgccgctccgccgccgcccgctgccgcggggtgacagcgatccttctgttccagccatttcccactttcctcactccgtaattcggctgggaagttggggaagatggatagggtcttgctgaggtggatttctctcttctggctaacaggtaagagtccttttcaacagaaacgaataactttgtatattcctgtagtggttctgttctcaccgcgccccccgcccccccattttcctccttactgaccatgtttaaagctgcttagcggtctggtggaaagtgggggagggggcaacgtgtgtgtttgtgtatgtgtttgtgtgtgtgtgtgtgagagagagagagagagaatgatgggggcggcgggggagaagcccaatgacaagtgagacgcatctagatgcaggtgtttgactcattggcgctgaggttgttctttcgaatgcatttcccctccataaaacggttctccttcggtcttatcctgagtttgtaatgctgtgagtcttgtgaaaagcctggctggaataaaggaagctcagagggagctgattaattaaatgaactggttttctggaggtggaggctagaggactgtctccttaatttcttccctagagaaggagggggacccagggcattctctctgtggctctctggagggtgcaaggaactggaggttgggaagaagatggggatggaaccttcactggttgtggagtttagagcctggctctctcttacttggtatcatttggggagtggtcccaaatgataattagaaagcagaagagcctttctaataggtgcactctccgctccct

SEQ ID NO: 3015 - DNA, 1520 bp, Artificial sequence
  DNA replication origin
gggccggccgcgcaggcggggccgggggctggatcgcgccgccggctgagcgcgcgctgccgcgggcttccggggtccgcgcagcgctcggcggcgcatccgcatgcccaggcagcgcggcacggggcgagcgtctccccgccgcagagcccgccgcgcgggggagctcggccgccgcaccgcctcccgcgcctccgccccgccgcccgctgccgcgactgccaaagtttctcggtcacgtgctggcccccggcggcccaaaggtcagcgtggagtgattgaggccacgcggagagagggggtctctgggtggcaggcagcgagaggcgcgggggaggccgccccgcgggccgcgccgagcggggagcgaccatcgcggcttctcccagggacgcccgcgctcgggaacccgggcgagaacgctggctggggactcgagcaggggagcctgtgtctgcgggcagccacagccaacctgaacggggagagagtgacagcggcgagggtgggggacggcggggacttggcgtaacttcttacaggacttaactagcaagtcctctaggctagaatgttcgcttctgcggtacccccgcccctccgtctggtttcctttttgacagtgcaaggaaccaggcaagaggctccgcagaattgaaaaaggtaggcgggaatctcgcgtcattactttttcctgttaaaatatgaggtagaataagggcatccggccctttaacagaaaatatgtaaaaccagaatgagataaatgattataacggcttaaatccatccaacactttatagattccagcacgcattcacatggattattcctatttgtcagacggatttgtcttgtgtctcaaaatgtatgtgttgagagagaactgagaaatgtatgatttgcttaagaaatatatttatgaagcctctactaggtgctaagaactaaggttacaaagtggaatgagatagacttcctgcccttaggagcctcatcttgggtcgaggaaagggaggaaggtcagaccattaaagacatgatacttattcctagtaaaacggggcaagtgcaataatggagacatagagaaagtgccttgggaacatagaggaaggactaagttagtcgtgggtggggagggggcaccacgataaaggaggggtaacatctgagctggcatttgcagaaagcacaagatttgagccattcaaggatccctggtggaaagggggcaggcgagggcattctgggcagaggaaagagacatagcagaaaggtctcaagtagcatctgaaaacagagtggtgccaggctggaggggagttcctggagcagacagactccacacctaagagtgaatgtgtacacagacagggagaatatgtatgtgaacatgtgagaaatgggaagaatagaccctgggcagctgtcttttatggctgcctgacatctcaattcccttcttattctgagaaattccaactgcagaagccagaaagtctagagccacctccct

SEQ ID NO: 3016 - DNA, 918 bp, Artificial sequence
  DNA replication origin
gcaccgcccttaatccatttaaccctgagtggacacagcacatgtttcagagagcacggggttgggggtaaggttatagattaacagcattccaaggcagaagaatttttcttagtacagaacaaaatggagtctcccatgtctacttctttctacacagacacagtaataatctgatctcttctttctttttcccacacttcccccttttctattgacaaaaccgccatcgtcatcatggcccgttctcaatgagctgttgggtacacctcctagacggggtggcggccgggcagaggggctcctcacctcccagacggggcagtggccgggcggaggcgccccccacctccctcccggactgggcggctggcagggcgggggctgcccccgacctcccagacggggtggctgccgggtagaggggctcctcacttctcagacggggcggctgggcagagacgcacctcacctcccagatggggtggcggtcgggcagagacactcctcagttcccagacggggtcgcggccgggcagaggctgcaatctggcactttgggaggccaaggcaggcggctgggaggtggaggttgtagcgagccgagatcacgccactgcactccagcctgggcaacattgagcactgagtgagcgagactccgtctgcaatcccagcacctggggaggctgaggcaggcagatcactcgcggttaggagctggagaccagcccggccaacacagcgaaaccccgtctccaccaaaaaatgcaaaaaccagtcaggtgtggcggcgcgcgcctgcaatcccaggcactctgcaggctgaggcaggagaatcaggcagggaggttgcagtgagccgagatggcggcagtacagtccagcctcggctttcacaactttggtggcatcaga

SEQ ID NO: 3017 - DNA, 1288 bp, Artificial sequence
  DNA replication origin
gggtgggccgggtgcaggaggagggcagtggatcgcagccccctttgccccttgtcttccccctccgcctggccgctccgagcctctttccccctccgctcagcgcccggcgggggctcaatgctccccggccccccatctccccgccgttaattataataatcctgagtactaataaattatgctaagtcgcgggggggggcagcgggagccggggttgagtatgaatatgaatatgtaaaatgctgtaatgattacctgctgctgctgccgccgcggctgaactctcatcttgactcgctgctcctccgtccgccattttgaatattttaaccaaaatcgcccggtcgataaaccctccctcgctctggctcccctcccccctcccgccctgcttgcctcctccctcctctccgccccctcccgctccttcctctccccgggcgcgcgccagggggcgcgcgaggccggctctgttcgccccggccccctcagaagagctccacccccttcccgcgctctgcgcacgcgccttcggggcgctgtggcccttcggtagctaaagcagcgccctcaatcagccaggcaccctgtggcttcatttttcgtctcggctctgcgcatgcgcgcctttctcctgccgccagaagtgtcgccggcgcatgcgctccctctagctcagaaccagattatatagtatcccgggcgcctgtgtcttcttacacttctcccttttcctcccgccttgcttccctcctggcttcgctccggtctcccccagtggcctgtggcattgtaaaagcacggcaaggagcgcagcggccagaaacgtgggggcgcgtggaagggcagtgagcggcccgcgtgccctgtgctccgcactttcttcagggtttccgcgcagttgaaacattggcaacaatggataagccgctcctcgctaggtaatttccggccctctgggcaggtaggggcggaaacgaccgccacgggagccgggcatgaggcacctgctgagccacacgcgggcctcccgctttaaatttgaatccgagctaatccccgcccccggctctgctagtgcaggagacccggccccggcaaacgcgagggggagtgtcgtgtgattgttttaattagccctaaatctcttctgctctacttgcttctaacgccaggctggcttcctcgggagctaggcgtcttattaagtcgctaatttccgccctacccttcctttctgccttcacgcccctctaacgccgctccccccaatcgaaacagaccc

SEQ ID NO: 3018 - DNA, 1095 bp, Artificial sequence
  DNA replication origin
gctccctgcccgcgccccgcgcggggctgagcccgggggtcacggccccaggcacttcggcctcgccccactggtccccaatgtggtggcctgacccaagccaggcctgctctctaggtgggtaggggtgagcggtcgtgggcgctgcgaggtggcctggggcggcgggggtggggaacccgcgcaggggtctgcgtgccccccctggggggtggactggattggaaggagtccttggggcaagttccttccgaggggatgtcctctggggcggcccgcgcgcccccggccggcggtcggcagcccctttgcgttgtcggccggggcttcgcgggcgagttgggctggaggtgcctggcgtggtctgacctccgtctccctttgcccctccccgctgccccccctccgttccccccaccccctgcgcctgaccgggacgcacggggcgggtggccctccggggcctctcgctccgaggccccagaagcgcccagaggcctcccgagaacttggatgtaaagggctgccctcctgccccagaatgggctggcctgacaagttgatcgtattctcgatttcctctctcctgttgggagtcggtggggagggacggggatccccctcccttcttctgtggcggtgttttctcgctgtgtgctgggtcgtctttactctctgcttagctgaacctcttctcatttgaataatgtctaattcggggaggtttatattattgaaatggccgcctggctttccccgcctctcatgtttagtaattcagacctttaataacagccactcacagcccaacgccgtgtttatattttacattcgccccatgtgcttttgtggttcgatatgattttttttttccttggcaatccgcagggctctgagatcaaacccaggccgtgctgggaagagaggggggaagctgggccttggcttctctagcagttgcctaggcctcatgttctctgctgcttgatttatttactaataaccaaaatgactacctccaccaacttccacacactttcccctcctctgcgggcaaaacaaactctcttggggctttactagcattaaaacagg

SEQ ID NO: 3019 - DNA, 1630 bp, Artificial sequence
  DNA replication origin
tcggagttggtcaaggaggcgtcggaacagcaggcatttgcccttctagttggcagcagcgatgagccgcgtgctccatgctcagggcaggggcagccgcccggggaaggggcgcccgatacaccgctcaccgctcagccccgcgtctccctccggggtcctttacctccatgtccttcaggtgccgactctgcggcagacgcacccgctcgcccgggccggagctcacgatccccgctgtcccctccgctcccggccgtggccagtttcgggctgcggcgggcacagggcgagtgggcggtggcgcgcgcccggctgcgctcggctgcgggactgccccggccgcgggggccctgcgcgagagaacgaggaaggaggaggagggagggagggaggaaggggaggggaggggagggtggggagcggggagggaggccgacgatcagggtttaaatttagacgcaaatctaaacagatactgtccctcccagggcaggactcaagagcgggagccacgactccatgtgcccaaacatggggatgggcagccaccgggcccctctgtctcgcgaagtttctcaggaccctgggctttgccacggtctcagtccttctcaacgtctccctcccttaatgcgccttctttctttttcctgtcccttcaagaattagagtggtcctttaattctttttgtttcctctcttttcgatttccttcttttgtgtccatccttcctgctttccttcttcctctccctctttttaaaattgcattactgtcatacctggtttccctgcagttcttgggtggagttcgaggaccctccctggtggaaggcgtttgtgttctaccaaaagaggagcccttctgaccgaggcttcagagctcagcgtggcgccgacgggaccacctttcccttctcacctcttttcctctccaccttccaggaaaccactatctatccatctatccatctatcttctgtatacgagtagaaggaggaggaggaggaggaaaatcaggaatccacgcaaagttttccaagctccctgaagtggtaaatcttttcttcaaaccttgctttgactgatgcattcggttttgtgggaattttggctcccacaagctgcttgctaaagggcctcgtctccattcctgttaaatatagcaaagggcaagatgctcaacatctgattcccatagggcccagcatagcaaccttcctttagggccatcccggctgggcagcagagaccgcatgggagggattcggggactggaatctgcaccagggtcactccctgctacccggatcccggcccccttcagacccttcggcagagagaaacaggaaaatgccttgagagacctgtgagtgccagggtattggctgggtatatgacgcctctgggttatcccacagcattctcacccgcccaaccccagctcaaccaggggaggggagccccatcagaggtgggcaatgggacaggtgatggtgagcactgtgaagagacatgtggagaaacagtagagaaaaaaggctgagagtctgctcctgctacaaagactaccctgattctggttatcccggcaccatctttgcactttcaggcacttagattgctg

SEQ ID NO: 3020 - DNA, 942 bp, Artificial sequence
  DNA replication origin
ccaggtaggtccatttgacctgctcatctaccagagtacctcctatgtgggaggcactgtccttacagcctttgatatattttctgtaattcttacctctctaaaagaggaaactggggcctagagttgctaagtaagttactattcaagtcagtaagtgcaggcatgagaattttctggattccaaagctctttccacaccaacatgctgtactaactctatgcctttactggaagagttaacttagtctcttgttaataggcatttactggtctaggccctgagatacatcagtgaacaagacagtccttgcccttcagaagttgctacttcagcaataaacaggtacacagcgaaaccataagacgctttgttaaacgctgtgaagaaaataaaacagggcacttattttatgggaatgtgggaagacatctctgaagagagagcacatgagttgaatcccagttggggaaaagagaaaaggaaaattgttctgagcagaagcacagacagaaacaaaggttgaggggcagagaaaagagaagggtggcagggacaacaagagggggcgggaagatgcgagtggtagtgtgaggccagctacattgggcctcatggaccagagcgcgcagtttgtgttttatcttgaaccagcaggatgtcatttggagggtttcaaggagggacgtgacctgagtcgcgcatcaaggagctgtctgtggaggagggacaggagtggaagagggtgagcagaggcaggtgctggcagcggtccagctgagattgggtgcgggagtgaacagggcttgtgcagggggatgggatttgaaggtcaggctgctgggaattactgatgcatgggtgtgagcaagggaaagagaagaatcatggatgactcctgaaggtttgacttggataacgggatgcatggggtatttgct

SEQ ID NO: 3021 - DNA, 1052 bp, Artificial sequence
  DNA replication origin
aacgagccgctctcggcaagggcactcccagagcttcccttcagccttgttccgcctctcacctcgtgttccgagcaaccacgacctgcgacccttatactgcgtgtcctctgattccctaagcctcgggtccggagcgcttactgccccacagcgtggaggagcagggagggaccggcttttgcctggtccggccgttccaaccccccatcgccggcgtggcctccacgttcgcacgcgctcccggaagccgccttccggcttacgggctcgccccggctgttccactcgcagtgttggcgggcgcccgggagcccgggctgaggaaagtgcggggcggggcagggcgcctcaggacgcagcccggtgccaagtcccggcggcgccccgcccgcgcccagcccgtcagtgcacgcagagctgggcctgctcgctccgcgagtgggtcggtgaatgaagacggggagtccgagcgagggaagggaatacccgaatcctggctaagaaaggggtggtgggagacgaaatcccataggagtgaatattaagttaactccccgaaccttcatttggggatagtgcactcttttaagccctttgcttgtattgaactcacctgatattcgtaataatcccctaggtgccattgtatctccatttgcagatgaggaaactgaggctcagagatgttaagtcgctcacataaatccactgggctaggagctggcggtggcgctggtctaggaactcccgaggtcctggagggtgggacaactgggggctggggcgtgtgaaagggactggagagttggggagaagattggtacctcggtagcttggagaagagagggcagtggcagtgggccgggtcttctccctcccgtccagcagaaaatgtgggcctgccctactgctcttctgctcagaggagcgggagtccgagtgcggggtctcccgccggtgtggtttcccggcctggggtctagctcgtcttgcctgctttccggactgctctcaccgcttccccccacttcacgaccccagcccgccac

SEQ ID NO: 3022 - DNA, 1477 bp, Artificial sequence
  DNA replication origin
agccctggtcctggcatcacttacagagcccaagcgccgccgccagcaccgaccacagccagcgccggctgtctggggctgcaatcaccgccccggctccggcggacgctgccatcgtccagccactgcagtcgccgccgccgccgccgcgtccctgagcccgggtccccgctgaggttggctcggcttggggaagaggcttctgatctctccgccacccgcgccgggtggcacctccacgccgcgctccccactccggtcccagccgcggctctccagctctgcaccgaagcctcagccccactccggccctcgctgtccgctcattggcctgcccgcacccttttaaggacgcgattggagagtcaggctgtccatcatccgtccgccgggaaggccccgcctcctcggtcccacccaggcgcctcggccccgcgcggaggccgggtctgcagcggtcccaggccgagccgagccttccgcctgcctgcgtggctgtccgcctgcgggccccaccagccagcgtctcctctgcctttctcagggtccagtcccgtggtcctcttcattgtctctcctcgccacaggtctttgctgggtactaacctcgcctccgtttcagctcttcttgttctctgccggcctcacctaacgaaaaagaagcaattcatttaccttaaaaagaaagaaaagacagaaagaaaaataatgaggcgttcaattgatgggggagagacttctgattcagtcgtccaggtggaacacgttccccgtgccgtgtccccaaggcctgtcctttgcgtggactagataatgtatgtgttgcaatttgcgaaatctactagtttaaaaagaagtctccatcttgccctaacctcctcttaggaacctccctcctggcttcagaaggatgggaatctggaactctttcctactacctgaaaaacaaatgaaaatgctttttgattgttttgctttcgcatatctgtgttcctgtctgtgtccgtgaaaaatagaaagcagaagttcccaacactgattctgaagtgccctgcagaagttcccgacactgattgctggccctgctcaacttggttgccttggcccagaacagtctgccacctacgggttgtccaatcaataggggaaatatttggaaggatccttatgaaaatggcttacaaaagggaaaaatgggggacaggggcacaagaaagatgagtgtgaaggaggaaaagggaagattcaggtgggaggctgatacgatgaggaagggaagcaagctttagacaattaggacaagagcgggggaagagtatggtgagaacccaaaatgtaacctctcacttcagggtttttgtctaaggtcagtcttaacaatgccattcctgatatctgtgctgtttcagctaacattgcagtacagcgaaatcataagaacattagtgagaaaaaaacttaaaaaaaaaaaatacca

SEQ ID NO: 3023 - DNA, 944 bp, Artificial sequence
  DNA replication origin
ggagtggggctgaggcttcggtgcagagctggagagccgcggctgggaccggagtggggagcgcggcgtggaggtgccacccggcgcgggtggcggagagatcagaagcctcttccccaagccgagccaacctcagcggggacccgggctcagggacgcggcggcggcggcggcgactgcagtggctggacgatggcagcgtccgccggagccggggcggtgattgcagccccagacagccggcgctggctgtggtcggtgctggcggcggcgcttgggctctgtaagtgatgccaggaccagggctggggccggggagtggggcccccgggcccgacacacgcccatcgcggcggtcgcaggccaggcgcgcgcactgagagccgaggtggggagggggcgcggcctgcgctctctggggccgaggggacccagcccatggggaacgcgggcctccgcgactggccgggaaggcgcagagcctctttcttctctttcctggatcctggagtgcggaggaggaggggagagtgctttaccttgctccttcccggggggcggtccaggggagcggacccggcgggcggctgcggtgagccctcgcggcgcaccctgccctctcctcgtggtgactctggatcgtctaggccctcccggattctgactcaggaactagggttctggcgttcttcacctttgggaggtggcggaaagttgcaggtttttcatttgtagggcctttgttgatttgtttcctgttaagccagggttttgttgtaagttccctttcccatgctctcattcagttttaagtctccgtaataaaagagtctcatttccgtggtctgcaaaacgccaataaaaaaatattgttacttctaggttagaatgcaaagagcttggaataccagtgagatggcctggcttaaaagaatttggtcaaa

SEQ ID NO: 3024 - DNA, 926 bp, Artificial sequence
  DNA replication origin
gggtatccaggacgaggagagggaggagtcgccatcgcctccgcctccgcctcctcctgttggaggggggctgagggaggagactgttgctgatctttggatgttctggttagtctaagaaggagagtatgaggcgagctccggcccgggtgcggccgggcttcaggggcccaggcgccgctgctgccaccgccatctaacgctgcgccctggaggcccggcgcgcggatggtgccggtgcggctcgggtgttgaaacgggtgtcccctccccctcctcccctcccccacgcggtggtctcccctcccacccggctcaggcagagccatgtctcggggtggctcctacccacacctgttgtgggacgtgaggaaaaggtccctcgggctggaggacccgtcccggctgcggagtcgctacctgggtgagcgggggccccggggcggaggcgctgaggtcgccgcctagagtgggggagggggcacgctgccgggtctgttggaggtgggacggcgtctcggtgggggcgcccggagactctggggtgttgggtggggccttggttgccgaattccgtgccggtgcctcccccagtcaagccccctgtgcatgctgccagccgccgcccttgctgggtttttctcggagggccgggccgtgggcagaaggtactggcttgtaaaggtgttggggtcgctgatgggttgggactcgggagacttgcggaacctccaggagctgccgcgtttagagcaaaagttagctcttttgctcttttccagcgcgctttccccgctcagccgaagaacctaagttgttgcccaccctctccttcaatctccagagggtttaggtgtcggctgcgacgcgttgaccaccctcagggacttcacgctccagacagaatccgtgtaaactgtttttgc

SEQ ID NO: 3025 - DNA, 862 bp, Artificial sequence
  DNA replication origin
atggcgtgaacccaggaggcagagcttgcagtgagccgagatcacgccactgcactccagcctgggcaacagtgcaagactctgtctaaaaagaagaaaaagaaagaaaggaaggaaggagaaaagaaaagaaggaagaaaagaaagaaaagagagagagaaagagagagagagaaagcaagcaagtgggaggaagggagggagggaggggggaggggagggggtgggggcagggtggaggcggggtggggcgggggagggcagggcagggcagggcagaatttggcacggaaattctctgataaccgaaagaaatcagtagtacatctagagtgtaacaatcatcaagtactgagaaaattgaatgagatgaggctagagagacagggaagggcaggccatataaattcttatacgtccacagtgaggagtttgatttttttttcttttgtagttgtatttccaaatgcaattaggaacttctgaagggatttaaacagcaaagttatataatctgatttaacatgttaaaatactcattctggctcctgcatggagaatacattataatggaacaacagtaggtacaggcagattaattaggagacaagaaatgatggtgagatgaaaagacccaggttatagtttagatacaggaacaaaagaacttgctgatgagctggcatgggacttgaggaaaaggaaggaatcaagaaaaactcacaggttattcaaataagcaaatggaccaagaaggagccaattacggaacaggaagggtaggaggctgcattaagttttagtttgaacatgtagatttatgacgtacaacaataggccgggtgcagtggctcatgcctgt

SEQ ID NO: 3026 - DNA, 1274 bp, Artificial sequence
  DNA replication origin
agtatgagtatccccattttatatatgaataagctgagaggaaggttaactcactccctcaggctcatagagcttagccgacatctgagtcagtgtaaattaaataaatatcagggatttcaaaataagtgtctaaaatactattaagaacagaaagctttaagctccttcaagtgtctggcttgccgcgtgacctagactcttaagtggagcgtcagcttccagtttttgaccaaataaagcatttatcccataggaatattaaggcacccatttacttttttctccccattatcccatttgtccccagagcaatgtgggtgtttggcaggtgccagacagtaaattactgttctaaattgtgcctcagtggcccaataatattaaggaagcatctcccacagtgtcaatctgtagacaagggaataattaatgtatttatcaaagcagatggatttcagaggaatgtgaatcctgctctaagcacagcatcagggtttgtttttttttttctggagtttagtgaactgggctttgtaacttcttacctgattattttgctgccctgtttgtccttccttctttccctttttagcagttctactctgtgcttcaacttttcatccccttattaagactgctgcatagaaaacgtaggagtctggagacaggcaggcaaagtggggagtgaggaagggaaaacaaacattctgagaaggaactgttccgtcccccgagctgacagcgcccgctctttgttttgtgatgactgctccctggccttttggttccgagggagtgcagggcagcagtgtgaagacctgtttacgtccactccccactccccggggctggcttcgggacgaattcactgtggtattaacagagcccgggacagagcctggcagaaggcagatggatgctcgtgcccgtcggctggatgaatgaaaggtgagcagcaaaggcgataccaggatcgtccacggcgggactggaggaggagaatgggactgtgcggagcctgcgggaagaatctgaaagtgtctgtgtgatggagagagacatggaaaaggcgacgtcccagcggctggaactggggcggaggaacgggaacagggaaggcctgagttaggcaccacaaaggttttcaggagaaaagtggggcgagccgagagggtaagggcgagacaaagagcagcagccgaggctgttcgtgggaagaaatgggaaagaagcagccgggagggcgggcggacggacgcgaaggaaggggc

SEQ ID NO: 3027 - DNA, 952 bp, Artificial sequence
  DNA replication origin
gtctggggtgtgaggagcccctctgcccggctgcccagtctgggaagtgaggagcgcctcttcctggccgccatctcgtctaggaagtgaggagcgtctctgcccagccgcccatcgtctgagatgtggggagcgcctctgccccgccgccccgtctgggatgtgaggagcacctctgcccggcgacgaccctgtctgggatgtgaggagcccctccgccgggcagccgccccgtctgagaagtgaggagcccctccgcccggcagccgccccgtctgagaagtgaggagcccctccgcccggcagccgccccatctgagaagtgaggagcccctccgcccggcagccgcccgtctgggaagtgaggagcgtccccacccagccagccgccccgtccgggaggtggggggcgcctctgcccggctgccccttctgggaagtgaggagcccctctgcccggccgccaccccgtctgggaggtgtacccaacagctcattgagaacgggccatgatgacgatggcagttttgtcgaatagaaaagggggaaatgcggggaaaagatagagaaatcagattgttgctgtggctgtgtagaaagaagtagacataggagactccattttgttctgtactaagaaaaaatcttctgccttgggatgctgttgatctatgaccttacccccaacccagtgctctctgaaacatgtgctgtgtccactcagggttaaatggattaagggcggtgcaagatgtgctttgttaaacagatgcttgaaggcagcatgctcattaagagtcatcaccactccctaatctcaactacccggggacacaaacactgcggaaggccgcagggtcctctgcctaggaaaaccagagacctttgttcacttgtttatctgctgaccttccctccactattgtcctatgaccctgccaaatccctctct

SEQ ID NO: 3028 - DNA, 1023 bp, Artificial sequence
  DNA replication origin
tgatttctctatcttttccccgcatttcccccttttctattcgacaaaactgccatcgtcatcatggcccgttctcaatgagctgttgggtacacctcccagacggggtggcggccgggcagaggggctcctcacttcccagaaggggcagccgggcagaggcgccccccacctcccggacggggcggctggctgggtggggacgctcctcacttcccagacgggcggctgccgggcggaggggctcctcacttctcagatggggcggctgccgggcggaggggctcctcacttctcagacggggcggctgccgggcggaggggctcctcacttctcagacggggcggctgcccggcggaggggctcctcacatcccagacagggtcgtcgccgggcagaggtgctcctcacatcccagacggggcggcggggcagaggcgctccccacatctcagacgatgggcggctgggcagagacgctcctcacttcctagacgagatggcggccaggaagaggcgctcctcacttcccagactgggcagccgggcagaggggctcctcacaccccagacgatgggtggccaggcagagatgctcttcacttcccagatggggtggcggccaggcagaggctgcaatctcggcactttgggaggccaaggcaggcggctgagaggtggaggttgtagcgagccgagatcacgccactgcactccagcctgggcaacattgagcactgagtgaacgagactccgtctgcaatcccggcacctcgggaggccgaggctggcagatcactcgtggttaggagctggagaccagcccggccaacacagcgaaaccccgtctccaccaaaaaaatacgaaaaccagtcaggcgtggcggcgcgcgcctgcaatcgcaggcactcggcaggctgaggcaggagaatcaggcagggaggttgcagtgagcggagatggcggcagtacagtccagcttcggctcggcatcagagggagaccgtggaaagagagggag

SEQ ID NO: 3029 - DNA, 1396 bp, Artificial sequence
  DNA replication origin
tgagctgcgagtgggagggtgggcgactgggctgtcggccccggccccaccggccggggaatgcgctttagggccgggtagggctgggggccccgaggtccaggcggaaggagcctttgctgggtgggtcggggccccagacccggactggggtgttggggtggcggtccctacctcgcgacggggctggtggccgcgccccgagctctgccttggttttctgtccggtttaggttgtagggtgtgacactcccacccgcccctgtacacattgccttgtgattgggggtgagaaactgcccccatcccatgaggacagggaccacatcttgtgtctctgtccacactgcccacaactagtctctagacacccagcgcctcaggagactgcctgcgtgttggtttgttttattagaaaagcttttttttctttttttctgagacagagtctcactctgtcgcccaggctggagtgcagtggcgcgatcttggctcactgcagcctctgcctcctgggttcaagcgattctcccacctcagcctcccaagtagctgggattacagacacccgccatcaaacccggctaatttttgtatttttactagagacgaggtttcaccatcttggccgggctggtctcgaactcctgacctcaagtgatccgcccacctctgcctcccaaagtgctgggattacaggcatgagccaccgcgcccggcctattagaaaagttttgatcgtgctgaaacctggccactaatgtcctatgttgtagaaccacacagaatgctgcatttctatttagggtgcttttagcttttgttttcctttttggatgacaaaataacgtttctcttcgctttttggtgtattctttagcctccgttccccatctgtgaaatgaggatgttaagatgatatggccaactggaaactaatcagtgtttcttctggtttctcagcaagttcttctttctcagcaagctgctttcacccacgtttgtggttgctgattttattcggttttgttttgtgtgatactgggacttagcatgacatctccgaatgtaagattgctctctgaatcttcaccttgagggagtaattctatgggatcgaatgttggagtcactgaaatttaactttttgatatttcaaaacaagttggtgggttctttttaatttgttgcctttattaattggtcaaggctcagagtaatttcacgggtttttttttcttgatttctagcctctattatgaatctcaagtggaacctcagaccgggcctaagaaaggtctgactcataggtagctgaccctcgttatttaaagctttatttccatagactgtcaacaagcctttatgaacaattggtgcttaagaggcagacact

SEQ ID NO: 3030 - DNA, 974 bp, Artificial sequence
  DNA replication origin
acctctttccacacagacacagcaacaatccaatctctccctcttttccccacatttcccccttttctatttgacaaaaccgccatcgtcatcatggcccgttctcaatgagctgttgggtacacctcccagacggggtggcggctgggcagaggggctcctcacttcccagacagtgcggcagggcagaggcgccccccacctcccagacggggcggcggccaggcgggggctgccccccacctccctgtcggggcggctgcccggcggaggcgctcctcacttcccagacggggcggctgccgggcggagggtctcctcaattcccagacggggtcgcggctgggcagagacgctcttcacatctcagatggggcggcggggcagaggcgctccccacatcctagacgatgggcggccgggcagagacactcctcacttcctagactggatgacggccgggaagaggtgctcctcacttcccagactgggcagcggggtggaggggctcctcacatcccagacgatgggcggccaggcagagacgctcctcacttcctagacggggtggcggccgggcagaggctgcaatctcggcactttgggaggccaaggcaggcggctgggaggtggaggttgtagcgagccgagatcacgccactgcactccagcctaggcaacattgagcactgagtgagcaagactctgtctgcaatcccggcacctcgggaggccgaggctggcagatcactcgcggtcaggagctggagaccagcccggccaacacagcgaaaccccgtctccaccaaaaaatacgaaaaccagtcaggcatggctgcgcgcgcctgcagtcccaggcactcggcaggctgagaaaggagaatcaggcagggaggttgcagtgagtcgagatggcagcagtacaatccagcctcggctgggcatcagagggagacggtgcaaaggagagggag

SEQ ID NO: 3031 - DNA, 1310 bp, Artificial sequence
  DNA replication origin
ggggggttgggaatcaaggtacaggaacggagtgggcacaagtaagggcaccaccaactcccagaaccgcctcatcccttcccatgctaccctttccccactcatctctttttgctgattctgcctacaggttttccctcctgttacagtaatggacactcaacaacacatacccttcccagcaacctgtcctgctggaaaactactcgataaggtaacttctgcctgaaggggaccagggtcatcatacccgcaagtgcagcatcttcctgcagctctcatactaccaagctggggtttttccaacataaacattacaggtgctaaacgagaggtggcttcctttctcaataagctgttctctctctcggatgcccttgacagagccctgcagcctcccccactggggcttggtggataggtggtcgcttctcccccgaatttcaggaatgtttaggtttgcacaggtcctgcaggcgagcttggagaaggattagaaaaatgctcattcttaatcagttcgggcttgtctttatgccagcgaggttgaccttggggacagaagggtggccaggataaggacaagcatcctggtattggggaattctctgatatggggctgggacgtcaagatgggccatgatggcccctggggatagggcttctctgcagtggaagcagaagcatcccggtgttttctgctgtgtcactgtcctcagagggatgtataaagctgcttgggggctcataggagagggatgaaaccaagagtttggctttccagcaacagcggacaaagagtgggaaggggtactctatgccccaggtctgcaacatcttgccctatgcgctaggttttcccaaaggtcctttggctccaagaattttacagcagaacaaagggatcgatacccccaagggggcataaaagcatgccaatgagaatacccgccgccgaccgggcaccaagaaagtcctcggtggctgggtcacgtgcagatattgttgcctggggtctagactggcctgagtctcaattggtttctacgggacaactcactgcgggctaccgccctgggtgggtttggcaattgtcctgctcgaggtggttcaggccgcccacaaggggcacagccgggcagtcaggaaccggggctgccggctgggctggcctgcaaagaagagggaagggccggaactgcaaccgcagtggcggggagtgcgagggggcggcaggtgcaggagcgggaggcggggcggagctgggcagagtcctcgccagtccggcgtcccggagtgaccttccccca

SEQ ID NO: 3032 - DNA, 945 bp, Artificial sequence
  DNA replication origin
ctgcgcgcccaccaataggtgcggggctcggagccgcgcagcctgcgccgtccctccctccgcccccgccccgccgccgccgccgccgccgcctccccctcctcctgctcctgccttggctcctccgccgcgcgtctcgcactccgagagccgcagcggcagcggcgcgtcctgcctgcagagagccaggccggagaagccgagcggcgcagaggacgccagggcgcgcgccgcagccacccaccctccggaccgcggcagctgctgacccgccatcgccatggcccgcgggaaagccaaggaggagggcagctggaagaaattcatctggaactcagagaagaaggagtttctgggcaggaccggtggcagttggtgtaagtacggggtccgcagctcccggccgccgcgtctgatctttcccgggcggcgcatcccctgcgcagggtccgcggccggttccgcacccaccgcgctggccggggtggcgggggcgagggtggtggacgctgctgggtcgcgccggcctgggcttgcagtcctgtgcggaatgcggtgtccccagagtggggcgcagggtcggggctggaacacgacaggcggaaggttatgcatatcgtagcgatcttggcttggtaatttgcagtctttcctaccgtgcatcggttgagccttttactcctgggaatagtcaggctctgcgagactacatttgtctctcccgtgtcctgagtccttaaaaaaaaaatgagatctggggtcttgagagaacctcgtgaggtgatgggatctaatgcagacgaggttgtgtgttacagcatctttcttctagtctaaatacgtatctcaaaagagaggaaagagaagggtggagaggaatccatccacactgtagtatttcacagcgatggctaaggatttccctccatgacctcccctggagtc

SEQ ID NO: 3033 - DNA, 1321 bp, Artificial sequence
  DNA replication origin
cctgacgcacaaggcacggggcctctggacgcgtgttctgagcccttcgcaggagactcgtcctacagagccgaagaaaacagaaaatcatgaacacaaagaagagcacgaagccgacctccaactggcaaaatcagaaatctctgccgagaatggctcgagcgcttttctcggtcctctcttcctccgctgcccacccgcaggccggtcgcccgcccttcccgcgccccgcgtccgccgcgcgtacctccctctcggtcaggttcttgtccggccccagcaggtacggggtcaggaagggctcggacggcctgaggctggcgaagaagccgtaggcgcagagcagcgcggtcggcaagaaccagcattcgcgacggacccgagcggtccgcaggagcacagtggccgccgccgccgccgcccgccgagacaccgggccgggcacatccatccggggcgcgaggggaggggacccggcccggccccttccttctcctcctccgccaactggagtgagggtcaggcacttgtaaccgcgagtgacgccttctccctgtaaggccaggacgttctggactcgccgccgcctccggctacagaacccccagctttaccctacagacgcctctagggtcgctgcctgatcgcccagtttaagggagacccgtcctaaggcccaccctctgccaccgcctccactccgggaaccaatcacagcggacgccgggaatacttgcctgctcttccattggtcgtgggtcacacgacgtgaactggggcggtggcagcacgccaggcctctgacgtcccagggctcaagcgcggaggacatgtggaactccactccaaaagcggcggcttgcggcggagctctctctagtgaggcggccagctggcgttcgtggcacacttgctgtcggctccgctcatctgttgggaatgcgtcctgtgggcctagtcctccgctggaagaaacgcgctgttctccccaaccaccgtttatcattcttattcaccgtctccggaatgtccattcagtttccgctcctgagagacttagtgactgaggccaggcaaagatttcaccttggggagggggaacgttaaacctttcctccagcagctttcgtgttttaaattgtattcatccgccatggaaagacatcagaagcccaggatctaagagacagactgaaatgaagaaagtagataatattgtgagaataatgaacaagctggtcactgaacagcagaaccgtaatggagtcccagttaaagggttttaactttatttcgtcactttttgcaagcatgatacaaa

SEQ ID NO: 3034 - DNA, 1249 bp, Artificial sequence
  DNA replication origin
aacctttgtacaaattctgaataatcccaggatatttcttcagcagcaatgtaataatttcttctgtttccattgttgctgcggaggtaccatgctgcaatgttgtcaggatctctggaggagttgatgtttgtcctaacatcagttttgtaggggtcatcatagggcacataatcaatttcagcatagtcatcttcactgctctggacctcttcctttggaatgatctcaatgtaatctgtaccatctttactgaggcccactataaccagtggattaaattcctttgatagaaaagtatcattgagagtaggagatgaaggagatggcatctgaccaaggtctggataaggaaaagactcattaaattcttgaagaagcaatgactgactagattcagaagggtagaatatctgatcaaggtctggaggaggtgatatctggctgagatccgggagaagggtggtgtcactgatgtctggagagagagtcacctggctgaggtctggggaaagggacatctgaccaaagtttggggaaagatctgtctcaccaaggtctggagaaagtgtcatctggtcgaggtctggggtaaggggaatttgactgagatctgcaaagaggggcatctcactgaggtctggggaaaggtttgtctgactgagttctggagagaggtttgtctggctgaggtctagagaaagggttgtatggctggggtctggagaaaggggcatctgaccgagggctggggaaaggtttgtttgactgagttctggagagaggtttgtctggctgaagtctagagaaagggttgtatggctgaggtctggagaaatgggcatctgaccgagggctggggaaaggtttgtctgactgagttctggagagagagtcatatggctgagttctggagagaggtttgtctggctgaagtctagagaaagggttgtatggctgaggtctggagaaaggggcatctgaccgagggctggagaaaggtttgtctgactgagttctggagagaggtttgtctggctgaggtctaaagaaagggttgtatggctgaggtctggagaaagggttgtatggctgaggtctggagaaatgggcatctgaccgagggctggggaaaggtttctctgaatgagttctggagagagagtcgtgtggctgaggtctggagagaggtttgtctggctgagttctggagagagggtcacctggctgaggtctggagagatgactg

SEQ ID NO: 3035 - DNA, 1156 bp, Artificial sequence
  DNA replication origin
tttttttttaaccttcattaacctccaggcttctaaatcccatgctgcattgctgttttggatgataaagcatgcgacatgaccaagcctagctgctacatcagttcccctctaaagccactcaacattactatcaacataaaaacagtgcatttgctatgcatttgcagttttgtcactatcccagccagactgctacctaaaacctttcctgtaaagaaatctcaaattgcctcagaccacaatttggtctgtgacaatttgctgcgaggttatgtgtgtgttcgtgtgtcatgccccagtgatggatgatgtagcgtgcatgggacggtgtgcggttgtgtgtatgttcgtgtgtcatgccccagtgatggatgatgtagggtgcatgggacggtgtggggttgtgtgtgtgtgtgtgtgtgtgtgtgtgtgtgtatgtgtcatgccacagtgatggatgatgtaggctgcatgggactgtgtggagttgtgtatgtatgcgtgtgtcatgccccagtgatggatgatgtagggtgcatgggacagtgtggggttctgtgtgtgtgtgtgtgtgtgtgtgtgtgtgtcatgccacagtgatggataatgtagggtggatgggacagtgtggggttctgtgtgtatgtgtgtgtcatgccacagtgacggatgatgtagggtgcatgggatggtgtggagttgtgtgtgtgtgtgtgtgtgtgtgtgtcacaccccagtgatgagatgtagggtgcatgggactgtgtggggttgtgtgtgtgttcgtgtgtcatgccccagtgatggatgatgtagggtgcatgggatggtgtggagttgtgtgtgtgtgtgtttgtgtcacaccccagtgatggatgatgtagggtgcatgggactgtgtggtgttgtgtgtgtgttcatgtatcatgtcctggtgatggatgatgtagggtgcatgggacagtgtgggattgtgtgtatgtgtgtgtcacacccagtgatggatgatgtagggtgcatgggacagtgtgaggttgtgtgtgtgtgtgtgtgtgtgtgtgtgtgtgtgtcacgcccagtgatggattatgtagggtgcatgggacagtgtggggttgtgtatgtgtcacgcccagtagggtgcatgggacag

SEQ ID NO: 3036 - DNA, 1115 bp, Artificial sequence
  DNA replication origin
ggccgggcagaggggctcctcacttcccagtaggggtggccgggcagaggcgcccctcacctcctggacggggcggctggccgggcggggggctgaccccccacctccctcccggacggggcggctggccgggcggggggctgaccccccacctccctcccggacggggtggctggccgggtggggggctgacccccacctccctcccggacggggcggctgctgggcggagacgctcctcacttcccagacggggtggctgccaggcggaggggctcctcacttctcagacggggcggctgccgggaggaggggctcctcacttctcagacggggcggttgccaggcggagggtctcctcccttctcagacggggtggctgggcagagacgcgcctcacctcccagacggggtcgcggccgggcagaggcgctcctcacatcccagacggggcggcggggcaaaggcgctccccacatctcagacgatgggcggccaggcagagacgctcctcacttcctagatgggatggcagccgggaagaggcgctcctcacttcctagatgggatggcggccgggcagagatgctccttacattccagactgggcagccaggcagaggggctcctcacatcccagacgatgggcggccaggcagagacgctcctcacttcccagacggggtggcggccgggcagaggctgcactctgggcactttgggaggccaaggcaggcggctgggaggtggaggttgtagcgagccgagatcacgccactgcactccagcctgggcaccattgagcactgagtgaaccagacaccgtctgcaatcccggcacctccggaggccgaggctggcggatcactcgcggttaggagctggagaccagcctggccaacacagcgaaaccccgtctccaccaaaaaaaatacgaaaaccagtcaggcgtggcggcgcgcgcctgcaatcgcaggcactcggcaggctgaggcaggagaatcaggcagggaggttgcagtgagccgagatggcagcagtacagtccagcttcagctcggcatcagagggagaccgtggaaagagagagagagggagaccgtggggagagggag

SEQ ID NO: 3037 - DNA, 840 bp, Artificial sequence
  DNA replication origin
ttgccccgccgccccgtctgggatgtgaggagcgcctctgcccggccgcgaccccgtctgggaggtgaggcgcgtctctgcccagccaccccgtctgagaagggaggagaccctccgcctggcaaccgccccgtctgagaagtgaggagcccctcctcccggcagccgccccgtctgagaagtgaggagcccctccgcctggcagccaccccgtctgggaagtgaggagcgtctccgcccagcagccgccccgtccgggagggaggtgggggtcagccccccacccggccagccaccccgtccgggagggaggtggggggtcagccccccgcccggccagccgccccgtccgggagggaggtggggggtcagccccccgcccggccagccgccccgtccaggaggtgaggggcgcctctgcccggccacccctactgggaagtgaggagcccctctgcccggccaccaccccgtctgggaggtgtgcccaacagctcattgagaacgggccatgatgacaatggtggttttgtggaatagaaagcggggaaaggttgggaaaagattgagaaattggatggttgccgtgtctgtgtggaaagaagtagacatgggagacttttcattttgttctgtactaagaaaaattattctgccttgggatcctgttgatctgtgaccttacccccaaccctgtgctctctgaaacatgtgctgtgtccactcagggttaaatggattaagggcagtgcaagatgtgctttgttaaacagatgcttgaaggcagcatgctcgttaagagtcatcaccactccctaatctcaagtacccagggacaca

SEQ ID NO: 3038 - DNA, 857 bp, Artificial sequence
  DNA replication origin
ctgctgccccgtctgggatgtgaggagcacctctgcccggccgcgaccccgtctgggaggggaggagggtttttgcccggccgccccgtctgagaagggaggagcccctccgcttggcagctgccccgtctgagaaggggggagggtttctgcttggcagccgccccgtccgggagggaggtggggggtcagcccccgcccggccagccgccccgtccgggagggaggtggggggtcagcccccgcccggccagccgccccatccgggagggaggtggggggtcagcccccgcctggccagccgcccagtccgggagggaggtgggggccagcctctgccctgccgccgccctgtccgggaggtggggggtgcctctgcccggccgccccttctgggaagtgaggagcccctctgcccggccaccaccccatctgggaggtgtacccaacagctcattgagaatgggccatgatgacgatggcggttttgttgaatagaaaagggggaaatggggggaaaagatagagaaatcagattgttgctgtgtctgtgtagaaagaagtagacataggagactccattttgttctgtactaagaaaaattcttctgccttgggatgctgttgatctatgaccttacccccaacccggtgctctctgaaacatgtgctgtgtccactcagggttaaatggattaagggcagtgcaagatgtgctttgttaaacagatgcttgaaggcagcatgctcgttaagagtcatcaccactccctaatctcaagtacccagggacacaaacactgcggaaggccccagggtcctctgcctaggaaaaccagagacctttgttcacttgt

SEQ ID NO: 3039 - DNA, 1026 bp, Artificial sequence
  DNA replication origin
tcaatgagctgttgggtacacctcccagatggggtggtggccgggcagaggggctcctcacttcccagaaggggcggccgggcagaggcaccccccacctcccggacagggcggcggcagggcagaggctggcccccacctccctcccggactgggcggctggccaggcgggggctgaccccccacctccctcccggatggggcggctggccgggcgggggctgaccccccacctccctcccggacggggcggctggccgggcgggggctgaccccccacctccctcccggacggggcggctgccaagcagaaaccctccccccttctcagacggggcagctgccaagcggaggggctcctcccttctcagacggggcggccgggcaaaaaccctcctcccctcccagacggggtcgcggccgggcagaggtgctcctcacatcccagacggggcagcagggcagaggcgctccccacatctcagacgatgggcggccggacagagatgctcctcacttcctagacgggatggcggccgggaagaggcgctcctcacttcccagactgggcagccgggcagaggggctcctcacatcccagacgatgggtggccaggcagagacgctcctcacttcccagacggggtggcggccgggcagaggctgcaatctcggcactttgggaggccaaggcaggtggctgggaggcggaggttgcagcgagctgagatcatgccactgcactccagcctgggcaccattgagcactgagtgaacgagactccatctgcaatcccggcacctcgggaggccgaggctggcagatcactcctggttaggagctggagaccagcccggccaacacagcgaaaccccgtctccaccaaaaaaatatgaaaaccagtcaggcattgaggcaggagaatcaggcagggaggttgcagtgagcagagatggcggcagtacagtccagcttcggctcggcatcagagggagaccgtggaaagagagggagagggagaccgt

SEQ ID NO: 3040 - DNA, 836 bp, Artificial sequence
  DNA replication origin
aaagcagtgggccacttctcccgggaggggtggatggtgagggtgcaccaagtggccaacagccaggaccaggtgttggaagcagagcctcagttctccttgcctgtctttgccttcatcatgaccaagttcaggccagtccctggctctgcccttcagatctttgagctgtgtgctcaggagcagcgcaagcctgtgcggctggagagtgccgagcggctggccgaggcggtgcaggagcgacagcagtatgcctggctgtgcagccagctgcgccgcaaggccaggctggggagtgtgtctctggacttgtgcgatggggacacgggggagccacgctacaccctccacgtggtggacagccccactgtgaaaccatcgcgggacaatcattttgcgattttcatcagtgagttgggattgctccctctcttccctggaggggctggcttacaggggctggggcttgggctggggctggggctgaggctgggctggggctttggtgggattctggactgttttttgtcttgcaggggtttgtacttccagaggattagactacccaaggcatgatgaaaggagagtaatagctctctagcaacctacttggagttgagacctattccttttcatctgccattgcaaaggcttgatgaagtgtgagaatggggttggtagggaagagagagaatagagataaatttaggaggtcacatatgatatagagatgctagttactttgtagcatggagtaatggaagtaatgctggactagcaagtctaagacataggttctagtcccagctgtagcctgtgagctgcaggacctgggg

SEQ ID NO: 3041 - DNA, 915 bp, Artificial sequence
  DNA replication origin
attttcatcagtgagttgggattgctccctctcttccctggaggggctggcttacaggggctggggcttgggctggggctggggctgaggctgggctggggctttggtgggattctggactgttttttgtcttgcaggggtttgtacttccagaggattagactacccaaggcatgatgaaaggagagtaatagctctctagcaacctacttggagttgagacctattccttttcatctgccattgcaaaggcttgatgaagtgtgagaatggggttggtagggaagagagagaatagagataaatttaggaggtcacatatgatatagagatgctagttactttgtagcatggagtaatggaagtaatgctggactagcaagtctaagacataggttctagtcccagctgtagcctgtgagctgcaggacctggggaagttgctgtgcttctctgcaaaatttggagaggcagcatagggtagcagctaaaaaagtgagctctggaaccagactgtttgggtttcagttttggctcagtcatttcctgatggtgtgacattagacaggttacttttctttctctgccttgatgggattgtaactctggtgtagttgtgagaagtataaaagctcttagaaatggtacctggccttggaagtgctgtgtaaatgttagccattattactgaaagcagtaagttatatcagatttatcttaataaggataaaaaagatagtaggaggaagtgctttcaaaagtggaacattgtagacaaatgcaaagtgtttatggtcttggtgttacggtaatttgtttcctggtgactgagctagtttttcaagtattctataattctgtctgtccatgtgtggaaataaatagtgcagtgaatacaagcgtgggtagagtctg

SEQ ID NO: 3042 - DNA, 1400 bp, Artificial sequence
  DNA replication origin
aaagttgagatgtaatgtacagtaaaatgcacatcacttaaaagtttagtttgaggagttttgacaaatgtatgcccacatcccagtcaagacatgggacatttccatcactccagaaagtttcctcatgcctcctacagtcaatctccactcctcaaagacaaccacagttccgatttctattaccatagaatagctttgctggttgtagaacttcacatacatgaaatcaaaccaatatggtctttggcctttttcattctacataatgtatctgagattgttgctatatcaaaagtcttttttgtggcagagattatttcactatatatatataccacgtttgtttattcattcacctgttgatagacatttgggttgttttcaggttttttgacattatgaacattttaatatgtctttttagagttagaaggaactgtacattaaatgctgagattacaaaagatgacttcagttttgaataaattgagtctgtagtacttgtaggacactcaggtagtattctgggctcctcttggagtacagtctaagttgcagaagagagacagggtctagcaatgtaaatttctgtagtcgccagccttgattcagagttaaagctatgggaaagtcctcaggcagaggacaaacattagacaagaaaatgcccatatatgaaaccctgcgaagcatcagtatttgaggagcagactaaaaaggaaccgtctgtggaggctaagagaagcatggccatttatctttgtgtcccgatcatcaggcacaggaccccacacacagtcacttctcaatgtgctaaatttcacagaatgcgtccagggtacctggttctggatagatccggtagaaggagatagaccgggagggcaaatggcatgaggagtctcacaggccagagtgattaaaggggtgtatcggggcggtaaaccctacagactctacctgtgcttatgcggggctggggaggacgagtcattacagatgaagaattaagtaaggtcagaccactcagggccttagatggatgtcacattgaagaatttagactccaacaggcctgccaccctgggaggagtcatcgcggattctggagaagggcgtgacagaggagatttcctttcgggaagtgtagtctggcagcggtgccccggtggtggcggcggcggtgctgctgttgctggtgatcgtgtggtggtgttagcggcgatagtgctttccactgggctttggcttggtagccgctgaaagagaacaacgctgccgctgctgctgatttcatgccatttcctgacccggcgctgtaacttggcctctgagccttggccacagaacgcagaggccgtggcatctggccgcagctgggctgcagtgcgtgcgcg

SEQ ID NO: 3043 - DNA, 1417 bp, Artificial sequence
  DNA replication origin
tctggccgcagctgggctgcagtgcgtgcgcgcctggcctggtggtccgatgggaagcccggggcggggcagccgcggggcgggggcggggcgtcgcggagataggccacgcccctgcccgcccgcgcaggcgcgctgcgggtcgttagctgtcagagccaagcggcgggctggcggcgggctccgacgtctgcgccaggacctggctggctgagcccggcgcagcagcagcagccagggcagcgcggcccctactccctgtcaggtcgtagaggcgagcagggaccagctggtcgccggcccctcgggcaagatggggaaccgggagatggaggagctgatcccgctggtgaaccgtctgcaggacgcgttttcggcgctgggacagagctgcctgctggagctgccgcagatcgccgtggtgggcggccagagcgccggcaagagctcggtgctcgagaacttcgtgggcaggtaagcgcgcagggcgcggagtaaggatgcggcagtggggcgaccccgctgcgggccgttggaacgtggacgggcagcgggagccagagggtggatggaccaggcgctgcggtggaatggggggcagagtggaatggggggcagagtggcggtgtccgtggggcgggcggggtcctccagctctgggcatcctccgtcccctgccaccccccgcctggtggccctcctgcctgcctttcatcgtgcgatacaaagccatttcctccctgtcctccagtcggggagtcgggggaggggtccgccccgggctcgacccccaccccctcggtgcgcgccagccccgggcagcctccctgcgtagcgcgccgaaagcttcccagtgcccctctcctgttttcccagctcaacacccccctccttttcctgtcgccctccgtgaggctccctgtgaggctgtggggctttatcccccgagccccctcccttaggtggagatgctttccttctcgccagggttctcgttcctctcagctgtctactgttgcctgcctctagctggggaggcggggtgcgaggagaaagacgtcgtttgttgtggtgaagctttatccagagacgcttccccaccattctcctcccggagagtcgaagaataaaaggtggtgtgtttgcgtgtgcacctattcacagcttcaggcaattgtgagagagcccgaggcacagacttggcagggggtggacgtggacttatgttgtccaggtgccatgtcattcctgcatcatctcggaactgaccagcatctttctcgcactctctctgcgccccctcccccagcatcatcttccgttctctaagctcctatttgtcttgctagccttcaagacaacattctgaatctaaattgtagctgtggttttcctcatgactcttaatacagaaaca

SEQ ID NO: 3044 - DNA, 1201 bp, Artificial sequence
  DNA replication origin
gaggggctcctcacttcccagtaggggcggccgggcagaggcgcccctcacctcccggaccgggtggcttgccaggcgggggctgaccccccacctccctcccggacggggcggctggccgggcggggggctgacccccccacctccctcccggacggggcggctggccgggcggggggctgacccccccacctccctcccattacgggcggctggccgggcatggggctcacccccccaccttccttccaggattggggtggctcccgggcagagacgctcctaacttccccaaacgggggggctgcgggccggacgggctcctaatttttcggccggggcggtgcccgggcgggggttctcctcacttctcgaacagggcggctgggcagagacgttcctcaactcccagacggggtcgcgcccgggtagaggcgctcctcacatcccagacggggcggcggggcagaggcgctccccacatctcagacgatgggcggccgggcagagaagctcctcacttcatagatgggatggcggcagggaagaggcgctcctcacttcctagatgggatggcggccgggcagagacgctcctcactttccagactgggcagccaggcagaggggctcctcacgtcccagacgatgggcggccaggcagagactctcctcacttcccagacggggtggcggccgggcacaggctgcaatcttggcactttgggaggccaaggcaggcggctgggaggtggaggttgtagcgagccgagatcaggccactgcactccagcctgggcaccattgagcactgagtgaaccagactccgtctgcaatcccggcacctcgggaggccgaggctggcggatcactcgcagttaggagctggagaccagcccggccaacacagcgaaaccccgtctccaccaaaaaaatacgaaaaccagtcaggcgtggtggcgcgcgcctgcaatcgcaggcactccgcaggctgaggcaggagaatcaggcagggaggctgcagtgtgccgagatggcagcagtaccccccttattcttacagttcctgaatacctctgcctcattcatctgccacttcctattaatccttcaagattcagctcaggaattacctcttccaggaagccttctctcatctcctcttgcagttacgcatcatcactctttcaataacaccct

SEQ ID NO: 3045 - DNA, 923 bp, Artificial sequence
  DNA replication origin
ccgtctgggatgtgaggagcgcctctacccgggcgcgaccccgtctgggagttgaggaacgtctctgcccagccgccctgttcgagaagtgaggagaacccccgcccgggcaccgccccggccgaaaaattaggagcccgtccggcccgcagcccccccgtttggggaagttaggagcgtctctgcccgggagccaccccaatcctggaaggaaggtgggggggtgagccccatgcccggccagccgcccgtaatgggagggaggtgggggggtcagccccccgcccggccagccgccccgtccgggagggaggtgggggggtcagccccccgcccggccagccgccccgtccgggagggaggtggggggtcagcccccgcctggcaagccacccggtccgggaggtgaggggcgcctctgcccggccgcccctactgggaagtgaggagcccctctacccagccaccaccccgtttgggaggtgtacccaacagctcattgagaacggaccatgatgacaatggtggttttgtggaatagaaaggggggaagggcggggaaaggattgagaaatcggatggttgccatgtctgtgtggaaagaggtagacacgggagacttttcattttgttctgtactaagaaaaattcttctgccttgtgatcctgttgatcggtgaccctacccccaaccctgtgctccctgaaacatgtgctgtgtccactcagggttaaatggattaagggtggtgcaagatgtgctttgttaaacagatgcttgaaggcagcatgctcattaagagtcatcaccactccctaatctcaagtacccagggacacaaacactgcggaaggccgcagggtcctctgcataggaaaaccagagacctttgttcatttgtttatctgctgaccctccctcc

SEQ ID NO: 3046 - DNA, 1225 bp, Artificial sequence
  DNA replication origin
ctgatttctctatcttttccccacctttcccccttttctattccacaaaaccgccatcgtcatcatggcccattctcaatgagctgttgggtacacctcccagacggggtggtggccgggtagaggggatcctcacttcccagaaggggcggccgggcagaggcgccccccaacctcccggacggggcggcggccaggcgggggctgacccccctcctccctcccggacggggcagctggccgggcgtgggctgaccccccacctccctcccggacggggcggctggccggggggggggctgaccccccacctccctcccggacggggcggctggccgggcgggggctgagcccccacctccctcccggacggggcggctggccgggcgggggctgccccccacctccctcccagagggggcggctgccgggcggagatgctcctcacttcccagacggggcagctgccaggcggaggggctcctcacttctcagacggggcggctgctgggcggaggggctcctcgcttctcagacggggcggctgctggtcggaggggctcctcgcttctcagacggggcggccgggcagagacgctcctcacctcccagacggggtcgcggccgggcagaggtgctcctcacatcccagacggggtggcggggaagaggtgctccccgcatctcagacgatgggcggctgggcagagacgctcctcacttcctagacaggatggcggccgggaagaggcgctcttcacttcccagactgggcagccgagcagaggggctcctcacatcccagatgatgggcggccaggcagagacgctcctcacttcccagacggggtggcggccgggcagaggctgcaatctcggcattttgggaggccaaggcaggcggctgggaggtggaggttgtagctagccgagatcatgccactgcactccagcctgggcaacattgagcactgagtgaaggagactccgtctgcaatcccggcacctcaggaggccgaggctggcggatcactcgcggttaggagctggagaccagcccggccaacacagcgaaaccccgtctccaccaaaaaaatacgaaaaccagtcaggcgtggcggcgcgcgcctgcaattgcaggcactcggcaggctgaggcagaagaatcaggcagggaggctgcagtgagccgagatggcagcagtacagtccagcttcagctcag

SEQ ID NO: 3047 - DNA, 826 bp, Artificial sequence
  DNA replication origin
cagccgccccgtctgagaagcgaggagcccctccgcccagcagccgccccgtctgagaagtgaggagcccctccgcctggcagctgccccgtctgggaagtgaggagcatctccgcccggcagccgccccctctgggagggaggtggggggcagcccccgcccggccagccgccccgtccgggagggaggtgggggctcagcccccgcccggccagccgccccgtccgggagggaggtggggggtcagccccccccccggccagccgccccgtccgggagggaggtggggggtcagcccacgcccggccagctgccccgtccgggagggaggaggggggtcagcccccgcctggccgccgccccgtccgggaggttggggggcgcctctgcccggccgccccttctgggaagtgaggatcccctctacccggccaccaccccgtctgggaggtgtacccaacagctcattgagaatgggccatgatgacgatggcggttttgtggaatagaaaagggggaaaggtggggaaaagatagagaaatcagattgttgctgtgtctgtgtagaaagaagtagacatgggagacttttcattttgttctgtactaagaaaaattcttctgccttgggatgctttgacctatgaccttacccccaaccctgtgctctctgaaacatgtgctgtgtccactcagggttatatggattaagggcggtgcaagatgtgctttgttaaacagatgcttgaaggcagcagactcgctaagagtcatcaccactccctaatctcaagtacccagggacacaaacactgtggaaggctg

SEQ ID NO: 3048 - DNA, 1443 bp, Artificial sequence
  DNA replication origin
ggacgaggacaacgagcgactgggcggcggaggacgaggaggaggaagaggaggccgagcaacaagatggcccctgctgcaggagcagcctcagcagcagcaggtgggaggccggaggcggtgctggcggtggcggcggcagccgtggcccggcggcctgggacagaatcagagtcaacggtggcctcggcggcggcggcggctgccgcggcggtggcgacggccgcggggactcggagctgagaggagctgctgctcggaccagcgcggtgagcgagcggcgggcggcgacttggggagcggggctgccgcggccggggcctcagtcgggaacaataggcagctgtggtcgggaagggtttgtcctcgcccgccctctgctcctccgcggcagcggcagcccggccggccccaggctcctcagggcccccgccggctgttctggggcttgtcagtggccggcgtcctttaggcctcaggcctctgcatgccgcctgtagggcctgtcggggtaggtaggccgagaggaggacgaagggaggctcggacgagagggagggggcgaaagggctacctggctcctgtggtactcccagggcctgggccaggcggggaatgcgcacgggaactgctttttggacccctagtctgtgggggtgggggagggcgaaggcgtctgtaaacaggcgccgcctcggcctcccagcacctcagggctgcttcctcccccagcccctgaagcgctccccttctttggccaagtggatttcacggtgtctgtttccctgaagtccctggagatctagcctggtagtcttctccctgctggcgatgggaaaattgtgtgtgtgcaggtgtctttaaaaaaaaaaaacaaaaaacttaaatgcaacaaaaacatataaaatgtggttatcggtaaaggatggagtggtaagggatgcgcctctctaaacatctctaagtatcagttctataaacatcagttatgcccgcatcccaggtgagagtggattgaaacaagggctcttttggaacagtaataacacaactcttgacataccagaatagcctatgaaactggaaacaaacactggcaacgcggagacaaactgtaatgtttaaagaggacttttattccagctaggcgttttgaattactaacatgcagtataagaagcaacattaactagcataaagtggacctcaggaagcacttcgaaaggagacaggtggttcatctccggccatagagcttcttgtgccttgtctcgtgtttcagtaatttttcctgaaattgttcaagaccagtcttttctctgagtttgaaatttgatttcgtttttgttttgttttgcgacggagtcttgctctgtcacccaggctggattgcagtggcacaatctcggctcactacagcctccacctcccggattcaagcga

SEQ ID NO: 3049 - DNA, 921 bp, Artificial sequence
  DNA replication origin
gggggggtcagccccacgcccggccagccgcctcgtccgggagggaggtgggggggtcagccccccacccggccagccgccccgtccgggagggaggtggggggggtcagcccccctgcccggccagtggccccatccgggaggtgaggggcgcctctgcccggccgcccctactgggaagtgaggagcccctctgcccggccagccgccccgtccgggagggaggtgggaggggtcagcccccccgcccggccagccgccccgtccgggaggtgaggggcgcctctgcccggccgcccctactgggaagtgaggagcccctctgcccggccagccgccccgtccgggaggtgggggtgtcagccccccgcccggccagccgccccgtcttggagggaggtggggggggtcagccccccccccgcccggccagccgccctgtccgggaggtgaggggcgcctctgcccggccaccaccccgtctgggaggtgtgcccaacagctcattgagaacgggccaggatgacaatggcggctttgtggaatagaaaggcgggaaaggcggggaaaggattgggaaatcggatggttgccgtgtctgtgtagaaagaggtagacatgggagacttttcattttgttctgcactaagaaaaattcctctgtcttgggatcctgttgatctgtgaccttacccccaaccctgtgctctctgaaacatgtgctgtgtccactcagggttaaatggattaagggcggtgcaagatgtgctttgttaaacagatgcttgaaggcagcatgctcgttaagagtcatcaccaatccctaatctcaagtaatcagggacacaaacactgcggaaggccgcagggtcctctgcctaggaaaaccagagacctttgttcacttgtttatctgctgac

SEQ ID NO: 3050 - DNA, 1330 bp, Artificial sequence
  DNA replication origin
acctccctcccagacggggcggctggccgggcagaggggctcctcacttcccagtaggggcggccgggcagaggcgcccctcacctcccagacggggcggctggccgggcggggcgctgacccccccacctccctcctggatggggcggctggccaggtggggggctgacccccccccacctccctcccggacggggcggctggccgggtgggggggctgacccccccatctccctcccggacggggtggctggccgggctgaggggctcctcacttcccagtaggggcggccgggcagaggcgcccctcacctcccggacggggcggctggctgggcggggggctgacccccccacctccctcccggacggcacggctggccgggtgggggggctgaccccccacctccctcccggatggggcggctggccgggcggggggctgaccccccccccacctccctcccggacggggtggctgccgggcggagacgctcctcacttcccagatggggtggctgccgggcggagaggctcctcacttctcagacggggcagctgccgggcggaggggctcctcacttctcagacggggtggttgccaggcagagggtctcctcacttctcagacggggcggccgggcagagacgctcctcacctcccagacggggtctcggccgggcagaggcgctcctcacatcccagatggggcggcggggcagaggcgctccccacatctcagacgatgggctgccgggcagagacgctcctcacttcctagatgtgatggcggctgggaagaggcgctcctcacttcctagatgggatggcggccgggcagagacgctcctcactttccagactgggcagccaggcagaggggctcctcacatcccagacgatgggcggccaggcagagacactcctcacttcccagacggggtggcggccgggcagaggctgcaatctcggcactttgggaggccaaggcaggcggctgggaggtgtaggttgtagtgagccgagatcacgccactgcactccagcctgggcaccattgagcactgagtgaacgagactccgtctgcaatcccggcacctcgggaggccgaggttggcggatcactcgcggttaggggctggagaccggcccggccaacacagcgaaaccccgtctccaccaaaaccagtcaggcgtggcggcgcgtgcctgcaatcgcaggcattcggcagactgaggcaggagaatcaggcagggaggttgcagtgagccgagatggcagcagtacagtccagcttcggctccgcatgagagggagaccgtggggg

SEQ ID NO: 3051 - DNA, 1012 bp, Artificial sequence
  DNA replication origin
cagcctgggcaccattgagcactgagtgaacgagactccgtctgcaatcccggcacctcgggaggccgaggttggcggatcactcgcggttaggggctggagaccggcccggccaacacagcgaaaccccgtctccaccaaaaccagtcaggcgtggcggcgcgtgcctgcaatcgcaggcattcggcagactgaggcaggagaatcaggcagggaggttgcagtgagccgagatggcagcagtacagtccagcttcggctccgcatgagagggagaccgtggggggagggggagggggagggggagggggaggggttgtttctatttatatcttattatcttgtctaactcttgaaaagttgtagttatttttaacaggttcatctttctacccaaaatgtgagtagtttactagtttacaaagcacaattatagtgttatcattttctgtgtttgtgtacttactattactagtgagttttgtatcctcagataatttcttattgttcattaatgtccttttccttcagattgaagaactccctttagcatttcttgtcggacaggtctggtgttgataaaatctctctgtttttgttgatctgtgcaagactttatttctgcttcatgttggaaggctattttcactgaatatactatcctaagattttttttttcctccagcactttaaaatgtcatggcactctctcctgtcctgtaaggtttccactgagaagtctgcttgccagacatattgcagctccattgtatgttgtttctttattcctgctgcatttaggatcctttctttattcttgacctttgggtgttagattgacctctgggtgttatacaaccttgacctttgggtgttttgacctttgggtgttagacaaccttaaggttgtcttctttgagttaaatctgcttggtgttctataacctttttatacttgaatatttttatctttctctacgtttgggaagttctctgtgtgttttttttgttt

SEQ ID NO: 3052 - DNA, 1210 bp, Artificial sequence
  DNA replication origin
ttgagaccagcctgggcaacatggcaaaagcctatttctacaaaaaaaaaaaaaaaaaaaaaaaaagtagaaaaattagccaggcatggtggcatgcgcctatagacccagctacttgggaggctgaggtgggaggattgcttgagcctggaaggttgaggctgtggtgagccatgatagcactactatgctccagcctgggtgacagagcaagaccctgtctcaaaaaaaaaagaagaagaagaagaggaagaggagggggaggggggaggaggaggaaagaagaagaagaggaggagggggagggggaggaggaagaaagaagaagaggaagaggagagggagggggaggaggaggaaagaagaagaagaggaggagggggagggggaggaggaggaaagaagaagaagaaagaaaagggggccagatgcggtggctcagcttgtaatcccagcactttaggaggccaaggcaggtggatcacttgaggtcaggagttcgagaccagcctaactaatgtggtgaaacccatctctactaaaaatacaaaaattagttgagtgtagtggcgcacacctgtaatcccagctactcgggaggctgaggcaggagatttgcttaagcccaggaggcggaggttgcagtgagctgagatcgcgccactgcactccagcctaagcgacagagcaagacttcatttcaaagaaaaaggaagaaagaaaagtggtatgagcacaagaactctaacaaaagatttctggatggattgggttaatggaaaactggcagaagcctggaggaaggagaaggtcaagatcagctaatagtagctgataagaagtcctgtatcattatgaagagtatcaaaagcacccctgcagcctgggatggttgactgataactataactgtaaaacaatataatccgatgtgtatcatgacttaagagaatttgagaagaacagaaaggtgaatgccagtattcaatggccaatggaacatgtgtttagggactttatagcaatacttcagtgctctaatgttcaggtcatacctccctatcattccctaggtggtgtgttatctgtttatatttttatctgctatcctaatctgggagtcctctgagtgtagggatgacttatccatctttgtaaatgtcctcaaaatgcttgacatatgatgaatatgttaccacaacaccagggg

SEQ ID NO: 3053 - DNA, 942 bp, Artificial sequence
  DNA replication origin
gactagaggatggtgaagaaataaactgtgtctcagggatttgattcatgaggcagaaaacccgtggcaggatcatggaaacacatgaattattcacaattcaaaccgataggggaaggaggaggaggggaatgaccaggaaaggaacatcaaggaaatgaaaccctccatggccagggagggcccggagggtggcaatgggagctgccgcccaaggggaccaggccagagtgatggagggaggaaagcccaccagtgacttggacaggggaactgagaacacctggagggagtgagggtggtcttgcaatcctgggatgggtaaactgagggagtgtccctacatctgaaagccagtcacagctggggtagcagtccagcagctcatgattgggtttaaaaataaattctgatgccaggctcacagctgtcctgtgattgcaagagaggggaagcacatccgaccggggaggcaggctggtcagtggggtggggggagggcgctggtggatctgagaattgggggagagtggatgcgcaggatgagagcaggtgtcgccctctgggaagaacttgctcttcactccagttgatttgagtgtgtgaacagggttggggagctagggagaaaagacaaggcttgttcctcaacactgaagacagacttaggggtgtgcagaagtgagagggagcccatggtgagtaagagaaaaaggtgaaggcaggtttcaggagctgagtaaggcagtgcagaatgaagagaagcccacggcattgtcaggagcaggattacagctaacgggtttcaagagagtcagttaggaggcagctgggtggaatggcgacagatcagtctggtttaaaaacctgggtggggtgaacacagccagtacacgtttactgccccactaagagcatagcacaactcggcatgcccacaca

SEQ ID NO: 3054 - DNA, 1106 bp, Artificial sequence
  DNA replication origin
cacagggttgggggtaaggtcacagatcaacaggataagaatttttcttagtacagagcaaaatgaaaagtctcccatgtctacttctttctacacagacacagcaaccatccgatttctcaatcttttccccacctttcccccttttctattccacaaaaccgccattgtcatcatggcccgttctcaatgagctgttgggtacacctcccagacggggtggtggccgggcagaggggctcctcacttcccagaaggggcggctgggcaggggctgaccccccccctccctaccgggcggggcggctggccgggcgggggctgaccccccccccaccccacctccctcccgacggggtggctggccgggcgggggctgacctccccacctccctcccggccggggcggctgccgggcggagggcctcctcacttctcagacggggcggctgccgggcggaggggctcctcacctctcagacggggcggccaggcagagacgctcctcatatcccagaaggggcggcggggcagaggtgctccccacatctcagaggatgggcggccgggcagagacgctcctcacttcctagatgggatggcggcggggaagaggcgctccttacttcccagactgggcagccaggcagaggggctcctcacatcccagacgatgggcggccaggcagagacgctcctcacttcccagatggggtggcagccgggcagaggctgcaatctcggcactttgggaggccaaggcaggctgctgggaggtggaggttgtagcgagccgagatcacgccactgcactccagcctgggcaccattgagcactgagtgaacgagactccgtctgcaatcccggcacctcgggaggccgaggctggcggatcactcgcggttaggagctggagaccagcccggccaacacagcgaaaccccgtctccaccaaaaaaatacgaaaaccaatcaggcgtggcggcgcgcgcctgcaatcgcaggcactcggcaggctgaggcaggagaatcaggcaggggggttgcagtgagccgagatggcagcagtacagttcagcttccgctcggcatcagagggagatcg

SEQ ID NO: 3055 - DNA, 934 bp, Artificial sequence
  DNA replication origin
gagcgtctctgcctggccgcccatcgtctgggatgtgaggagcccctctgcctggctgcccagtctgggaagtaaggagcgcctcttccccgccgccatcccatctaggaagtgaggagcgtctctgcccggccgcccatcctctgagatgtggggagcacctctgccccgccgccccttctgggatatgaggagcgtctctgcctggccgccccgtctgagaggtgaggagcccctccgcccggcagccgccccgtctgagaagtgaggaggccctccgcccggcagccgccccggccgggagggaggtggggaggtcagcccccgcccggccagccaccccgtcgggagggaggtggggtggggggggggtcagcccccgcccggccagccgccccgcccggtagggagggggggggtcagcccctgcccagccgccccttctgggaagtgaggagcccctctgcccggccaccaccccgtctgggaggtgtacccaacagctcattgagaacgggccatgatgacaatggcggttttgtggaatagaaaagggggaaaggtggggaaaagattgagaaatcggatggttgctgtgtctgtgtagaaagaagtagacatgggagacttttcattttgctctgtactaagaaaaattcttatcctgttgatctgtgaccttacccccaaccctgtgctctctgaaacatgtgctgtgtccactcagggttaaatggattaagggcggtgcaagatgtgctttgttaaacagatgattgaaggcagcatgctcattaagagtcatcaccactccctaatctcaagtacccagggacaaaaacactgcggaaggccgcagggtcctctgcctaggaaaaccagagacctttgttcacttgtttatctgctgaccttccctccactattgtcctat

SEQ ID NO: 3056 - DNA, 1068 bp, Artificial sequence
  DNA replication origin
ccttaaaaaaaaacgcaactttattgttcctcagccccacctccggctcggcgggcgtcctcaggatgcactgaggctgaggggaggggaggcggcggagggtcgaggtcgcggtccctctcctccgagcgcccggctggaggggagggagtcacgatgtctggtagccgccaggccgggtcgggctccgctgggacaagccccgggtcctcggcggcctcctcggtgacttccgcctcctcgtctttatcctcttccccgtcgccgccttccgtggcggtttcggcggcagcgctggtgtccggcggggtggcccaggccgccggctcgggcggcctcgggggcccggtgcggcctgtgttggtggcgcccgccgtatcgggtagcggcggcggggcggtgtccacgggcctgtcccggcacagctgcgcggccaggcccagcgccggcgtaggaggcagcagctccagcctaggcagcggcagcaggaagcgacctctcctcgcccccctctgcaacgggctcatcaactcctacgaggacaaaagcaacgacttcgtatggtgggtttgaagagcactccctccttgtccctaaattatgagtttctgccgcttaggcttgggggcggggggtctggtgtgggggtggcttgttggagagcttgggatactggtgctgtggtggtgtctgcagagggaatcgagcgtttgcaggcattcgagctcctggttggtggggtgaaggaatgttggagtagcgaggcagggtggggataataaagaggtaggtaagtgttgctgaggaggaagtgaagggagtttaacgaatgacgagggaagaggtggaaggtcaaataaatggttttggataacaaagttggcagagaggttgagtcttaaaatttttgcctctctgatgaattgaacactcagtcaatcaggagtccttgttgagatgaatgaaatttgcaaatggagaggactaagcttcctcggatgcagaggggtggagttggtcaaaatttatttgaagtatggtagatgatgctgtaaacataagcatgga

SEQ ID NO: 3057 - DNA, 1146 bp, Artificial sequence
  DNA replication origin
cgtccgggagggaggtgggggtgtcagccccccgcccggccagccgccccatccgggagggaggtgggggggtaagcgccccgcccggctagccgccccgtccgggaggtgaggggcgcctctgcccagccgcccctactgggaagtgaggagcccctctgcccggccagctgccccgtctgggagggaggtgggggggtaagccccccgcccggctagctgccccatctgggaggtgaggagcgcctctgcccggccgcccctactgggaagtgaggagcccctctgcccggccagctgccccgtccgggagggaggtggggggtcagccccccgcccggccagccgccccgtccgggagggaggtgggggggtcagccccctgcccggccagccgccccgtccgggaggtgaggggcgcctctgcccggccgcccctactgggaagtgaggagcccctctgcccggccaccaccccgtctgggaggtgtacccaacagctcattgagaacgggccatgatgacaatggcggttttgtggaatagaaagcggggaagggtggggaaaagattgagaaatcggatggttgccgtgtctgtgcagaaagaggtagacgtgggagacttttcattttgttctgtactaagaaaaattcttctgccttgggatcctgttgatctgtgaccttacccccaaccctgtgctatctgaaacatgtgctgtatccactcagggttgaatggattaagggcggtgcaagatgtgctttgttaaacagatgcttgaaggcaaaaaaaaaaaaaaaaagaaaatttggtacctatacacaatggaatactacactgtcataaaaaaggaaataatgttgtttgcagcaacatggatgcagttgcaggtcacatcatcctaagtgaattaatgcaggaacagaaaatgaaataccacatttttcacttataagtgggagctaaacattgggtatacatggacataaagatggcaacaatagacactaaggattactagagaggtgaggaagggaaggaggcaagggttgaaaacctaattattaagtactatactcactacctagatgatgggatcaatcataccccaaacatcagcatcatacaatatacccatga

SEQ ID NO: 3058 - DNA, 1222 bp, Artificial sequence
  DNA replication origin
acctcccggatggggcggctggccgggtggggggctgacccccccacctccctcccgaacggggtggctggctgggcgggggctgacccccccacctccctcctggacggagcggctggccgggcagaggggctcctcacttcccagtaggggcggctgggcagaggcgcccctcacctcccggacggggtggctggccaggtggggggctgacccccccccacctccctcccggacggggcggctggctgggcgggggctgacccccccacctccctcctggacggagcggctggccgggcagaggggctcctcacttcccagtaggggcggcctgtcagaggcacccctcacctcccggacggggcggctggccgggcggggggctgacccccccacctccctcccagacggggcggctggccgggcgaggggctgacccccgaacctccctgccggacaaggtggctgccgggcagagacgctcctcacttcccagacggggtggctgccgggcggaggggctcctcacttctcagacggggcggctgccgggcggaggggctcctcacttctcagacaggacggccgggcagagacgctcctcacatcctggacggggcggcagggcagaggtgctccccacatctcagacgatgggcggccaggcagagacgctcctcacttcccagatgggatggcggccgggaagaggcgctcctcacttcctagatgggatggcggccgggcagagacgctcctcactttccagactgggcagccaggcagaggggctcctcacatcccagatgatgggcggccaggcggagacggtcctcacttcccagacggggtggcggccgggcagaggctgcaatctcggcactttgggaggccaaggcaggctgctgggaggtggaggttgtagccagctgagatcacgccactgcactccagccagggcaccattgagcacggagtgaacgagactctgtctgcaatcccggcatctcaggatgccgaggctggcggatcactcgcggttaggagctggagaccagcccggccaacacagcgaaaccccgtctccaccaaaaaaatacgaaaaccagtcaggcatggtggcgcgcgcctgcaatcgcaggcagtcggcaggctgagacaggagaatcaggcagcagtaccgtccagcttcagctcggcatcagagggagaccgtgga

SEQ ID NO: 3059 - DNA, 1020 bp, Artificial sequence
  DNA replication origin
agtggggcggatccgggaggtaggagtgggggaggggaggtcgtcggcgagtgggtgtgtagagcgagctggagtggggggtgggggcgccggtccagcgcctccggccgcctcgacctcccccgggactcacccagcacgaagtagggcagctccgtgttctccaggtcgtccaccacgaccatttctcccgggaagtcgttgcgcaccgagaagaggagcttgggctccgaggccgaggggctgtgcatgatgctcaggtcgttctcgcgcaggaagggcagtgccgacaccgtgatgcttttgagcttgcactccagctccttggatggatccacgtcgccggcggccgtggccagcaccgccgccggcccccagcagcaggcgagcagggcgcagagcccggctaaagccatcttgagccccggccgccttcctcctagcgctgcgatggtgggggaggaagcgagcggggagggagcgagggagcgagcgcgggaggcgggggaggttagggaggggatggagagccgggagagccctggaccccggaatgagatgccgcttgcagagtcctgggtttaagctctgatgtctggagagccccggattctttgtttcccggagctgcttatctggagaagggaaagcgggggaggggggagaggagaaaaagggaaggaaggacgtcgaaaggaaagaggaagggagctgaggattctagggaatcaggtcagcccccagctggctgccggtgctcctgcctctctcctccgttgcatcctccaacacgagcaaggctcttggctatgaactacctgcacggcatttttaatacattgatctttgcaatgtaaaatcttccctctcgcatcatcatccagaaggcttgagagaggcacacacagacatacaccttaaagggcgcttctgcaaagctgcgcggtgaggggagatgaaaattcccccagtggttttgtggatgtattatagcttgtccgaatcttgcttccaccccgc

SEQ ID NO: 3060 - DNA, 1221 bp, Artificial sequence
  DNA replication origin
ccaactgggggagtcccctgtccctccgccgaggagaaacccaagattttgccttctttccaactctaaagagactcacccacccgctctctcacccgaaatcactgccttgcacatgggcagagacaggtcttccggcttcaccgctccctcggctgcctgcagacctgccactgacctcggagcgcacggcaggtgcacatccccgggcaagtcctaatgggatcctccgagctcagcgtaagcgctgccagcgcagcggcgagcagcttgcgaggcaggcggattgcatcccagagctgcagcccggcgcgtccccgctccgactccgcgctccgtacctaagcagtgtcacctgcagactcagacaccagatgagtgtcttaagataacaatgctgccctgcctgcctctctctttctttcttatgcatgtaggttggcagccaatgggacacagcgccacactccccacaggtgcccattggctgggcggcttggcagggggcgggctctgagcctcaccgctctctcctttggtgagctggcaggctggggtaccagctctgttaaccctcccagcgttgcagtggggactttttggtgtgtataaggaagccttgggtacattcacgggtggggcgttggacactcttaaaaaggctggggaacaagaagtagctggggagctaattacattttcttctaatcttcctgagttacaataatcatttatcccagcccattttgtttgcttgcttaactagaactcccagagattgggacccatctgagccattttccatctaatttgaggtttcatttggttgttttgtgcattttttagcctcttggattacttaattagaaatgagcccccaagtgagaaatagtacacacacacacacacacacacacacacacacacaccccagagacccaagaggagagagaggcaaaagagagcaagaacccagtaagatggctagagagtgaaacagatttagaggccaggacagctaaatcaggaaacattctgcccccacaccaggactgtaaggacaaaggcaaagaggagaacttcaggtttctggggagagattaagtttcaaaaatgtccctccaaaaaagggaattgttttgcctgtggtgttttccctctgtgtgtctcctttcacttctgtgtgtgtcaggaagagggactgtgcatctccgtttagtt

SEQ ID NO: 3061 - DNA, 779 bp, Artificial sequence
  DNA replication origin
ttagaagaaaatgtaattagctccccagctacttcttgttccccagcctttttaagagtgtccaacgccccacccgtgaatgtacccaaggcttccttatacacaccaaaaagtccccactgcaacgctgggagggttaacagagctggtaccccagcctgccagctcaccaaaggagagagcggtgaggctcagagcccgccccctgccaagccgcccagccaatgggcacctgtggggagtgtggcgctgtgtcccattggctgccaacctacatgcataagaaagaaagagagaggcaggcagggcagcattgttatcttaagacactcatctggtgtctgagtctgcaggtgacactgcttaggtacggagcgcggagtcggagcggggacgcgccgggctgcagctctgggatgcaatccgcctgcctcgcaagctgctcgccgctgcgctggcagcgcttacgctgagctcggaggatcccattaggacttgcccggggatgtgcacctgccgtgcgctccgaggtcagtggcaggtctgcaggcagccgagggagcggtgaagccggaagacctgtctctgcccatgtgcaaggcagtgatttcgggtgagagagcgggtgggtgagtctctttagagttggaaagaaggcaaaatcttgggtttctcctcggcggagggacaggggactcccccagttgggtcttgcacttcccttacctctcccaccccgcgtgcgccccggcccagtgccgaagccccacttcaaagat

SEQ ID NO: 3062 - DNA, 1154 bp, Artificial sequence
  DNA replication origin
gtggccccgaccaagggtgggtccgggctcaggtgtgtgtgggtccctcccgggagaggacgcagaagaacccgggaggggaggctcgccctcccacctcctcggagccgccttcttcagccccgccggcgtctctcgcggtcagaccaggctctggctggggatggagcggggccgggcagggctgggcttgggggcgtcgccgccaggggccgccccctctgaccggctcccgccgccgccgcctcagaagctccgagtgcccgttccctcagcctgaggaggggtagggggcggtggccccgggttctagcccgcctgtcctcggcccccacttctggaatgagcctgcccgccccctgactctcaggccacagctccggccacagctctggctcctgctccgcggcggatcccacaaacccggcagccacggcggtggcggtggcggtggcggtggcggtggcggcggcggcggcggcggcagcggcaggcggcatcccagggtgataggctgaagcaatcgagggccgagagcccggccgcgtgtgcactcgagtaacgaagccggggagggactgcgccgcaggcaggaaaagtcggacaccgaattattcatccggcctgtcccgcctactttccaagtaccctcccagggatagccgggtattgagcggtccgggtctctgctgctcaaagtaaagaccgtttgagaaggcggggaggtaaaagggtgcgggaaatttaaacagaaaagaaaggagcttcccttccttctcacacctttcctatttatttgtttctttctttctttatgggccaacgtttctttcttattggacaaagagatcgaagaagctgctttatcttacagtcacccaagggggagcgccttcttccttcccagagtggagtggcagtgggtccgggattctgggatatgcacagggtctgcgccctgcgccctgtccgcgctgaagctgaacttgtcattggtttgcaacagcatggtgaagaagtgtggtgtggatggacggacgggcctctcaggcacatgaaatactcaaagcccagtattaaccaaacatgtttctctgttttgtctttgatctttgtgcagtgtgttggcttttttcctttaatgatgtcacttg

SEQ ID NO: 3063 - DNA, 836 bp, Artificial sequence
  DNA replication origin
gccagagcctggtctgaccgcgagagacgccggcggggctgaagaaggcggctccgaggaggtgggagggcgagcctcccctcccgggttcttctgcgtcctctcccgggagggacccacacacacctgagcccggacccacccttggtcggggccacgctggatcctcctcccggcctgggtcccgcccgccgactgcaggtgggctgcatcgcccgagcctcgggcagtgggcgacggggaaggaggtgagaggtgtccgcgccggctgccgctcgggtccctgccctcgctgcgcgctctcctcctccccttaccgcaggcagggcgcggagccgcgcgccagcccgccccgaagccgccgcctcgtccccctcccgcctcggggcaccatggagctctctccgtcgtccggaggagccgcggaggcgctgtcctggccggagatgttcccggcgctggagtccgactcgccgctgcccccggaggacctggacgcggttgtcccagtcagtggagccgtcgccggtggcatgttggatcggatccttctggagtccgtgtgccagcaacagagctgggtccgggtgtacggtaaggaccacaggccgtcttagaggctggtgtttcctatttttgcttgggctgaaattcattccctaagtcacaggctcattcccagtcctcatccgtgctaggtcagtttcccacatccctttttgttctgggggtgcatttctgacaagtttcttcagactatcacttgggcagggatgtcactcagtatggtctttggacctcttcagacacctgcagtaagtttaatgcgggagttg

SEQ ID NO: 3064 - DNA, 1695 bp, Artificial sequence
  DNA replication origin
ccctccccggcgccctgcgaatgaggtgggagtgggaacgccatcagggcagagcccctccagctggctggggtctgcacctcctcgccagcccggccacctcaaaacggtgcttgcctccctgcgggggtgtagaagcctcttggagcagcacttgtagaaaatcaagtccctggaaagaagcaaaattaatccgtttgtttctctatttatttttgcttccccacaccaggtattcacttcatccaaggctgcccaatgtcaccttccacccagaggaatctcccctctccaccccaggccaacagcctctgccttcagctgtggcctccactctggcattactctgggcagagggctcaggagggctcaaggaggaccagtgacattcagagtggccagagtaaagggagggagggggagtggtgggagaggcgtgcagaaggcacaggtgaggtggcggaggggggcaggtggtggggggagcgggctggggtgggatgggcctgtcagcatagcaagggctgtgatgggcttgagtctgacagggggcaatgacctgacctacggttttgtaagatcactctggctgccacctggagagctggtgtggggatgatggccatggtagacacaaggggagcagttaggagaccaccacaagtgaccatgcggcccaggcgagtagggtagcaacagagatggggagaggaggtcagatttgtgatctgtatctgaaggtggaatggacaggaattgctgatgagcttgggtgtggtgcatgagggaaagagagaaataagcatcattcttaggatttgtcctgagcaactggaagaaaaagaatgacagtggctaatacggttagccaggcgctcctctaaacccttcacatagtttaacctgtctagatttcataacactcctatgaattaggaattagttcttcccacattttacagaagaggcaatcgaggcccagagagttgaatcagtttgcataaagtcccaccattagcaaatggaaaagctggaatttggacccagcacttcaccactgcacacttccccggctttacagaaagagaaatgccgtgaactgagctagatgagcccgggggaggaatggggtttttccgtgggggtgtgaatcaagagttctagttggaatgaattcaggctgaggtgccttttaaacatccaagtagagatatttagctcagcagatggatgtatgactcaggccctgggtggcaaggaggagcatctggggctggcgtgttaagcatggagaggagacaggagaagagggcagaaggctgggaagtgggattaaatgctgcatgtgaacggatgaggacagaaatggatactttagagcatcctgtcaagccttggggtgtcgggtgatgagtgtgtttaggaaatattattctagagcagtgcttgtttttgtttgaggattcaataaaggctgtcaccttgttccagaaaaagtacatgaacacacacgcaacattttgcatacaatttcagggtgtccgtgggtccccagaggacatgcatgggccattctatttctatcaaaccttacttcatccaccagccacaatcaaatttcactgtatctctcaagtcctgaccagacctctgatgcagtcaccccaccctctctgtctgcatgagataggagct

SEQ ID NO: 3065 - DNA, 1573 bp, Artificial sequence
  DNA replication origin
ctccctcccccgcaccgccccgcggcctgagcccaccgacctgtgcagccgcggccgtcgcctcagaggacggaaagacgatgccggcctcacgcttcaccgccacggccgccgccgcctagagtagcactcgtcgacccgaacagtcaccgtctctcattcagcgcccgcagcagccgccgccgccgccgccgctgccgctcgggggaggagagtgagctggaaccaccccgtccgcgccaggggtgggggacgagagcggacctggcgggggcgcgcgccaagcgggcggggcggagccgcgcgcgcgcgcgcaccaacggagcgcgctcgcgggggctctgagagctgcagccgtcagggtcttaacctcgcgcttcccgcccgcagcttttcggccccgcggagcccaactgccgccggtgatcggtgcccgcagcgcgcgcagccatccgcaaccccaccgcccggcgcctgctgaaaggaggggctcccaccggccaaacaacgggggggggaaggggtaggaggatggacaggtggggcgtccgccaccgcctggccacccgctcccggaacgcggccctctgtgaaatccgccgtgatgtctgtggccttcagcgccgggctcttcacctttaaggccagagaacaaagtctggaagcacttggccccaagatcaaatatccagcccacgccagcggtgtttttagaagtcactgaggacaaatgagggggctcccaatgtggagagtcaccccactgtcttagataaggtcataaattatggtgatcaacatcctcacacattaagattcgggaagtgttagaagtaggcctttgtaagatgttacgcagggtactacccttgacttaaggagcaaatgacagaaattgggcggaaaggtgttgtttcagagtctactaaatgggtggcctacttaaagctagcaccatttgatgcagtgtgactgttaacggaaggttttaagtgagccgcctttgtatctgctgtcattagaccatttggaaatggataattatttgatgatctgcagttctttctctaggcaatgtgcagtagaatgtggaaagaatactatgtaccagcattaagtgtaaaacatgaaaggaccaataattcactattcccatttggtttctttcttccctttaataaccgctaaacagaactgattaatcttgaacgttgaagattgctaattatttcctcctttgattgccttctgtcatagcccttttactctagttggggacgctagaatgcccttcaacctccttctctcaaatagggttactttaaagcaccccaacgcaaagttaagtcaaaaagaaaaacagcgaggataggcaacaaagttcgtagtgtttcatttttattccattttactttcaaagaaagtcttgaatcatgacgaaatcactagaagaagtagagcaatcaaaagaagaaaaaaagcgttcccccccacccaatatttcaaatgacaagagtccaaaaaagaaaagaaaaaggaagatgattggtaaaaaggagggaagtgcattatg

SEQ ID NO: 3066 - DNA, 1113 bp, Artificial sequence
  DNA replication origin
cgcgcctccctcggccgcgggttctcagagtcggagcggccgtggggtccccgctcgggggcgccgtcctgaagccgggggcgctgcgaccccttgaacccgcctcgctctccctcttgggtggcggaagcccccagcctccgcccgctctgttctggcgcccagcggcgcctcagtcttccttcaggtgagcccgatcccggacctcggagccaggaccagcagaagccgggccacaccccctcccctggccctggcggctgcgcccagaagcctggccgcagagttggccgcccgcgaacccgcggagtcgcggtcagggtgacctgttgcagagcggcccgcagcccgagcggcccccgccagccccggccccggaggggctgcgtcctgtgctggcctcgggccgggcgcgcgggccgggtgtggggcaggggccgcagccccaggtcggcttgctctacggcctggaaccgggctctagaaaaaaaaggagattccgaacgtatctcatcaaacacttgcaaagccgggagatctgtctgcaaatatccggaattccattgcagtatcggattaggtaggctcataaacaccgtgcttttgaggtgatttggaagaaacgcgagccacgagcgaggaactagtttctggaaaatagccgtaaacctgtgcggagcgaattattaaccccccgccccagctcccccctcgaagctcttttcctgtagctgtgtgttgtgtagacgcaagccagtttcagtgtacgtgggcgtgtttgggaagaagctgcgagctgataggaggtacctagtacaaatgttaatttgtttgagttgggaggggtaagggaggaggaagaaagggcactgatgttagctgtggaggaggggcaattgaaatactaaatttctgttaaaaaaaaaaaaccccaaaagaaatatctaatgcctactgtgtatttaagaccataaagtggaatcacacaagcagcagttaattgagctttatcgtttatgctccctggattttttttccccaacactttagttgctatagagagccttttcttaccagtgttcatgagttgacttgggtatttttctgtgtcca

SEQ ID NO: 3067 - DNA, 912 bp, Artificial sequence
  DNA replication origin
gcggggcacggtacgtagcgcgcgccgggctggggccgcctgggggcggggcgcctccctgaggggccgggcaccgggtgccctgagccgtccccgagtggctgcgggcgggtcccgggcgagggcccgaggcttcctgggagacccgctcgggccgcgtgtccctgtgtgcggtcgcggctgaagggacgcggcctcggccgccacgtccctggcccacctgaggcgcgggcccacctggggccgcctcaggctgccagaggtccttctagtgaccgtctctcgtccccttgcgcggtccccagaggcgattggccccggtgcctctcttgtgttccccggagcgcccgttgaggcagcccagggagcgcgccctcgcggggtctttgctgggcccgcctcgtggccgggaagcgcgagtgacctgcaggccggaggcggaaggcggggcaaccgtgcccggggcccgcggtctcctggggtcctgcgccgggcgctcgcagaagggcacaacttaacgaatgctgtgttagccctcagtgggctgcgcttgagatttcatttccgggtgtgacggccccgcgattaagagcggaccgatacgtttcccttaatgatgaatgtgaatagttgtcgagctgcgtccttgattgtgggttctgataagagattcattctaatctgacttctgttaacctgccagtctccggataagaagagaaggggtagaaggatggattggagggaaagtaggggtaacagggcttggttagtcttaatggaattattagtccttttaaagaccataccatcattgggatggataaggagtttctaatttgggaaaatgagagttgcttgctattgcgacttgggtctagtgccagatatcagcatcttccccacccagcc

SEQ ID NO: 3068 - DNA, 879 bp, Artificial sequence
  DNA replication origin
cgtctccgcccagcagccaacccgtccgggagggaggtgggggtcagcccccgccaggccagccgccccgtccgggagggaggtggggggtcagcccccgccaggccagccgccccgtccgggagggaggtggggggatcagcgcccggccagccgccccgtccgggaggtgaggggcgcctctgcccggccgcccctactgggaagtgaggagcccctctgcccggccagctgccccgtcctggagggaggtaggggggtcagccccccgcccggccagccgccccgtccgggagggaggtgggggggtcagccccccgcccggctagccgcctcgtccgggaggtgaggggcgcctctgcccggccgcccctactgggaagtgaggagcccctctgcccggccagccgcccagtccgggagggaagtgggggggttggccccccgcccggccggccaccccgtccaggaggtgaggggcgcctctgcccggctgcccctgctgggaagagaggagcccctctgcccggccaccaccccgtctgggaggtgtgcccaacggctcactgggaacgggccatgatgacagtggcggttttgtggagtagaaaggggggaagggtggggaaaggattgaggagtcggatggttgccgtgtctgtgtagaaggaggtggacatgggagacttttcattttgttctgtgctaagaaaagttcttctgccttgggatcctgttgatctgtgaccttgcccccatccctgtgctctctgaaacatgtgctgtgtccactcagggttaaatggattaagggcggtgcaagatgtgctttgttaaacagatgtttgaaggcagcatgctcgttaagagtcatcacca

SEQ ID NO: 3069 - DNA, 1183 bp, Artificial sequence
  DNA replication origin
acccccccacctccctcccggacggggcggctggccgggcggggggctgacccccctacctccctccaggacggggcagctggccgggcagaggggctcctcacttcccagtaggggcggccgggcagaggcgcccctcacctcccggacggggcggctggccgggcgctgatccccccacctccctcccggacggggcggctggcctggcgggggctgaccccccacctccctcccggacggggcggctggcctggcgggggctgacccccacctccctcccggacgggttggctgctgggcggagacgctcctcacttcccagacagggtggctgctgggcggaggggctcctcacttctcagacagggcggttgccaggcagaggctctcctcacttctcagacggggcggccgggcagagacgctcctcacctcccagacggggtcacggccgggcagaggcgctcctcacatcccagacggggccggcgggcagaggcgctccccacatctcagacgatgggcagccgggcagagacgctcctcacttcctagatgggatggcggccgggaagaggcgcctcctcacttccttgatgggatggcggccgggaagaggcgctcctcacttcctagatgggatggcggccgggcagagacgctcctcactttccagactgggcagccaggcagaggggctcctcacatcccagacgatgggcaaccaggcagagacgctcctcacttcccagacggggtggcggccgagcagaggctgcaatctcggccttttgggaggccaaggcaggcggctgggaggtggaggttgtagcgagccgagatcacgccactgcactccagcctgggcaccattgagcactgagtgaacgagactccgtctgcaatcccggcacgtctggaggccgaggctggcggatcactcgcggttaggagctggagaccagcccggccaacacggcaaaaccccgtctccaccaaaaaaatacgaaaaccagtcaggtgtggcaggctgaggcaggagaatcaggcagggaggttgcagtgagccgagatggcagcagtacagtccagcttcggctcggcatcagagggagaccgtggaaagagagggagagggagaccgtggggagacgggagacgggagatgggagacagggag

SEQ ID NO: 3070 - DNA, 1164 bp, Artificial sequence
  DNA replication origin
gcgaggcgaccacagccgcgcccggatcgcactctgctccgcagcgaacggcggaccgtggggacggggtcttacccaggggccccgtggctgcctcctcgtcctcgtcacagtcgtcgggccacacctggcagctgaagagcgtccagtaccgcttggagagggcacccgccgccctgagctgctcctgcaggcgctggaagcccggccaggcccaggccgagcccggctcgtcggttccctcccacggcctggaggcgccgcggggctcaggcgcgcccgggagcagcagcaggaaaaagagccaaagctggcgccacggaccgcgaagcatggccggccccgagctgcgggaccatccggctgccggcctagccaggctcccttaagcccggggcggtcaggcggggaccgcacttcctaggcgggcttgaacccgggattggtgttgctgtggcgaccggcgggccgggctgagtgcgcactggcagcctccgtacacgtgacccaggcgggaacccgaaaccctgtctggggtcctgagaggcagtcccgagactgacttcaggccaggtgcaactagccggcttccaggaagcagtttattctgggtcgtgattgtggttgcaaagaaggtgaactcaggctttgaaatggccactgtcaatcactccgctaggactttcggacggctctggtggcccatcagaggcctaccgaataaggacactcctgctttgcctcgcgtttgcagatcaacttcccgccaacctgttagaggaagccggaaaaccgtctcagtcaggagcgttaggcaggccaggggagtcagctgagtggagaagaggccctggaaagaagggcacagctaggtgcctgtctggccaaggttgccctggctcctccgcagagggaaatgaaaccgcagcaaaacaccagcaggtttccacagtgggagtccacgaaaagcaagaggaagctgattgacgggctccagtctggaggtgtttggagtttggaaaccccccgagtcatgggtaaatcatgaggcgtcatgtcaatgtaattatatctcataaaaatccgaagtactgtgtgcactttcttgactaggtttgcaactttcaagtgctgggactgagcagcccatccgacaccattggc

SEQ ID NO: 3071 - DNA, 1104 bp, Artificial sequence
  DNA replication origin
gcagccggatggtcccgcagctcggggccggccatgcttcgcggtccgtggcgccagctttggctctttttcctgctgctgctcccgggcgcgcctgagccccgcggcgcctccaggccgtgggagggaaccgacgagccgggctcggcctgggcctggccgggcttccagcgcctgcaggagcagctcagggcggcgggtgccctctccaagcggtactggacgctcttcagctgccaggtgtggcccgacgactgtgacgaggacgaggaggcagccacggggcccctgggtaagaccccgtccccacggtccgccgttcgctgcggagcagagtgcgatccgggcgcggctgtggtcgcctcgctcctgtccggggcgacatctgggcccgcagtcctgctctgctcagccgccggtaccggctgtgggcgggggcagcctccgcggagcagggagccccatcaccgcccttgccccacccgcgtcccctgcgcacccccctggcgcccggcttcccgtcccccgcctcccctgatccctgcgctttccagattctctcgcaccgcctgtgccatctcccagcccaccctggcgttattcgaaggtgttgctcttgacagctctagggaacgtccgctgtggacatgcctggtgactgccgtctcccttgctgcttttggacgcagggcttgaggaccgacagtgggccgagtcggggctgggagttagaatctgagttctgggtgtccctctgtccctgacaagttgtgtggcaaggttgccgcatcactgtagagcaccggatggtctcctctcggtctcacagctcctccttttccaggctggcgccttcctctgttgggccagcggtacctggacctcctgaccacgtggtactgcagcttcaaagactgctgccctagaggggattgcagaatctccaacaactttacaggttggaccccgcatggcttcaaggggctagggatctgtggggaggggaggcagtccaggggaaatggttagatgcaagggacctttcgtcatcctgcccagcctcccgacaagcaggaactgccacagtctgactgaagttttgag

SEQ ID NO: 3072 - DNA, 1294 bp, Artificial sequence
  DNA replication origin
tggacggggcggctggccggatggggggctgaccccccccacctccctcctggacggggcggctggccgggcagaggggctcctcacttcccagtaggggcggccgggcagaggcgccccctcacctcctggacggggcggctggccaggctgggggctgacccccccacctccctccctcccggacggggcggctggccgggcggggggctgacccccccacctccctcccggacggggcagctggccgggcagaggggctcctcacttcccagtaggggcggccgggcagaggcacccctcacctcccggatggggcggctggccaggcggggggctgaccccctcacctccctcccggatggggcggctggccgggtggggggctgacccccccacctccctcccggacgaggtggctgccaggaggagacgctcctcacttcccagacggggtggctgctgggcggaggggctcctcacttctcagacggggcggctgccgggcggaggggctcctcacttctcagacggggcggttgccaggcggagggtctcctcacttctcagacggggcggccgggcagagacgcttctcacatcccggacggggtggcagggcagaggtgctccccacatctcagacaatgggcggccgggcagagacgctcctcacttcccagatgtgatggcggccgggaagaggcgctcctcacttcctagatgggatggcggcccgggcagagatgctcctcactttccagactgggcagccaggcagaggggctcctcacatcccagacgatgggcggccaggcggagatgctcctcacttcccagacggggtggcggccgggcagaggctgcaatctcggcactttgggaggccaaggcaggctgctgggaggtggaggttgtagtgagccgagatcacgccactgcactccagcctgggcaccattgagcactgagtgaacgagactccgtctgcaatcccggcacctcgggaggccgaggctggcggatcactcgcggttaggagctggagaccagcgcggccaacacagcgaaaccccgtctccaccaaaaaaatacgaaaaccagtcaggcgtggcggtgcgcgcctgcactcgcaggcactcagcaagctgaggcaggagaatcaggcagggaggttgcagtgagccgagatggcagcagtaccgtccagcttcagctcggcatcagagggagaccgtggaaagagggagagggcgaccgtggagagggagagggagagggagaggctgaggct

SEQ ID NO: 3073 - DNA, 883 bp, Artificial sequence
  DNA replication origin
gcccctactgggaagtgaggagcccctctgcccggccagctgccccgtccgggagggaggtgggggggtcagccccccgcccggccagccgccccgtccgggagggagggaggtgggggggtcagcccccagcctggccagccgccccgtccaggaggtgagggggcgcctctgcccggccgcccctactgggaagtgaggagcccctctgcccggccagccgccccgtccaggagggaggtggggggggtcagccccccatccggccagccgccccgtccaggaggtgacgggcacctctgcccggccgcccctactgggaagtgaggagcccctctgcccggccagccgccccgtccaggagggaggtggggggggtcagccccccgtccggccagccaccccgtccgggaggtgaggggcgcctctgcccggctgcccctactgggaagtgaggagcccctctgcccggccaccaccccgtctgggaggtgtacccaacagctcattgagaatgggccatgatgacaatggcggttttgtggaatagaaaggggggaaaggtggggaaaagattgagaaatcggatggttgccgtgtctgtgtagaaagaggtagacatgggagacttttcattttgttctgtactaagaaaaattcttctgccttgggatcctgttgatcggtgaccttacccccaaccctgtgctccctgaaacatgtgctgcatccactcagggttgaatggattaagggcggtgcaagatgtgctttgttaaacagatgcttgaaggcagcatgctccttaagagtcatcaccactccctaatctcaagtacccagggacacaaacactgcggaaggccgcagggtcctctgccta

SEQ ID NO: 3074 - DNA, 1555 bp, Artificial sequence
  DNA replication origin
gcggcggtggcggcggcggcggcggcggcgttgggggcgcggagccgcgacaggaggagggaaaagcagaatctgtgagtcgcctggaggcagcgcggcggctgccgtgaggaggccgggtgcggagccgccggtggcccagccactcagggccagggcctgggctgggagggagagaccggagcagcgccaggagcccgaggccggagccgaggaggaatgtgaccaggggtcggcgggggcgcgggagtacgcgagagcagggatggggcagcaggtgggccgcgtcggggaagctccggggctccagcagcctcagccccgcgggatccggggcagcagtgcagccaggccctccggccgcaggcgggacccggcggggcgcaccacagagaccggcttcaatatcttcacccagcatggtgagtgtgtctgggagccggcatgagagcgtgggggaggccgggggtggggtcggggcggggtgggtggcggacgggctgcccgaggggtcggagggtggaaggtgcctgagagtgggggcggaatccgctgccatctggtccagtcctgggaggcgagtcacacccctcccccctcgcgtctctagcctggctggcagatcccgggggcggagaaggaaagagaagtgggtttggggaccctggatggtctgtcctctactctgggacgggactatgcggctgcagaaagaaagtgaatggcagcttcaggagagggaaggatgaagggcagtattagctcagtcccagaggtgggagcataaacccgtcgttagtgaaggggaaatgggttgtatcctaagggattgggaaatgggaactgaatttcaggagattgtggagtacaaggtatgtgtttacgttaggtgatgagcagtgtcaggatagtgaactgtggacagtgtcaaatgcttttctgtagggaagatgaagttagcatcatcttatcacttttgacatgcttttgtggtttattttgttttgtatttcgtttttactagaaatgaaaggctttgccaaagcctctgtactatgcttcagagtaggacacacaattctgagattgctggcaagggctagaggttggtgggcatggttaggacgtcagtcaggatatgaacaagttttcctttgtagtgtgtgcgtgtgcccatatacatacatacatgtatgtatgctccctgtagtctgaaacctattattttgatctcattgtcaatgtatttttagaatagttgtctccaaactttttttgtcttgtttttttgttttgtttttgtttttgttttttttgagacagagtctcgctttggtccccatgatggagtgcaatggcgggatgtcggctcactgcaatctctgcctcccgggttcaagtgattctcctgcctcagcctcccgagtagctggaactgcaggtgtgcaccaccacgcccggctaatttttgtatttttggtggtggtgggattttgtcatatactcctgacatcaggtaatctgcctgccttggcctctcaaagtgctgggatta

SEQ ID NO: 3075 - DNA, 1036 bp, Artificial sequence
  DNA replication origin
tgctctcgcgtactcccgcgcccccgccgacccctggtcacattcctcctcggctccggcctcgggctcctggcgctgctccggtctctccctcccagcccaggccctggccctgagtggctgggccaccggcggctccgcacccggcctcctcacggcagccgccgcgctgcctccaggcgactcacagattctgcttttccctcctcctgtcgcggctccgcgcccccaacgccgccgccgccgccgccgccaccgccgccgccatctttaaaccaccgagcgctgggaaagcgtgggacagagcgtctcccgccccccgccccccgccccccgcccgccagtcacctccgccgcggggaaggagggcttcccggctgccgccccgccctgccgcgccgcgccccccgtccccgcccccgcctcctcgcagggtgggtcccccagtgcccacctcatttgccggccaccgctgcttgaggtctttcgtcctccgcgtcctgtcgccgcacctcggcgtcccccccctcaatccgcctcagccgaccccctcccgcgttcggctccacacgctaccgcctttggggttggtcggtctccggccttccccatcccacctccacctgtcaaatgagtgagtcgagggctcagtgccaccgcgtgcgcagctcaggtgcaggcacaggtggggcagaaaagcacaaggcatttatttggtccttgccatccagttaaggagctctaaaatacccagggggatctcttttaaacacccttgtcagcagcaggcctccagtaaaaattaaaatggtataaaatttacaagaagagagtaaaatgctaccttatttgattttaatttttggagattatttcatgatgttaaatcgcactggcctggattgtgtgccttctatagtctcattggggacgcaattgtagccccattcctcatattatattaccatgaattcctcttgaactcctttaccatctcaccatatgtgagtttctgtttccttacaatgcctgacag

SEQ ID NO: 3076 - DNA, 894 bp, Artificial sequence
  DNA replication origin
ctctgccccgccgcctcgtctgggatgtgaggagcgcctctgcccggcggcgaccccgtctgggaggtgaggagcgtctctgccctgccgccccgtctgagaagtgaggagaccctctgcctggcaacagccccgtctgagaagtgaggagtccctccgcccggcagccgccccgtctgagaagtgaggagcccctccgtccagcagccaccccatctgggaagtgaggagcgtctccgcccggcagccaccccgtccgggagggaggtgggggtcagccccccgcccggccagccgccccgtccgggagggaggtggtggtgtcggccccccacccggccagccgccccgtccgggagggaggtgcgggggtcagccccccgcccggccagccgccccgtccgggaggtgaggggtgcctctgcccggccgcccctactgggaagtggggagcccctctgcccggccaccaccccgtctgggaggtgtacccaacagctcattgagaatgggccatgatgacaatggcggttttgtggaatggaaagggggaaaaggtggggaaaagattgagaaatcggatggttgccgtgtctgtgtagaaagaagtagacatgggagacttttcattttgttccgtactaagaaaaattcttctgccttgggatcctgttgatctgtgaccttacccccagccctatgctctctgaaacatgtgctgtgtccactcagggttaaatggattaagggtggtgcaagatgtgctttgttaaacagatgcttgaaggcagcatgctcgttaagagtcatcaccactccctaatcttaagtacccagggacacaaacactgcggaaggccgcagggtcctctgcctaggaaaaccagagacctt

SEQ ID NO: 3077 - DNA, 1317 bp, Artificial sequence
  DNA replication origin
tgtttcagagagcatagggctgggggtaaggtcacagatcaacaggatcccaaggcagaagaatttttcttagtacggaacaaaatgaaaagtctcccatgtctacttctttctacacagacacggcaaccatccgatttctcaatcttttccccaccttttccccctttccattccacaaaaccgccattgtcatcatggcccattctcaatgagctgttgggtacacctcccagacggggtggtggccgggcagaggggctccccacttcccagtaggggcggccgggcagaggcacccctcacctcccggacggggcggctggccgggcggggggctgacccccgcacctccctcccggacggggcggctggccgggtggggggccgacaccaccacctccctcccggacggggcggctggccgggcggggggctgacccccacctccctcccggacggggtggctgccgggcggagacgctcctcacttcccagatggggtggctgctggacggaggggctcctcacttctcagacggggcggctgccgggcggagggactcctcacttctcagacggggctgttgccaggcagagggtctcctcacttctcagacggggcggcagggcagagacgctcctcacctcccagacggggtcgccgccgggcagaggcgctcctcacatcccagacgaggcggcggggcagaggcgctccccacatctcagacgatgggcggccggacagagacgctcctcacttcctagatgggatggcggcggggaagaggcccccctcacttcctagatgggatggcggccgggcagagacgctcctcactttccagactgggcagccaggcagaggggctcctcacatcccagacgatgggcggccaggcagagaggctcctcacttcccagacggggtggcagccgggcagaggctgcaatctcggctctttgggaggccaaggcaggcggctgggaggtggttgtagcgagccaagatcacgccactgcactccagcctgggcaccattgagcactgagtgaacgagactctgtctgcaatcccggcacctcgggaggccaaggctggcggatcactcgcggttaggagctggagaccagcccggccaacacagcgaaaccccgtctccaccaaaaaaatacgaaaaccagtcaggcgtggcggcgtgcgcctgcaatcgcaggcactcggcaggctgaggcaggagaatcaggcagggaggttgcagtgagccgagatggcagcagtacagtccagcttcagctcggcatcagagggag

SEQ ID NO: 3078 - DNA, 1180 bp, Artificial sequence
  DNA replication origin
ctctcccacccaggcctctctctgcttcagcgccgccccggccgtgggagtcggcgggcgcagtccacagctccaccaagacacagctgtcggggttccgggtgcgccccgcccgcggccccggtgtcccgcccctcgccctcagcccccacccgacggtctttagggtcccccgggcacgccacgcggacccgcagcgactccacagggactgcgctcccgtgcccctagcgctcccgcgctgctgctccagccgcccggcagctctgaggatggagaggagggcgcggagctcctccagggagtcccgcgggcgaggcggcaggactccgcacaaggagaacaagagggcaaaggccgagaggagcggcggaggccgcgggcgccaggaggctgggcccgagccgtcgggctccggacgggcggggaccccgggggagccccgagcgcccgccgccacggtggtggacgtggatgaggtccgaggctccggcgaggagggcaccgaggtggtggcgctgttggagagcgagcggcccgaggaaggtacggattcagcaccactatctgctacttttccaggtggtaactaaggggcgtcagataaggtggaaagggtcatccccacgagacccactgaagccagagcagattgctggatgctcaggttcccaggaacggaagggcgtaagttaggaacccagcaacctgctatggtgagcaaagaacatcagaagaaatacaaatatcactatatactggtctcggggccagccttggatgggactggggagcgagtgtggtacaggttggggacgaagcaacttggcaaaggagccatggacttggtttttgtggccatggaggggcatacgggcacctaatttaagtaaagacatgcacgagctggtggctgtaggctgtaggcttattcttcttccagcgtccccacccctcggtcttacctaaaagcattttaaacttctgggaagatgatcattctttctgaaaagcagtcgcagcagagccaagtgaggaagagccacacctgagtttaaatcacagctcaaccacttgctagccatgtgatcataggaaggaccttaaccatctctcctataacagtacctgcctcagagggtagtggtaaggatacaatgagaaaaggcatccaaagcac

SEQ ID NO: 3079 - DNA, 1604 bp, Artificial sequence
  DNA replication origin
catcagttttaagaaagaaggccgcggccgggcgcccggagccgcgcagccacactgcccgggaatcggccctcgcccccggccctggcgctcggagctcggagctcggagctcagcgctcagcggctgccagggcttttaatgtctgctcggcagagcggggcctagggctggaaagaggctgcctcgcaggaaggcgctctagcgagcctcctcctgggcccgtcacgcccgccgtggggcgctgcaggtaggggcgcgctccaggtgggggcgcgcttccccggggtggcgtgttgacttgagacgccggcccgctcgctggctgctggctcgccagccgcttgtccctgccatgaattgagaccgcgggccagccccgcgcctactccacccgcgcctttctcgagcctcctccacccgccgcgggaggccaggcttctgaggcgggggcgggggcggcgggggcaggcagctcccggcctggtgcctgcaccatgaactaccagcagcagctggccaacttggctgccatcccggccgagatccagcacttcgagttggtccaccccaacgtctactcccatctaccagctgctggagcgcgtggaggagccggtgcttcagaaccagatccgggagcacgtcattgccatcgaagatgtctttgtgaacagctaggaatggacgctgagtcgatctgtcccggagctcaaagtggtggcaggttcaagaaagagattgttgttgatggacagagctatctgctgctgattaaatatgaaggggaccccctggaggcgcagtttgccatgtcggtggatgcagttatatttgttttcagcttggaggatgaaataagtttccagactgtttactacagtggaatggccaactatcggaacatgagcgagattcctctggttctggtgggaacccaggatgccataagttccactaacctgagggtcattgatgatgccagggtaaggaagtgctccaacgacctgaagcggtgcacgtactatgagacgtgtgctatgtatgggctgaacgtggaaagggacttccaggaggttgcccagaagattgttgccacaaggaagaagcagcagctgcccataggaccctgcaagttgctgcccagttctccaagccattccaccgtctgttctgcacaggtgtccgccatgcacatcaactagacaagtaatggaggtaggagtttaagcaactattcctcctctgttccatcgactcccagcaccagccagaaggaacttcagatggatgttcctcccactgccaacacgcccacacccattcacaagcagttcacaagcagttcaagtggggtcaaacctgttcacctctcagaaagggagcaacccaaagagtagaaaggcctagagagtcatgcatacggcattgggagcagccaagccatgccaattatacagggcatgctgttgaagcagagtggcaaatcgttgaataaagagtggtaaaagaaatatgtcaccctgtgtgacaatggtgtgcggacctatgatccaagtttacatgattacatgcagaatgtccatggtaaggagactgacctt

SEQ ID NO: 3080 - DNA, 1693 bp, Artificial sequence
  DNA replication origin
cccgcggtctggccacgaggccggagatgcccccgagtcgccgcgcccctcggagcgagaggcccctggcgcggagagggagagccagggcgcagacccagacccagtggggaactgctacgctgaaggcggcgcggtgggcagagggaggcagccggggcgcgcttacccgggtgttgaggcgccctcgaaagtacgcggtggccagacacatccccgcgcggagcccgagcccggcggctcctcagcccgcccgcgccccgccccgcccctccgctcgctcccctgcacgatgaggccccgacccgttaccgcggctgagcagctccgctcgggcagcgactcccgcgttcggctcccacggggtcgcagcgcgtccttccgggcgccagcggctggggcggcacacgtgaggctccgcggcctccccggcgctccgaggactgccctgctccgggcgtggagcctcatcgcccctccaggtggccagggctgggggcaggtaccgcgcgacctgattggcgctggccggagtccggggagaatcccccgccagagaggctgatgcacgcgggccaagtgaagccacgcagtcaaacagcgcaacgggcgccttccaaacacccctgcttagctccgctgcctttttgcctaagaaatgtaaacgcgggaggcgggcgccctgggaacgcctcagtacaggggactttgcgccctacagatcgggtccaggacggaaaattcggagagcatgagaatcttagggaccagggtgtgtcgctatccactggaaagagactgcctcgagagcctcccgaagggctcctctgtgttcctatttccggcccgcactgtgccctggaaatccagggacacctggatgtccccgccgctgaggggtacccgggcctcgtggcagggcgggatcagatcagtcagggtgtgattagagctgtgacggtgaagtctggcaggaagaggcaggaagggagagaagcaatgcctcgacacgaggagaaacctgaatggtgcgctagatttcttgtctgaaatcaccttcttttaatgtcttaaaactctaggagttgcttatgtgctgtagcccagccaataagttctgacatcagtaattcagagggtctgctgagagaacatgacggcctgagaggggataagctgtcacttctccgcacttccgaagcatctctatatggaacgtttacctgttccggtctgatcatctttctcttgatcctgctttccgatcttgattggactgaagacagcgaggacagaggggtggggtcaacccggttaatgctcgaggagggagcgttcccactacatcaacagttttcctctcttcttaggcaggttagttctggggattcaaggcaaaggtgatcagggaatccatttgaaaaacaaaaacagaaaactccaaaacatttaaaaactgtggaccctcagcctaggtccaacttctaaagaaggggagtaagaaatttagcacctggagcaaccttattattcctaatacactgttaaaaaacaaaaatcccaaggcaagccaccacctcatcattccagcaagtctactgttgttgcagcacactccactttttactctaactctactcacaggttttacattttgagctcagattttcatgtgccgtcttttctcagcaca

SEQ ID NO: 3081 - DNA, 1521 bp, Artificial sequence
  DNA replication origin
gggtctgctgggccaatgcgccgccgtcggtcagtgagtccggattcgtgccggcaactgtgggcagccttgagaccggggctcggtttgctggtgatttttccgaagttttacaaaataaagagggcgaagtgccttcgcggcgcggcgtgggcatgcaggcggcagggcctgtgggagccggcgtctcggccagcgagtctggggccaggacagcgggggtaggacggagaagccggacgtgcccgtggggccgcggtgtccttgctcccgaggccccagagcgggcgaccgcactccgattccagagggccctgcgcgctcaaggcgccggccacacggaagcctccgccccgcggcccagaggggggcctggccaagcagagagcagagcgggcaagcagaaggcagtgtggggacgaggcccgcattgggctgctgggaccccgccacccggcctggcctgggtggggcgggtagaggccgagagccgcgcgccggggccctgggtgggtggcatcctggttctctgcggctccgaaggccgcgagggaagtcaggggtgcagatctgttccctcggtcagcgccctttggccgacacacaccagccgtgttttcctgtcacactgggggttcctttcctctgagtggaactgtggggccctggaagtttgctagtcctggcaagtttgacgtgacggggacgcagtcatccaacctgcaggcggaggcccgcaggcactttctcctgtcatttcgcccacctgggccctcccccagggcgcccagggggccccatcctgagattccgagggggccgcagcgtggctggcaggaccgacgtctgcgcagttgcgtctgtgtcctgcttggtcctctagcagctgagccagacacatgttttatgtcgtgtgggagacaaacaataactgcgggcttcaatcccgcatgttcgctttgcctaagattcgctggagtctgtgtcctgaggggaaaggcagctttccttctgccctaatgaaatacttgcatgtaacagacgttcagaccctgaaagaggtggaccccggggaaggaacagtaaaggtacatgctctgaaaacagattttcttagccttctctagggaggtttcagttcccatgcctaagagaatctaaaccagcaggtacagacagggtcatgctggcgtccagaggggaagtaatgtgtggctctcggagggtcctgctggggcatcaggcagatcggcagcggccctgccagggctagagatctgcattcagtgacctcatcaggcatactgttctggaaaggcaaggtgagatgggctcgtgcagatgagagcaggtccccctgtttggcccaagaatctctgttttttctctagcttgccgtctgtaactggaaatgaccccggcttagttcagggagtgcttcagcctgagtgcaaacatcagctggtaacaggggagcctggccccagcacagtccagtcctcacccagaggcccacgctgg

SEQ ID NO: 3082 - DNA, 1195 bp, Artificial sequence
  DNA replication origin
aactggggctgtgcgcgacagttgctggccagctggagttccgggtgggcgtgggcttggcgggccccgcactcggagcagccgggcggccctgccggccccaggcaatgaggggcttagcacccgggccagcggctgcggacggtgtactgggtcccccagcagtgccggcccactggcgctgcactcgatttcttgccaggccttagctccctccccgtggggcagggcttgggaccttcagcctgccatgcctgagcctcccccactccgtgggctcctgtgctgcctgagcctcccccactccgtgggctcctgtgctgcctgagcctccccaacgagtgctgccctctgctccacggcgcccagtcccatcaaccacgcaagggctgaggagtgcgggcgcacggcgtgggactggcaggcggctccacctgcggccccggtgggggctctactgggtgaagccagttgggctcctgactctggtgggggacttggagaacctttatgtcaagctaggggattgtaaatacaccaatcagcactctgtatctagctcaaggtttgtaaacacaccaatcggcaccctgtgtctagctcagggtttgtgaatgcaccaatccacactctgtatctagctactccagtggggacgtggagaacctttttgtctagctcagggattgtaaatgcaccaatcagccccctgtcaaaacagaccgctgggctctctgtaaaatggaccaatcagcaggatgtaggtggggccagataagagaaaagcaggcttcccgagccaccagtggcaacccgttcgggtccccttccacactgtggaagctttgttctttcgctctttgcaataaatcttgctgctgctcactctttaggtccacactgcctttatgagctgtaacactcactgcaaaggtctgcagcttcactcctgaagccagcaagaccatgaacccacggggaggaaggaacaactccagacgcgctgccttaagagctgtaacactcactgcgaaggtctgcagcttcactcctaagccagcgagaccacgaacccaccagaaggaagaaactccgaacacatgcgaacatcagaaggaacaaactccggacgcgctgcctttaagaactgtaacgctcaccgcgagggtccgcgtcttcattcttgaagtcggtg

SEQ ID NO: 3083 - DNA, 1089 bp, Artificial sequence
  DNA replication origin
gggacccgggaccgcggacagagacagttgaggctgagcgagactccgcggtcccagccaggtcctacaggagctcacctgagagtgtcgcctccgccctcggctaccacggtgcatcccgcggagcctggcggagggtgcagtgacgccgccccgaccggccccagggctgcccggcctggcctccccgctccggggacgcaccgggtgccctcctcgcaccggctccggggatccgccggtccgctgggaaggaagacaaggcggaaaggctgcctcccctccctcagggcaagccaccccccgagctgcggctccctgcagttctctctggcgcaggtctggccccgctccccggcccgggagtcacttcgtcaggggcggcccagtcgccattacagcccaacaactgacacggaggaggagcggcgccagcggcagcggctgtggcggcggcgcgaggcagggcgggagcagtcgggcccaggcaaacctcgcgagaactgtcccgagacagtgccacaggcatgccaaccttcggttagggccatgttgagtgtggccgaaaggtgggagcgaaataaaacaaggagcagaaccgcgaagaagccatgtttggtgcgtcgaagtttaaactcgtaggacttgggaggagccaaggtatatccgcagaagagaccacccctgccctttcgctttgacgctcattgggccttttggctgcgcatttcaccccgggctgagaaaacaagctggggattcgacaagaatgaactcaaagtctggaaacggcagcttctgagagtttacaatgtttcaccaactgtcgtccaaataagtcgtcacccctgtcagagtagttgcagctctgccgttacccactgctgtcactgtggccgttttattcgcgagggttacagttctgtttagcatgcatctaatgacttaagactccacgcaagtaaaacggagtttcctcccattaagtattggctttgctttaacagtgctttgagaggctctctgtggccaacatatcttctcatatctttgtcctcgtttcccaatctccgcgtggtgaaatcatct

SEQ ID NO: 3084 - DNA, 1045 bp, Artificial sequence
  DNA replication origin
cgccgcgcaccgtgtccgcctgcagcagcgtcagcgggtcggaaggcgaatagagcgccgaccgcggggccgcgttagcgccgggaaccgcgagcagccacagcagcagcagcagcagcgacggcggcggcccggagccgctgttgcacctcctcatcctcggcgctgcgctcaccaccacacgcaagcaccggatgagtcgggtcccggcgccgcggcaccgcctgcctccgcccgcaaggaggagccacgtggccccgcccctgagcccccgcccccgagcccccgcccccgaggccggcccagccaccccgccccgccggccgctcctgggcgcgggagcgggcggggctgagcttgttgcaggggctggccctggccgggtggtgagccatcctttcgcggtccgccgaggcctcggagcagcgcgacccgggttcccgcctcaggccccaggaggcgaggtgtacagtccggtaaaggaatggagcgcccgccgagcggtcgctgcgggggtagcctcgcggaggttgtttggcctctcacggcccccgtatccaacggaagaggagtccgttggaatagacgacccggatttcggctgttgtagggcagttcctgggctcccgcggagcgatgagacgttgtgaattagatgtgagaagagggacgcttggtctgcgaccaccaagaccccacaggatcgatgcacccacccctgctgatgaccatgaccatctaaaggggaacatcatttgaggggccctactcatggatcagaagcccctcttcactgtggggtgtgctgggttggcgggcagttgccgtggaatcagtttcctcaggacccatatctgaccaccctcataaggttgtcagggcgattccaacattcggggttcccagcagcccagatcccccacatccagctcttcagcctactcagagctctccacgctcactcacatgtccctctcgcaagtagcccgatcaactcacctggtgtcatgggcactaaggtgttaatggattttctctggtcacc

SEQ ID NO: 3085 - DNA, 1235 bp, Artificial sequence
  DNA replication origin
caagaaataccaacagtggaacaatggttccagttcccctttctctagaaaaaggcctatttccaaagatgcccacagttctcattcaatgaccatttcagggtaggaggccgtgctagcgacctagcaccagagtcaggaagtaactccattcagaggcagcaagtcaggaacaaatcactatcactataccactcctgcccgccaaatacccactacctggattaggtggatgtgtgacaccacaggaatctttaaattgtggaaaggaaactatgagacaatgtatgccgagtacttagtaaggtgcctgaaatgataggtgctccgtaaatattaattactattattaccatatttcctcgactctaagtcttaagtgtttcaaaattttagcatttctgtaatagagttcaccttcaaatctttatacatgtagtggttttttcctatccttctaccccttgggctgtcataaaatgaacagtgtgtctcacagttgatggtgtcttggaattcaggaaatatagttttggtgccccaaccagggattgggaacatggagcaagagccaaacacgcaccaaaggcctctgggtgcatgggtttaaaatataagggtctgagcgggggaagagagagaaggatgtggcccagaagctaaggagctggaggcggcaggtcaggagaggcccggaacagagataggaaaactgccaggtggacatacccacatcaaagacaaaaatgagaaaggaagtctatgtaccacctggtcaaccagtcgagggagtggagaaaggtggcagggaggcaaaatggatgtccgttcccttttctccccagcactgacccacagcagctagggaacctggcaggaagatgacatgggtccctggacgagaggaagaggactgccacaaggctggcccaggaaacggtaaggtgtcagcggaccatgcggaggaaggaacaaaggagacctctcgcagggaaggaggcagtaacctggcgggggacgaaccgggcgagcagggcaggtctgggggcccaggccgcggagagggaaagaagctcgggatgagggccaagaggaaaaggcaagggagcgggaggcaaaaatggagctgagaaacatgaaggtggtgggcgtgggatgcgcggagaggaagaggtgggcggaggtgactggaagagggacgcgctcccggagtaggaggctgcccaccgggcagg

SEQ ID NO: 3086 - DNA, 1413 bp, Artificial sequence
  DNA replication origin
gtgagtggtggattcaggttgaagttcattgcagctggagtggcgggagtggagggcaatgtgaggtgagtttgggtttggagcctggaaggccttgaatgcagtgagtttggacattattcattgacagtggggagtcatggaagagatttgaggaggagcaaaatgttcagaccagaactgtgccttagaaaactaaccttagtagcagtgaggaagatagctggagtatgaaaagattgagcatactaaaacttctgagagcatgaaaggtggggactgatgcagtgacccaaaaatacgtcatcatctgtcgggcctggtctagacaaggcaggtggagaaggagaggacttttgaagaggtaacacggaggtcaaattcataggacttgtcagctaactggatgacgggtttttgaagagggggatggtgtgggtggcagggagggggactggttgctgggtgaggtaaacacaagtggcaaagcaggttgagagaggggtgattcagtcttggggatggtgggggaggggcagtatccagacacctgagtggaggccatcaggaagaaccaggagtctaggacaggtgaggtctgagatgcagagggttcagatggcaaatcatttggacaaagtcattggctttggcaagggagaaatgataggtttgttcattgatccctttatccactcatcatttagaagcaagattgagcaacttctttgtgacagtgccttcaacagctttttaaacagaagagtgtcaggacctgacatgtgtctgtaggagagaccggggtaggagatgggggtggacagtgggcacaggagagcagtcgaaagtgaagctaggaccagggcaagggggccaagtaaggctggtcagtgtcaagccaaccaggggagggtggcaacgtgaaagcaacaaaggagagcaaccacaaaatgtggcacgaaagttgacaaatgctcgccatgggaagacaaagcaggcagtaataacatctgtaccagagagaggccaggagggcggggagagatcactggagtggctgaagagaaggtcaccaaggagcttccctagaacggcttcaactgagggttgtggggatggccagagagcagtctgaggagcaagggcagacgctgttccaggaacattggcagcatggggacacgggaaggaaatgcggttactcgagaaggaaggagggcctctcttcatccccatcctccttcccttcccatcctttccttttttaagggttagactagaaggattcgaatctatctgtaggcctagttgggcggctgtagtagaaaagaggaatgatgagagatggctaggaagaagttcctgaagagcgtgaggcgtgggagccagaactcggaggagacattggcctgg

SEQ ID NO: 3087 - DNA, 912 bp, Artificial sequence
  DNA replication origin
taccaggctgcggcttggcttggaggatagatacatgggtgaaaagggcgacagtgcccgctcttggtggacctctagtgtgaggcagggggacagagaggcctgcagtgcatcagggctagggccgtggtggagagaaagatgtggggtgaagagagggcaggctcgacgccattgggaaggggcccgaggccttacggggtgagttgaggggtgatgggtgagtagggattccgccaggagaggagcatcccagcagagggagcagcctgtgtggagccccgtgaatcagaggaactgccaggcagtggtgtgggaagccagtgtgtatggagcatctccaccatgccatgtggcgctgcaggtgccggggacacagcagcatatgagacaggtccctgcccccacagggccagtatctgagtggcaggagacagacacagagggatggcttcagccatgatgacgaatgctgaggaagacaaagcaaagcagtgccggagcgggtgctgtctggagaggggtctgggaaaggcttccctgtggagggcccggtgctgggacccatgtggagaggagaaggcagtgtgggacgtctgggaagagagtctcccaggctgtgttggtgtccttgggctgcactcacaaatgtcaggctggggctcagccagtagacgtctgttgtctgagttctggaggctgaagtgcaaggtggaggtgtctgtgctggtttcttcgagcctctccttggctgggcggtggtcgtcttctccttgtgtctccgtgcagttgtccctctcccaatccatgtccaaatttcctcttcctgcaaggacaccagtcctattggattagggcccaccctaatgaccttattttaccttcattacctctttaaagaccctgtctcca

SEQ ID NO: 3088 - DNA, 987 bp, Artificial sequence
  DNA replication origin
gctgcactcacaaatgtcaggctggggctcagccagtagacgtctgttgtctgagttctggaggctgaagtgcaaggtggaggtgtctgtgctggtttcttcgagcctctccttggctgggcggtggtcgtcttctccttgtgtctccgtgcagttgtccctctcccaatccatgtccaaatttcctcttcctgcaaggacaccagtcctattggattagggcccaccctaatgaccttattttaccttcattacctctttaaagaccctgtctccaaatacggccacattctgagaggctggggattagggcttcaacataggaatttggggggacataattcagcccatagcacaggctggagaccagcaggtgcaaaggacaagcctggtgtgtgggcagcactgaaagaaggctgctgtggccggagggagggaggtgaggctgcagagacaggccgggggcggaggtgagcgctcatgggctcagaggccttggcgagggcagggtttggaggttggtgttggcattttgagaagccactggagaggctaacggaagtgacagttggttaacactttagaaaggtggaggatgggctactgcaggcagggggaggcagggcagctgaggagcaagctgcatgctcgcccagcagtggtggttgggcctggactagggttgtcagtgtgcccctggaggaagtggtcagatttggggatatgttaaaggcagagctgagggacttactgatagattggaggaagggtatgtgggaagcaggactcgggtggactccagggttgtggggcctgagcctctggtggatgatggtcccataagctgaggagtcaggggctcgggttgggatggtggaatcaatggcccgctttgtgtcaatagacctcccaatggaggtgtgcacagttgagtctggagttccagggagaggtggggaatagagagattagctttatagtcattag

SEQ ID NO: 3089 - DNA, 1731 bp, Artificial sequence
  DNA replication origin
agtgtgcccctggaggaagtggtcagatttggggatatgttaaaggcagagctgagggacttactgatagattggaggaagggtatgtgggaagcaggactcgggtggactccagggttgtggggcctgagcctctggtggatgatggtcccataagctgaggagtcaggggctcgggttgggatggtggaatcaatggcccgctttgtgtcaatagacctcccaatggaggtgtgcacagttgagtctggagttccagggagaggtggggaatagagagattagctttatagtcattagtagcatcagagctcaagctgtgggactggatgagctccctggcagggaggtagagaagagtgctgaggactgaatcctgagcatcaaaccaccagcaaaggaggctgaacgggggaggccatggtgatttcaagggggccccagagtccagtgtttcaagatagaggtgtagtcactggggccagtgcagctggaggtggcgcaagatgaggacatctctagcaagggctgtgtcggtggagtagtggaggtaatggccttgttggattcggctgaagagagaccaggaggcaagattctggagataatgagcaggaactggggcatgactgggttagagggaacttctttatgatcatccttttccccagttggaatgatcccttatcaggggataaatggatgacgcagtaaagaaaaaacactaacgggagtgaaatcctggaggtgaggagtggggtaacccgagcagcagcggagacagaggctgagcaacgccagggccgtgtggtgaggccttgtggtggggaggtgggcacctgtgctgggtgcagaagaacaagctgagaaggcagaggagagagagagaggcaggtgtgggctgctgcgggtctcaccttgccaggagtgaggagagtagggtgccaacgtcctgctgcgtggaggggtaaaagcaggagattggcttctaaaggcctgggaggtttgcggtaggaaggagcgagcttggaggcaagcaccagcagccctggagcctgagggtgaagggcttaggaggggcgtgttggattaggagtggtgtcctcagcggggagcctggtttcagttagagcaagaaagtggggctggttaacaggtctttgctgatgccagtccagagggtccagtgggtgggagggggtggggggaatggaaggggagagcgaggagagatggagacagattaggaagggcatgtgcaggccaggtccaggcccgagggaggtgacgcatggtggaagcaagtcggacaggcagcatgagtgggcaggggaggaagggccaggggctagggcggtggccctctggcccctgctgacctctctcaccatgtcacaaagagcctgagtttcctgccaaggagtgtggactttgtcctgggtgtgagtgacaggcacccaggttagtggcagggaaggggatccaggtttaggagttttggggggatggggtctcctgtaaagtgaccatggcaggtagagaagtagacaaggggacactgggcctctgctggcataggctggggtgtgtggcacctgtgcaggggtggccacggcaggatggggggcggcagggtggcctggggaggcaacggctgtggggctggcagcctgaagggctggtgcgtggcatctcctctgccctgtagccaaggccaaggaggtcctccca

SEQ ID NO: 3090 - DNA, 1106 bp, Artificial sequence
  DNA replication origin
cgtcgctgtgtcttcgccttgcgcgctctcggtccccggcttcgctccgccggacggagcgcgctccgtaaccgatgactccatctatcttcctcctcctctttcccctggccaattcctttcctgccggcacttcccagcccctgctctctctcccccgcgtctggctgaggctgggccaagggacagcccgtactcggcccggaacgcgcgagtcacgcggcgggcggcgccggcccgggctggggaaggggaccaggggctgtgcgcggaggtggcgggacgcaggccccccgcgcgcgtccccgcagaccgcggcctgcagccggagtccgcacttgcctccagttccgcagggtagggggcccaaacctccccgcggcggggcctccccggccgccctgccaccagtcgtccagctcggccctgtcttaggtccctagagcccgctctgcctctccggctgccaccgcgggtgctttgaaccatccgcgacctcgtgcgtgcagggcggcagtgagcacacggacgccggggttaaccagcgaaagggcttgccatgcttactgtatttacgagatgcatggacaggtagagaaacgcttaaaacaaattctcctcaacgcgagtttctggcagaaatacaacagaaggcccaacgctgggacgaggtctcctctgacgctccatcaggcgctcgacgcctccgggctgcaggcgcgggaagcccaccccgtctgccccaagacccagccgctctcctgcccccagcccccacggcatttccttccagaaatgcagacatacgtgtccttccagcctagtggggttcagcttaggcgggaagggggactgtgtgccctccccagccttccagaaccttccctgctgtttcccctggtgtcatctccaaacaagggacacctgctcacctttaagggaggagcatggggcgggggagaatggcctggtcgtctgcgctgcttagaatttgtctccaatgaggtcacagtgacttttgtgtgtcctggtactgggttggcatcatctcttcccttgtttacctgcgaggtgactccgcgcgcgagacaatatacacaagaaga

SEQ ID NO: 3091 - DNA, 1315 bp, Artificial sequence
  DNA replication origin
ctccggaccgcctgccccgctcggccccggctcggctccgccccgcccctgggtccgaacggaggagtgaggaggacacgagccgcgcgggcttggaacccacgaagacccgcaaacccagggcgccgccgtctccgaccacctgctgccgcggcaggccatcagcagaatttatacccagggcgcgagcccgccacggctgggcggaggcggaggcggaggcggggagggggggggggtgccggcttgcgaggccccgccccgctccctgccgccccgcccccctccgccccgccggcctcactcggggcgccgggacccccactccctccggggtcggctgcccgccgccgggttgggggatgtgccgaagggcgggcctccctgcggaaagcgacgtcacggccgctcctgcagtgtgaatgaatcaaaacgcccgggtgaccgcggcctcccgggcggccggcacgcgaagggtggagggggagggggaaggagcgggcgggggagggaagaggaaaaaagccagagctgcagcaacagcgtctcaacctgggatgtgcaccaaccccggagagcgagatcaaagggactggaaacagactggggactggcggggggagggggccggccagcctgtggagtcctccctgagaagcggagggcccggcttccaccgtgactccagcggcctgcttggggttttaattattattttgaaatttctgaatcgagctagagcgagagagcgagagatctccgtagactgcgactcgctggctttcgctccgagatgatgcagagtgcgactgtccccgcggaaggggctgtcaaggggctcccggagatgctaggtgtgccgatgcaacgtaagacacccccctttctcgctgatttaattctaacaagacagctagcagcctcagccgctgcggggcgggccggacgccgctcaggggccgggaggggctggcggccggggcgcagaggcggtcacagggcaggggcaccagccagagtgcgtttgagggggccaggctcttggctgtttggggccgaatgtgaacgcctcctggatcatgcttgaggcgagccgagtaccgaaccccgcatctccagcccaaggcttttcttggaacgctggggagagtgctgtttggggacacccaggggtacgagctgtaggccaggcctgagggcgagggtggtccccacaaatcttctttcgccggcgtgacggtcagcgcttgcaggaccgctagtgcaacttcaccccagctggcgggaagttggagagcgcgtctctcgcccctgg

SEQ ID NO: 3092 - DNA, 857 bp, Artificial sequence
  DNA replication origin
cgccgctcaggggccgggaggggctggcggccggggcgcagaggcggtcacagggcaggggcaccagccagagtgcgtttgagggggccaggctcttggctgtttggggccgaatgtgaacgcctcctggatcatgcttgaggcgagccgagtaccgaaccccgcatctccagcccaaggcttttcttggaacgctggggagagtgctgtttggggacacccaggggtacgagctgtaggccaggcctgagggcgagggtggtccccacaaatcttctttcgccggcgtgacggtcagcgcttgcaggaccgctagtgcaacttcaccccagctggcgggaagttggagagcgcgtctctcgcccctggggctggcggcggagaagccccggccacactcttagtccctgcggcccgcgccccgggcgtgcgtgccgggtgagtccccagccgctactgcccgcggcgcccgccgcgtgcgccgcgggaaactgactgctccttgtgagggaatctgctcgcgcattccagctagcctaggaatgcaggggagggagaagcgaccgcaagttgtgaattccgggttcagcctttgcgcacgcgagggcaggtgctcagggtggctcgggtttggaggggtagagacgggggtgtgtgggagctttgctagcctgcccgcccgctttcttcccgcgcccgaaattagcgagacagccggagctcgcggcgtgtttatccccaagtctctctctgtgtgtatgggtgtgcgcgcgcagagattttcccgaagggaatccgtctctgtgcttcactcctgagcgagagtccccgagagggaatctgtgcagaggccagaa

SEQ ID NO: 3093 - DNA, 1230 bp, Artificial sequence
  DNA replication origin
gcgggaaactgactgctccttgtgagggaatctgctcgcgcattccagctagcctaggaatgcaggggagggagaagcgaccgcaagttgtgaattccgggttcagcctttgcgcacgcgagggcaggtgctcagggtggctcgggtttggaggggtagagacgggggtgtgtgggagctttgctagcctgcccgcccgctttcttcccgcgcccgaaattagcgagacagccggagctcgcggcgtgtttatccccaagtctctctctgtgtgtatgggtgtgcgcgcgcagagattttcccgaagggaatccgtctctgtgcttcactcctgagcgagagtccccgagagggaatctgtgcagaggccagaacaggtgcccagtcgtcgcgcgcgcgcgcgcgcgcgcgcgacaagcgccgggagagtcctgcccctgtggcttgcacgctcagcagggcgccccgggcaccctggagagaccaaggagttcctcgctccgcttgccaaggggttgtacttccgcctgcgacttctttagtggtgcggtagctacatcttcggggtttactttaagtaagggccggctcatccagggatggtgactacctacaaactagggcgcacgagcgcgccctcctgcgcctcgggtttccatggcagggtttctgtccggcgatccttcggagggcaggcgtaccgtaggcttccctgggaagtttttgagaagggactagaaaagaatagcttcatccaagcctatttagattgtttcttggctgtattctacagttattctttgagtgttttcgtgtcaactgccggcaatcagttccacgtctgtgttgagccttggggagtttaccgctaagatgttttcatagaaggcattggagattcactacgccccacaccccgcacacaggcagggacagagtgggttctcagcccctgcaaagacggaaacagaaaccctgcaaaggtgcaccgagtccttaagctgcttgtagctctgcgcgagtgaggagactgcatgagtgggggaagggtgtgtgtgtgttactagtgtccttggtacccagtacgtctgtgctttcatggctgtggtccgtaggtgacctgtctgttgggaccccaatgaaggacgatggtctctgctctgacggcctttcttgtgatgagtgacactctgattgtctcactttttgccttccctgttcagagacaac

SEQ ID NO: 3094 - DNA, 1188 bp, Artificial sequence
  DNA replication origin
tattggtacatacagtaacagtaaatatcagcaactttcctgtcaagtgtggtgatagataaaagaaatacatgtagggaagtgtcagctgggaaaaaaatatacggccagcagtaaatcaccgccaagcaattaaagcataaaatcaacttgtgcagtattttgtttcctcaggacggtgcaccgttccatggcagctccacgcacaggaggctgacatgggtcctgggctggtccccaccgactgccttcaatagccaagagtaaggaagacatcccagaggagaggcactgagttcaaatcccagctccaccgtttgtctgtgaggtctggggcagttactaaccctctctgaacttcagtgtcctcatgtccaaatgaagaacaggccttcaagcattgcgcaggactgggtcactcactgatttattcatcatacatgcactgagcacatatcgtcagccaggtcctgctctgggtgctggattcagtagtgaacaagacggataaagaccctgctgttgcagaacttgccttctagagagggggaaacagggtcagcaagaaataagtgcacagcgcatctactgagatgagtgctgtggagcagggaaggaagtgctgagggggaggggtccaggggtgtccccctgagcaggtgacatttcaggggaccactgcaggaaatgcaggtacctggggggagagcgtgccagcagggaagcagtgcccgggccccaggaggaggcggagtggactgggcagtggaggagggagggtggaaaggcgatggcgctgggatgccatagtgccttggtggccgttagggagcctgtggctttgaccctgagtgaggtagaagccactggaaggtttcagcaggggagggcgagggtgtgacttaggcccactgtggcgaccatgtgcagaagtgcctgtaggggcatgggcggaagcggggagactgttaggaggcagctgtaggtgctggctgatggcagcccaagctagggaaggcggtgtgggtgtgagaagtggtccccaacatgatataattttgagtagaagctgggcgtggtagttcacttctattgtctcacctacgcaggaggctgaggcgggaggatctcttgagcccaggaattcaagcttgcagtgagctgtgattgcaccactgcactccagtc

SEQ ID NO: 3095 - DNA, 1110 bp, Artificial sequence
  DNA replication origin
cgttagggagcctgtggctttgaccctgagtgaggtagaagccactggaaggtttcagcaggggagggcgagggtgtgacttaggcccactgtggcgaccatgtgcagaagtgcctgtaggggcatgggcggaagcggggagactgttaggaggcagctgtaggtgctggctgatggcagcccaagctagggaaggcggtgtgggtgtgagaagtggtccccaacatgatataattttgagtagaagctgggcgtggtagttcacttctattgtctcacctacgcaggaggctgaggcgggaggatctcttgagcccaggaattcaagcttgcagtgagctgtgattgcaccactgcactccagtctgggcaacagagcgagaccctgtctccaaataataatagtaataataatgatagtaataataattattattattctgagtagagtcaacaggatttgctgacagatcagatggggacggatgcccaaaggttttggcctgagctgtgggaagaatgaagttacagtggtctgagatgggaagggctatgggaggagcagagggtgcggggggtgttggtaggagtttggttttggactccaaatccatgtgctgtagaggcagtggagccccagtctggagcccaggggtctgggctggaggtgagatccccaggggagcggggtgggcagagaagaggtgtgggaggaggaggagcaggagcagaggagcagaggccggagagcacagtgtaggaggcagcgagcaggtgtgttgggaggcttgggaggccagggagaggggagctgaccgctgggctgcagcacagctctggttgggtagggcactgccttgaagggtgcaggaagtgggcagtatagaagggaggcaggcagggatcatagaatgcctgtacatggatggaaggagccagcagaggtgaagctaatgacacagaaggcaaaggggatggttgctgggagtctcattacgtgagaaggaatgagctgtgtctggtggaggtgcatggttcacctgtgggtggcaggcaggggctggggccccgggtgtgcgagtggaaggcacagtgggaggtggggagggt

SEQ ID NO: 3096 - DNA, 1224 bp, Artificial sequence
  DNA replication origin
cgagcaggtgtgttgggaggcttgggaggccagggagaggggagctgaccgctgggctgcagcacagctctggttgggtagggcactgccttgaagggtgcaggaagtgggcagtatagaagggaggcaggcagggatcatagaatgcctgtacatggatggaaggagccagcagaggtgaagctaatgacacagaaggcaaaggggatggttgctgggagtctcattacgtgagaaggaatgagctgtgtctggtggaggtgcatggttcacctgtgggtggcaggcaggggctggggccccgggtgtgcgagtggaaggcacagtgggaggtggggagggtccaagccgggcttccctcttccatgggaaatgggagggcgccagcagctgagcctggggctcagtgggggagcgggtgggaggtgcattctgacccccggcccccgaggcaccatcagtccggtgggcaggggctgctttcctggctctgtggatgcccgtgctggggtggggcaggcgcagggcggagagagggcagggtccagggtgtgtggggagggacaggtgggatcgccctggggtctgctgggtaaggaaggagggaagcgagggacagtgacaagcccaaggggaagggcagtccctgggttgtgtgagtcagtgccctggggagctggaagaacagcggggtccaatggtgggagggttggaagtgacccctggagctgtggcagttgctggtaacaacaaggtctgggggagtgagcggtgggagggagggtagaggccacagccttcaggaggtcaaagaattgagagggagggcctggaaggatggtctatgtggggactgcagtcaccaagggtgtggtgggagtgagggtgagcctgagttaagtcacccaggcgggaagcaagtggagcagggtggcagtgcagccacggggtgagtgccggggcattgggctgagggctggaggtgagggtcggatgagatcacatgtgcagggcccactctgcacaggacacaggttggtgctaggagaatggcagctgcctttattaccagcgtctcagtgacccacttgtggtacatcatgcgggtctgctcagaggtcggaacttaccatcaggaatgtgccagacagccagggtgtaggatttatgcacccctggttctagaaggctcggtccctgcagggcctgcctgctgcccccttt

SEQ ID NO: 3097 - DNA, 1109 bp, Artificial sequence
  DNA replication origin
agctcaggcggagctcaggtgcagaggctgggacccagcacacaagacctagtcctctcctggggtccagagtggcccatgagagtcagccgagaagtctcagctcttctctgcccacacctgggccagccggaggatgtggaaggtggacagcgggccaattacatgtgttggggttaacacactggggggtgagggcttccctggccaccccagcactgcagggctgggagcctcatgcagggggctcagagccacatgagggggacaggccctctcctcgagctccagcctaggtcagggcaccaaggccgggtttgctgcccttgaagcccgccgcatgtccgctgtgttgtgtcagaagcaccgactgcaaaccccggttctctcgctcgttgcccttgggagctaggggtcggcacctcacctctctgagccccagttcttatctgttaaaaggtgtcacagtacccacctttcaggctaggagctcaggagacagtctggaggcagtgtgatggcgacagcaagtgggatgtaaagtcttgtggtttagtaaaccatgggcctcatttcaacccgggacttaatgcccttcttagaaaagcttttggctgggcacagtggctcacacctgtaattccagtgctttgggggccaagatgggaggaggcggcgagcaggtgtgtcgggaggctcgggaggccggggagaggggagctgaccgctgggctgcagcacagctctggatgagtggggcgctgccctgaagggtgcggggagtgggcggtagagaagggaggcaggcagggatcatagcatgcctgtacatggatggaaggagccagcagaggggaagctaatgacagcagaggcaaaggggatggctcacacctgtaattccagtgctttgggggccaaggtgggaggatcacttgagaccaggaattcaaggccagcctcggcaacatagtaggacccaatcactacaaaacatgtcttaaaaaatgagctgggcatggtggcatgtgcctgtgatcctagctgctcaggaggccgaggtgggaagactgagagttcgagtgcagtgagctatgattgtggcactg

SEQ ID NO: 3098 - DNA, 885 bp, Artificial sequence
  DNA replication origin
ggagcgcctctgccccgccgccccgtctgggatgtgaggagcgcctctgcccagccacaaccccgtctgggaggtgaggagcgtctctgcccggccgccccgtctgagaagtgaggagcccctccgcccggcagccacccgtctgagaagtgaggagcccctccgcccggcagccaccccgtctgggaagtgaggagcccctccgcccagcagccgccctgtctgggaagtgaggagcgtctccgcccggcagccgccccgtctgggaggtggggggcagcccccacccggccagctgccccgttcgggagggaggtggggggcagcccccgcccagccagccgccccatccgggaggtgggggggcgcctctgcccggccaccccttctgggaagtgaggagaccctctgcccagccgccaccccatctgggaggtgtacccaacagctcattgagagcaggccatgatgacaatggcggttttgtcgaatagtaaggggggaaatgtggggaaaagatagagaaatcagattgttgctgtgtctgtgtagaaagaagtggacataggagactccattttgttctgtactaagaaaaattcttctgccttgggatgctgttgatctgtgaccttacccccaacccggtgctctctgaaacatgtgctgtgtccactcagggttaaagggattaagggcggcgcaatatgtgctttgttaaacagatgcttgaaggcagcatgctcgttaagagtcatcaccactccctaatctcaagtacccagggacacaaacactgcagaaggccccagggtcctctgcctaggaaaaccagagacctttgttcacttgtttatctgctgaccttccctacactattgtcct

SEQ ID NO: 3099 - DNA, 1038 bp, Artificial sequence
  DNA replication origin
atttttcttagtacagaacaaaatggagtctcctatgtccacttctttctacacagacacagcaacaatctgatttctctatcttttccccacatttccccccttactattcgacaaaaccgccattgtcatcatggcctgctctcaatgagctgttgggtacacctcccagatggggtggcggctgggcagagggtctcctcacttcccagaaggggtggccgggcagaggcgcccccccacctcccggatggggcggctggctgggcgggggctgccccccacctccctcccgaacggggcagctggccgggtgggggctgccccccacctcccagacggggcggctgccgggcggagacgctcctcacttcccagacagggcggctgctgggcggaggggctcctcacttcccagacggggtggctgccgggcggaggggctcctcacttctcagacgggtggctgccgggcggaggggctcctcacttctcagacggggcggccgggcagagacgctcctcacctcccagacggggttgtggctgggcagaggcgctcctcacatcccagacggggcggcggggcagaggcgctccccacatctcagacgatgggcggccaggcagagacgctcctcacttcccagacagggtggcggccgggcagaggctgcaatctcggcactttgggaggccaaggcaggcggctgggaggtggaggttgtagccagccgagatcacgccactgcactccagcctgggcaacattgagcactgagtgaacgagactccatctgcaatcccagcacctcgggaggccaaggctggcagatcactcgcggttaggagctggagaccagcctggccaacacagcgaaaccccgtctccaccaaaaaaatacgaaaaccagtcaggcatcgcggcgcgcgcctgcaattgcaggcactcggcaggctgaggcaggagaatgaggcagggaggttgcagtgagcagagatgggggcagtacagtccagcttgggctcggcgtcaga

SEQ ID NO: 3100 - DNA, 1639 bp, Artificial sequence
  DNA replication origin
agcccccgggccccgggtgggtctggccggcgcagcgccccacgggccgcactccctcccggcgagaggacgggaagcggggtcgggcagggagggcgctggcagggaaggaagtggcatcagctgtccgttcacggctttgccgtggaggggaagagcggccaagcccgcgccttcccggcccgcgctgggcagagggagccgagcgcggagaggtggggccgcgggaggggctggaggagccgggcctcggcctcccaccccgcccggagccccgcggggccgcctctcctgagccgcggcccagggagcgagtgtccccggccgtcagaggcgcgggatggaagtccagggcggccccgagcttggggacgacggggcggccgccagcctcgcagggcggtggccccttccccgcgggaaagcgggcgcaagagcggaggcgcgcggggcgcacggaggccggggagcgcgggcaggagctgggggcgcaccacgttctcggcgggctccgcgcgccgctggtaaccctacacccagggctcgcctttcggggtggaagctgaggaatgccttttgtgtggacaagttttccagaggagccggccgccctctctgtggggccgtccatcgctccgtagagccgtttcctccgaggtcaaggtcgttggttcccgctctccagaggcgtgagggaaacccggagggaacgcgctccgcgcatcccgtctgccgcggtgccggaattgcccgccgccgccttgggtggggaccggttctcagggtcctgggggctctcgagcagatcactttccccagcgcgggacgggggtcgcaaccaggggcattccctgcagccgcggcccaaaccgacggagcttgctttctccttccacccagagggggtgaccgagcctcacctatttccaagcctattttttcacaaagacgggaagcaataaaagtggcctcaggagattccggaaatctctacaaagagaaagtgcccgttcatctttccttcagccgactggcttcactgtgaagcatggggtagttgtgcacctccagatgacaggacagacacagcaacagtaagggccgcgcaatatgtaccggggcaggggaggaggggaaggaagttttctagaggggctgcctcttgagtcaggagggggttactctgcacaaggtgggggaaggggcgtctggcagggcaacaggagagcggagcctggggagctgtgagtggactggcgtcttggcaatctaggagcttgagagattatccagtgcaaaccctctgtgtcacagtacaggcccaaggttacgtcagaggcttcgaaccagagcgactccatcttgtgtgagggcgaggaaaatgaggctgggacttgctgggccacattcccagtgagttagctatacccagcttctagatatttacggttaagagaacaaattaataacgtttgctaaacagacccagacttaggagtgtcctgatatcctgatatcttgagaacagactcatttgtaattatgctttaaagttaataatatcgattattgcaaaatatagtaactaagaaaattaatcctttatcacaaacccttgtagcacagcacatctccccat

SEQ ID NO: 3101 - DNA, 1176 bp, Artificial sequence
  DNA replication origin
tccattccatgtggagccggggctctgcaggaaggagccggagtggggagctcaggccacccagcaccctctccatcccacaggcagcctggagctcctggagggtcctggggacggggggcgccttcccctgggcggggcgcgggtcgtcgatgcagctgccgcaggcctggcacctcctctcgctgcccggtgccggcggtgccgggtgtcccctgcggtccaggctgcccacaagcctgtggaatgtcccctgccccgcgtcccggagccggggagccccgttgatgtagtcggcgaggtcgggcttggagcgcagggggccctggtccgcggcctgcaacacggtgctcagcacctggcgctggcgctgctgcagccgctccaggtgacggaactcggcttcgcgggcggactcatcctcaaagcgcacgtgcgacggcgaggggccccgcctcggcctgtgcccaccgctggactctccgctggaggaatcgctcgtgtgcccgttctggaggctgtctctgcaggcaggggtcgtcctggggtcccgggctgggcttctgtggccatctctgatgaagagacaggaggagagaggtcaagggcagaaacctggggaggtatggacacgcatcggccctaccctctccaccctgggctacagtctcccaccgtgctctgtggcaaccgcaacccacaaggttactccagagaggatttctgggggcgtctcggcaaaccagagtagcttgccagcccattctgatcctgagacagcgctaaacaaaaccaaggccaccttccgtgcttttggctttccctctcttgcatggctcagcctgagttaagatgaaacactattgaatgggaagatgctgaagtcctcacaagtgtgtgttgctggggtggtgcggcgtctgtgtgtgtgtgtctgttagggagaggaagtgagcctgaccaccatgtatttttggtagtgattgtggaaatatgtatttgctgtaatgctgtcacgggaacaggatattttaagtttccacttaaaggagaggctgtgtgagaactgaagtcagagattcttttttttgtttgttttagtggcaggatctctctatgatgcccaggctggagtgcagtgacatgatctcggttcactacagcctcgatctctgg

SEQ ID NO: 3102 - DNA, 1078 bp, Artificial sequence
  DNA replication origin
gagcttggaacctcagggttcccaacaggaagaggacgtctccaccaccttccccatggttctgcctcccccgggagggagttgcttagtctgcctccaggccggcggtcaatcctgcatccagcctccaccagcacccctgacacctcagagcagctccaaggagctgccgaggtggtatgtgacgctgccatctgactattgagataaaagggaatgactctgaaggcctgtgtgtcatggattgggtctgggcgtctgctgtagaaccacaccaggcctgggctgggcaggaaccagcggcagccccttaccatctctgctgttctccaggggcggctccggttcccggctgcaggggcccctctccaccctaccctcgtggacggctcccccgtagggctcctgcagcccccgaggtgcgctgttgttgcagttgttggtggacagggccagcagtgggtgcctgacctgagggcggctgggctgggtctgtgatgggggcagctcacaggtcctgagaaccgcgcttcttgaaggaggccgagggatacccacaggctctgtctggtcacccagcctgagcagtccagccagggctgccttcctgtgagacactggcgaggtggttttcctcgaagggggaggggttggcgcccagccttcaggacacaaggaagctgttggctgccaggcttggtgtggggcagaaggctctgcatggctctgttgcagggaggaaggagagacaatttccagggactcgtggctttctgtaacctgggcctggcctcctggccccgatgattcaggcgtcatgggggcggtggtggcataggctgtcctgcatggagtccgggaatccaaagggtgaggctggtgacttcccagccctggtccaggctgccactggggtcccagggacacccgcttcaactccaggtcaggaggcttggcatcttctctcaaaaatagagttccttcaggcgtgtgtcctctgccctctttcacctcattttccacctccacatcatcagccctaggcaggtgttgctgggcctgaaggccccaagggagc

SEQ ID NO: 3103 - DNA, 989 bp, Artificial sequence
  DNA replication origin
agtctttggtggaagacagtcaatgggaccttcattcagtccgcatcctcttctcgcctgcagcctgggaaatgaaaggcgccagcgacgcaaaccgctctcacctgcttcactctgcctaggagagcggggagggaattaggagaaacagaccacctgaactccctggaacagaaggggtgtccgaggggtgctgctcctggttgcagagcgtggggcgcttcgtgagggagagcctgagcgagctgccctgcgcgtcccacccactcaccactcagtatgtattgtgcgtactgcactagcttccctagtaagtaccggaatacaaagatcaagcgttgttccctcaaataactcacactccagtgagggctgagagacaaaaacccaactaaacatgatgcctaaacatgagttccacaaaggagggaggcataggagaaatgggagcggggctgggggggtggggaggggggtggagccccagttcggcctgaggcaggattgggagcggctccctgaggggcgtgtgcctgcagtagatggatgagtgggcatttgcaggtggggaaggtgggagaaagagccctgaaggttcgaagtcagactgtgtgtgatcgacagaactgcaagggggtcagctgcaaccggggtcaagcgtgttaaaagaagaatgaggagggatgaaagcagacagatcccagaaactctctggccatgccaagtggtctgaactttgtcttgaaggcgataagggaccaatgacagatgttcggcgagggggtggcgtggtcggatttgcatatcagaaggaccactctggaagccacatgcaggaccatggcagggaggccagtcaagggactgctgagggaatccacgtgggaagtgatctgtgcctgggctcagagtcactatggccatggagaagtttccagaaccatcaggctgtcaactctccgagacttggctgaggtggcaaagctgag

SEQ ID NO: 3104 - DNA, 1883 bp, Artificial sequence
  DNA replication origin
agccggtgccctgctggacacaccccgcctcgcggaagcggccttggcacgaaggccctggcgacccccaggcagcgcaacgggccgctcccctctcacccccgcccgcgcgaggccccgcgggaggacgcggacagaggctgttggctgtgctgcctggccccacgcctcctgtctgcgcggcgggaacactccgcgggcggccgcgtggccgggaaggcgcggctggcgcggagtctgcgggtgcagagcaagcggccgcccgctgcctgccctggccggtggggacagcccgccctgccagggagacttgggggggcaccggagtcgctgcgaggttgcctctagtggcctgagggcggggcgggcgcggggcagctgctgagggcacagtcgcctcctggtcgcagggcccgcgacagaccccgattctccctcccgggacaccgggtgccagctgcggatatctctcgccgccgctgcaccccgcagcgacagaggggggcccccgggaaagaggggaaaaccagccgccgcccgggacgctggttctgcgggtggcttctgaaaatgcccccaagccccgaggagactgaggtgcctgaggcaaaggggtgccactttctgctccgtgtagtcccagtgtcaggggccttctgtgaaccgcgggagggacataagttagacaccgggaatacccacacctttgcatgtggctgcttcgtttctgtgcctgagccacttggcccttgctgtagcttcctactcgttttacaaagccctgcttgtgctcacctgcccggttggcgcccttgccaactacccggccaaccacgaatcacggccccaggctgtccacaggctacccacaggctacaccggctgcagctcctcttgcagcataccctgcatccggcgctgtaatgtgtgtgtgcctccccctgggctggggccccttgaggctgcgggtctttcttaagtccgggggctcttgcctggcctaggcctggttcctggttaataagctctcagtaagaaggttctgatggcccaggcactatggctcaggccagcactttgggaggctgagtcgggcggatcacatgaggtcaggagttcgagaccagcctggccaacatagtgaaaccctgtctctaccaaaaatacaaaaattagctagacatagtggcaggcgcctgtagtcccagctacttgggaggctggggaaggagaatcacttgagcccaggaagcggaggttacagtgagctgatactgtgccattgcactccaagcctgggcaacagagtgagacactgtctcaaaaaaaaaaaaaaaaaaaaaaaaaaaaaggttctgatgttccagtgtgtgaggcagggctgccctaggccttcgaggtcagcagctccccaggcaggcagatgcaggcagttggggaaggtcaaacaggaggctggaggaaccaaagccccctcccatttccacacaaggcagggcctgcacatcaggctgccccagggagaagctgggatgccagcgcctttgcctccttggaattaggtcaccgtccagaggcctgggagcctccagtgtcccgcgtgcctcgtgcccctcccctagcaccaagccttttctggcatggggaggcagctgcagtgggaaaagtgggccccaagtcagaggggcaggattgcatgccctgtcactgctgctgaacttggttccccatctatgcaaaatgaagacaatgagcaggacatacctggcaggactatttaaggactaagtatgtcaccagcccgggaggtgatacgcctgaggccttttcccgtcctcccagccccagccacccccttccacctcctcccacctgggaaggca

SEQ ID NO: 3105 - DNA, 992 bp, Artificial sequence
  DNA replication origin
cgggcggccgcttgctctgcacccgcagactccgcgccagccgcgccttcccggccacgcggccgcccgcggagtgttcccgccgcgcagacaggaggcgtggggccaggcagcacagccaacagcctctgtccgcgtcctcccgcggggcctcgcgcgggcgggggtgagaggggagcggcccgttgcgctgcctgggggtcgccagggccttcgtgccaaggccgcttccgcgaggcggggtgtgtccagcagggcaccggctgttagagccgcgggggcctgcagcctgagggtggagggagggcgggctcgcgggagttttgcaaaccccgcccccagcacacgcgcgcacgcgtacacgcacacacactgctgggctcaccctgcctttgagaaacgcacggctggggaggcggacggggcctactggtgcaccgcacggtcccgggccttgctgaaaggtgatgtggaggcggcgcgccgagccagactgggaggatgagctggagctggccggagggatggggaggaagtggggcgacctatggaccctcatgtccgtggggcgggggcggggtgtgcaggaatgagtacctggtgcatgagtgtccccagctttcaggcgtgctggaaaaaccgcaggccggctcgaattttggaaaccagtgttaaccaggacttcaaggacctgccttcgttgggctgtccctcgccttgccctgccagctacgcaaatgttccagagctctgttgaggtcattaaatcaccctgaatccatacggcaacactgcgagagagagactattataccaggctaacgcacgaggagtccgaggctcaaaggttaattcacagatagatccaaggtctgggagccaatcaaaagcggaggcaggatttgaacctggccctctgtgacttccagccagcatccttccaccctcctgggtccctctgcagctcacctcccttggaggccctcgagcag

SEQ ID NO: 3106 - DNA, 1120 bp, Artificial sequence
  DNA replication origin
gccggcgcccgagtccgggattcggccagtggtgctgagcgagtgctggaccagcggccgtcctgtgcacctggcctgtgcgcgtgcccgctgctcggcttcacccagactaaggcgcgggcagctgcgggaacaggcggggtgggcggagggagaccgggaggcacgggcgccctgtgcgcggaggaggtgaaggcggccggggccgggacgccatgtccatggaggaccccttctttgtggtgaaagggtgagtgtcggccgagcgctccaccggaggaagaggtggcggtgctgcctgcccgcacctcctaggtcttctcgcagtggggggaggggaggcaagttggagctggggagggggaacagtggagacggcttagtcttgagggccatgaccaagcgtcaagagacgttccctccatccctacctggaccgtgaagccactgtccccagccaagcccctggtggtggggggccctttttggcctgtgtgctgcggtacaatttatttgggggccgaggggctcagcagctctgcaggtggggaaggagacacgcgggtcctggcgcacactggccgtctagtcgagcatgggatcttgcttcgaaggagcgaaaacagcatctgggcaggaaaagggaaatggccctcctgagctttgtagttcgcgttgacgggggtgagctccattgtccattgagtttggagcgcttgtccgcagactggcgagaccacaacaagcccagaggcgtctgagcacgtttgctgggagggaggcgggggcgggggccgttctgggaggctggggagcagggcaccggaagacaattcaatgggggagtttttactgagtaatgtgaggagaggaaagcagtcgttcatactcagtgatgatttggaaggaaaacaaaatgaaacaagccaaaccaaactttcctcagctttctattagcaaccggaattttctcacagtgctaaaggaaatgagtgttgcttgttaactccttgatttcatccaggttgtttgacaggtttctcctatttcttctgcctttcagaatagaaaggactgccttctgttcccttacaagctatcctagctcatctttgattgc

SEQ ID NO: 3107 - DNA, 1466 bp, Artificial sequence
  DNA replication origin
gccgtgcgcccgcactcctcagcccttgggtggtcatgggactggcgccgtggagcaggggtggcgctcatcggggaggctcgggccgcacagaggcccatggagggggtgggaggctcaggcatggcgggctgcaggtccccaagccctgccccgcaggaaggcagctaaggcccggcgagaaatcgagctgcagcgctggtgggctggcacttctgggggacccagtacaccctccgcagccgctggcccgggtgctaagcccctcattgcccgggccggcagggccggctgcccccagtgcagggcccgccaagcccacgcccacttggaactccagctggcccgcaagcgccgcccgcagcccgggttcccgctcgcgcctctccctccacacctccctgcaagctgcgggagcgggctccggctttggccagcccagaaaggggctcccacagtgcagcggtgggctgaagggctcctcaagtgccgccaaagtgggagcccaggcagcggaggcgccaagagcgagctagggctgtgaggactgccagcacgctgtcacctctcagtgttatgggatccaagctggtgtgggcccttaggagagacttccagagaaggtgatgtcttagggaggtctcagggacaggtaggaggtgagtaggcagaggggctgggaggggatgcaggagggcgggcagggggagcagggcagagaccacatgtgcaagcaggaggttcgagaaggcggggcgtgcatgggaaccaaatggcctgggacgtctggagcacagtgacaggcgtcacgggcagaggcgatgcctgggaggtggagcccaggctgagaaggctacgtaccccatgccatccccaaaagctggcaaatagaaggtatgcagccacaatggctttcttcccctactctgcctgccggtgtctgcagatgcccatgtccaagccttttgtcctgttatctcctgccattctgacccatctaaatccttcccagtcctcaaaacccacctccaaaaacatttcatccctaaaacaggatcatccctaaaatttcatggctaaattgagatgacagatggaggctcacataccagagatccagatatttaaaaggaataaatcaatctaacaaacttgaaatatgttctatccccccaccttgagagattgccctttgtatggcttcgaagaccaagttcaaattaaaaaatctcacactgtgtgaagttctgggcctgaatggggcggcacagagaaagctggtgtctccctccagtccccggccctcagcctgagactcacctctttttcttcctgtttcttgctccttccagcactgccaagggcctcccacaattaaacacctctacttttttattcaggctcagccacaaactgcctcttgtctgagcttgtcctgggcttaagtgatcctcccacctcttggc

SEQ ID NO: 3108 - DNA, 902 bp, Artificial sequence
  DNA replication origin
gaggttcttatgcagcttgatgccgccgcgctggacccgcgagttgtagatcttgcccagagagatgctgacgatgcgatgagcctccagcttgaactccatctgcttcccctgcacagggccgtcggcgccggggtgacacgtttggaaattgggagggaacgggaggcgcaaacaagtccgccccctgggcacaccctcgatcacctaagactccgaagagaaacgactctggtgacgcgcgcgctgctctactaacctctccaaacaagacaacttccccgtttcgggtccggtcgctaaacagggcagcctggctgccccgcgccttatataggcttctcgaccgccaatcacgaagggccgccaaccgttccggggctggccggcgcgccctcgtgcgccgcgcacggccaatcggagcccgaggaggggcgccagggcccgttcgaacgttagtcccgcggagcaggctcttaaagggggcgacggcttgcggccgcagaccaggcccgtggggagtgaatgttcgggacggtgctcgagagcgctactgtttggagttacagattctggcttgtgcgatggcttgccggaaccaaagcgaacaaaatattcgaactttcttccgaacacggtggtggactctgttctgccataaagtcctgatccttccctgatcgactccgccctcaccagccacaccaccgtttccaggccggccacacctgtaagcgacccccctcaaccctggcaaaaatagagatggtggccatacgcggcggaggacacccctggataacaaatagtattactgcaaagtatttggcaatcattatttttggatgagccgctttccccgctagagtcacatacactcttagcagctgtcagttctaacc

SEQ ID NO: 3109 - DNA, 867 bp, Artificial sequence
  DNA replication origin
agcgcttcctggggcacaccgcgggcggcgcggggggctcgtcctccgctggttgcggcgcgcagcagcaggcagcgcggggggtcgcggccggtgtacccggcgggtcctccccgcctagggggcagccgcaggggcggcgcgcggcacgagatacctcggggaagacgccccagcctccggcggtaccctcggcttctctggccgccgcctggcgcggcccctccacgcggctccaggcagcttccgtcgcgtccgcctctccgccctgaaaaacgtccccgactccagtcaccgtggccaccggcacctcgtcccctacccgcggcgcgtctgagacggaggagcgctccggctgcggctcggtctccggccaagaggcacgagcggcgggcgggggcggctctccccagccggcgggtggcccggccgccggctccccgggctgctgctgcggtggcggcgccggggtcccagcgggaccggccaggtagaggccggggcacgggtcgctcaggtagacttggcgggcgctgcgcagcaccagcgagaccaggaggttcttatgcagcttgatgccgccgcgctggacccgcgagttgtagatcttgcccagagagatgctgacgatgcgatgagcctccagcttgaactccatctgcttcccctgcacagggccgtcggcgccggggtgacacgtttggaaattgggagggaacgggaggcgcaaacaagtccgccccctgggcacaccctcgatcacctaagactccgaagagaaacgactctggtgacgcgcgcgctgctctactaacctctccaaacaagacaacttccccgtttcgggtccggtcgctaaacagggca

SEQ ID NO: 3110 - DNA, 1346 bp, Artificial sequence
  DNA replication origin
gcagcccggggagccggcggccgggccacccgccggctggggagagccgcccccgcccgccgctcgtgcctcttggccggagaccgagccgcagccggagcgctcctccgtctcagacgcgccgcgggtaggggacgaggtgccggtggccacggtgactggagtcggggacgtttttcagggcggagaggcggacgcgacggaagctgcctggagccgcgtggaggggccgcgccaggcggcggccagagaagccgagggtaccgccggaggctggggcgtcttccccgaggtatctcgtgccgcgcgccgcccctgcggctgccccctaggcggggaggacccgccgggtacaccggccgcgaccccccgcgctgcctgctgctgcgcgccgcaaccagcggaggacgagccccccgcgccgcccgcggtgtgccccaggaagcgctgcgcggcgggggtgggcggcggcccagcgggctgcccggcgcccggctcgaccccgctcaagaagccccgccggaacttagagcagccgccgagtggaggagaggacgacgacgcggaggagatggagaccgggaacgtggctaacctcatcagcatcttcggttccagtttctcgggactcctacggaaaagccccgggggcggcagagaggaagaggagggagaggagagcggtccggaagccgccgagcccgggcagatctgctgcgataagccggtgctgagagacatgaacccctggagcacagccatcgtggccttctgagcccttggcccccctgcggggaggaggtggagcagcgggcgtccccgaagtgagggccaggcccttcccggctgcgaggacgcccagagaccgcgggcgctgagcgcgttgggcagactggttgcctctgggcatcgcaaactgcccccgggcgcatctggcttatctggagacctgggagcttgaggctcattggaagaggacgatcgttaacttttgtgtttgtgtatgtctgtgtatgtaagtttgtcttgtggcattaagactattttgctcttctggaatgcaccactccttccccagggtttaagagattgggggcagacagggactttcctctgccggctgcgtggagaaggaagcggctaaaaggtttgggccggggagttccccattcgttctccggggagggagggactttacacctacccctcaccggaaagctagacccgcttcagggccaggagtggcgtttccgcacaggatttcctaagacgagagggatttagccaagagcacagacttggattccttctgtccctccccacctttctctcccaatgaagaaacg

SEQ ID NO: 3111 - DNA, 1569 bp, Artificial sequence
  DNA replication origin
agcggcgggccccgcccccgccctccagcccgcagcgccgcgccgcgcgcccagcccccgcctgggcctgctctcgggcgggacctcactggggcagccgcgggcgccggcgcaggaagcctcccttccccctcggcccgccgggcccggaaaggcgggagctgggaggaagcttcgcggcggccgaggctgcgggagaggacgagcgcgccccattttctccgcggagccgcccccagccctcctgacctccgcgcccctttaaatcctccgcgggtctccccgcccttcctgctgggatgggaggagaccttagcggacggtgctctgcctgtgcggccagatgaaagggggactgggaaaatgaagccagctcttgccggtgggctgggggcggcaggaatccggagctctggccgctggcggcactgggcttgagggaagcggcggcacgggaggcgtcctcgggagccggggtctcacggtccagggaacgcccccgccgccggcttgctagcgaggcatcccgtgaacaaagaggcctgcttcaccctactggggcgatcgccccccggagggaagggtttccaccttgcacggcactcgcgcgttttgtctgttggttgtggtgaggagggtgtattgcagatccaaaaggagcctctcggcctcccagggtgtctgggtcagaattgagacgttctgggcgaggaggtgttgggaggggagtaggaggtcggaaggagagaggccgacccagttagctctgttcacaccgtccctctctaggagcggagcctacacctgacttgtttggaatgtgagcttttgcaggggacagaggccctggcacgtagaaagttctaaactgtctggtgaattgctgcaattaaaaccagagcggctccttcagttgtcctgggtgggcagggcatcccaaagaaacacagaaagtatgcagggtcctttgaaaatagtgcccatatcaaacaaaatattaatacttcgcatttgtaaagtcctttcctctaagaatgttgtctcgttccatatatattttccactccataaaattctagagcacaaagaaaggattcatatgggagcgaatagaacaagtaaagacggtcagctgtggtcacagtggaggaactgaagagtttagacttcaccagctcttagagccctgttttctttgaagtggttacaaccgagtactttggtgtggcctaaagagtttgaaggtatacagttaaaggacctggaaataagattgggctggccattggggccttgcttttctcatctgtgagatgatagttgtgaaaatgagattagactgtatgaaatattcttcgtaagccataggatatgttatacaaatgctttagttattgaaacatctataaattggtatacaagtcatgattactgtagttgcaatacggagttggtggggtgcttcagatttgcaagctgtaggaggtgggaacaggactgaagggctatgtgctgatgaatctccttcagcattgctgtggaatggatatgcttccccaaaattcatat

SEQ ID NO: 3112 - DNA, 1252 bp, Artificial sequence
  DNA replication origin
tccttacctgaggcataattctaccctggagtttttctttttttttttccccctggagaaaagggaagataaaagctgactttgttggacagaaaagaaacagaagatggatacattaaaaatgtaagtgcttacaatttgcagcatacatgaaactctgcccacttcacttaaatatgtccaccaaaacctcagccccctccagcctctggcaagggagtcctagctggggttctgggagatggcagcagaaccttggtgagatggccttgggcttgactttgcagagctaaaaaggaaagacgttcaaacaatgaaaagtcctcccaccggattccaccttctgttggccacttccttccttccctcctttttccttcccttcctgcgggagctactctgccccaccttccttcctggagaggaggacctaccctttcctctctagggctggtgccaaagggatgaacaatgtgattgctgggggggcgggtaggggtgcagggagtcaagaagtgggaagaagcagccggtgttcgaaacaaaccagagtaaccaagcagagatggagggagagagatgtttagtcctcaaggtgcatttcaggagtctttgaccagttcccagaaatttccttcatttaagcttccaagcaaagagactgctaatggcagcaacggcagtagaatccccaaagcctcatcaaggtgcccaaataatgtgacctcaaggtgacagaaaaaaggatggcgtcagtgaggtaaaaggggcactcaatctaggtagccatttgcaatctcccttctgctgtcccacagcccagagagaaaagaaaaagtggaaaggaaaccgtgaaaagaggcagagacatcaagagagtttctggaagagtcttgaaaagggcaaggacagaaagaagatgccaataggaaggggagaggacaatacaaaaggtaatgtggagctgaaaataggagaggggagagtcgcccttccatcaaatgtaatgataaagctaccaaaggagaccagagagtggcggagggggaaggtcaaatggaggcgttcgtgaaggcagagctttggagagagggccaaacgtgagatggcgagcacacaaaaaaggcgctccaggaggcagttgagggggctggaacgaagtgagagagaagaaggaagaaatcaaagggttcatcgagggaagggggcgcctaggaaacacgcccgggagggccccgctttgtctggcgtg

SEQ ID NO: 3113 - DNA, 915 bp, Artificial sequence
  DNA replication origin
ggggtgtcagggagggttgcatggaggaggccttgaagaatgagcaggacattgactcttggaagggtgatatttcttccaaatggagaaaatagcaggcaccaaagcacagggcctattttgggatctgagaaaagggcagattgtggagtgctgtttggaagagtcaggccagggaggcatgttgtccatttgtggagtcttttttttttttccattctccatttattcatttatttatttatttatttatttatttatttatttatttatttatttgagatgaggtctcactatgttgcccaggctggccttgaactcctgggatgcggtgatcctcccacctcagtcttgctagtagcagggattacagacctgtgccacatcacctggttcattgtatgaagtcttaatgccactcggggaggctgtattttctttataggggtggggtctgatgatggttttgatgagggaagtcccatgggtgggcctgtcctggcagtggcctgaggggttggaatgcaggggaacaaagagcagcagggctgaggcagaaaagcactgtgggggcacaaagatggaggggtggtgaggaggccgcatctacagggacactgggtggggacaggggatgagtgggtgagagtcggggcctgagaggattcaaaagtgactgaaatgatgatggaggggttatttatagaaatggggaagtcacagagagaaggtgcctttgagtcggggaggggacgggaagaagaaggagggagtggatttttattttgaacctggtggttgtcagtggtttgctggaccttcgggggggccaacagtgaacagcaggggctccctgataatcaaccctaaaaccttgtctggaacatgttcagcttcttccttgcccaccctcct

SEQ ID NO: 3114 - DNA, 1228 bp, Artificial sequence
  DNA replication origin
tagcaagtggtctggcaatgaaggaaagaacttccctagaaggttgtaggggtccccagatctttgtggctcactgtcacgagtatttccaggtggatatttgagcagcagactgtcattgggaagcagggcctgggctctgggccgcattggacaagcagtttctgctagccagaatctgctagctttctctcctgggtaccggggaggtactgggcacagtgggctgaggcctgtggcaagctgggcacagtcatggttctttcagtttctgtttcctattagggactgacaatggaattaaggggcatggagaagagtgaggcagatggtccatgcttctggagagctccgaggacctagatgttgggtgtagggggcgctggaggggatatcagaggagccatgagggggtcgcaaaggagaggcagggagcgggttggggtcagagtttgaagccagctatcagaggagggagggcgctggtggccttgcatcatgtgtggggtggagagcacagcccaggaaaaacagtgatgggggaaggaaggggtgaggtgaggctgaaagaagacgcaagcttctgctaaggaggctgggttttatgtaataagcaactgggagtcatgagcaccggaagatgatgcagtccacacgtggccactcaggaagacagctgcatcttctgtgaggaggcctggggagagctgtcacccgggcaggatggtctacacaaggtctgctgcaaactcgggtgctagcctgggtagtggctgagaaaatgagcagctgggacaccagacgagctgggctgggaaggacgaggctgtgtggtgcatcaccagccagatgcctggggttgcaggctgggagtggggaaggtgtgcccaggatttagaggacactgggggtggagaagtgggggcaagggacagggggagaaggagaggggataaggagaaatgcattctagatccaagagaataagatttaacagcaaacttactttgttcagttcatttccacatgaggctgtgcaagtgagaaatgaagtgtctcctcattactcttaattctgtcagtgttaggaagcaagaagactcccctcttccagtcctgggggttgttagttatgctgaaaagcaccctgtgctcttttttgatttcagagaaggggtacattttcctccaaggaagggggagccagttccgggacctatcagaccag

SEQ ID NO: 3115 - DNA, 1543 bp, Artificial sequence
  DNA replication origin
accttgaattaatgcagagtcccgcgctcagctgaatgaagagggtgtgctagtattcccgagacatcactgaattattttaaaaggggaaaggggtggggatgggagggcgaagacgggggaggagaaatggtgaaattgaagggggaagaaggaggaatccacagaaagaatggggaaggaaggcaggcggaggtgagggccacaaatggagaacaaaataaataaaagagaagagagacaatttaaaaaaatctgtctcttgctcacacagtggaaaagaaatttctggcaatcagaaagagaactcgcatacatgcccaccacccgagagggcagaccagggactaacaaaggaggagggaagagagctatatccagacagcagaagatagcgctgtccagacacgggcggcacgcgcgaggcggcaagggagcggcgggagggtgggagctgaacgccggcgtgagcgcgcgtacacccggggctgggggcggcgggcggggggaggggggcaccacgaggcttcatttaggcggggatttgtgttgtaaacagcctgaggtcaagaatttaggtcagggtttctgtggaaaagttcaataacctcaaacttccgcgggcgatttccactggagtacccgattctcgtttgcgggcgggatggccccttcctgggctccagctctggacctcaccagggtcctggccgctggccttactgggcagggagaggaaaaacatgattacatctaaaaagaaacaagagaactgggggcttcaaggatcaagttaagggggaaggagaggtgtaggggaccagcccctgagccagactcttcccaagggaagccccagcccgatgcagagcctgttcgctgcctgtggactgatccagaggctctctgaaggtctccaggagctagctgggggctctaagggagaccctgtttcctgtgggcagttaaggagcacaaaaaaatcaacagccccaaaactgagtcaaactggcgtttccaaggcttcctagacctgaatccctctagggtatcctctcccccatttctctggctctctgcatatctttccctcaaaaataatagaaatgtctcccagaaccctgcaggtaatgactttccgtcccacccacccatctttacaaggcccagcagggtccctagggaggctttggcaggtggcttatgaacaactgcctcctgtcctccaggagctcagagtcagagaagagaggggctccagaaaaagagagaagaggaggcagtgggattggaagggacaagaagagaagggagtcacagggaaggaggagggagagaaagagaagcgttctctccctctccactcattgctttggcttagccttggcccaggtgggtcaagtcctcagaaggcctcgcttgagggtggccagggctgaatgacgacagctggccctcctacttggccatgagtttccatggctgagggcagagcctggcacacagtggaaacgtgcactgaagggaactaaatagccaccat

SEQ ID NO: 3116 - DNA, 1423 bp, Artificial sequence
  DNA replication origin
caagcgattctcctgtctcagcctcccaagtagctgggattacaggcacacgccaccacacctggctaatttttgtatttttagtagagactaggtttcaccatgtcggccaggctggtctcaaactcctgacctcaagtgatctgctcgccttggtctcccaaagtgctgggattataggcgtgagccactgcgcccagccaggtgtgcctctcatgtgctcctctagcaatcaggcctacgccaatcatagcacattctgtgatgtggtcacaatcgatgttcttcctgcctcttccatgaggatgatgtggactaagtccagctcatgttgttgtgcctagtgcctggcacagtgccttgcacatggtaagttctcagtcaacgctgattgaatacgtacgtctttcagaggccaatctggttatgtcctccttggcatggaaaaggagaatgatgccaaggggagcagcaggggcatctgagtcacacgtggccccaggtcctgaggcaggcacaggcattaaaaaaggaggaaggaacctgcatacaggacccagttctcaagaagagttctccttaggctgggctcagaggctcatgcctgtaatcctagcactttgggaggctgagtgaggaggatcgcttgtgcccaggagttgagactagtctaggcaacacggggaaacgtcatctctacaaaaaataaaaaaattgctggatgtggtggtgtgtgcctgtggttccagttactcaggaggctgagacgggaggatcaccggaccctgggaggttgatgctgcagtgagccgtgattgcaccattgcactccagcctgggtgacagatcctatctcaaaaaaaaaaaaggagagaccaccttgtggcttggtgcccccaggcacgcacttgggaggcagggcagcaggtggtggtggcaatccccccagagtgggccctggggaaggggttagagggattcttctaccaaaaatgggagggaacagccagctagctgtccgaggtggggctgagatgtgcggccctcggagttctctccttattgcagcacctctaaaccttaccaacgcggcatatcattatttctttaatctgtgtcttctgcagtagactgtaagtttatgagggcaagaatccagtccactttgttaaattctggacacctgggggcccagcctggtccgccgcggatgctcctaatttcaacatcatttatcgagctccactgtgtgccagtttgtgggtcaggcccgggatgtagcactgagcaagccagaagccttggcctggaaggcaatgccattaacctctttctttctcttctctatttccctgtgaccttggccccattcttcctccctccctcccttccccactccttgtctctgccctctccctcccac

SEQ ID NO: 3117 - DNA, 2608 bp, Artificial sequence
  DNA replication origin
gggtgttgagagaagtgccagtcctccggagagtgagggcatagcgtgggaaagacttgtccacagtcccacttctaggacttgaccctacagaaatgaaagtgcacatcctaaaggcatgtaggggaggcttactacagcacagctggtaactgcaaagcaactgggaacatccattgatagggttgctggaataaactgtggttcagtcatgctgaggaatactctgcagcgtgaaagagatgttatggacatctttccagaaatggccaaagaaagatgcacaccatatcctgtaatttttaaaaactaaaagaataagagcaaaacaaagacctatatgtgtaatataatttcatgttcatcacagaaagagggaaggggaggagggagggagggagggggaatttttcccagcttaagtataaacacaggggaaagaagcaaccataacagatggcagctgggggaggggctgagatgagagaggagttgagatggggagaggttgaggtgggggaggggttgagatggaggaggagttgagatgggggaggagttgcaatggtagaggagttgaggtgggggaagggttgaagttggagaggagttgaggtgggggaggggttgaagttggggaggggttgagatggaggaggagttgaggtagagagcagttgagatggggaagtcttgagatggggaagggttgaggtgggaggggttaggatgaggaagaggctgagatgagggagaagttgaggtggagggggttgagatggagaaggaatgaggtgaggaggggttaagatgggggaggagttgagatggcggtggaattgagatgggaggggttgggacgggcaggggtagagatagggaaggagttgagatgagtgaggttgagatggggcagaggttgagatgggtgagggttgagatgggtgtggtgagatgggtagagttcagatgaggtaggcttgagatggggagagggtgaaatagggaggcgttgagatgagtgtggttgagatgttgaagggtcaagttggggagacactgagatggagaggggttgagttgtgaaggggttgagataggaagggattgagtaaggaaggggttgagttgtgaaggggttgagatgggaaggggtagagatgtgaagaagctgaggtgggaaggggctgagatgggaaagggttgagatgggaaggggttgagttgtgaaggggttgagatgggcagcggttgagctgtgaagggttgagatgggaaggggttgagttgtgaaggggttgagatgtgaaggggttgagttgtgaaggggttgacatgtgaaggggtttagatgggaaggagttgagatgggaaggggttgaaataggaaggggttgagttgtgaaggggttgagattgacaggggttgagacgggaaggggctgagttgtgaaggggttgagatgggaaggggttgagatgggaaggggttgagttgtgaaggggttgaattgtaaaggggtagagatgggaaggggttgagatgggaaggggttgagttgggaaggggttgagatgggaagggattgagttgtgaaggggttaagttgtgaagtggttgagatgggaaggggttctgttgttaaggggttgagttgtgaaggggttgagacaggaaggggttgagttttgaagggaatgagatgggaaggggttgagttgtgatggggccatgatgggaatggggttgagttgtgaaggggttgagttgtgaagtggctgagatgggaagcggttgagatgggaaggggttgagatgagctgggttgagttagggaagggttcagatgaggaggagtttaattgataagggttgacataggaagggcttgagacggatagtggctgaaatggggaggacttgagatggagagaggttgggttgaggaagggttgagatggggtaggactgggttggggaattgttgagatggagtgacaggagggggatgcagttagacctgaccacctgaccccagtgcacccaagctgggtgtgtccagccaacactgtctccacaccaggagcactgtccccagaactgaccactggtctgtcctactccaagagcagaaagagaatttactgaattcctctgttttctttataaatttgggaagggttgcaggttcctcatcacctgatcagcaggcagtaatgctgcctttttagaacagcagtgaggctgagtagtgggatgtgagcacagctgcagagggtctgcaaggaggtccccaggagaggcgggggcagggacagaggggaaagggggacaagccctcttcctcactcacacgccaaccctgcatgccttcattccctccctgctacaggcttcgagagaaaaagaggaagagaaagatggttaaaggagctaaaagcagaagagaagagaaggaggacagtgtggctggggtatgagcggctgaggtggggtcctcagaagggtgccccacgcccacctccttctctgcgcctcagccttctcacctgcaccttcaatgagaagttatgtgcgattaattttaaaggtcttttcatcggtgcc

SEQ ID NO: 3118 - DNA, 1084 bp, Artificial sequence
  DNA replication origin
aacggctcagtctccctcttccccgcaggcagcgccctcggcggagcactggagaagatgcggaaggagaatggggaggcgaggcagaggacagcgagcggcgcgcagaggcgcagcgaggcgcgcaagagcgctgggagaagcgggggaggagctggccaggcgggaggggcggggacgcagccggaaggctggaggttcctggaaggtgaggctggcttgccttcttgatttatgtggccaaagggtagcagccacctctgcaaaggtccagtgaagagtcccctttcccccaagtaatgccgagaagagagaggcaggtgcagccagcgatgcggcggagtctccgcaagagagcgagggcctggcgtggggcgcacacgcacgcgcgtcttgggtccctgcagagaggtgtccccagtgctgtgccctgttcggtgccgggagcggtgccacgggcccgccgccgccctagtaaggtgtcggggcctttgcgcgcctagcgccatggccgcgtcgccgctcctccgcacctcccaggctccacgaacacggccaggcatttccaagtagagggcagaaccctctccccatctccccacttagcacctgggaggccccgtggaggaggctaggacctctgggggttccacactctgctggtggtgctggctcctggcgggagcttctgccctcacggggcggcctcccggttccgctgtaggaaagccctgcccgacgtctcctggaagggccctccatggtgagttatgggctaaaactacccttctcgaaatgcgaacaatcagaaggatcctcccgccccccatcctttactcccaaataagctccacggactttctcaaacccaacccattaatgtagaaaaaaaaaaaaatagaattggtatctgagctgcagaggtgggaaaggtggactccaagccccagggaaagagctcctgtttagccgccaagcccttccccacaggtgactggtggtttgaactgagggcagggaccagctgtcccctcccatgtccacactagctggggcacaccgtcttctgtgttttcctgccttg

SEQ ID NO: 3119 - DNA, 951 bp, Artificial sequence
  DNA replication origin
gccatagtccgcgccctctgtgctttcgtctgcttgtaggcggccgcctgccccgaggccggcacgggggttccttgccggttcctgctctggtccgagtctccatcgccggaccctggcctggcgaccaccgcctccccgaagcgagccatcctgaggtttaaacagacagaagacacacaaaggtgatcgcggccgaacacccgcacacagcaacaagcagaaagacacacggagactcagagccgcatccagacaagcacggggaccaccgcctctggggagctccgcgagctcttcggagaggcagcagcagcagcccgccgctgtgaactgttgaatctaaatgcaacctctgcgaagctccattcctcaagaaggaaaaaaaaaaaaaagaaaaaagaaaaaaaaagcgggtggtagggcttgggggtgcccagtttctggaggaaaatatttttttcaaaatgccagtgtgtggtggtgttcagggaccagagaggagaggggtggagtaggctgctcttcaaacatagctcctcttctggcagacgcaccacctagttcagggagagaggcaggcaccggcccgctaggtaacagtttggtgatttattggttgggggaaggggtgggaaggaggggaaaatgaaaacaaaagaactttaaaaaaaaataaacaaagacgaggacggggttacgatgacatgctttataacgccagcccctgcaagtccatctaagaaattccaccgcgaagacttgggtctttatatctgccagcagagacgcatccaaaggttggagaaagagggagggaggtggggagagcgatattgaggttcctgcgtaaaccgcaatgcccaaaatctcaaaataagaagtcgatccaagcgaaaagggacaaatgacttcaaagctcctgcgcttgggctagaagttgagcagcat

SEQ ID NO: 3120 - DNA, 813 bp, Artificial sequence
  DNA replication origin
ttcagaaggaggttgtcagcagtggggtggggctgggaagaaagccacagtgaggcaacaggtgcaggcatggagaccagagcaagcacagtgtccgtggagaacggcatgcatgtcacggcaaccactggagtgggcgtggagtggagcatggcggagagtgggggtgaacaggcaggcaggagctctaggtctgtgtactgcggtgacacttctggattctactgtgaagacaatagagggccattaagaggcttaaagtgagggggtggtagaatcctggctacatagacctcccagcactcagagccttggaatcttgccatggtggtacatgtgtgtgttgggggtaattagggaggaaggggtgaggctgagctaggatgactagttaggacaccatctttactgtctagaatatactgagggctgtgacctgggctgtgtcagtgggaccagaggaggggacagatacaaaaaatacttaggggtctttaaacttgggggatgagagggaagaatccaagatgaatcccaagtgtaggggagggtggcttttttcaccctggatgaggagcagtctggtatggagaggggatgagggtggctctggctttggcggttgggtgtgtcttttggactgggtgtggtgccctatagaaaggctggagcttgggacaggtctgtgtggacacctcgattcatcactgcatggttggtagttgaaaccatagacatgggtcagattgtcccagtgaaatggcagagaagagggcaaggacagactccaagaggccctgaatcaaatgggta

SEQ ID NO: 3121 - DNA, 1186 bp, Artificial sequence
  DNA replication origin
ggaaagggccccagtcaccctcgcccactgctccctgctcattgaatgactccaccctggaaccctgtgtcagcagtggacctcggtggtcctggcccatgcccaggcctcctaaagagtaagtcataagaagtatccaaaagccttcctatcacatgcttttacctatgaccaagaccaaagactagctctggaattacaacagagggagagtaaagctttatgttctttctcataaaagaaggcccaaaacacttcttatgtattaaagcaaacaaacaccaaaagagctgtgggtctgggatcctgagacatgcccaagtcaactgaagcatgcactggacatgggagattgcactttctgaagtagcagtggcacgttgactatagagaagatgcggaaatggagagggagccatggaagaaagaaaaacagggagggaaaagattttcatgtgaaagagtaaatacagaaaaagtagaggaaaacagcaaggctggaatcctgtggtcacaattcagtgatcacggggcagcaggtgggattaatgcacagagatcatgaggccagagcagggatggggtatggggtcagggcaaggatagggtgtggaattcataatgcagggatgaggtgtggggtcagcgcagggatggggtgtggggtcagggcaaggatagggtgtggaattcataatgcagggatgaggtgtggggtcagggcagggatggggtatggggtcagggcaaggatagggtgtggaattcataatgcagggatgaggtgtggggtcagggcagggatcgggtatggggtcagggcaagggtagggtgtggaattcataatgcagggatgaggtgtggggtcagcgcagggatggggtgtggggtcagggcaaggatagggtgtagaattcataatgcagggatgaggtgtggggtcagggcagggatggggtatggggtcagggcaaggataaggtgtggaattcataatgcagggatgagctgtggggtcagggcagggatggggtatggggtcagggcaaggataaggggtaggatgaatacagggatgggatgtagggtcagggcaggggtggggaagtgcttttttttttggctgtgtttccctttaggacaccattgattaacatttgttgcctaagggaactgtgatgggga

SEQ ID NO: 3122 - DNA, 1436 bp, Artificial sequence
  DNA replication origin
ctatgtctatttctttctacacagacacagtaacaatctgatctctctttcttttccccacatttcccccttttctattggacaaaaccgccatcatcatcatggcccgttctcaatgagctgttgggtacacctcccggatggggtggcggcccggcagaggggctcctcacttcccagatggggcggcggccggacggggcggctggccgggcgggggctgccccccacctccctcccggacggggcggctggccgggcaagggctgccccccacctccctcccggaccgggcggctggccgggcgggggctgccccccacctcctggacggggcagctgccgggcagagacgctcctcacttcccagagggggcggctgccgggctggaggggctcctcacttctcagacggggcagccaggcagagatgctcctcacctcccagacggggtggcggtcgggcagagacactcctcagatcccagatggggtcgcggccaggcagaggcgctcctcacatcccagacggagcagcggggcagaggcgctccccacatctcagacgatgggcagccgggcagagacgctcctcacttcctagatgggatggcggccgggaagaggtgctcctcacttcccagactgggcggccgggcagaggggctcctcacatcccagacgatgggcagccaggcagagacgctcctcacttcccagacggggtggtggccaggcagaggctgcaatctcggcactttgggaggccaaggcaggtggctgggaggtggaggttgtagcgagccgagatcacgccactgcactccagcctgggcaacattgagcactgagtgagcgagactccgtctgcaatcccggcacctcgggaggcccaggtgggcagatcactcggggtcaggagctggataccagcccagccaacagggtgaaaccccgtctccaccaaaaaatacaaaaaccagtcaggcgtggcggcgcgtgcctgcaatcccaggcactcggcaggctgaggcaggagaatcaggcagggaggttgcagtgagccgagatggcggcagtacagtccagcctcggctcggcatcagagggagaccgtggaaagtgggagacgagggagcggcatcagagggagaccgtggaaagtgggagacgaggaagagggagagggagccagtttcattcttctacatgtggcttgccagttatcccagcaccatctgttgaatagggtgtcccttctccacttaaatgtttttgcttagtttgtcaaagatctgttggccgcaagtatttggcttcatttctgggctccctattctgtttcactggtctgtgtgtctatttttatgccagtaccatactattttggtgactatagtcttgtagtgtagtttgaagtcaggtaatgtgatgcc

SEQ ID NO: 3123 - DNA, 796 bp, Artificial sequence
  DNA replication origin
cctctgccccgctgctccgtctgggatgtgaggagcgcctctgcctggccgcgaccccatctgggatctgaggagtgtctctgcccgaccgccaccccgtctgggaggtgaggagcatctctgcctggctgccccgtctgagaagtgaggagcccctccagcccggcagccgccccctctgggaagtgaggagcgtctctgcccggcagctgccccgtccaggaggtggggggcagcccccgcccggccagccgcccggtccgggagggaggtggggggcagcccttgcccggccagccgccccgtccgggagggaggtggggggcagcccccgcccggccagccgccccgtccggccgccgccccatctgggaagtgaggagcccctctgccgggccgccaccccatccgggaggtgtacccaacagctcattgagaacgggccatgatgatgatggcggttttgtccaatagaaaagggggaaatgtggggaaaagaaagagagatcagattgttactgtgtctgtgtagaaagaaatagacataggagactccattttgttcagtactaagaaaaattcttctgccttgggatgctgttaatttataaccttaccctcaaccccgtgctctctgaaacatgtgctgtgtccactcagggttaaatggattaagggcggtgcaagatgtactttgttaaacagatgcttgaaggcagcatgctcgttaagagtcatcaccactccctaatttcaagtacccagggacacaaacactgcggaaggccgcagggtc

SEQ ID NO: 3124 - DNA, 865 bp, Artificial sequence
  DNA replication origin
gcttgtccgctgggggtggggctcaaagctggggcggggatacggagcaaaacttaagaggaagatgagaagcctggttggccaggaggcttatctgtcaggacagggggcggggcctggggggccgtacctttgcttaccgcgagtgggcggggcaggttttaccgccgcggcccatcagcgaagatcgctgagcggcgcccgccttgcgggcctccaggacccggccgccgccatccggtgggaagccgggtggcctgcgggtgaggggggcgaggcggacggagggcaccacaccccccggggggcggggcgggcggagagcaccctacatccgggagccggggcggcgcctggagagcggagcaggcagcgctttctgcccgctgagtgggtcaggcgccgcccccttgtggtctcggcctgcgggcagccctttggagcgcgcgggaaccggacgcccgcccgaggagagaggatccaggagaccactccgggcgggatccgcggagcctggggccgggcggttggcccacattataagagggcctgcgttgcttctacctcaaaggctttagggtgtttgttaattccccgccccccaacctgatgatgctccaggtatttacaggcaggtgccccataggctgtttactgggaagcagaattggtggactccgttcggggatatgaggaaagatccataagcagagagaataaagcctttgcacttacattttacttctcttatccctcacctctaccacctttccccttgacccccaatgggctgcaggtcacatcatcttgtccttgatatattcagaaaatagaagcccctcaaacaacttagaagcagtccccg

SEQ ID NO: 3125 - DNA, 1252 bp, Artificial sequence
  DNA replication origin
cgacaaggcctacacctggtcctccgaccaccggaagcacatccgcacccacacaggcgagaaaccctacccgtgtccagactgcgggaaggccttcgtgcgctcttcggacctgcgcaaacaccagcgcaacatgcacagcaacaataagcccttcccgtgctccgagtgcggcctgaccttcaacaagccgctgtcgctgctgcgccaccagcgcacgcacctgggcgccaagcccttccgctgccccgcctgcgaccgggagttcgctgtggccagccgcatggtggagcaccagcgcgtgcactcgggcgagcggcccttcccctgccccacctgcggcaagtgcttcaccaagtcctccaatctgtccgagcaccagacgctgcacaccggccagaggcctttcaagtgcgctgactgcggcgtggccttcgcgcagccctcgcgcctcgtgcgccaccagcgcatccacactggcgagaggccctttccttgcacgcagtgtggccaggcctttgcccgctcttcgaccctgaagcggcaccaacagatccactccggggagaagggattcctctgtgccgagtgcggcagggccttccgcattgcctctgagttggcccagcacatacgaatgcacaacggagagaggccctaccagtgtgaggactgcggccaggccttcaccaggtccaatcacctccaacgacaccgagccaagcacggcacctgcaagaaggagcccatcccttcctcctctgacgagtgaagatagcatcgtcgacctcactacttggaaccttcccaggtgggcccactcacatggtattgccagcctcactggtcagcctcgcctcccagcaggtcgcgggtcatcagtggtccatttgattatttatttgatcccttgaacagaaagtcaccaccgagagagcacccaggtgggtggtttcacatcagtggttctgagtgtccgaggtcataagcaattggaaaagggaaagacaaagtagtgggagctgatcaaacgttgagttccttgggttggggaacctgaatcaatcagaaactgcttctagaattacatgctgggcactgggccgggctccagggataaggtggggaaaaagactaacctgtcctaccctcaaagccatatgcaaatactgaaaagaaggcctgaggggctggtcctctttagagaaagatgctttttggtttttatataaataaaggaatccccagaagt

SEQ ID NO: 3126 - DNA, 1090 bp, Artificial sequence
  DNA replication origin
tgcgctggtggcgcagcagcgacagcggcttgttgaaggtcaggccgcactcggagcacgggaagggcttattgttgctgtgcatgttgcgctggtgtttgcgcaggtccgaagagcgcacgaaggccttcccgcagtctggacacgggtagggtttctcgcctgtgtgggtgcggatgtgcttccggtggtcggaggaccaggtgtaggccttgtcgcagaaggagcactggtagggccgctcgcccgtgtgcaggcgcctgtgctgctggagtgtgccgcggtgggagtaggccttcccgcatagctcgcacgcgtagcgcttggcggcgccgccgcgcgtctccgcggggctcagcggcttgctgggcttctgaaaggcccgcccgccccgcaggcacctgtagggacgcgcctcagcctctccgccctcgcgccggcccgcctggttctgtactttcctgctgttccgcgcttttgccaggaccgcggcagccaggctggctggggtggccgacgcctgggctggtgtatgtgtctcttgcgtgggaaggtcccagttgctccccggcctggggaaacacaacagagaagagttccctgcggacgtgtctacacttttgtgcgcacagagatactttccattgctggggaagctgggtgggacatccaagactgcgtcctggtttgcccccgagtatccatcatcacccgcaggtagtcggtccccaagaggttgcatctgacctaacaatttgtgtgcgagaccactgggaagggaacccagagctctgcttgctcccggggaaccctgggtctcgttgatctttgtcacatctctgctccaactggctttcccagacatttccactggtttctgccccatgcccccagcactggaggagtcagagaatttctcttcctctttgcccagtggatggggccatggcaagtcaggattttcgtgtgttactggggagctgccccttggacaggccaccgggtcagcggtgccctctttttcggcctccccaccatcttcatcgtcactctctaagttcatgctcagcatctgggtgtcatgagcttc

SEQ ID NO: 3127 - DNA, 1765 bp, Artificial sequence
  DNA replication origin
aagggcggggtgagttgttttgatcttcttttcactacttgcggccgaagcgccgcccctggaggccgttgggccggcctgcgccctggggctcgcagtggtttgtttgcgctgtggatggagtggcggtgcggtcccctgtggagcgcaaacaaggcgcttggttggcgcgggcgcctggctgccttcctcgtggtggggccttcggagcaatcgtcctggttctggcgatggttgagacgcctcgattgcggcgtgtaacggtgagcgttgtttgggcggccggctcccgcctcggggtcccgggggccttccaatgtgaccgaacaatggagagcccgggcctcggcgcagtcagtggagaagccggtccgggcggaggcagcagcagcgcgcagtccctacggcctgcgcccccaccctcccccggaccccccaacccctcggcggcagggtatggccacctccgtgaggccctgagattcggacgggggcccgaggggcagggcgcccactttagggacatttcagtgggaaggggctgctctcaaagtggataattataactccctcgggggcgggaagcggggatcctcccccagccgcaagtccacgaagaaagcaacgaatgaaaattatgaagacaacgagaagtcagactcctccgggtcgcgctccagctgcttcggcttcgtcgcctactctgtgaactccggggagagatctcgagtcaagattaagaccttaacccaccaacctgcctgttcggacaccccccgggccggccgctgtctgtccccttctccatcgccctctcccagaaagctccggtgcttggaccagctagagtctgagaaagaggagaggcgcgaacgccactccaaaaagagaagggttaaagagggcaaccctaacgatacgcttgactttctgtggctggggtgagtgagggggcagggaggacgaccccggagttggtgggagctgcagaaactgctgaaaacttcagaatccatttcccccacgtaaacttggcaccgcagcagcagcagttgatagagtggcactaggctgctggcatgcaactcggctcacggaaaagagcaagagatccgaaactgaggcttaggacaaagtgtgcatgatattggtggtgtaacatgttggagaggacagccgagaaattgggttgtaggttttttttttttgttttccgacagagtctctatctgttacccaggttggagtgcagtggtgcaatctcccggctcactgcaacctctgcctctggggttcaggcgattctcctgtgtcagcctcccgagtagctgggattacaggcgtgcacaaccacgcccggctaatttttgtatttttagtagagacgggagtttcatcgtgttggccaggctggtctcgaactttgtacctcaggtgatctgcccgcttcggtgggttgtagcttttagcgggagctaaagggttctgggatggaggtgggaagtaggatttggccggctgagtcttctagaggcaatattggggtgttggtcttccccaaggggaagggtggtgaggctgagggagaagcagttatgttttcagctgggcaaacatggacggttgcccgtagaaactttgccactgtacttcagaacgttgccctagtcgttggaggagaacaatgtgttccctttctagccaccctggtccacggagggaggagggagagagagaatgtttcctcttcggctgttgtggcttg

SEQ ID NO: 3128 - DNA, 1236 bp, Artificial sequence
  DNA replication origin
ggccattgggcgaggagcccggcgggcgccgctggggtgggggcaagcgaactgggaaagaaagaaagaaagagaaaggggcgtgggggaggggcagggcggcgtgggggaagggagcggagccgggagggctgagggcagaggggcgagttgccgccaggccgggaagcctcggctcgccgcccacccgccagctcgccaggtgccgccccacggcccccaacccggggtcccgaggctcccagcaaagcccgccctggacctctgccctgccgccttcacggggaatagttttacgaggagagctccctggggaaatgcggaaccagggaaaccgaatttagccttttgttgcgagggagcctccgagccccgcttcctgcgggcaggggttagcttgagagggagcgcggggcgcgggacccgagggaactttgggcgggcctgggctagggcgggtgccgcgcgggcctggggacaggccggggttcccaaggcctggaagagccgcccgctccggctctcttgggtctggggaaataaacagaactctgccatttcacatttgaaatcaacgtgctgtttctctaattttacagagaggattctggagggcggtagaaactaagtctggagacctgtctcatactgctggccagaccctaggcaggtctttcagggcccaagtttcctcatctgcaaaataaagtggtcatcgaaaatgacctgtggagccgcccactagatttgaaattctgtgtgcaaactgcccccggagcagctgaaaggaaatcgaggtgttcacttgccccctttgaagtccagggattgtcaagaaattcctttaacgaattctccctgattttgctttatcaagtgcggcttcttgttaatctggaaaatgggaatacatacctctcctctcagcttgccgtgatggttgggaaaatgtgtatgtgaacacaatattgaaatgtacctagagacacaacataggtaggtaggtaggtaggtaggtagatactgctatccgtactattactcgatcattctatttttagtgcctgaaatctacctgatggtgtccagattttattgcttctttcagtttaaagagcaagaatttatgcttccagtgcctttggaagaggaagggaagaagtttgttctggttatgttttgtaccgcaaatgtggaaaagaaatgttgcctgcaaccacacacacataacttggc

SEQ ID NO: 3129 - DNA, 796 bp, Artificial sequence
  DNA replication origin
agcctctgcccagccgccaccctgtctgggaagtgaggagagtctctgcctggccgcccatcgtctgggatgtgaggaacccctctgcctggctgcccagtctggaaagtgaggagcgtctctgccccgccgccatcccatctaggaagtgaggagcgcctcttcccggccgccatcccatctaggaagtgaggagcgcctctgccccgccgccccgtctgggatgtgaggagcacctctgcccggccgcgaccccgtctgggaggtgaggagcgtctctgcccggccgccccgtctgagaagtgaggagcacccccgcccggccagccgccccgtccgggagggaggtgggggggccagccccccacccggccagccgccccgtctgggaggtgaggggcgcctctgcccggccgcccctactgggaagtgaggagcccctctgcccggccaccaccccgtctgggaggtgtacccaacagctcattgagaacgggccatgatgacaatggcggttttgtggaatagaaaagggggaaaggtggggaaaagattgagaaatcggatggttgctgtgtctgtgtagaaagaagtagacatgggagacttttcattttgttgtgtactaagaaaaattcttctgccttgggatcctgttgatctatgaccttacccccaaccctgtgctctctgaaacatgtgctgtgtccactcagggttaaatggattaagggcggtgcaagatgtgctttgttaaacagatgcttgaaggcagcatgctcgttaagagtcatca

SEQ ID NO: 3130 - DNA, 1172 bp, Artificial sequence
  DNA replication origin
tgtttaacaaagcacatcttgcaccgcccttaatccatttaaccctgagtggacacagcacatgtttcagagagcacagggttgggggtaaggtcatagatcaacaggatcccaaggcagaagaatttttcttagtacacaacaaaatgaaaagtctcccatgtctacttctttctacacagacacagcaaccatccgatttctcaatcttttccccacctttcccccttttctattccacaaaaccgccattgtcatcatggcccgttctcaatgagctgttgggtacacctcccagacggggtggtggccgggcagaggggctcctcacttcccagtaggggcggccgggcagaggcgcccctcacctcccagacggggcggctggccgggtggggggctggcccccccacctccctcccggacggggcggctggccgggcgggggtgctcctcacttctcagacggggcggccgggcagagacgctcctcacctcccagacggggtcgcggccgggcagaggtgctcctcacatcccagacggggcggcggggcagaggcgctcctcacttcctagatgggatggcggccgggaagaggcgctcctcacttcctagatgggatggcggcggggcagagacgctcctcactttccagactgggcagccaggcagaggggttcctcacatcccagacgatgggcggccaggcagagactctcctcacttcccagacagggtggcggctgggcagaggctgcaatctcggcactttgggaggccaaggcaggcggctgggaggtggaggttgaggttgtagcgagccgagatcacgccactgcactccagcctgggcaccattgagcactgagtgaacgagactccgtctgcaatcccggcaccttgggaggccgaggctggcggatcactcgtggtcaggagctggagaccagcccggccaacacagcgaaaccccatctccaccaaaaaaatacaaaaaccagtcaggcgtggtggcgcgcgcctgcaatcgcgggcacttaggaggctgaggcaggagaatcaggcagggaggttgcagtgagtcgagatggcagcagcacagtccagcttcggcttggcatcagagggagaccgtggaaagagagggagagggagaccgtggggagag

SEQ ID NO: 3131 - DNA, 1031 bp, Artificial sequence
  DNA replication origin
agggaggtggggggttcagccccccgcccggccagccgccccgtccgggaggtgaggggcgcctctgcccagccgcccctactgggaagtgaggagcccctcagcctggccagccaccccgtccgggagggagatgggggcgtcagcccccccacccggccagctgccccgtccgggagggaggtgggggggtcagccccccgcctggccagccgccccgtccgggagggaggtgggggggtcagccctctgcccggccagccgccccgtctgggaggtgaggggcgcctctgcccggccgcccctactgggaagtgaggagcccctctgcccggccagccgccccgtccgggagggaggtggggggtcagccccctgcccggccagccgccccgtccgggaggtgaggggcgcctctgcccggccgcccctactgggaagtgaggagcccctctgcccggccaccaccccgtctgggaggtgtgcccaacagctcattgagaacgggccaggatgacaatggcggctttgtggaatagaaaggcgggaaaggtggggaaaagattgagaaatcggatggttgccgtgtctgtgtagaaagaagtagacatgggagacttttcattttgttctgcactaagaaaaattcttctgccttgggatcctgttgatctgtgaccttacccccaaccctgtgctctctgaaacatgtgctgtgtccactcagggttaaatggattaagggcggtgcaagatgtgctttgttaaacagatgcttgaaggcagcatgctcgttaagagtcatcaccaatccctaatctcaagtaatcagggacacaaacactgcggaaggccgcagggtcctctgcctaggaaaaccagagacctttgttcacttgtttatctgctggccttccctccactattgtcccatgaccctgccaaatccccctctgtgagaaacacccaagaattatcaataaaaaaataaattaaaaaaaaaaaaaaaaaaaacaaatagtcaataggta

SEQ ID NO: 3132 - DNA, 1304 bp, Artificial sequence
  DNA replication origin
ggccgggcagaggggctcctcacttcccagtaggggcggccgggcagaggcgcccctcacctcccagacggggcggctggccgggcagagggctgacccccccacctccctcccggacggggcggctggccaggcggggggctgacccccccacctccctcccggacggggcagctggccgggtgggggggctgacgcccccatctccctcccggacggggtggctggccaggctgaggggctcctcacttcccagtaggggcggctgggcagaggcgcccctcacctcccggacggggcggctggccgggcggggggctgaaccccccacctccctcccggacggcacggctggccgggcggggggctgacccccccacctccctcccggatggcacggctggccgggtgggggggctgaccccccacctccctcccggatggggcggctggccgggcggggggctgacccccccccacctccctcccggacggggtggctgccgggcggagacgctcctcacttcccagatggggtggctgccgggcggagaggctcctcacttctcagacggggtggttgccaggcagagggtctcctcacttctcagacagggcggccgggcagagacgctcctcacctcccagacggggtctcggccgggcagaggcgctcctcacatcccagatggggcggcggggcagaggcgctccccacatctcagacgatgggcggccgggcagagacgctcctcacttcctagatgtgatggcggctgggaagaggcgctcctcatttcctagatgggatggcggccgggcgcagacgctcctcactttccagactgggcagccaggcagagggtctcctcacatcccagacgatgggcggccaggcagagacactcctcacttcccagacggggtggcggccgggcagaggctgcaatctcggcactttgggaggccaaggcaggcggctgggaggtgtaggttgtagtgagccgagatcacgccactgcactccagcctgggcaccattgagcactgagtgaacgagactccgtctgcaatcccggcacctcgggaggccaaggctggcggatcactcgcggttaggggctggagaccggcccgaccaacacagcgaaaccccgtctccaccaaaaccagtcaggcgtggcggcacgtgcctgcaatcgcaggcactcggcaggctgaggcaggagaatcaggcagggaggttgcagtgagcggggatggcagcagtacagtccagcttcggctccacatgagagggagac

SEQ ID NO: 3133 - DNA, 868 bp, Artificial sequence
  DNA replication origin
gccccgtccgggagggaggtggcggggtcagccccccgcccggccagccgcccggtcccggaagtgaggggcgcctctgcccggccagccgccctgtccgggagggaggtgggggggtcagccccccgcccggccagccgccccgtccgggagggaggtggggggttcagcccccccgcccggccagccgccccgtccgggagggaggtggggggtcagccccccacccggccagccgccccgtccgggaggtgaggggagcttctgcccggccgcgcctactgggaagtgaggagcccctctgcccggccagccgccccgtccaggagggaggtgggggggtcagccccccacccggccagccgccccgtccgggaggtgaggggcgcctctgcccggccgcgcctactgggaagtgaggagcccctctgcccggccaccaccccgtctgggaggtgtacccaacagctcattgagaacgggccatgatgacaatggcggttttgtagaatagaaaggggggaaaggtggggaaaagattgagaaatcggatggttgccgtgtctgtgtagaaagaggtagacatgggagacttttcattttgttctgtactaagaagaattcttctgccttgggatcctgttgataggtgaccttacccccaaccctgtgctctctgaaacatgtgctgtatccactcagggttgaatggattaagggtggtgcaagatgtgctttgttaaacagatgcttgaaggcagcatgctccttaagagtcatcaccactccctaatctcaagtacccagggacacaaacactgcggaaggccgcagggtcctctgcctaggaaaaccagagacctttgtt

SEQ ID NO: 3134 - DNA, 1927 bp, Artificial sequence
  DNA replication origin
ttccgggaccgggcggctggccgggcggggggctgaccccgccacctccctcccggacggggcggctggccgggcagaggggctcctcacttcccagtaggggcggccgggcagaggcgcccctcacctcccagacggggcggctggctgggcggggggctgacccccccacctccctcccggacggggcggctggccgggcagaggggctcctcacttcccagtaggggcggccgggcagaggcgcccctcacctcccggacagggcggctggctgggcggggggctgacccccccacctccctcccggacggggcggctggccgcgcagaggggctcctcacttcccagtaggggcggccgggcagaggcgcccctcacctcccggacggggcggctggccgggcggggggctgacccccccacctccctcccggaggaggtggctgccgggcggagacgctcctcacttcccagacggggtggctgctgggcggaggggctcctcacttctcagacggggcggttgccaggcagagggtctcctcacttctcagacggggcgtccgggcagagacgctcctcacatcccggacggggcggcagggcagaggtgctccccacatcccagacagggcggcggggcagaggtgctccccacatctcagacgatgggcggccgggcagagacgctcctcacttcccagatgtgatggcggccgggaagaggcgctcctcacttcctagatgggatggcggccgggcagagatgctcctcactttccagactgggcagccaggcagaggggctcctcacatcccagacgatgggtggccaggcggagacgctcctcacttcccagacggggtggcggccgggcagaggctgcaatctcggcactttgggaggccaaggcaggcggctgggaggtggaggttgtagcgagccgagatcacgccactgcactccagcctgggcaccattgagcactgagtgaacgagactccgtctgcaatctcggcacctcgggaggccgaggctggcggatcactcgcggttaggagctggagaccagcccggccaacacagcgaatccccgtcaccaccaaaaaaatacgaaaaccagtcaggcgtggtggcgcgcgcctgcaatcgcaggcactcggcaagctgaggcaggagaatcaggcagggaggttgcagtgagccgagatggcagcagtaccgtccagctttggctcggcatcagagggagaccgtggaaagagagggagagggagagggacagggacagggacagggacagggagagggagagggactcatgtttttaactacttttttatgtagttaaaagctgaaagatggtaggatttgctaagaaggaacctgaatggtaaggcagagatgaaaattatcaaactgtaacaatcaggggacacaattaattacataaagtcgcttaatggaatatgctaaggaaaacttattcctcaattaaagtggcattgtgcaataacagagactgatcaacctctttcagcagaatcctggaaaactatgtaaacacccacaggccttggaagatgttagtgtcaatctactgggaagatgacccctgaagaccctgtaatcctcatcattctgtgattcaaagggaaaagcaatatggccatgtgagtcagtacaaagagcatgggatttggaatgagaagacctgaacttcagtcctggcttggctatccactcactttgtgacctcaaagaagttgaatgaacatgtattgagcctatgtcttgcagcaagtactgacttaggatttgaggaaataagatcaccagacttgggacatgtcctgaagtgggtcattgactcatggagcaccgagaattgtagacaatttcctcacattttccttatatata

SEQ ID NO: 3135 - DNA, 886 bp, Artificial sequence
  DNA replication origin
cagagccctgcgcaagagaaggaaaattaagacgcagcggagcccaggaggtgcccgcacgcgggaaggactggcgtgcagacgaggcagggggaggtttgcactcggcgtggcgcgggtgagccgcgtgctctcgggcacccggccgccagttcggatgcttccgatcctcggggagccggggcgctgcgccggagtcacttcagcccatgttgttcaggtgacacccggggaagagcagactccagtgtgcaaaacgtttcggggtttccgggccagcggttccgggcgcgcctcgcgggcggcggcgcagaactacaacccccaggctccctggcgtggcggcacgtgggcccgagccgggcggccgcggatataaagcgcggcggcggctgccgggcggagcggctgcacggacaagagcggaggcctgggtgagcgcggcccgcgacggcacgggctaggacagacggacgcagacggcccgacgacctgggcgttcgggcggaggggcgctggggcctgactcgcgggtgggtgagacgttgacggacccggaggaaagagggaaggcagatacgctgggaaacggatctggggaaggtgtgaatgcgaaaagtgtagggacagacgggggcagaagaacttactcccccggattgtttgcagacagcatatctgccgggtctccaaaggtcctttcctcaaaatagagttagcaattgagcagaagagagcttaaagttaaacctgatacatccccccttcacttgaggagaaattggtggttttctgcttttttaaaaatccctatttgtatctcctcttctccgagtacctgtccctcaagatattctctgcccagaggtacattctgccctcactt

SEQ ID NO: 3136 - DNA, 1011 bp, Artificial sequence
  DNA replication origin
ccagaggaggaagcgcgctttgcctgctagaggcagcagcgggaaacgctgggcggaggagaggggagggggccacaggctgcccggacggcgcaagcgcatcgcggcgaggcgcgcacgcaacccgcaatccggggacccgcgggcggctcgtcccttcccccacccccagccgccgccgccgcccgcgcttcgcaacaaagccggctgcggagccatggtccacggcgcccgcccgcgaccccgccgccccgcatggtagccggaacgtctctcccttaccagccttcgcttcctggtgcccagctcttaggaccgtgtgtgactctggccttctaccgagacaacagagaaacgcacagcaactcgcatggaggaatcggcgaaatggctccgaccgcggcgctagggggcggggccagcgagcgtacgcatgcgcagagcgcgtgccagggcgggggatggcgagggcgcgccaatggagggggcggggctcagcaacctcgcggcgcggaagggtttcgttgctagggagatgggctgagccgggcgggcatcgcgccagacctgctactctggataatccactctcctggataatccactaccctggataatcggctgcccgcttttgcgcatgttagggagttgacggcctgtagcattctgatgcagcaaaatatttcgcagggtctgtcatagggatctccggtgagaggaggttcccttcgaaggcagaactggaaaccttgctgctaacttggtagggttgttgagataattacatgagatggcatatgaagggcggcttagttcaatacctggcatgtagtaggtgttcagtgggcgtagttaccggattgattcagatagtctgaacgccagtgtctcttgaaagaaataaactggccgggcgtggtgactgtaatcccagcactttgggaggccgaggtgggcgaatcacttggggtcaggagtttgagaccagcctggccagcgtggtgaaacccc

SEQ ID NO: 3137 - DNA, 1643 bp, Artificial sequence
  DNA replication origin
gcgaggaccgcgctgctcgccgaccactgcccccgcgcgccgcctccgcgcttccctcacctaccccgggagcagcctgcactccgcgccgacccccgacttccgagcgcgtgcccgagtgcgcgcccccggggaggaaggagcagggggtggggtcggcagggtggggtggggtctgggcgaggagaaagcccaaccctgtctcctctcagcaactcccgcggcccctggggcaactccccggcccaccgcgccccatggactgcgcgtccgccccggcgactccaggaggcggcgggggcgggagcagcggcgtctcgcgctcgggcccgcggcgcgcgacccggggggaggggcgcgcgaggtgggcggggagccgggggagggggttgggggaggggaggggagaggaggggagaggaggggaggggagaggagaggaggggaggggagggcggctgggtggtgcatgccgggagggaagggcggcctcgcagacccgctccccgcgcgggagtcgctggggtccttgggctccgcggcctgggagactccggattgcgggaggagtcgggggagggcgccttagaggggcgatgccgggtcaggaggtcgctcggggtcgtccctggggcctcgcgccaatttgggctgcggcaagagggtccccgcccggccaggtgtgggtccgaaccgggagcgcccgctgctgcccggggccccgctccagcccctcccgaacagaggtcccggggcgttcatggggccgacacggtccctggagaatcagaagggcctggtcgcagcagccagatgagtttcgtgaagcgatttcctgccgctgatttaaagtgtaaccagtcgttttaccggggcaaggaaggaagtgaaaaggctgggaatggaatgaatttttcccttgggtacgcacgacccactgcgaaattcttccactgtgttgtttgtgttcctcggcttgcctttaaaagactcgaaattatgtggattctgacatcctccttttcgggcctgctgagtcacggaatattctcagtgccagaatgactcagttcacagaacctgagccagaagatcatgagttttagtcccggagcagaacctgggcgcttacccagtgctggatacggcaagcagagaccagggcagggaggcagcagcttgaaacccttggcgtccccaagcagagaggatgcacatagtgaatgacacggatttgttttgttctagcttttcaggaatttaatgataaagtgcggataataagtacaccgcaaaaacaaaacaaaaaaacacatgcataatttcggacccagttgtcccattaagataggcgtaatgggaatctgaaacaaggaaataagtatatgttaggtgactctggatagttagggttagttagacgcagactgctgattaggaaaaccttaaggataatgttctggtaggatgaagaagggaggggaatctagggtcttgttacacggctgagcttacttagcaagttatgttcatcactgttccgtttatttgatgagatgggtggagattatgcatggctaaaggtgcctcattcttggcaccttctctttgggagaattaagttgtggggactaataattttt

SEQ ID NO: 3138 - DNA, 1133 bp, Artificial sequence
  DNA replication origin
cccaccctgccgaccccaccccctgctccttcctccccgggggcgcgcactcgggcacgcgctcggaagtcgggggtcggcgcggagtgcaggctgctcccggggtaggtgagggaagcgcggaggcggcgcgcgggggcagtggtcggcgagcagcgcggtcctcgctaggggcgcccacccgtcagtctctccggcgcgagccgccgccaccgcccgcgccggagtcaggcccctgggcccccaggctcaagcagcgaagcggcctccgggggacgccgctaggcgagaggaacgcgccggtgcccttgccttcgccgtgacccagcgtgcgggcggcgggatgagagggagccatcgggccgcgccggccctgcggccccgggggcggctctggcccgtgctggccgtgctggcggcggccgccgcggcgggctgtgcccaggcagccatggacgagtgcacggacgagggcgggcggccgcagcgctgcatgcccgagttcgtcaacgccgccttcaacgtgactgtggtggccaccaacacgtgtgggactccgcccgaggaatactgtgtgcagaccggggtgaccggggtcaccaagtcctgtcacctgtgcgacgccgggcagccccacctgcagcacggggcagccttcctgaccgactacaacaaccaggccgacaccacctggtggcaaagccagaccatgctggccggggtgcagtaccccagctccatcaacctcacgctgcacctgggtaagcggtgacagccccgtcccctgctactgctcgccagcagcccagctcccggaccggctccgtcccagtggccggcctcacgggcgcagacggccgcgtgtttgctctctgttccccggcatgggccacacagaaactcctttctccaacttcttaaatagatactgcttttaacatcccgtgagggccaggatgttccgcacgagtctctctgctttcctgttctttctgacttaacgggattctggctctctgattattctgcatttcggctgttaggattgtgatttcccccttttttttctgaagcgttaatcagaaactcccatccccacttttctctttgctagcaaggtcatcacagcgcat

SEQ ID NO: 3139 - DNA, 972 bp, Artificial sequence
  DNA replication origin
aggtgggggatgggaggggactagagatgagtatcatttggggctgggcaggggttcgagataccagaactggagtgtggcggtgcggtggttcggctaccaggctggcgaagaccgggatgggggcagaggttggggcgccgagtaggggaggaaggggctggagataacgtgctgtttgtttaggatgggccgaaagctcgaaggagttaaatcatgtatgtgcctgggattcgcaaacacactcgcgcccgacacaccggtgacaggggctggggcttcaagattaatttcggatttggctggtgattctgggcggcccagggaccagtgtttgggaattgtgggccgtgtattgcccgcgcgaggtggatgctgagtgaatagggagggggcccttttccgcctaggttcggcctcagggacccgctgcctaggacggggagggggccgggcggaggctgcgggaggccctgcgcgagccggagccgaaggatcggggcccaagttggctgaggctctgcccagggtggcgatggcactcggaaggcttgaggcgtctagtgtgtgtacgaatgtgcgaatgactgtgtgtgagtatatgcgtgtgcgtgttggggggaggggacttatcgcgcgtttgtttcttagaagctttggggcgtggagtcagagagagcgagcgggggcatccggctggctggttcggggtccagcagcggtaggggaaaggtgatcgatagatgcctattggaggtctcgcgccaccggtgggaagccacgcggcttcgcagctgctcgtaggactcaaaggcgtggggcatgagcgtttagacacggaaagagggacgcggaggtcactttagaagcaggaattgagaagttagaagttgggggtgctttttcttgaaactgagagaagcgaggagtagggaaaagcgagtgggctgggatggatgagagagcgtgtgg

SEQ ID NO: 3140 - DNA, 834 bp, Artificial sequence
  DNA replication origin
tttgcgtctggagcggctccttggagtccacagcatccaccgccggagcctcgccttcctttctccctctgcagacacaacgagacacaaaaagagaggcaacccctagaccaccgcgaaggacccatctgcaccatgaccgagaccaccaagacccacgttatcttgctcgcctgcggcagcttcaatcccatcaccaaagggcacattcagatgtttggtgagtcctcccgcccacctctggaagccgcttccgctcctctcctttcccaggcacctgtgttttccagggcgatcgaacgggaaggcgtgtgccccttcggaggggtgggccggctcatccagctggtggaggtcggccccttcattttggactcaggggagggtacgcagactgcgtttccgaggcgtcacttgccggggccagacccggctcgcagggggccaaaggtgggggatgggaggggactagagatgagtatcatttggggctgggcaggggttcgagataccagaactggagtgtggcggtgcggtggttcggctaccaggctggcgaagaccgggatgggggcagaggttggggcgccgagtaggggaggaaggggctggagataacgtgctgtttgtttaggatgggccgaaagctcgaaggagttaaatcatgtatgtgcctgggattcgcaaacacactcgcgcccgacacaccggtgacaggggctggggcttcaagattaatttcggatttggctggtgattctgggcggcccagggaccagtgtttgggaattgtgggccgtgtattgcccgcgcgaggtggatgctgagtgaata

SEQ ID NO: 3141 - DNA, 1177 bp, Artificial sequence
  DNA replication origin
gcttaaatgatagaaaaccacgtgttagccttctaggatgtgttcccaccctcaccctggcctcctcgcggcaggctcgcgacagctaggtcaggagggagtacgcgggtggggtggatttgggggaggggtcgactcgccagaagtcggctatccccgtcggcagggaaggcatcgcggctgtcgtgtgccgctctcctccctcagggaccccgtccaggcgggatcccgcctcccagagcccaaggcagttgtggggaaaccccttgcccttcctcgccgcttggcgctgtcgcctcgccctcccgactccagcccgccgcccgccagcctccaggccatgcatcctcttcgcaggcccagccctctccacgcccggctctgagaggaaactacggaggtggttcccgctcgcaggcgggtggaaaagcccatggtgaatgcctcggggtgtccccccagttgctgtgggaagtgggaagggaggaggaagtggacttcaccaccggggagaactatatcgattcctaacttgggggaggcctttagatggaagggaagccaacggggaaccctgggtggtttcctgggaatccattggccaaggggagggtgaccctgtccgcacacatcggttactatgacaatataaccacagcctccagttgccatggcagctgcctatccaatccgattgtcttctcttcctctccgggccccaccttatcccctccaagagtctcccagcgtgcatggggaggggctgcagcgaagaggagagggggtccttcgagtcactctctacgcgcgagggaagacaggcgttgagggactgctgggaggaactgtaggaggaaggggcggcgtttccggtggggaagagtggaggcgtgcaaaaaggaagagggaaatcggcaggagtgataagaagggggaagactttgagtgtaactcccgttcttttggcctgggtgttcccggtggtgggattgggattgcccccttgcgcgggaggagaagggtggattggcaggaagccgccaagcgccaccagccggtctctcagaagccgcacaggcgccacacagctcgttgatcccaaaagggagcgctacagagaggcggaaatcactgagggacaggcgctgctgaaatctcgcgagagggaccccctccc

SEQ ID NO: 3142 - DNA, 1574 bp, Artificial sequence
  DNA replication origin
agcagctttccccactccctccccctcgcctcattcacccccacccccctgccgagcgaggaggagccggaggagaggaagatggcggcggccgccagcacccgcggtgccgcggggccgctccgaggagcctgagagacccacggaggcttcgcgggaagacgcggcggcggcggcggaggatgagcctgcagagcgcgcagtacctccggtgagtgccgaggccgggctggtacgtagggggagcgggccgcaggttggggcatggagcaacagacaccgaggtaagtccggggtggcgggggagttgctgcgtcctctcctcgccgggcaggtcggcggagactgcaaggggatctgcgggagggggcggaacgggtatgggtgcctagcccctaccgcccgggctgagctctggcgaagccggctcgtcccggtgcgaggagggaggttggggaagcgtgagaatgtgcgcgcgcgcccttggtctcgggtttgctagcgaggggtggagagaaacgtccggggaggcggcggcgaccccgagtggaggtgggtgtggaggagtctgatccccgtggcaggggactcgtggtgtggcgtgggattggttggagcgatgcatgagtagaggacggggaggaagtctgcacacctggggtgttggggcgggggaaccgcggagggcagacagggggagagggagaccgcaggaaactggagcttgttcttcattctcgggttgggagtattgaggaataatgtcatctgtagttagttggcggtgtggggaggcgtgaaggggaatagatggggaagtgaggaaagagggaggcactgtggacaaggttgggtttttcagaagaaactgggttagaatcagtgtagtcggaagataccattctgagagtcgtgtgtattcattaagagtggtgtaaggaacttgtatgtcagaggtagagtgacacatgggaatagtgtgtgtgtgtgcgagatgtgtgtctggggtggggggcgcggcgattgatgcacatttcaggatgaagatgtagataggttgaacttagtacctgatggcgagaacatattgaatggaaggacaccagcttttgtgtcagctgaaaggttccatggaagctgagtaagagcttggaggcagaggtaaagtgggtcaaaaatcttgatagagaaaagtaaggttgttagatcctgaaattaactggggagtgactactgcttagaaaaggggaagactttaaaattggtcctttttgtctttcaggagcagaactaagaaagggaggccttatggaaagatgttttttaaaaaattgtttcataccttgcggaggagggagttggatgaggtggaagtctgaaatgagtggaaaagtcactttagctgtttagtgacatgaaagtattgacgtgtgtggatccctatatgtatattgcaagaggtgtgtagttacctgatacatagggtggccattataatttttaaagtagtaaagttttattaagcataatagggagagaagagaatgatgagatatttgaacaatgcttgaatg

SEQ ID NO: 3143 - DNA, 1267 bp, Artificial sequence
  DNA replication origin
tgcaaggatattgccgcaggcaggagtccacctcgccctcgtcgggcccggcctggccgtcgcccccatcttcttcgtccacgaacttgttctcgtcatattcatccacgtccaccttccggaagcgggccgacgacactgtgttcttcgacatcccaatcccgaccagcggcaaaggcctcttcttggcgctgcctctacctcagcaagcccagcccagcaacccactacccggcgcctgattcacttccctcttccgctctgaggcgtcgccgactgccgcggctcggaccgttctgggcctgcgcgctagccccgtttcttcctcctcaggttcgcgctcccttggcgcctcccacgctgcccctgctcttccacggagagcgcgcgcgagggaaggagcgcgcaggacacagcgcgcaggcgcgggctctccgcaggcaaggggcggggctgggcgaaggaggcgggggcgagagggagggccaaaagctggaccgcgggcagaggtaagaagcgattggtcgtccgattgcgtcacgtgattctcggtgggggggttcccatagaaacgcttttctgcggtccagtctagggggtctcagattggcggggatgggcagcagcggcaggtggccttggcttttgctgcagccgtcaacgacctatcatcggggtcctgcgtaaggtccggctggctgggacttggctgtgggtgggatggactggctgccggaccgagtgccctgcagttggtaggagtatgaggcagagtgatgcacacccgggcgcccagcatcgttctaattgccggagacattgcctcagactgtgcgctgctagaggctgcgttcctgagcaggaagcccgtttcctgggattggaactacccttcttggccagcgggaagtccccaaggacggagtcgaaaggtcaaatcttatctgtcagtgctgtgtgacagcatcgcaacgggatctgcagaacctgaactcggtatcaaatctattgggagggaggggaacgtgtccgggcaggcgctggggtcgggtggcaaaactggggtgaatttgtagaatttgggaaagggtcattgacatcttaaaataggtggtcgtttggagcaagaatgctcgaaaggggtgagggtaggttaggctctctagtgctgggggaaaacaaaatgtggaaggattggtggaaaccagacctttaagatttatattatgatttgagatttatatgattccatctaggccagatttaa

SEQ ID NO: 3144 - DNA, 1098 bp, Artificial sequence
  DNA replication origin
gagataatttcttgcttagtttgtggaggtgggagggactggaggagggatatgccatcggttgtgagccctcgggtttgcggggtaagagctaggcctagataggtgactgggggggtgcttatttgtgctttcttaggggagacctgatgcccccattctgccaagaagtttaaaagagagatggtatggacattgcagtctctttgagagggtctacataggtgtagatcatcaacatactgaaggagagtggatggttttagggataaggtacagaggtcacgagccagggcctgcccaaaaaggtgggggctgtctctgaaaccttgagttagtatgcaccaggtaagctgatgtgaaaggtgggtgtcggggttttcccatgtaaagacaaagaggttttgggaatcagggtgtaaaggaattgtgaaaacagcatcctgtaggtctagaacagaaaaacaggtggtgttggagggaattgcagaaagtaaagtatatggtttaggaactactggacatactaggggtatggcttggttaatgagcctgaggtcctggactaagcaataagttccatctggctttttgacaggtagaattgatgtgttaaaaggggagtctgttgggcagagtaggtgactgacaaggaggtgagaaatgataggctttaggcctatgagagctgcttgggggatgggatactgcttctgtgataggaactgggtggggactttaagagtaacgtggacaggggtgtggtgttttgtgattgagggtgtggaagtatcccaaacagtggggttaactatggatgggggataaggaaaggttgcatgttttaaggtgggaggttggaggagtagaagaaagttagaagccccagaggggtctgggttgatgcgttgggtactatggggaatgtggaagtggagagtagtgtggagttttgaaaggatgtctctacttaggagcagagttgggcatgagggcaggactaagaaagagtgagtgaaggaaaaggtgtgcagggagcagaaaagtggagaggtggctcggggtttggagacttgtccatcaattcccacaacagag

SEQ ID NO: 3145 - DNA, 1025 bp, Artificial sequence
  DNA replication origin
agagggtgctgatggggagaaccggaccgctggagctctggagggtagcctgcgaattggggctttgtcccacaaggggcatgggggacacccctcaaggggactttcagttccctcgcttttaactctcgaggtttcctctttccccacctcatactgctagccctgacgtgaggggatagggtgcctgtcgccgtattcccatgtagatacgacagatggaacgtaactgcggttggccaggggctccgcagtggctggggcgccgcagtgcgctgctctgactttccggtgccgggctcctgctccaggctggaaatgtgctcctagctctcctagggggacctggacctaggggtggagattgggcggagcccgcggagtgtgcccaaccatggcaccaccgtgggcctggtctcctgcgagcgctccgggctgtccctgccggtgcatcggggttccacgtcccggggagagacgaagatgccctgggaaagataaacagccaagttttgtccccggaggaaagaagcttggacctggtccctgtgtctgctgcggggagggccaggggataagtgcgggtgcctgcccgccccaccttgtagaacttggtcgtctcgcaccttttataaacgcgaggatccgagggcgagaagttagttggtggccaggttagccgctgagtgggttgtggaggacaaggaggtggatgctggccaggggagatgtgctgtcaggtaggtactcggacaagaagactctggccccctgaggaagacagagcccaggtcactctggagcaatttctgtcttgtgttgataaagggagctgttctcaggcgagacacatccttaaagcagcggttgggcaaagagaggaagaggagtaaaagcagcagctagaattggcagcctcagagtacctggtgggagaggtgcaaaggtgcgaaagcaaacatgtgatatagtacagctctgtgctgtacactgctttactatataccctgccatacgtgaccgcc

SEQ ID NO: 3146 - DNA, 741 bp, Artificial sequence
  DNA replication origin
cgctcgcgccaggacttccccgccgcccgcctcggcccggaacatggctgcgcgccctgctgccaccctcgcctggtcgctactgctcctctcctcagccctgctccgcgaaggctgccgagcgcgcttcgtcgccgagcgggactcggaggacgacggagaggagccggtggttttcccggagtcgcccctgcagagccccacggtgctcgtggcggtcctcgcccgcaacgcggcgcacacgctgccgcacttcctcggctgcctggagcggctggactaccccaagagcaggatggccatctggtgagcgcgcacgggccccgggccgccgcggcgggacgcgggggcggcctgcccagcgcggacagcgcccggagcagcagctgcagggcgagggagccgctggaggggcgggggggcacgcggaaaatctggcgcacacaccccctcgctgcccgcgccggtggctggcggatcgggcggtcaggctgcggagggacgcgcgggtcagtgtgcgcagagggtgctgatggggagaaccggaccgctggagctctggagggtagcctgcgaattggggctttgtcccacaaggggcatgggggacacccctcaaggggactttcagttccctcgcttttaactctcgaggtttcctctttccccacctcatactgctagccctgacgtgaggggatagggtgcctgtcgccgtattcccatgtagatacgacagat

SEQ ID NO: 3147 - DNA, 1001 bp, Artificial sequence
  DNA replication origin
gctcttggggtagtccagccgctccaggcagccgaggaagtgcggcagcgtgtgcgccgcgttgcgggcgaggaccgccacgagcaccgtggggctctgcaggggcgactccgggaaaaccaccggctcctctccgtcgtcctccgagtcccgctcggcgacgaagcgcgctcggcagccttcgcggagcagggctgaggagaggagcagtagcgaccaggcgagggtggcagcagggcgcgcagccatgttccgggccgaggcgggcggcggggaagtcctggcgcgagcgcccggctgggctgcctgagggcggcggcggctgccggggagcaaggggctgcgaggggcggccgggggatgcggcttgccgcggccggccggctcacacactggcctcggcggctgcggttcccaggaccctcccgccgccgctgcaccgcccaggccccagtgcgggtgcgcagcgtacctgcagccgctggcgctcccctgcgcctcgggctcgcagacagtagtggccgaggggctgtgtgccctgagtcctgaggaaagttcctctagtccaggttccgctcgtacagctgaggtctgtggccttccctagagccgcgagttgtggccctgtctgccaatgagcctgtgagtgtgtgtgtgtgtgtgtgtgtgtgtgtgtgtgtgtgtacataacggtacaaccccaagaaaatttattctgcttttgcaaaccgcagactgaagcccttcacagtgatgcaatgtatccagttttcataatgcacctattgactgagtagagttctaaaatgaaaagtctccccaactattcacgattatgacaaacacttgtttaaccaccgcaaaggcagcatgtcgcattttcttatatactcaacttctgaaattcattcttgactgagtagacacctaataacacaaagtttgaagacttggagaattttggagccagatcagaccccgcaaaataaaagaaagccctt

SEQ ID NO: 3148 - DNA, 1681 bp, Artificial sequence
  DNA replication origin
gagccatgtgtggctagtggtttgcataacggacagtgcagaatagaacatttccatcatgtggaaagttctgttggagagtgctggtctacattctggttcttcctctccaatcccaccgtgatcgctcacctagattcttgtgagagcctctgaactgacagtagtttccttccacgctagtccattctccacattgccttatttgtttagttcatttattcatgcagcaagtatttaaggaggaccttctatatgccagcatggtgctaggcacagaggaaggaacagagtatgagttagacctagtcctgacacaatgtactcacagtccacagacgatgtgtgtagcactcccatgtttaaaaaccagtactggatcccccttaccaacgtcccttacagtgttcccaggaccctgggctgtgctctgtgggatgcagcccagagtcaactctgctttctcaggagggggtcagccaaaacaactgtttctgtatgtggggtggggggtgtatggggggtgtgtgtgtgtgtgatgaggtgaggtgtgtgtgaggggagattgtgtgtggtcaggtgtgaggtgtggggtacgtggtggattgttcggggtgtggtggtagggtgtgtctctgtgtgtgtgtatgtggtggggtgtgtgacggggtgtgtgtgtatggcaggatttgaggggtgtgtggtgggatgtgtggaggggtatgtggtggtatgtgtggggtgtgtggggggtggggtatgtgtggtggggagagagtgtgtgtgaggtagatgtagaatatatgtggtgaggtatatgtgggaggtgtgtggggggtatgtggtgtatgtggtagggtgtgtgtgtgcagtggtgtggggagtgtggtggtgtgaaggggtgtgctggtgtgtggggttgtgtcgggggtggggtatggagtagggtgcgtgagatgtgtgtatgtggtggagggtatgtgtttggtggcgggatgtgtaagtggtggggtgtgaaatggggtgtgtgtatctctgtgtgtggtgggttgtggggtggaatgggggggtgcatggtatgtgtgtgtggtggggtgtgtggtgtctgtgtgtgtgtgtgtgtgtgtatctgtgttggcagtagggctgccacccatgggttgaggttgtgccttctggcacttgagtttggatgcatggagggcgatggcctggtgccctacagtttcagtttcactcttccccatcacctctcccacggttctgtacccggtcctccacccaccacctcaccaccttccctgttctctgcatacccagtcacacttcagtgcttttgcacaggcctgtcccctagtgggctttcctttctcaacggcttaacctgatgaatgcacttatccttcaaaactcacttcaaatatcactttctgtgaatcttttccagcaacccagaggggcgaccttttctctgtatgtccacagaaatctgttattagatctagtagaacacctgtcaggtttaccctaaaccccatttatgtaggcctccctccagtagagtgtagttcctccaagtgaagaattcatttatcatcatagccccagtgcatgaaatagaagaggtccctaataaatgattttggatgaatgataaatggacagcaaatggatgaacaaa

SEQ ID NO: 3149 - DNA, 1009 bp, Artificial sequence
  DNA replication origin
agctcccgcgcgcgcctggctctcctccccggggcggggcctgcggaggccgccggggcgcagcgcgctggggagcgggttgggggctgctagggctgcggggcgggaaggaggcggcagtgtgtgtgtgtgtgtgtgtgtgtgtgtgtgggcaggtgtgtgtgtgtgtgtacgtgtgtgcgcgcgcgccctgcagcggccggccagccggagggaagaccccggcgggaagactgcgtcccgtccggccttcccgggcctgtcacttgggcggtggcgtgggagcggcgaggctgctcggggggcagccgggtgggcccagctctaggggagattcgggtcagcccctgagcccagcctcccggctgtgcctgctggaagcagacggagggaaggccgggcgtctttggcccaccgcgcggccgctcccctcccgggccaggctgaacgggcgggcgcagcccagaggcccgggctctgccaccgatccgcctccatactgacccgagctgcggcgcctgcaagattaatgaagcatccgcgattcggtagaggcggcacggggaggaaagacacaagatcgtgctgcccccctctccccacccttctcagcctcctaggacctaaaggcgtaggctgcgtctgctgggcgcgtccggagtggtccagagagatcgccatccaccactgcatccgtccagttctttgtggaccctcacagaagctcaatcaatttcccaccctctggaaaagggtatttttctcttccctggcatattgggtgtttcttgtgtgcacctaattgatctttttccattgatagcctttggatgtcttttgtgcggcttccccgcgcttcactgctccctcattgccttagacacgcgaggaatgtcaggcccccagagtgagaacacccaagaaaacaataggggcaaaagatcctccctgggcctcgcggattatgcacaaaccagatcatttcccacattcggccagggtgaagatg

SEQ ID NO: 3150 - DNA, 1563 bp, Artificial sequence
  DNA replication origin
cccactcccggggggacgttccgtgccgcggccgccgcggccgctgcttctttcacactttagttgggagctgcgcgccgcgctcagttactggagagctggccgcgcgccgccgcctcccgcacgcttgcacgcgggcccggcttcggggttttgggttcttactccaagcggcggggaggagggggagccccggacacactgtggggaggaggaggaagaagaggaggagggaggaagaaaaaagacgaggaggacaggggcggggggcgggaggcttgccaccttcagcccccccgcgaacgcccaaggtaagtgtgagccattgcctgctctggggcggggggagctggcggtgcagcccgccccggctcggctacccgggcatccccgggtgggcagggagggaggcctgcggggtgtctgccgcacggaagggatgggagccgcggtcgtggcgctgcctgcgcggggcccgggccggggctgctgctggtgcggggctggcggggttgctgccagggacggaagctggggtgggggagccgcgaggggcgtctgccggcctgggcggaggggctgggatgtggtcggggctgctgacgactttcgtcacatcgaggcctgggtggctggtgttagacacccctcccttcccacccgcaccctgccgccctcagccttcctgctctcctctagctttgcatgtagccaccgtactttgcaagccagagcttgaaaggaaaaacacaatttaggatcctttgctaagtatccaagtcccttctctcgctccgactgattgatgtgtttgtgtgggtggtttgacccccgggatttctgaagttttgacctttttggggtggctcgtttcgttgcatctgtttgcccacctcggtgtatttattattcgtgcccatgcgaggcagccagagggtgcttggttattgtacacgaaacagatttcactctcctctgcaggcagttcgcgaagtgccgccgccgcggctgcctttggtctgctggttaatgtcctttccctatcatccaccctgctccctccctctacggagggttagtttttgtttttgtttttgttttttcctttccacttactgtttgtgtgagagaagtcctgggcttaagggctctcagcactcgttcatttctcttctaaagctctgaatggctcaggcatgtcggtaaaatttggggtggtcctctttgctccaagagttgcatggccaaagataaaaatatgcacacataaacacgcattaattctgagagacggcaagcagtttgagagagaaataatttgttttcaataggaagtcggtgacctatgggatctcttccattgccggtgggttaggaaaattgttttaaaatagatagtgcttgtgttgtccgtggctggaagacagccatagttcagttactgaagcaattctgaaagtgatacaccctgggcacccagaacctcagtaaagacacacgtagtctgactcagatgttaggaaggggactgacacaccatagattccatggagtatttttttc

SEQ ID NO: 3151 - DNA, 835 bp, Artificial sequence
  DNA replication origin
cagctttccggtgtcgtagtctaggaaaccgcctccccaacgttacttccgggtagggccgaagccgtagagcctcaggaccaatggagacctcatgggagaggggctgtctccggcgactggagagggcattggccaggagaagtgagacgtggacaaaaggcgggactgggaagggatctctcgcttcgacccgcctccgacccgcggagttgccccctgaggactaccagtcccagtgtgcactgcttcttccccggctctcccgcgagccgactcggagccgtgtctctcgcttctacccggggtaggcgcgctgcaccctgggacttgcggtcctccgaggtcgccagtggttgctgggatcccacctccccctttcctcggcgccctacagtcaaccctgtctcggtgggctgcggagtcccgggaaacccgtcagctgtttatctctcttcctcagaaagttgtttcccagagagctggctgaatgaggcgcactgtccccatgtcagtgctgctgcgttagggaatagtgttggagtagtcgtctaccctcagggaaattccaaaacacagtaacagcaaaatgaattgagcctttgaaggcattgcgctaaggtttttactcgcaatcatctcatgcactcttctcaactctgatagagtaagtaccaccatcccccttttgcagacgagaaaacagaggcttagaaaagttggttaacaagagctcgtcacactgctgtattagaatccatccagcctctgattcggaagcccttgcatttaaccaccgcgcagtactacaaggatgaaggagcacgtgggtcct

SEQ ID NO: 3152 - DNA, 950 bp, Artificial sequence
  DNA replication origin
ctgataccagagtcttgctccggccgcggccagcggagccctgggctggggcaggagccggtgagtggggcgggcggggaggcgaaggacgcggaagcagcgggccgggacacgcgtctactcggcagcgttgcaggcgactgacgggggccccggagtgtggggggggtgtgtgtccgcgggggtgtgaagggacatggcgccgccgccgcccccggccgctctcgcggcggagacggcgggtgaagcgggttctcattgttcccgtgtcttcgagggtcgtgggagggaagggagctggtttgcggaggacccagtcagcgaagcgccgggattccttccttcgccgcgagcctttcgctgccctttcctctgcgcggaggccggcgctgcggcgcggtcccctcgcctccgggggcgggggccccagcctctctgcagccctactccggaggcggacggagtggaatgcgagttttttctctgggctttcgcctcgcagctagggatgtgtgtctgcatcgtgggggtggggtagggggcactttgtgcagatatcgctccttccttctggggggtcggagtcggggttccagtgtagaggagctcctcgacctcggggttcctcggggagaccccttcagcttcacacattcctggagtgccgcctcctgctctggagtatctgttgctgctttctaaaaccgtgagcttacccaggaggagtcgtggggggagggggtgtcttggttagtttctgcgggaagattcgcgttttgaaccgtgtcgtttacgctgagatgctagtacccacttttgccgggagcccacgtcctgctggtcagaatcgtttaccttctacagaagtctccttcttgctttcagagatggtgttagtaaaaattgatctcaaactttgaggttcattccagttatttgcccgctaagat

SEQ ID NO: 3153 - DNA, 1525 bp, Artificial sequence
  DNA replication origin
tagaaccagcgcgtattacctggttcatctctgaagagatggaaacattcatttctagagcttcgatgggaagcaggaggaagcgggcgggaatcggcccaacggaaagcgccagaaggcggcggaagacgggagcggtcaagtagaaggacgaggggccagtccgtggagactgaaaggaagggggagcgccaccgagaactcgcgggaactcgctcgctcgccgatacagccgcgccgaagcagcaggcggagaaactgcgcccagcagctctgagcgaccgacctccacgcgcgaccgggagacactgcctccgccgccgccgaccgctcgcgccgcaccccctcgcacgtcaccacgtgcgctgccgccgccgacgcctcccagcccgcttccgtctcgaatccatctgcaaatcacaggcgagctccataaagatcccactctaagccccgccccacccgcggccccgcccacatcccgccccgccttcctccctggtctactggggttccttccttctcggtgtaactaggtcagcgcaaggtgatcctgaggagataggcggcgctcggggggcgccctcgttcctcttatcgcgcctttgtccctccctccgttccttgccccgcaccctcactttcgccgccctgtgcgttgcctgtcccggaactggttccctcaagccgccctcacctgttctgacttcccctcgaggcacaatagcctgagagatcagacgtgggagattagattgctcggcgtcagacctacttctaggcaaccccccctagactggagctgctcgtcgtggacattaggatctagttgggcatgagcccttaacttaagggtcgggggggaagtggcgggtgcggagaggaggcgtggagagtgtgaggaagaagagaggcactctgagaagaagtcgaacaactaacccctcatttggcctggtttgggtgagaagattgagtcacttggggaaaaaaatattggagaagtcagagaaggtgtaaatcagtggtgccacaaacaccagtttacttccacttttcaccccccgggtctgttttgtctgcgtgcagctctcctcgtgtcggagacgctgagtcagttctctactggtcttgccctcttccggaaaaagaaaacacacctgagaagtggtagttcctatcctaacctactggggccctttataccaggtgccaaacttcattatccaccccaccaccttgcccgggagggagatctgtgaaagcgaaacgtgatttaagctgggatctggcagcaacttcgtggactctgaagggcacgtgggaaaggagttttgattgaaggtgagggatttagtgaggtaaaattatatccaaattagagtttggtaaaggcttccaggttaatgtcctgttaacgcttatcctgatttgtggaggacacttaagctgtctaggcctaaccttgtgtttgatcactcaccttaatttgtagacattctaggagctctttgtcaatgcctct

SEQ ID NO: 3154 - DNA, 3212 bp, Artificial sequence
  DNA replication origin
ttatgaattggaatggaccaggttaccttgattttcatgtaaactagacattttttggatgtatgaactcaatgtgaaattgcatctttcagttctgattgccctccctttgggttagtttggaaaatgatactacagatttttgctttgcattgtacttttaagaatagactccgaactaaatttttttgactttctatataccatctctgctgctcacagacacacatatgctaaattcccaggcttaattttctagagaatgaaaaagcttactgtaattacacctctgcttacctacagggaagctgtaaaacttcacaagctaacaaggtcaggtaatatatctcagttgagtgatactaaactaaggcattctggttcagatagatgtaaactaacattaccagctttaaaaatgaaaataactgattcttaataccggaaagcatgggattgatgataatgccttgattgggtactctcggtaagtaatccatgtcgggagtaacttcaggcatgaacacatggggcctgagaagcatatgaggtgtttctccttcagcaccacctgcatcttcactctttggatttacttcaactagtttggagtttggagtttggttaggtctggtggtggtttggagcatggcttctgctattcttgaggtagggttcaattctggcattgttgatgtcatcttgcggggagttggtgtcgtctttggttttctcactctaggcattgtttttggctttttggtagaagtgggttttttgggtgctttggttggcttttgaggtttaggagttgtcgctttagaattagtagctctgtcttttggtttagctgtttcttcaggtttgttcataatctcagtggtagtaattgtcttttttgttgtagttactttgggtgcaagagtagttgttttaagagtagtaattttgaatggtgtggtatcttgagttgtggtagatgttacttgtgtggttgtagctgttattttggattcggtagttttttctgttgtagttgctgtctcttttgtcatcttaggtgcagcagttgtagtttcaggtgtagtacgtaagtctctttctgttgtcttgtctttagctgttgtagtcatttcaggtttagtcgctgcaggagtcttagttgtaggtacaccaggttccttgggactgttttcaagagcttttggtgtgggttctgcagaaagctcaggagttgattcatcagggcttttgtggatagtggtaggctccttggtggtagttggagtagagacctctgaagtggttggaggaggtgtctcaggagtagttggagcaggcttcttgggggtagtgggtgcaggctccttgggggtagttggagcagtctccttaggtgtagttggagcaggcttgtcagaggtggtggatgtgggccccttggtggtggtgggtgcaagctccttgggggcaggcttcttgggagtagtgggtgcaggttccttgagggtagttggagcagtccccttaggggtagttggagcaggctccttaggggtagttggagcaggctccttaggggtagttggagcagtccccttaggggtagttggagcgggcttgtcagaggtggtggatgtgggctccttggtggtggtgggtgcaagctccttgggggcaggcttcttgggagtagtgggtgcaggttccttgagggtagttggagcagtccctttaggggtagttggagcagtctccttaggggtagttggagcaggctccttaggggtagttggagcaggctccttaggggtagttggagcaggctccttaggggtgttgggagccgctgccttgggagtggtgggagcaggctcctcaggggtggtgggtgtgggctcctcaggggtggtgggtgcgagctcctcaggggtggtgggtgcgggcttctcaggggtggtgggtgcgagcttctcgggggtggtgggcgtgagcttcttgggggtggtgggtgcagtctccttgggggtagttggggcaggctctttgggagtggtgggtgcaggcttcttggtggtggtgggtgcaggttccttgggagtggtgggtgcaggctccttgggggtagttggggcaggcttcttgggggtggtgggtgcaggctccttgggagtggtgggtgcaggctccttggtggtggtgggtgaaggctccttgggagtggtgggtgcagacttggtagtggtgggtgcaggctccttggtagtggtgggtgcagacttggtggtggtgggtgcaggctccttgggagtggtgggtgaaggctccttggtggtggtgggtgcaggctccttgggagtggtgggtgcaggctccttgggggtagttggggcaggcttcttgggggcagtgggtgcaggctctttgggagtggtgggtgcaggctccttggtggtgggtgcaggctccttgggagtggtgggtgtaggctccttgggagtggtgggtgcaggctccttgggggtagttggggcaggcttcttgggggtggtgggtgcaggctccttgggagtggtgggtgcagacttggtggtggtgggtgcaggctccttggtggtggtgggtgcaggctccttgggagtggtgggtgcaggctccttggtggtggtgggtgcaggctccttgggagtggtgggtgcagacttggtggtggtgggtgcaggctccttgggggtggtgggtgcagacttgatggtggtaggtgtgggctctttgggtgtggtagatgcaggctccttgggagtggtgggcgtgggctccttgggagtggtgagagcagggcctttggttgtagtttcagctttgggtgtaggtttagccagcactttagatgtgggtgctaaatctttagcagatgttttctctatactttgtgtctctttagcggaagtagtcttctcttttccatcagttgaagtctgtttatttgttgtagtagtttctttagtttcaactgttgtctctttattcactgtcaaagacgtctctttagatgtatcagaattaggtggaagactgggtctgggatttattggttttgctgttgtgatcttgggagatgtgctgactttattgtgttgggtggtagacgtgtcaggagttgtgaccttgaagtcaccattgtccaatccacttccagcttcatctacaac

SEQ ID NO: 3155 - DNA, 870 bp, Artificial sequence
  DNA replication origin
catcatcatggcccgttctcaatgagctgttgggtacacctcccagacgaggtggtggccgggcagaggggctcctcacttcccagacggggcggccgggcagaggcgccccccacctcccagacggggcggcagctgggcgggggctgctccccacctcccggatggggcagctgccgggcggagatgctcctcacttcccagacggggcggctgccaggcagaggggctcctcacttcccagaaagggcggcctgtcagagacgctcctcacctcccagacggggtggcagcgggccagagacactcctcagttcccagacggggtcgcggcggggcagaggcgctcttcacatctcagacggggcggcggggcagaggcgctccccacatcccagacgatgggcggccaggcagatgctcctcacttcctagatgggatgacggctgggaagaggcgctcctcacttcccagactgggcggccgggcagaggggctcctcacatcccagatgatgggcggccaggcagagacgctcctcacttcctagacggggtggcggcccggcagaggctgcaatctcggcactttgggaggtcaaggcaggtggctgggaggaggaggttgtagtgagccgagatcacgccactgcactccagcctgggaaacattgagcactgagtgagcgagactccgtctgcaataccggcacctcgggaggccgaggctgccagatcactcgccttcaggagctggagaccagcccggccaacacagtgaaaccccgtctccaccaaaaaatacgaaaaccagtcaggcgtggcggcgcacgcctgcaatcccaggcactaggcaggctgaggcaggag

SEQ ID NO: 3156 - DNA, 1289 bp, Artificial sequence
  DNA replication origin
gaatggggcggctggccgggcagaggggctcctcacttcccagtaggggcggccgggcagaggcgcccctcacctcgcggacggggcggctggccaggtggggggctgaccctcccacctccctcccggacggggcggctggccgggcggggggctgacccccccacctccctcctggacggagcggctggccgggcagaggggctcctcacttcccagtaggggcggccgggcagaggcgcccctcacctcccggacggggcggctggccgggcggggggctgatccccccacctccctcccggactgggaggctggccgggcggggggctgacccccccacctccctcccggacggggtggctggccgggcggagggctgacccccccacctccctcccggacggggtggctggccgggcggggggctgacccccccacctccctcccggacggggtggctggccgggcagggggctgacccccccacctccctgccggacgaggtggctgctgggcagagacgctcctcacttcccagacggggtggctgctgggcggaggggctcctcacttctcagacggggcggttgccgggcggaggggctcctcacttctcagacggggcggttgccaggcagagggtctcctcacttctcagacggggtggctgggcagagacgctcctcacatcccggacggggcggcagggcagaggtgctccccacatctcagacgatgggcggccgggcagagacgctcctcacttcccagatgggatggcggctgggaagaggcgctcctcacttcctagatgggatggcggccgggcagagacgctcctcactttccagactgggcagccaggcagaggggttcctcacatcccagatgatgggcggccgggcagagacgctcctcacttcccagatggggtggcggccgggcagaggctgcaatctcggcactttgggaggccaaggcaggctgctgggaggtgaaggttgtagcgagccgagatcacgccactgcactccagcctgggcaccattgagcacggagtgaatgagactccgtctgcaatcccggcacctcaggatgccgaggctggcggatcactcgcggttaggagctggagaccagcccagccaacacagcgaaaccccgtctccaccaaaaaaatacgaaaaccagtcaggcgtggcggcgcgcctgcaatcgcaggcagtcggcaggctgaggcaggagaatcaggcagcagtaccgtccagcttcagctcggcatcaga

SEQ ID NO: 3157 - DNA, 959 bp, Artificial sequence
  DNA replication origin
gccccccgcccggccagcctcccagtccgggagggaggtggggggatcagccccccgcccggccagccgccccgtccgggaggtgaggggcgcctctgcccggccgcccctactgggaagtgaggagcccctctgcccggccagccgctccgtccaggagggaggtgggggggtcagccccccgcccggccagccgccccgtccgggagggaggtgggagggtcagccccccacctggccagccgccccgtccgcgaggtgaggggcgcctctgcccggccgcccctactgggaagtgaggagcccctctgcccggccagccgccccattcgggagggaggtgggggatcagccccccgcccggccagccgctccgtccgggagggaggtgggggggtcagccccccgtccggccagccgcccggtccgggaggtgaggggagcctctgcccggccgcccctactgggaagtggggagcccctctgcccggccaccaccccgtctgggaggtgtacccaacagctcattgagaacgggccatgatgacaatggcggttttgtggaatggaaaggggggaaaggtggggaaaggattgagagattggatggttgccgtgtctgtgtagagagaggtagacgtgggagacttttcattttgttctgtactaagaaaaattcttctgccttgggatcctgttgatctgtgaccttacccccaaccctgtgctatctgaaacatgccctgtatccactcagggttgaatggattaagggcggtgcaagatgtgctttgttaaacagatgcttgaaggcagcatgctccttaagagtcatcaccactccctaatctcaagtacccagggacacaaacactgcggaaggccgcagggtcctctgcctaggaaaaccagagacctttgttcacttgtttatctgctgaccttccctccactattgt

SEQ ID NO: 3158 - DNA, 950 bp, Artificial sequence
  DNA replication origin
gttatgcatagtgagtttaaggtatagcaaggagtccagagtagttggagtgagagggtaaagaaaaagaacgataatgatagataaagcagattacgtggggtattgtaggccattgagaggattttggctttattctggtgaaatgggtaattgctacagtgttttaagctgtaggaatatataatcagacttactttttcaatgtatcactgtggctaattatctgaaaataattttgtatgagtaccaggagagaagtagggagacctattagaaaaaaattgaagtaatcaggaaagagatgatggtggtacctaccaatcagcaatgtaggcagagagaagtaattcagatcccacgtatattttgaaagtaaggctaccagactgtcttaatggattggatgtggggtatgaataagaaactgtctgaaatgactcaaggtttcttggcttgagcaactgggatgagctgataacctgtaattgctcagctgcaatggaaaaggctgctgatacagcaggtctttgcgtgcgtgcgtgcgtgcgtgtgtgtgtgtgtgtgtgtgtgtatgagagagagagaaagcaggggtttgttgtttaggacatgttgagtttgagatgtctataagacattcaattggaataattcgttgacagttgaatatatgagttggagttggagaaaggaatctgagccagagatataaatgtggggttcactggcaaataaatatttaaagccatggataaacataagatcaccacagtagacaatgtagatacagctgggaagaggaaaagggctcaactgtggagcattcctacactaaaagcatgagaaaaggaaaaccctgcaaaggagtgagtggctagtggagcaacagaaaattctggaagccatgtgaagaaaacttaccaaagcagtagtgagagatgacagcg

SEQ ID NO: 3159 - DNA, 1733 bp, Artificial sequence
  DNA replication origin
tgggctcccactttggcggcacttgaggagcccttcagcccaccgctgcactgtggcagcccctttctgggctggccaaggccggagccggctccctcagcttgcagggaggtgtggagggagaggcgccagcgggaaccggggctgtgtgtggcgcttgcggccagctggagttccgggtgggcgtgggcttggcgggctccgcactcggagcagccggccggccctgccggccccgggcaatgagggacttagcacccgggccagcggctgtggagggtgtactgggtcccccagcagtgccagcccactggtgctgcgctccatttctcaccgggccttagctgccttcccgcggggccggcctcgggactgcagcccgccatgcctgagccttcccccgcctccgtgggctcctgtgcagcccaagcctccccgacaagcgccgcccctgctccacggcacccagtcccatcgaccacccaagggctgaggagtgccagcgcatggcatgggactgtcaggcagctccacccgcagccctggtgtgggatccactgggtgaagccagctgggctcctgagtctggtgggaacgtggagaacatttatgtctagcgcagggattgtaaatacaccaatgggcacgctgtatctagctcaaggtttgtaaacacaccaatcagcaccctgtgtctagctcagggtttgtgagtgcacccattggacactctgtatctagctgctctggtggggccttggagaacctgtgtgtccatactctgtatctaactaatctgatggggacatggagaacctttgtatctagctcagggattctaaacgcaccaatcagcgccctgtcaaaacagaccacttggctctaccaatcagcaggatgtgggtggggccagataaaagaataaaagcaggctgcccgagccagcagtggcaacccactcaggtccccttccacactgtggaagttttgttcttttgctctttgcaataaatcttgctactgctcactctttgggtccacgctgcttttatgagctgtaacactcaccgcgaaggtctgcagcttcattcctgagccagcgagaccatgaacccaccagaaggaagaaactccgaacatatccgaacatcagaaggaacaaactccagacacgccaccttaagaactgtaacactcaccgcgagggtccgcggcttcattcttgaagtcagtgagaccaagaacccaccaattccagacacagtaggagtgatcatatggcaaatactgatgatagagtcgagtgagatgaaaacaaagattgaccaccaaggttagcatcatgaagttaccagtgatcttgagagcagtttccacgcagtgatgtcaaatacctgttggcatggttttaagagaaaagggaaggagagaatttggagacagtgaatacagacaatcctcttaaggaggtatgttgcagagggaagcaaaaaaattgagtggtatttgttgagggaagtagagtcaagatacttttgtgtgaagtaattggaatgatccagtagaaagtgaaaaaatgataatgaaggaaaaagaggaaagaattgctagaatgttctctttgagtagacaagtagagatagcaaataacgaacaagcagagaaactggctttagataggaatacggttagttcatctgaggtaacaggtaggaaggcggagggaggtgcca

SEQ ID NO: 3160 - DNA, 1214 bp, Artificial sequence
  DNA replication origin
catttaaccctgagtggacacagcacatgtttcagagagcacagggttgggggtaaggtcacagatcaagaagatcccaaggcagaagaatttttcttagtacagaacaaaatgaaaagtctcccatgtctacttctttctacacagacaaggcaaccatccgatttctcaatcttttccccacctttctcccctttccattccacaaaaccgccattgtcatcatggcccgttctcaatgagctgttgggtacacctcccagacggggtggtggccgggcagaggggctcctcacttcccagtaggggcggccgggcagaggcgcccctcacctcccggacggggcggctggccgggcggggggctgacccccccacctccctcccggacgggacggctggcctggcgggggctgacccccacctccttcccagacggggtggctgcggggcggagacgctcctcacttcccagacggggtggctgccaggtggaggggctcctcacttctcagacggggcagctaccgggcggaggggctcctcacttctcagatggggcggttgccaggcggagggtctcctcacttctcagacagggcggctgggcagagacgctcctcacctcccagacggggcggcagggcagaggcgctccccacatctcagacgatgggcggccgggcagagacactcctcacttcctagatgggatggcggccgggcagagacgctcctcactttccagactgggcaagccaggcagaggggttcctcacgtcccagacgatgggcggccaggcagagacgctcctcacttcccagacggggtggcggccgggcagaggctgcactctcggcactttgggaggccaaggcaggcggctgggaggtggaggttgtagcgagccgagatcacaccactgcactccagcctgggcaccattgagcactgagtgaaccagactccatctgcaatcccggcacctcgggaggccgaggctggcggatcactcgcggttaggagctggagaccagcccggccaacacagcgaaaccccgtctccaccaaaaaaataagaaaaccagtcaggcgtggcggcgcgcgcctgcaatcgcaggcactcggcaggctaaggcaggagaatcaggcagggaggttgcagtgagccgagatggcagcagtacagtccagcttcggctcggcatcagag

SEQ ID NO: 3161 - DNA, 911 bp, Artificial sequence
  DNA replication origin
atctaggaagtgaggagtgtctctgcccggccgcccatcgtctgagatgtggggagcgcctctgccctgccgccccgtctgggaggtgaggagcgtctctgcccagccgccctgtctgagaagtgaggagaccctccgcctggcaaccgccccatctgagaagtgaggagcccctccgcccggtagctgccccgtctgagaagtgaggagcccctccacctggcagccaccccgtctgggaagtgaggagcgtctccgccccgcagccaccccgtctgggaaggaggtgggggtcagcccccgccaggccagccgtcccgtccgggagggaggtgggggggtcagccccccgcccggccagccgccccgtccgggaggtgaggggcgcctctgcccggccgcccctactgggaagtgaggagcccctctgcccggccaccaccccgtctgggaggtgtacccaacagctcattgagaacgggccatgatgacaatggcggttttgtggaatggaaaggggagaaaggtggggaaaagattgagaaatcggatggttgccttgtctgtgtagaaagaagtagacatgggagacttttcattttgttctgtactaagaaaaattcttctgccttgggatcttcttgatctgtgaccttacccccaaccctgtgctctctgaaacatgtgctgtgtccactcagggttaaatggattaagggtggtgcaagatgtgctttgttaaacagatgcttgaaggcagcatgctcgttaagagtcatcaccactccttaatctcaagtacccagtgacacagacactgcggagggccgcagggtcctctgcctaggaaaaccagagacctttgttcacttgtttatctgctgaccttccctccactattgtcctgtgac

SEQ ID NO: 3162 - DNA, 958 bp, Artificial sequence
  DNA replication origin
gggtgggaggcggggaagtgccgggggcgcagccgacatgggcccgccgccacggctgctgtgagcagcctctttccctgtgtggccgccggcgtgggcggggacggcgcgaccctcgcgcggccgggctgcgggcttccaggccagcgcgcgggggccggacggacagccccacaccgacatgtaaccatggactgcaggaccaagtgagtgggggggcccgggcgcgtcgggggcgggcgtccctcggcggcccctcccaggccagctcggctcctccgcgcctccgcgctcaaccggctccccgggcggccgaggttggccgggcgggctgggggtgcggtccggcccccaagcctctggccggccggcgggacggcgctaggccgcaaagcctgcccgccctgcgtccccggccctccgtggttggcgcggctcctcccggagaggccactagcgccttgtcgacgcccgcctttcgggggacaggggaggccgggcggcccctgacaccgccgctgaggggttctcgtgcttcccccgagtgtgtcagatgtgactctcctggggctgcctgtgtgcgtgtggtgtccgggagggagtcagcgttgaggttaagaggttattattccgagtgctctctgagcattaaatataaccggtgttttcttaagtccgtttgttacttttgtcttggatgttttcttatgattctgcttataaaattagattggtctctggtgtttctttatgcagcaactgtagatgcatggttcttgcaaaacggtatccaattagagggtacttttatgtgtgtgctaaagtatttatcaacgactactttgctcaggagattaggtaaaaagcaattttaataacggtggtgattttgtttctaggtatcttagaggcatgagttttatatttttcttctgaaacttaactttggaaagaattc

SEQ ID NO: 3163 - DNA, 1341 bp, Artificial sequence
  DNA replication origin
gccgccgagggacgcccgcccccgacgcgcccgggcccccccactcacttggtcctgcagtccatggttacatgtcggtgtggggctgtccgtccggcccccgcgcgctggcctggaagcccgcagcccggccgcgcgagggtcgcgccgtccccgcccacgccggcggccacacagggaaagaggctgctcacagcagccgtggcggcgggcccatgtcggctgcgcccccggcacttccccgcctcccaccccacccaccagagcctttctgtgacagcagcggtggcgtggccgccgcccccgtctccgccggtagccgccaccaaagctgaggcctctcagttcctgcgaccggggccgcccgctgcggctcctgcaccttcttgcaaatcaggaagtcgccgggagggggaaggggcgcgcggggacgcgcccagcggcttcacctgggccgtgcggctcgcaagtcggagactgtggaggaggcgggggccaggtccccgcgcccgggcggccagagggtgcagggggagcgctagtgcctgctgggatggcccacgtaccgctttgccacctagccagaaaggcaaggtgccccctgtgtcctcagcatgaaccaaaccggcttcctttctgggtccagtccagattccagggcgtcggggctgcaaccccacaaagggcgaagtacctggaaaagtacctcgacctgcagtgttttccacacacatacacacggacttgggttcctttcatttcatactacaaattcagagctcaagttgatgcccctggctcttgcgtcactccagctgtggcctgcttacagctctctgaaatccagagctaccccctcctgattcaggaatgttcagacatgtgcacctgctaaatagccctgtcaagtagccaaatggtagtgccccacttgtctgcgcatgtgggaggcagacattcctataccacagactgcagtgataaccaaggactaacttttgaacacatgtacatagtcgcaggcctcatagtctggcagtttaggcgagttcagagagggcaccactgaataagcgtgggagggactgatttacacagccctaaagcacatgtgaagcaggttatgtgcactctcacccagtacttgtcataggtgtgtgatagatactttcatcagcattttacagatgaagaaaccagggagtaatggcaaagctggagttcacaccaggtctatctgatgctgattatttacttctacctcatattgcctgtctccctcctctgctgtctcatatttaggatctactgagaagacaggtagaaaagtcttatgatgga

SEQ ID NO: 3164 - DNA, 1197 bp, Artificial sequence
  DNA replication origin
tatttaatgtcaggagcagattgggtaataaaatgtattttgagaataagacggcctttagaccttttagggtctagggctataaagtgtctcagggttgctgccaaacaagtcatgaactgagctgcatttttatatttgatgaaaaagagcctaaacgctatctgacttgggataaagaaaaaggagcattaaccttgactatgcctttagctccagccacctttttaagaataaattgctgggcaggtgggggagggctagtcatggaacgaaactgtaagccggaccaggtgtgaggaggggaggtgataaaaggattatagggtggaggagcagaggctgaggaagaattgggacctagctcagcctggcgaggagcagcctggggaggaggggagaggtcagatgggtctgtagaaaaggaagattagaaagactcagcgatgcttggggttgggactgaggggacaggtgggagggaaagaaggaagatttgggacgagttgcactgggcacagagactagggagggactgatatgtaaaacaatgcctggacgtcaggcacctcagaccgtttgcccattttacgacaggaattatttagatcttgcaggatggaaaaattgaaaatgccgttttctggctatttggaactactgtcgactttgtattggggtcaagcggcattgcagaagaaaataagatgcttagattttaggtcaggtgagagttgaagaggttttaagttcttaagaacacaggctaagggagaagaaggaggaatggagggtggaaggttgcccatagtgaaggaggcaagcccagagcaaagagagagtagagacacggagggaaggggttcaggggttcttaccctccagaaaagcgggaaaggggtcagggcacagagatacgaggttggggcgcagaaataagggattggggtgcagagatataagaggttgtggtgcaaaaataagggattggggcacagagatataagagtttgtggcgtggaaataagggatcggggtgcagagatataagaggttggggcacggaaattagagatagggtgcagagatataaggggttgaggtgtggaaataagggatcggggtgcagagatatgaggttggggcatggaaataagggatcggggcacagagatataaggggttgtggtacttgct

SEQ ID NO: 3165 - DNA, 1034 bp, Artificial sequence
  DNA replication origin
cagggtgggtgccccgcgcctgcagcgtccgccggggcggcgcggcgggaggtggccgacaggctccgggcctcgcagcctcagcccccggcccagcgcgctttccgacggcggcgccgcgccgagccacccgcccgcccaaggtctctcgcgggcgggagaacggaaaactcccaacttcctggtgagtcgctgcccagggttcaggcgcccggaccgggcagctcctgccgggaggggccgcctgcgggagtcgggccgggagagggaggtcgggaccgcgcggggcggcctccgggataccctcgctcggggtaggtggggcggggcgcgctgcgctcgaggcggatgggggtttcggtcttgttcgttggcagcggtgggagggggcggcaggaaacttcatacctggccccggctctagaggcccgaggccgccaagggcgccgcggtaactaagaaactccgtggccacggcggcggcggcaacaggtctttggtttcgggacccgaggaacttaagcgaagtcccgccttccggcggatgctcattggcgacgtcggttatttatctctcgcggattggtgaagtccgtctgtcaggattcggcagcagcccgacttaggaaagtgaagtgcgctgggagagagtgggtggtgggagccggcagataggggagaatccgaagtggcttcagaagtacagggagcgtgagaggtctgtcggagaatgaacttgggagagactcgggattacaaaatgtcggagagagggattgcgaggcaatagcgaacattgctggtgatggtggcaatggaaaagaaattgaaaactgaggccaaagtcagagaagggtagccaaaggaaaacagagaaaagtgacaagaccgtatgaccgcagaacagtgtaaggaagcgagcacaacctagaggatgctgccttgagagctaaagaacttctgttgcctctgttacactgtaggccttcactcctaaaaccgcagcatcctctatttagtcttgcactgggagc

SEQ ID NO: 3166 - DNA, 634 bp, Artificial sequence
  DNA replication origin
aggaagtgaggagcgtctctgcccggccgcccatcgtctgagatgtggggagcgcctctgccccgctgccccgtctgggatgtgaggagcgtctctgcccggccgccccgtctgagaagtgaggagaccctccgcccagcagccgccccgtctgagaagtgaggagcccctccgcccagcagccaccctgtctgggaagtgaggagcgtctccgcccggcagccaccccgtccgggagggaggtgggggtcagcccccacccggccagccgccccgtccaggagggaggtggggggtcagcccctgcccggccagccgccccgtccgggaggtgaggggcgcctctgcctggccgcccctactgggaagtgaggagcccctctgcctggccaccaccccgtctgggaggtgtacccaacagctcattgagaacgggccatgatgacaatggcagttttgtggaatagaaaagggggaaaggtggggaaaagattgagaaatcggatggttgctgtgtctgtagaaagaagtagacatgggagacttttcattttgttctgtactaagaaaaattcttctgccttgggatcctgttgatctatgaccttacccccaaccctgtgctctctgaaac

SEQ ID NO: 3167 - DNA, 1286 bp, Artificial sequence
  DNA replication origin
cccgagtggacacagcacatgtttcagagagcacagggttgggggtaaggtcatagatcaacaggatcccaaggcagaagaatttttcttagtacagaacaaaatgaaaagtctcccatgtctacttctttctacagacacagcaaccatccgatttctcaatcttttccccacctttcccccttttctattccacaaaactgccattgtcatcatggcccgttctcaatgagctgttgggtacacctcccagacggggtggtggccaggcagaggggctcctcacttcccagtaggggcggccaggcagaggcgcccctcacctcccggacggggcggctggccgggcaggggctgaccccccacctccctcctggacggggcggctggccgggtgggggctgacccccacctccctcccggacggggtggctgccgggcggagacgctcctcacttcccagacagggtggctgctgggcggaggggctcctcacttctcagacggggcggctgctgggcggagggtctcctcacttctcagacggggcggccgggcagagacgctcctcacatcccagacggggcagcggggcagaggcgctccccacatctcagacgatgggcggccgggcagagacgctcctcacttcctagatgggatggcggccgggaagaggcgctcctcacttcctagatgggatggcggccgggcagagacgctcctcactttccagactgggcagccaggcagaggggctcctcacatcccagacgatgggcggccaggcagagacgctcctcacttcccagacggggtggcggctgggcagaggctgcaatcttggcactttgggaggccaaggcaggcagctgggaggtggaggttgtagcgagccgagatcacgccactgcactccagcctgggcaccattgagcactgagtgaacgagattccgtctgcaatcccggcacctcgggaagccgaggctggcggatcactcgcggttaggagctggagaccagcccggccaacacagtgaaaccccatctccaccaaaaaaatacgaaaaccagtcaggcgtggcagcgcgtgcctgcaatcgcaggcacttggcaggttgaggcaggacaatcaggcagggaggttgcagtgagccgagatggcagcagtacagtccagcttcggctcggcatcagagggagaccgtggaaagagagggagagggagaccgtggaaagagagggagagggagaccgtggaaagagagggagagggagaccgtg

SEQ ID NO: 3168 - DNA, 1057 bp, Artificial sequence
  DNA replication origin
ctccttcccctccctccaccgccctctggctcaggatcggcaggggtctctctcctctttctctcgcctcccttctctctcccctcctctccgccccttccccctatctctctctgcctctctcttgctcactatcgcaagtgtggagttgtgaagttccaacctccctctcctgcctggtccactccccgcgcgggaccgagaacggcccttcccagccccgagggtgacggtgctgggaaggacaggggggaagacgagggggagaaggaggtaagtagggccaggggttgggggaaggctggattgaggggtgaagacagtgaatgcggacgcgggttccggactcaggtcggacactagccgccagccaataaggatgaggctcaggctccagtcccccggcctgccccaacctcttcaccccgcctcaccccctcccaccccaccctggcccggggcggggggatgtaaatgcagccgggtcttacagctagtcagaagcgacctctgtctgagcgtggcggcgaaggagaagcagccagagcggcaatttcctcgatctgaggggaagcaagaagaagggatgggggcgcgggtgggcgtgtgcccttgctagtgtgtcggatgaggagatgaagggagttaaacacccacttaaaccattgaaaggagaaaatttagctgaccgttcttacatgcagagttggtctgcggtcaagggtcctccagcttcaactccccagggcactgagaccctgaagaggcgacacgtgggccccggcgccctgaaggggccgagggtcagctcaatgagaggcgggccacaagccaagagctcactcatagaattagaggaaggggcagcgactcctctttccccagtctgctccctagtcccttcgttcacttttaaaagaccctcgactggagcccaagatcatctaagcgacagactttccagttttagtgacctgtgtttccacacggaatacaaggatcagtccaggctgtactttttcattctgttgtctgatgggaccatccacttgaggcc

SEQ ID NO: 3169 - DNA, 1279 bp, Artificial sequence
  DNA replication origin
gtctttggcttctcgcgccagaacaagaagcagaaactttccttttggagccaagaatcgtgccggcctcacccagcgaccccaagggtaggccctctccggagctgccggctgaggtcccccaacccagccccccagcgccacttccccgatgccccacactaaactggaattccaggtgcccggaagaaaggcttctttggaccaaccgggttcccatagcagccagacccacaggtcagcctccggggcttcagctctaggggactctcacagccctacctagaggcttggggagaccccaggatgaccgatggggtaacggatcacaacccgcacggcgcacgccctccagctacgtattttcccctccgcggtagggcgactacaggtcccccggcctgagcgcccgggcgcgccgcccactcagcaccgcagagtgcaccagccctgaactctgctctcaacacctcccagtcctttcaagttcgcgcaaggggatggcaggaagcgttccgggatcacaggcccgccggcccgcacatcctgcaccctggaaggggcgaggatggaagagcaccggtgacttttcctagcattgttccctccctggcccagagcaaatgagataaacttctgaagggcttaatacaagccatagggttgctattttggaatgaggagaaaatgtagccagcgggatttgtttttttgttggcaatcaagagctgggaaaacgaatgggacctccatattttcagatctcagattttaaaagggggcaataaacgaaccgctgtcctcccacccccaactcactcagcactacgcgtacaggggatggggttggggtaacttgttcccttcagttctgccagcaatgttgaattgtccaaatccgagctggctgcgggtgtccgcctgggcttttggtgtggtcacatgtattctaatagcgctaagacaatcctttcggaggtcacctctttctgtagttgactttcctagactgggtcgcctccctccacacaagagtactggttgaagtacagtacacaccaattccaatgacagagaacctgttcgggtgtccagtgagacattccatttcttagaatgatcttattattctaaagtacctttagcctgaagctgccctgcttgggttgccatagagctggaagcctctctttccttaattagaagcggccaattagacgttgcttggaaaaacctctgccccgcattgttcaagagccataaacttttatgcctgcac

SEQ ID NO: 3170 - DNA, 826 bp, Artificial sequence
  DNA replication origin
tcctggatgacgccgtgactccccccttcaccgcctcctaggcctggagacctctcttcagctccagcgaacagccccccatagtggtggtggtgatggtggtggtgggactgctgctcctcaggatccgcgggtttctcctgtttgatgctaaccaaagactgcaagaacccccaggaggtcctctgcgaggggaaggccgcggctgacgccgccggctccttcttgaaagtcatgtccggggctggcggaggggggggctcagcggccggggctgcggaggtagaggaggataacacgcattgcgggggaggggcggccgaccccgccggccgggtgaagctggtgaccgggggaagacggtggttgaacataaccataccctggggaaaggtgggttccatctctgccctcctgccgctgctgccgccgccgccgccgccgccactaccaccgccgccggagccgctaccaccgctactgccggtacctccgccgccactcaggaacccactgccgattttcataccccggaggaggcctggctgaagaaaggaggaggaagagggaagagggaggaaaggaggtggaaccgggccccgggccgggaccaccgcagcgctaaggaccccgccgcgccgccgcccagaccgcaacgcgcccagcactaattcccagcccagtcgcctccggcaccggcacgcatggtcctgcgactcttccccaggcctcgccctctccctcctggacccaccggcaatacttacgggtcccgccgccgccgcagccgccgtcgcctccagttaataaaaataacgccgtcctc

SEQ ID NO: 3171 - DNA, 1200 bp, Artificial sequence
  DNA replication origin
ccggagccgctaccaccgctactgccggtacctccgccgccactcaggaacccactgccgattttcataccccggaggaggcctggctgaagaaaggaggaggaagagggaagagggaggaaaggaggtggaaccgggccccgggccgggaccaccgcagcgctaaggaccccgccgcgccgccgcccagaccgcaacgcgcccagcactaattcccagcccagtcgcctccggcaccggcacgcatggtcctgcgactcttccccaggcctcgccctctccctcctggacccaccggcaatacttacgggtcccgccgccgccgcagccgccgtcgcctccagttaataaaaataacgccgtcctctccacaatggaattaaaagcctcccgtgtactgcgcagccgcggcgcagtgtctgctgggaactcctcgacccggccagaggggagggctaaggagccagggcgcctgcgccgcagcttccgcccggcctgcctgtcaatcactggggccgttgggcggaggcgggggagcaagggcaggggaggcggggatttggagccctgctaaaaaggggctttcgaggcgaacaggcgtgattggtgggctgcactgaaggagatgaaagtggttgagggtttctgggggaaagacgctcaggaggtggaacccaaggggcgggaagttacgggggactgtactacagcgtggcgtgggagatgcagagaaaggggctggaagagaaggtgagggaaactgaggattcaatgttagggctttcttcactctaggttttgcaatccaggtcttgaaataaaattcaaacctagaagtggatcattgagggcacttttgattctatcaagaagcattcaactccaaatgctcaacatttattaaaacaggtgcttatgttatccctttgaatttggaagcactaataatgggcgcatatcctttgcatttatgggaggagcctgctttgaaaccgcaattagtggtaccgttgcaacaaaaaaaaaaaaaagaaaaagaaaaaaacttgtcttactgccaaccttcctgaaggctactggaagaggaaaccgagcgtaatccaggtgcagcagtcctgtaaaacacgcccacacacatacttcattatcattacatcttatttaaatgcccccgtaccttagcctggctaatcagtctgt

SEQ ID NO: 3172 - DNA, 1075 bp, Artificial sequence
  DNA replication origin
aactttttatgattataaaagcaatacatcttgattgtagaaattttggaaaatggagaaactgtaaagaagtaggaggaacagctcatcatgtagaataactttttgattatcagtatttcactacaacaaacatggaaatcaaacaagagcatcaggctgactggttgaaagatcccaagtaaaaaaataaaacaaaaacatttctgcaggtctgaactgagtgacctttgagactctcagcattggctgtattttccttttctggaaatgctgggctgggagcatttccagaaatactcctgggctgggagaatggcctgggctgggaggatggccatggagaggctgggctggaagtatagccatgggctggagagcctgggctcagagcctgacctgggctgggagggatggccatgggctggagaggtggggctgggctgggaagatggccatggagaggctggactgggaggatggccatgggctagagaggctgggctgggaagatggcctgggctggagaggctgggctgggaggctggtcacgggctggagaggctaggctgggaggatggcctgggctgggaggatggccatggaaaggctgggctgggaggctggccatgggctggagaggctgggctgggaggatggtctgggctgggaggatggccatggagaggctgggttgggaggatggcctgggctgggaggatggccatggagaggctcagaactcaccacaagaggtgggagagaggatgaaagctgggagctgagtgtgtgtcagtgtgtgcagaggggctggggaaggagagtgagcatgcttgcacaagcattcagggtggagaaggccaaggagagaaaaagggagtgagcaggcaggtggaggctacaaaagtggccctgtgcagggtgctgggtactgctgagaggctgtcctctaggggtgccttgcaggaaccgagagcctaagtctgtcttgaggactgctgggtgcagagtacacttctctgtgacctggcaggactatctgggtcataaatcacagattgtttgcaccaacgag

SEQ ID NO: 3173 - DNA, 1250 bp, Artificial sequence
  DNA replication origin
cctcccacccacgcccggcggcaccgcaccccgaggcgcttcacgtcacggagctgctaggagacgggcggggctccggttccgggtagaggcctgggacacggggaactgtaaggatgggaggaaggccgcgcaggggcaccagttctgccgccgcggcctagcgccccaggtcccggagaaggggcaccagggcggccaggggcccaagcttccggggcacgctcacccgcgcaggactgaggccgcgtccgctcccgctcccgctcgggccgtctcccccttccaggctccaggccaggcttccgcccgacaagccctgacccgctcgtcaggactgcggcccggggttggtggtgcggagcggagcggagcggagcgtagagtagaatccacttccccgggttttgggagggggccgcagcccgctttccgggcggcggggaggcggggccaccgcgggggcggagctcggctgggagccggcagtggcttgggagggagggagggagaaggagaggggcgggaaggctcctcgcgttttccacgcccccgcccagctctgggctggtggtaaatctcggaactggtccgggctgggcgagttctggacggaggggcacgtttgggaatcctcttggaagaatttacgtaatcgaatgggctgggactggtggaaaagagttggaccgtccggaaagaagcaggagggcggcgcgggggcctggcacccttagaaagtgggaagtgtgagtgtaaaagggaggggcacttctgcccgttgggcccaaaaacccttttctggctttagctagtagagccactcaaaatttaaacggagtcagcttgatgtggcatatatgataagctggataatatttcctgcaccaccgcacccctccccccaccccaacaccaacaagaaaataacacaagtcacggttcttgttccttgtgggctgacatttccctgttttgccaacctctggagccacgtgtcccaagcagcttgtagttgagaagtgatgggggagaggagacagcacgggagaggaaggagggaagccagcttatattcaggtgccttaagtatttaaaaatattttcagtgtaatagtcgatgcattcaaaagagcatatttaccaaatatgtaaaatttaaagtatgctaatgaaactatcactccaccacgttatcagtatttagcatgtatctatgcatctccaggattctactcctggcctcttag

SEQ ID NO: 3174 - DNA, 1425 bp, Artificial sequence
  DNA replication origin
gagctggcccacccagcgcagcccggcccctgcccgccggagacgcagcagcggaaaacgtcaaaatcactgcggctcacaggccgccgccggcccgtcccctcctctgtgctccctcccgtcgccgtctcctccttcccctgccgccgtcgccgctgccgtctcccgggtcttcctcccttgctgacggcgaaggtggtggccggggagaggccgcgaatcccaagctctcagttcctgtcttatcagtaatgtccttgtaattttttcctgcccccctttctgcagctcgctggatcgttccccctcagccgccgccgccgccgctgcggttttccggctgcggcactggatgaaggagcagatgcggagactgagcatgcgccttcgcgcggctccgacccaccccccccaacccccgcccccgcccccgccccctccccgcttccctcccgtctccggcccactgagcatgcccagcctcgctccccgcccgcgcccgggattcggggcggctgccttttaatcatcgctctggagtactcgcttcagtggacatcctccacgtccctggcttttggctgctgctgcctgcactgctgagagaggaaaaggaagggagggaggagggagaggcctggcaatagctttcgtattctacttacacagtgcttcatcgaaaagagttgatatttacttaaaatgttcattatgtgacacacactttgcagcgaacttgacctgcactatctcatttagccctcgcaataatcctgagaggtagatgtcattgctgattgtccacgaaagagaggtggagttgattaggtcatacatggaacttaaccaggattgaggatctgtgggggctccaaacctgtgttaatttcatgatatcgagatattttcttaactcagtgctctccacttaaattttatctctgagagggcacacgtccaacaatgcctccccattctctcagaaaagagcataaattctttcacaaaacaagctaatgccctttgtgatctggcatctacaggcctttatagcttcattttgtcagaactgctctctattttcttcaatgagcatgccttctcagatctctacctccttgctcagggtggttcctctgtccacccagcttactcctactgcaccttcaaactccacagtagtcacttcctccatgaagccttccctgacagctgctgacaactttccagtcagggctgtcacacaggtgcctcccctgttgttcccggagcaccctgttcttatttctgtcgtagcatctgtcacatcgtgtggcaataatcagttacttgtcggtttttcccattgatgacatgatgacagggtatatctccagcagctatacggtgcccagccccatagtataattgctcaattaatggact

SEQ ID NO: 3175 - DNA, 1115 bp, Artificial sequence
  DNA replication origin
ggccagctcgccccgcgcttccccctcgtcctgctcgtccctccgcccacccggggcctgaggggtctccccgctccgagggaaggggagagggaggcgagggcgtgcgggcatcgcgatggcggggacattttccacaacgtgattgttgaaggctccccccatcccccctcccttaaaattccgggcccttccagcctccaccctcccccaagcccgtgtgactaaaccgagacaaaggggaggcggcctcgctcacacgcgggctcgcggggcgggtggctcggaggggcgcgggcacggggcggacctcgcgcggacggacggacggagacggcgccgccacattcctatgcccgggagcggcggcggcggcggcggcggctcccgcgggaggcggcaggcgcgcggcgcggacagctgagcttctcctccgtcggcgcccgggcggacatcgcccgggccccgatggtttgagcttgcttctccctccctcccgacccccgtggtggcgaggccacgccatgtgaaggttagggccgggacatcccgaggagccgcggtgaaagatgggggatgctgcagaccccagggagatgagaaagacgttcattgttccagccatcaagccttttgaccactatgatttctccagggccaaaatcgcctgcaatctggcctggctggtggccaaagcctttgggacaggttagtggtgtcaccctttccctcccctcttcctcctgatgtggtccacatctcggtttttgttcccgattctcgaatccctccctccccgtgcctgtcttctcgtacaggttaagggagatgatgggaggctaggaagagaaagaaaggagaaataaggaaagcaggtttggtcttcaatgaagggcacgtgaatggtcaggtgggatttggccagattccttttattggatggcaaaatgtcccccccatcccccagtgagcaattttatgtttttacatagagtggttttgatttgtggtattttcttcattgtgttgcgtacatttctgcctcagtcataattgtgattacaccaccaagaaatctgagttggtttctttattattgcaagaaggtggatggt

SEQ ID NO: 3176 - DNA, 1588 bp, Artificial sequence
  DNA replication origin
cccgcgcagcgcgtgcccgccagcgcgaagctgctgagcttgcagaggccatcgccgaacggccagcggccgcctagcgccgccgccgcggcccacagcggcagcgtgagcacgaagcccaggtcagctgccgccaggtgcagcacgaaggtatccaccagccgccgcgggccccgccgcccggccagcagccacaccacaaaggcgttgcccagcaggcccacggcgaaggccgccaggtagagcgcggggatgtagacgtagccgtagggcaggtccccggccggacacagctccagctcctccaggccgtccaaccccgagtagtcccagggcgctgaccccgggctggggctccagggctctgtgggggccatggcctggctatgaggcctgcgcggagtgcagccctgggcgcaggcggcagcagctctgagcaggagggggtttgctcttcacgcccggccctgcacctcccttcctgccacccaagccggaggcaaatgggtgggcaggaaagaggggagggaggaggggatggggtgggaggggcaggcttctgtgagagagatggtggcctccgatttggggctgacccgaggggtaagggcagggacaggcaaaaggggcttcacatctaaatcttgggaggaaaagtcttcagggctgggagacctgcccggcctcccagtaggagcgtggcccattcctctattagttgctcagtttctttgttcgtgaaatcgggatacttgccccactgtctcagggtcgcgttgcaagaggtggtgggtgcccgagagccctaacctcttctcagcctccacttcaccccttcccacctgcacccaccggctgctgtcttctctgttttagaggtgagaagacagagccccgggattttatgagtatggggcctaaggcacgccccaccccaaatccacctgttccctaggaaagactccactgccgggacacagcagatctgggtgggtgggggagcccgccctgggcagtcaagcagttgttagcgtcctgagatgtggggctcatgtcttcaccctatgagtggcttctctgacccagtcaggtcctcatgaagccacgcgaaagggttttaaggcagcgaggaaggggtgtagtcagatcatcctgctggaaaggggtgaaacctgggattcacatctgcctcttccctgtcttctcctatcctaaaaaacctgtcaagccagacacagatgtaagctcagttcaaaagatgacacctaatgaaacaccagattagttgtcctaaattatgagtcaggagcttggaggcagcaagatcccttctgaactgagaaactgagagtaaggggaggattcataaagacgagggggaatgaagtctgaccctgaggaggcagtgggacctaaggaggagaggatgggtgagggaaagcttgctctttctcctgaaggaggcatgcagccacttacatctgaattcttcttagcagatatcccttccacaagatattgtggtagaactgatgtcacagtgccctctgagtctgtccccagtgttcccaggtatgagtggctgatg

SEQ ID NO: 3177 - DNA, 1086 bp, Artificial sequence
  DNA replication origin
cctcttctgctactgccgcatctcgcgccgcctgcgacggccgccgcacgtgggtcgggcccggaggaactcgctgcgcatcatcttcgccatcgagagcacgtttgtgggctcctggctgcccttcagcgccctgcgggccgtcttccacctggcgcgtctgggggcgctgccgctgccgtgccccctgctgctggcgctgcgctggggcctcaccattgccacctgcctggccttcgtcaacagctgcgccaacccgctcatctacctcctgctggaccgctcattccgagcccgggcgctggacggggcctgcgggcgcaccggccgcctggcgcgaaggatcagctcagcctcctcgctctccagggacgacagttccgtgttccgttgccgggcccaggccgcgaacactgcctcggcctcctggtagctgccccgggccgctggaggtgggcggcagcggagcatcgagaggaggccagaggtcccggaggggactgagctccccagacgcgcctgttctggcggcagcaagctgctcgggccggcatcgcatttcctcgcgcgctgcctggactcccaaggcctcctccatcggtttccccggaacctcagaacaattgaactcccctaaaccaggctcctgtgactagctgttccctctcagcctgcagggtacctgagctaattttgtccagtccaagataggtgctatgagatgtagcagacagcaactcggagacccgcagattcaccaagtagacagaagggaagtgggtttccttctctgtcccatcgggaagagaacccaccagaatatctaacccagacccccaaatgccattctgatttctggctgtgctttctcccgtctcccacaatagccgttgctttcagagaaataccttctccaagtcagaccccctgcccttctcactcacaaaacccttgcattgaatctggtgacacttctccccctgtgaagcggcaggactcacctggaagttgttctggtctttccctctggacagaaggtcctgaaatcgctcaccaggcgttttttgaggtctccatcactcagcc

SEQ ID NO: 3178 - DNA, 1371 bp, Artificial sequence
  DNA replication origin
agctgcgggagcagccgctcgaggggcgaggctgtcccctttgccccgctttcggacgcccgcgcggtgggacacccctggcgccgccagtttccgcagcccaggcgggacgaagcttctctcttggtcccagtgccgcctttcattcgcgcgctctggcctggctggggccagttttcattcctggagacccctaagtggaagaatgaaaggagcctgcggaagggcgctcccccgaccctgtcctccccgcaggcgccctccccctcgctgtgcggcgctgcgggtcgcgcggggatggcccctctccccggccctggccccggcccactcccactcctcccgccgggcccgctggctgaactccggctggctgaagggaaggagcaccctcccggcgagcgcctcctgctgcccgctgcgagctgctgtgtccccgttcatccattcattcacttcccggttttcagttgttcaataaacatttattgagcacctactagtgcccagcacgatggatcaaagctcaagccccattcactggaggattctccaatctagacgagtgatgaagcagcacagtacctgaagtaagggctaggaccccgggcaagaagagggaaggctgacccaggctgagcctcggcaaaacttggccagaggaagcaataccagaaaataagagagggacttgaaacagcagtgacaggtgtacaaaagcacagcagcaagggagcacagcaggttccaggagctgcagggaggttagggtttgggatgaggaaggagtaaagggaaagaacatggaagagagacgaggctaattcgtcagtcagtggctcatccagaagcagggcagccagacgcagaggctcacgcctataatcccagcactttgggaggcccaggccagaggatcgactgaggtcaggagttggagatcagcctgggcaacattgtgaaaacctgtctctaccaaaaaataaagaaattggccaggagtggtggcacgcacctgtagtcccagctacttgggaggctgaggtgggaagatcacttgagcagggaggcggaggttgcagtgagccaatatcccgagactacactccggcctgggagacagggcaagaccttgtctcaaaacaacaacaacaacaaaaaacccacaacgaacggccaggcgcggtggctcacgcttgtaatcccagcactttcggaggccaatacggacggatcgcctgaggtcgggagttcaagaatggcctgggcaacatggcaaaaccccatctctacttaaaatacaaaaaaaattagcgagcatggtgctgggagcctgtagtcccagttactcaggaggctgaggcatgagaa

SEQ ID NO: 3179 - DNA, 1194 bp, Artificial sequence
  DNA replication origin
ggccatccccgcgcgacccgcagcgccgcacagcgagggggagggcgcctgcggggaggacagggtcgggggagcgcccttccgcaggctcctttcattcttccacttaggggtctccaggaatgaaaactggccccagccaggccagagcgcgcgaatgaaaggcggcactgggaccaagagagaagcttcgtcccgcctgggctgcggaaactggcggcgccaggggtgtcccaccgcgcgggcgtccgaaagcggggcaaaggggacagcctcgcccctcgagcggctgctcccgcagctcgctcacccctgcgggtacgtcgtcactcccgcgtgcggccccgtcccgactcttggatcggactcttcagtcccttcttgcgtcttcccctctttcctctgggccttggtatgccccaggggacagatgtcttgggatctttaacatttgggatgctgcaaatgccgaagttaaatgaaatacctccggggagggcaggccgcagggaggctcggggggagggaagatggcctggacaaacaggtcctgaagctgcgaggctggagtggagggcgcaggggcaggcgggcggcgccagagctccatgggacaggtaagcgggaaaacttcggggcacccagtgcgggtgaactggggcgggggatcgggcccctgaacccacggtcttcagccttagcggagggtgccctacagggaatggggtaattttttcaaaggggcaggaattctgagttcctaccaaaaatgcacatttccagtccctcaacctttctccttcgaccttcttcgtgcctgtggatcttcctggccaggttccgggaagccagaaagcagccaaacaaaaggagcaaagtctcgggccagcctggatgtggagggcgcagtgggggaggggagcagggtggacaggacaaaggggctttttagagaaagcctagaggtctcatttcagggcgcattccaagctggcttggagttcccctgtcccagcccacttcacctttgcttagtggaggcgaacacctttcctagtgagcagggagcagacgcgagtaagaaaacagtgaaggaaccatctcctacccctcttgcctggagggtcccgggctatttcacttcttccttttttcactgttgtctctagcgctggccattgattccttaattct

SEQ ID NO: 3180 - DNA, 666 bp, Artificial sequence
  DNA replication origin
gatgggcaaggtggaggaagggccgcttatgcccagagtcaacccctctctgtttgactttgtaagaaagtgccaagcctctatggggagggacggtgtgtcacggaggactggggaagggcagggctgcaggctctttgggagacccagagaacaagctcccaatggggcggggggaggaagaactgtcccctcttagggcccctcagcctcagcctgggcagaaaatgaggtggtcagcctggagcactctggggctagcattgtttggaaaaagggtgtgtacaggaatgtgaaggtgtgctgggtgtgtgtaccggagcagtgggggatgctgggggactccagccccatgagttccgctccacaggagatgcctggtgaaagcaaacttcctctgtcatccctgcacttgggggtagggagtggggacaggactttttaggggctgggggaggggaagcaatccagacatgtattgaggcactggaatctgggtcgggggaatggtgggaagatcagagagtggggggaaagggaggtggtaagatgaagacttgaggggtgcagcctgctggggacaggccaggcaacagtcagcgttagctctgcttccgccttgaaataggctagattccagtttcccatttgcttgggggtcggtgg

SEQ ID NO: 3181 - DNA, 695 bp, Artificial sequence
  DNA replication origin
cctggagcactctggggctagcattgtttggaaaaagggtgtgtacaggaatgtgaaggtgtgctgggtgtgtgtaccggagcagtgggggatgctgggggactccagccccatgagttccgctccacaggagatgcctggtgaaagcaaacttcctctgtcatccctgcacttgggggtagggagtggggacaggactttttaggggctgggggaggggaagcaatccagacatgtattgaggcactggaatctgggtcgggggaatggtgggaagatcagagagtggggggaaagggaggtggtaagatgaagacttgaggggtgcagcctgctggggacaggccaggcaacagtcagcgttagctctgcttccgccttgaaataggctagattccagtttcccatttgcttgggggtcggtgggatgggagatcttgaggcttattttttataggaaataagttccattttggtctctggctccttgcatttggggagtggacttagggtctggggtcacagtggacctcctgtggagtaggaaacaggacttgggctcaggtcagtgcctgtcagtgccccatgaacatgcgttgctgggggatggatgtaaataatcaacagagaagtgatggcctcgatacccttgggggacaatgtctgggataaaaagaacagcctgatcctctctc

SEQ ID NO: 3182 - DNA, 966 bp, Artificial sequence
  DNA replication origin
gaattgcagcccctccccaacaaaacagccctcctgcctggccccggggtccctccagagcagccgtacctgtgcccggggtcccagggctcgtccgaagccctctctcccaaggggcaggctcctgacccggaaagctccttggcggtccagtgagtgggggcgggtgctccggaggcgtgcacgctcgtgccaccacttgagctcctcggacacggcggccttgctgagcccccggcctgccgggctgtccttcagggagggcgtccgcacgatgcggctgcgggagggcaccagacgctggtagcgcaggggagtgccctcctcctcgtaagcagggcccggggctgcgcggcgcagctcccactcgccaggcggcagggggctctcagccaccaccacgtaccgccccgccgggaaatagccaggcggcagcagtagcttggggtggtgggcgaccagctctctgctgccggctgggacccaggccccgcggtgacgatgggtcttgggaggggagagaggctgcagaaaggagatgtcggggctgctgctgcccggcgaagtggggtgggagatgctggagacgtcagagccactgtcttctgagcaggagtggcaggcggcgtggggcagcgggggcttggtcgcgggaaagcaggaatctggcactgtcaccgtgtagtgagtggggcggcggcggggaaaggcgctgcgacctcggccctcaggacccgcccggaaggaatccaccctgaagagggaaagagaggcattctgagtgtggggggcagaaactccacactggggttggggcgggaggtggagttaaaacaggtgagtcctgctctacctcaaggcccaagcatggccctcgtgcaagggtcttaggtcaagtctcccaaagcaaaccaacaaaccctctgccgggctgcgtgggtgccaacgcattccttccctgtgtgc

SEQ ID NO: 3183 - DNA, 1080 bp, Artificial sequence
  DNA replication origin
ctgggattacaggcatgagccaccgcacctggcccttctaacgttttttcatcatagtcccaaaaaccaatactttacaagtggttttggaaaggcaccacttttgtggcatgttctggttgggagagggagtcacagttcctactccccccaccagctatgcttctgctctgagaaggtggttatttatacaaacatggacatactcactcccaagggctgatgagatgctgaattttctttgggggcattcattaattgtcccagctgcagcgactggagcaagtctggaagctgcctgtgctaagaccacccagctgtccctgggttctcatcctagggccttctttgcttccaggtcaggggacctgcttcaatgagaaagcaactgaattgaggctaggagaggtagggagagctgagttctgacttcacctgtgcagaactctctgcccccatgttacctggactggaacagactgtgaatatagcagaaggttccaagaactctggtgtctgacctagaagaggcacagttctctctactggaaagaaaacgatgtagccgattgcacaagggtgccaagggaagacccaggatggcccatcaaaggaacctgggggaggatgcaggaggctgaagggatgcacctggcatttctctcactgtgctcttaccgcatcagcaacccccaacttttgggcctactctgccccccatgcgtgaataccctgcttggatgctgtgcttttccggtttgtctctaagcccctttctccagggcatgttggtttccctggcctctcagtgtcctaactggagcccagagtgccttgttctgagccaggagacggctgagcactggccctccacacctaagcgtcctttacattaacttattggtcttgtataacacctggtgccattgccaagtggctgtgtcctcagctacagagctggaattgtgtggggtttagtgctaaatacttcaataaagtctgttttttgtgattggctgagctggggatgagggattttttatttttatttatttttattttttggtgtgtgtgtgtgtg

SEQ ID NO: 3184 - DNA, 1604 bp, Artificial sequence
  DNA replication origin
cacttccccaaggacagggcactggccaggcagagggtagagatgggtggctcagcgcctccaagccattcctggagctttgactgcccggagcccaggctcatgagaaacagccccttccccatacctggaagactgggacccctccttggggtggtgaggaggcggggctctccgcaggcccctcccccatcggcaagagtgcccacagcccctccgctgcctggggtcccactgaggccaggggcggggagcgccaccttggacacttccgtgcttgccctgcagggaccgctccagggccccggagcacagcgccccctggagaggctgtgcccggacctgaggcgccggcgtgtcaggtaaaggggtcccccttcccgccagttccctccacagccaaggaaggggcggggaagggccccggccctcgctgcccaaggggcgcctccagccttgcctgggtgcggccctgggggccgcggggatctgtgggcctcaggggtctggggcactccattcttggggaaggtaggggaggggagacggctccagggtctctggagaagttgtggggtatcctgatctcagacctgagcgcttcgacctattatttgtggggaatggggcgctggattctgtattttagacgatggtgagttaggcccggggaaaacagggtgagcaagttcccaggggatgacctgtccaaggggcagctcccaacaacaggacagagaccagctaagaggggggatacaaaagagacggacacaggggcagagcaaggccctttaaggcagtgagcgatgggacgcgcccgtttggggacccgaagtgcagggcggtgagagaaccaggttgcacagcagtttcttcctggtccaccagcaggcttccctgggccatgtctgggaggggcagacatgtgggggctcttagctcccctaccatagggcagaagtaaggttatgaattagggggtggggacagaagcctctgggaagaggggacctcgggattttagcagcaagactcccagaggcaatttggcctggaggcagagggatggccactgtgacctaggagcccacctgtgagtctgagattctctatgctggaagatcccagaatggaagactactaggcaaatcaggagggaccagggcccttcagagggtcccgaatcttcccatggggaagaaatgggaagctgaccctggaacccggcactggccctactcaaccaattccttttgtggtaaatgggcagggtctgcctcctgcagcttccccctggagtgagtgcagaggctgtatccctaggaaggagtatcttacaccaggcctgcccactgttctcatcgcaagctgcaggctgctgccccaagtgtacagatgaatccgagttctaacaagcgaaaaccaaacagagtaacctttgaaccatcgacattacaaatctcttggaagtccagcttaccgggtgagcagttggttctgtctctcaattaactgtgggtgctcagaagtggtggtgattgcacaagccctcgcttgaggtgtacctaatgggcacacatctgcccacttctggctacccc

SEQ ID NO: 3185 - DNA, 987 bp, Artificial sequence
  DNA replication origin
ggagagggaggagggcaggagagggggccacgccctctgtccccagagcagctggccccatcggccgggtcacagcttcccttccatggtgtccaggctgctggggtcgagggtccgggggcatccctctgacctcactcctagggtgggccgctgtggggtaaccgccggacactccagaacttcaccgtcaggtcactggggtggaggacaaagtggaggggtgccggtcagctcttgcagtgggcttggctggctgcccccaaaagtagaggatgaactggattccccaaactccccaaatgtggttggggctgggaggcaagcatggcttacggggaggtggactgcaggtggtggggtgctgggcagatggagaggcctgtgcactcagaggcccccaggggagctttgtcatgggttttctttttttgggggggtgtttcgttttgtccaggcctgaaggctcccccttctgctccctggcacccatctcctggggcctgtcccactgttcatgcttggaaaaggacggtgggtgcaggagggacaggcagggcacctctctaggccaggcaggacaggaagggaaaggaagaagaaggagtaaaataatctcataccgttaagaagcagctcagatcgaagtggggaaagagagggaaaaggaaagaggggaagaatgaaagaggagacagggagagttggggagggtcagggcagggtggtggcgcggccctttatggccaggactcggcgaggaaggcagggggtgagtccagggacgtaattccacaactttacccggcagtcactgtgtggggagagaggcgaggacagagaggagaggtgggaggagatgggaaggggaggggagagaagggacaaagtcggaacaagaaagaaagccatctgagtcgcaccccatgggacagagggcctggctgctccccacacagggggccagagcgggtgggtggggtgtaa

SEQ ID NO: 3186 - DNA, 1492 bp, Artificial sequence
  DNA replication origin
ggaggtgtgtgcgcgtgtgccgcgccgtagggagcggcgggtcgcgccgccggctgtcagctagctccgcgccgccgcccgatggcgcgaggaggcgcgcgggcccagccccggggggccggccgcgggtgagcccctcggcctgccgcccgcgagcatgtcacctccagccgccgccgccgcagcctccgccagccgcgcccgcgcccccgcctcccgcagccgcagccgctgcctcgggcattggcccccagacccccgcctctgatccacgcccagaccctagctccagagggccatggccggccagggggactgctgcgtcaaggtggccgtcaggtagggacccggggcggggaagggggcgcgcggagaagcctcgggctttgtctcgcgtgggctttgggcggggggcgcgagcaccgcttgggctggagcctgcactcccggaggaggggccggcgtgggacgggatggagggcgccgcgcgctggccagtctgccgcaggggagcggcgaccccgccgactactggaaggtggctttgtttgggtggtaattttgggcccctcttgggagcccttaatgatcagaaaatcgaataaacaaggaaatccggtatttcacacccagctctggcccaggccggagcgtctgtgcgtttcctcttcgcctccccacgaggctgctgtctcatacggggataccagagagggaaatttcccctcatccatgcgagtcagctagttatgtgctcttggtccagctagcaaaggcagcacacccaccctgggagccagatctgcagacaaagatcgggtgcggggaccaacggaaaagctgggatgatgccttggccttctgtgggaagtcaatggctttgggggagaatcctaccagtcctgtcccaagaggagatgggcctaggaagggaggaagaggtgtatctgaggtgcttctctctgagagggcaggagggtgtgatgcagatgccccatcctcaggcactcagataaaattgagcaggggagggttgcctagacttatctggggttccattctcaacagctccgggacttgagccggcagaaatgagacagggagaggacatggctgggtgggttctattgggaggggtacacaaaggtgcaggagcaggaaatgctgtgaaattgagccatctgtgttctttgtgctgggtggagatgcttcacacctcaccacttctcccagtttttgctttgggtttttctctttgagaggggtgtcttggcggcagagtgccaatctggagctgctcaccaaggtagggatgtggcaagaacatctatctctgccccagccctgtatgatggagggggcgggggattgtccaggtctagggtaggtctctcaggtctctagatcccttgggtcatatgtgacccagattccaggggtcctaggaggttgctcctagacagagtcagagatggcaatgaaaaagctttct

SEQ ID NO: 3187 - DNA, 1545 bp, Artificial sequence
  DNA replication origin
ggtcatctgggaagcctggaataagatatacatgtccaaatctggagtctgttgcttatatgctggaattcatacatgtgaggctcagtttccccatctgcaaaatttaaaaagaataaaaaagcctagcttacaaggttatagggaaaaaatgagaatatgtgcataaaataccttgtgtaggtggtccatatgtgttagtctcctccccacgaattattttggttggaagatggggaggaatgttgcaggatatgactgcaacattctgctaacctcctggtccaggagaggtgatcccctggccccagggagagcttcctctagattcaaatgctaataaaaggtccaggataccaccaagacctcttctccagcccccatcatgggggcactgctggcggtgctcctcctgtttgccatggggatgaaaaggatgtgttgattggcccttgaaatttgcccttgaaattatctttggttttgatttgaccttaataggtcaagccaaacagggatctgagctactgcatgaagcagttattggcggggaggggggtgtgagtggaggagggaaggggaggaagatggtaccaacagatgcatcctcagaccccagtccacacccttgccaaaatctctgacatggtttcatcatctgagggtaatgtaagaggcctggagtcagactccccttcctcccctcccccagagatccccatccacatctggggctgcagctgggtcctcctcttgggccctttccaggggagggagctgggtgaagtgagggcagctggtgaggggccctgtgaatggccccaatgttgggaggcagggggcagggaagaggcgtctgggctcagagggagggagatggactgggaagggaattgtgactttgcagcactggtctcctcctccatccaggcccagcgttaaagtctccatggtcctccttgtcctttatacccattcctgcaggcagctgccctccttcccttccccacccacttcaccgcccagcctctctacccaggtgctcggaactgagggccccctttgttccctcctttcccccagggcagctcaggcctcccacactgaccctctggccccacagccacaacaagcagagtgtgagccaggcccagtggggtcatctgtgggtcataaaggtcaatgggacagtcgtctagcagtagggaggggctagtcttgggctaggagcctggccaggaatcaactaaaacatgagctttaagatgctgcagggtggaggtgggggaaattttagttaggggctagcaagaactcccttcgagaagggttggcgaatttactggaataaatgcagaagggaagctttcctggctcttttgaactataaaccgtcaatcgctgtgggatccccgggagaccagggttcttaccatgcttacccacgaactcgctctgtaaccttcggtagttcccctctttgaatctcagtttcttcatttatgaaatgagggtcccattgaagccgaggttctgctactccag

SEQ ID NO: 3188 - DNA, 1464 bp, Artificial sequence
  DNA replication origin
ggcagaggcctgagtgggagaatgggaagggccgtgtctcagggaaggacatggctctggttgtctctaccctgggctgacattgctgcagtccattcagtaaatgacctatgaggttgagcctccaaggccctccccgattctgggtacttactgtttcccaggaagcagagattgcaacacccttgggtgccggatgtccactatgggttgaggtggtgggtctgagtgaaggggagatgcctggctccacacctccacctctggccagggcacaggatgtcgggctgtgggatggtgagggtggagggggaagattaggaggaggcgcttgtggcaatctgcacttgccctgcacaacactgaacagcaatcaaaagacaccacagtaggctgagaaaggggctgaaagaaagggaaaagctttatatttagtaccttcatcagcactcatttcctactgtttgaacgtgggggcccacattttcacttgtactgggccccccattatgtagcctggctgtgaaggagcgcattgtagaaggccaagcgggagaggggattctgggcagaggaagccacgtgggcaaagggctggaggcaagagacagagaggtcagggggggatttagaaaaatctctcaggccccatgtggagcatggattggggtgacgtggggtgagatgggaagcagggaagggggcagggagcccagggaagtcatccaggcaggaaacaggggaggctgggccaaggcactggtgatggtaaagatggctgtgaggtggccttaagaaagacctgccaggtggaatccatggtgaggactggaggtggggatggaggtgtgggggagggggaggatgacacttgggggtcagaagtggacagagcagatggcagtatcacttaccaagactgcagatgggggtagggaggaggaaggtggtgagttcaacttcagatgtgtggtgatacaggtgcctgtgtccactgatgggtaattggatttgcaggtccaagcattttatgacagaggtttcctcactttggcacatgccaaactggctgggtggggcaggggcggggatggttgtgggcaagaagggcttccctcagttgccgtgtgtgcgagcagggccgggggtgtgactgctgtctgtgggaataggctcccttggcagtgtccctccatatcccttctgccagcactggctgagggtaatagacttggggcccgggtttcctggggctagaggtacacctctgactctgcctgctctgtgtctgtgggaaatcccaggatcttccctgaatagaagaggaaactgaggcccagagagagcaaggagtcctgggaatgaatatgcagctgatcagagggtggcaagaggaggatccaggatgctgacatcctggccaactgtgggatgtcacagtggcacgggcctctgaaatcagcc

SEQ ID NO: 3189 - DNA, 1033 bp, Artificial sequence
  DNA replication origin
agcaggagaaagccagattcccagggaagccatggagccatcctcaccccaggatgaaggcctgaggaagaaacagcccaagaagccagttcctgagattctgccaaggccaccccgggccttgttctgcctgaccctggagaaccccctgaggaaggcctgcatcagcattgtagaatggaagtatccttcagggcccgggccgtgggggggggtgtgcgtcatgagggagggattcggggtgatcacagagcacaaacttcctacaggagggccagggaggcctggcacttagacatggggtgaactcacagaattgagtgaggagctgggggaaggagccctcggctaagcaggagaggaggaggaggaagaggaggaagacgaggagggtgggggaggaggaggaagaggaggagggtgggggaggaggaggaagaggaggaggaggaagaggaagagaaggaggacttggtggggcttcctgggcctgagtgggccacccaagtcctggatgacaaccagagatgcctactgaccacctatgggtggggcctgtttcatggggactgttcccatgtgtgcccaaatccacattatcatggggtgccactaggtttttgaagcaccagcctcattttagaataggatagggaccaaaaaaagatgcgatggcctctttgagaaaactctcccttgtttgggttgggtggggggtgacagtggacagaggtgagctgaaggaaggcttcctctgggggcaggtcccagctgaggacagagccaaggggagaaatggatctgaaagacacctggtctcagtggctccaagacacaggccaaacaagcctggttgttctagctcagacgtgccaccctggggacagggactttgaaactcatgctatgtttgcatttgctctggtggggagaatgatgaaaatatctgggttatttggggaagggaggaaggagtgacagagagaaggggagggctgtgtcaagtgggttctgagagcgagggtggggcata

SEQ ID NO: 3190 - DNA, 882 bp, Artificial sequence
  DNA replication origin
taggggctgctgtggagctgtcctgacttaggctgcccagtgccttctccagacaatgtcatggggctgaggaggggtaagcctaattttggcatgagggggccactctgcagtttgaggttccatatccaaggctacctattcctgacctctgttgccccaggcttgaaaccttccatcctgtctccctctcccactgcccctgccccatcccaggcctgtgtgtaagttcttcccccgacccaccccaccctcctcaggggacagattgggaagtcactggctgggctgggtggaatgacagctgcctggcctcagaagctcaggcccggcagcggggagccgagtggaggctaattttacttgctgggagcgaggagagtaatcctcctgcccccactcctgcccccgccccctggctggctcagcagggcaggctcagccgacagcctcagccagcctagtccccaaggcgggggcattggggacacagggaagggaaagcactggggtgggggagcaggagaaagccagattcccagggaagccatggagccatcctcaccccaggatgaaggcctgaggaagaaacagcccaagaagccagttcctgagattctgccaaggccaccccgggccttgttctgcctgaccctggagaaccccctgaggaaggcctgcatcagcattgtagaatggaagtatccttcagggcccgggccgtgggggggggtgtgcgtcatgagggagggattcggggtgatcacagagcacaaacttcctacaggagggccagggaggcctggcacttagacatggggtgaactcacagaattgagtgaggagctgggggaaggagccctcggctaagcaggagaggag

SEQ ID NO: 3191 - DNA, 1245 bp, Artificial sequence
  DNA replication origin
cgcggccacctccccggcgccctggctgagaagcgactcagcaaggtggagacgctgcgcgccgccatccgctacataaagtacctgcaagagctgctgagctcggcccccgacggctcgacgccccccgcttcccgcggcctcccgggcaccgggccctgccccgcgccgcccgccaccccccgtcccgaccgccctggcgacggcgaggcccgggcgccctcctccctggtgccggagtcatccgagtcctcctgcttctccccgtcgcctttcttggagtcggaggaatcctggcattgatcgggcctgtggccgcccccggcttggaggatgatccgccggccccgtcccactttcgggagcagcgggaggctgttgggtcacccgcgatgcgccgcaggacggtgactgtaggaggtccgcggcgctcccgtgtctgcgacaccctccctcctccaccagcttggggcggaagtgcagggcagcgggtacgatgggcacgatagagacctaggagctccgtgggtgaagcgaggggcagggcctgggactgctccgggcgtcctgcgtcccctccggggtgcagaggggctccccaggacggtcatccctgggtctggctcccgctcggcctcaggtggctctgctccgtccttccttgccgcaggcgcagtccagtctctgcgagtccccgggatgcgagcccgactttgagccctcggttaccatgccactgctctccaccagatggcctcagatactagcgacttctttgggagcacgcttactcctcgagaaaggaacccagaggaagggatgggaggccagattgctgctggcgctcagcccagaccgaacctacagactcagcagaggcgacctgtgtgccccggtggcgttctctggcttcctgggttgggagggggggttactccctccccgcatcccccccatgaggtcgtctagttttgtcccaggttgggtggggactgtggtttttttccctcagactgtaagccttgggggaggggggcgtgcatataggtacataggcactgcgtcggcaccaaagagctaaataaaaggattgttgaattttctcattcctagatcattgtctaccctcacccttcctggtgcccctttcttattctcactcccagcccagagtacttgctgggaggatatgtggggttcgctgttagctcagcacatttaagattcagtgttgttagctcaggc

SEQ ID NO: 3192 - DNA, 1240 bp, Artificial sequence
  DNA replication origin
ctcgccgtcgccagggcggtcgggacggggggtggcgggcggcgcggggcagggcccggtgcccgggaggccgcgggaagcggggggcgtcgagccgtcgggggccgagctcagcagctcttgcaggtactttatgtagcggatggcggcgcgcagcgtctccaccttgctgagtcgcttctcagccagggcgccggggaggtggccgcggaggcgagcgtagccctcgttgacgcacttgactcgctgcctctcgcgctcgttgcgcttctggatgaaggctggctcgaaggggtattcgtagaccccgaaggcgccggggaagggcacgtaggggaacacccccgcataggcgtcgtagtagggcggctctgctgggcccgggtacagcaggaagggcacgttgcccaggggctcggcggggggcaggggcgcctgccggggagggggcatgacgcccagctgcatgcagctggggggccccagaggcctccggtccaccagagcccggcagaagttattgttcatggtgccgcgtggagctggacccagagcgaggcctccaccgaatggccccggcttggggtctgcaccgtctccaccagtggggcaagtcacatcgctagcagcagctcttgggtaccaggacttgctagggcctcttttcgccctttagggtggcttccaatgactccctaacaagagccatcgccctagacaagtgtggcccctctcaggaggtcggtgcacgccttctcagagccagcccatggcgccgcggaactctgagggcccgcaccccgttccgcagcacccatgggcatggccacagacccgcccaccctgcctcttgctgccacccaacatgggcacctcaggcctaaaccacgggctccatgtcctccacacccaccccagcgcctggtccttggtcctcgcggccttcgggatccccgggctgtccggggtccccaaactgatggctgctgttaggagtgcgccagctcagtggagggagtccccgggaacatttctaaagaagaggagaggagagtgaacatatcagttaggaaagacctgtattatgggcttctttgtatcatccccacccgcaaacgggattgtaagcctcatgaggagaggcggttggctactgaaggggcacagatctgggttaaaatcttgtgtccactccttaatagtcgggtgaccactctgagtcgtggtttccataacggaa

SEQ ID NO: 3193 - DNA, 1175 bp, Artificial sequence
  DNA replication origin
tgggccagaagccttgcagagaggccccatctacagggagagagctcagaatcagggttgggcctcccagaaaaacaacagcaagatcgtggcagagacagcaacagtgatgaatgctggaggaaagcaggaggctgggaggctgggtccagtcggcttcaggctggaggactggggagcagcagggaaggaaaggagcacagaggggacagtggaagacaactggacaggcatgccccagagcaactgtgggatgctcgactgggacctgggagaggaaagagcgacctgcagggatgccagtctgatcctgtagggtcctggccaagaggaaagcagatagagatttcacaggatgacagcctggctgagatggacagaggggatgctccaagtagggaaagggggagaggaatagtagtgtggggtggtgggactggcctgggagaagctggagacagcaatggggcaggaggtcctggcaccctggagcttactggaggaagaggttctggctccaaggtgggcatggcccctgaatcctggggttctcagggaggtagagatgctgactatggggaagccaggggctactgggggtcaggagagttgctagaacagatacctggaggcaaggacttccaggaaccatcaatatcaggtggtagaaaattccttctgggagatgggagtcctgagatcaaagctgaagactcactgcaggaggcagatggtatatgccggggggagtctgtagttacaggaagtgcctacaaaactggccctggaggcccaggagaccccagaggctgcgaaggtgtcctacaggagctcaggggaagggatggccaggaaacagcttgggcctcgggtgaggtagagtatgaccccagaagcttccagtcttcccagggctggacagcaggtcacagagcagcagggggtattggcagaatagaatctaagggcacaagtccttgggatgacacaccatctagcctcagaaaaactggggcccaccatgggcctggagtgctggggcccagtggaggacaagagggtatgggtggtatctgggtggctggactgacggagtctggtcagggggtggatgccagaagccactggctaagtagggctccaggcctgggtgctcagggatctggggggacact

SEQ ID NO: 3194 - DNA, 1156 bp, Artificial sequence
  DNA replication origin
ggctcaggaggatctggggaaacgggaccagagggtaagatgggttatggagatggttcagggaggcttggagtaccaggctcactggctggaataggacatgaggctggacccagaggccataaagccatgggtcacaggtcaggatattgggtagcatcagagggtgacacgaactccaaggatggtccagagcgagccagggaaaccaggcttgtggatggggcaggacctggggtggaacctgggatggctggaatgccaggcactgcaggtggcatggcacacagagacagcctcaggggcacaggggtgctggggtctcagggagggcgacagactctttcagatgagcgaggctccaccaaagatcttgggggctatggaacttcagggatccctgaggcctcggaggctgctggtgccaagggaaaaccagatgtcaaagaatggcaagacagttctgggactccagggtcttctagagacagaggggctcccagggtgaaggataggtctccagaccaagcagggataatgggggcttctgggtttcttgatggcaagggggcagtggaaggtgagacctgggcaggaatggctgctctagggtctggatatgaacgggacatctggaaagcaggcccaggaatgacagacaggggtagagttgctggccagggggggttggcatctcagggaggtggggactcacttttgggaggcagaagggtaggctcagggagttcagtggggacaggtcaggatctggacagcggctctatgcctgggggaaggggcaagtcaacatcagggcctgctgatagacaagggacgagcaatgcttgggctcctgattgggaaaaccaggggtttagccaaggcagcatagatgctgggaagcagcccgcaggctccagagcttccggttctctgcaggagaaagatgccgcttttggtgggacccatgaagggccagggggctttaagggtggggagggtgcaccaggccaagaggcggctggtggatgccgaagcccatggtccctggatagcaaaggttcaagtcctggaaggggcagttctgttgatgcagaggactcaggtatcctgggcaaggggaattctactgagtgggggaatgccctcaccccaa

SEQ ID NO: 3195 - DNA, 1522 bp, Artificial sequence
  DNA replication origin
gcccagctcctcggcaccccgggccgcggcacagcgcggggaggcgtcccagcgccaagctggtcggactggttctgagcaggaagtctcccgccctcgccccgggcagccgaccagccccacgccggccccgggcgtccgtcgttcggtcccgcgatccgtccgacggtccacccagtgcttgcggcctcgcggccgggccggcctgggctgcaatcaatgcggctttgtctgggacgcccacatcccagaggccattcccgggtcggcaaatcggagcgcggccggggcgcgcgggggtgagataagcggccatgtgatcccacctgggctggaaggggaggggcgccaggtgaggcggcggccggcggggcgcgggcggccacgcggggctcctgcagcatggctgtcagcaggaaggactggtccgcgctgtccaggtgagcgccggagggagccgggaggggcggggggtcggcggggagcctttgggtctcctctcctcggggcaccggcctcctccccgcctgggaccctgacactgaggctggatcctggtcttgctgcgactcgcgggagacaggattggggccaaactcgggacccctgaggttacagggtgggtcttctcccctcggggcctgaggccccacacagggtgcttaggggaaggctggtcctcagtctggacgcccgctgggatatggccccccctgtggaaggtggaagcaggaaggaacgttttgggggattgtggaggtgttcaggagtaacctccaagcctcattcctgagagaagcctctctcactgcccccgtgtgtctctggcggagaggacccctgggaggtgtcccacagcccctcttgggagggggagcagggagagccgtcttggaggggtcagtgaagaggactggagggaagcagacccgtctcccactaaggacgctcagaatctcagcatggcattttggggtggcatctgggctgggaaccttaagatagttgccatccccatctgtgctgctgcaatctttacttgtacactggtctcctaaagggtcggggatgaggcatcctacccctgcctgctggacatcccatcagggtccgagaggcctggggaaggcgggtgttcagaaggcagcacccctcatggagattggtgacctctagcgacttctcttggagcgaccctgcacctctgccaagaaggccccctgtgagcattttcacctcattcctccactgggcgcccccgtcccccatcttgtccctaaggaaactgaggctcctgcggtagcccagagctggagcctgctcttttgatccctttctagccaggtagatattagcctcttagctcctcccaggtgggcatttgggtcttggcctttcctgagccagggctatctctgccaggtgcagaccctccagccatttgggtcctgtaggctttccccagcaaggcatctttcacaggtttttccagtgctctagtatgtcctctaccccgctcctg

SEQ ID NO: 3196 - DNA, 1626 bp, Artificial sequence
  DNA replication origin
gtacagtagctggcacttagaaagtatcccataaatgtacagtgtctgatctcaaggaactttctgggcattgacatatatgtcattcacttttccttacttctagggttgtctgcatacaaactttccatgtctttgggcttttatatctgtagagaggctgttagattttgggcttttagaaacaggactgttcctgccttcgtgaagtgtccctggcatgaccaggcttcagatgacttcataggagtatttctcttcctgtgttgaggtgtcagcactgaccagccatgggaagaacattcagtaggtccctagggagacagcagcttccctgacagtgtcaggccccgggtcagaggatccagggacctagactattggggtcccctctttctcttttcctgtaagcagcatacagctccagggcctgccttggcctctgttcagaactccctggagccttgtcgatattcatctgtgcactccaatgtcactagcagggaactcatatgatttccacaacctggaaggaagcagagcaaggtatcgtaacatccactccacagataaggaaactgaaggagtttgtcccaagtcacacagttcacaaatgtcagaatcagagctcaagtgtgcaagttaccagtccagttctcatgtcctggacctcgtcccacccttgccaagaaggaaggctccctggaggagggggtacttcgggagggggaatctcaacaggctggctgtgtctgtgtttccaggcttctgcccggcagctagcttgccctttgccgtgagatctcagagctggaaggcctgacatgagcaccaaagagaggctgaggctgggcagcgaggcccaggagcatgagggcagttctggctctggctcaggctcccttttgatattctcatcctggcgctggggctgtgcctccttcctctcagggcaggaacagcaactgtgcgctgaccctgcagttcagatccatcagggaagataagattccccatgctcaacgcctgaccctctcttagcccaagcccacctgaggctggttcctggatagaaagcacctggccccgcaccagcccagatgggcacctaaagggagccaggtggtgtcaggggtgcctgagctgtctcacggtgctccaaaattcgagtcctagatatctgtgtttaatctttccttggggaagaaaaactgagcttcctctgcccttattatacaccctgccactctagcccaaagtccagtatcagggagcaaggacagtgcctttgacatatttgtgctttcacaaatgtttgctgaattgagtctaagattctccctttgggtggggctgggtctaccaggggcatgttttgtgtgcagctcagaaagcaatgcctcattcatctcagcgaggcctactgggacggtgggcccgggtgggttccgaagccagggagtggggagggcgctccctgcgaaggggccccgaaggcgcgggcgctctagacccgagatcacagtacctgcgctaacttttccgctcggcttcttgctcttgagcgtctccgggctaagtcgggttcccggcaggggtccccgcccccagcccagctcctcggca

SEQ ID NO: 3197 - DNA, 895 bp, Artificial sequence
  DNA replication origin
tgttgtttctatgtgtgtccgagcacattgttggagggcgagcagttcatcacctatgtcaaggtcagtgagtggctgcggctgcttctctctgggagagggggcatctggtgcccagacactccaggtgccaagaacttgaaacagatggcttctcagacggccctttccctgtacccttagccatgagcctcctagccttatttcaggaccctgagaaacaagcaaagatccctcctgagccatgaaaggcaaatttcctgcactgtgtctggccagaaggtgcctttctgtgttggttacttgtccattcgtttattcgatgagcatctactatgtgtcaggcactgtggtggtcactgagaatataaaactgcataagacatagtgttgacactcaagtttctcccagatgagtaaatagatgacttcagtattgtggatgccatgtagaaagagggacatacagggctatggggcctggaggagcggctcctagtgcagtcgggtggccagggtagacttcctggacgagtcagtgctccactgagacttggaggagggtaggagtataggtggattgggagagaagggcctttggagaagcctctggtgatctggggatgttgaatagttctgtgcagctgggaccagggggcataggggctagggaagctgcaagggtgtgatcacagaagcgcatgtgacttgaccacaggtttgcattttatcctcatattgtcattgaaggaaggtggttcgggcggcagtgggatggagaggcttccggagcagtcagctggagcggtgaggaggttgctgccatgaagctggcagaagacagtggctcaaacagatacggtggcgtgggtctgtggaggagggcaggttagga

SEQ ID NO: 3198 - DNA, 1281 bp, Artificial sequence
  DNA replication origin
gaacgggcgggcggtggggctcacggcctagggaggcgcggaggcatctggcagaggcgggtcgggctgggccagctggggtagagcggaggagcgggtgccggctgaagcggggcggtgggcgcggagcgcgctgggggcaccgacaccacctcaccggcagccgggtgctgagggccgcggtgtgggtgcgcggagcagtcagggcgcaggtgggcagcgcgcacggcctgccagcccggggcgccagaatcctgcgctgcggggccgagaggggcgccgcgcccgccgcagcctggagctttccgcgaacctcggggcgcccatgacggcggcggcgacggctaccgtgctcaaggagggcgtgctggagaagcgcagcggcgggctgctgcagctgtggaagcggaagcgctgcgtcctcaccgaacgcgggctgcagctcttcgaggccaagggcacgggcggccggcccaaggagctcagcttcgcccgcatcaaggccgtggagtgcgtggagagcaccgggcgccacatctacttcacgctggtgaccgaagggggcggcgagatcgacttccgctgccccctggaagatcccggctggaacgcccagatcaccctaggcctggtcaagttcaagaaccagcaggccatccagacagtgcgggcccggcagagcctcgggaccgggaccctcgtgtcctaaaccaccgggcgcaccatctttccttcatgctacccaccacctcagtgctgaggtcaaggcaggtaagcccccgggggactgggccctcttctctccttccctcccttctctttcccctacagagagaatgaggactagcattctacttcagagccggacatcttaggggggaggttcctggggccaactgagggcatgggaggcttgggccagtggccaacccagcagatccggactttcccctgaggcaccaggttggccggtccagaatgtgatccaggtgtgtgagaggaagatggaagccctgggagggggatacctgggtgagatgagccttctttcaagttggttcagccctgactcaggtggaaggaagtagagggaggttggcctgcacattgccccaggctgtgggcctctgctttccacgcagagcagggctcctggacttcggctttctggcagctgaggacaaccgagggtggggacgcggatcgtggaggccgaccctctttccctctaggttgaatgcttgtcataaagtttgagcattgaattgatgtagaaagaca

SEQ ID NO: 3199 - DNA, 1351 bp, Artificial sequence
  DNA replication origin
cagcgcaggattctggcgccccgggctggcaggccgtgcgcgctgcccacctgcgccctgactgctccgcgcacccacaccgcggccctcagcacccggctgccggtgaggtggtgtcggtgcccccagcgcgctccgcgcccaccgccccgcttcagccggcacccgctcctccgctctaccccagctggcccagcccgacccgcctctgccagatgcctccgcgcctccctaggccgtgagccccaccgcccgcccgttctcttgctcccctgggctctgtctgcgcgctgggcggcagctcgcgggatgtgcccttacatgttccgccgctcgcctcctgcgccgcccgcccgcagcgcattcctaccctggccggccctcccctccgcgccgcgcaccagctccggcagggccccgggggcggggccgcagcgggggctcagtcactcactggaggcgcagggcgcggggcggggagggccgggactgagagggggctgcttactcaacagcccaagccttctggctgccgtctgccgcttctcggaaccgcagctcccccaggccttgaatgaagggggagatggcggggaagggagggggaaggcgcatctcctcgattggagagcgcgctgctagcaagggggtgggcttgcttggcgaacgcgcagtggcaccagttgcatgttaggcgtcagacagctgctggttacttggcacgccatggggcccccagcctctgcatcaagcccatgttgggttcctcctccatcgcccgatttctctgtgcagcacccaagagaggctgtccatcgctgcctctgcttggacagttcacctgctcctactcctacccccatgcattgcgcggggaggcctgtagagagtagccagtgccaacaaaggagagctgaggcttgaggtcattcatgccctcctcgtagtgggggaggagggaccccctccgtgacctggggatgccactgtctgcagtcctctccaccgcacacttgcaggcgccgacgctggaccgatggcacagccagtcccaggtgtaagcgcagctccaaccttgctccttccgctccgcagattctgtcctccctcggccttccccaagaatggacttctcccgcatacagagctggaggggaacgcagagggagaggtctctttctgttctggctagaatattgtgtaaacacaagagctttgcagagttgagttcaaacctcttctcccttgttggctgtgtcctgcccacctggggcaactttactgacctccgtcaatttcctcatctgtcgaataggaggattaatttattctcatctcatggggttgtcct

SEQ ID NO: 3200 - DNA, 795 bp, Artificial sequence
  DNA replication origin
cattgtatggcagagagatgagggcatccgtgccaccccctccctcaccctcctgctggggagaaaatgcccgcgggcggggtggggcaaacatctgggcctgaccttggacatctgtgtccctgagcgcaggtgtgagttttccctcttgtgaaataactgcatggaaacctctccactccaaatcttggtgctaggtggtgatggttactgaaacctgaaagagcctgcagtcagtgttttgtggcctcagtccttgaaagctgggaagtgataaaggggctggtattgagcacatttaaagcaaatcacaatgtgttagctaacaatcagccctctgaggcaggtattgtatctactggtacagactagagaatattttgcatgcttctggttctggtgctgttgtgaactaaccaggacccaggaatcggctggagcaatagtgggctcaggctctgcctagagccctgggctccagccacccaccagctgctccctgagagtgaatgaatgggcaggctctccccacgctgggatactatcacagtggcaccgaggaaatccactgggccctggtagaaagtatatcagtatatcatgaagaggtggcttggagtcttggtgggattgtttggaaggcagagttttgactcttggatttgccacttaacgcgcaggtttccttggacaaactatttaacttctcaatgtctcagtttctttcagggatgctacttggggagcatattacacagaacctccaacacaggagtgatctctcagttactgtct

SEQ ID NO: 3201 - DNA, 1249 bp, Artificial sequence
  DNA replication origin
gtcaactgtgtccaggaagcccaggaaggcccgggatggggacggacctagtgcctccagaaaagagcagcactgcccgggctaactgcggtcacttctcacagttccccgcctgcgacagccccggggctgcggcggggctggcaagaccgggaggcgctgagtgcgtgcccaggcgcccctccgcggcgggcagagccgcgcgactcagggcgcactcacctggcagctggctcggcggcgcaggggcggcaggcgctctcggaagtggcggctgggtgcgcccggcctgcgcgccgttttgttccgctccgcggaaggcgtgtcccgggccacgccaaccagtgggctttgcacactgcaccactccagggctgatgtcatggcgcgaagcccggcggtgctgccctcctaggccccgggaaggccggccggcaggggcgggggcaggagtcgccgactctgggggtgctccgagctcgtgctgcggtcccactgtgcgccctgtcgccgccaccgcggaaaacgtcttgcacgtgcgaggggcatttcaggagtttcctgtctgtcaggtgagaaggcggagatatgaccttagaggtcagacccatgataaacttgagcccctaacgaaagggtgtctcgaatttacttgtcctggtggcagagggtgagggacacattttgggcgccagggtaagacagacccttccagggcaggtctgattctgcccatccactcactagctgggccctgggcctagacagcccttctgggttcagggtcatctgtgaacggcgtgtaatctacagggatgtgaggggctaaaaggagatccggtaggacccgcagaccttcagcagcacccggcatgtaatagacactcaataaatgtaactcccccctccaacagctcttgcccctcagtttttcccagtcttccctgctaccctaaggacaacacctggaaaaaggtgttctcccgcaaaagcagcagttctgaaaagtgggtgcctccatagaggcttttctctggggctccaaccttcagtaggacagacacaggctcaggccactcaagctgcccctggggcagtttccaggggacattctgtccacacctcctcacccagtccccagcccttcctgagtgccccgtgcaggcatttcagggagcagagaagctcacagcctccagctggtcaccctacaccccaggtggcccatagatgcagctgctatgtcttc

SEQ ID NO: 3202 - DNA, 1695 bp, Artificial sequence
  DNA replication origin
ttgttatttattccagcgcctctcccgagcccagcccacagcctccctcgggcaccaacctcccctaccccgagacttggtctcggcctcgcaggacctgccagccaagcctcgcaaaacgggaagcgccagaccctcagcgccgcgaccgcgcgaccgccccgcgccggccactcaccggagcgcctgcccgcccgggctccgggtccgcgccgcagccgcgcagagtcgcgcatccccaagggcagcgcgggtgcggggtccgcttctcgcgagcacaaagtttcccggggctccccaggccgcctcggcccctcgcaccaggcttggcgtccgccgcgcactccagcctcgggccccgcactagggcagccgccggccccggccccacaatgaggagggaggcggcatcctgaacaaagtgccgtcccctcgggaacggcggccggggcggagcctcgtgacccgctgccccaggcacacgccggctgcctccacggcgggcccaggaggggagtgcctggcggccggggggcgggcaggaggagagaatccgtccgatcgccctggctttcctccccctgcactgtgccagtttaacccgcagaggggcggaggcatgggtcccttccagactttgtcattggaaagctattcccgtaaccctttgctgccttcgccttcccgtcccgcctcccaggctggccgcagaaaggcggctgctcggtggcggacccgcgagctggcagggcaggaagcctttgcacaattgagcctttcctttgcccggggacccgccaccgccacttccaggccgggtttcctccctcccccacatgtcgtccgggtaccgctcgctggttcagccgcagttctttaggagaaggggacagatggatgggccagcctctccacccgacttctgaccccgggcacccacctcctttctttctccaccccactgaactgtcatgctgtctgagctgtcttagaggagggggaggccccgcaagtgccccgcaaatagtaggtgctcagtaaaataagtgacttctccccaccttccagacagccgatgcccctcctccttcttccagggacttgggagtgggaggagggggaagaagaggagagaggaaatgacaggacctgaggagagtgaatgggaggaaggccctcagccagaacctactgcagaagcagtgcaagccccctgcctcctggcttggggacttccagggtctgcaggaagaaggcagaaggaagccagatgacctgagctttgaagcaggctttggaaagggagtagctgtggccaaggacccagcagattcccctgctcctgccaacaaataagaggactgatctattcccagggccatggggttgcaagttggaggactgatggatagaaagcaaaactgcctactccctgggaggtctcacagctctttgccagcaaaatcagtgtgagcagagtcaggatgagagcccttgagtcctccctgaacgccccacacagtcagtaaggccacagtggctttgaatttggagagatgagacaccagacaatggacaagcagtgacattcaagaagttcccaactgatcagggaaaaagatttgttgtatgatttttgtccatgaagggagtgaactgccttttggcgcgggataagggggtggactgcagagt

SEQ ID NO: 3203 - DNA, 947 bp, Artificial sequence
  DNA replication origin
ctccgcccctctgcgggttaaactggcacagtgcagggggaggaaagccagggcgatcggacggattctctcctcctgcccgccccccggccgccaggcactcccctcctgggcccgccgtggaggcagccggcgtgtgcctggggcagcgggtcacgaggctccgccccggccgccgttcccgaggggacggcactttgttcaggatgccgcctccctcctcattgtggggccggggccggcggctgccctagtgcggggcccgaggctggagtgcgcggcggacgccaagcctggtgcgaggggccgaggcggcctggggagccccgggaaactttgtgctcgcgagaagcggaccccgcacccgcgctgcccttggggatgcgcgactctgcgcggctgcggcgcggacccggagcccgggcgggcaggcgctccggtgagtggccggcgcggggcggtcgcgcggtcgcggcgctgagggtctggcgcttcccgttttgcgaggcttggctggcaggtcctgcgaggccgagaccaagtctcggggtaggggaggttggtgcccgagggaggctgtgggctgggctcgggagaggcgctggaataaataacaaccaagatgctcgcggcttcccgggaaggtgtgtgccctttcgacccctatgggactgactgcgcgtttgattctagagttgactctccgggggggctgcctaacttcagtccctctgagcctcagtttccttgttgtgaaatacccacaatttaaagtgcgttgagatcttatcatgagacaccaggtgctgcgttcttatactcgcacccacacggcaagcacacaccctacccgcacctctgcctttcgttgaagcaagagttaactcctcccatcccagcaggagccagaggaacagctggggcaggtgacctcgcgggccgttcca

SEQ ID NO: 3204 - DNA, 1146 bp, Artificial sequence
  DNA replication origin
gcccgagggaggctgtgggctgggctcgggagaggcgctggaataaataacaaccaagatgctcgcggcttcccgggaaggtgtgtgccctttcgacccctatgggactgactgcgcgtttgattctagagttgactctccgggggggctgcctaacttcagtccctctgagcctcagtttccttgttgtgaaatacccacaatttaaagtgcgttgagatcttatcatgagacaccaggtgctgcgttcttatactcgcacccacacggcaagcacacaccctacccgcacctctgcctttcgttgaagcaagagttaactcctcccatcccagcaggagccagaggaacagctggggcaggtgacctcgcgggccgttccagaaaacgttccccgcacccccgggatgcgccgggaagcgccctcccgccaatctcccggaggccgtcctctctggcgcccgcccagtgcgtctgggagcggagaaagtggtcccggaggagaggggagagaggagaacgcagaaattgggtgatcacggggagctcacctgagcgctcccgaggcttgggctctggtccctgctaatccccagagccgataaaaactggtcataggataaagaagcagctaagtttgcagcgggcagaggggaggcaggaactggagaggacgcgagtggcgggtggcgggggcggtgtgtaggggtgacgtccacccggcagagagggttccttgtcccctggagccgaacacaggaaaatcagctggtgagtcaatgggactttgttaggatagtcacagggcgcagctggcgccggcttaagggaagagctggatccccccttgataacatgctgtttatctggcttcctgtttcaatgattgggataccattggctcgttcaaattcaatgctgagaagcctgtgggcacgttcgttcactgtgcaaaagcagagggcttgcctgggttttcatctgtgggctagctcttgttccccctacatgaagtccccggcaactcacttgtaatgggactggagacttcgcaaaaagaatggcctccccaggaggaggatctgacgatctgacactgcagagaccttggcttcctttaggccagagatatatatgattccagct

SEQ ID NO: 3205 - DNA, 1903 bp, Artificial sequence
  DNA replication origin
atggacgatccgcgcgtctgcaggcacggggggagggggcagggggcgggagcgcaggaggaggaggcgggggaggaggagggggagagagaggacggaagaaaccgaggaagaaggggagagaagggggagagagcgagggaggagggagagaggcaagccgagggcgcaggggaaagaaacgcgaggaaggaagccgggaaaaaggaaagagcagggaagccggggagcgatagggcggggtcggaggaaaaggggcggggcggcggggaaaatacaaattaaaatttaaaaatcagtcaaaggaaggatggaagccccgcggctcctccggcgcccagcggtgcttttgctttggtgtccggatcccagcccgcggcctgcctgcctgtcagtcccgtggacaccgcactgccgggcagcgccccggccgcactcagccagccagccagcccgagtcgaggctgcaggctgcagctccgagcagaggaaggagggaaggggaaggcggggagcaaacaggaggaggggagcgagtgtgcgcacggggagggaggtgggggagagatagtgtgtctatttctggctcgggagggggaggtatctgcgagcggagctccaggggcggatgagtggggggtagggggaaataaaggaaaagcagtttttctcccagctttccgcgtagaagcggggcgggttcttggattctcggagggcacggggaccccctgccgtgtccaggataaagatctgttgaggaggtgtggaggtgcaggtaaaagagacggagggagggcggctcagaatgcgggagggaaagtgggcccgtgggcctgagagagatgtcgggagaggggtggaggaatggtatccagggtgctcattcccctcccccaaccccaaaccgtctttggttttcccccaggaaactcccagtcccgccctacttcagtctctgaggctcaaggttgccctcctgagcccaggaggtaggggatgggggtaggacacgggtggcttggagagaaggggcctagcgttgactggggagggggctgagggctttgtaggggaaggagtaactcttgagatcaggaaactgggtttctattccaattagcaatgtgaccttgtcaaagtcattgaacccctctggttctgttttcttttatagtggttataataccagcttcacaggtagaagggctttggaactgtaaaggcctgtgtcaaacctagggaatcaagaggaggctttgcactgggtcccttgcctgccagagttaagcagagcagcagagtgcttttaaaagatgtttcccaagcccttcttcctttcctcctaactggacccaggggacagggatgaggtggagggggaacaagagccagatggagtagtctgcagtttgcctaggactgtacctcagtagaggggacactgcccatcctcaaatggcctcccaagtcacagccaggttgcctgagcaaaaggctctcaggagaaagtggaggggaattctctgaaagcaaagcttgctccaggaggggtaggcccaggtggagccacactctagggattataaagccctaagaactttttgccagaatgtctaaccatcagattatctccccaccccaaacccaacctccatctctctagctcctttcctccctttctcctagaatctgaagaacgctgtgtgtgagtctcatggttcacacactctcctaacactaatcatcacctgctgcctggtgtgaaatgtatttgtgtctctatctgtctcccccgccagcgcaggatctctccgggtgtagaactgtgtcactcagcaccttgcatggagcaggtgttgcaactctgttggttaaatggatttggaggcctgagcactgt

SEQ ID NO: 3206 - DNA, 810 bp, Artificial sequence
  DNA replication origin
gacatcagcggagcttcacggcccttggaccccaccttgcctaagcctttgggcgccttggccatatcgtcgctccattcgggctcataaagctgcagctttttctcggagtccgtgagaaaagagaggttggtgagtgacttctgcttgcgcaggttggaggcgggcggcccgccggggacacggctgtccacgctgccggacttgaagaccttcagctcagccgcgctggccttggccatgccgccgccgccgccgggcgccttggcgcgcttgggcagcatgcctctgccgtccgccgctgccgccttcctgccggcgccccgcggttcgtccgcgccctcgtcgccgccgccgctgctcagctccacctcgggctgcacgctcttgacgctgctgcccagcattctgcccgcgaggagcgcatggacgatccgcgcgtctgcaggcacggggggagggggcagggggcgggagcgcaggaggaggaggcgggggaggaggagggggagagagaggacggaagaaaccgaggaagaaggggagagaagggggagagagcgagggaggagggagagaggcaagccgagggcgcaggggaaagaaacgcgaggaaggaagccgggaaaaaggaaagagcagggaagccggggagcgatagggcggggtcggaggaaaaggggcggggcggcggggaaaatacaaattaaaatttaaaaatcagtcaaaggaaggatggaagccccgcggctcctccggcgcccagcggtgcttttgctttggtgtccggatcccagcccgcggcctgcc

SEQ ID NO: 3207 - DNA, 1295 bp, Artificial sequence
  DNA replication origin
aaaggcttaggcaaggtggggtccaagggccgtgaagctccgctgatgtccaagacgctgtccaagtcggagcactcgctcttccaggccaagggcagcccggcgggcggcgccaagacccccctggctccgctcgcgcccaacctgggaaagccgagccggatccctcgaggaccctatgcggaggtcaagccgctcagcaaggcgcctgaagcggccgtgagcgaagatggcaaatcggacgacgagctgctctccagcaaggccaaggcgcaaaagagctctgggcctgtcccctctgccaagggccaggaggagcgcgccttcctcaaggtggaccccgagctggtggtgaccgtgctgggagacctggagcagctgctcttcagccagatgctgggtaagtcctgccgccccgccccgccccgcccctggctttctcctaaccagctgctggggaaggtgtggggaaagcgaagccccctccccttgcgccttcccggagggccctcctgttcacgatcaggctgtgatgggcattgcgcccagatgtgctgagctggcccacctccagatgcgcatggctcaagtgtaccttcttaaagacattacaggcgggaacccgggctcgactctggcctgcccgaggtgaggctggacaatgggatggggggtgagggggttacaggctctcagaaatagagccagaatcccaatatggcaaaacctgggactggtggaaacctccgttgtggtgtggcctgcgcttgacaggagcatcccgcattgcaaggggagcgtccagcgagagcccggatctagaggacagatgtgggagagcagatgtgagggctgattggccccggaacacagctgaggctccacttcctctgtggatcccgagtgggagcgcaagtcggatttccccgcggtgtgaggattctggctaaaagaagcgtctagggccgggggcgggcgggctgccagctgtgcgcatctgggcgcatgtccgatacctcagccccggctctggccccaacccctacacccgcaggtcttttagggcgtgtcgaaagctctgggcgttagcgccgagactcctgtttgaccgggaagcctttgccctgtggctaatggaagccgagcaggcgggaagggaggaacaaagcttgctcgagtggaggaagcgcgcagagctgttccattgttctccgtgcctgaagagtctatgcaaaaaaacccgaagcgggccccggaactgctctttctctccccggagagcccctgccctcaga

SEQ ID NO: 3208 - DNA, 1294 bp, Artificial sequence
  DNA replication origin
tctgggcgttagcgccgagactcctgtttgaccgggaagcctttgccctgtggctaatggaagccgagcaggcgggaagggaggaacaaagcttgctcgagtggaggaagcgcgcagagctgttccattgttctccgtgcctgaagagtctatgcaaaaaaacccgaagcgggccccggaactgctctttctctccccggagagcccctgccctcagagaggaatagatctgggatgtgccggacgccaggcggccatgcctcgggaactggcacgggccctcttggggccacggaacaaggacggtggggcctggtgcccaggcgagctgctttggctgcgcggacttgttgcggtggctgggttgtgggtcctccggcgccgagggacccgagcttcctgggtacccggcaggctgcccgcccgctgggggctgggaaggggcgtgccaatgcgcgtgtgaaagggcggggccgagtgacgggcttggcgggtggggaacatgcaagagctcgccgggcggccctggagaatgcgaagccggaggagaccggttcggcctgctgcagtcttcctaggaaccctcgactcctgtgtgggctaggatgagggtcctctgacaggggcaaggatttgggcctttggagaaccgatccttacgcaggaggccgcaaatgggctttgcaggggcaatcaggagactggacaagggcaaaagaagagcagccttttcccctgggagcccctcctgaaggtggggatggctgggtgggtgcggaagctgaccaggcagcctcactctgcaaagggaatgtgccacccggtcctcagtgtggggctgagcctgtcaaaggccctgcctcagtgaatggggcaagagagacaataagggaaaaaattaataaatttttggcaggcaccatggcaggcaccaaggagggatatggacaaaatgcaactggcccatgtgatagagagccctgctgagggactgaaagcagggtgagagaggaagggaccgtgtgtgtgtgtgtgtgtgtgtgtgtgtgtgtgtgtgtcagactgagagagggacttggcgagggagggcaagggagtatcggggcacagaatagcagaaggcacagaacccttttcagggtcaaggctttacttgttggggataacttagctggtctgggtcctctccagacctggatgccctcacactgtcccagaagctgactgcccattgaagccctcttagttgctcctcaagaggagccaaacaggtctgagctggctagggagatgg

SEQ ID NO: 3209 - DNA, 1106 bp, Artificial sequence
  DNA replication origin
cacccccctggcctcaccgccagaccgcagagctggggtcgggtttgtggcacccccagccccgccgcagccccccagttccgccgcagctgcagtctcaggggcagtgggtgtggggtccgcaagaaggagggtcttggccgcgctcgcttttccgccagagaggagtgcctgcgccgccggagcctccgagctcctggacgtttggcttacgggcatctggggctgggagtgggtgtgtggagggctctagggagtggaaagggaaggaaaggagcttaggcgcccaggagacctggacggagctgagacaatagcgcaacttgattgaacttcgatggttgcggctgtggcgcgtgggggcccggcctgtgagggtcgggggtcctggggaccaggcgggtggaaggaggaggggcttgcagccccaggtcggccctgccaaggtcaccctagttccggaagctccgggggtcgtcctggggtgaaaggaggtggtgggaggcggaaggatgaaacgggggagggaggggacgttgaatttgtgaccgtactgctggctggatacttccgagagagagtgaagcctggtgctctaccctgggaaggggtgaaaaatcggagagccgggtaatttggggagacgcacagtgagggactggtcgtgtaaggtgagggcaaggcacagaggctccttcataaaggggaagtgagtgtaaccacagctggccctgggactctctgagctgacttggaaactgcacttccaagggagaattaggaaattccaccggcctgagaaagggggctggggtttctgggattttttagcggggtgggcaggggaggcttcccatctcactattctcaccccatatacactctccttcccctcagcctcccgcagacctgggaagttggaggttgggccctatgcctggtgctgtggccactcccacctcaaatctcaggcagcccagacctgcaccctgtaacatgctcctgcgtcctcatattgctcgaagggagccccaagtaccctccaggggctcaattacaactgtgcacacaaaggtctagggtaaaagcaaagaattgggcaaggc

SEQ ID NO: 3210 - DNA, 954 bp, Artificial sequence
  DNA replication origin
cctcctctctcctaacacctgaaagatgcatgaatataaagtcatatatcatgaactttattccaaatgagattgctaacttactgtgcaactttaggaaagccccttaacctgtctggggctcagttttcacacaaatccagagatccttgcagagaaaggtgcagttctcgttcaggcagcaggaggcgctgtctctggaggcttagattcattccccgccctccgcccgctcccgcccgcctctggtgcgcaggcgcggcttcgcggattggccgcgcgcgggggccgtcattcggtggcgggtcccggccgcggggctggcgggctgaggggagaaaagatggcggcggcggcggcagctggtgcggcctccgggctgccgggtccagtggcacaaggattaaaggaagcgttagtggatacgctcaccgggatcctatccccagtacaggaggtgcgggcggctgctgaagaacagattaaggtgctggaggtgacggagggtgagtgaggcgggaccgtcacgaggatggctcagccgcacaatccgctgaccgcagctccgtaccggctggggacatggggagcctgagccagttggagatgtgggcgccgagaagtggagcaggaagcgagagattgatgtcgctggtggttgtgaaagtccgagagaggagaggcgcgcctgaaggatagggtcgggggaggtggagcctgggagtgggggagggagggtggagacttgaaaagatagatggagcctagaatctgcaggggacggagatggagctagacttggtgctgttggaggaagtagcgcggtcggggaaatattttttgagtccaggaccaaagtctttcgctgttctcttcaccagctggattgtactgggataagagtagggggagctattagtaggagtggtgaagggtagggcctcgaaaaggcgg

SEQ ID NO: 3211 - DNA, 1078 bp, Artificial sequence
  DNA replication origin
gcggtggttcctcccatccgagccaccatgggcactgcgggcagttgggcactgcggccagggaagcctggctgtgtcctggacccgcccccggcctgggcccaatcactatgctggactccagaagccctgatcctggtgccacctccgaatgcccagacacatgggccaaccctggaggagcagggctggaccttcacttgtgggggacctcctctgccgcgtccagcctgggacatcctgtcgggggcggagagggaaagaggctggatgtcaccccgcccccattcccagaacacaagcactcattgagaggcattcagagtggctttgtccccagcggtgcccacaggcctgaaccctgccagctgcactggctccctacgatggacccttcccccttcaagtggacagagctggcatgcaccagcccatggcctcactagcagggaaggcaggctgctggggccacctggggcccatccagttaaacactcttcacagtgaaagcccttcacagagcaagcctgtactgcaatagccaccggagcatagggagggcaacagttaatttcaggtgggcaacagttaattccaggtggagacagtgttttaggatgggagaggtcagtcttcacaggtttatactgagtgccagtgactatgccccatgctacatgaggtaccctccgaggaactgcaaattaagccagggagatcatcaaaagcctaccttaatcccctgccatgtacaccctttcacacacttctgggcttccacatctacctcactggaatctttccacaactccatgaactaagcaaggttcatcagtgttatcaatcgcatttcacagactgagaaactaggactcatggaggttaaagaacttgttcaaggtaatacagccagtaaatggtagaggcatcaggaagacccaaatctaaatcagggttgatccccagccgcaacagcagacagtgtagacagtgagtatttcttgtgttctggggtgagagaatcaggacaggtccatggaaggcccagtagaatcttagtaggttagggaaggacagc

SEQ ID NO: 3212 - DNA, 710 bp, Artificial sequence
  DNA replication origin
tgtcaatagggtcctgctaggctgggagggaatggtgaatcccccaaagggcggtctggaaggcacatgtggagaagaggggcatttttagacaaaagcaagaggagtgcattcttagggcaggaatcttgccaggctgggcctgctcaagggaaagcggatctcacaggtggatgggaggggtcaggtgcaggggaaggagctagggcagggacacatggaaatacaatgggcagggggagaaaggttggcaagaaaggagagacaccttgggtgaggggagaaggggagccccccacaagaggtgaacagaagggaggtacttcaggcaaagagtaaaggagggaggggcaagtaagggaagggccctagagggctggaggaaggagggagggagggaggggtaggaggggcatagacaggatgagtgggaggtgctgggggaagggtgctgaggggggccacactctcttggccactcttaggccagcagcctagcccagcaccacagcaacacaggccctagttaggccaaactcagaggtcaggagccccagcctggccatgcagggtgaagggtagggggcagcacatggcactcccgacttggtggtccagaagctcatgggtgacctgcatccagatctcatgtttcttaaagagtgccacatgtgtgacacagtgcccaggcctagagccccttgctcacc

SEQ ID NO: 3213 - DNA, 1122 bp, Artificial sequence
  DNA replication origin
tggagtcactgggtgtttagaggagccacttgcccagatagggaatagtgcaggggtcggcaaggcagtgggggaagataaggagtccagtttttgaggtactttggggcacacaaaccaagatattcattagacggtactaccttcctagtagtgtctggcccagagatccagctttgagagacatcagtacgtagaatgcagctgatgccatcagaatggatgagataatccggtgagaggctctaaaggtgaaaacaaaggaggcctaaaataagaccttgccaacacccacatgtctcaaggaagagggtccttgaaggaggcctaaaggagctatcagagagctaggaggaaagccatgaaggctgcggtggaaaccgatggggaagcgttttgaaggaaggacctggccaatagcgccagatgcttcccacgcagtttgagcaatatatgaaataaaagataaatccgacttagtgacaggagggtcagaagtgatctggatgaaactaatttccatggaatgttgggggtgaggcaagagtgtgttggattgaggaatgaatacggatcaaaaagtagagctctttgaggaagtttgggtatacgggaaggctggcgctacagctggaagggactgtggacagaaggaggatctgattaaccgggagagatgggcaggtttaaagggtggtgggaaggggccaggaaagagggagaggctaaggctgtggaagagggtgcgggagtgcaatgtggggaggaggggtgggcaccagagtgcgtggggaggggtgagcctgggcaggaggagagggaaggtgaaagatgagcctggaggtgagtttgtagaagaggtggcaggaagttggagaattgccatgggttgtttcctctgtctgcctgggaagaaattagaggagattgtctgccaagaataggggtggagtgggacgagagatactaagagaagggagaagaattcggatagatgctatgaagaaccaggagagagctagacccataatgacagttaccttttattgaaagcttcctgtgcagccacaggaagtggatgtgttatccactcacctcaatgaagccttaataccgccccgt

SEQ ID NO: 3214 - DNA, 1035 bp, Artificial sequence
  DNA replication origin
ctcggcggcgcggcagggctgcgggaaggacacgcacagggcctggccatagtgcgagaagggctgcgtgtagaagctcacgggctccgcaggcggctcctccgagccgggccgctcccgccgcagcgccgccgccgtcacctccaggcacgggtgcgagtccagccgcagctcggcggcgccctcgggctccaggcagcgcaggtccaggaccgcggtgccgctcagcccccggctccctgcgccgggccctggaggcccgaactcagcccgcaggtccaggtgcaagtgcagcagctcaaaggcccggaagttggaggccgaggccacgtccacagcctgcgcggagtgcagcggccgccgggccgcgccgctgccgggggaatgctcgccgctcgccatggccgcagagccgttgctcaccggccgggccgcgaacccgaggggagccccgccccgagcgccgcgggcccgcccccgccgcgcgggccccgcccccgaaatctgctcccgaccgcatcccctccctgcgctttaccgcccactcttctagctgcacccgtgcctcgggacttaggacaaaagaggccggtgggatcgtgtggcccacgtttgcccacccatatcctactgaggtgttccagtcgtcccggtggggcacccttctctgctgacccttcctgctgcctcatctaggcagtggcgtggactgagccctggctgggaaggtctgagttccagatctcacaccctgcgataggccagttgttagaactgtgtgtcaccttgggcaagtcgcacaagaaacatgaatcttcccgagcctttttctgcaccagtataatagagtcataatatctgtgtatctcacgaagtaatgtgagaactctaccaggtaacctgtctaacacactcagcaaacagtgaaaccctgcacaacttcacggaattcacactggatcgagcctcgtcccccagcaactccaggcacgcctatctttctattgttgggttaagggacaggaatcagcaccg

SEQ ID NO: 3215 - DNA, 1009 bp, Artificial sequence
  DNA replication origin
cacctgcccaggccagtgccccgtgcccaaccccagagggtgcgggatgacagactctgacaatcattaaaccagccgggcctgatttcccagcactgcctgctaagatccgggccaagtggcactgaatatgcaaatcacctggggccaggagcccagtctaaaggccaggaaatcccctccatccaatgagacaccagctcaggttactgcaggggacacactataaagccctgagctcagggaggagctccctccaggctctatttagagccgggtaggggagcgcagcggccagatacctcagcgctacctggcggaactggatttctctcccgcctgccggcctgcctgccacagccggactccgccactccggtaggattccccgcctgtcattccctagcccagctcttgggaaactgcagaggggtccagaggatttgcagttctgaacctgcacactccagtctaggatctccgagcaagagcgtaggtgtcctgagggtcaaagaacagagagagattgtctctgggaaggcagaatggccatgacgccgctagtctggctccagggccccagagatctgaggagggaagcccagctggaggctcctgtggtcctgccctggtctgagatcttggagcccttcttgaagagacggtgtccgcagagttgctgatcttcctgcccctgggggctactcttgcccagggttgggcaaagcagagtagctgggagtgtaaggagaggaccctcgtcccctcaccaacctcatcctctctccccctacccacaggtagcctcatggctgcaacctgtgagattagcaacatttttagcaactacttcagtgcgatgtacagctcggaggactccaccctggcctctgttccccctgctgccacctttggggccgatgacttggtactgaccctgagcaacccccagatgtcattggagggtacaggtgggtctcagcggggtgggatggggcacggagtggga

SEQ ID NO: 3216 - DNA, 787 bp, Artificial sequence
  DNA replication origin
gaatggccatgacgccgctagtctggctccagggccccagagatctgaggagggaagcccagctggaggctcctgtggtcctgccctggtctgagatcttggagcccttcttgaagagacggtgtccgcagagttgctgatcttcctgcccctgggggctactcttgcccagggttgggcaaagcagagtagctgggagtgtaaggagaggaccctcgtcccctcaccaacctcatcctctctccccctacccacaggtagcctcatggctgcaacctgtgagattagcaacatttttagcaactacttcagtgcgatgtacagctcggaggactccaccctggcctctgttccccctgctgccacctttggggccgatgacttggtactgaccctgagcaacccccagatgtcattggagggtacaggtgggtctcagcggggtgggatggggcacggagtgggagacagatccatctaagggcctgttagacaaatgggggaataggcagggaggagggtctctaggcaaattccagggctagaggctgagacttagtgactgaggtgctgggggttgtggggctgtgacaggcagagggaggtgtcagataccaggacaagggtgttgtgaatgctacctcctgcccctactcttgggatggctccaagggctgaggtgtgaatccccagtgtgctccaggaatggggctgtgtgggctgggagtggtggctcacgcctgtaatcccagcactttgggaggctgagctgagcggatcacctgag

SEQ ID NO: 3217 - DNA, 788 bp, Artificial sequence
  DNA replication origin
ctgcgcttggaggactgcacctcgcgcatggttcatgctcttctctgctgttgccattttgaaatttttaatcgttcttttttttttttttttttgagatggagtttctctcttgttgcccaggcgggagtgcagtgtcatgatcttggttcacggcaacctccgcctcccaggttcaagcgattcttctgcctcaacctccagagtagctaggattacaggcgcacaccaccacgcccagctaattttgtatttttagtagagatggggtttcgccatgttggtcaggctggtctcaaactcctgacctcaggcgatccacccgcctcggcctcccaaagtgtgggattactggcatgagccactgcgcccagcctaataattctttaacaagggcccaggctttcactttgcactgggctctgcaaattaccaggcctgtcctgactggaggcaagggctgaacccatctggtgggggaaaagggccaaagaggaggtcaggaaatgcttcatagaaggaccccgagggaggaggtgagtcgtgcaggcaggcctgggtgtggctatgtgagactgtgaggtgggagtgtgttgcgtgcgctggtgtgtgcaagtgtgtgaggttgtgaatacggtccatgcgagtgtgtgagagcaggcagcgtctgcagtgcgtgcaggggcatgtgagtgagggcttgtgaatatttatctttgtgagtgtgagtgtgtgtgactttggttcccatgagtgtgtatgaatgtgtgtggtgtgtgggggaggta

SEQ ID NO: 3218 - DNA, 1693 bp, Artificial sequence
  DNA replication origin
cagttccaggataggtgatgagaaggtgactcccaagtggagcagggagacccagtggatttcaggctcccctcagccctgtaacctggcatcaggatctgagggctggtctgaagtctgccctcgggtgagcgtgtcagtgccccctcagaccatcccagctcaagtccactgcccaccatgtgccaacccccccgcaagcctgggacccctaagcaacaaaccctacattgttcccccagctggcccaggctgcgaggacagtggctctttcccaaggccgctggcctgctgactgattctgcaagccattcacgttggcaggcttgggaggtggcggtggcagagccttggagccaccatctctcccccttcatctctgagccggccaaccagcaggagggagaggtggagggcaccctttgtggaggaggacccctaaacaggatgttgaggggtctgactcccctgccctggacttcacctcagttcacccggccccttcctgcatcccttaggaagctggtggtacttccgggcctggcaggggggtggagaaggagttggggaaatgccgaggaaacggtccccaagagcttcagcacgacaggcctgcctttggtcccctctccaacctgctcccccacccatctgaagtttctacagacagagctgggggcttcagtcaccgtggcaacaggtctgctgagaaacgggtgggtgtcactccccagcacaaagggtgtgtgcatggcggcgccatcacctagcaacggcctccctctctcttggcggcatcacccgccctgggggtgggtgccagggagagagaacaaggccgttaagatccccaggagagggggagggaagcttgggtacagggcaggctgaggccaaggggtgtgggtgggtggacagaggagaatggagccccaggcgcttggaaaccctgcccctgcccatccctgggcccccggggcccttcctgaggccccatgtggatgctgtaggtaggcctggtgggcagaagtctggtgggacccaggacagagcttcagacagggggggtggttctgaggaaagctgagctcccaggcggggagcgactggtggcctggctgaggcatcacttctggttgatgctgtgccagcttcccagggacctacaaggctaagggtgccctctggaagggaccagaggtggggctgggggaagtggcacttcaagggcaagaccccacaggagaagctgcatgaagggtctgccgggggcagtgggagctctggcgggaagggtggtgcagtgggggctgggtgggggcaggccagggcaggcagctgggccgtctacaggcaaaacagtccattctaagaaactgaacaagagcagctctcagagtgacaaaggctgggaagccctggggctcacagaggaaagaccactggactccctccaaggggggctttgtggagagagggcatagcagagatgaaggctccagaggagatattttccaggcttttgacttcccaaggagcatggggtttaggccaggatgaggacttaggtcctccggctccccaagccctccatcctctctgtccctcaaaagccataaaacccttggagtcgccagggccacaaggctgttctgaacatcggccacaaggctgttctgaacatcagccacag

SEQ ID NO: 3219 - DNA, 852 bp, Artificial sequence
  DNA replication origin
agttaggggaccagaatggggggcaatttattttacaataaaaacaggagttcaaacctcagcagaacaggactctggggtccccagagggccctcctcacactgggtgaggaggggtgggcttagggggacgacaggggtgggcggggagctcggcttcaggtttagatgatgacggtccctggtctgagggagaagggctggagtctcagcttctccgtgacttcgagtgttgaataagccactgtagggtgatgtctgataggagaaaagagaacagcttataaggcctgcaagtactggccgtgctggggcagcagagaggcccaagaaaccaaacctaagggtatcagaagtccagagatgccaggaggggtggcgcacacctggagtctcagctacatgggaagctcaggtgagaggattgcttgaacccaggagtggagttggaggctgcagtgagctatggtcacgccactgaactccagcctgggtgacagagcgagacactttctcaaaaacaaacaagaagtccagagctggcaagcgccacatggccctgaatgagtagtagcggaattcaggtgctgggaaagagacagagccacagcatgtcagagccagcagggacctgagaatcaccgggtccagccctggaatcttagaaacgaggaggtgaagcccagagcggggatcgatttgcccgagatcacacaaccgcttggcgacaagctgggatagtgcccagaatctgggccacctggctgccttttctacccaagagccacagggctttggacttcagggaaagttgtggagcgagaacctgagagccactaaaacactcagaaa

SEQ ID NO: 3220 - DNA, 2025 bp, Artificial sequence
  DNA replication origin
tcaaggccctattctggaaggaggagatggagctcacgctggtcgggcttcagtactcgggcaagaccaccttcgtcaacgtgatcgcggtacgagggcgtcgggcgcggggtccccgggcgcgggccgcgggtcgggcctgtccccgcccgcgccgcgccctgctgagccggggtcgccgcctggcatagccgggcacggccgggcgccgggcgggggaggagccggccccgagcgcttggggcctagtacggcccgtgccgtgggggaccggggcggcgcgcgacccgctctctcacccgggccggtactgcacggctgggggcaggggaagggggacgaacagacagggccggtgccacggggcaggcggcaccgaggggctctcgaagcaggagggacccgctgccggctgagacgggccccctctggcccccgcgcaagggggcatgacggggcgaaagtgcacgggccttcctgtcccgcgggtagagggtcacgggacggggcggccgagaggcttgaggagggggtttgggcaagcccagccccacccagagggcttaacccctccttgccggaagaggaagccccggccctattgagggggaggggaggtatcccccggggtagaggagtcagctgaggcccttggctcaagcccagactcctccccaacttctccccgacccgcagtgtctagccgggggtccagggaggatcgcatggtaacgggagtttggagactccgtctggctcagaagtttgcaggagcaggtgctcccgacaagagaggatgaggtgtaggggcacggcccactggggccttgggagagtggctctaagggctttgggtcgtcaacactgaagtgggtgattgtaagtctttcagcgccaggggagtggtggggaaggagttaaaatctctctcaaaaaaggggaagatgagctccatgggtgtgagctgaggctgccgtaatggctgcggcctgcctgtcagagccaggctagacagggcttgtgggtcgaggaagcatgggacaggggctggggttgtccagggacctggccccagtcccaaagctgaggtttcccacaactgtgagttggccagatagtaaccaaagatactgatgagataggtcagcagaggaatgtatccagccggcctaggtacctctacctgtccgtgttgttgccccaccttgcagaagatgggcctcctcgacagttctcagcgtcctagaaggcaggggacgtcacttcattggacctgaggcatgaaggcagatggaaagctcgaggggcgggcatcctgtggttacacaattgaacactggcttcctttcccaaacatgctctgcaaatgacctctgccctttctcgacccagtgtctcctgtctcctgacctgacagggcaggatcttcaggccaatgctgcggttttggcacagtaattttcggagctaacacccctgggctctgtctgcctaggctctgcccttggggtcagagaccctctggttaaacttggcattgacttaggctcttggattcccagagcaggcacataacacctggactctgacctgactctgcaggcctaggtggcttgggttctaggcgtttaggtctgagaaatgcagctgggcctaggtatctcctcgttccccagggtgttactatagctgtgctctgggacagggatccacaggtacccgggtgggttcggtttctgggtctgcagttgagcctttgacaggagggccccctctagaccagcatcatatccagagagttggagactatagcaggccagaaacagaacccaagagtcccaaattcccctgccagggtcaagagttcctgtgatatacaggaaaagcaccccatctccagcccacaaggtcccctttttaatcttaaatttgccacttccgctggcacattctaaaagagcaggcaagctaaattcccttctttagagaggcttcccaaggaaaaccaccccatgtgggctgcag

SEQ ID NO: 3221 - DNA, 1193 bp, Artificial sequence
  DNA replication origin
gacaggcccgacccgcggcccgcgcccggggaccccgcgcccgacgccctcgtaccgcgatcacgttgacgaaggtggtcttgcccgagtactgaagcccgaccagcgtgagctccatctcctccttccagaatagggccttgaaccagtccagcagcttgttgaacaaagcgatcatggtcgctgccgccggccccgcccggtgccaggtccccgccgcccctcgctgccctcgcgctgcggcccggagcggcccctccccggtacggcccgggtcccgcggctcggtgcgggcggaggctcgagcgcggctgccgacgactcgctgccccggaatcggctcgccgatgggtgtggcttccgcgccctcctcctccgccgccgccgccgccctccctcgcggccgggccgtgtcctgctcgcacccgagcgcgcgctcctccctcgctggagccggggggccaggggccgcacccgcaggtggggtgagcagggaatccgcaggtggggtgagcagggaatccgcaggcttcagcggcgggggttgaccggcagctggcgtcgagaggcgcttgggaaatggggtctaatttattttagaccctgtccccgactgccgcgccctgactggcaccccctttcttaaagggtggtgggctcgaggtgggtgaggttccggttaagcaggagccttttcaggttgaaggagagtgggtcacccacttcccaggacacggagatgagatctctacgacagggaggcagatggaggcttttttgtccctgaacccttgcctctgagcattcctgggtacagtcccatcctctcaaaatgcacccagtgcagagggacaaccgtattcgggtcttttaatactccatcttgttttgttcaccacaatttaccccgaccacttgttaggaagcctctggccccaagtgaaacggacgcttgaacttgctccggatttttaccagcatccccaagatacccaaacagatacagtcctggcagggggttttcagtgaggaacgtctgtgacaaaggaaaatgttgccctgttttggtgaaaagcagagtattcttcaggaggagaagtgatagttctcctcttgaagtgggtctggagtgcctgcaaagatgccttactcctgcccctctccttgcaagacccacccataggacctgctca

SEQ ID NO: 3222 - DNA, 1278 bp, Artificial sequence
  DNA replication origin
ggacctcccagcctcagggtacccatctccttcccagctcttgctgcaggccatcaaggacgaggctggctcttacgcacccctgcctggctatgagcaggacagccccatctcctgtgagtctcactgtggaccctgtggaggggcagggggccagcatgggctgggggcctctggcagcttcaccctcactgtcttccctcagatgactgttctcaggggcagttttctccagtgtaggagagcacccctgacgacatgcctgaagcctggctcttccctgtgagatgatgctggttttgccactgtttcctgccctctctgaccacctgtacttcccgggctggggctgctgggggctcccagagttgtgggctgggcaggggacaccctcagtctctggaagccaatgagctgtgctctgcagggtgggccctctggctgtgatcatatggtgctgactggcctcgcagggccagaggagctctgggagctggtgtggcagcacggggctcatgtgcttgtctctctgtgcccactcgatgccatggagaaggtgagagtgcagaggacagaggaagggaggctcaggagttagggctgaggttggaggcgggtagtttgtggtgctgtctaaccagggcaggggcagagatctcaggaagttgcctgagcagccctaacttggtcccagccacaggaattctggccaatggagatgcagcccatagtcacagacatggtgacagtgcactgggtggccgagagcagcacagtgggctggctctgtgccctcttcagggtcacacatgtaggtgttggggccacagggcatggggtggtgtgtgggagaagagtcctgtgtgggctccctctgccctctccagcaccaatgccgatcatgtctttgcccgagggggagagtaggaaggaaagggaggtgcagagactgcagtttccatacctggagcctgggcatgagctgcccgccaccaccctgctgcccttcctggctgctgtgggccagtgctgctctcggggcaacagcaagaagccgggcacactgctcagccactccaggtgttgctggacaatggtcttgggggagtggacactggaagcccctccctgcccctctggcatagcctcagatctccctgggccctgcttgggttatgggccaaaaggacacagtctcacaatgcccctgtcttccccacaccctaccctgtcctcaggaatatggtgggaatttaccgcctccctccctgggcccag

SEQ ID NO: 3223 - DNA, 908 bp, Artificial sequence
  DNA replication origin
gccgccccgtctgagaagtgaggagaccctctgcctggcaaccgccctgtctgagaagtgaggagcccctccgcccagcagccgccccgtctgagaagtgaggagcccctccgcccggcagccaccccgtctgggaagtgaggagcgtctccgcccggcagccaccccgtccgggagggagatgggggggtcagctccccgcctggccagccgccccgtccggaagggaggtgggggaatcagccccccgcccggccagccgctcgggaggtgaggggcgcctctgcccggccgcccctactgggaagtgaggagcccctctgcccggccagccgccccatccgggagggaggtgggggggtcagccccccgcctggccagccgccccgtccgggaggtgaggggcgcctctgcccggccgcccctactggaaagtgaggagcccctctgcccggccagccgccccgtccgggaggtgtgcccaacagctcattgagaacgggccaggatgacaatggcggctatgtggaatagaaaggcgggaaaggtggggaaaagattgagaaatcggatggttgccgtgtctgtgtagaaagaggtagacatgggagacttttcattttgttctgtactaagaaaaattcttctgccttgggatcctgttgatctgtgaccttacccccaaccctgtgctctctgaaacatgtgctgtgtccactcagggttaaatggattaagggcggtgcaagatgtgctttgttaaacagaggcttgaaggcagcatgctcgttaagagtcatcaccactccctaatctcaagtacccagggacacaaacactgcggaaggccgcagggtcctctgcctaggaaaaccagagacctttgttcacttgtttatctgctgacc

SEQ ID NO: 3224 - DNA, 1657 bp, Artificial sequence
  DNA replication origin
acacggcaaccatccgatttctcaatcttttccccacctttcccgcctttctattccacatagccgccattgtcatcctggcccgttctcaatgagctgttgggcacacctcccggacggggcggctggccgggcagaggggctcctcactttccagtaggggcggccgggcagaggcgcccctcacctcccggacggggcggctggccaggcggggggctgacccccccacctccctcccggatggggcggctggccgggcagaggggctcctcacttcccagtaggggcggccgggcagaggcgcccctcacctcccgagcggctggccgggcggggggctgattcccccacctcccttccggacggggcggctggccaggcggggagctgacccccccatctccctcccggacggggtggctgccgggcggagacgctcctcacttcccagacggggtggctgccgggcggaggggctcctcacttctcagacggggcggctgctgggcggaggggctcctcacttctcagacagggcggttgccaggcagagggtctcctcacttctcagacggggcggccggggagagacgctcttcacatcccggacggggcgacagggcagaggcgctccccacatctcagacgatgggcagccgggcagagacgctcctcacttcctagatgggatggcggccgggaagaggtgctcctcacttcctagatgggatggcggctgggcagagacgctcctcactttccagactgggcagccaggcagaggggctcctcacatcccagacgatgggcggccaggcagagacgctcctcacttcccagacggggtggcggccgggcagaggctgcaatctcggcactttgggaggccaaggcaggctgctgggaggtggatgttgtagcgagccgagatcacgccactgcactccagcctgggcaccattgagcactgagtgaaggagactccgtctgcaatcccggcacctcgggaggccgaggctggcggatcactcgcagttaggagctggagaccagcctggccaacacagcgaaaccccgtctccacccaaaaaatacgaaaaccagtcaggcgtggcggcatgcgcctgcaattgcaggcactcggcaggctgaggcaggagaatcaggcagggaggttgcagtgagccgagatggcagcagtacagtccagcttcggctcggcatcagagggagaccgtggaaagaggggagagggagagggagagcgagagcggaggctcgtcttctactttcagcgccatggcaccaactggaggcctagggtcaaggtctgctcatttcttggtccagctatgcagcccctctagccctgggaggttattgggagagtggagaggtgttgatgagaggatcctggcatgtggaaagacagggtggaagaaatcctggatgcctctgaggtcccaggtttctagtataccctctggctggaccatggggagatagggcaaaaaaaggaaggaggggggcccacagcctgctctagctctgcgcgggggcttggctcagcatgggagagaccagagagagcaagaggctgcatgaaggaagcacagccagctcactatggtctaaggagagaacagggattgac

SEQ ID NO: 3225 - DNA, 2068 bp, Artificial sequence
  DNA replication origin
ccaatagagcccctggggcggtccccaccgacggtgcagcccgccgggaccgggaggaagcagctgcggccatcgcgccgtgcgtccgcgcccggccgccaggtgccccagtagcccgaccgccgagatgcccagcccgccggggctccgggcgctatggctttgcgccgcgctgtgcgcttcccggagggccggcggcgccccccagcccggcccggggcccaccgcctgcccggccccctgccactgccaggaggacggcatcatgctgtctgccgactgctctgagctcgggctgtccgccgttccgggggacctggaccccctgacggcttacctgtgagtactgcccgcctgtccccgcctggtcctgcgggctgctggctagcgcccagtcccggcctcagcagggcacctgcttgcttggtgccctggggcatgggcatcccggagagggtttgcccccttccaagttgaccgttgcgggactggggaggggagaagagtctgagactaaataccaggcgagcagggagaccgggcttccctgacttggcttccccattggcctccgtgcttgtgggctgactatgggagcccaggcttggcgaggtgggttctggaccctgagcgggagggcgcggggctggctgctccatctcctgttgctgcattctcttctagcagagcagtgcccgggatggtggctgagggtaaagctgacagaactggaggtggaggtgaggggagcgtgccccagtagggtggaaataatgtctgttcttctgccatggtgaggacaacagggctgtcacactgaggctgggtggccttcgtgggggcggggggggcgggtttcctagaagctgggaggggggccttatccactcttgtctcctcagaaagggactctgccagcaccatctcccttcactggggcctcctggctcccccaggggcctccctaaagtcatgtcccaagaggctgtgttggagacactaatttgtgggcaggcgccgaggctgaaaaccagagaaccatttttagcgtctgagttggggtgagatggcgcgtgaaggggaccctactgggggcagctgtcctgtctgtctggctcatgggagcttcccctcagagctggagggctgggggctctggctgctcaccacctgggcaggaggagggtgagagagcacattccaggccacccacctgcacccccagccccgctctggggcaaggaaacctcctccagcccagctctgcaggctctatcaacttcctcagaggagctgggagcaggtgggaaagcctggtggggccttctgctgagggctaggatcccagagttccttctggcctgagagaggctccttatggctttggggttccagcacatgggagcttagaggaagaggaggctgggtgaatctttataggggcctagcaagaatttgtggaactaaagatgctcagtgttgggagtgtcctggtgggaggtagagggtcccagagggcaactcttcatggggctcctctccaaatgtccctgtccccaggttgggatgtccccctccactccaaaaggcacaggctgtgggccaggtaagggagtgggaagagaaaaataatgtccatctagaaggacaaatggaatccttcacagtgcagtaggtgacggcagaggcaatcatgggaataaaggtaccaactgcacagagcctgggcgctcagcatctggcaaagcagggcaggctccggccccaccctacacacaggccagcccctctttcagcagttttctatcctgggagtatgtgacattggttcatttgaagacagggtcctgtggctaaagagtttagatgtgacttctgtggagcctttctctgggtgagctgaaggaaggtcccttgcctgggttgaaggggcaggggagataaggccttccagagcttcctttcccagcattaagtcttcctagactggttaatgaccctttttctagaaggacttggggaaggaggtacactgtcacctttggaattcaagcatcctaccatccat

SEQ ID NO: 3226 - DNA, 1195 bp, Artificial sequence
  DNA replication origin
gccacctttccgcctctccagacccccactccacgtctttgcagtttatagagctcttgaacatccttggtttcatttaatttgatcctttttaataggtcagggaacgaagcattatttattcccattttaaatgaagaaacggagattcggaaatatcaagttacttcccactgtgccacaaagttaagaattggcagcgcgaacccacgccaggtggttcagtggagcccctagctgcacgcacgtacccgggagctaagcggcggccccgggggcggggaccagcctcgcgcgcgcgcccctgcccaccccagcccgcctggccgtgcccctgcccgcccctgcccgcgccgcccgctccatggctgaaagggtccggaagtggggaggcggcctcggctcccagaacaatggaaggggattagggccggcccgggtagcgccccacccgtcgcgtcggtttctgggtcctgctccccagggctgcggaggacctgtggaactttccggagctcggcacccttcccccaagcctacctgggcgcaccgcgccgtgcactcccagcccgggagaggttctgtcccgccctcgctgagcggccctctccctccaagcgcattccggcccctgggacctcgagtgccagttctgcggtccagtgcccgccaccctccgcgctgatcctctctcgttctgccgcttctctcgtatgcccttccctctggatagcgccccacccatctgccctcttccctaactcccgaactatttggttcatcagagctatagaaagactagatccaagatctggatctaaaatacctgcccaacaagaagtccttcctgatacctagcctcactccctcatgctgcagttggactgaatagagttctctgcctgcccttataatgtaatcctcagtggctctggggtcagactgccagagtttgtatcttggccctaacacttagcagttgtttgatattggactagttcctttcctctctgtgcctcagtttctgcatctataaaatagtatctaatattccccataagataatgttgtgaggtttaaatgggagaacccatgggtgtagcatgaatgtcagtggacatccctctcctcacctgcatgtaaccaacagagcccctcctggtggagaagcagggctataaagttaggaaagata

SEQ ID NO: 3227 - DNA, 1196 bp, Artificial sequence
  DNA replication origin
tatttatctcagtatctcttgtgttaggcatttcaagcactcgtcaaagtttacaaaaacaaacagatggacagacagatggggggatggatgcatggagggatggatggagggacaggggatggatgaatggatagatgaagggagggagggagggatggatggagggaggggggatggaaggagagagggagggagggatgggggatggatgaatggatggatggatggatgggtggagggatggagggatgggggagggagggagggagggatggatggatggagggatgggggatggaaggagagagggagggagggatgggggatggatgaatggatggatggatggatgggtggagggatggagggatgggggagggagggatggggatggaggaatggatatatggatggaaagagggacagagggagggagggagggatgggggatggatgaatggatagatgaagggagggagggatggatgaatggatggatggagggagggagggagggacagagggaaggagggatgggggatggatgaatggatagatgaagggagggagggatggatgaatggatggatggatggatggatgcatggatggatgcaaggatgaatggatggatggacagagacacaccaatagttcggtctcctcttccctcctgacagacccagaactcaggccagggctctgcactggcatcagctgctcaggaaggggcaataatacaagaggaaggagagctgaggagaaagcctgcctctgtcctctccccatgggggagggatcacccacctcctggtcccgactgggggcttaattgcacctacaccaaatctgagctatcagttcgcaacacccggggtactcttgcctcaggcctctcaggccttggcctgcttgagctctgtggggcgcagagggcaggagtggcccagtcagaggagaacattctggcccaagaaagccctagcaccatagccagagagggctagcaggaaggctgaggagccccacaagtctgagctgaggtgttcccgcactgctcctgggtggcccgacttgggccaactctgtcccagaccggcatttacggctgaaagaatcacccctgatcccctggcccagcccaccacgaacactctcctagcatctctcaggagccaaattacccatgttca

SEQ ID NO: 3228 - DNA, 909 bp, Artificial sequence
  DNA replication origin
gcctctgcccggccgccaccccgtctggaaagtgaggagcgtctctgcccagctgcccatcgtctgagatgtggggagcgcctctgccccgccgccccgtctgggatgtgaggagcgcctctgcccggccgcgaccccatctggtaggtgaggagcgtctctgcccggccgccctgtctgagaagtgaggagcccctccgcccagcagccgccccgtctgagaagtgaggagcccctccacccggcagccaccccgtctgggaagtgaggagcgtctccacccagcagccaccccgtccggaagggaggtgggggtcagcccccaccaggccagctgccccgtccgggagggaggtggggggtcagcccccaccctgccagccgccccgtccgggaggtcgggggcacctctgcccggccgcccctactgggaagtgaggagcccctctgcccggccaccaccccgtctgggaggtgtacccaacagctcactgagaacgggccatgatgacaatggcggttttgtggaatagaaaagggggaaaggtggggaaaagattgagaaatcggatggttgccgtgtctgtgtagaaagaagtagacatgggagacttttcattttgttctgtactaagaaaaattcttctgccttgggatcctgttgatctatgaccttacccccaaccctgtgctctctgaaacatgtgctgtgtccactcagggttaaatggattaagggcggtgcaagatgtgctttgttaaacagatgcttgaaggcagcatgctcgttaagagtcatcaccactccctaatctcaagtacgcagggacacaaacactgtggaaggctgcagggtcctctgcctaggaaaaccagagacctttgttcacttgtttatctgctgacctt

SEQ ID NO: 3229 - DNA, 1056 bp, Artificial sequence
  DNA replication origin
gttgggggtaaggtcatagatcaacaggatcccaaggcagaagaatttttcttagtacagaacaaaatgaaaagtctcccatgtctacttctttctacacagacacggcaaccatccgatttctcaatcttttccccacctttcccccttttctattccacaaaaccgccattgtcatcatggcccgttctcagtgagctgttgggtacacctcccagacggggtggtggccgggcagaggggctcctcacttcccagtaggggcggccgggcagaggtgcccccgacctcccggacggggcggctggcagggtgggggctgaccccccacctccctcccggacggggcagctggcctggtgggggctgacccccacctcccttccggacggggtggctgctgggtggagacgctcctcacttcccagacggggtggctgccgggtggaggggctcctcacttctcagacggggcggctgctgggcggaggggctcctcacttctcagacagggcggccgggcagagacgctcctcacctaccagatggggtcgcggccgggcagaggcgctcctcacatcccagacggggcggcggggcagaggcgctccccacatctcagacgatgggcagctgggcagagacgctcctcactttccagacggggtggcggccgggcagaggctgcaatctcggcactttgggaggccaaggcaggcagctgggaggtggaggttgtagcgagccgagatcacgccactgcactccagcctgggcaccattgagcactgagtgaacgagactccatctgcaatcccggcacctcgggaggccaaggctggcggatcactcgcggttaggagctggagaccagcctggccaacacagcgaaaccccgtctccaccaaaaaaatacgaaaaccagtcaggcgtggcggcgtgcgcctgcaatcacaggcacttggcaggctgaggcaggagaatcaggcagggaggttgcagtgagccgagatggcagcagtacagtccagcttcggcttggcatcagagggagac

SEQ ID NO: 3230 - DNA, 1860 bp, Artificial sequence
  DNA replication origin
acagatggaggcttggggaccagcgggccctgggctgcctggtgtaggatacggaaagtgtgtagggggggtgcacccgtgggccccaggaggtctgttgtgcgcatgctctgagtgtgagggaggacgggtaggactgtgggggtctgccctggtcgtgctcccaagagaggcactgctttctgcagagtgcgtgggcaactgccagctgggggagcgctcaccaggggaaaggggagctctctgtggcttagcagtgattaacccacacaatcaatggatcctccagccacagtgtgagcagctctgcctcatgtgaggcacacagcaccttccagcacagtcccgatatctttcatgccagatgcacatcttcaatttcagctacaaactgttacaaattgatgcattttctttctgactaaatgttacaaggtttgaacacactagctctgccgatcaccgcccctctaagggatgggtttagaggtttggcacgaaagcaaaagccttttaataggagtgcgtgagtgtggtggtgtgtgtgtgatgtgagtgtgcatatgtggcgtgtgcatgtatgtggtgggtaggggtatatgtggtggtatgtatgtgtaggatgtgtgtgctgtatgtgtagtgtgtgtgatgtgggcgctagggtgtgggggacagtggggtgtgtatatatggtgtgtgtgtgatgtagggggtggtgtgggttaggggtggaggctctagtggggtgtcagggggtatgtgggtagtgggtagtggcatatgtgtggtgtgtacgtatgtgtggtatgggggtatagtgagtttgtgtgggatgtgtgtgtaatacgtgtatgtgttgtggtctgttgtgtgtagtgaggtgtgtgtggtgtatagtaaggtgtgtatggtgtgtgtctgtgtggtgtgtagtagagtgtggatgtgtgtggtgtgtgtggtgtttagtagtgtgtgtggtgtgtgatgtgtgtggtatctgtgtggtgtgtgtggtgtcatagagtgtgtgtatggcatgtagcacagtgtctggtgtgtagtagtgtgtgtgtggtgtttagtagtgtgtgttgcgtgtagtagggtgtgtgtgtggtatgtagtagggtgtgtgtggcatgtagtagggtgtgtggtgtgtgtgtggtgtgtggtgtgtgtgtggtgtgtatggcatgtagcatggtgtgtgtgtgtggtgtctggtctgtagtagggtgtgtgtggtgtgtagtagggtgtgtggtgtgtgtgtgatgtgtgcctgtgtggtatgtggcgtgtagtagggtgtgtggtgtgtgtctgtgtggtgtgtttgtgtagtgtgtgtggtgtctgtgtgtggcatgtgtggtgtgtgtagtgtggtgtgtgtctttgtggtgtggcatgtagtaggttgtgtgtgtggtgtgtgtggtgtctagtagggtgtgtggtgtgtagtagggtgtgtgtgtggtttgtgtgtggtatgtgtgtggtgtgtgtggtatgtgtgtcgtgtgtgtggcgtgtaatagggtgtgtggtgtgtctgtgtggtgtgtgtgtcgtgtgtgtggcatgtagtagggtgtgtgtgtgatgtttgtggtgtgtgctgtgtctgtgtggtgtgtgtgtggtgtgtgtggcatgtagtagggtgtgtgtgtgatgtttgtggtgtgtgctgtgtctgtgtggtgtgtgtgtggtgtgtgtggcatgtagtagggtgtgtgtgtgatgtttgtggtgtgtggtgtgtgtgtgtagtgtgtgtggtgtgtagtagggtgtgtgtgtggcgtggactgggagtgtaaggggagggggtgttgccag

SEQ ID NO: 3231 - DNA, 687 bp, Artificial sequence
  DNA replication origin
gcgcccacgcctcccttctccagtccggactgccagcggaggggaaaatgggcgacaggagaaggggaggtgtgtgcgggagggactaggctgggggagaggggtttaaactggcgcggtcctacagaagtttgaggagggcggggccggctccgagcccccggagccctacgggactcccccgattctgccgaggagtccccgccagctccgtgcactcctgcaacactccccaccccacccgccagctccgagtttacagcctctcggttcgggggattagctgggggaggggaccccctggctgtagggaatggcctgcgggcaggggtgggagggaaacgatttgcttcgggagataaggatgaaggttttcctgagtcaagggagagaagggagggagaagagagatggaacaaaaggcagatgctggaggggaaggggagctggggagttcgccccgagggctccggcagcccgcggtccccaccctcagtctgtcctggagggtgaggtaaaggctggtgccagggctcttcacgggccacttggggaggggagaaagggcgatggaggggtacgggtgtgggggagaggaggaagagcgtctgctggcacaggaccccttgcctgctcccagacaggaacccagcagaagggctctgccacggacccgacacctcccac

SEQ ID NO: 3232 - DNA, 686 bp, Artificial sequence
  DNA replication origin
acacgcacacacccttcccaacacccaggtatgcagatgcacactcccccacaggaggagccgcccggaaatccctgaatcagcttttctgcagtccagggtctgtgacaagcgagctgctgcccttctgaagagaggctccagcccggccaggagcagcgggtgctgcagcacttcagtccccggcttcttcgggagtgaggtctatgtcctggggcaggggatgcctggaggaggggaagaagggggattcactgcgggtattgggaatttcccggttccccagactctgtggggatgagaagccctggaaagccctgagtgactgccccccccaacacacatgcacactggatttttgtgtgtgtgggttgggggatgaggaatgtcacttcctgggtcaaaccccaaactcgagtcctggtcctgagtgtgcagagtggaaggcaaacagaaagcagctgcatggagggtgaaggagaggctgaggggagagggcgaggatggggtggagctgggaaggtcaggggtggttaatggccggacagcagcagaaattccacctggcgagctgtggccccgaggtcttatcgggtgaggttgggggttgagggtgaggcccaagggtgacactgaggcacaggagtgctgcccaggctctcggtcctccctgcccctcctggtgc

SEQ ID NO: 3233 - DNA, 683 bp, Artificial sequence
  DNA replication origin
tgcctggccctgggatagagtgctctgggacacaatccctgcccacaagagtttggaagtttgctgggggagacaggcacataggcagataacagtgcagcacggggaaaacagcagtgtgcacaaaagaccgtggagccggagcccttggagcctccatgggggttaagatgaaggaacagccagagaagatggcttctgagtggctcttgaagtacacttctgatctgatcccaaggaaaggcgggtgtttcaggcaaagggaatagcgagtgctccagcgtggaagaaggaggacgctgggcatgccgcctggaggcactgggcagagtgggaagaaggggccgggagtggggtgggaggggcattggagcctggatgcgaagggccttgcaagccaggctaagggtgtggggcttctgcccacacaggcaacgggcacagcggaaggcttgaagcagggagctggcaggaggcaatgagaagagggagtgttgcggcaggtcaagggaaagccaataccagtctacaccatggaggagccatgggagtgggaaggaagggatggatttgctcatctacatgcaagactgcacactgggtagctaattgggggtcggggtgaggaaaagagaggagtccaggatgacttctggatctctggcatgtgaaacgggaaggat

SEQ ID NO: 3234 - DNA, 2288 bp, Artificial sequence
  DNA replication origin
cttcggagccgagttggggcagcggtggagcggggacttcgcgcccccaggggaacgggcgcccctgcgaaaccgtcgccagccacgcgtccttgccgtccgacgccccctcacattggagaccccggatctctcccgcctccttcgggtcgctctccggtaagtccatacccccgccggtgggggcacggacctccctctccaaagtttctcctttcctgctactgagtcgaggggccacggggtggtctgggtcccgagaggtgagtagggttggggaagtttgaggccaagggggccgggagtctgccccgtcctttgggggagtttggaagcgtccggatggaaggttcgtctcggggagtcggacccgaggggcgaggagccggctcctctgagggactggggctgggctgggggcagatttcctcccgcgggttgctgcagagaggggcgggccacgcgtcccctgcaccggccggctctgcgcccccgtccctctctcctttccctgggacgaacccactcgcgtctagcccagcccccgccagccctagcggtctccaaggaaggttcttttgccccagtctcaagcttcggggacccctggcaccgccgtcgtgggaagtggggcggggggtggggtctgggcgctgggagccggagaccctgggtcagggagaggttggggagacagactgcaggggccatctggaagcaacgggcacgaggagctggggcaggggcccaagaaggggctggaggcgcccctcccctctctccaaatctcatgactcagcacgacctaggacgccccgtccctgcttcagctctgtccccaagggctaggctcgcagcctggcgggtgctgacagcccgactcccttttctggactcttccatgtacctttcccatttggggtgcccccttcccctgcctatgctccttcccccacctctggggcacagggcttttatttttcaactaaaaagtggagctttatcgtttcacatcccactaagccaggccccctcatcctgtctcctcccttttcatccccacattccacaggtgcctccaggacacccccagcccatggctcgtggggtgtctcctggcagggcagtgtcctcccttacccctggctgaggtggcagagtaggtgctctccccgcagcaggagaagggagtgcaaggacagaagaggtgctggcccaggaggggccactgcagtggggagggaagggcagaggccccgtgggcaggtagtacaggttgagttagcttataaggaggaggaagtccttaggatctgggggcgcccaggaagccagaaaggtgaactggggtctgacctggaaagcaaaagggtgcccttctccctcccctactgctgccgccctgcggggcctctcccaggtggaatagattgtcctccatccaatctgtctggatccccataacctggcacttcattagagggggtgacagaagcagggaagcccttaatcctttcaaccatctctccctacttaagactaagtccagctttggggctgctagaaacatctctgtgaccagcagaggtgctgaaaaaagccatgcccagtgccccaaaggcgggcccgagtggcaggtggaagggggcagggtggctctgatgcagtgggacgtgcctggcatcctggtcctgtggaatgagagtggtggtctggcaggcactgcaagctgcagcgtgtgtcagggccctgggggtgagtcagcgtcaggggtccacgccaggcacactgcagcctagggagtccaactccaacccatctcctcccatgcccctggaaaatggccagtgcccactgaaccccgactgaaccacctttccctcagggtggctgcctctgctctgcttggctgccaggcagatccctggcttcaccctctaggactccccccagaggcttggctttttctggagatcttttgggcttaatccttaccttctcccctccttgtcttgccaaaggaggaggagagggaggcagaggaaagtttctaggttatagcctcacatagacctggcccaccattccctggaggaagagagaccagaccactctgctgggagtctgctttgttctgcagtccaggagcttggtccagggaacttgggttttcttttgggggaagggggtgattatgcaggaacatttctttttcagctttggggtctgacatccgcagaacaggaccaggggaagcaaaaagtgttggtgttcgtaaacattgactt

SEQ ID NO: 3235 - DNA, 1156 bp, Artificial sequence
  DNA replication origin
gtagcaggaaaggagaaactttggagagggaggtccgtgcccccaccggcgggggtatggacttaccggagagcgacccgaaggaggcgggagagatccggggtctccaatgtgagggggcgtcggacggcaaggacgcgtggctggcgacggtttcgcaggggcgcccgttcccctgggggcgcgaagtccccgctccaccgctgccccaactcggctccgaagtgcctttgccgcaagacttgctgagcttagcagtctgcgccgaggcggcagagggagggggcctgatcgatgggcgcgcgcggcgagcgctgcagtgaggggaggagaccaagcggcgtgggagggcggggaccgaggcggaggaggcccggaggaggcggagggcgggcctgccccccgggacgggttctttctgcgcagccccccaggcgctcggcgcccccgcctcctgctcaaggtcaaggaggctgcttccccagcaggaaggcggactggaaaggagctctatactccccaccccagaaggctggtctcctttctagccagctccttctctccaacttcccgaacccactgcagctcaaggctaaattattgggctcaggagcccccatccccatggccattttgggatccctgagcccctagcctcccctcctcccctctccgcttaggtcaccgctacctatattggccacctggatggtgggggcttctgagcctaaaggttgggtgagagagaggaggatgcttgagagaagacagcggtgcctgaggcctatggaaatagaacagcggaggggagagtaagaactgcagggtgacaaggagagaggagctggaagacggtagaaagaaaaggaggacgctactggttattaaagacagggtgttcacacatgttagtttgcttaatacgtaagacatccctttaaggtgggcattttgcgtgggcagtttgcaggtggggaaacagtccctgaatggtgcgttggaccaaggagctgcagacagttaagtggtggcatttcggaagagcctgggagaaagagaagggtggcaagggcaaaacagagcccttcctaacctacccaggagctgccagggcagcaccagaacttccttacagcacaatttgaatatccgcttt

SEQ ID NO: 3236 - DNA, 935 bp, Artificial sequence
  DNA replication origin
ccccgtccgggagggaggtgagggggtcagccccccgcccggccagccgccccgtccgggagggaggtgggggggtcagacccccacccggccggctgccctgtccgggagggaggtgggggggtcagccccccgcccggccggccaccccgtccgggaggtgaggggcgcctctgcccggccgcccctactggaaagtgaggagcccctctgcccggccagccgccccgtccgggagggaggcgggagggtcagcccccaacccggccagccgccccgtccgggaggtgaggggcgcctctgcccggccgcccctactgggaagtgaggagcccctctgcccggccagccgccccgtccgggagggaggtggggggggtcagccccatgcccggccagccgccccgtccgggaggtgaggggcgcctctgcccggctgcccctactgggatgtgaggagctcctctgcccggccaccaccccgtctgggaggtgtacccaacagctcattgagaacgggccgggatgacaatggcggttttgtggaatagaaaggggggaaaggtggggaaaagattgagaaatcggatggttgccgtgtctgtgtagaaagaagtagacatgggagacttttcattttgttctgtaccaagaaaaattcttctgccttgggatcctgttgatcggtgaccttacccccaaccctgtgctctctgaaacatgtgctgtgtccactcagggttaaatggattaagggcggtgcaagatgtgctttgtttaacagatgcttgaaggcagcatgctcattaagaatcatcaccactccctaatctcaagtacccagggacacaaacactgccgaaggccgcagggtcctctgcctaggaaaaccagagacctttgttcacttgtttatctgctgacgttccctccac

SEQ ID NO: 3237 - DNA, 1093 bp, Artificial sequence
  DNA replication origin
gcgggctggagggaggactgtgggcccggcgaggctcggcaggctggtcctcgcctccgctcccggggtgcgggggtgtgtgatggggtggggtgggggtgggggacttgcgagttgtcgtgcgaggaggaaagttttcaatatggcggcgggagcccctggtcctttgtgtggtggcggcgtcggcccggagcggccctcacctgggcgccccaccctccagaccagggcacccctccaccgcctggtccccgggcctccaggtgtcccccgggccggggtcaagaagggggcggccagcgctggctgggggcggggaggagccgcgggtccagccccggagcggatgtttgtggggggcgttagtgtctgggggacacttttggggcggcgggggcaggacgggcggcggtgggccccgatgcccgcccgcgctcccgaacgcgcacactcccggcttcttctggctcagccgctcggctccccggggaggcctgggctgtgctggtggggatggggtccgggcgaggccgtgtttgtaggggaacgtcagacggagagacctccgaagatttcgtgctcgtttcccccggccctcaggctccgggcactgaaaggcagtcacccaccgcagcccttccagccctgtctacagcgcctcgggcctgggggcagtgagtgaggggtgggtgttgctgaaaccatccgtaacggctccaacgttcgctgaggagagcccggccaactccttcctccgtggccggaactgggtgcgctcctacacccctgttttttttgcccacctttcgggagggtctgagtccgagttggcctaagcggcggttggacgggctgggaccgttgggaagcgggtttaactgcctttcctgctgtttaagaatcttctccccactctcttcccccacccccacttctaagtagaggaagaccccttcccacccctttctcccttaagcttgctttttgtaatgacattttgagttgtagggattctgtttgtaatcgttatgttttggaaagctgttttcagggagatccctgaaaataaggcttcttaacccttccctgcccc

SEQ ID NO: 3238 - DNA, 1204 bp, Artificial sequence
  DNA replication origin
gggttcaagtgagtctcctgcctcagtctcctgagtagctcatactttcttcacatccacagagtacataccatttcctgctgtcaggcaaatcttagaaatttctacaaatcccagaaagaatgggtaagcagcccctgggtcccttcctagccccttaccttgatgacaagatccacatagccttgatcctcatcactggtgacaggagtgtatggcctgatgaccaggctgccatcaattcgggtggagaggtagatatgtttgcctggggaccgtgcagagagctacataagggttgtctgtgatgtgctgcatccctcaaaatactcaaagagatttgagagaacaagatgtcttgcttcctgctgtggtcccaaggagctacaaggcagggaagatttgccccattgagccctcagttggatctcttataagcgcccagttgaggaaacacttatttccagcgtttcctgccagttactgccaggaccttgacagatgagccaaaagggtctgggcaatgggaaaaagttagtagtgcttgctcagagggagtaattagcaaatcctgcagggaagaggcaagactgttgagtgttaaagctggatgggggtcatggaagccacactctagaggggcccagtggcacctcacagcttggaggatgcagagccaagtgggggaaggggaatggtgtgtggagcaaaccggttgaagcagcgtgtttcatgagatcccaggaggggagtcaccttctgaggataccagggaaaggagcccattccacactttccttacccacaggcagccccagagtgtggtgggcggtgggcagggcaaagcggaacctcttggtgttgtggctcacagtctggagggtggaggacacaagtgtttcaccaagcgcgcctggcgctgccacgtcccttggacatcccaaccaccgtgggtgctgtaccctccatgccaggagcactctggtcccctccttcaccctggccctttcttccccaacttaccgtcttgtctagcagtcgtagcaggtacttttcattggggtccaggagagtgacctgaggccggcgggacctccgaaccaagtaggagcccacagccaggccgagcagagtgaccagccccacccccagggaggccagcaggacggggctctgtgggtagaggaggcagcgtgaccgccag

SEQ ID NO: 3239 - DNA, 1058 bp, Artificial sequence
  DNA replication origin
cggcagcgacagcccctggtccggagctgagtggccagaaccagatggggaggggtcccccagtggaggatactgaatgagggtcttaccgtctggatccccatgacggagcgccttttcctccaccacctgacaagccgacagatcccacaatgcgccgcggggcgggtcggagggcggggcaggccgggggcggggccgggcaggaggcaggacctcgcggctgggggggcaggaggcggggcctggcgggggggggggggggtgtctgtcgggggcggggcctagcaggaggtggcggcggcggggccttttgggggcggggtccggcagaggcggggctgggcccctctgcgcgccaccctttccctccgctactcggtggctcagggtctccggtgcttattcaatacttttttttttttttttgagtcggagcctcgctctgtcgcccaggctggagtgcagtggcgcgatctcggttactgcaacctccgcctcccagtttcaagtggttctcctggctccgcctcccgagtatctgggactactggcgtgcgccaccacgcccggctaattttttttttgtatttttagtacagactgggtttcaccgtgttggtcagggtggtctcgagctccagggctcaaataatctacccgcttcggcctcccaacgtgttgggattacaggcgtgagccatcgcgcccggccccaagatcttttaagaccgcagctccagcctctcctcccagcgaggtggtccctgccacttcgacccgcttatatccgaactggatgggagttctgcctaaggtagaaccacgctaaattgggggattggaaatctcttgagtctgcgggtgctgagcggagagtgtaacgatgaaccagagacaggctcaaagtagagcagaagggcctgaagttaatcattgtgcagtcaccttagtttttcaaccggctgaattgcagcaagagaatggaacagcccagaggagtctcttacaggagtgaacagtggcatggcaacttcatttccttttgacaaaagact

SEQ ID NO: 3240 - DNA, 1132 bp, Artificial sequence
  DNA replication origin
tctgagacaccattcatctcacacgaggtacggcgatacgcgacaccacccagtacaacagctctctctccacctggaacccggacccagcttgattcgcgggtgccggatgatgacgtatccttgcacctggcgatgattggttcgcgtggagaggcgtcgtccgacaacgcgactcggaacccggacctatgttctcgcgagagttagcggcctccggtgtgggatggccgcggagccgggcggagctggcttgcggctcccggggccggctctccggccggagacatggcccgggggcccggcccgctaggcaggcctcgccccgatacggtcgccatgcccaagagaggaaagcgactcaagttccgggcccacgacgcctgctccggccgaggtgggcgaggggggcaggggcgctgaaacattttgggggctggcggctgggagggggctggaccgtgccgaggtgagcgctcgcgtgcccgcggctggagggcggctcggtccgggggcctgcagcgaggaggaggtgttggcggggaagacgctgacgagagaaggcctcttccttgagggttggtgctgtgttgcagtgaccgtggcggattacgccaactcggatccggcggtcgtgaggtctggacgagtcaagaaagccgtagccaacgctgttcagcaggaaggtaagctttgcgcgagcctttaaagactcatgccgcgaagacagaactaggtattttatttctgtttttcttgcagtcctttagtcgtcttcctgtaaccgtgtttgctttcgttagtgttaacttacatattggggtggaggaggattagtcaagagtagcagtttctgtagcagaaatattttctttctttctttgcatttaaaaacatgtttgcatactttttagtttccactgcattcttcttggttattaatctctttgctgtagttcacatgttttactctgcagtttgcttccttgtttaataaccttggagtgttcttttccttttctggtgtttctcttgctttcagtctgtttactcatgggtctgagacttgtgttttatgacacctactgcctccagctcaggaccaggattaaattggattcaatttgtctca

SEQ ID NO: 3241 - DNA, 2450 bp, Artificial sequence
  DNA replication origin
agccctttttgactccgtatgtgctacctccggcaggcgtcggtactgcttaccctgccgcccctcgccctcctttgcggtgccctgtgcccttgggggtgaggataggggcgatgcctgatctgcggggagggcgtggagtgcgccctctgctccatcggcttcaggggagggggccgagttggcgagtctcccggtgggaacggagcagactgcgcccccatttcccctccaggagagtcagaaaaagcgcctctcggctccggggccaaccccactcctttggggacgcgattctgatgggctgaggtcttcgctcttcgcgggggtcttaatctttcccgagttgctcatagcacccctgttcctgtcgctagctctccattcctcgaactgccagcctcagtctgtgccagagatgcccccatctccgcagtgccagggcggtggggtggaaggagcggccaacccgaggcctggtgggggtggggacaggggtgggcgcaacaggaaaagagggctggaatagagatgcctgaactgggagggtgggagtggggcgctgacttacgtccacgcagtagggatgttttccagcgcagattttgaggttttgatggtgggtgggaagagagaggtcgggctggaggacttggagacatggtgtaggtggttttcttcgagaaggaggagggatccaggacaaggtgccactaggagctgatgtcacctttgaggagaggtgtgctggtagtttccatcagaggagcaggagagttggggccgttctgtgtggagagcaagtggttaaggaggcgctgcttcgcagggagatcccctcctggtgtgagcttaagggtcccctccaggagccaggtttcagggatttcccatagtcctttccagagttcttggatctggtacctagtactttgctcaacatccagcaaacatttgttggacacctactatctgccagatactatgctcggtgctaggtcttctgaaggcaatttacagccacggagtagctgaaaggtacacataggaggcacacatagcaggtattctgttaacacccttctcaccgcccatccccattctgttacattgctgttggattagaaaaagaaagaactgtgtccacgtgctttcaaacagctgtctgaattagactccaacctacacaccccctaccactattaactggccaggtagtcccagggaagctgcctaagcaaaagggcagcttgaatgatttcccttggttattttctcagattttgtcctgaggcttgaggaggcttcgtggggtaaacggtatctcaaagtaaggagataatgaatgacaaaatggttattgggggccaagaatgtcctagacactctgtgtagtgggagacgccatctctggaagatggaatagtgtgggggaggagggtgtagaagggaattcgcatccagtggagttggggtttgtgctgctgagcatgtcgtgatgtcagaaccgtgtggtgcatgaggtctggctgctgggctgtaaaggagggctggaggggcagggcatggcaggcagccaggctcctgggtctcatctctgagttgattgctgaaatcttagagttggaaagagttgtcagggatggcttataggtcctcacagagcctctgaggatggcagagctagagctaggcaagagaatgagtagtcaggctgtggtggtgatgaggtggggatgaaggctcagcagggctggggagctgggtgttaagggggttttaagatatgggcagctagccgaggccttcgaatgccaaggacattcttccctgggctttaggccctactgtgttggctccataggtgagttgctgtagaaacaaggtgtggcaattgagtggtatggggtgtgtgtgtgtgtgcacacgcgtgtgtgagtgtgtgtgcttgtgcatgtgttggagaggaggagaggtgaggagcagggaggactgagggagtgaaagctgcctcaaagtctgggtcctacgtagggaattgagagaaatggaggggagggagtggggtcagagggagggacaagtgtgtattgcagccacatgaagtcaccatctgtccccctctggcctgctagctcacggacctataattagctctggagggcatacggtgctggctcacaggagcgtgggacttcgggtggccagcagagtggaggattcagagggaccatggtccttgatgtactgtggaaggggctgcttctaggggaccctctgcatttgctgtactgggaggggcctgaggcaactgagaatgtcacagggacagggctggtgggggaaacagcagtgggggaaggagctctaagcgaggatggcaggagactccagggctggtctgagcctgagacctccccgtttgttgcctggctgctggcccactgcac

SEQ ID NO: 3242 - DNA, 970 bp, Artificial sequence
  DNA replication origin
gaaccgtggaggtctccagtctctgcgaccccgccgtcccagctgggagaagtcggcagccgcgggagaacacacagagcggcgggttagtgcgcacacacgctccccgcggagcgttagtgcagctgcagcgcaggagcgcggggcaccagcctcggcctcgcccctctccacccggcccggccctggggtgccaggaagaagcccgcgctcggctgggcctcggccatgcccagcccgcctgttactcaccttcaggcatgatcttctttggcggggccggtgggggctgcagggtccccagggtggacacacggaagcccgccgggagggtctccgcggaagcgctgagcatgccgccgcgaccgtggtgctcccgcggccggaagcgcttcctccaggagggcgcgcggcgaaacaccttgtcatccccctgcaccatgggggacaccagaggcccgagggccctgttggaattgccatcctcacgccctgcctggagggggccagtcgctgctggttcaaggggcaccactcccacccctttggaaagagggagcgaggtcacttcccctttctagccttgagtttttccatctgtacagtgaatcgggaaaccctgcgactctgaaattccctgtctctgggtggcggatggagggggtgtgtggggcgggggagagtcttgttgggtctgccatcctgcagttgaactgtttcccagcccaccgcaatcttctcaaagtaggcttggcatgaccattcacctttcaaggcattcctctgcctcagcccatgggaggtgacagccggtccctatacacactgtcctgtccttctggggcctccgaatggctgtagcccagtataccagaagagtactatgtcgggcgggagtcagacacctggcttctaatcctggctctgccattttactggctatgtgaccctgtaccaggtgagtgacccc

SEQ ID NO: 3243 - DNA, 1708 bp, Artificial sequence
  DNA replication origin
actggcccctatccaagaaacacatgccagatgcttttcctttcctctcactttgatgaagccctcggttccatcatcccaccctgaacataagtcttgaacattttcaggcaccttggtaggatgagggagtaggtgaggagcgggtatttcttgggaataatattcctaccaaatcaggacctgtatccctcagcttgggttcccatcatgctgctggggaaagcaatgaaaatggtggcagctgggcggatcttaggaattccgggaggaggcagtccctgcccaccaaaatagccctggatgagggttaggtgatttggggacaagcaagagagtggctgccttcaccaacattggatttcctggacctgggacatgaatcactgtaggagaagctattttcttcctgggaggtcagagaaaggaggccttagtctgccttttccccaaacttgactttgggctcaatgtatattcaatccacccattaggttcatttttatagggttgggattactaaagaagtgaggcagaggaggagagaaggggaagggatgctgggagcagagctagcaatgcatggttagatctgttctgccctagagtcaagatccgcacaacctcccttccccatagcccagcaggagctccacccgatggttggggcaggggacattcccactgccctttgggcttaaggctaccagaggccattggctctccctctggctggtctgcctatgcttcttattaggtgggagcttagagtttccccatcctcacccttggctcagagctcagggatccatttctctctggttcttcccaaactcaaatttgggattcagcttatgccagggcctggaatctctacctcagtcttcctcctcccagcctcaccatcctgtgggagaatggggccttcagtagcccttcccagcccctccctgaccccaagagaatgggggcaggaactgcagtcacggtgatgggttgggagagtggtgatgctggggatgccaaaaccagctgccagaccatttggcacagccagacgtggatagacaccctaagattgaatagcccaagcagggctgcgtctgaaatgaccctttcttggaaggaccatcccagcctgtggcccaggatcctggtcctggtggaggttgcagtgcagaccaggctgggtccagaagaggaagggtggcttcacatccaccctgagctgcccttctctccttcccccagaatcccaagcatggacaacctgggtgcctccacaataccaggaaaccccagccacatccaccggacttacaacggacacacggtgggactcggggtaatggggtgccgagggggtggacgaatatattctgagatccagggcaaccggaaagtcacggacgagactaggagctgcggaaggaaggggaacgagcaagaggggtcagggccagaggagcctgtgaaacccagaaggaggaagccagccctgggggccatggctagtcccggaaggcggagagcatgtgtccgtagagatagtgggagtgagctgagggagagagagagacaggcatcgcactgtgaggcaggttgcagggcatctgcgagagaggttgtaggatgtgtgcgacagcggcaacgcagcgtgctccaagcgcaaagcgccccaggccagacgaagcaggaaggggcaagc

SEQ ID NO: 3244 - DNA, 1279 bp, Artificial sequence
  DNA replication origin
acattgttggctccccaaccctgactgtttcaacttgattctgtctatttgcacgctgggctgatgtcatttgcatggtagcggctggatttcaaaatgctcagaaatccccttcacctgctccctgctccttactaccccttctgctgcacacccagtcacagccctctggccttcagcatcttctagtccctgctgattttgcaggtgggctgacctgggctgccatggtgcttggctaaaatcaaagcaatttttccattctggattctcatgtgcttgggaatagaggagcaagaaggagaagggtctggaagggtgggggcctctggctgctccaaacaggtctcaccatatattttcctaggctgggtctctgggtattattgatgaggatgaggtcgggggtgggggggggtgggggggggtggcaaatgcttgtgcatttcaataggacatagatgcataaaaattacatgcaaatcagcattgattatttgtggggcagtagctttgcagcaagatgagaacagatcacagaatcacagaaagtcagagctgcaaggcagtctagaatccactagtccaccttcttcctccacatatggggaaatggaggcccagagaagggaagtgacttgcccaagcgtacagaggatgagtgtcagaagtgtgaagggtgcctgttctgaatcccagagcctcctctccctctgtgaggctggcaggtgaggaagggtaagtagtaagcagcaagtgagtagatatttcccggtgggcctggggccacaagtaggcagacagtgaggggttggagagtttgaatggagggtttagagagacatcaggagaggtactgctggagagatgaaaagaagatacaggagaggtgtgagagagagagtgggctggaggtgccaggcagaggcctgagggattgagacaggggagatttggaggcagatgccaggattgagatgtgaggaggaagggagggtcccccctccaccaggcctctgaagccacacgttgtttccatggaggactgagcatcggatgaccactgggaaatcccgtccctgcctggaatctgatgctcagagccaggatcattcttcaagaatttctggctttagggtgtgggaaggtgcagacccggaggtggaaggggttgggttggaggagagtgggtgagggtcaaggggaggtgattggtggagacaaagcagagagctggttttaaaaataaccagaactaggcttagcactgtgaactggg

SEQ ID NO: 3245 - DNA, 706 bp, Artificial sequence
  DNA replication origin
ggaagcttttgaggatttttgaggattttctgaaggacctgaaagatgctataggaagatcatccaagacgctgtgcagaggggaggaggagagggtgagagcaggcagaactgccaggaagcaatcatggtcaaagatgacgaaaagttaaacctaagaggaagcagtgggaacagagatgaagatggacaggaaagatgtctcgtgggaggacttccgggcatagtggctgggggactgaggaggcaaagatgactctatttcaagctgagttcccagggaaatgctgaggaggatgagggagatttgacggacaggctggttggggggatgggggatgggatacgaagtccactcctggacaggttgggctggctgtgcccatgggaggggtccagcagccttctggaaatggccaaagggtgatcggagctggagctgggtcatcgcaatggaggtgacagtcaaggccctgggagagatgaggccacccaggagaggatgcagagaataggctgtggagaagctgggctgtgcccacagtaatcaagagggagggcagccaaaggggaggagcaggctaccagacatttcaggaagcaggggtgctgagtggttcggggctgagggctgaagggcagctatgataggtctgagggggatgtggtggatttcatgaaaagaagggtgtggagacctcaaaga

SEQ ID NO: 3246 - DNA, 744 bp, Artificial sequence
  DNA replication origin
ccatccccctcctgtttctctggccctgcagagcggagcacggaaaggcagagtgaggactggagcacgatggcccaaagaacatctggcttacttggggtcttatgctctaccttttttcctttctagatggccctcaagccagccatcatgtggtgctgcgagtaccttcggcgctgtggactcaccggagagggatcttgacccggaggtagcggtccacagcaattgccagcagggccaggatggagctctgggtgaggatgaggaccggacaggcaaccatgaggcaggtgtggaagtaggtctgtggcccaatgttgatgaggatggcgagggggatgaccagggcacccacggccacatcagccaccgccagcgacacgatgaagcagaaggtggcatcccgcagcgcctggttcaccttcaccgcccagatcaccagcacgttcccgggcacagagaccagggcgatgagcacctcgatgccgatgtaggcggcctggaaagctgagatggagggcggcatggcgggcacaggctgggcacatcagcagacgggcaccaaggggcacgaggcaagcacctgtgtggtcagggaagcctgggatggggagacccgtctgggaggggcagggagctcaggctgccctggaactccaggtaccctgtgatgtgtcccacttgtcacatgcagctcctacccaggctggaggggcacccggacccttctctgcctaatct

SEQ ID NO: 3247 - DNA, 1789 bp, Artificial sequence
  DNA replication origin
tatatagctgtctatatcttgacctatttccctgacttccttggtggttgaccttggtcagttccggccttgctgacacctggtctccatggctgggtatatctctaagttatcttgtttccagggtcagccctgtttcctgtaacaaataattctttcccctcagtgagcagaagtaatggcctcatctggcctgatccagcatttggggagaagccggtgaaagaggccatctaagagatatgtttaatgccaaactattagaattttgggtcatttttatttgttatatgaagcagtagagcaaaatatttgaattctgaattgttccagaaatgtgggacatgtgagcatagtaacctgttttcaattaacttgcaagctctggttgaatctctaaaaagatcactaacaataccaaatgatagattatgaatgcccaaagaatggtatggatgactaactcagcctcgagagaatggtcagcataggttttcaaggtggaagaccaagattacactgtaccttcagtagtgtgagagattgaggcaggggtggggcgtggtatagacaatgatgtatgcaggagataaggacatgagccacggagcagcagggtcacgcatgttcaggcatgcatggaatggggaccacgttacagggcagagatggggatcatgggcaagctgttgagggatccaggctgtagatttgctgatacttagagggcagtgagaagagtgaccctggagcacaaagtagcagcaacctaaaaaggcagatggggctaaattatgaagggtcttaaacattaggcaaaggagtctggacttgatttagtagacgaatgggggaggggatgtttcagaatgacctgagcaagagaagagctagggaatgaagtcttttaggaagggaactccactaacagtgggaagggtggtctggggatgggactggatagaatccactgcaaccatctagatagtaagaagcagccgatttggggactggatttagggagcaaagtacaaggaggggctgacctttctggacggagtgactgggaaatgatggtatcgctgacagaaatggagatcaagagctttggagagacactgggcttcggctgacattgaggtggtggctggacatctgagggagaggacagagccggtgggaacaggagcaggatggaaagacaggaggacagactatgcagatgagaaaagccactgtaaaacagtaaacatcaagacaggctacatgcataggacctctccaaggaaaggcagcctagagaaaagggaggaggactgaggagacatagtgcggggaacggggcacgaagggatccaggggcagcacagccagacaggggggtggagaagcctggggcacaaggaaaaaagacagggacacggcttccagaaggtggtcagagggctcagagtccaaggaaaataggaatttacagaggccactgggttttagtcaccttacaaacacggcatctgtatgccagaccctgggccaggcttcacggtgttgggtagaagttatcctcattcagcagacatctaccgagtgcctgtgatggtggcggtccctgagtgtggaagagggagactgaggccagattctttctcgagaaggtccaaaccacaatgaggaaggaagacggctgggggaaggagggagtggacggaaaaatacgtacagttgagagcagaccactaattcaaaaaaattagcacttaaggaaagtgagaactagaaaaataagttg

SEQ ID NO: 3248 - DNA, 1536 bp, Artificial sequence
  DNA replication origin
tgctcagccagtaacaggcccatgaggcctgatagtactgtttccattcatggaggttcttgggatggccttttcttgggtcagaatcagtttcttgcaactgaaagaatcaataaatagcaaatttaaaaggatgaaaacagtgggtggtggtgatggaggtgcatggtgggagtgcaggtgggtggtacaggtgggtagtgcaggtgggtggtggtggtggatatgggtggtaggagtggaggtgggtggtggtggtggcagtggaggcgggtgatggtggtggaggtggaggtgcaggtgggtggtagaggtggcagaggtggaggtgggtggtgatagaggtggaggtgggtggtagaggtggaggtgggtggtggtggtggaggtgggtggtggaggtggaggtgggtggtggtgtgtggaggtgggtggtggtgtgtggaggtgggtggtaggtggtggtggaggtgggtggtggtggtggtggtggtggtggtggtggtggtggaggtgggtggtggaggtggaggtgggtggtggtggtggaggtaggtggtggtggtggcagtggtaggtggtggaggtgggtggtggtggtggtggtaggtggaggtggtggtggtggaggtaggtggtggtggtggcggtggtaggtgggtggtaggtgtggaagtgggtggtggtagaggtgggtgatggtggaggtgggtggtagaggtggaggtgggtggtggtggaggtgagtggtggaggtaggtggtggaggtgggtggtggtagaggtgggtggtggaggtgatagatagtggatctaaggccttgactcaccctgaaggctgcaggctgtatccccgagctctggagccgatttaggcggacatccaggaactcaatgccactgggcagcacgggcagagcttccaactggttctctgggaggatgaggtcctggagggcatgtagcaggcggaaggcatcattatcgatggaggaaatgaggttgttggagaggtcaatcctcttcaactttgctgagagaggttaggggagaacaaagagagaaaccagaacacactatctttccttgtccaggttggagctgtctccacaccttgctccatccctctcaagatgaggggattctaaccagctctccacctgcactaggcccaaaccagaggaaataacataaaccaggactccttggaaaagccctcggatgcctcagtgcccctccctggagttttgtcctgtgcagtggccgtccatcttgcatcctttagaagaagcctcttgaaagcgagaaccaacaggcccaggaatccctggatccacctcacctccacttgtgagtctaaacaaaagggcactgaggcctggaaaggctctgggtaattagtggtagaatttggatcagaacccaggtctcctgtctcaagcagggcataaggcataaagaagctaaaagcacacaaacaaccctgtaaacagcatcagtgccatggagagtagatttaagactgtcctgcccaga

SEQ ID NO: 3249 - DNA, 1190 bp, Artificial sequence
  DNA replication origin
atcccagcactttgggaggccaaggcaggtggattgcctgaggtcaggagtttgagaccagcctggccaacatggtgaaaccccgtctctactaaaaatacaaaaattagctgggcatggtggcaagcacctgtaatcccagctactcagaaggctgaggtggaagaatcgcttgaacctggagaggcagaggttgcagtgagccgagaatacaccactgcactccagcctgggcaacagagcgagactctgtctcaaaaaataaaataaaataaaaataaagcagtaagtggggacagaggcatgcacatggccaatggcagcaccaatgtggagcagccagttcatgaggaggcaaagaccaaagaaggatcctgaaagcagggacgctggaccaggacacctaggactggtggaagctcctgggcatagggtgggggaaggaaggcactcggggaccctcaacagagggagcactgtgcaggcagcagctggcgcatgtggcgtgagcagaggtgggggtggagagggcaggagaggcggcttcagggggcagagcatgaaaggagctcctgctggagtttcatggaggggtgattggtcagaaggctcaggtggagatttgggaagttctgtgaaaggtggctgtgactgatggggacaagcctggagtctgaggaattggtgaggaggctgatgcatgtagattagaggaagatgtgagtactgtgtgagaacagaggtagcagagttggatgggagaagggttcggagatgtccaaggagccattcagggtaagagctgaaaatcattccacagaggtaggactctttggcagagggaacagctgaatccaggggagggcatgagggggctacctgagcatgtgggcatgtggcaggggagaaaggtggaggtggggctgggcagagggaacactgcttgggagagcccctgccagggacaggcctgggaatgcaagcagagtggggtggggcagcagaaggagaggccagcgaccccaaaggaaggaagaagtgggggtaaaggaggaaagagttggggcaatccttgctcagagcacagtgaaatgctgtttgctggggggaggaagttagtccctgtggccactttgtgcaccgtctggcctcactgctgccttcatagactcctggagccactcttcatt

SEQ ID NO: 3250 - DNA, 1129 bp, Artificial sequence
  DNA replication origin
gaggccgaggcaggaggatcatttgagcccagaagtttgtccaacatagtgagaccctatctccacaaaaaacaaacaaacaaacaaacaaacagctgggtgtggtggtgtatgcctataatccccagctacttcaagtggctgaagcccaggagttcaaaactatggatcgcacaatttgcactccactccagcctgggcatcgaagtgatctcatctcttaaaaaaaaaaaaaaagagagagtgagagagaggaaggtgggaacggagggagggagggagggagggaaggagggaaggaaggaaggagagagagaaggaggaagggagggaggaaggaaggagagagagagaggaaggaaggaaagagagaaagggagggagggagagagggagggaggaaggaaggaaggagagagagaaggaggaagggagggaggaaggaaggagagagagagaggaaggaaggaaagagagaaagggagggagggagagagggagggaggaaggaaggaaggaaggaaggaaagaaagaaagaaagaaggaaggaaggagagaaaagccaaaaccctcacttctccatctggctccccagactactgccaggaacaagtccaagagcagagaaatgtgggtttcctaagaaaggatgtgtcatgaaggaagagaggataaggaggctcattcaataaatatttttcaactgcctactatgtgtcaggcactgttccaggcacagctgtgtccaaaacaggcaaagtctctgctctgatggagcttacactctacagctcatcatggaaggttggaattggctgaggcctgagaaacagctcctgaatttttggataaaagtgagtgagcagcggctaagccaggaccagggctcaggacctcagcctgccaagcagtgtccaggggagaggagaatggcacaggctgtgactgcagcccagcaccttctcagaggctctatcaagagagagggtcactgtgctgattgaaaaagatgatgtaaagtgtcaagttcccctgctcccttctccaagcctgttccacacgtctccagctgactcttgtctgctcctttctgacttggtggcttgggacagaaaatcctgaaaacct

SEQ ID NO: 3251 - DNA, 1397 bp, Artificial sequence
  DNA replication origin
atactttggggaaagaagtctttcaaagttgcttaggtcatatgatgaatcctgagggcaaacatttgctcccgctctggctaggaaggctctgccctcaggctctgggagttcctaaccaatagcagagtcctaactcgctgtgccccacaaattgctagttacctaggtcccagattcacctaagatttaacccatagttcctttttctttggaagagcttgcccatgtcaggggagaactctccaatgtacctggaggtcccctttctgcttatgctcagcccagggccggtgaggcaaggaaagaaaatagctcagtcataaactcatcccagctgagcctcttatggaaatgctgacagacccttcaagactagacgccagctccagcagtggcgcctttctaaagccccggctgggagctaaatatagtggcaggagggatggggtgtggacttgggggatggatggggaggggagggaagaactctggaggagaacaggagaggggaagagaggaggggaaaagaaagagaaataaagaaggagagggcagggaagaaattgaagaaatggggagaaaacaagaagaggctcagaaaagttttagggaaagggagatgaagaagaaggtgagatggagagcaagcagatgtggctggacatgggagtgcggctcagtgttcgggttccggttccgtgtggtgcagagagctagctggtgggggcagcctagagggggaacagtagtagtcccaggctaggcccctgtctggctggcctgcagaaagccctcggtaattgtttatctgccacagcactattggaaccaagagacagcccaattctccagactccagactctgttctgcctccccacatcttcatctgggtgcaggcctgcctctagctgtccccaagacagtccataatgcggcctagggtccttccagttagcctggggcctctggtgggggtgaggtggatctttgtgtaatggaggcagggctgtgggggcggggtggcctgcctttcagtgagggtgggagtgtggtactgcatagtgagagtgcagcctcagacgtgcttgaaagaaacctgcttcctcaggctgagggggcaatgggcaggttagagcactgaggtggaaacaggtcaggaagtgagacccagctgaactgaatcagactcctagtgtcagaggtatttgaaccagagtgactccattttgactaggagctgggtaaaataaggctgagacctactgggctacattcccagatagttaggcattctacgtcacaggatgagataggagattggcacaagatacaggtcacaaagaccttgctgataaaacagtttgcagtaaataagctggctaaaacccaccaa

SEQ ID NO: 3252 - DNA, 1010 bp, Artificial sequence
  DNA replication origin
gtcccagtttctaggaaggctgaggcgagaggatcacttgaggtcaggagtttaaaagcaacttgggcaacacagggagacccataatgaaaaaaaagaaggaaggaagaaggaaggaaggaaggaaagggaggagggaagggagggaggaaggaagagaggaaggaaggacggaaaaaaggaagagaaaaagaaagaaagagaaagaaagagagaaagaaagaaagaaagaaggaaggaaggaaggaaggaaggaaagaaagaaagaaagaaagaaagaaagaaagaaagaaagaaagaaagaaagaaagaaagaaagagggagggaggaaggaaggaaggtagagggagggaaggaaggaagggagatggaaggaaggaaggggaaagaaagggagaaaggaagggaagggaagggaaggggagggaaaaggagggaaggggagggaaaaaggagggaagggaagagggagggaagggaagagggagggaatggaagagggagggaagagggagggaggaaggaaggaatctaacaaggtactaactgttcttgaaatgccctgggaaggtgggagtgactagaggagttgcaagaggctgaaatgagaacaaaggtcacctttagtgtcctgtaagtgccttgagtgtcagacagtcaatcactagacaaaaaagaccaaacaatccatagttcccatagagggtgaccctaaaatctccccttacccctgcaactttcttcggctgctggcagggagaggcacaagcacaggcaggggcttattttttttctcttgtttttaatttttttgtagagatggggtgggtcttgctatgttgcccaggctggtcttgaaatctggccccaagtgatcctccctcctcagcctcccaaagtactggaattacacggatgagccactgtgcctagccagggcttattttggattttgttttcagatgacagcaggcaatctccagcctcacattgatgaactctgagttct

SEQ ID NO: 3253 - DNA, 1156 bp, Artificial sequence
  DNA replication origin
agcacggggttgggagtaaagttatagattaacagcatcccaaggcagaagaatttttcttagtacagaacaaaatggagtctcccatgtctacttctttctacacagacacagtaacaatctgatctctctttcttttccccacatttccccgttttctattcgacaaaaccgcctttgtcatcatggcccgttctcaatgagctgttgggtacacctcccagacggggtggtggctgggcagaggggctcctcacttcccagatagggcggccgggcagaggcgccccccacctcccagacggggcagtggccgggtggaggcgccccccacctccctcccggacggggcggctgccgggcggaggggctcctcacttcgcagacggggcggctgccgggcggaggggctcctcacttctcagacggggcggccgggcagagacgctcctcacctcccagatggggtggcggtcgggcagagacactcctcagttcccagacggggccgcggctgggcagaggggctcctcacatcccagacggggcggcagggcagaggcgctccccacatctcagacgatgggcggccgggcagagacactcctcacttcctagacgggatggcggctgggaagaggcgctcctcacttcccagactgggcggctgggcggaagggctcctcacatcccagacgatgggcggccaggcagagacgctcctcacttcccagacggggtggcggccgggcagaggctgcaatctcagcactttgggaggcaaggcaggcggctgggaggtggaggttgtagcaagccgagatcacgccactgcactccagcctgggcaacattgagcactgagtgagcgagactccgtctgcaatcccggcacctcgggaggctgaggcaggcagatcactcgcggtcaggagctggagaccagcccggccaacacggcgaaaccccgtctccaccaaaacatgcaaacaccagtcaagtgtggcggcgcgcgcctgcaatcccaggcactctgcaggctgaggcaggagaatcaggcagggaggttgcagtgagccgagatggcagcagtacagtccagccttggctttcacaactttggtggcatcagagggagaccggggagagggggagg

SEQ ID NO: 3254 - DNA, 936 bp, Artificial sequence
  DNA replication origin
tggggggatcagccccccgcccggccagccgccccatccgggagggaggtgggggggtcagccccccgcccggccagccgccccatccgggagggaggtgggggggtcagccccccgcctggccagccgccccatccgggaggtgaggggcgcctctgcccggccacccctactgggaagtgaggagcccctctgcccggccagctgccccgtccgggagggaggtggggggggtcagccccctgcctggccagccgccccatcggggaggtgaggggcgcctctgcccggccgcccctactgggaagtgaggagcccctctgcccggccagctgccccgtccgtgagggaggtgggggggtcagccccccgcccggccagccaccccgtccgggagatgaggggcacctctgcccggccgcccctactgggaagtgaggagcccctctgcccggccaccaccccgtctgggaggtgtacccaacagctcattgagaacgggccatgatgacaatggcggttttgtggaatagaaaggtgggaaaggtggggaaaagattgagaaatcggatggttgccatgtctgtgtagaaagaggtagacatgggagacttttcattttgttctgtactaagaaaaattcttctgccttgggatcctgttgatctgtgaccttacccccaaccctgtgctctctgaaacatgtgctgtgtccactcagggttaaatggattaagggcggtgcaagatgtgctttgttgaacagacgcttgaaggcagcatgctcgttaagagtcatcaccactccctaatctcaagtacccagggacacaaacactgcggaaggccgtggggtcctctgcctaggaaaaccagagacctttgttcacttgtttatctgctgaccttccctccactattgtcctgtgaccctgc

SEQ ID NO: 3255 - DNA, 1095 bp, Artificial sequence
  DNA replication origin
ctcccggatggggcggctggccgggcggggggctgacccccccacctccctcccggatggggcggctggccgggcggggggctgatccccccacctccctcacggatggggcggctggccgggcagaggggctcctcacttcccagtaggggcggccaggcagaggcgcccctcatctcccggacggggcggctggccgggtgggaggctgtcccccccacctccctcccggacggggcggctggccgggcggggggctgatccccccacctccctcacggacggggcggctggccgggcagaggggctcctcacttcccagtaggggcggccgggcagaggcgcccctcacctcccgagtggctggccgggctgggggctgatccccccacctccctcccggacggggcggctggccaggcggggggctgacccccccatctccctcccggacggggtggctgccgggcggagaccctcctcacttcccagacagggtggctgccgggcggaggggctcctcacttctcagacggggcggctgctgggcggaggggctcctcacttctcagacggggcggccagggagagacgctcctcacatcctggacggggcgacagggcagaggcgctccccacatctcagacgatgggcggccgggcagagaggctccgcacctcctagatgggatggcggtcgggcagagacgctcctcactttccagactgggcagccaggcagaggggctcctcacatcccagacgatgggcggccaggcagagacgctcctcacttcccagacggggtggcggccgggcagaggctgcaatcttggcactttgggaggccaaggcaggctgctgggaggtggatgttgtagcgagccgagatcaggccactgcactccagcctgggcaccattgagcactgagtgaaggagactccgtctgcaatcccggcacctcgggaggccgaggctggcagatcactcgcggttaggagctcacctgtttgtcttttaatctctgcatgaacagaaagtataggcacaagcagagttaggactttatggcacacatagagattctagatga

SEQ ID NO: 3256 - DNA, 1543 bp, Artificial sequence
  DNA replication origin
gcacgccccccgccgtcggccggggagtcgctgcggacccacggccaccctgggtccgcgccccacggggcccgccgtcccgggcggcgagcttggttccggccgggcggcgccctctccgccgagccaggccgctctctgccctctgccctctgccctgggcttgcggccgtctccctgccttccgcggtcctgctctgcgactcgtcggacgcgcagccggcccgccctccctgctcttcggctctcacgctctccggctccaacctcagcgcctcggctcgattccgagtcagggcctacgaggctgaccgctgagctctgggctcagacctgggctcgccggttctgggcccgggttccaggacccgtgctcacacagttcagttccaagccgggactggagaagggcgctcgcggctcgctgctgcgaggcgactggacagcctagaggagaaagagggagggagaccgagagcgcgcagggggaggagggagggagggtggggacttgcagaagaagggagggacagagagtttcctcctcctccctgcagccgggtccatccaggcatcaacagctggaaacctctgttggaaaggggaaagctaaggtttacgggcggcggggaagggtgggggtggagtgagggggtgtagagaagagaagaaagaaggattctgcccgctcccactgcccaggtatgagggtcgctacagagaatcttcactccttaaagcaagacctaagaagttattggtccagctccaagcctcccaacccctccaaacagatagcctggactcgggttttttaaaaaccccatttctccggacttcccttaagaacctgatctctgccgggcgcggtggctcacgcctgtaatcccagcactttgggaggccgacgggggcggatcacgaggtcaggagatggagacaatcctggctaacacggtgaaaccccgtctctactaaaaatacaaaaaattagccgggcgtggtggcgcgcctgtaaccccctactcgggaggctgaggcaggagaatcgcttgaacccgggagtgggaggttgcagtgggccgagatcgcgccattgcactcactcctgcctgggcgacagggcgagactccgtctcaaaaaaaacaaaacctgatctcacctgtagctagacggattcctgatatctccaaccactccctaatcctgtcatttgcagcctctcaaataaatcttattttctcctgtcccattatatgggagggtgggggagaatggagagttggtttcctttcattcaacgtatttatcaaatgtctacatatgaccgggcgcagtggctcacgcctgtaatcccagcactttgggaggccaaggcagcagatcacctgaggttgggagttcgagaccagcctggccaacatggtgaaaacccctctctactaaaaatacaaaaattagccgggtgtggtggtgcatgcctgtaattccaactactcaagaggctgaggcagaagaattgcttgaacccaggaggcagag

SEQ ID NO: 3257 - DNA, 1685 bp, Artificial sequence
  DNA replication origin
agggagatgcggagcgggtagtcgttcagttcccagcggctcgccattgttttcccaccccgcgcgttccgtacgtaaacacacacgcacacacaaggttgtgtgtgtgcgccggctctggctgcttcccgtccccaggcgcgcagggatcgcccgcgggattcgctcagctgcccgcatgggtcttcaggctggaggcgctccaggacttaactggagctggagaggacaagagacgtgggggttgccggacagtaccgggcggggcggtgagccgggcctgggcgggaagtgaattttgaacttcagccctggacctttccgggaggaccccgagcgctggagcggcggctcccgccctggagggcccgcggcagctgcaaagactccgctggcgctcttggcagccgcctcggtgacagaggcttggaggaagccgaagagttttcctgggaagtttgctttgactctctgggaatttccgggcaggacgcctcggcgctggcgctggcgctggcgctggtgaaggggtctggccaaagacggccagagacgatgctgctggctcttgaccactaggctgtacttggctctcagcagtccaagtaggtgggtctctacctcccggagttcatgccttccaaaccagtatcccccaaaggatcacgacatgccggtttcaaagatgggtgcataactctgctcgttttggagtccagggaggcaagctcggttccagccgggcggcgctctccgtcgagccaggccgctctctgccctctgctctctgccctgggcgtggggctgtctccctgcctaccgcggttgtgctttcggactcgtccgacgcggcgccagcccgctacctcccgctctccctctcccccgctccctggctccccggctccctgactccgtaatctgcgcctcggcgcagttgcgagtcagggcctgaggctgacccctgtttccactgtgcttcattagaaagcgcttcacaagatgctgggattcagcacatttggattccagttccccatcgatgagcagcgtgggtttggacttccccgcatgcgaaatgggcagagttatgcacccaactttgaaactggcatgtcgtgatcgtttgggggatactggtttggaaggcatgatctccaggagggtagggacccacctacctctggatcattaagggccaaatatagcctagtggttaagagtcctggagctggagttagatcccggatgccactggcggtgtgactctgggcaatttaacttaacctctgtgcctcagtttcctcagccataaaatagggttaatatgaacgcttcatggggttgtcttgaggattaaaagacttaataaagtgaaactgagaacagtgcctggcacataataagtgctaggtaaatatgagctattattgccattattacttaactgaccttgtacagagcccagaagagcacttggtgattgtgctcaactaatcaattataacattgcccacttctggagaggaggagatcttgtactctctcccacccttgcctgattccagcccctcagatcaaacgtatccttcttactccttgtctagtgccatcttctcgagtcttttttctttttcttgtttccttcctttctccctcccttcacaacttttgtgaaagcattt

SEQ ID NO: 3258 - DNA, 1115 bp, Artificial sequence
  DNA replication origin
ccagcgctaagaggggatgtggcaggaagagtggttgtgcaaatgtgtcagactgggctgatgccctttcacgatgacaactgagtgggccccacggaccccctggcgggctctgggggtgggggttggggggttgcctgggactcatggggcctcctgctttggccctggcgcctaggaaaggctagacagggaggggagccttggcgtgagctgccctcacactgacttaaaagcattaactcttgcctggccacacaaggcaggacctggcactcctcagagtggagggtgaggagggttttctgtcttagccctcagcctgtgtggggtatgaggtcccccaccctcatgcgaacaacctctccccaccctccagccctactgaaggagtctgaagtcactcaaccatccttgtgaggttttggttctggcctgttccatgagggtggggtagggtggggaaagaagggggaataaaatgtagtggggaggggtggaaggaagcctgtgtgcaggtacagccgtggctcagaggcaggtggggtgagggcagtggggcttgaatagggcgctgtcgaaagcagagggagtggccccttcagcccctgctgtttctcaggcttgcccggctcctcttttcttggctggtggtggggtgtgtgtgggggggagggaagctgagtgtgatgtgtgtgtgagtgtaatgtgagtgtgatgtgtgtgtgggtgtatgtgtggggggccaggtgtgtgtgtgtttgtgaagggctgagcgtgatgtgtgtatctatgagtgtgatgtgtgtgtgtggagggccaggtgtggtgtgtgtgtgtgtgtgcacatatgtgtgcaggcaggcaggggcctgtgctctggagaccctggccaggctcctccaacccatgggaaccaggcagggcctccgagaactccagggagacagtgaggacattagacggatgtcaagaaggaagggagagtagaatggaagaaaaaggaagagtcagaacagccagcttctggtgccccaagcacgttggggtttcaatcccagtatacctggggaggagcagtagtgggctatcacccccttccctccttttgctgt

SEQ ID NO: 3259 - DNA, 1106 bp, Artificial sequence
  DNA replication origin
tgtatgtgtggggggccaggtgtgtgtgtgtttgtgaagggctgagcgtgatgtgtgtatctatgagtgtgatgtgtgtgtgtggagggccaggtgtggtgtgtgtgtgtgtgtgcacatatgtgtgcaggcaggcaggggcctgtgctctggagaccctggccaggctcctccaacccatgggaaccaggcagggcctccgagaactccagggagacagtgaggacattagacggatgtcaagaaggaagggagagtagaatggaagaaaaaggaagagtcagaacagccagcttctggtgccccaagcacgttggggtttcaatcccagtatacctggggaggagcagtagtgggctatcacccccttccctccttttgctgtcaactttgtttccggggcagtcatggaaccccagccatccccctcgcccgggagcacttaatatgggagtgtctggccagggcaaggggctgaggaagagaaaggagaggtagagaaagacccaatggtgggctccctaactggggcttgtggggcagggagaggaggcctctcctccctatccagtaaactcctagggaccagaacaggaaacagggtcagagaatagagaaaggggacctgtgtcaaatcttgacttgggtagaggtgggtagcaagagggctttctgtttgatatctgagtagacaagggatggacttgactgctctcggccagagaatccttgaaatgggtgtacaagtctaggtgaatgggcctttcttagagttgtgcagtgcacagtctgtacaactgtacacgatagcctgttggaactggctgaaagcatcagggacctttggttttcataatgtaaattccccttctcttctactgggttcacctgaccttagatccgtacttctcaccatggtggcaccctccatttggggctcattttggctatctgtgttacccttttctgggcactgattaacttgaagtttggagaaccagaattgtgtgtgtagtggggaagggggttgtgtgtgagtgttggtgtgtttggcagtttagagagggtctgttggactgttgacaccctttattgagcctgagtcc

SEQ ID NO: 3260 - DNA, 1721 bp, Artificial sequence
  DNA replication origin
cagaactcacccttaaaatctacagaaagcgatagcccctctctgcagagcaatgcatataaacatgcatttttcatgcaatttcagggaactcacagatcttacaactctccaccatggaccccacatgccaaggatttccaagcccaaggcctgaagaatagtagagacagaggccctggcaccctcctcacctgaaaagccggggctcacggatgtgctcaggctccagggccacaccctgcatgtactcatagcacagcccattctggaaggtgcagtagagtttgggggcacagctgtgtgctcgcagcagctggaagtttctgacctcattctcccggtccaccagcagctccgtccgctccccatacacccggaccagcacgcagtcctgcatgtcctcctccacatagcaggccaccagcttgttggtgatgccatccgtgaagcgctagcatggggagaggacagtgcgtgggtgggtgggtggggcaggatctctctggtctctctcctgggctctgtagctccagcaggaggtgctcatttgaatgccgagcacaaccaccccaagcccccagtgctttagcccagtcactcatgctcctctctgtccccaaccttgggagtctccagtctctatagagttcaagaaaaaaatggtagcttgggtttagctcccacacactcctgggtgtgcctctagtgaatgggatttggcagtggagaaatttccacactacttgggaggtagacgcctcctgctgctccttaccctccaccccagtacggaaagaaacatcatggaccagaatgtggcaggggagggctgggagttgcccagaacactatgtcctgaccagctgccaatcaccttgtgccgggcagtgtgctctgctctaccccttgccccatccagtggtggaggtacaaggagggtactgaggttggcacccatcccaggactttagtggccagaggtccttaccagaaaagacaggagacaactgggctgcgagcaaggttctctggacagcagggtgatgaggagaaaggaaccatggaatttacggggcacaatgtgacagagctgggagggccctagaggtcatctgaaccaattctacgtagggaaactgaggcaggagaggggagggactggcagatagcacgttagatcagtgctggaattaacctcaggcctgcttgatgccttgacagtcttataccaaactgggccttttattttgaaaacgctactccatccccagggcgggttctgtcagcctccacacttggttaagaacctccccacaactttgcccccaccccaccccagaatgcctgtctgcatggagccgctaccattccagcacaagctacaagcgccccactcggcaccttcctccacaggcagcccacagcggggctggaggtagtcagctggggagttagcctaaggctcagtgagtggctctgcccacaggtgtgtcctgggacctgtgtccagctggggctggggaagatggcctgtgtgggggtgctgagcccgagcctgcagcgatggtgaggagctgagtgctagctggaattccacagggtggctcctgggacccacaggggcagctcagagcctggaggatttgctcccaccatggggtggagaaggggcagcaatgtatgcatgtatggctgggtcgggggggcggggggtctct

SEQ ID NO: 3261 - DNA, 800 bp, Artificial sequence
  DNA replication origin
ctccacacttggttaagaacctccccacaactttgcccccaccccaccccagaatgcctgtctgcatggagccgctaccattccagcacaagctacaagcgccccactcggcaccttcctccacaggcagcccacagcggggctggaggtagtcagctggggagttagcctaaggctcagtgagtggctctgcccacaggtgtgtcctgggacctgtgtccagctggggctggggaagatggcctgtgtgggggtgctgagcccgagcctgcagcgatggtgaggagctgagtgctagctggaattccacagggtggctcctgggacccacaggggcagctcagagcctggaggatttgctcccaccatggggtggagaaggggcagcaatgtatgcatgtatggctgggtcgggggggcggggggtctcttaaaagttcccgcctcctcaggtttcagagctggctgggtacgcgcttctggtcagcgaggggcaccagcacgcagcgacagggggtgcggcccgcacacgcagcatgccgacagtgggcaggtggccaccaggcgtgcctaagagccccgggaggaggggggcgtgtgcagggccaagggaggtgtgagcctagttttggtagcgacgaaatcaatccgtacacaaaccacgttccaaacctttcttgcgcagcagccgcgcacccctgggactgacacccggaaggatgcgaggactgggtccccgcatccccctggcagccctggcaggaccccatcctcggccccgcgcccactccgctaccttg

SEQ ID NO: 3262 - DNA, 1309 bp, Artificial sequence
  DNA replication origin
cctcggagccgcggcagacgctagccccggcgggggggtccggcgagggagtgggagtggtagaggaggggccaggggaagtccatgactcaggcgcgagctgcccgcttcgatcgccggctcgcggcccgccgcccaccgccgaccccggagcgccgcggcccgccgcgattgtgacatcacgggcggtggcccgcgggaacgcccccggcccgcccccgccccggcccgcgggccgctggggagctcagccagccaccgccggcagctgaggccgccgctacctggagcgcggggtgggggcgacgcccccctgggggccggtgacgccgggggtggggcctccgctggctccgccccgcccgggtccccgccggggctggcttcccggcctccgaggccgcgagactccagctctctcccggtagcctggggtggaggcgggggagggctcgtcctgcgcccccacctcatcctggaatagagagatccgctgctcccacgacgtcagcttgggctcgcccctctgtgcccctgctccgtgcccccagtccccggaccccgggaaatggctctgcaggggcggcccctgctgcatctcaaaggtccttccctgcagagagcccccccccacacccaggcaacctcccatccccgacagaaacacactgcatgaagaggggacattgggtgatagcgttggggtgagagtgtgccagtccagcagactgcgctgtcccctggcaggccactgaacagccagggcgttggagtgtttgggcacatcctgggcaggacttggggccagactgagttaaagcctccctcccatcctgagcgtgtgaatggagccaggtagcaggccagcggtgtacccgagcccagtgctttgcttggcattcggggtgtgaagtggacagaccctcgcgcgtcctggggaggacagccaaatgcctggcgcagctaagggccaaagcaaggcatggtgatggctgggggtgggaaggaaggggaaggggtgacaaggtgtcccggggcaggttgctgtggggaggagacatggagagaggccaggccggctcagggggcaagtccctctactagccagattctcctttggtcattctctgccaccttctgagcagggctctgttggctgccagccctatttgttgtagtgaggcctcagggatctcactagtcactatctctcactgccccacccagaaaagcgccttcagagaaggggccctttcctattttcccagttacccctttggcctatcccggaacctctcaaccgcaaggc

SEQ ID NO: 3263 - DNA, 882 bp, Artificial sequence
  DNA replication origin
gtgtgtgtgtgtgtgtgtgatatgtgtgtatgggtgtatgtgtgtatatgtgtgtgatgtgtgtgcgcatgtgtggtgtatgtggtgtatgtgtgtgtatgatgtacgtgtatgggtgtatgtgtgtatatgtgtgtggcgtgtgtgtgcatctgtggtgtgtagtgtatgtgtacgggtgtatgggtatatatctgtgtggtgtgtgtgcatgtgtggtatgtgtggtgtatgtgtgtgtatgatgtgtatgtatggatgtgtgtatgtgtgtgtgtatgttgtgtgtatgggtgtatgtgtgtatatgtgtgtgtggtgtgtgtgcgtgtgtggtgtgtgtgcatgatgtgtgtgtataggtgtatgtgtgtatatgtgtgtggtgtgtatgcgtgtgtggtgtgtgtggcatatgtgtatgtgtgtgtatgggtgtatgtgtgtggtgtgtgtggtgtatgtgtgtgtgtatgatgtgtgtgtatgggtgtatgcgtgtatatgtgtatgggtgtgtgcgtatatatgtgtgtggtgtgtgtgtgcatgtgtggtgtgtgtggtgtatgtgtgtggtgtggggggtgtgtgtgtgtgtgctggggtcaggcagagttgtcccatggcgcacatggtaagtgccatccacagtgggaaggaggcactcggggggaaaggggagccggaagaaagagtaccaccctccaaccacacaagcccactgccctccttcctggcccaccaccctgcttccgcacagagaaccggaaatgtacatctacccacattcctgtctggctcagacccctccaggatgaagcccctgcagggccccttcccccagccttgtcactagctttctctccatgcaaagctcca

SEQ ID NO: 3264 - DNA, 927 bp, Artificial sequence
  DNA replication origin
agaggcagggtgttgcagaccaggaaactgcatgtacgaaggccctgagtcaagagggctcacatggaagccatggagaacagtgtggttggagcatggcaggcaatagggacagtggcaggagatgaggtgggcaggcaggcctgggccccaccaggcagggcctgtgagctgtggtgtggatgagaaggctctgctgcagtctaatctcagtgggcagccgtgaaggagtctaggcagtatgctaacatgatcaggttgtatgttttgcaagacctttgagcgccgtgtggagaaggactgggagggtgcaggaataaagcaggaggccaaatgggggctgctgcatacgtccaggaaagagatgatcgtggccgggaattaggtgttaagaatggagagaaatggacagctttcaacatgtatcttggaagaagaaaagaaaacttagctgtggatttcatgggggaggggtgggcttctgcgttaagtggtggggtgggcggtggtgacatgtttactcatttgaggacaaccaagggaggcacaagttgaaggagggaagataaatagaccagtttgggattgaagattagcccagttcaagatggctgagagaaaaccaggcagatatgccaagtaagcagctagatatgagtttcaaagcccaaagagaggcatggactagaaagagagacatcagtgtcatcagcatacaagggaggtttgaagacgtgagaggctgggtgtggtggctcatgcctgtaatctcagcactttgggaggatcgcttgaggccaggagttcaagaccagcctgagcacattgcaaaacccctgtctcaacaacaaaaaaatttaaaccaattttaaaaaattagctgggcatggtggccaagtgcctgtagtcccagctactcaggagact

SEQ ID NO: 3265 - DNA, 1035 bp, Artificial sequence
  DNA replication origin
aatgggttagaagtgtttagccttggaaggagggcagcacctcttcttttgacattggaggggaagaggcaaagatagtgtaaggacagtcattttctaggtaaaagggtgtgacattgagggagtgcatgtctaatagcctcaaatttctctgtggaggagcaggtccattgtcgggaggacagaggcaggggaggtcggggggctgggaaggatggtgagggtgtggggtggagctgccatctggggctgagcctcctgggattgggactgtggctctgtggcaacctcatctgtatggcagtgtgattttttttttttattctccagcagcaccataatctggctatgagtgcagggagagtagacaatttgattaatttggagtgccgtattgagttttagagaaggtgaggtaggaagacaatagatgaggtttctgagagccgggttgatatactccaccatggggccaggctttgtagggaagtaacgaaaaccgggaggagctgatgggtccagaaaaaaagacaagaattgaggagctggggacctcaatggagtagaaaagctggtgttgagttaatggagtgagaaagcccaaagggtggaatgttgggatcagaaagcaggaatcctggaagtgaagatgttagccgcagaggggcttggggtgctgagaagattaaaggtgtagccctgggagcatcgctggagtgcaggtggagggtgctggagccggggacatcaaggctgtgtaaagttagggcattgatgggtcatgctcctgagcaaggagattttccacagtgatgcaggacagaatgaagaggaggactaacatcaaaacccttagactgaaagaacgattgagaagcggacagtgatgagaaggattaaacagtgggagatcaggcagtggtgcttccagaaaggtggactattgccatagtgtggaagaatgacagggtccacgtggcaacacagagctaggagaacacccgtctctcctcctggctctgtgttatgttgggc

SEQ ID NO: 3266 - DNA, 1415 bp, Artificial sequence
  DNA replication origin
ggctcgcagagttagagctttccagcgcggggatcacacctcagaagccggtgagtctgttttcatgcatcacatagatgaggtgggaggaggaaggctgggctctggtcagggctggcagctgcctgtctgccgcgtgagcctgggctgcttgcactgcggagcactggcttccccatctctcatccttggcagccttacttggggatcatggatgctgagaatgctaattatagccctccctgtgcccccacccccacctccagagtcccctgtcagggctgatgctgtttaaattgattacatttgaattgcatctcctggatgaaggcagcgttggggctggcagcttcctagggtccagcaggggtcccccacgcaagctagcacagagaggccagcccaccctccctttaatcttgccagcaggaaggagagagggagggggtccagggtcaggctcaggtcagccccagggactcaccttcctcagcgtggggaggggtcagggtgtgtatcattcttatgagtcagaggttgggtcgaagggtgacagaggctcttggattccaattcctaggacgcatctgagctctgggggtctcagatttagtggggagctcttgaaggagctggagcctggtatgtggtagaggagggcagggaatgaggggatggcatttataatgatgggaccaggctgcagccagctaagagcctcgaggtattgtgtgaggagtctgaggaaaggaggacagttgggggactggccagagaagggtaaggagggctacagtggaaggggagggaagcggggcgagacaggaaagtggcgggggtgggggagaagggagaagaagggagaagaggctcctgggaaatgctctttgagacaacaggccagccagggcagggaagggggctgtggagcctgggagagcagagatggagaaccgggatagagggagagccatccccggggcacaggggtggggagggagagctgcaggagggtggaaggtggtggggaggaggctggagctcagagctggtgtcagaggaggttgcagccttcagggattggaggctcttcccaaagccctgtagaccctttaccctcaatctgatcacttgagtggtgcactctgctgagggtctcctgcatggtggggcagggtcctggctggcaggtatctgcctgagcccactgtctgggcaggtgcgggggcactgcgggcacttgccctacaaatctcccaaatcctgttttccaggccaccctggaagagtatgaaactgaggagggctcctgtggctaggacggttcagtcgccagctttcacccccgagcagctgcattttagcttcagcaggacatgagcagaccctgctggtggaggggaggtgggagcggc

SEQ ID NO: 3267 - DNA, 2312 bp, Artificial sequence
  DNA replication origin
attagcatagtgaatgttttgttgtgagactacatgctgctatgagaaatacagaagggggacgtaatgtagccaagagcttctgaacaacctccgggaagagatgagctgagattaaaggaaggttaggagttaggagaggaagggaaaagtgccgtagttaggaggaaacatgccaaggtcttgaggtgagaaaacagtggcatctgggaagaactagaaagtttagtgtcgctgaaagcatggacagagagagatgagtgaattgaattgcctgggcatcctgggaacgggaagacaccctgatggcagggaacccgcgcctgcgctttcggggtcaggtccaggtctgccccgccagggctgaagccagctcctggtggggctgcagtgaggcggaagaggtgggatgctgctgcctggcggtgctgcggcggcagacctccacgaggaggtcctgggctaccgcggggtacacaggcgggcggaaaagggggagcagagtcagggggcagttgggaagctcggagacaaaaggagggagggagccaaaaagcctacagcaccaggtattcccaggcggtctcccatccaagtactaaccaggcccgaccctgcttagtttccgagatctggcgtgttcagggtggtatggccgtagacactaatggtggtgcctggctgcctcttcaagagcccggcccagccacgcccgcccgactccaggcgtcactgccaccccagggtcgtggggctcggactggggacccctgagctgctcgcctgcggtcggactgctctccccttctacgcccaagcaccgccggtctgccctgctgcgccttccaccggcctcccagagcctccagccatacagcagagatggtggttgggataagagtttgaagagagtggagcaggtctggaacaggtattctggagaataggggagagaacagagtaggaaaatttccacaaggcaattgcctgagactgtccaatttgcagaccagggcttttcagcctcaggactgttgacattttggattgaagaattctgtgatgggggctgtcctgtgtgttctaagatgtttagcagcattcttggcctctgctccctagatgccagtagcactcccctaattatgacaataaaaaatgtccgcagacattggtaaatattacttaagtgggagaatggcctctggttgaggaccactgaggccagccaatgcgtactacaggagaaacatcacacaacctgcagattggtgtcacacatttatggccctgacctggcctctcagttctatctggttcttctgttttcctcataggcgaagtaatggttctaacctagaagacagaatgaggtgaagacaggctaacttctctaagctctcaatgactcacgagataatagatgtcaagatagaacctactaagtgttcagtaaatgttatctattgtcatttccaggagggggctgattgaaactgaagaatagtacagtaggaggagaggaccaggagctgaaaagacaggtcgctatgttgagagagagagagaggaagaaagatctaataggacttcaaaggctgtggtagatgtattactgtcaaaacctgcgcagcttttctctaccaggccttggaaaagattgcacttcctgcaccactggcagcgggctggccaatgggatgcaagtggaaatgaactgtgctattctgagcagaggcttagggaccattgtgtgggtaagtcagtgctctttttcctccacgtgaggctagtgtgtcccaaaatgggggctgctccctttgacctgtctccaagactgaagagaacagggaccatagctgtacctatcctgcgagggacaaaggaacaagcttttgttaattcaagcgattgagatttgggggtttgttaccacagtgtaatttggcataagctgactggcatacggtggagcatcccagatgagggcaagctcccagggcctaacagagtgagtggctggagtatgtgaaggtgaaattctttgacatgaagtggttaaggtcccacgaggccgtggtgttagatgggtcattcatgtgatgttgttatcatccaggaagctggtaggaggtaggaacccaaagtctgtaatgaacaagggaaagtgtgagcaaagtcagcagatgacagcagtaaaggaggagtaaaggggagtatagatctaaatatatatatgtatatgtgtgtgtgtgtgtgtgtgtatgtgtgtgtatatatatgcagagatttggtatatatatgtgtatata

SEQ ID NO: 3268 - DNA, 1537 bp, Artificial sequence
  DNA replication origin
acaccaacatttaaagatcaagacgggaaggatgagtcagcaaagacgactcaggagtaccagagaagccaagaatgtggggtcagagaagccaagggaaaagaaagtgtcaaaaaaaaaaatgagtggaaaatgcttctgagaactaaaaaatgttccctggctttagcaatctggagagctgcttcagcagagtgatgggggaggaagccagactgaagcagggctggggaaggagtgggtagcacagagatggagaatgctgttgcagccaaccctttcagacatttggcttgtacggagaagagagacagtgtggtggcagcaagtggagtcgggcttcaggaaggtttttgttgttgttttgcttgttgaagacatgagaaacttgagcatggtgagaaggctgtttctgagaaggcagaggagaggacctagaacatgggtggtggaagaactggcctgtgatggccatgctgtggcctctgcagacacaggagggaaggaggagaggactggcccagaggcaggtagtttgggggtttggtggggataagttggggagttctgcctggtgacttctctttctctgtgaagtgggaggtgaggtcctcagctgagcatgagggtggaggcagaggtttggggaggaaggtgtgaaatagtcattgtggagactgaggggagacagaaccagaggaacgtggtaggaacaccaggcacttttgaagagcaagctgggttggtgatggtgagtttgtagaagtagcaatctgtttgtgtgtttgtgtgtgtgtgtgtgtgtgtgtgtgtgtgtgtgtcccagcgggtccagattcctgaatgcaggtagaaagaagcagataaagcaattaatccagaacagggacttggtcaaactaggacaataaaaagacagaggctcaagagagtttaggatattggcaggaggattcttaaaaatgatggaccatggcctctatctggactcagagaagggaaggcagaggaaggtaattgatggtaaaaaaaaaaaaaaaaaaaaaaaaaaaagcaaaggtgccaatggagcaaagttcccaaagagattaaagagtgggggtgtcatagaaccctcccactgctaaatttgactggctaaaaaataagtggtggtgtgggagtccttggacaagcaagctgggaaactaaaaggtgtagaaggtgatgaccagaaagttgggtactctgctaggtaattttcaggggatggcaagatacagagtgtgaacttgcaagtgagtggctgagataggtgagcccgtgaagggactgttgggtctggggtagaagaagctgtccacatcgtcactaatctcacccaggatgatggacagacatacagttggaaagggagaaggtctatgggcacacgccaaaggcttccctgaatgaagagggtggctagtgagaataaaggtgagtggggaggatgtcgccttattttgcgagatttggggaataatcgtgtcttagagacattacattctcttgcaca

SEQ ID NO: 3269 - DNA, 1973 bp, Artificial sequence
  DNA replication origin
taataggtattcaataataaatttgattccttcccccttctctgtctgaagcaccagccttctacttgccctgggctgccagataaatggtgagatgtgacctggtccatcctttcaggtcagaaaagtatcctaaggacaggatgacttaagcggtacctggcatgttagaggtcactcagtgtgataattcactagcattgttcatgttcctcacctctgccccctcaagctgtgggtctttgaacgagcctggtgggaacagagctaatcagctggcaagtccagatacaagtgtggtcagcttgagacatggaggtttgtttaccgctgtatcttcagcttctaaaatcatgagaggcacacagtaggcactcaagaaacagttgttgaatgaatacatttttttaaaagccatggagtttccttttcctttcaaataaacgacataagggtgtggggagtagaagggggaggtgagtaaatgacagggttcaagggacaccagggccaggcaaatgcagctgccaggcccaccagcccaggctcctctgcaaaagggatgcagcaaagtcaacagtgcatgtgctcccactggcaggatgagcaggagtgcgtgcacgcctggcttacggtttaagctgcagtttacaggagaagcagggcaaagtggagacagagcctgggaagaaagggagatatctggggaagaatgaggagggtgagagaagaggaagagcagtgtgagggggaaaagggaagtgaagagtgttagaggaggaaagtgaagagtgaaggaaggagaggaggatgagggggaggaggaagaggggaggcacagggaaaataggatgggaagtgaggaagaactgtgttgaattagagagggaacctgctgtactagcctggatggaattagcagatctctgagatcttactgccactcggtgtttccccgggaggagactgcattagggagagggtgtggatttgggggtgttcctaggtgccagaccctgggcagacctcaatctcccaggcactgaggcctttagttccatgctttgcaaataatgaggacccatcccaggaccagagagagccctccgcaagaaggagaagcctgagtcagcacaggggaaggaagaaggcctaggaggctcagatccctagctctgcccttctgtttccatcgtttcgccacaacagcacctggccaggaaagtgggtcaggccacccacatgtggctttttctggtagccacagggcccaaaggcaagggggctccagtgcccagtgcagagcccacctctaccctccatgcccagtgctcttttttgaagggatctttaagaagcagtgggcaatgggaggagctcctggccttcttattcagggacaaaacgctgggccagagcccatcctagactggcgggaaaggggggcacggagcctgccatcggcctgggtgcatggggagacctacatcttcccctatgacagtgaccaaactggcagggagtcacctctactgccctgacctagggaggctgttctcctcaccaccctaggtcctggagttctcaagcagagggcctgtcagtccatctctggcaactgagcgctgtgcccagcccaccccctccaaccctgccagtcgcccagttagaagctgcgttggctccaacagatgggagctgcggcagcctgaggaacagagcacaaagcccagctgacattttccttcctgttcgtttgggtgggggaggaagggtagggagcacagtgctacccccggggcccctccccaggttccgggtctcctgcacctctttagcttctccgctcggccccagatggagctcagttccctcaccccgcggctcctcgccggctgggcagccagagcctgcgccaccctttgccagcaggacagacggcccacctgtggctggccagcccatcctgtctc

SEQ ID NO: 3270 - DNA, 884 bp, Artificial sequence
  DNA replication origin
ccagcctccggccgcgacgcgcccagggcgcggagagggggtggggacggattgggattctgccatcgccctcaccggctgggccctggagccgctcccaggataactccacgttggggagggcgcccgccgagcctccccggcctgtgcagacggcgcgcgcggcgggagggcgcggaccagcgtccccagcccggccccgggcggaaggcgagcggagcgcggccgcgcgggcagcagacggcagacggtgcccggcgcccacggggtgagtgtgcagcttcggggctgacctgggcagcgccgccgccgccggggaatcgtggacaccgaggtcgctggcgtggccgaggcgtacgcggcgggagcggccggagcagccgcctcagggctcctggctcctgccccggcaccgcagctccgcctgacccgggtgggggccagaggagggccggccgctgccttccgccgagacgcctgcgggggagccggagacttgggagagggaggcggccgaggggcagagggacggagggctggagaatgcccagaagcggccagggagagggcgcctgggccttcgcctggagaggccagaacctcccccaaactgttgctgggtagagtggggccctggagatgtggaggagccgagaggtggcagtgaggttagggagggcgtgacacgggcggactggcaggctggaagcgctccagagcctggggactttctcctccttggagctcgcgagtctgtgcggagggacaaggtggccttgggtctgtctgaagtatctggaaccaggagctaggctcctcccgggccggctggctggggtccgaccgcagcctgggatgggacctttggggtgggggatgggccg

SEQ ID NO: 3271 - DNA, 1712 bp, Artificial sequence
  DNA replication origin
cggtgccggggcaggagccaggagccctgaggcggctgctccggccgctcccgccgcgtacgcctcggccacgccagcgacctcggtgtccacgattccccggcggcggcggcgctgcccaggtcagccccgaagctgcacactcaccccgtgggcgccgggcaccgtctgccgtctgctgcccgcgcggccgcgctccgctcgccttccgcccggggccgggctggggacgctggtccgcgccctcccgccgcgcgcgccgtctgcacaggccggggaggctcggcgggcgccctccccaacgtggagttatcctgggagcggctccagggcccagccggtgagggcgatggcagaatcccaatccgtccccaccccctctccgcgccctgggcgcgtcgcggccggaggctggcgggcgagagccaggcgctccttgagagcgccgcgcgttcgcaggtgcccggagcaggccctcgcggcgcccggcaccccctccacgcgcgcccctcttcccggcttcgcgctcgccctcctcactcgcttctccgccgctctcccaacctccccagcccactccggtcgcctcctcccagtctgcatgccacgccaaccccctccagtcccgctgccattttaactcctgagtggccagaggccccctctacctaacgcacacacacccgggaggaaggagttgggtggggccagacgctaacgcttgagctgtccttgtgcctagagacacaaggcttggctgagagaaggggcacagcccttgggtccgggaagagaagggttggcttctctcatactgcctcggaccctcttgcaaaggccaggagacgaatggggaattcagcagctttgtgaggacaggtgcagctcacagtcacagcatgcacctaagatcacatttttgctttgcatggtgctaccctcccgaagttaacagtggactaaggaatgtagtggggtgggtgagaatttgtcactgggcccaggcacctctcaccctaaagaatggagtggaagacccctttagttgtcatgcttttccagcattgcatcctgagccgtgcagctctagcattctggaagattccgtcctggctctcaatgaaggaggtcaatttcagtcaggaactggcaggcccagttaggggtttggcttcagggttccccactctgccagctggacatcatgaagactgggggaggaaagtaagaaggtgccaaaggtgggtgctaggctgctgcctggtggcttagaaaagctgggtgactgccactagaggagggcaaaggcccaatgcccaacacccatgccttggtggggacttcagcctggaccactcagaacagacatcacaaactcggctccatggcaggccacaccctactgatgggtctggaccagagcctgcagaaccaacaacaggggaatggatgaggtggaggccaaggtgtggagtcctgtgaggagtggcttccctgggctgcctgccgtcatccagtgcttgagcttctggccctgtcttttccaagggtacagccagtggtgactgccatgcctggtggcttttgtgaagttggcttgaaggtctgagttctgtatgcacagaggggattctcaccttcatatattgaatgagcacatattaagttcccactaaaccacccccatgttcccactctccacccctgctacg

SEQ ID NO: 3272 - DNA, 757 bp, Artificial sequence
  DNA replication origin
ggtcaggggatggagacagacgagggcgggaacaagggggtgtcgctaggtgggtttccatgactctctacccccatctctccggtgttcgcgctcgcctacctccaagggctcgggctccggccctgggcgctgtccgagctgtccgctgccggcgccgccacttcccccgcgtcccctgcagcgcctctcgccgccagccgccgcattagggcagagaccagcccgtgcgcgtccccgggcggccggcgcgcccccgacaccctgcgtgcgcgcccccgcgcccctcccttcgcgctcctagcggccgctgagcggggaccaggacagaggcggagggaaggatgctccggacgcagccccgcctggcgcgctggggagcggtgcgcagagccagggccggaaaaaaaaatcctcctttctcttttcacctgaggcctctttgcgggcttgcctggagagtgataactagtctccccgtttccgttcgctgagcacctactacgtgcaaagcacacaggaggaagtaccctgaagccccaacaggatcgcttgtttgcacctccaccatagactgtgactttagggagcaggaagttgccggacagcttgtgttctcagggcctagcacagagacttgtttgtggtaaactctccagcaacatttgttgattggcaagtcgttggatcctgattcagggatgtgagagaggttgtgactgctatgaacagtgcggggctttcttttagaaatggg

SEQ ID NO: 3273 - DNA, 1417 bp, Artificial sequence
  DNA replication origin
cttgccttgctggagatttgactgaggcccagcagggcccagcacatttccaagggtagatgagacgcactaggccctcatgccagggacacaggcaggcagaaaaggggtattgttgtcctctcccccacactgagggatgaggcatctctgctcaacacacacacacacacacacacacacacacacacacacaccccatgccaaaatgccaaggaaggagtcaggagcagaacctggctcaggacaggatgggggctgccatggggaccagattctaggtgattcagcactctgcccactcttggcccagcccatgggccacactcatgacagctccagatgccaaagtgctgacttggaggctgaagcagaatcttttctaaaatccaaaattatccagccctccagcagggctcctcatccaggcctttacatcagggctcaggccaagccccaggaggagtctgctcagtcattcccctggaccctgccccttccccatcctagtttcccaatgcctagcaccccctcccccaatccatctaggaaacaaacctgaacagctagaggagtagagtggctgcatggctggagaggaacataagagagaggcctactaacccccagcattcttccccaagccacaaataggatcgaacatgcagaaaggggttatattccacaaccaagatccccacccagggaaggggggtccagaggccactgagggagggctgggtacaggctgtatggctccacacagcaccaggaagggcagctagggaaggtgacgggtgtcaggccagctaacagccaaaggggggagaaggcggggttcttgagagggactgtgatgcaggaggacaccaagaggcagctgggaaggggctgggacagggcgtgcaagggggaaccaggggaggacagaaactgagggagcaaatggagagacaggacaccaactggtaggggcatgagatggggaagagaataggggaggcaagaaggggctgatgtgtgcggtaggaaatacaggaggcatggggtcatccaaagtggggtgtcgaggtaaacagaagtacaagggcaggcagggctcacggatgaggcggggacagagaggaaagggaaagggttgaggatgcgggaagggggaggggacgcggccaacgagatagaaagggtgttggggtgggcagggggctgggagctggacggggacggggtgggcatacgaacagaatcggatggattcggggcaggtgacagtgtggagaggggaagggatgggaatgtggacggagggggagggggcaggtcaggggatggagacagacgagggcgggaacaagggggtgtcgctaggtgggtttccatgactctctacccccatctctccggtgttcgcgctcgc

SEQ ID NO: 3274 - DNA, 901 bp, Artificial sequence
  DNA replication origin
aggccagtcacatcccaaagggcgagaggctggggctaccgggctgaaattcctttccttcccttccccctcccaaccttagcttctcctcaaatccctcccccccatcctcactggtgggagggaagaatttgcacaaagtttggctttccagtaaggaaaggggctggggccagaatggtatggggaagggaaggggcagagctggggagttctggaaagagagggcaatccttctgcccagcaccgtggggcttacataatgggctggaggtggggggcagccccagccagtgagtgtccagagctgaatcctgtcaccttctccaagagggtctctcaggtctgggaagcagcggggcatggagaaggcagtgcctatggaaggggagaatcctgctgctacttggggatggagacgggcaccctctagccccagacccctgggggttgagcctgtgtcctgggggggggggtccagtgaggccaggagggagtggggttgtgcatgccatggccccagccctggagaaaggtgggtttcagcatcttttccctctgctcagaaggagctgggaggaggaacagcccaagaaacccagtgcacaggtgatgttctggtctcgtctgggcaacagtttcggcctcctctcccaaccgtctggccaaagacgcctcagctcacttagcctccgagtctctctacctcctggtcccactcagaggggccggatgagccactggagatcgagtgcagcaaaaggtgggccacctgtgggagaggctgctgtgatcgcacctggacagggagatggcctggaggtcacaacaggtgccctcactcctggccttgggagaagggagctctccccttaaagacagcagcatccaagcccctccc

SEQ ID NO: 3275 - DNA, 1728 bp, Artificial sequence
  DNA replication origin
tttctcttttaaaagcaggcaggatgggcatgggagctcacgcctgtaatcccagcaccttgggaggccaaggtggccagatcacttgaggccaggagttcaacatcagcctggccaaaacggtgaaaccccgtctctaccaaaaaaaaaaaatagccaggtgtggttcgcgcgtgcctgcagtcccagctacttgggaggctgaggtaggagaatcatttttatctaggaggcagaggttgcagtgagccaagatccagcctgggcaacaagagtgagactgtctcaaaaaataaaataagaaaaggagaggggaggggaggggtagggtagggaaggggaggggaggggaggggtacggtagggaaggggaggggaggggaggggaggggaggggaggggaggggaagggagggggcagaatttcccaatgttttttaatagcaagctgaccagctgggcaaggtggctcatgcctgtaatcccagtgctttgggaggccgaggcaggtggatcacctgaggtcaggagttccagaccagcctgaccaatatggtgaaaccttgactctactaaaaatacaaaaattatctgggcatggtggtgtgtgcctgtagccccagctacttgggaggttgagacaggagaaatgcttgaaccgggaggcagaggttgcagtgagctaagatcatgccactgcactccagcctgggcaacagagcgagactctgtctcaaaacaacaacaacaaaaacagcaggcagacctgtaccatgggaaacagattacccccagaaaggaagattcggaaggagaaaggccagaaagggaaagggtgcaaagagccactgtggttagggaggccatttcctcccagggagcaggagatagcaagatcagcaacaaggggcctgatgccctaaatgtcagggagtggaaactagaataagagcctgagtaggtagtgccacattatactcattcaatcagatagtctcccactcagtaaatgacagttccatacaagctgtggagcctgggtgacgactcatctgtaacagagtctctttactgccagggtgtattttgtattcccatggtcaggtcagaaaagaacaaaggaagagccgcagaagcagaattggactgggagcctagagactcgggcctaaatctgcctctagctcaaaactgttctgtcccacattccatctttctgttcctctcattcttctgcgaaccccatgttccaactttctaaatcaatgctcaccatacacacacacacacacacacacacacaaccactcaaacagccatatatatttagcattaattatatgcctgtgctttaaggtatattatctccaaatgtcacaactttgtaaggcaggtattatcactcccattttatttatttattgagatataattcaccccttttaagtgtacaattcagtggcttttagaatgttcacaaagttgtacaagtatcatcactatttaattccagagcactctcatctcctcccagaaaaattccatacccattagcagtcaccccttatttgctcattttcttctccccacatctcctagcaaccactaatctactttctatctctatgaatttgcctattttggatatttcatatcaatggaatcatacaatatgtggcattgtgtattactcccattatatatatgaagaacccaagattcaaatag

SEQ ID NO: 3276 - DNA, 1325 bp, Artificial sequence
  DNA replication origin
cccggcggcggcggaatgatccgcgagctgtgccggggcttcggccgctaccgccgctacctgggacggctgcgacagaacctgcgcgagacccagaagttcttccgcgacatcaagtgctcccacaaccacacttgtctctcctccctcacgggcggcggcggggccgagcgcggccctgcaggcgatgtcgccgaaaccgggctgcaggcgggtaaggagggcagcccggagggagagagggcaggagaggcaaatcggaggacggaccgcacccctgccctgcaaaacaagcccgagtcttctcgggcaggcggaaaggggcagtcgtgtcgtgtggccgggtccccgggcatgggccggccggatctgggataccttgggagggcatccttctgaggaggggaggaaggggcccgctgggggaccgggagccaggggcaaccgagggccggagttcccggagcgggaccccggggaccggggtgtgcgctgacggacctggggcgggccggcgttcggagagggtagcagttaatccgaggagtggggaaagttgctctgagttgggggcgggcgcgtgcgccgttgtgggtcagagccccagtttagagatggagcagaggcggcagcgagtcccgggagtccgaggaggccatgggactgtagtcgggtgtgtgggtttgatgatgtatgtgaaatgtgttcacaccaatcatgaggcagctctgtgaagaggggacattctctaaatagggttgggggtcgccagaggaaatcatatctgatgggtgccacggaattgccagagatgttgctcatgcttaaggtgaagaagagagggaagggatcattttggtcctgagccaatggagaactagctactcttgttctttcttgcatgattctttctaggatgtgccagaggcccccaaacacttaaaatcgtgcagtctttaatctttcctaacgtcttgcttccttttaaactgctgttggtggggaactggaggatttgttaactactgcgtctaattaggaaataactttagattggaagggagaagggactgacattccacgtagatagatatcttggggacaaaacagcaaagaagtctgtgggtttaatttagtgattctcaaactaaagtgtgtattaaactcaccccaggggcgtattaaaaatgccatgtctcgtgctctagctcataaattcctattgaataggtgtgtgaagtgggtcctaagaatctaatttaacatgaaaagaccctgaagaggccgggcgcggtggctcacgtctgtaatcccagcactttggg

SEQ ID NO: 3277 - DNA, 850 bp, Artificial sequence
  DNA replication origin
ctgtcttcgctccccaggtcgaaatgaactattccaagctataaccaaggctcccccttctcgcccctccctcacccgcctttaagaattttttttttaattcaagaaattgtggtctgccatctcccctccttgttaataatttagaccccaggcctcatatgaatataagagggggtgcggtcttccccaagacggcgcgctggaaggacagattccccttgccgacccacatacaccatgaagaggtgcagatcggacgagctgcagcaacaacagggcgaggaggatggagctgggctggaagatgccgcttcccacctgccgggcgcggacctccggcctggggagaccacgggtgctaactctgctggcgggccaacttcagacgccggcgctgccgcggcgcccaacccaggtccccgaagcaagcctcctgatttaaaggtgagcgcagaccatccccccggcaagcccagcccgcgacttagctctcgccaccccacgcagaagtgctttaacaggataaaagtgaggggggaagccaggcaaaggtcagagaggatgagcggatgctttgctggcaccccaggggggacgtcaggtaccatttatgcctctgtctttcagctccgtgtcaggtctctgtgtttgttccccattattcagcaagcgttttagtgactcacccatccgagattgtttgaataatgtgtgaagtgttattcgcagacaaagggctggagaaatccaagatgctaaccaaaaagtggacagcaggtgaccattagttttccttgctgagtaagtctctacccattgggatctttgtgtgtgtgtgtgtgtgtgt

SEQ ID NO: 3278 - DNA, 869 bp, Artificial sequence
  DNA replication origin
ctcttgtttttggcctagtcatacccgactcctttaaccaaggtagataactctgcagacggtggggtgtcagtatctgccagggagggcccctggctcagctccccaggtctcaaggcccctcagcggatggcccttgcctctgagtctccccctgccccagaaggcccatctcaccttgtccccgatgccttcggcctcctcagccaggaggtacacgttgctgccgtcggccagcagcagagcagtgtcggtggtggaggaagagcggggacggcactggtgctggtgcaggatggcggccaggctgctgtcctggggggccttgcgcagcaggtgagggctgccacgctggggctccagggagctactcttggtgcgccggctgctgctcccgctgctgccgcccccactgctgctgtgcaggctggcgccccgcttgatggagggccgggagcggatctgctgcagcacgcggttgaaggcggtgggccgggcgggcaggtcgtgcagggacatggcgtaggagacgcgatgcatctccggagagcgctccttctcatctggggagtcatggtcggacataccctgctgctgctgatgctgctgggaatcctgagacgtctggtgctccctttcccgagaccgacggcggctgtggaacaggtgcttcagaccgtggccaaacatggagccctctgacagctgctggattttcttaagggggagagatgaagaaccctggtgagtggaaagctcttgattgcctagtcagtaggagggtgaaggtgaagggtctgtccttggtagactggcatagctaatgcagccatctgaacctggaagatctctgtggatggcccgtcgtg

SEQ ID NO: 3279 - DNA, 1208 bp, Artificial sequence
  DNA replication origin
taggcagagatcgaagatagcagtgaggaaggggaattctcactggggtgaggtcagtgagtaggtgaaagggtgtgagatccagaagtcagcatcgtccttggtcacaaagagtcacctctgggaggcagaaatgaattcttactttgtttttattttctatgggggaagaaaccaaaggtgcaagtgtttattgagagcaggaggggaggtgggaagggctggcttgaggagggcagtaaagctttggcttggggcagagcaaggctctgagcaggaactcacgggtgacctgtctggtgttgtagaggctggtaatttgtgctggcagcaccctagtggttgcgatttgttttctctctagtggtcctagccagagggtaggaacagagctgaacgattatcaggctaatccagggttgggggttgctgggagggcatgtaagggtgacaaaggagttgggggtttgtttgggtcagagaatgctcaaaaggttggaccttgaaacctcggctagcagagaaggaggtggggataggagaaggctgatgaatgtggagaaaaggagatgggggtactgagggaatgagggagcaggtacattaagaataaagaggagtgagagagacaggagagggcattggagtttacaatttggggggtgggatagggaagacaaaggtcagagtatactcatagagcatgacagacaaggaatgaatggaaagataatttgcagtggcaagagctgagaggctaggttgtgggatgggctgtccacatgacatggagatgcccccttggacagtggtcaggaaggagggcagcaggtctctttgatgactggagggtgggggagaagagtgcaatggcagggacctcgaaggccaggctgaagcaacactgagtacagtagaatgctggtcccgtctccagagggcacaaaatgagggaggaagaggaagaaaaaatcactgcgattaatgagggctccggggcaagtggagctgcagtaagagcctgcaggggcccaagtgctagactatgggcaggaggcagcttgtttgttgtggaaggaggactctggaaggtccagtgggagggcggatgaaagagaagacagttcaagtggaagtgagaggagacatgatggaagaccaaacagttctacatttgggggatgtgaggccccgtggattttccagcg

SEQ ID NO: 3280 - DNA, 1366 bp, Artificial sequence
  DNA replication origin
gtgaagttgaccaggggctgcggagcccatccgctgcccgccggagggcgcgtggccccagctgcccttgattcaccgcgttccccccgcagggccaggcgtggacgccgccggaccgctgagactcggggcacggtgaagcactggccggggtctggctgggtccggcgctcgggagccagatggaggtggcgataggggccgtgggagccggcgccaagtagccggtggacccccgcgctcgcacctctcccggcgcccgggcgctccccaaggctgccatggaggtgcctaacgtcaaggacttccagtggaagcgcctggcgccactgcccagccgccgggtctactgctccctgctggagaccgggggccaggtctatgccatcgggggatgtgacgacaacggcgtccccatggactgcttcgaggtctactccccggaggccgaccagtggaccgccttgccccggctgcccacagcccgggcgggggtggccgtcaccgccctggggaagcggatcatggtgattgggggcgtgggcaccaatcagctgcccctgaaggtcgtggagatgtacaacatcgatgagggcaagtggaagaagaggagcatgctgcgtgaggccgccatgggcatttctgtcacggccaaaggcaagtggggccagggctgagggcggccagagagaaggaagtggggggccaggagggaaacagatggaaaccaacaggcatttgctgtgggctgtggagtttagtgccatatttctgcagaccccatgcgttcagcaaaatgcctgcacctcccgccgccacaccccagcccctgaaacctgccttgccttgcaggtgccaccacccccagacacctatttggggtcctgacaatgctcactccatccttgtagcgtcaccaggccccactgagagggctttgggacctgattccaggggcctcttccaccttcaacctgcccctctgcctcccaatctcagagacgctcagtggagaccagaatgttcctgagggttcatgtctggccgcgtttcactaagtcctcagggcatgcatgtcctcactacatggttttgtgattctcattttcctttctcaaagcccccatttcattcttttcacgcctagtacagcccagaacctagagctccgaaagctcttttgctaaaacacaaagggttttgtgggagatggttcaatgggaattaggagacaccaagttcagacacacctgagcagcacaggcttgcagtgggatgcaaccttccctccgtctcctcttcctccctccctcttttgctaaaccatactagctgcatgtcaagtctactatagattgggaaccag

SEQ ID NO: 3281 - DNA, 1080 bp, Artificial sequence
  DNA replication origin
cctgacctcaagtgatctgcctgcttgggactcccaaagtgcctggattacaagtatgagccaccgcacccggccagaattatattgtatctttaccgatcaatttcaaaaccctggttgtgatatatactgtgctatagttttgtaagatgttgccattgggagaaactgggtaaagggtattttttcttacagctgcatgtgaatctaaaattttctcaaaattaaaactctagtttaaaaatatatagacatagatctatctatctgtataagaaactgaggttcagagtagttaagtaattttcagaggcaagattcaaacccaggtcttccagcctcccaagcctgcgtgtttcaagacttggctacatttgaaagaaccaggtaggaggaagatcccatcggccttgcagtccaccagaccaggtggttggttctctggcctcatgggcacctttgttactggggactactgtcctataaacggtattagagagtggcttgcaaggattgtttgtcaagccctgcgagttggtgccgaggacggagatttgatcatcaggtttccccttcctgaagctcgtgaagggtgatggtggcggtggtgggttgtgcatgtgtgtggcagatggaaaaacttcccgtgtgtgtttgtctatgttggtgtctctggctgtgtccacatgtctgtctgtgcatcactggtcagtgtctctgtggatgtgtctatttcgagggcggcggcagggtgatgtgtaagttatgcttccatgtgcaagtgggtgtatatgttatatttgaaagtacctgtgccaggtctgcgtgcatcacacccacataagttgttttcatgaggttaaactatatgataatacctccccccagcaaagctggctattgagttagcaggtcacgagctgagtctgtgtactgtagataaactgggtaattggactctccgcctcttcatccaaaacaaacacaaaagcccgcccccacaccggagggcgtctgtgcccgtcatctgggtgcttggttctagtgccctgctttccttgaccccctgtagacaaggtg

SEQ ID NO: 3282 - DNA, 1029 bp, Artificial sequence
  DNA replication origin
tgaggagaggaaccagggctgcggagaaggggaggggggccaggcaggagaggggggcctgcagggagccgtctcaggtctcctgccaaaaattaaactataaaaaagctggaggggagcggcaggggaaggaaggagagaaaggagatggggagggagggagggaccaaacagcccctctgcaccaatagcccggcagggggacgtgagtaatacatggctggttcagagggagtgagatcaaaagccagtagatacaagaggtttgtgcttcaccgaccagacagccagaggctcaatgagacctttgttactcaggcccaagtcagggttgaaggaatacctggctgccccgcctgcccagcccgcccccacccccacccccaccgtcctcagggctgggggaggggccggtcacaagtgagtcaagttgagttgggtacagctcagccctggccggtggtgggcgggcagggggagggaggaggcctgccctcgctggggcgtggagcttctcggggtgagtggaggagtgagtggctgcctggaaggcaggaagtggctctgcggggaattgtgaggcggactgcgagggaaagggggccttgttgagtccgccaggtgagcagcccctgggacccccagcccctggcccagcatcccttgggagggagctgagggcattctgcctagagtccatggctttatgcagggcctgggtctggggttctgggggcccatgagagaggaaggaaaggagaaccagagggggttggggctggggcagatggcccaaagttcaggtgggaggccgcaggatgcctggttgtttggccctgaaggttgggcatgtctggagtgtgtggaggggcgtgctgtgctgtgctgtgtgctgtgtgctgtgctgtgctgtgctgttgttggggaatgcaggattcctgtccagtgaaaacaggttgcttctaccagggttgtgcagggagccagcaagtgttgccctggggctgagggtacagttggggtgggaga

SEQ ID NO: 3283 - DNA, 698 bp, Artificial sequence
  DNA replication origin
tccagcctgagacatgatggctgtccccacctccatccccagcccagtccctctggcccagacacaccttagagagagatgccctacttccacagcttacttggggcttgtcaggtgggctgggattggtaggcaggccaggggctgagcccttcatgtgcccagggataggcagctgggattggcaggctatggctgggaatccgagcgcaggactgggtgagggtgggtggagggggccaggctcgagcaggtctgagaaaggaaatggaaggacagataagtgctgaccttgtcctcccagggcaggggagtggtgggagcagaataggggtatgggtgaggagaggaaccagggctgcggagaaggggaggggggccaggcaggagaggggggcctgcagggagccgtctcaggtctcctgccaaaaattaaactataaaaaagctggaggggagcggcaggggaaggaaggagagaaaggagatggggagggagggagggaccaaacagcccctctgcaccaatagcccggcagggggacgtgagtaatacatggctggttcagagggagtgagatcaaaagccagtagatacaagaggtttgtgcttcaccgaccagacagccagaggctcaatgagacctttgttactcaggcccaagtcagggttgaaggaatacctggctgccccgcct

SEQ ID NO: 3284 - DNA, 977 bp, Artificial sequence
  DNA replication origin
agacaaaagtaaggcagcgctggcccctcttcctttgttataaccctgagtgtgtgcgggcgtgagcgcgcgcgggagtgtctgtgtgcgcgagggtgtgcatatgtgtgtgtgcatgtgcgtgcatgtgtgtgcgcgcgtgtgtgcaaatgcctgcatatgtgtgcgggtcgggactggccgggggcggcaggacccgaaggcgctaggcggattcaccggattgggagttgaatcgcgtcccggtctttctagctgtgcccggaaatcgggcgtgcgggcaggtagccgtcccgctctcgccagttcctccgagtactgagctcggagtttgttcacaggctgagcccgtgctgggggtgtcgcagcttgggcccggcctgcaggggtgggggaggaagaagctccggctgagggtctgccccgaccgcagagggcgcacgagggggtctcccggcaccggcgcggcgcccacgccactacaggggccccctgaaacccgggtagaagcttgtgataggcgttgcgaccccgggaaggcgcgaggctgtggaggtggctcgtggggccatggagggagtggggggcggcgagacggagtccgtctaaatgccagttcccagaagttcagcgtatcgattatttcctaccttaatgcatatttatgccgcgccgaaataggcttcataattaactcccggagtcatccgcagaggttaaagggaccccgaagatttgtgcattgattgggtacctcggcggggtgtgtgtgcgcgcgcgtgtgtgcgtgcgccccgtgctaacccattgaagaataattatttttctccactggaagctacagcagagaatcggacaaggagggaagaaagagattggtgagggggagagagagagaaagagagagagagacacaaaggaagtgagtgcaagaggagccggcttagcatctaaactgtgagtactgagcgaaaaca

SEQ ID NO: 3285 - DNA, 1656 bp, Artificial sequence
  DNA replication origin
gggagcccgcaggggcgggggaggggacggaggaagaggagacccacccctcctacccccgccactcgccagcgccgggtacccgaaccgggattagagaataaattatctgctctcttctcattgggctgtggctgaggacgccgtcggcggcgccgggctgggagctctcccggctctttgcattcaccgcacagctccggctcgcctcgcttcgtggaggccgagagcccggggcctcggctccagacatcaggggacaccagccggctggccgcgccgccccgcccctcccctcccccgccacccggcttggcctcagccccctcccctcccaattctggcttgggtcttggggacgaagatactaggggaaaaggcctagaggccgaagatcccagtatctttcctcctctcccgccacgcccccttcccaaggaggcggaagtgggggggggggggcagcaggggttggtcacctgagcccaacccgcttcagtcagagagggcttttagagccctcgagaggatcccttcagtgaccacggcccatgtcctgccccacacacaatgacaaagaagagatggcactaaggatctttgcttttctcctctctccagccccctcaactgcagtccaatattgttactaatttctttcctttggcccaccttggcagacagctcattaactgcctggaaggaaatgccctctggttcaaagcagcttcctgccaagaattcattcatttagcaagaaatatgcaggatcctccccccaccgccccccaccacccgtgccatgacacgggctgggtgccaggaatgcaaaagaagaagatccagatgagacaatcatgtttttaaaaagcaacaaatactggagtcagaggtgttatcccagtgtgagaggtgctaaaccaaggtacaggcaaagtttgaacccaaaaggcaggattgagtaacttcagccattcattcaataataatgtagcatgtcttccatgccaggctctgtgctaggcattggggatatacacaggtgaaccagtgcgtgtggtgcccagtcctctggagtgcacagtctgctggacaagatgaacactgactagtgccatatgagctaatcaggagacatctggggagtgtgaataatggggactcttactcttcactggggagcccagaaaggcttctctgaggaatgagatctaaaggatgaaagatagctgggtgaagatgggatggtgaggggcaagggaagagttctggtcagaagaaacctgtagagaggcccttgagctgctagtaactggctcatgagaaagcagtgaatcgtccagcttgcagagagggagcacacaacagagcgaggtgggcctaggaaggacctgcagaagctagagagctgcccagagtagtatttgcaggtgtaatccaggcagatttctccaggttccaaagactaatgttttgaaagaggcttacctgtgtgttgctctttctgagcccaaccccacactgtagccccctttaacttctagtgtctgatggttgcaattggcccaactttgtccctgctgaagacatccccaaaataaagaacatagatgatgacatccctgtttcaatctgtcactccccagtggcctgcac

SEQ ID NO: 3286 - DNA, 787 bp, Artificial sequence
  DNA replication origin
aaggctctcagggccggttttagaaacgaaacaggaagaggcacttggaccctggttcccagagtgggagaaaggggtgggcacccgggcagagggagccctggggattggtagcggctgtgggcagggcgggagggccgggggcggagtcaacttgtacatgtgaaaaactctggcgggggccgggcattttccttcctcctcctcctcctcctcctcctccctcctcttccccaccttcctccactccctcccttcccctccccttctacctcctcctcggccagctcaggttgcagcttctctggggaactgctcacctttccggagcaggggaagctgccccgtgcccgggagggagcgggcgcaccgcggcccccaggacacgcgctgtgagtcccgcgggcggtgcgcctgggaggaagggggaggtcggaggagcgggcaccgcggcgccgggtataaggagcaaaggtaagcggaacggctcttaaaggcgcagttttgcttttgccctgaggcgagaggttggagggaaataccggagcggcgaggggagagcagagatcacgaggcgtgatctgtgtgatactgtgttgtgtgttgaggggtggggggtgccctcgaaaggccactcgtaagttccaggtgcttgagagggagggttattttgcaatctcagaccccgcgcccccttagggagtctccatctgggatcactttggcccctgggctcccgtctgaaccctacaaagcaaagttttccacccagtccggaaccaggcgc

SEQ ID NO: 3287 - DNA, 769 bp, Artificial sequence
  DNA replication origin
tgtgttgaggggtggggggtgccctcgaaaggccactcgtaagttccaggtgcttgagagggagggttattttgcaatctcagaccccgcgcccccttagggagtctccatctgggatcactttggcccctgggctcccgtctgaaccctacaaagcaaagttttccacccagtccggaaccaggcgctttctaagctcccttcattctgggaagggcaagggtcaggagtctccagggaccaaaggacccgagagtgtggggccacatcgctgccttgaagggcttcctgggctctggtgaactttccagagcggcaggcagggggtgggaggccggagccctgggaagaacgtggaaggacacgtgaagccctgcaggtcccagttctgggggaggcaggggtctggggaatgctgctgcttctctctttccaccccggaagaccaaaggggcagtgcccccctccacccctcatcaacaggcgacagagggttaatgcagcagagggaaaggaggctgggtggggccggggggagtgggcggtgacctgttgggctaaggagatgtgccttgaggattctgctgtagttgagggacaccatcaggaatctgaaatccaaaatcgggtctggactggaggcctctgttttcgccctgtggggggcggggattccctgaaggtgtctgcagaccttgtgctgggtgggagttgggctgcagaaacagtgaggggttttctgtgctgcagggtcagcaccctcctaggc

SEQ ID NO: 3288 - DNA, 1019 bp, Artificial sequence
  DNA replication origin
gtggcccaggcttgactgttttctcctactctgaactgcgtgccaaacaaactcagtttcaaactttggtgctaccactagcaggctatggaatcgcaatgacgtgataaaacccctctcacccctggctccattcattcattcaacaattattgaacacctgctgcatgccaggcactgttgtagaccctgagaatccacagatgaatgaaacagacattaattcctttcctaatactttctaacaggggtaggggggtgcggacaatagacagaatgaatacacagtatgatggatggtgacaagtgcaatgatgggaattcatgcagggaagagggaaggtgtgggaagtgcagttgcaagtttaagtagggtggtcaagaaggcctccccaagaagcaggtgacatctcaggagaaatccagagtaggtgtaaggtgagggggtcagtcatgcagggtctgggagaagcaggtcaacaagggaacagcaggggcaaaggtcctgaggcagaagtaagtctggttcactgcaggacaatgatgtggctggagaagatgctggatgggagtgcggagcagctgtgttgggcctcgaggggtaaggagggtttgaacggatgagtgacatgatcacactgaggctttaacacgctgctgtgttgagaacagacaaggggagcaaggggagagcagggagcccgggcaggaggctgctgctgaggcccaggggagagagcttgatggtggctgggaccagcggggggcagtggagatggtgagaagtggctggatttgggctatattttgaaggtggaggcaaagagctctgcagatggattgtatgttgtgggtgagaaaagagtcaagcatgactctgcagcagggttttcgccaagcagccggagtggagagatagaacagtcactggaggagacaaggcattctgggagtagtggtttcagtgggaagaccaggagttggatgttgggcaggtgacattttcaacgtacagtggt

SEQ ID NO: 3289 - DNA, 912 bp, Artificial sequence
  DNA replication origin
atccatgatgaccattttaaagacaaggagaccatggtgcacagaggttgagtaacttgctcaaagtcacagagctaatgaatggcagaggtggaatttgaactcacaaagtctggctgtaaggcagctgccctcctgtgcacacccttgtgcgtgcatcctgccacctgccggggcagagctccagaggcccttacctccatggagaagcggcgctggttctgccgccgctggaactgcacgccaggggagagctgccccggctcctccccgctgtctgttggggagaaggtgctgcactcctgcggggggtctctgccaagaggaccgagctgcaagtctaagagggacaggcgtcagctcccctccctgcctctctgtcctgagggagagaagggtagcccccctcccccagcgctgtgctcctcccctaaggccagtggggagggggtgggcggggaggggaaggtgactggggagtgtctggtaggtgggagaggtgctgggtgggcccagacccctcactctcattccgccggttgtggagctggttgaattgctccgtgaattcagccaaggattcttcaatggtctcagtgcggggcactgacagggagaaacggcgcttaaagttcttcatcttgttcatgatcatgagggactgggcagccgggtcctgagatgggaagtgtgagaagagcagttgaaaagaacaaggcaaccagtccaggtctccacccactgggaattcagctctctcatcaagctctgtcgccctgtatgccaccatcactgggagccagggttgtgtcttctgcaaagtttgacccctctgagggtgggtgttcaccctcttcttcccagtcaccttcttcctcccagtgaccctcagcactgcctccactgcccacc

SEQ ID NO: 3290 - DNA, 809 bp, Artificial sequence
  DNA replication origin
taaacctaggcgcttcacagatggacttcgagggtctaacggcacccccctttcccccagaacagaaggcaaaatcttgttgtacatatgtttctccttgggagagtattcgtgcatggctttcattagaaccccaagaggttaatcacattgccctttagaaggagaaccctagaaactcaacatcttcctcacactaagctccctggaagggcctgagatgaggccctcctccccacctggccaggtgcgggaaggaggaggatgacgctggtctatgctgactctctctctctccttctaactagttggaggagggcagagagggaagggccgcgtcctggaggaaccccgggaggaattctgaaataatctcctagaaaaaaaaatttaaaaagagttctggggaaaattctttcttccatggataaatccctggcagtgagtaggggttgattattctctagactgggtgtccttcgaggagcctgcagctgacctaggctgtcccttcattaggtggcctcgggctggctggtgggttctgtgtgttcccgctcctaagggagccaggatctggcccctggaggcagaacagtaaggccctgcggtgtcccctctgcccaggtcttctggtaatgacaggagccatgacatcatttccactggcccaccagggggaccagggctgaaaagactgaggaggtatgtgggcgggtgtccccaagacaacttggcatgaggtggggcaaccaatttctcttgcaggtactggtcccatctcatagccgcacccctgcatctgccct

SEQ ID NO: 3291 - DNA, 945 bp, Artificial sequence
  DNA replication origin
gaggcagagctgctgcgagaagaagacccaggagatctggggcagcgagctgtgcgtctgacagcgcaggtccagcagcgtgggccccaggaaggcgatgcacaggccgaagctgaagaagacgctccagtaggtgagcgtgggctgcaggttgcggcggagcagccccgacacgcggccgtcgcagcccatggcgcaggctgacgggctcgcggatctggtcccggcgagcccggtgcccgagtgccgcccgcgggagggccggccgggctggggaggcccgcggcggggagggaggggcggggaggggccgccccagcgaggggccccgcccttgggcccgggcggcggcgggggcgcctctgcggcgggtgggcagtgcgtccgctcccgcgccttccccgtgcggtgccaggcgccggcctccccctcctacccgagcgcacatgctcgccctcccccggctgcggagaccaaccgggagccgcgctgccccccgcccgctctccctcgaccagtccccccagcctccggatgcagcccccagggaccgagcgcccattttagagcccggcagatggagagcccgagacatcctgtatctccggataaggctaggggccctctccccgcacccgggctgtggcagtggaggaaacccggacccctttaaacctaggcgcttcacagatggacttcgagggtctaacggcacccccctttcccccagaacagaaggcaaaatcttgttgtacatatgtttctccttgggagagtattcgtgcatggctttcattagaaccccaagaggttaatcacattgccctttagaaggagaaccctagaaactcaacatcttcctcacactaagctccctggaagggcctgagatgaggccctcctccccacctggccaggtgcgggaaggaggaggatgacgctggt

SEQ ID NO: 3292 - DNA, 1283 bp, Artificial sequence
  DNA replication origin
cgcgtgtcggggctgctccgccgcaacctgcagcccacgctcacctactggagcgtcttcttcagcttcggcctgtgcatcgccttcctggggcccacgctgctggacctgcgctgtcagacgcacagctcgctgccccagatctcctgggtcttcttctcgcagcagctctgcctcctgctgggcagcgccctcgggggcgtcttcaaaaggacgtgagtgccgcgcccgtgcgcccccgccccgcggcccccggcacccaccctcgccgggccgacccttccctcccgccccgcgacccggcctctcccccggccccgtggggctgcccgtcgcccccgcctcccggccgcgaccacccctcccagctccatcttggccgaagagctgcctccctccctccctccctcccccgcagctctccctggaaaactctctccagagactgaaggtgacttctggcttatttatttgtcatcactcatccctgtgagaggataaaaccagttcccacctgcttcccccacccaccgccccgtggggagaggagtgatagagtttgcagaggtggggagggtgcccctcttacacagctcctctggggtttgtcagtagccccggctgccgggggcgggattggcagtgaggtggaaggaccgtgggagggccagctctgtggcggtgcagggtgctggaggtggcctgcggcttgactgattcccagggccaggctccactgtaggcagctccacatcagctaacacaggctgtcccttcccccgggtagccacggggtttagtgggttctgtgtagccctcctcctgaggcagccagaacatggttcctgcatgggcccccgagacacacaggacctcaccgttaaggccaggttgggaggggcagggcactttacccatagcttggtaaggtgactctccagccctggtgccaaggttcccctccactccccacccacctcatcctactcctgctgggcctctgccccacgacagggctctggactctccctggcaccacccccagaaatccccctttgacactattgcagagccttattctctcggcttaaattggacagggccacctccgggctcccttgtggaaagacagccagattcactctcccagtgcagcatggaaaacagagacccataatagaatagggaatagatgacttgcaagccagaggctgctgcttgatttccccagtcccagctcctggctgagtggtttcctagatcccatggactcagtcgagcaa

SEQ ID NO: 3293 - DNA, 1337 bp, Artificial sequence
  DNA replication origin
tcctcacgctggaaactcgaggacggcgcggcagccgctgcgacccccgcggcggagccgtagaaggcggcggcggccaagccgagcccgccgggtgcccgcagccgcccgcatctcccgccgccgcggctcctggcgccccgccctccccgcccccgcacgcggcagcggcggcgcgggtcttggggccgctacacgccgggcgcgcgcgttcggggcgttccttgcagcggcggggcctgccaggccctccgcggccgccgccactctcaaaccccccgactgctcctgggtccctcccagacgccgtagtcgctacacgtcacttccgggggaggggctgcgaccctaaggggtgtcgtgagccgcgtctgccagcaaacccgggtttggtgtggccgggggatgtagctcgggcgcctcctggagtcgtctcgccgctctccgtcgcgttcggtgcggttgcttccaggtccctgaggcgcccgtccggaacccgccaggacccaagctgccgcctgggccgggacctcggactcctcaaaggcgcgccactttctcctcggttggagggaagaggtggcgctcgcagagcaacctgcgggggaccacttctgttggtgctaagctttggggagagtctcctccctcctgtgtccctcgtcctccttaccactcgctgttagaagttggggccgtcacagctttctcatcgaagtgccagatcccaggacactacaaacgcttgataaatactaaattagcactgtggctttctagcctggggactgacaaatggaagcgctggagtcgtgggaaaagcttgccctgacgatggaggcagcgaccagaaatccattcgtggctctacccctcactaactcaccaattttaagcaaccttaacctctctaaaacagtcatcatttataaggtggagagaacccaatcttagagttgttgtaatgattaaagaaaataaggtgcatgaaacacctagcaagagtttctagcttagaggttctcattaagtaaaattcttaaggaatcaggtcacacttgatacaagaggctacttgagcagtttagcaccagaaggaatgtaaagtcataaattaggacagctgaacaaaacctccaagaaataaattaggtgtttgtttaacaagaaaccaaagagaggtcagtgtctgagttactggttattcgaggccatttactagctgtgtgacctgtagtgagttgcttaacctttctggacctcagtttcctcatgtaaaatgacgataatgagcagcattgctgagaggattaaatgaagtatagagcataatgtac

SEQ ID NO: 3294 - DNA, 966 bp, Artificial sequence
  DNA replication origin
cagccggggaagcagggcgcccaggttccggaaagccaagcgggcccggcatggacagcagtggggcgacaaggagggggccgacagcccttctgctggctcggtggggcccagcgctgcctcctcagccaccagcagtgtggctgctacgcaggtgaggaagatgagggtgagcaggccaaagaggcactcctcctgggtgcccaggtagggggccagggcactggtgtcccagtcaatggcaggcaggaggtagcccaggcagcccccaagactgatcatgaaggcatagacagagtaggcctggcgacagtggtccgggtcccggaagaggtcagagagcagggcctccagtggagtgaagcacacctggccacagaagtccagcagccccacgcccaggatgagcagtgccagctccaggggcctgggatccgggcacagcagccctgctagccagccggcccttgggatgagaaagaggctcagcaggatgcccaaggacagtgcccagatgaagggccggcggcggccatagcgtccacgccagtggtcactggctgagcctaggagcgggacacagaccaggcccagcactggaccaatgcctgcaagaagggaagtagtatgagtcaatggctgggacaagtaaagggcaaggggaaggggaaccaagctccgtgagaaggatggaaataacattccgtactcgacactgtgctacgtcttcacagggatgctgtaatttactcctcataacacaggcattacagatgcccccattttcagatggacaaactgaggcatggagcaactaagaagtgatacttattcaaaggcgcagacctagggagggtaagaggcagcgtttcaacaagcagtgtgactccagagcctgcaatcctcacaggggcccctcttcctgggggtgaggggttgtcacacaatggttactacttgccttct

SEQ ID NO: 3295 - DNA, 1551 bp, Artificial sequence
  DNA replication origin
gcacggccgagctccgcgctgtcgcgtgttttgcgccccgcgggatggggctgcgccgtggccgtccggggcgctgcgcgccgagccccgcgcgaatcccagaggagggcgcgtcccacacgctctgccggggcgggtgccgagtgcccggcgcctgcacgggtccccgctgagctgtgctttcttccgcggagggcgggcaggcaggaggtgcccgcgctgtcccaggcggggcggcggtgtgggcggggagcggcccctccccggagccccgggccgggccggaccgggccgggccgacggctggcggaccggccgctggctcctgttgcagcctcccgtgtcagacttttctttggaaagttgcgtttattttcttctcttgtctgggcttcaccggaaaggggcaggatgagtcactgcggcgcgcacagtccgggacttgggggagccgggacgggagccgacggccgcggcgccgcggggtgctcaggcccaggccggctttcttgaggaagagtgagttattaagacagggaaaggggactgagccctcttggacttagaactggggcgagctctgggtacagagttgggactggaccgtgtgtgtgtgtgtgtgtgtgtgtgtgtgtgtgtgtgtgttactgtgtccccttttcagcctcagtttccccctctgtggggagagaaaggccgctgttttctcctcgcctcccaggtctcaggtggggaaggacagagttctgcaaacggcaaacaggtgtgatgtggtggtacctaggcatcccgtgcagcttctcagagctctgggcctaggcaggcttgctagaaaagccccagggacctgcatgctttctccctagtgcgggtcaggccttcctgtagtcttccgctccccccaggcactgcagtcctgtgagttgctcttgcccttgacctctgaatcagcctccatcttcctgacagacactcttgacctgctcagcttttccccactccagggcgtgttccctatgcttcctctttttccaaggggccagagttgggggtagggaggggtttggcatggtgggtacctggtgaggactcgcccttcagctgttacacagacccggtcccggtggagcagggactaagaatagcccagctgctgtcttgctgccctggagtctgcagccgggcattgccagttgaccagggcccgcagtgacccttgctggggtcctggaacctttgctcaggggtggggttgaggtcctaggggcttcggactacctttcctgaggcacttagcagatctcctttcagagcagagaccgccttggtgtagactcacctgcccgaggcctgggaaacaggctggcctattggggtgggagtgggagggcccaggaggcccaggctagacgggaagcctgaggaaacccatagagcagcatattgtaggggataagtgggacgcaatttgaggtcgcaggccattctgttggatcagtcccattccctcattcctcccttatctcctcccaccaggcctgtcgtggagcc

SEQ ID NO: 3296 - DNA, 1228 bp, Artificial sequence
  DNA replication origin
cattctggccacccgatctccaggcagagctgctccctacctgtccaggaccatcccttcaaaggagatgtcacattctctccgaattacccttctgctctttgctattctccgacgcagacagagctaactcaatccctctttctgcgctgaaaaccaaattccaattttttttcttcttaagagtgtgtacggggaagaatggatgataaattgccaatgaaatgttctctttgtcagctgttgagcaaggtccgaacagatacctgttccagaatgtctttgatggagtcccaggctggccctggggttgggggttggggggcagttttgtctttttttcctccatggagttttattgggtggagagaaatccaatttagttggattgttgacttgaatactacaaagtcccaggaagatgccttcgaaggggaagacctggttggccttagccaaccaggcactggggcactgggttccaatgctggccctgtgtcaacagccgtataacgtgggccaagtcccttccatgttctgggcctctgtaagagggggtgagccaaatgatttctaagggcaccttccagctgagaggtagaaggaggcagagaagaaagggagatagagaagggagaggaaatagtggcgccctggtggtagtggggaacagagagcaggtgccagagagagttgagaagagaaaaatcaagaatctaccttctgagtcactaaacaagtttaacttgaaaactgtctcagcgttgcctccctggagcagacacacctctacctggggaccctcctggagatggctttccaaagtctttggcataccctctcgtggcaagcagagagactagggtggagtccagggtctctgagctggtgtcccctctcctccaggaaagaggtcaggagtcaggggaaatttcaggtcagctggaaaattacagagccaggagagagtggacggtggtattttgcaggcttgggaaagaacactgggaacatgagagagttgtcgcaccacagacaagtaagagcccccctcttcctcctgcctcccaccacttctttccaggggcccttgtgctttatgccttatgacagggggatgaggaaggagagctcaggggagtgagcacacagcctggatcccatggtgatcctgggccctacccaatcaccccttcccaactaaaccaggtggatgcactggccaggc

SEQ ID NO: 3297 - DNA, 969 bp, Artificial sequence
  DNA replication origin
gggcccgcgcgcacccttgagcgtggggggccctgctggcgcgcgggggtggtggctgcgcgcccgtgcgcgcgcccctccccgccccgcgccgctgcagggctccggtctgctcagctgcctcccccacccaccgcactagagcgggcggggtgtccctgagccgccagcggccggagggggaggggtgtgaagtcagcgcccccaagaggccccacctcctcggggccgtccccttggagccagcgcggggaggcgggcggactcgagctccactccccaccttcagcgaggaggggcggaggcacccgtattgccccttcccccagcgactggcgcgggggtgggggccctgagccctctctgtagcggacgggggtgttcctggcaaagggggaggggcagcactgccaaccggccccgcctctgtccttcggggtcgctgcaggccccgcctcccggatcgggccgagcgtgggcgggacccgtttttttccccccgggcaaaagtgagagttcgggactggatcctggaaaataatgggctgctgcctctctccccacctcagagttttgagagagttaaccccaaagttcgctctttctctccgactagaaatgtccttcctcggggaaatgtccgtactcagggaggtgcgggttaacagcacggcccaaatcccgtgtggttctcgttccactctcacccgcgtacgcgtctcgggatatttttgtaaccctcttgtccccgagtgactttagtaataaaagggctaggttcgggtaaccatcagacttcattctcggaatttcaacaagtttgctattcccccagctgtcggtggaatcgtcctatgccattctccaggctattgtatggaatgtgccatttatggaggggtgtggtttagtccaatctgttgaggccttaaaaaggagagctgttgcaaataaatatttttaatgtaa

SEQ ID NO: 3298 - DNA, 747 bp, Artificial sequence
  DNA replication origin
gtttctcggcagtcaggccaggagggggtggggaaggtgcgaacagccgggggctcggagctcgcgccctgcgccccacccaggttgcggccgcccggggaggaagcgcgtataggttgagtgcaaagtttccttttttgctttctcgtcagagcagcccagacaggcggtgggtgggaatgcctcacttcagtttgaagagggtccggatccaaaggggttaaaacgagcgacccccgatccccgaccacacttcccgcctccctaaaacgcacaccccgctagccatgggcagccgcgaccacctgttcaaagtgctggtggtgggggacgccgcagtgggcaagacgtcgctggtgcagcgatattcccaggacagcttcagcaaacactacaagtccacggtgggaggtgagacgtctcgggggtggggagggggagggggaggaggaggccccgaccgcggactcgagctggggacccaagtggggtggggatttgctgtcggttgttgggtccttcttcgggtcaggaagtactgtctgggaacctagatggtgtaattgccgggtgtttggtttacacgcctctcttgagtttcccgttagattttcccaaactgagcccactgccaggagaaaggtaagagcaaaggcgtgaagatgagaaatagggaagggaggatgaggatgagcaattgctgtttattgcaggcgtactgtgaacttaagtctccagcctttcagc

SEQ ID NO: 3299 - DNA, 1552 bp, Artificial sequence
  DNA replication origin
gcagcgagcccgggcagcgggcccctcggaccccgggccgatgggcgctgggacccgcgcgctccaggcgcatggagccggctcccggttcccgtcactcctcctactgcgtttccccggcgccccgcctcctgggcacgaagcgaaggaagggggccgggccgaggttgatcccgccccctccccagtccctgattggctgctgctgttgtccatccgagaatctatttttgatggagcggggggggtgccacccagtctgccccagatcacgtttgccaccggcagccaaccagttgggcccgagtccgcgggcaagaagcgattgggggcgcgtgagctcggctccccggtcccccgtccgggtgcccccccgccgggcccgaagcgatatatcctgccctccccggccacctcccccgcgtggaagcggagcggcggcctcgctgtaacgcagaagcgaaatgtagcgagccgggtgtcgcggctggacgctcgccttggctgggggtgtgggggggcacgccgggggccaaggaggactgtcgaggaggagtgatgagaagagggggtgccctgcaccccccgagaccacgggccacgctgccacttgccaggcgccccccttcctcccaggcgaggggcaggtcagtcctgtggggtcctggggcggggagggggtggtggagggcggcagtcctggcgcgcagcgcatttgctgaatctgagtggtggagagactgaggaggccacccagttactttctctccctcctcggggttggggatactaaaatgggtcttttttgtccccgcctgggaggaggggatagggcgtcctggttcacttttgcttctttcgtcccagggccttaggcctgtctgaagtctctttacagggggagtggtgagggaggactggcttcccctcctgggagccccctctcaggttcagtggcctgccaggaacacaggagggaggcgggggtgtcagcttttagcggactcagaaacttttctggcataggggcactggactcagaggtttcctcctggatctctggtgagggagtttgaaagaaccacagtactgtgtttaaggagattggaaaagggagtcctggtgggtgactgaattgatagaggaaacagttctcctgggccagttcctggggtttgatacctcctttcctaaactgaacttgactaattgtgtgtgtttggaatacttaaggacctgttcctcttacctggtggaactctctttaaatttattttttacgaataagagctcttctggtgaaatggaataggatgggagtccatcaggaattaggaagcctggggattcctttaggcagagaagtggagccattacagctaaagagatgcatttggagcaagtgcatattggcttacggtgctttggtttttgttttgggttttttttattgctacttttgtttttttgtttttgtttctaagaattccactatatccaactctcagtaaccctggggaacaggaggagcctaattaactgaaatgcgtgg

SEQ ID NO: 3300 - DNA, 1403 bp, Artificial sequence
  DNA replication origin
tcatttgttgacctgtacacttaggtttcgtgttcctttcctaaatgcctggtatatttcaattaaaaaaatacacacaggagaggggaacagttttcgagtaagtaaaaacacggaaggtagaaaggaaataggagagagatcaagattttatacacaggtagctgagctgtggccagattaaatggggtagtggaggggagggaactgttgaatagaacagggcagaagttgcctccagcccaaccaaagttcctccagatacatcagccttaattccccacccaaccccacaccccgtattcacaaacctcatctttctggacaagtcccagcatttcctagactagcagctacttctcctggcagaaaaacccagtatttgaggccaaaactggggtctgagacactgatattttgctctagtaggtcctgtgagtctgcaggcccttgatgcaaatgctccagagctgatctggaatcatcctgggggtactggtttggggtgggtgaggggaacagggtttggtatgtgtatttgtcatccttatcaaaaggaatgacctgctcaggttgctgtgtgtgctcttgtgagcacgtgcccaaagcttcatacacagcactgcgatctcttctccccaggcacatctccgctccaaaccctattcaggggtctagagccatgttcgaatgcccccgggctactttcagggaggaaaaggacaggaaggaaccgttggtcacaggttccactgacaagaggggaaaacttgggagtgggggttcctttatgagggaggtcacaccccctgcacaaaaacatcccaaagagaactggcattgagcttgtgttggagaggtggagataccccagggaggaagtggcgaaaggtgagcatgggaacacccctctttgatcccacaaggtgcgtcagggaaagttggatttcatttagtccgggatggtgacatctctccgcacgctgccaccaggctcagtgggtcagaggaagtgaggctcccctcctctccgacctcaggtgatgcgtgtgcgaccccagccatgggtctgacctcctttcgctcccgcccgccagtctccacccctttcaaggccgggacttttttaaggccggattcgtcaggggtgagccatttgctcaaggaacgcggaatctggagggagcctaaagtgacgagccggcgggagaagagcaaggtagggactgttctgtccgggtaccaagtgggaggagggagcacgcggctggctgcttgagcccgggggtcagaggtggctggctggctggctccacagggacgtttaccggtcttcccgaaggccagaggctccaaggaaacatccagaggcaggagaggacgcgcactgtcgcacacgcctc

SEQ ID NO: 3301 - DNA, 2931 bp, Artificial sequence
  DNA replication origin
agcaggtccctgcaaggtcaggcaccaggcagcacccatggcgtgggagtcctgggaccgcacagtccaatggggtccacaaaacagtcacgccggcagtgacaccggactggctgagaggtgtgtggcagcctagccgtgacagtgggctgtgcgcactccgggaggctccctaggtgcgatggggatgggccaggctaggcaggaagttgaactcctgcagagggtcaatggcccgtaccaagattgtgtacgtgtctgagggtggtgtgtgttgtgtgtggagggtgggtggtatgtggtatgtgtgtgtctttgatgtgtctgtgtgtgtgtgtggtatgtgtatggtgtgtggtatgtgtgatgtatatgttctgtgtgtacagtatgctgtgcgtttgcggtgtgtgtggtatgtgtgtatgatgtgtgtttgtatgtggtgtgtattggtggggtctgtgaatgagggtgtgggtgggtgggtgtaggtggcatgtgtgatgtgtgtggtgtgatgtgtgtggtgtgtatgtggtgtgtgggtatgtgcatgtgtggtgtgtgtggtgtgatgtgcatatgtatgtggtgtgcatgtgtatgatgtgtggtgtgtatgtatgtgtgcatgtgtgctgtatgtactgtgatgtgtatgtaagtggtgtgtaaggtgtgtgtgtgcatgtgtgtagtatgtggcgtgtgcatgtgtggtgtgtgtggtatgtttgtggtgtgagtgctgtgtgtggtatgtgtgatgtaatgtgtgtgtacgtttctgttgtgtgtgaagggtgtgggggtagtatgtgtggtgtaatgtgtgtgtatgtggtgtgtggtgtgaggtgtatgtatgtatgtgtgcacgtgtgtgtggtatgtggtgtgtgtatgtgtagtgtgttgtgtgtgtatagtatgtgtggtgtaatgtgtgtgtatgtggtgtgcagtgtggtatgtggtatgtccatatgtggtgtggtgtgtaggggtgtgtggggtgtgtgtgtggtatgtgtggtgtagtgtgtgtgtatgtggtgtgtgcatgtggagtgtgttgtgtgtgtggtgtggtgtgtgtatgtatgaggtgtggagtgtctgtgtatgtgcgtgtgtgtgcatgtgtgtggtatgtggtgtgtgcatatgatgtgtgtgtatgtgtggtgtgtgtggtgtatgtatgatgtgtggtgtgcatgatgtctgtgttgtgtgtgaatggtatgtttgtggtgtgtggtgttcgtcgtgtggtgtgggtggggtctgtgtgtgtgagtgtgggtgggtgtgggtgggtgtgctgtgtttgcatgtgtggtgtgtggtgtgtgtgtggaggggtgtgtatgtggtgtgtggatacatgcatgtgtggtgtgatgtgcccatgtatgtggtgtgcatgtgcatatgtggtgtggtgtatgtacgtttgcatgtgtggtgtagtgtgatgtgtgtatgtatgtgatgtatgtggtgtggtgtgtgcctgtgcgtagtatgtggtgtgtgtgatgtgtgtgtggtatgtgtggtgtaatgtgtgtgtggtgtgggggatgtgtatggagggtgtgtgggtgtgtggtgtaatgtgtgtgtggtatgtgtggtgtaatgtgtgtgtatgtggtgtgtggggtgtatgtgtgcacatatgtgtgcggtatatggtgtgtgcatgtgtagtgtgtatggtgtaatatgtgtgtatgtggtgtgtgtgtttgtgcgtatatgtgtgcatatgtgtgtggtgcgtagtgtggtgtgtggggtgtgtgtggtatttgtgttgtaatgtgtgtgtgtggtgtagggtgtggtatgttgtgtgtgcacgtgtggtatgttgtgtggtgtgcagtgtgaggggtgtgtgtgtatgagaggtgtaattgtgtgtgtggtgtgcggtgtggtatgtggtgtgtgcatgtgtggtgtgtgtgtgatgtagtgtgtgtgtatgtggtgtgaagggtgtatgcatggtgtgaatgtttgtggtgtgtggtgtggtatgtagtgtgtgtgtgtggtgtagtgtgtatgtgtgtatgtagtgtgcagtgtgaggggtttgtgtgtatgtgtggtatgatgtgtgtgtggtgtgcggtgcagtatgtggtgtgtgcaggtgtgtgtatgtgtgtggtgtagtgtgtgtggtgtgcagtgaggagtgtgtatgtgtatgtggtgtgtgatgtggcgtgtacatgtgtggtgtgtgtggtgtagtgtgtgtgtttgtggtgtgcagtgtgaggggtgtgtgtatgcatggtgtgatgtgtgtgtgtggtgtggtatgtggtgtgtgcatgtgtgttatgtgtgtgtgtatgtgtggtgtgtggtgtggaatgtggtgtgtgcatgtgtggtgtgtgtgttttgtgtgtgtggtgtgcggtgtgaaatgtggtgtgtgcatttgtggtgtttgtgtggagtagtgtgtgtgtggtgtgcggtgtgaagggtgtgtgtgtgtgcatggtgtgctgtgtgtgtggtgtgcagtgtggtatgtggggtatgcatatggtgtgtgtgtgtggtgtgcggtgtggaatgtggtgtgtgcatgtgtggtgtagtgtgtgtgtatgtggtgtgtggtgtgatgggtgtgtgtatgcatgttgtgtgtgtgtgatgtgcggtgtggtatatggtgtgtgtatgtgtgtgggggtgtatgtgtggggagtagtgtagtgtgtgtgtgtatgcggtgtgcggtgtgatgggtgtgtgtgtatgcatggtgtgatgtgtgtgtgtggtgtgcggtgtggtatgcggtgtgtgcatgtggtgtgtgtgtggtgtgtgttgtgtgtgtgtgtgtgatggggtggggagtgggctgagaaggcaggaagg

SEQ ID NO: 3302 - DNA, 1080 bp, Artificial sequence
  DNA replication origin
acatgcctgtagtcccagctacttgggaggctaaggtgggaggatcacctgagcccaggaagtcaggccatggtgagccatgattgtgccactgcactccagcctgggccacaggagtgagaccctgtcaaagaaaggaagaaaggggaaggggaagcggaggaggtgaaggggaagggggaggggaaggggaggaaaggggagggaaagggggaggggaaggggagggagggggaggggaaggaaaaattagcaataccatccctgctggggcttttcaggcccagctccagtagcatgagatattgcctagaggcccagttcttttggggttaattggaaaaagacagaatcaccacatccagtggagggaagtgggctggctggcagctgctcagtgaatcacagcagctttacatggtcctcaggatgcaggacttaaggcaaggccactgaggtggccagactgggggaacagagacagactcccacagtcacacccccactgaaatgctgcaagcattggaatagtgttgtattacttgtacagttagattcacaagttgtcaagaggcctggggcctggagaacagaatgacatagaaacctaattatggcctggaggttttgcaggaaatctgaggaacaagatgctgccattgtcaagtgaaaatgatgtcattaacggaaagagctcagcgatgacttgcacccggggagggtgcagatgtcattagggcaacactagcatgaaaacctcaggctttgcccatgcaacaaatgaggacatttctcacacctaccccagatggtgctcactctgctagtcccaagatcctaccagggtggggggtgagagatgggggatccccaagaaaccaactccgtgacgaagggctggacccaggttcagcaccacaagctctgtgccatcggggtacattactgctcagtctgggggtggcagtgagtgatggggtgtcagaggatcttcttatgtatttgggggcaccaccatcatcaaggtgcaggaggcaaggctggacaccacctcctgaggtctagggtcatgagcattaa

SEQ ID NO: 3303 - DNA, 2008 bp, Artificial sequence
  DNA replication origin
gaacctcagtgtttttgtctataaagtggaactgataatgcctatctcacagggtcatggagaggatgagatgagttcatatatgataaagtgactaacacagcaactggcccatagtaggagcttattaattgttcctaggaccctgccctggggaagcaaggtcagctgagacccgagtctctgcccagcaacaggcctcctgagtgtgagcctgcttagctgggctggggaagaaagtcctcccttcctgccattcctggctggtgtctctcatgtgcagctctctttgaagggactgacaaaagaggcaatgttggcagaagctcttagtttaggccttaggaaggcaacaaagtgcagtgggctgtaattccgccaggcctgtgttcaaatcctgctcagcctcacatactctgggcaagttttttttctccaggcctccgttttttcatctgtgaaatggagctaacagttcccacctcctacatttatatgtaaagttagagacacttgggaggttctcaataaatgggagtggtggtgggcctggtggggatggtgggcctggtgggcctggtggggatggtgggcctggtggggatgatggggatggtggggatggtgggcctgatggggatggtggggatgtgatggtggcaatggtggtgatggcgatgataatacagacaccacgcctatttctttccctcattcaggtaccccaggaagtagctcaaggctggtgtagagagaaagatattccttactttgaagtcagtgccaagaatgacatcaatgtggtgcaagcgtttgagatgctggccagtagggctctgtcgagggtgagtggctgtggcggcaggacctgctgagaccgcccctggattggggagggtctcgggagcttccagagaagaacatcttgggtgtgggcagggatgtgggtgggacaggattgctcatcgtctcagttaattagttatggaatgggtttaacagcactccagctctggaaccacagaatgccagaggtagaaagctaccttagagcatgcagtcagtggtctgtcaatccagctaactaaccaaatccctcgtggagtatctaaaaactccagtcctgtacctgagccctggagatcctaacgaggaagggtttgagaagtgatggtctagtccaatcttcattggtgggaggtgccaggcattcacccaagtgaaatatcaaacctgtacgagttgctgacatctcccaatcaaaaagatgaatagacgtagacccctaggtacgaaggttcggcaagaatgtgttgagtgtgtggcaggcactgtacaggcctcaggaccctctgtctcaagaggcaggcagataggcccctaagtgattgcaatacagtgtggtctggtggggcaggacttaggggtagggtctagaggaggggctcacagacagcccatgctgcagggaaggagagggggctgggaggaggcagggaggagggagagggaagaagggagtgggagaagggagcagtttaggttgatggccaggtttccagctttgcaaatgaagggacaatggattagtgattccatgagccaagcaagacagggaaaaaaggagaaagcaggggcttcatgacagaaaggggcaatgacattcatgtaagcacattgcgttcaaggttccttgagacaccaggtagaaaagtctgaattctgcaaggaggtggggaagaccatggaaggctgcctggaagcagtggcgtggttttaacgtcagtctgatgtggagtttggaagccctgggattggcatggggaggggctcagcttgtgtcatcattctgccacatctcatcaacatgggccttttaggagaggggaaaggatcatcgcagcaatggttctgaattgaggaaatgggcaaatgagggtgggggactggaagcttcccttatgtggaagcatccgccgccctcatgggatgccctctgcagctgctc

SEQ ID NO: 3304 - DNA, 1555 bp, Artificial sequence
  DNA replication origin
agtgcagcctcttctctctctgccccgttgactgttgcctcagatacctcaggtgtgtgtcagacaccagtccaccatgtccaccaaactccaggggttgtacattaacgactctcctcaataccatcttttagctagagatgagtccttaactgttcctcctcttgggagaggcaagggtagttgtgcccacaacacaactctctccaaggaaatccctcctaatcctcattttcaagcgctttatatccacgctgtgggatttagagtcatccaagagagtcttgatcatgagcctttgggaatatgtatccagggtagactgtctccacctgctttatatctgacatctgtccagttgttgcgcctctgccaaaactttcattttaacttccatcttgtttcatgtctgtagggtgtggggagggaagctgggggagttcaagaccgagagtcagtgaaataagtggtgccatcttctgttgagagggaggaaaccaatacgaggcttaagaaacatgaggaagctttgccagttactcttgggagaagtgggaggaggagctacttggggacaaggacaagttctgatgggtgacaccaaggactccgctgaaggaggagactgggagtttgaggtggggtctccgtagggtaccagccaggagcaaggaacttggactagggcttttccaaccaagagaagatgaaggacagagctgcgagggcaccaagaaaccacgaaggaaagaagagggaccaggggaggcagaagggccagggctggggtggcggaggctggggaacagggcagcaggaggaagggcctgagggggttgagggaaaggagatcggggcacaggagaccaggtttcttattttacagaggccctgagaggaagaggctgacatggagagattgagggcagcaaaggatttctgaggctaccatgagaggtggcggctgcgtatagaggggttaggaggcctcaccagatggcaagtgtttagtgaatgaggggcacctggcaaggtgaggagggcgggtggtgactcgcgggagtagagggggtccaatccaagccccagggtgggtgatctttggtgtccagagagaggaagaacaaaggtttgaaagaggcaatgaggcaccaggcaagccagccccctctctgggatctgtggtgagtaaagtctgcaaatagccccagtggggaaggcaagagggggcgctggggaagcgtgactctaggaaaagccagggttcagccagacagggaggtccctggagaggatggaggaggggtgaggagaggatggaggagaggatggaggagaggggagcctgtctctcaacaaggtaggcccagggaaggggtttgtagggaggtggaataggataggggaggggaggaggcactgagcgacagtgaaatcaggacaggacgtggagaggatgaggtgtgtgggagagagcagaagggctttaattctgagacctgggattataaagccccaagaggggaggctgggaagtgccggccctcaaatgtcc

SEQ ID NO: 3305 - DNA, 1779 bp, Artificial sequence
  DNA replication origin
cgggcagaggcgcccctcacctcccggacggggcggctggtcgggcggggggctgacccccccacctccctcccggacggggcggctggccgggcggggggctgacccccccacctccctcccggacggggcagctggctaggcagaggggctcctcacttcccagtaggggcggccgggcagaggttcccctcacctcccggacggggcggctggccgggcggggggctgaccccccccacctccctcccggacggggtggctgccgggcagagacgctcctcacttcccagacggggcggctgccgggcggagaggctcctaacttctcagacggggcggctgccgggcggagggtctcctcacttctcagacggggcggccgggcagagacgctcctcacctcccagacggggtcgcggctgggcagaggcgctcctcacatcccagacggggcggcggggcaaaggcgctccccacatctcagacgatgggcggccgggcagagacgctcctcacttcctagatgggatggcggcctggaagaggcgctcctcacttcccagatgggatggcggccgggcagagacgctcctcactttccagactgggcagccaggcagaggggctcctcacatcccagacgatgggcggccaggcagagacgctcctcacttcccagacggggtggcggccgggcagaggctgcaatctcggcactttgggaggccaaggcaggcggctgggaggtggaggttgtagccagccgagatcacgccactgcactccagcctgggcgccactgagcactgagtgaaccagactccgtctgcaatcccggcacctcgggaggccgaggctggcggatgactcacggttaggagctggagaccagcccggccaacacagcgaaaccccgtctccaccaaaaaaataggaaaaccagtcaggcgtggcggcgcgcgcctgcaattgcaggcactccgcaggctgaggcaggagaatcaggcagggaggttgcagtgagccgagatggcagcagtatagtccagctttggcttggcgtgagagggagacggtggaaagagagggagagggagaccatggggagagggagagggagagggagaggcagaaaaatctttttaaaacacaagccatgcttgaaacttgccgttttccaagccccctcctaatagtgaagaaccctgactctccccacatctttgctgtgatccttgcaaccccccagttccattccagacacattcatctcctcgcttttctttgaccatgtcaggtacacgtctacctcagggcctttgcactgccattcctcctgcctgaaatactctttccctatttatcatcaggtgtcacattcttacctttcttttaggtcaaatgtcagtaaggccttccctgaacacctgatacaaactagcaacccactcttacctcttacaaggaagtgtagggtagggaatgcttgctttatttccccgtagcacatcccaccatctgacattttgtgtgtttatgtgtttctttgttcgttctagaaggtaagctctgtgaggacaaggctttgtctgttgggatcactgctgtattcccaggacctagatcacggaagtgcttaatgactacttgtgaatgacgaaaagaaggagtaaatcaattgtaaagttccagtcatctaccacagttcccacgggagctgttcctggccagtggtgacacacagcccacttcccgcttggcactcctcccccgtcc

SEQ ID NO: 3306 - DNA, 1945 bp, Artificial sequence
  DNA replication origin
ggaggtggggggggtcagccccccgcccggccagccgccccgtccgggaggtgaggggaacctctgcccggccgcccctactgggaagtgaggagcccctctgcctagccagctgccccgtccgggagggaggtgggggggtcagccccccgcccggccagccgccccgtccgggagggaggtgggggggtcagccccccgcccgaccagccgccccgtccgggaggtgaggggcgcctctgcccggccgcccctactggaatgaggatgattgttggtcagccccccacccggccagctgccccgtccgggaggtgaggggcgcctctgcccggccgcccctactgggaagtgaggagcccctctgcccggccggccgccccgtcccggggggaggtgggggggtcagccccccgcccggccagccgccccatccgggaggtgaggggtgcctctgcccggccgcccctgctgggaagtgaggagcccctctgcccggccaccgccccgtctgggaggtgtgcccagcagctcattgagaacgggccaggatgacaatggcggctttgtggaatagagagtggggaaaggtggggaaaagattgagaaatcggatggttgccgtgtctgtgtagaaggaggtagacatgggagacttttcattttgttctgtactaagagaagttcttctgccttgggatcctgttgatctgtgaccttacccccaaccctgtgctctctgaaacatgtgctgtgtccactcagagttaaatggattaagggcagtgcaagatgtgctttgttaaacagatgcttgaaggcagcatgctcattaagagtcatcaccactccccagtctcaagtacccagggacacaaatgctgcggaaggccgcagggtcttctgcctaggaaaaccagagacctttgttcacttgtttatctgctgaccttccctccactattgtcctatgacactgccaaatccccctctgtgagaaacacccaagaatgatcaattaaaaaaaaaaaaaagatttttctggctactgtattgagccagactgtaggggcaagagtggaagtagagaaggtggtaatgcaggaatgcccagtggttaaaccctcataacaaaaggacttgcatgcttctctggaggcagctagaaggcaggactccaggcagaagagagaaacccatgttgaggtcagtctgtggatggcagggaccccacagactggaccaatggtggcagtgggaaaggttcctggggaggttggtcaagtactaacaaggccagaagccttctaccttcagtcttgctctggcaaccccacctcttctttcatcttctcccatctagggagatgtctaatgggcatgatagttagaggtggtgagaggatagggacaggaaagtcctgcctgtgggacaacagggatcagggactcaacaagtcttaggcctctcaccaggaccagcatgttgggaagctgcctctccatccatattcagtctcagaatgggcagctgcttcccctgcaccctcatcttggtctggtcttggtgatagggtggggagagtgggacattgcacagaaggggcgcagaaggcagtgggaacccaatcatcggtttttcagtttttcagtggcctgtatctgctttagccaggactgggcttggccccaggactaaagggaccaaaaagaggaaccactgtttagactgccatgacacacagggcccgggaagatcgctggctggatgtgttcagcacctttggtccctccagggatttctgaagattctcattcaaatcagtacctgagtttgggaatcagtgactgcaggcagtgtttcccagcatattccatggagaatccctccagagccctggtctttagaggcgtatgcctctggttctaccactctctgcagtct

SEQ ID NO: 3307 - DNA, 935 bp, Artificial sequence
  DNA replication origin
ctgagccctggatcacctcccgcagggaaaaaatgaagacttgagggaggctgaagatggcggccagcagccagggagcagcgatgagcaggtaggtggactggcctggctgctggaggctgcgcagggggtgacagacagccaggtagcggtccagcgtcatggccagcagcatgtaggtggaggcaaacatgctgagcacctgcaggtacttgacggccctgcacaggaggtcggggccctggaagcggtaggtgatgtcccacagcagctgtggcagcacctggaagagcgccacggccaggtctgtcagggctaagtgcagcacgaacaggtgcatgcgggagcgcttgcggcccagctggcccagggtcagcagcacagccaggttgcccccggtcgccagcaccaggacagtggccaggactccgatctccaccttggccagctcctcatcccggcccagccagggtgttgtggcattgggggcagagagggtgccccgaggggtggggttggcatcccacagaggcccagaatccatgagcaaggtttgctgggagggaaggatgaagggagggtgtggatgcaagtggagaggtttgatggataaaatggagtggcaggggaggtggagagaaaggagaagcgttgagaatgacagggagaaggcttgcaaataggcggaaatcgttcagaggactgggatagagaggaggagggaggatgagattcggaaggagaaaatgtgactgggatcgacccaggagagggagaaggaggggtcaggaagatggggaatcaggacgggaagaatgggggacgctgtgcagagtgaggcttctgggagggaaagaaggctggggaggggctaccaccctccaatccgcctcaaattctctttctccaaacttttctggaagccaagagcggaa

SEQ ID NO: 3308 - DNA, 1316 bp, Artificial sequence
  DNA replication origin
acgctgtgcagagtgaggcttctgggagggaaagaaggctggggaggggctaccaccctccaatccgcctcaaattctctttctccaaacttttctggaagccaagagcggaagcccttcagcctgcttggaggcgcggtccggggcagtcggtgtcgcgctcagggcaggaagccccagccaagcccgctcgctctgcctggtgagcagcggctggagcgcagcggcgcggctcgggcgggttttatgggctcccaggccgagcccggcggcctgcggctcgccagttggctcctgcagaggagggaggagtgaggttcgcaggcacccacccggcgggatgaccgagaggccggctgctggagggagggggggcagagggggtagcggacgagggacagggagcgagacaagcaggcgacgcaggccagcgcccagcagccggcaggacacaccgacccgcaggcaggcagataagctcctctgcgcactcaccctggaactctcgggccgtctctccacaggtgcatccccgggggatggtgagaggcagtcactcctcccacctacgcgggggcacttcggctggcggctgttggcgcgccctctgccagccggctagccggtgcaggatccacaatcttcaagggtggccaggtgagcgaggcggcatccctgattgccagtcacctgggagtgacgtctgaccgcagaccctgttgagggactgcgaggcatagggaaaggaagaaaaagtgagggtatatgtgggggtggggagacgaaggagctagacctgagagccctggtgcttgatcggtgggaacagccggagaaattcccggtatttgcgtccccaagggacatcttaacttctggcctatgtgcttttcgtgcttaggtgcttccaagatcctaaacgcagttaaccactcggcgaggtagaaaacaggcccagagaagttcaagaacttgctgtagaagattactgaacgagtaagcagcagaggccggtctagaaccagccccgtgtgcccttctgacagcgcagcagcagcacttaacacctaaccggcttggctaaattctatgtgagaggcactggtgctgacggtaaaaataaaaacaaaacaccatccagtccagaggcagcttacagctcaatagagaaggtattgtgtggtgttggctgtgaaattcacttaatcttcagtatgcaagatggactattgggactctccctagagcagattagaagttaggagtgacagactgggcgcgatggctcacgtctgtaatcccagcactttgggagg

SEQ ID NO: 3309 - DNA, 1686 bp, Artificial sequence
  DNA replication origin
ctggaggaaggggccacgctgagggaacaagacagggagcagaggcggcggggttcaggcgagcgggaagcgggaagcgagaggcgggtgtgagatggggtcctgaggctggaagggagcccggggacaattggagttgcacacgctcggaaggcgggaggcggcaaggagaaggctgccttagaggtgaggggaattggggcatgatcatgggccgcgatgttgcgtgaagcgcaaggatgtcaggaactgtgggggccgagatgtggtctagggatgggagtgggcgaagagaagtccatcggggcgggccggggggtgggactcggggagagccccggaagctgcgcggaacacccatcctcctgggtcctaggctgggacccgggctgtccgccagggctgggagacactggaggaggccggccgatgattacgcgcgatgccaacgacgactgccctacggtggaccgcggctgcccgtgtgcggaggaaagggagaggcggctgggtgccggctgcgctgcggtccgtgagccaggacggagtcccaggctgtacagtgatgggcggagagactcgcagtcctgagaagtattatgggctgtactgggagatttggagagggtggagggggggcggtctgagggattccgggcggcaccgctaaggcgatgccgcgagcagcatccgcgccctctccttcccgccccagccccggtttgttcagtcagggctccagcccggcggccgggaggaagaaaaggaagagggaaggagcctttacctggctctgacgcgacgggtcccaggcccccggctccgcttcccactcagagctctcctcccctctcttccccgccacccgtttctacgcagatcggtgccccagtccctggaggagcctccgccaactccgcaggaccccgccgggaagtagagcccacccctttaccaatcaccgcccgttttctatcgaccgatggggcccatagccaataggaagagctgatcccgagaggcccggaatgagggggaggagctggcaaaacttggaggtgtgactagcactgccgaggcgtggtcacagattaagctccaccccgggttgttgaacccctaagtagaactgatgggcgggattaaggtggaaccgacgaccaaacacaaactcttgagctaaggcacggccaattgggccggggtagagaggaggggtgttgcggggagttttaaccaataaagagtagagaccggtggagactgtagaacctcttccaataagaagcgggaagggcgtgccttgccactttcactagggcgaaggcagggtttgccgaaacctcccgaagccggccaatgagatcggaggcggagccaagctcagccaaccagaaagccgaattgatctcagcaccgttactggggcggtgcctacggtcttcaagccactaagctctcgtgaggggaggccccggagccttccaatgagggactggggctaactctagttcttccaatcggtgcgcggcgctggcaattcaaactgataccgggttggagaggcaggaaaagcggaagagggagcgaaaaccaacgtgttcggtgacagaccccagcgccgactgagcctctaaagcgacttcagctctgccccaccaacaccaccgcgcgcccgggaacagc

SEQ ID NO: 3310 - DNA, 850 bp, Artificial sequence
  DNA replication origin
atgggggggggggcaaatctgcaggaaaaagcctgctcggcacgggacacatccaggaaaacaatgtggtcagctgaagcaggaaacgggttagaggatagggtcggagccgggaaaaccggggggcggcgagcggaaggcagccgtcgcctccctcaagctagggacgatagtgactataaatgccacccccaatatttttttgacacccaagctcagagatcccagatatcccacccaatcccaggctggggatgggaggaggtcggtgaggtcgcagtcctgactcctcgcaccaggcggtgcccgagaagatccggccccggacgaggcccagggggctggagggacgcaagcgggagcgcggagcccggcgactagctccctcgcgtgccgcagcggcgaccctttctacttggtctttccttttcctccgagcgccgggaggaggaagctcccgctagcgtctcccacttcccgcggctggaggaaggggccacgctgagggaacaagacagggagcagaggcggcggggttcaggcgagcgggaagcgggaagcgagaggcgggtgtgagatggggtcctgaggctggaagggagcccggggacaattggagttgcacacgctcggaaggcgggaggcggcaaggagaaggctgccttagaggtgaggggaattggggcatgatcatgggccgcgatgttgcgtgaagcgcaaggatgtcaggaactgtgggggccgagatgtggtctagggatgggagtgggcgaagagaagtccatcggggcgggccggggggtgggactcggggagagccccggaagctgcgcggaacacccatcctcct

SEQ ID NO: 3311 - DNA, 861 bp, Artificial sequence
  DNA replication origin
tccgcagccactggcccgggtgctaagtcccccattgcccggggccagcagggctggccggctgctccgagtgcggggcccaccaagcccacgcccacccggaactccagctggcccgcaagcgccgcacgcagccccggttcccgctcgtgcctctccctccacacctccctgcaagctgagggagtgggctccagccttggccagcccagaaaggggctcccacagtgcaggggggggtgctgaagggctcctcgaattccattaaagtgggagcccaggcaggggaggtgccgagagcaagcgagggctctgaggactgccagcatgctgtcacctctcaatctgaattgttctaattaagatcacatactaggaatagggtgatttctccaagtttagaagaattgatttattttctgataaagatggtgcttggcaacattttttcctcaaataaccagtgagtatttattgattgaccagttctgtgcttgtacaaggcattggaaaatacaagagaagtttagggagtcattatgtggttggagagaagattttgaatacaggaagcaattagagcataaagcagtaatgatctcattaattggtgttatgtacaacatagatctgatgagaggtcagagatggttaaaggttctggaatagtctggaaagttgtcatgaagcaggtgggacctaggcttgagaggtagatttgtgtggcagaggagagaacagcaagtgcaggtgagaggaagcaggaatatttggtgatgagagggtgtaggggctagtgtgggatccagctttattaaagggaaggttcctaacacattcatctaactgatttccattgca

SEQ ID NO: 3312 - DNA, 1293 bp, Artificial sequence
  DNA replication origin
gcaggaaggacgacccaagagaaccgccgacggaccgaagggggtagggtccgtgccaggcgacgtctgcgcgagtgtggatttgggggcgtcttcacctggagcagctgcaggattccgcagaggagcgcctctgtacagtacagctcagagggcgcatttctgcggggggccctaggccttcagccctgcctctttcccttgccaatcactttccccaacaccaggttcacccccgacccgcaccctcacgcgccccgggagggagcaggtcggagggaaaagcttgggaactggctcgatggggtctgagtagggcccctccgtctaggcgtccgctcgccactctcccgctgatggtgccgacaggagggccgtgctccttggcccttcctctctccggcttgtcgccgcccgccgccccctctagagcggagctcgacgcgggtccggaatgccccgcgcgcgctcccgcagccgcgctttgtcccgtgggtgaccgccggatgcctccaagggctggcagagctgtccgcgtgcgactttcgctctggttggatttccccttccttcgcagccctgccgggtagggtattcctctttcctggaagactggtggggggtggaggggagttgggggggctccattgagagaacgctccctcgccccaagggttgggggagcttttcttccttagccaaccctccgttccccagagctgctctagtaattactgtggagataccagttcccctaaatgccctaagtggaacctggtatggatggttcactcatgggacccaaagagagatctcctttctcccggcactttcccccgtgaaggcttgcttcaagccttcatggacccttgtctggtttaacgctctgcggtcaccatcttgaaagtcttactttttgaacaaagggccaggcgttttctttttgcactggttcccacaaattatgtagttgttcctgacaggcacctttgcccatggaaacaggcccatcttatggataaggaggactcctggatctctgaacctgggcctgggccctggccctctctagccccagtattgttaactgtacattgggctggaggtggggagacaggtggttgttaacgtggcactctccagctccgtcattatgactcagtgatcacagctttcctcttaaaacacaggttcggtttggtccgtctagcggtggtcattttttagaagaatagtctaaattcttctggacctggtctctcccttctcttcccaggccagagatgggtctcc

SEQ ID NO: 3313 - DNA, 1148 bp, Artificial sequence
  DNA replication origin
agtgtaatggcccctctctccctgccccagggccctcccagtccttcgcccccagactgcggtctccccgcacgcccctcccctgccttcacacttactagtgcagcgcagcgcctgccgcagcacctctcgtccgcacaggtcacaccagccggggccgcccggcagcaccaactcggcgaagcagtgcccctcgcctcgctccgccgggactctgggatcctgcggctgctcgaagatgctccgcacgtcgcggggtcggggcgctccaggccgccgccgcagtctctgctgcagaccaggccggagcgggcgagcgggtcgggaggcccggggcgggggctccaggttcccccgggcagccctccgggcgctgcgcccctcgcgcgccccgggcgcagtggagaggggcgccgggacacagaggcgcgaggaccggtcggggggcggcggcggtagctcggggccgctcaggctctgtagatagcgcggcggctcggggtccaatagtagcgggtacgggcgctgcccgatggccggggacgccatggccatgcccggctagtggcggcagctttggcagcggcggctttggcgactgcgctactcccgagccagccccgagagaaggggccgccccacaccagcgcgcctttaaaggaaccgcagcctgctgggcggggcgggggcggggagagtcggagtggcaggaaggacgacccaagagaaccgccgacggaccgaagggggtagggtccgtgccaggcgacgtctgcgcgagtgtggatttgggggcgtcttcacctggagcagctgcaggattccgcagaggagcgcctctgtacagtacagctcagagggcgcatttctgcggggggccctaggccttcagccctgcctctttcccttgccaatcactttccccaacaccaggttcacccccgacccgcaccctcacgcgccccgggagggagcaggtcggagggaaaagcttgggaactggctcgatggggtctgagtagggcccctccgtctaggcgtccgctcgccactctcccgctgatggtgccgacaggagggccgtgctccttggcccttcctctctccggcttgtcgccgcccgccgccccctctagagcggagctcga

SEQ ID NO: 3314 - DNA, 1324 bp, Artificial sequence
  DNA replication origin
ttccacttgacccaggcttagtgtctgagttctatttccctgcagccagctgcagcgggcagcacattgaacagcctccgctgcagactgcaggcagaaaaagggtagggttttcctgatgtggaaatcactgctgctgtccaacgctgcagttggatgggagacgtgaggctgctgccataggggaagggcctttgctgaaagatgcaaaccacaatccatttccagagatgcttgttagaggctgtgccattgtctgtgctttgggcttcagatatttgaaatatccatgtaaacacatgaacacatggctgtggatatcctctgataaacacgcaagagcaaatgccggggtgggggtggagggtggacacctattaaaggcatacacacccctaactgtaggaggagaaaaataataaacccccaaggagactgaagattggctcagaaaatctatacactgggggcccagtgttttctggctttgagaagcgcctggctcaggaggtgactggaggggcctgagggctgtggagaggaagggaccctgtcaggagctgagtaatgttagagcatgacgactagggcaggaacccaggaggaggaaggggaggaggcagggcacagccaaacattggagcagagtccaaaggtttgaggggccagaggtgaaaggcaggagggggcacgggttcagggtgacttcaggctctcttcagcctcacagcctgcctttatccaaaatctaacaaggtctcctccctgtcccaatacgtccccctggaggagaggtctgagcctgtaccatgggcggacaaacaagcgttttgtcagtaaccctaataagcaagggtcaaacggtcatctcaacagcagtctcacaacccactcccaagaactcacaacaaaaccatgagggtgcacagggagatgacagaggccgccgaggccatcacccacccaccccccacaacctgtgtgcgagtgtgtgtgtgtgtgtgtgtgtgtgtgtgtgtggagggccaaggcacgcacctgtcaggagacaggtatctgttaactaccgcataaccatacctaggtagtgggcaggcactaaaggataccgggcagggaactaaggagcggactgtccccaggggttgttatctccttatgttcggggctcccctggagccaaagagtgtaatggcccctctctccctgccccagggccctcccagtccttcgcccccagactgcggtctccccgcacgcccctcccctgccttcacacttactagtgcagcgcagcgcctgccgcagcacctctcgtccgcac

SEQ ID NO: 3315 - DNA, 2312 bp, Artificial sequence
  DNA replication origin
ggccggggcggggaacggcaccggcgggctctggccctgggagttggacagcatggtgcccggggacgccggggcacaggcgggggtgcccgcggccgccccctcctccggctccgggccccctccccgccgccccccgacgggctgcgaagttcgctccgggctggagccggcttccccgacccggcccggctccaggctcggcgggtcgcggggctccgtgggtcccaccgcgcgccgctggctcccaccggcccggcgccctccctccctccccccgggggcctggcgctctggggaccgcggggcggcgggggcccggccggggggaagcggccgcgcgacaatgtacccagccccgggccggcggccgcgtcacagcctcgtctgcgtccggggccggtccttaaaggggaggggcggggggcggggcctggggaggcgtggcgtggggggaggggcgggccttaaaggggaggacgcgcggtgccgggagctgggaggatcgcggagtaggctgggggctgctgcctcgcggacagtgagaggggacagggagaggggacgaagaaatgctagttcttaaccaaggctatgcaaagggagaggggaggcgtgtcaaaggagctgcataattcagatggaaaatccactcctctccaattgtctgggcttcttagcggcagcgaattgggagaggggtgtatttccaaggacagggatggcttgtaggtatccagctagatgagacctcgtgggggtgggggggagctggaatcacaggggtcattcatcccaggaaaaggtgtgagccaaaggcgggcgtattaaatatttccctaacttcaacattttcctctgaggttttttgcatctcttttctcattaatttattgtttttcagtaaagacgtattattgtgtaaccaggagcactttagtaattatacctttgaacatgttttcctgtaaataaactaaaaaggatacagggtgggaagaggatgggttgagattggggccacctgaattcccgccatcctttgccacggattggctgtgtgaggctgagcaagccttgcacctctctctccgtgggaagaacagcgagaccttttcaaaggttgtgggcagagtcaaaggagataatgaaactgaaggggaggccctggggaatggcttctgatttccgatgtggaaaaattaatccgtaagaagtgggttagccccgtgtatctcaggaaaagcccagggatctagctggaccctgcatagaagctgccaggaggcctccacacacattctgatggggttcgagatgaccaagtacattcctgccgacctcctcccacctctgactggcagaacatttgagaaatggcaagcaacccagacaggtgaacacaaaacctcagcttaagtcttggtaaggccagttagagaatgaggcttgacctatggccacacatgccccctaataggtcccccaaaactccagagagaagacaacacccccagaagtggccactggggatagaacttaggtaggtaagggacaagtgcaaatgtctcttccctcattcacctttcccagaagatgcttgtggaggcaggaatgagggggaggagtgaggggtgggagttaccctcccaacactgtcctttcctggggcaggtagggctctgtggaccaaggagagacatgtttcccccgacacaaacatatgctcttctcaagcagcatctgcttagctccatgtacaaggtgccgtgctcagccctgcagcggtggatggtgttatctgatggggaagaagacagataacagtggcacagagaggatggcagacaccttcctaggagcccgaagcacagggattctcttctgtctacagcagccagcagcttcctcccgagtctacaggatagatacggttagacagctccccagatgcccctgactcttcaaagacaaagacactatctaaggccacggggataggaaaacatcttcactccactacttctatagcactgctatcacctccccgaagcacacacaggagatgcccaaggacaagaggaacgcaggggtgggaaggtggaaggctccaactgctcaggctctggtggggctgctctggagtctgagttggtcttttttttctttgcagagtcactggaagctccctatggcttggtgttgaggtatcacctgcttttctccacaaagctagaaagagaataacttccttctgccttttcagaggcagcaaggcacagtggtaagatgacaggatctagagacaaatg

SEQ ID NO: 3316 - DNA, 734 bp, Artificial sequence
  DNA replication origin
cagagcccgccggtgccgttccccgccccggccccgccgccgcagccccccacccctgccctgccgcaccccccggcgcagccgccgccgccgcccccgcagcagttcccgcagttccacgtcaagtccggcctgcagatcaagaagaacgccatcatcgatgactacaaggtcaccagccaggtcctggggctgggcatcaacggcaaagttttgcagatcttcaacaagaggacccaggagaaattcgccctcaaagtaggtctggggcccggggaggggaggcggggccggtcccgggccctggagctccacggcgtcgggtgcccgtcccggcctgggtcgcggcgcggggcggaggggtggccgcggcggggcggggcggggcggccgggccggcggtgccgagtgcggcgcgggcggcgggtcccagcgccctcgcctccctgaccgcttccggccgctcccgggcgggagccctgggacccgctcctggggactcaggggaccctgccattttggggtttgagcgggatccagccgagtcagaacggttggcttcgggacttctgctaatttcactccatctcaaggaagtgattttggggttggtggttccccgtcctctcctccctcctttttctctctctgcgggcacaaaaggcccattactcattgagccggttggtcggttggtttggagaagtcggatcgcagaggtttatttagcctcg

SEQ ID NO: 3317 - DNA, 773 bp, Artificial sequence
  DNA replication origin
attttggggtttgagcgggatccagccgagtcagaacggttggcttcgggacttctgctaatttcactccatctcaaggaagtgattttggggttggtggttccccgtcctctcctccctcctttttctctctctgcgggcacaaaaggcccattactcattgagccggttggtcggttggtttggagaagtcggatcgcagaggtttatttagcctcgctccttatttgggagccggaatgtgtgatttcacttccccgagcctcgcgagggcagccgggccgccttggggcgcgccgggcaggaggtgtgcggcgggagggtcctgggtgtcccccggctgcgggggcgggattatttggatcccggagctggccccctcagctggccccctcccacgcccgcgcggggcggctccggggagaggccggcggtgtccgcggcccggctgatcattgtgaacagagtctgtaacccgcggccgggcccgtgctgattccgcctcctagagagggccacttgctgtcctggactcgcgccgtgatgggcagtctgaggaaacattatccttgagccgggggagcccatcccttttctttctttaaggggtgtggtggtggggagaataaggattcaagtgagaatatcgacttcagaagttaaacacaatggactgggaggtctcatgagatgggtgggtccgcagtgaagtgtgagccggtcttgcagggtcaccaacaaggttttcctctcacaggggtttcaggtcaaac

SEQ ID NO: 3318 - DNA, 1656 bp, Artificial sequence
  DNA replication origin
aggatccgggctatactcacactgtttctggggggatgtgcctgacagacccgggctccacagtggttgtgtcagccactccctgctcgcccccacacagcagatttgtcacatgttctctaaaacaacaacatccgtggtggaagttgaatgtgaggctcagagcaggtgcagaggaagtgtgtgggggggtgggcagcctgccctgccccatccctatctgaatctcccctggcccggagcagctgtggttgtgatgtcctccagccctgaaatgggccaagatggcagagggcagcctcgggcctctccttagtgccagagctcccagctgggattagccccacccttccctacttagcgggctcttcccaatgccccagagctgtcacacagctgggctccaccatgcactgggcttgaggcctggggctgtcttggagagacagagaaggggaatatgagtgaatgaacgtgatgtgtgtgggggcaagagtgtgtgagtatgaatatatgtatgaatgaatgtgtgagtgtatgatgtgtgttgtatgactctgatgtttgagcgtgtgaagtatgtgtggtgtgtgtctgaggtgtgtgtaagggtgcaatgtatgttgtgtgatacgtgtgtggtgtgtgtgtggtgtgtggctacagtgtgagtgtgtgtagtgagtgtgaacatgtagtgtgtggctatgagagtgtgagtgtgttatgtgtaatgtgtctgtgtgaatgtatgatgtgtggctatgagtgtgtatgtgctgtgtggtatgtgtgtgaatgtaggatgcgtggctgtgtgatgtatgtgtgtgtgtgaatgtgtggtgtgcggctatgtgtgtgtgctatgtgttgtgtgtggtatgtagttatgagtgtgtgtcactgcgtggtgtgtggctatgagtgtgtgtgtgcacactctatgctgtgtctagtgtgtgagtggttgagtgtgtgagtgtgtggtgtgtggttatgagtgtgtgtgttctctgtctagtgtgtgtggtgtgtggttatgtgtgtgtgattgtgtgtgtggtgtgtgtccatgagtgtgtgtgtgctctgtagagtgtgtgagtgtgtggcgtgtggctatgagtgtgtgtgtgcactgtggagtgtgtgtgtggtgtgtggctatgagtgtgtgtgtgctctgtggagtgtgtgtgtggtgtgtggctatgagtgtgtgtgctctgtctagtgtgtgtggtgtgtggttatgtgtgtgtgattgtgtgtgtgatgtgtgtccatgagtgtgtgtgtgctctgtggagtgtgtgaatgtgtggtgtgtggctatgagtgtgtgtgaatgtgtggtgtgtggctatgtgtgtgtgctatgtgttgtgtgtggtatgtagttatgagtgtgtgtcactgcgtggtgtgtggctatgagtgtgtgtgtgcgcactctatgctctgtctagtgtgtgtgtggttgagtgtgtgtgtggtgtgtggttgtgtgtgtgtggtgtgcgtccatgagtgtgtgtgtgctctgtagagtgtgtgagtgtgtggtgtgtggttatgagtgtgtggtgtgtggttgagtgtgtgtgtgtggtgtgtggttgtgtgtgtgctctgtggagtgtgagtgtgtgt

SEQ ID NO: 3319 - DNA, 1151 bp, Artificial sequence
  DNA replication origin
gctccgcaaacccagccggggcctctttaaccctccacgccgacccctaaagccaagtcagctgggggccgacacagcaggagccccaaatgctggtgagcggcgagagccttaaaggcacaggacggcgggaaccacgaccgcgggccaagctccccacctgccaagtcgccggcccctgtgcgtgtctcagagaccgacttggacctcccacccagcccaggggcttccccggccgccgggcccctactcaccccacacggccggcaggcacaacagcaccagcagcagcagccggggcagctccccgaggaggggcagcgccgcgggcacgctcggccgcgcgacggtcatggcgcgccgggttagaacaaggacgcgccgccgggactccgccgagtcgcagctacgcccagcggccggagcgagttgcagtaagcagaagcctcgtggctccgcaataccagttaaatgagtgctttgggcggggtctgggctggggctctgcgtcaccaagggtgggacaaacaagacgggtggagtaggggtttgttgtggtcagaggtgcggtcagagggctccggcgtcatacgccccgggggccctagactcggggagagtggggaggggaaggaggaggagctcgctggcaacaccctctgggactcactctctccactgctgggtggggcctgcgatgacctgccttctagaaacctaaatatctcctcgctacgtaaacacaaacggggtgtaaacgggagagggggaggggtgctcaagtatcgcaggccttgctgcccgcacgtgagttcgtctaagcggagcatccccgcgcttgagtgctgccaaggggacctgcaggtgcggtggagttcgggggctgagactcaggcgctgagacgcggtgctctacccgcgtcttgggccctctactgggaggtctgtcaaaggccagcacgagggtggggaaataactaaggaggaagggcgtcatctcctagaacactctctaatgtgaaaacagagacctggggaaacaggttgaataacacagtagggagtgaacattgttcatgccttgttcgggtgggagtcattttcttcacccgggttctccttatttacgaaagacaccactttgggattac

SEQ ID NO: 3320 - DNA, 1000 bp, Artificial sequence
  DNA replication origin
ctgcagcactggatgctttgtgagttggggattgttgcgtcccatatctggacccagaagggacttccctgctcggctggctctcggtttctctgctttcctccggagaaataacagcgtcttccgcgccgcgcatggagcctcccggccgccgcgagtgtccctttccttcctggcgctttcctgggttgcttctggcggccatggtgttgctgctgtactccttctccggtaggaccccggggcgggttcgcgcgtccgcggcgagactagagctctcctcagtcgggcaagagtcgcggggcggggctcacagcaggccgtgcctgtttggggacagggttctctgaggggtgcagtgctcagatcccgggggtatgtggcggggaatgcggggaccacgcagagcccgaggtgaagcttgtttggtggcgtcgtgtgcgcggccagcatttacgcaggatctggctgcgtccctaaaaaaagcgtgaatcgtgttttcgggattgagccagtcggccaggggagcgcggactgggcgccctaggtgagggcttgttctggagtgcacaggtgcgtgggagtgttgctagggcccgtgctgtgtccgtggtgagagtttgccctgtgttcccttggtgccttggtgagtggggtgttcattagggcttggacagtacccgcggtaagggttgcagtgcgtctgctgtgccccatgtgctgggctgggcgagcaggggcctggccaggtgttgctgggagcgtgctgtgcgtaagtggcctgtgtgcagagttcactgtgggcaagacagctcaactgtttgctttgaatggagtgagcgcggactctggggctagggagggcatgttgagtgagagcaggctctcggtgcctggggttagagaggtggtaagggcgcgccatgctttttgtgccttctgtgaacagtctccgtgttacctgagctcctattagtttgtaaatggctgcttttttggg

SEQ ID NO: 3321 - DNA, 1405 bp, Artificial sequence
  DNA replication origin
cccctgccctgcttaactctctcatgtgacctcggtcacatctccctgccctgctctggctcccaaggcccaggagccactcctaccagagatcccaaatgagtcaccctgggaggtccttggagagaagaggaggtgctcagtgacaaatgtcactgctagcatcatccgcgggaaagcatgagactgaaaaatagtacccagtgaaaggagggagggggctgcggccaagttgtccctcatcctcataagcaattgtttgtccctctgccccacgctccagcagagggggtagagaagagaaaggggaggacggtttgtccgcattcagtggcagtggaggtgcatcttctctctcggtcgcaagaaggtggggtggggtggggcggggcggggcggggcggggcggggcggggcggggcggggcggggcgggacgggacgggacggggcgggacggggcggggcagggcggggggatcacgcgcctatagcgcaaagctgcggtatggagaaaagcctagaacccacagccgccatgatgacgcaaacaaaattaaaagggtcaagaactcaaggcccactgtttcacctaagaagaaaaggaagaagatgaaggggagaagagaagctctgatttgggtcaatatggaaaggggaggctgacgcaggctgcccaagagccagcctttagcttagtgacggtgatgcggatccgccatcttgaagcgccgcccggcagaggactctcaagacgccacagccccaccacggccacttctcccaaggtacaggtgcgcccgcattcactgaggtcggcctggcccacccctaccccaagaagcgaatcgcccttcattcaaggcaatgaccagcaagactatcacaaagagaaccacggtgaaaaatcccaaagggctttctgggccctgggaagatgtctgtcatctgggactagtgggaagaactcaaaaagtgaccctatttgccaagctcatctaataacacatacagctgttattttcttttcagactctaaaatgcaagggttcccagagccctgctgagttacctggtgtcgctcccatcctgatgcccgggcggtggccgccttctctgtccagccctccctgaaaatgaccccaggctaaggatcagctcagagccccgagctgtttttgtagctttcatgttgacagaacatcctggccactctgctgagagctccatctcccggctcccgatacactgagtcatcttccaaagaggaaaaaaaacaacaaagcagccgtcaccagggtccccattgccgtcgactgacgactcactggctgtcgtcacactctgctccgcggcccccgaattggtaacgaggggcttcagggtgcccagctcccctcccgtgg

SEQ ID NO: 3322 - DNA, 896 bp, Artificial sequence
  DNA replication origin
tgggagcaagaggttgtggggcgacggtggagggtttgatgggaccaaattctggaacattcgggactgcggcaccttacggcgggaccaagatttgggtctgcgcaggcggcgatgggtggtccgacgggcttcaggacttgatggcgtaacccccttcttcccccacgtatgtatttgctgggatcaggggcgctgtctctgtgtatgtgggtgctctgtctttctcaccttctttctcgatttttgctatttatttctctgagggagggttttttcccactttaatttcttttccctagtgtcagctgctcaagcctgaccagggtagaggtgagaggagtgaaccatcccctgcttcccacctgacctcccagcttttaccctatttccttctagtggacagacagactggttctccaagttgtttgggtgtcagcgtccatctgtctgtccgtgcaggtcttatgtggaaggtaagggagtgagaagtgccgaaaggaagacagagggacagttttttcccaggggttgccttattgaaaggtctggccctgggattctgaggctggtggggagccgagtggccagggtggggtgtgggctgggagaagtggggtaaagctggtaggtttgtcactgcgtagttgggaaaagtggggaatggtgacgcagtcactgttgcatctggttaggagctctatggggacaggtagtgaggctcctggggtctctgtggccagctgagaggggttaaggatgagctaagaagggaagctagcatttagagattaaatgtcatccttttggcgttggaaagttgtttaccttgcgctctctgtgtctccatgttggctcccttccagttcacatgtgatggccttccctgtactgct

SEQ ID NO: 3323 - DNA, 651 bp, Artificial sequence
  DNA replication origin
taggcccaactttttttgccttgtttgaccagccttggcactgccctccggctctccaggggaaaagctgcagttctgctcttgcaacacaaggagcagactggagaatttagatctgcgtcacagagctgagagagagagagagagagagagagagagagagagtgagagagcgagcgagcaagcaagctccgtcgataggtctgctagcaacagccgtgctgcagcagagagagagagagaaatcaagaaacaagtcatagcaacaccgggcaccaggttctgccagctcacttgctgagcgttcagagatctgtcagggccagaggcctctgggtagcctaggctaggagatgacacgcaaggtggcacgggcggttcccgtggggaggaggtggggtggtggtggggggcaggggtgggagcaagaggttgtggggcgacggtggagggtttgatgggaccaaattctggaacattcgggactgcggcaccttacggcgggaccaagatttgggtctgcgcaggcggcgatgggtggtccgacgggcttcaggacttgatggcgtaacccccttcttcccccacgtatgtatttgctgggatcaggggcgctgtctctgtgtatgtgggtgctctgtctttctcacc

SEQ ID NO: 3324 - DNA, 1507 bp, Artificial sequence
  DNA replication origin
agataggggctgcggagcaatcttcaggctcacagcccaagttcatagatggtgaattggccaggaatggtgggagatgggggctgtagggaaatagggtaatttccttaggaccccttccttccagctttgcaaccgtagaccaaaatttgggatctggcatttgtcaaatgtgcttaatttttttttctttccctttcggtttgttttgttttttagagaaacagcaagtgacagagcagaggaacggctggcccagccaatcctggagctgctgttgcagcacttgttccccaaacaagtgctcctacattctggtaggaggacagagaggagggggctactggtccacacccctcccctgccgaggaccccatggctgctcccctgcaggaaaggcagctaggctgccttaggccggatgggcagaggctgccatggcccagggtggtgacggttttgcggcccctccctgctgcccagagtgggaagaagagcgcagagcctggcaagtttctctctgtgtcctctgggctggaaggagcaggtatagacagggccgaggcagccagggcctggtgctgctttggcattggtggcaggagggctgaacctccagccccttgggtttggttccacccctggcctgtccctggcactcgacaactgctcctgtgtgcttattggtgccaccatgttatataacgcttatataatcttccagggcgagcactgtgtctccgctctcaggtcacgcagacacggtgtccgtgtgggaggcaggatctgtggaagcctgtgggtgaacctactcccccgatccccaacctggctccttctcctgatctcagccataggaggggggctgggagagccaggtccctctccacaccagctgtgtgggatgagaacacggttggctgggcagttttcctcaccttcctgccccactagtcccacttgccctgtctggtagagcagaagccatccttgtgctttgataccagctctttgttttgggggacccctggcatggcaggtggcatggcgagatgaaccccaaaatgttgcagtggaagaacacatggtacttagggttggataaagagagggagaaattagctctgcctttgaggagcaagggtaactagaaggatggtggtggcattataagagatttggagcaggcctggggctaggggatggtcagggaagggtgtacagggaagtagatcagacagcaaagataaacatggtgttcttttactgtactctccactgggctgtccctggttaccggggcaacagaagcagtgatgaaaatcatgcctttcgttcagtggaaaaatttggctcctcctcccggctcttccttctctaaatcgcctgtgacccattgagagggttatgcttccaaggatcagagagagaccccagcatgttttcatcatgctcccctttccccagtcttctttatcatctcccctcttcctgcatcccctgtctc

SEQ ID NO: 3325 - DNA, 1123 bp, Artificial sequence
  DNA replication origin
gcgcgggcaggctgagctcacacgcccgggaagcggccgccgcggagccggcgtccgcagcggctgcgcatctcgggcctgcagcggggcgcttggcgggcgggggccgggggagagcctgtttgcgcagtacccccggagggcggaaggccgccgaggtaagagccgggactcggccaggtgggagtgggcaccttgggccgggcctgcagggcggtccccgagcgtcccggggtagggtgggctccctggggacgatgcccagggccccggccgcgctccggtcgcgccccaccccggctgcagcgcggccttggggcgctgctggcctcgccgcgggggtgggagcggtcgcggcctggagcagctccgggcgggccccaggctctggggccagggccagctgcgcgcaggggtgagtgagcagcccccgggccctcaagtgagcccctgtccgctccccaccttgcatttctcctctccgcagtgggcgtggtgcccctttgctgcagagggggcgcccagagttgaggaaggctgcgggggagaacgcagagacaggtggttgagggggcgagggctggtgcgccaaggctcgaggtattaatgcgtatttctttttccccccttcttcagggggcgcggaggtccgtgtggaggaggaggcgggaaggccagaggcatagctcaggagagggcaggtgctgcgggagatcacttggctctgtctctgttcagctgcccccacccctgccaaattaataaagtgggtgtggtgatgacggtggaggagtttgattaagacctggcccaaactgcccagaactgccccaggccggccgcctagtcccgcgtgtatatccgggagccgcagactctgagcattctgtagagggagggggaatattacccgaaggagctacagccactgaggcagctccagagataggggctgcggagcaatcttcaggctcacagcccaagttcatagatggtgaattggccaggaatggtgggagatgggggctgtagggaaatagggtaatttccttaggaccccttccttccagctttgcaaccgtagaccaaaatttgggatctggcatttgtcaaatgtgcttaa

SEQ ID NO: 3326 - DNA, 1188 bp, Artificial sequence
  DNA replication origin
cccacccccgcggcgaggccagcagcgccccaaggccgcgctgcagccggggtggggcgcgaccggagcgcggccggggccctgggcatcgtccccagggagcccaccctaccccgggacgctcggggaccgccctgcaggcccggcccaaggtgcccactcccacctggccgagtcccggctcttacctcggcggccttccgccctccgggggtactgcgcaaacaggctctcccccggcccccgcccgccaagcgccccgctgcaggcccgagatgcgcagccgctgcggacgccggctccgcggcggccgcttcccgggcgtgtgagctcagcctgcccgcgcgcccgcgcttcccacgctcggcgtcccgcgcggcgccacccagcggccgcgtcgggcgctgcacgctcgtgtccgggaaaatctgcagcagccgggcctgccaactgattcggaaattcccagaatttgaccatgggcttgcggcggggcgggagacctgtcaggccgtgtggccgtcgctagactcggggcagagcagctcccacccaccctgtctctgaaggggactccagagtctttgcaagatattctgatttcccccctgttcctctgaccttgcctcgccatatttcttccagggcagtggagactgtggggatgctggtgactccttgtaaaatgggggtggagaatcgaggggtgggaaatgggtgggaagcgctcgaggctggcatctcaaggcctccatgggcccgtctagagatccgaggtgtgcactgagtcacttcccgagcttgttagaacacacatgcacagatgccccagcctacctgtaaattctaattcggaaatttcaactgctgtttttaaccttttcttgtacctacacccttctgagaattgcagaagagctatggaccctgtcttcaaaaaaagcacatgcatacagaaatataattttgcacaatatttcagggaattctgaaactcctcaaagctccgtggatcccagcttaatatctcactttgtgcagataccctaagcagaaagagcgagctggtgattacctgaatacgctgccatcttatctcatgctttttcctccttcagggatatctccactggacgcccaacctcacatttccgcctgtagaaattccacctgtcctttaaggccaac

SEQ ID NO: 3327 - DNA, 1336 bp, Artificial sequence
  DNA replication origin
ggggggagttgtggggctggggctccggcctggccggtgaagccccaggacccgtccgcttggggttaaggcaaggggtgcggcacgaggagcgcagggagccccgagtcccaggcgcagacccagctgcggacccgccgtacagccctggtgttgcaagcgtggaccgtgggcgtaaggccccggcgggaggcactcggcccggccgcggccgggtctgcagggtcctggcgcagcggatcccggcgcgccctggcccgcggcccgcagggttcagacggggccgagacagccaagcccggttcgctcgcgccaggcgctggagccaaggctgacgggcggttctgaatcatgtttggaggagcggcgcggcccccagggctccgctgagacgcgctgcagggctgtccgggccctccctcggcgacgcggccagcagcccgcgccgcgtcctcagcggcggcaaaaactaggagtcccggggctctgccgggcgccggcactggagggcaagagatgctggcttcccccggggctcatcaccccggggttccacagcacttacgtgggatggggaccccggagtagaccacggacggaaaggaacggtggtttcattctctgcaaaagaaatcctcgcgcgcacacgggtgccccgggccaggcagacctccagcagaggcgcccaggtggggcgtgcagagcttctgaaagtgggcacctactttaggaggctggcaagcacagagagcccagaatcacctgtgccgagccctcaagggggccttctcacagccctgatgtgcccccttactgcgattaaggctgtttgcgagtcctaaagagcttgcgttatgcagggcactttcaaccaaccattcctctatgtacagcaacctgtgaagctggcaggaccagtacctttattcgttttacaagtgagaaagcaaaggggtgggaaagccctagggttctgtgcccgactgcctagtcaggccctgccaaccaaagattgaagtccgttctttctctctcctgccaggaggcgaagaagtgtccaccctgtctattgagaggcctctactttaagaattaagccaggcagtcgctgctgtgtggaggggtgttgacagcaagtgacaaggaagcaagtctttatcgcaggaaaaattacttaagtggactccttagcagcctcctttccatttggaatgaagattagcacccctagccctagagctgtgattctcaaagtgtggtgcccagactagcagcagaagcatcacctgggaactagtaagaaatgcatcttaactgccccctcctaggcctcctg

SEQ ID NO: 3328 - DNA, 1625 bp, Artificial sequence
  DNA replication origin
cagcgggatggagaaacgtgacccagcggaggggctttcggctgcgaggtgcgagaggcgacccgaggggtgaaagcaaggcgagtgcggtcagcgcaccgggctgggcggcctcccagccggccggggaattcgttcccagctccagccgcatctcaccgcctctatcgcgcctttggggcctcagagggaggctgcatggcccggaggcctgaaatccgccatttgttccctcccggggcggcagagccacagctcactgaaggctgcagcctcggcagccggaagcgctggccgggcgcttggccagcgaccgcctcgggtcggcctcgggtctgcgcaggcgcaggctcgggaagccgggcgcggtggtgtttctgcggcccgcggctgccctctcgtggccgcaaggcgccatggcacggccgcttccacgcagcggaggtgcgctggccggaaggcggcgggtccggccagccagggagaccagccaagcgctgtgtttttccaggtccgcgcgggccaggggaaccctgcgtgtttgcttggtgggagtggtttactgggaaagtagacggaaggtaccctgcaaatcggcgtgcactgtattgtttgggagtcaacagcctggaaagtaaatatcaggtgagggcagtgctgggaaccaccgcctgccccctcccctggccttggccctgactttgagcggggcaccgcgggccaaacagctcggcggcccaggggagagggaggaggaggaggaggcaggcagcgggggaggtgtcaagactcagaaataggagccagctaggcccaacatacgcctgccaccccaggggctgcaaacagggaataccatcccttctgcccaccccacgaagacatcgtacaccccgacgagtcaccattccagaaaggctggctttctgcaagcgtgcgggggcggtgagagtggagggtggcggggttgctcggggcccacccaagcataactgtctgaagggcacacctcacaacggaaggtttaggcgagaggggtgaacccacactctggcacgagaatcatatgttctgttccacccagggagccgcactacatagagttctctttaaattcatcttcactggctgggtgtggctgagtcttctcctatctcctgattctcagttaactttttgcgtcccaccctgttcttgtctcaagcagtcgctttggaatgtgtttcctctcgtccggggtttgaagattagtcatgaaaaacatcactctgcccttgctgaagtgcatgttggctactcgatcattccacctgtgtgccccaagacggtctgctaaggagggctcccctcttttccatgccctctcagctccagactccatcccatccatcaacattatcctgtgcccccgagggaggagggcgggggagggtttctgtgcctggattattggtgagaggagagcaagtgcagaaatgaagctatgactcttgcagaagtcatgcattccgttcaaggatattcctttccgtagcctccacacattccctctggctgcaggcccctgggatttttctgtgtgaccccgtcacattgcatctgtatagattgtcaaagcacctcat

SEQ ID NO: 3329 - DNA, 1252 bp, Artificial sequence
  DNA replication origin
tgagcccacatccccagggatgcaggagccagccagcaccccagccgctcagccagagcagggcaggtgactggtgccagaggagacagttccgtgaggaccctcatggcagacactgagatctttgtgccctttctgaagttgattttttaaattttaaatttttttatttttaatttttgtgagaacacagtaggtgtatgtatttatgggctacatgagatgttttgatacaggcgtgcaatgtcaaataatcacatcatggacctttctgaagttgaaagagcacctctttgtcttcagtgaaacttgaaccagagcgagtcaactccaccctacaccccattccacatccccattcagggagtgaataaccaggagggtgctccacaggcaaaagctggagaagagagggacaggaagtgagatgggaggaggggaggtgggaggggaggggtaggaggaagcagtgaatttcaggagcagcaagggttaaaccaatccagaatggcagacagagagcatgaggtgtttaattataatactaaccccaagaagatctttttatctgccagctccctgtctctgactgtggggggtcagctggagatgagggaggggaggatgtgacaaaggtgttgagggaagctaattcgcctgggagagataaagggaatctgggcctcttatcagggagctgtcagattcccaggtcacaggcgcttgatagatagaatttgtaatcggtggaaggccgccaagcgcaaggggaaggcaggatgagaaagaaaagggacacaacaaagggaggcagtgggcaggggagggcgggagcagaaggctgacagtgacatgcccttcagagctgaagagtggggggtcgggaagatgccccgaggtctccatcacagggtgccaggactggccacccaggggtgttatttctgaagtgtgaaggggctaaatgtcttctgtgggatcagcacaagagagaaagtcatagactcctggccacagctagaggactttaacgatagggctgatgagatctgtgcccggaaagctgtgggctgatgaggtctgtgtccggaaagctgtgggcacttctccctagtggaccattggctaaagtaaggctcgtgcggaaatagagggccaccgcaggggttggccaggtgactgctcgatgagactctcggccttacaagagtagtaagagggcattagctctgcctctggagacacatggact

SEQ ID NO: 3330 - DNA, 954 bp, Artificial sequence
  DNA replication origin
actggagatcaggggaatgggaaaacatcatttgcgcgggttccataaggctcagggagagattcctaggcactgaatgggtctaagtgtttcatctcccggggctccctttgcggtgtatcgcccagcaggggtccagccccttagtttgagcaccacaggagtgctgggggttgaaatgggagtttgcttagggtcccagaggctccttatgaaccatttgagaatgtttccttccatgtgctctttcttgccccaccccacaagtgaggtagggatcctagaaaattctagccctttttatccatcccacaggtagtctctataatgccaatcatggtctagatgcccagagagtcaccagaaactaccattttagatccccgaaaaaagtccacctgtttggaatgacccttgccctagtgggagctacctactcaaactcagctctgctcaggagggatagaaataatggtggggaggaagttggataaaagatttggggctctaggtcagtaagggtctagaaatgagagccccatgaagtgggcaatggaaatctgaacaggtcccctgtaggaatcttagagtgacagtggcacaccagtagaaagtgcacaagggacatgaaggcagcatcagtttgaggggactgggactgccagtcatagcttgaggcagtcacttgggggcccatcagtttggaagaacccacagaaatttgggggcacattcatttccttccattcacgcgcacagtggacaaggcttatgagcggcaggccaagatgagtatcttggctggcctgggctggaggctttgagagcaggagtcaggtttagctctcccctctccccacacaatagcagtctccctcctttgctgggcttctttcccagatcttgaaacttcactcttccctctgggttggctttggattctggggccttcta

SEQ ID NO: 3331 - DNA, 882 bp, Artificial sequence
  DNA replication origin
cggcggctgggccgggcgctcggagtcggcagcgccctccgccctctccccacaggcgcgcacacccgtggcggcttctcccgcgcccgcctctttggggtcccggccccagaagacccggcttggccgcggcgggcgagtccccgcgtgggctcggccactttcgcgggctggagcgcggcgtgcgcgcgatcgcaggctcactggagccgctgcctcccgccgagggcttcccggccggcagcccgccggcttcccgaatgcgggctgagggcggcagcagcgctccgcggcgcgcctccaccgcgcacctgccggcgctctgcggctttggggagctcggggcggcaaggctgtcctgagagctggagcccaaagagggcctcggtggcaccagcgagacagcccaaagccacactggccagcgatcgatttgggggcgttcactccagtgccggggtccctggtggccgccggctctcccttccgatcggggactggagatcaggggaatgggaaaacatcatttgcgcgggttccataaggctcagggagagattcctaggcactgaatgggtctaagtgtttcatctcccggggctccctttgcggtgtatcgcccagcaggggtccagccccttagtttgagcaccacaggagtgctgggggttgaaatgggagtttgcttagggtcccagaggctccttatgaaccatttgagaatgtttccttccatgtgctctttcttgccccaccccacaagtgaggtagggatcctagaaaattctagccctttttatccatcccacaggtagtctctataatgccaatcatggtctagatgcccagagagtcaccagaaactaccattttagatccccg

SEQ ID NO: 3332 - DNA, 766 bp, Artificial sequence
  DNA replication origin
caacgctagaccttctattcccccgggggccaagccagctgggctcgcaaggcccgactcgaattcccgggccctggcagcattttccttgcccccttggctacttaaggtggccgatgggtccgggctgagctgggcgcaggacaggcagccgagcggcctccggatgccaaacctgcttctcctttgttgacagcttgcggaggaggaagtccgcgcgggcgggggagggggcagggtgctggcggtggcgggcggtgccagcagcgggcgcggccccagcccgggcggacgcggccggcggggagggggttaacgcgcgcggcctctatgataatgagctgcatggtgaaatagggaggccggcgctcagggctcctccgccgccgccgccgccgccgccgccgccgccaccgcgggagccagagctgccgggaggagcggcatccgcgccagactggagcgggagggcggcggagggcagttgctgggaatttttcagccgagagggcgagcgatccggagagagaccccgagagcttgggagcggtagggcgtgcgagcgccgcagccagcggagcaaacctcgaaatagatctggaaagccaggctcccggaggaaatgggactgtgaacgaaccggagagcaagaagggaaggaagcgccgggattgctgatgtcagaggagcccggaaagtcgcgctggaaaaatctgaagacagccggggctctgcttcttcctcaggagagacaccgccggccgcc

SEQ ID NO: 3333 - DNA, 708 bp, Artificial sequence
  DNA replication origin
cggatcgctcgccctctcggctgaaaaattcccagcaactgccctccgccgccctcccgctccagtctggcgcggatgccgctcctcccggcagctctggctcccgcggtggcggcggcggcggcggcggcggcggcggcggaggagccctgagcgccggcctccctatttcaccatgcagctcattatcatagaggccgcgcgcgttaaccccctccccgccggccgcgtccgcccgggctggggccgcgcccgctgctggcaccgcccgccaccgccagcaccctgccccctcccccgcccgcgcggacttcctcctccgcaagctgtcaacaaaggagaagcaggtttggcatccggaggccgctcggctgcctgtcctgcgcccagctcagcccggacccatcggccaccttaagtagccaagggggcaaggaaaatgctgccagggcccgggaattcgagtcgggccttgcgagcccagctggcttggcccccgggggaatagaaggtctagcgttggggttaggggggagctcagaacacaggaagagtgggtgagggcagtagggacagggaatcccccccattcgcatcacctgtcaccgcacacatcctgcacacctccctcttcatctgtaatttgagtgaggggtgagtggggaggaacggggcttgtctggtagggttgagactagagtcttggaa

SEQ ID NO: 3334 - DNA, 1234 bp, Artificial sequence
  DNA replication origin
attggtcatcatggcccgttctcaatgagctgttgggcacacctcccagacggggtggtggctgggcagaggggctcctcacttcccagtaggggcggccgggcagaggcgcccctcacctcccggacgaggcggctgaccgggcggggggctgacccccccacctccctcccggacggggcgactggccgggcgggggggctgaccccccacctccctcccggacggggcagctggccgggcagaggggctcctcactttccagtaggggcggccgggcagaggcgcccctcacctcccggaagaggcagctggccgggcggagggctgactcccccacctccctcccggacggggcggctggccgggcggggggctgacccccccacctccctcccggacggggcggctggcctggtgggggctgaccccccacctccctcccggacgggtcggctgccgggcggagaggctcctcacttcccagacggggtggctgccaggcggaggggctcctcacttctcagacggggcggctgccgggcggagggtctcctcccttctcagatggggcggctgggcagagacgctcctcacctcccagatggggtcgcggccgggcagaggcgctcctcacatcccagacggggcggcggggcaaaggcgctccccacatctcagacgatgggcggccgggcagagacgctcctcacttcctagatgggatggcggccgggcagagacgctcctcactttccagactgggcagccaggcagaggggctactcacatcccagacgatgggcggccaggcagagacgctcctcacttcctagacggggtggcggccgggcagaggctgcactctgggcactttgggaggccaaggcaggcggctgggaggtggaggttgtagtgagccgagatcacgccactgcactccagcctgggcaccattgagcactgagtgaaccagacaccgtctgcaatcccggcacctccggaggccgaggctggcggatcactcgctgttaggagctggagaccagcccggccaacacagcgaaaccccgtctccaccaaaaaaatacgaaaaccagtcaggcgtggcggcgcgcgcctgcaattgcaggcactccgcaggctgaggcaggagaatcaggcagggaggttgcagtgagccgagatggcagcagtacagtccagcttcggctgggcatcagagggagaccat

SEQ ID NO: 3335 - DNA, 925 bp, Artificial sequence
  DNA replication origin
gtgaggagcccctccgcctggcagccaccccgtctgggaagtgaggagcctctccgcccggcagccgacccgtccgggagggaggtggggggtcagcccccaccaggccagccgccccgtccgggagggaggtgggggggtcagccccccgcccggccagccgccccgtccgggagggaggtgggggagtcagccctccgcccggccagctgcctcttccgggaggtgaggggcgcctctgcccggccgcccctactggaaagtgaggagcccctctgcccggccagctgccccgtccgggagggaggtggggggtcagcccccccgcccggccagtcgccccgtccgggagggaggtgggggggtcagccccccgcccggtcagccgcctcgtccgggaggtgaggggcgcctctgcccggccgcccctactgggaagtgaggagcccctctgcccagccaccaccccgtctgggaggtgtgcccaacagctcattgagaacgggccatgatgaccaatggtggttttgtggaatagaaagcggggaaaggtggggaaaagattgagaaatcggatggttgccgtgtctgtgtggaaagaagtagacatgggagacttttcattttgttctgtactaagaaaaattcttctgccttgggatcctgttgatctgtgaccttaccccgcaaccctgtgctctctgaaacatgtgctgtgcccactcagggttaaatggattaagggcagtgcaagatgtgtttgttaaacagatgcttgaaggcagcatgctagttaagagtcatcaccactccctaatctcaagtacccagggacacaaacactgcggaaggcctcagggtcctctgcctaggaaaaccagagacctttgttcacttgtttatctgctgaccttccctccactat

SEQ ID NO: 3336 - DNA, 1536 bp, Artificial sequence
  DNA replication origin
accacccggcccggcccggcccctgcctgcgcctctccgcgccgccctgcgccccgcccgcgaggccgggccgagcagccaggtgcggcgggtaggggatgccgtgggcggggcccaacggagcggacggaagcacggggcgcggggctggacccccggacaccccgtcccgcgcccccaccccctgtaggcgccgcgcagcacctacctgcgccctcccggaccccgcgcgctcggcgccggtgggggcttctcaggtgaccgcggggccggggtcgcgggctgggccctcccggctgacagcagcgcccgtgccccgcgccggattgggggccgaggccggggccagggttggccggagcgcggaaggttggggaggagaggcaggccgcccagcctacgggtacccggttccagcgcgcgcgggaggcttgcagaggcggccgaaggcctagtgacaggcgcgcggcgcagaccccggaagcccacttgtcagaattaccggtcagctgggccggcgccgccggggtctggggtggtcccacgagtctgcacgttgctccgggacccaggggctgcgcccagaaaagtcatttttcttctctgggagggtgaccatttatagcattgatttcccagatttagtaacatggcaaaagttgctggtctaattgaagcaaacggagaactcaaggtcttcatagaccagaaccttagtcccggaaaaggcattggtgtccctcatagccgttcacccctccatcgtcagcccgctcgggaaacagctcttgccgaaaacctttggacagtccaatgtcaacgttgtcccgcaagtggtaaccggtacgcctcagagaccggcagcgtcaaacaccctcgtgataggtagcccacacaccgccagcactcactttgcctctcagaaccagccttccgactcctcaccttggtctgccgggaagtgcaacaggaaaggagagaagaatggcaaggcctgtggcatttctccaggaaggtctgagacaaggtgcagtggaaagggaccacttcctatcacgaggtggcggacgagctggcagaggaattcagtgctgccggcaaccacatcttaccaaacgagtcagcttatgaccagagcaacatcgatggcgcgtctactatgccttaaacgtgctgatggccatgaacatctccaaggagaagaaggagatcaagtgagttggtctgcccaccaactcggctcaggaatgtcagaacttagaggtggaaagacagaggaaacttgacagaataaaacagaaaatctcaatttcagaaacttattcgacagcaaattgccttcaagaacctggtgaagagagaaaccagcacgcggagcagcaggccagccggccaacgacgcccagctggctcatccacctgcccttcatcatcgttaacaccagcaagaccgtcatcgactgcagcagcatctccaacgacaaattcgagtatctgtttaattttgacaacacatctgaaatctacaatgacata

SEQ ID NO: 3337 - DNA, 1506 bp, Artificial sequence
  DNA replication origin
agagcctaaacgctatctgatttgggataaagaaaaaggagcattaaccttgactatgcctttggctccagccacctttttaagagtaaattgctgggcaggtgggggagggctagtcatggaacgaaactgtaagccggaccaggtgtgaggaggggaggtgataaaaagattatagggtggaggagcagaggctgaggaagaattgggacctagctcggcctggcgaggagcaggctggggaggaagggagaggtcagatgggtctgtagaaaaggaagattagaaagactcagcgacgcttggggttggtactgaggggacaggcgggagggaaagaaggaagatttgggacgagttgcactgggcacagagactaggaagggactgatgtgtaaaagaatgcctggacgtcaggcacctcagaccgtttgcctattttacgacaagaattatttagattttgcaggatggaaaaattcaaagtgccattttctggctgtttggaactactgtcgagtttgtattggggtcaagcggcattgcagaagaaaataaggcatttaggttttaggtcaggtgtgagttgaagaggttttaagtttttgagaacacaggctaagggagaagaaggaggaatggaaggtggaagcttacccatagtgaaggaggcaagcccagagaaaagagcagagacacagagaaggggtggggggttcttgccctccaggaaagcagagaaggggttggggcatggaaataagggattggggcacagagataagaggtcagggtgcagaaataagggataagagattggggcacagagataagaggttggggtgtggaaataagcgattggggggttcttgccccccaggaaagtgggacttgccgctcagggtgaaggagaaggggttgaggggtacttgcccctgccccaggaaagcgggacttgccactaagggtgaaggagaaggggttgagggatacttgcccctgccccaggaaagcaggacttgccactaagggtgaaggagaaggggttgaggggtacttgcccctcccccaggaaagcagagaaggggtagagacaaggagagaaggggttgaggggtacttgccccttccccagaaaagcaggacttgccactaagggtgaaggaccaaggcaggcatccctgcattgtcggacacccttgaaacgtgggtgtataatcagagaggtgtccctgcaatgattaaacaccaagggaaggctgccttcccagtccctgaccggtgccggagttttggatccacggataaaatgcgtctcctttgtctctcccagaaaatgaaaggaattgaaattaagagaagggagagattgaagagtggaaaggagaaagtggttgagggacagtgagagaggttggagaagagagtaagaagaggccacttacctgatttaaaattggtgagatgttccttgggctggtcggtctgaggacctgaggtcgtagg

SEQ ID NO: 3338 - DNA, 2186 bp, Artificial sequence
  DNA replication origin
gagaaaagataggaaaaccggtcactgccctttctctggaaaacttgctctcattgatggctcctccgccccctcccctacacagatacaccctacacaaaactccaggctggaagaacaaaacccctacctgggcaaaaggggcaagtctacaaagggaggggacaaaaaagtggcagggaagctgtagctactaagctgaaatactgaaaaaccgagaaacagattggctcttcatgccggccttgctcccctctcgcccttgagattagcatctttcttggaatgtcgaaaataccattagacagccccagcttatgaataaatagaatgtgactttctgggaagctcccttacaccccctgccgccctcactctgctttaatatctctccgtttcttgctttcttaaagaagttctcatcttgagtctagtatgtacgtgtgcatgtggaaatgtatgtatgcaggtggaggtgtgtgtgtggagatggaagtgtgtatgtccagatggaattgtgcgtgtgcatgtggaggtgtgtgtgtgcaggtggaggtgtgtgtgtgcatgtggaggtgtgtgtgtgcaggtggaggtatgtgtgtgcatgtggaggtgtgtgtgtgcatgtggaagtgtgcgtgtgcatgtgaaagtatgtgtgtgcaggtggaagtgtgcgtgtgcaggtggaggtgtgtgtgtccaggtagaatgtgtgtgcatgtggaggtgtatctgtgcatgtggaggtgtgtgtgcagctggaagttgtgtgcaggtggaggtgcacatgtgcatgtgaaggtgtgtgtgtgcatatggaggtgtgtgtgtgcatgtggaggtgtgtgtgtgcaggtggaggtgtgcgtgtgcaggtggaggtgtgcgtgtgcaggtggaggtgtgcgtgtgcctatggaggtgtgtgtgtgtgcatatggaggtgtgtgtgtgcaggtggaggtgtgtgtctatatagaagtgtgtgtgtgcatgtgaaagtgtgtgtgtgccatgtggaggtgtgcgtgtgcaggtgaaggtgtgcgtgtgcaggtgaaggtgtgcgtgtgcaggtggaggtgtgcgtgtgcatgtggaggggtgcgtgtgcatgtggaggtgtgtgtgtgcaggtggaggtgtgcgtgtgcatgtggatgtgtgtgtgtgctcaggtggaagtgtgcgtgtgcatgtggaggtgtgtgtgcaggtggaggtgtgtgtgtgcaggtggaagtgtgcatgcatgtggaagtgtgcgtgtgcatatggatgtgtgtgcatgtgaaggttgtgtgcatgtggaggtgtgcgtgcgcatgtggaggtgtgcgtgttcatgtgaaggtgtgtgtgtgcatgtgaaggtatgtgtgtgcaggtggaggtgtgtgtccctacggaggtgtgcatctgcatgtgaaggtgtgcgtgtgcatgtgaaggtgtgtgtgtgcatgtggaggtgtatctgtgcatgtggaggtgtgcgtgtgcagctggaggtgtgtgtgcaggtggaagtgtgcatgtgcatgtgaaggtatgcatgtgcaggtggaggtgtgtgcatgtggaggtgtgtgtgcatgtgaaggtgtgcgtgtgcatatggaggtgtgcgtgtgcatgtgaaggtgtgtgtgaaggtgtgtgtgtgcaggtggaggtacgtgtatgcaggtggaggtgtatgtgtgcagtggaagtgtacgtgtgcatgtggaggtgtgtgtgcgcatgtggtgtgcgtgtgcatatggaggtgtgcgtgtgcatgtgaaggtgtgcatgtgaaggtgtgtgttcaggtggaggtacgtgtgtgcaggtggaggtgtatgtgtgcaggtggaagtgtacgtgtgcatgtggaggtgtgtgcgcgcatgtgaaggtgtgtgtgtatatggaggtgtgcgtgtgcatatgcaggtgtgcgtgtgcatgtgaaggtgtgtgtgtgcaggtggaggtacgtgtgtgcaggtggaagtgtacgtgtgcatgtggaggtgtgtgcgcgcatgtgaaggtgtgtgtgtatatggaggtgtgcgtgtgcatatgcaggtgtgcgtgtgcatgtgaaggtgtgtgtgtgcaggtggaggtacgtgtgtgcaggtggaagtgtatgtgtgcaggtggaagtgtacgtgtgcatgtggagg

SEQ ID NO: 3339 - DNA, 1301 bp, Artificial sequence
  DNA replication origin
gcgcccagcccggctcttaccgcggggtcagcggggaggcggcggccgcagcgcttgagctgctgctggtccgctctgggctcggcgccagcccggccgccggtgcacactcgcgggtcccggcccggccgcccgctcggcggtgactgcgggtgcgcggcgggcaagggtcccggcaggtcccgccgccgcgactggggcgctgcgccgccgtcgctgcagacggttatggtaatgagcggctctgtctagcgaggagcgtgtgaaacccgtcaatcctgtttgccatttccccgtggatttccgaggagaggttctgcaggatgcccccagggtgagagagggaacatgacaagcgcgcccgctctccctccctccctctgctcaggccgccgccgccgctcctcaggctgcacacggggcgcctttcccgcacccccaccccagcccgccccctgcctccttccctgcttcccgccctccctcctccttttcctcccctcccctcccggtgcccggggacacgcgggcccagctccagcccgcagcccagaccccacgcgctctcgggctcccgccctagccctgggggcttggctccagccgaataatgtattcactctggaaccttccgagatatcttgtctttttaaatttggtttagttttgttgttgttgtgtgtgcgtgtgattaaaaaaaaaatctgtgcctttcccaccctttgcaaaagactttcttctcctttgccacagcaaacggagatgagaaacagatgtctttgcaggaccaaacagttattctccctcgccgcccgcccccgcccgtttccctcctgagctgcgtacgtattaaaaaaaaaaaaaaaagcaaccttggtcctgctgcaacttgaattggcaaccctttctgggtggggagcctccagggaaaacctccaggaaataaaaagtaatacaagagattgtccttgctcaagagaatgtaatttaagccttggaatcagaatattttgcaaatagtaattttctcctatagtggcctcagagtttattttttaaaatcattaattcataacttctgtctagggacccctccatagtcgagatgggtcatttcaggtgtaatgaaggcagaggcttggaaggcatagacctaataaaatcgggagaaggcacctgcacaaaagtgttacaaagactataatgtttgtttactgccactataccagatgtgctaaatataacacttctttaaaacagtgatcctccgactgtgaaaaaccagacctctggctgcctgg

SEQ ID NO: 3340 - DNA, 732 bp, Artificial sequence
  DNA replication origin
cctggaggctccccacccagaaagggttgccaattcaagttgcagcaggaccaaggttgcttttttttttttttttaatacgtacgcagctcaggagggaaacgggcgggggcgggcggcgagggagaataactgtttggtcctgcaaagacatctgtttctcatctccgtttgctgtggcaaaggagaagaaagtcttttgcaaagggtgggaaaggcacagattttttttttaatcacacgcacacacaacaacaacaaaactaaaccaaatttaaaaagacaagatatctcggaaggttccagagtgaatacattattcggctggagccaagcccccagggctagggcgggagcccgagagcgcgtggggtctgggctgcgggctggagctgggcccgcgtgtccccgggcaccgggaggggaggggaggaaaaggaggagggagggcgggaagcagggaaggaggcagggggcgggctggggtgggggtgcgggaaaggcgccccgtgtgcagcctgaggagcggcggcggcggcctgagcagagggagggagggagagcgggcgcgcttgtcatgttccctctctcaccctgggggcatcctgcagaacctctcctcggaaatccacggggaaatggcaaacaggattgacgggtttcacacgctcctcgctagacagagccgctcattaccataaccgtctgcagcgacggcggcgcagcgcccca

SEQ ID NO: 3341 - DNA, 932 bp, Artificial sequence
  DNA replication origin
gcgcagcgccccagtcgcggcggcgggacctgccgggacccttgcccgccgcgcacccgcagtcaccgccgagcgggcggccgggccgggacccgcgagtgtgcaccggcggccgggctggcgccgagcccagagcggaccagcagcagctcaagcgctgcggccgccgcctccccgctgaccccgcggtaagagccgggctgggcgcgggccgcgggggcgggagggccgggcagggtggagggcgagggccccccggggctcctgccctcgcagacgggcacccacgcggcctcccgcgcgccctcttggcaccagggctgtgccgaggtcaccgagtggactcgcagcggccggagcggagtcggggcggcgtgggggccaaggcacagctgggcgcggaggcggcgcgggcttttccctgggctagcgtgcgccgcggcgccttcaccagggcgggaaccgccgcctcctctagggctgctcgggctgccacccgcgcgcaccgagacaactccaggggcgggtggggtcagaagctctggtgagacctcatggtcctccgtggccgcttagtccctcatcgtaggggaaggggttaagtaggaggggtgcccccaggtccggatgccgcggcgcttggcaggtggggagagagggattgtggatgtcaggagcgcgcgtttgcaagaaaaaggaattgatgcagtagctgacaccttctgtcccccgccacctccgcccccgcaccctcctcccaggcagcagagctgcgctgcgggcggcggcggctcctctgtcctcagctcacctcctcggcgggctgaggctgctgcccgcctggtccacgcctccgcctctcgcttcccttcctcccctcccgcctcttcggccctagcaactttccgagtgcccagctgtggtcgcagaag

SEQ ID NO: 3342 - DNA, 953 bp, Artificial sequence
  DNA replication origin
cgcgggcttccagcgggtttggccggcaagggagggagggaaggccgggccgacatctgctgcgggctggagcgcgggggcccgggccagccccgccagagccctgccagccgctgtgagtcatttccttggaatcctacctttggtgtttatttcccttagaaggaaacttggttttttttttaaaaaaaaaaaaggataagacataaagaataataatagctcttattcttcagaagaggcacacggctgcggcaccgtagaaagacaacttgcctttgttcccggacacttggggtgttgtttactttctcctgcggccagcggccgaccgggcgctgctggctacccggggaggggctgagggctgcggcaccgacaccccgggggtgtgtctgtgcgggagccaggatgtggttggtggctgccgcccgccttcaagaggtcggccctccaaacctcggaccccacccccgcaaccgccacacacacacacaccttgggcaccagggctcgggcatcggagcaccccttcgtgctctttaggcccagcacctgcagccccaaccacaggacccagcttcaagctcttggcctcgcggggctgcagctgagaaatgtacttcccagggcagacaggtgtactgcaggaacggcagaaaagcgacatctgtttgtttagaagggttgaagaattttgttccgcccatccagtcccttccactaccaccaccaggagccggacaagctattgagatcattttgggacaatgtggaggtcaggggcttgatgccatttaaaactggcagcatcgatcgggggtggaaatagccctttacttccctgctttccagtgctggaatcagactgctaactgctataatgatcttaatcaaatgctctccaattttcaatgacagatggaagaagaagtgagcaaagaatgacctgg

SEQ ID NO: 3343 - DNA, 1618 bp, Artificial sequence
  DNA replication origin
ctctcgagccgcggaggagccttttacttttcatcatcaagccctggcacctggagggcgggcagccctagcgactggaatgaatcagaggatgccctgcaggccccggggggcgcggccctgcaagcatgggggaggggaggacgggggaaaggctgcttattgggctgctcagcacccggccagactgcgctgtgctgggacggcgagggggtggtgaggagggcagccgcagtgtgaggtggcccccccccgccccgcccccactccctggctggcgagggctggcaagggctccgggcgctcattgtgcaggcagctggcaccagctgggaaggggaattagcataacaaagagccggagcgagcgcggcgcggcccggcgggggctctgccgagcgccccgggctcggaggagccgcgctgtcagcggctgtggcgcgctcgggcctcctggcctgagaccctcggagcagcggggcccggcccccagcgggcgcgctctgtctgggttccggccgcaggactcgcccggagaatgcagtgggtgtgggtgtgtccgggacagcgtgaatgggcgtgggtgtgtgtgttcgggtgagtgtgggtgcccgtgtgtccaagcgtgcgtgtaaccgtgtccctgggcgtgggaatgcgggtgtgaaggggtcacctgcacacgggtggggacccgccagccctcttcccttccgccccaggaaggcctctttgtttatttctttccggagaccgcggtggttcttcaatcaccagttctcaatcctgattgcacctcggagcccccttcgggagcttttacaaaaccctcaggcctgagccctaccccagaggctcgcgatgaattggactctgctgaggcccccagcggatgtttcttcagacgtccgcgtggattccgacatgcggcgtggttgggaaccgccgagtacccactcccactgtccccagccctgctgccgaccctggacgccagcgagcgccaaggagaccggggccggcttggcctcgggtttagggcctggaagcttatccttcgccttcactggttgaggtcaagtgcacattcccccgacactagcgctgggtcttaggctaccgactgggcaacctcacctccattattgcatctaagccttacagcagccccatgggaaaaaagctgtcgtgaaacgaagctcagttgagtgtcacaaagggtcacaaagctaggtattcgacccaccgaattggagtccagggctatgggactccaaagtccacgttctttccactgtaatatttaaaaataaaaattaaacaactaaatcaaaaaccaccgctgcttttcaagtgctgccaagacctcaagctgaccaggtccctggaaaaaccctgggaggactctggaggaggcggggttagggtgtagcaagactcctgaccccagaaggtagatacggcctagacgacgtcactagaaattgcccggggcgtcttctctccagcaaccttctgcaccgccttccacctgggtagtctccctccccgtcccggcccttccaggctccagctccccaccccctccctacaggaaggaaatgtgacagcacaagcc

SEQ ID NO: 3344 - DNA, 1566 bp, Artificial sequence
  DNA replication origin
ccattctctctaactccttgggtaaagagggaattcctagaccttctatcatggagtgacaagggaatcttgctccctagagctataattgcttgcttgggttagtagtgagaggaaactattttggaactttaaattctatggtgagaatcttctgagtgggtgataggctgatgattctattcctactgcacttcctatttttctgtttcccttactaaagtcagagaagatgctagtgggcttgttttttttttttttttttttttatttatttaataaaaagtaaactttaatgtcgaaaatgcaaacttggggagggcagaaagatcacacacaaggctgtcacttcatacttggagagttgcacagcggcggggcagaggagctccttgcttcccagacggtggggcggccaagcagaggcactcctcgcttcccagacccgggccccgggggaggggtggaggggtggaggggggtgggcggtgggggatggggcagaggagctcctcacttcccagacagtgcagcggccaggttaggggctcctcacttcccagacggggcggaggcaggccagagatgctcctcacttcccagacggtgcagtggcggggcagaggcgctccaacttcccagacggtgaggtggctgggcagaggcgctcctcacttcccagacagtacagcggccaggcagaggggcacctcacttcctagatggtgcagtagccaggcagaggcgctcctcacttcccagatggtgggcagccaagcagaggtgctcctcacttcccagacagtgcagtggccaggcagaggggcacctcacttcctagacggtgcagtagccaggcagaggcactcctcacttcccagatggtgggcagccaagcagaggtgctcctcacttcccagacagtacagcggccaggcagaggggcacctcacttcctagacggtgcagtagccaggcagaggcactcctcacttcccagatggtgggcagccaagcagaggcgctcctcacttcccagactggggttgggtggggtgggggagggcgggcagaggcgttcttcacttcccagacagtgcagcggccaggttaggggctcctcacttcccagacggggcgggggccgggcagaggcgctccaacttcccagacagtgaggtggctgggcagaggcgctcctcacttcccagacggggcggggggccgggcagaggtgctcctcacttaccagcagtttggcggccaaggagaggccgttctcacttcccagacgatgggcggccgggcagaggggctcctcacttcccagacggtggcaaagggtgggggccgggcagaagcgctcctgacttcccagaccatgcggtggccgggcagaggtgctcctcacttcccagacggtgggggggccgggcagaggcgctcctgacttcccagacggtgggaccgctgggcagaggcggtgggtttggtttttcttagatggggctgtaatatgcacaccagggactgagggtatgcttacgaaaggataaaccactttaa

SEQ ID NO: 3345 - DNA, 1116 bp, Artificial sequence
  DNA replication origin
tattgttcggcggtccaatggtaagaggtgcattcggatttcgattacccgggcgttttatccgtgcctttattgcagaacctctcgccgctcggagccagcagatgcagcagaacccgcgagctctgctaaggagccgcggcgcgggcacccagggcagcctccccgaggcagagaaaggtgggcagggcggggcggggtctgatgggtccccatcctaacaggagagctcttctggggacgccttttgggcctttctagcgccctctcggtcttatctccaaggatgcgtgacagctgctgagcaaagtactgggaaaagtgatggaaagctggctgcagccggagcggcagcgcgcgccccatcggcactgcccacccttccgcgaaggctctggggctcccgggctgctcccagaggcgccgcctctccccagggagagccagcagtagagacgggcaactccaggtccccgctgcctcagaatgggaggatccggctgcctccaccttccatccctgcaactgaaaagtccgaggtgtcgggacgtgctctcggcggcctgattccaccccttcacccacccaccactttctaggtgaagttaaggctcaccttcgaagtgaggggcagatggttttcctggcgtcaggtgggaagtggagggcacaggtgcagagcgaactaaatggtcacaggtacaaacctgttatatttcccctcttccaaacccacaacggttttatgccacccttaagtgttgctcacctataaattcccaatctcaccaaacctataaatagatccattacccaataaactgacaatcagcactcatctgtttccttgtggcattaagatcgacggtagcatgaagccttgagaggcgagagtcctaggagcggggatggaaaggaagaattccaaacgcctttcggacttaacagaggagagaccccaactaagcacttgcagagcgactaggagtcctggcagttggaaggcgcagcgcacgagttcatcaaatggctatattgaaagatagccaagcataagatgctctttgcagactcctagagcccccaccccaccccttccagaaacagatgacattc

SEQ ID NO: 3346 - DNA, 913 bp, Artificial sequence
  DNA replication origin
ccgggggccccggcctgaaacagagcaaaggaagagagttacatcagcacgctcccctaagacttgttgggggtgaatccgccctgaaagctgctcacaatgccctcctctccacccagcccatggcacatcctgaacacatttcccggctgaacccagagggtggcgctgccgtcccagccttggtccacggccgcccgccacttccctgcctctgcgggagccccccagcttggtctcccgcaggccggcggtggggcacgagcccggtagggggcgccgccggcccaggcgccgctgctccctccgcccacccggaggcggctgccgctagccgaggccggcgcgagtgcactgcgaggcgggccgcagggagggaggcgcgaagagggcgcgagggtagcagccagagggagccgccagccctgcctgcggatccccgccgggcgcatggggcgcttcgagccgggactgcgtgcgggccccgaggccagtttcctgctgtcgtaagaagccgcgccaggacgcccgccggaccccgagctgctgggaggatgaccatggctgggggcaggaggggactagtggcccctcaaaacacgtttctggagaatattgttcggcggtccaatggtaagaggtgcattcggatttcgattacccgggcgttttatccgtgcctttattgcagaacctctcgccgctcggagccagcagatgcagcagaacccgcgagctctgctaaggagccgcggcgcgggcacccagggcagcctccccgaggcagagaaaggtgggcagggcggggcggggtctgatgggtccccatcctaacaggagagctcttctggggacgccttttgggcctttctagcgccctctcggtcttatctccaaggatgcgtgacagctg

SEQ ID NO: 3347 - DNA, 809 bp, Artificial sequence
  DNA replication origin
cccgggcgcccctcggccgcaccgcgctctacgccgccgccggtatcactccgctccgcagggaggttccggccgcctggggggaggggaaggggggaggggcggggaaaccccgctcgcaggcagccgggccaccccaaccaagcgctaataaaatcgccaccgaggcgtggccgccgctcgggctttcttcctagggggcgctccggagcgcgggcgggagatgcacacgagggagcgggactctttgccctctctgggcggaaggaacgcggtcaccctgagaaaggaccggcgcgacccgactgggcgaccggggggagcggccccccccctctgcggaccgggctgcaggcacgggcctgagcgcggcgttcctcagatgtctggacccgcaggccgctcagtttcccggtgtccgctggcagcctcgagctaggggcgcgctctggcccgcggtgcagtcgcgcagtatagcagggcggccttggggctctgaggcccaaccggcgaaagaagtagactcggccctaaccatctcgacgctacaatttttgtttctggatctctgaagtagggcccagttcccgagagagagtctggggatgacgggatgagtttccggggctgagcgatgcaactgttttttgctgaagcccctctccccgatcctaaccctactgtcttattcttaccatctttctttccttttttttcttctctgttttaatagctggggagtgagtgctgtggagtgagggggaaataagataaacatgagacctggcccagtagacgcgttttcagtt

SEQ ID NO: 3348 - DNA, 788 bp, Artificial sequence
  DNA replication origin
ttggtattcggctccgactctcatcccaacatctgcaaagcaatgccaaaaaatatatataaaaaataaaaaagaagaaaagaaagaaaaaggaagagacacttaaaaaataaaaatcgctagatggaggaaagaagcggcgggtggatgggaagatatcaactcggggcactccgggagatggcagcggattgggggcggggagcgggggggggcaaaggcggaggattggtcgagggcggagggacggggggtcgcgggggtgctgctgcactgcaccgggagttcgaggctaccgcagcgcccaggctctgaggggagggagggcgggagagcggcgaggggagggggctgggggaggggaagagggaggggggcaggcgggctggcggggaggagttcgaggctaccaccgtgctcgtcgtcgctgctgcagccgctctcgggctctgagtagtgcagcccgccgttggtggacgaggcgccgctgccgccgccgcctgccgggctcttggcgctgccgttggccgatcggttcttccccagtaactcgggccctttctccatcatgccgggcatggtagaacaggggagggggaaaggtgaggggaagaggcaggcgtcagggtgaaggcggagatggcttagagcgcgggcgggagggaaaggaggaggaggaggagacggcggcggcggcggaggaggaggaggctgttaatatggagccgccataaccgccccgctccggcagtagcgcagtcgcctcacaacaacccgccccggccccg

SEQ ID NO: 3349 - DNA, 1006 bp, Artificial sequence
  DNA replication origin
ccccgacggaacctggcccctccggtccacagccgccctctggaccagctccccagctttggacccccagtctccgccctcgccacacctctccccggctaagaaacccgctccgcaccgctcccgctgtccccgggccgtcggcggtcacctgccccgccggtctcccgcaagcccgggcccctccgcctcccccggcccagccgccgcctcgcgccctccccgccggtcggggaccggccggacgccagcaggcgctttcggtttcaaagtaactgggacgagatgaaaagcgctcgtcggtgtccccaccccggcccttccgtcgcgagggtgcccagggcggcgacccgccggactcacgtggggctcggcgcgcgggctccgcgaggccggtctgcaggcgcggctgctgctcctggctgcggccggcggcggcggcgaagcggaggcgaggcctggggcggggccggggcgcgggcggaggggcgcgggcgggcgcaggggaagagcggacgcgcaggaaggggtcgggaggaggctgagaccgtcatccaggcggttggaaagctaacctacccgcttcagaaccgttagtatctacaagtccagtcatctgatttccctcacgtgcgtctgaattgtggccgtcttgctcttccgtcaggcacaacaaggctcagcccgtcctctcctgtgttgacccatttgctcaaggccttgcttgagatctggctcaaatcagtccttcctggactttccttcagggtagcacaaatttgccagccctcctcttgctgttggcctaacaccagcaatctctgagagttgtagagctccccggttggcttcccaaacatctcctgtggtcctcaaaacaagctggtgaagtaggcctggtcatccccattttacagatgagctgtctgagggccagagcagcaacgtggagtgacgtacccaaggttagacacgctcagcaagctctgcagctggaacttgaatc

SEQ ID NO: 3350 - DNA, 1435 bp, Artificial sequence
  DNA replication origin
ggaaatcagatgactggacttgtagatactaacggttctgaagcgggtaggttagctttccaaccgcctggatgacggtctcagcctcctcccgaccccttcctgcgcgtccgctcttcccctgcgcccgcccgcgcccctccgcccgcgccccggccccgccccaggcctcgcctccgcttcgccgccgccgccggccgcagccaggagcagcagccgcgcctgcagaccggcctcgcggagcccgcgcgccgagccccacgtgagtccggcgggtcgccgccctgggcaccctcgcgacggaagggccggggtggggacaccgacgagcgcttttcatctcgtcccagttactttgaaaccgaaagcgcctgctggcgtccggccggtccccgaccggcggggagggcgcgaggcggcggctgggccgggggaggcggaggggcccgggcttgcgggagaccggcggggcaggtgaccgccgacggcccggggacagcgggagcggtgcggagcgggtttcttagccggggagaggtgtggcgagggcggagactgggggtccaaagctggggagctggtccagagggcggctgtggaccggaggggccaggttccgtcggggtgcactggcggggaggactttcaggcacgtcccgcacatccgcactgcaaaccaggccctggcccccttccgcacccgaaggcaccctctccacctttgcagggctttccaatcaaagcaactccagaatgaaacttcaggattgcaaggaatggaagcctctaccagctgttcgtttgcgcgtcttcctttagaaagcagctacccccctcccccagaaggcgagctctaaggaaccttgacgcaaaccaaagctccgagaggtggaaggagttgcccagaggcacccagagaattcgcagattctgagttctccgtaccagatggtctccactttgttcctgttctgcagggtcttggtggttctgagaattttcggggccacgctcttgctgcgggtcccactgggccactctggctggccgactttctctgctcattcggcctccttctgctaagtttccatatttgggtatttcagatttactttcatgagaactcagttatctcgctgtggcaggcagagctgcctcaggcgagcattgaggttggtgaaaccaggcgaggctccctgccagggctgcccctgcagcccccaccctccatagccttgggctctgacccacctcctgtgaggataggcatctggtaaccagtttaattctgtaaatatttattgggcaggtgctgtgtgagaactgggctggggccagtggaatatggttatttcctccagagatacttgcattttaaaagggctctggaagacctgagatgcaaagaaattagttgaaccatttctggaaatag

SEQ ID NO: 3351 - DNA, 1303 bp, Artificial sequence
  DNA replication origin
acctccctcccagacggggcgactggccgggcagaggggttcctcacttcccagtaggggcggccgggcagaggcgcccctcaccttctggacggggcggctggccgggcggggggctgacccccccacctccctcccggacggggcggctggccgggcggggggctgacccccccacctccctcccggacggggcggctggccgggcggggggctgaccccccccacctccctcccggacggggtggctgccgggcggagatgctccccacttcccagacggggtggctgccgggcggagatgctcctcacttcccagatggggcggctgccgggcggaggggctcctcacctctcatacggggcggctgccgggcggagggtctcctcacctctcagacggggcggccgggcagagacgctcctcacctcccagacggggtggcggccgggcagaggcgctccccacatcccagacggggcggcggggcagaggcgctccccacatcccagacaatgggcggccgggcagagacgctcctcacttcccagatgtgagggcggctgggaagaggcgctccccacttcccagatgggatggtggctgggcagagacgctccccaccttccagactgggcagccaggcagaggggctcctcacatcccagacgatgggtggccaggcagagacgctcctcacttcccagacggggtggcggccgggcagaggctgcaatctcggcactttgggaggccaaggcaggcggctgggaggtggaggttgtagcgagccgagaccacgccactgcactccagcctgggcgccactgagcactgagtgaaccagactccgtctgcaatcccggcacctcgggaggctgaggccggcggatcactcgcggttaggagctggagacccgccccgccaacacagcgaaaccccgtctccaccaaaaaaatacgaaaaccagtcaggtgtggcggcacgcgcctgcaattgcaggcactccgcaggctgaggcaggagaatccgatgaatgatctttctaatgtattgttgaattcagtttactactattttgttgaggaattttgcatcaatattcttcagagatattggcctgtagttttctttttctgatgtgtctttatctggtgtgggtatcagggtaatactggccttatagaatatgttgagaaatattactttatcctctatttttcagaatagtttcagtaggattagtattagttctttaaatgtttggtaaaattcagcagtgaaccatcaagtcctgggca

SEQ ID NO: 3352 - DNA, 940 bp, Artificial sequence
  DNA replication origin
cgccccgtatgagaggtgaggagcccctccgcccggcagccgccccatctgggaagtgaggagcatctccgcccggcagccaccccgtctgggaagtggggagcatctccgcccggcagccaccccgtccgggagggaggtggggggggtcagccccccgcccggccagccgccccgtccgggagggaggtgggggggtcagccccccgcccggccagccgccccgtccgggagggaggtgggggggtcagccccccgcccggccagccgccccgtccagaaggtgaggggcgcctctgcccggccgcccctactgggaagtgaggaacccctctgcccggccagtcgccccgtctgggagggaggtgggggggtcagccccccgcccggccagcagccccgtccgggaggtgaggggtgcctctgcccggccgcccctgctgggaggtgaggagcccctctgcccggctgccaccccgtctgggaggtgtgcccaacagctcattgagagcgggccaggatgacaatggcggctttgtggagtggaggggggggaagggtggggaaaagattgaggaatcggatggttgccgtgtctgtgtagagggaggtagacatgggagacttttcattttgttctgtactgagaaaaattcttctgccttgggatcctgttgatctgtgactttacccccgaccctgtgctctctgaaacatgtgctgtgtccactcagagttaaatggattaagggcggtgcaagatgtgctttgttaaacagatgcttgaaggcagcatgctcattaagagtcatcaccactccctaatctcaagtacccagggacacaaacgctgcggaaggccgcagggtcctctgcctaggaaaaccagagacctttgttcacttgtttatctgctgaccttccctccactattgtcctt

SEQ ID NO: 3353 - DNA, 1177 bp, Artificial sequence
  DNA replication origin
ccgcctctctagctcctcagccatccgctcctcagtccagccgccgcagaggagaccagcaagcagagccctcagatgctcggagctttctcggcgcgaagctgcccgtcgccctctcctgccgccctcgcccgccgccctcctgctcctgctccggctgcggctcttggtaccccggctccgggagcccagctccccgccaccgccgccgcctgggtgtgggggctgctgaggctgagccgggcctcggcgccggctctgaggacggacgcctgaggagctgcgcggcgcggcgccgccggctggcggagaacgcccacaggcgcggggctcggcggcttgacccgggcttgtccccgtgcggccgcgggggcccctcagcggtttcccgaacggcccgactcgggcgctcctccgtgtcgcggtcgccgaccctccgcgtcccgccaacgccgccgctgcaccagtctccgggccgggctcggcgggccccgcagccgcagccatggggtgttggggtcggaaccggggccggctgctgtgcatgctggcgctgaccttcatgttcatggtgctggaggtggtggtgagccgggtgacctcgtcgctggcgatgctctccgactccttccacatgctgtcggacgtgctggcgctggtggtggcgctggtggccgagcgcttcgcccggcggacccacgccacccagaagaacacgttcggctggatccgagccgaggtaatgggggctctggtgaacgccatcttcctgactggcctctgtttcgccatcctgctggaggccatcgagcgcttcatcgagccgcacgagatgcagcagccgctggtggtccttggggtcggcgtggccgggctgctggtcaacgtgctggggctctgcctcttccaccatcacagcggcttcagccaggactccggccacggccactcgcacgggggtcacggccacggccacggcctccccaaggggcctcgcgttaagagcacccgccccgggagcagcgacatcaacgtggccccgggcgagcagggtcccgaccaggaggagaccaacaccctggtggccaataccagcaactccaacgggctgaaattggaccccgcaggtgagccgggaaagtcgctgccgcaggtggttgggtttggggtgcccaga

SEQ ID NO: 3354 - DNA, 1250 bp, Artificial sequence
  DNA replication origin
gacggtttacaaaaaaactttgctttgcactcggaacccccgttttcacacggacccgagcgtgacaaggccttgccgccccgcccaccaggcccggcacgcttccccattggtcaggaccccctcacgacagcctcggcgtcccgcccagccacgctcactattggatggagcctcggaggggcgggaagggggcggggtcgcggctccaacagataggggcggggccttttcctcccggagccgggcgtgggccggggggccgtggccgggtgcagcggcgggcgaattgggggcgcgggccgcgtgcagcgggagggggaggggctggccgggtcccctcgggtgtggcggagtcctggcctgcggaccatcgcaactcccagcacacctgcgggggccgggctgcaaagtctgcaaacagactttgatcctccgagcccagtccacgtgggggcgggccgcgcggcggctgtgtgacagctcggcggcgggggaggggccggaggggagcccctgagcgcggggccctcgagtactcggtcctgtcggaggaggccgacagacgcataaacaagtgcgactgtaacttgggactctgctggacgccgagctgaggagttagtcctcccgaaggtctgctaggggcgtggaccgaatctttgtacatgttttgggaaagccagtttctcctatcaccatcaacccctggagaccttgtgtgaactcaggtgtctgtcactgattatctaaggacagttcagggtacagacttcaggcaggagaaacctgggctctgctccttgccttgtcaatagccagctgtgtggctttgagcaagtcacctaatctctctagacctgtttccccatctataaaggactggacaaatgcaactctgaagatccccgtctgactccaaaattctaaggctctatgatttaacatttatttatagactacacacggtggaatcttgtgctggttgctatggggaggtggaggggcagtaagaatacaaaggaacgagtttctgtccaggtggaggtaaaatataaacacgacattttaaaattacgatggaatactcttgataaattgtgctattttagactgaatacataagcactgtgttgtgggtggagatgagttgatctggaaaggaacagcttgcccatctaaggtggggtggtggctggaatcagagtggcttaagctggacctgaaaggcctcaccacagcccctgcgc

SEQ ID NO: 3355 - DNA, 728 bp, Artificial sequence
  DNA replication origin
cggctcctctgactcccaaagccccggctggggcccggccagcccgaggtaacctccggctccgcggtcgcaggccccagagcggcagcggagccgggccaggggaggcgctgggggcggggaagggggtgtcgtcgtcgcgtggcccggggaggcggcagcggcctgagggacgagggcgcggtaggccccggggaggaggcgggggcgcggggcatccgcccgcctccccgggacccgcccgggtgacaggtccggcctctgagtccccgccgtccctctgtccgcaggcagccgcgaggggagtagggcgccagcgcgcccgctcgcgcagcgcctcgggccgcttgggccgccaccgcgtccatgaccgcgacccctcggcgggggacacccgcccccgctctccgcagccgcccgccgtccgcgcccgccgaggtgagcccggcgcgcgggccgcgcccgccgccacgacccttccacatccgcggaaaccgctgcaggctccaccggctccccgcgctgcggtcgcctcttctctgcccctttcatcatcccctgcttccttgccctctggtcggaaatctcattctcttcatccccagttccttggcttttacctctttctggcttttgctcccttccccctactcctgtccttcctctttttcgcattataaccccctactttcttcctctcaccttgtaagctttttttctaggccccc

SEQ ID NO: 3356 - DNA, 1204 bp, Artificial sequence
  DNA replication origin
gcggatgccccgcgcccccgcctcctccccggggcctaccgcgccctcgtccctcaggccgctgccgcctccccgggccacgcgacgacgacacccccttccccgcccccagcgcctcccctggcccggctccgctgccgctctggggcctgcgaccgcggagccggaggttacctcgggctggccgggccccagccggggctttgggagtcagaggagccggaagaatgcatggccggcggcggggccggcggaagaaggcggtggcggggccctgccccgctccggctgtggcgcggcccgcgcccgttccccggcggcgccgagactcggtccccaagggcccggccgcgttcgcccggactggcggggaggggcggcgggaggaagcggcgggagtcgggactgcggcggagccgctcccacagcgccctctaatgaaagcgccgccgccgctgcctggcccgcttgccccgcctggcccgctccccctacccctgcgccagcgagtcggggccctcggggctacctggacgctcggccaggacctcagtgagtccagaacatactgagggaaagggccgctcggaaagatctaggaatgaacacccatcctcacaccccaggagtgccttggtttcagttgagagccccctttcagccaacacggccgcctttcattgttagggctctcttctctgcccaaactaggaacctgtctccttgacggctaaatgtccacttttcattcttaatgaaacccggttgcactcatggcttttcttcttaacctctgcagtgtattattgtctagagtttcaaattcattctttttacggtcaaaagtcttgtttcaggaaagcagctggaacattaatggcaattccactttcccattcatcgcccccgcccccaccaccccaccaagaaactcagtgggaatgaatggtctacacagagaaactgaaatctggttagtcaagaaggaaaaaacaaccaagtgcctggcattaagtaagtactcacccgcccgccctcccccgcccgccataaaaagaaaaaccgaaaagacaaaaaacagtggccatgggaactcctagacagaccccgtcacttgggatactatagctgcattctggttcaaaggctggaccacctgaaggaaaatagagaaatagtccattgacctacccccttgagcatt

SEQ ID NO: 3357 - DNA, 1051 bp, Artificial sequence
  DNA replication origin
tacaagccataccagtatctcactctgagaggtgacagcgtgctggcagccctctgcagctcttgctcgctctcggcgcctccttggctttggcgcccactctggccgcgcttgaggagcccttcagcccgccgctgcactgtgggagcccctttctcagctggccaaggccggagccggctccctcagtttgccgggaggggcggagggagaggcgcgggcgggaaccggggctgcgcgcggcgcttgcgggcgagcgcgagttccaggtgggcgtgggctcggcgggccccgcactgggagcggcagggctcgggacctgcagcccgccatgcctgagccttcccccacgccccccgccgtgggctgctgcgcggccggagcctccccgacgagcaccgccccctgctccagggcgcccagtcccatgaccgcccaagggctgaggagtgcgggcgcacggcgggggactggcaggcagctccacctgcggctctggtgcaagatccactgggtgaagccagctgggctcctgagtctggtggggacttggagaatctttatgtctagctaagggattgtaaatgcaccaatcggcattctgtatctagttaatctggcggggccttggagactctttatgtctaaataagggattgtgaatgcaccaattggcactctgtatctagctcaaggtttataaatgcaccaatcagcactctgtgtctagctcagggtttgtacatacaccagtctacactctgtatctagctaatctagtggggacgtggagaacttttgtgtctagctcagggatcgtaaatgcaccaatcagcaccctgtgaaaatggaccaatcagctctctgtaaaacagaccaatcggctctctgtaaaatggaccaatcagcaggatgcgggtggggccagataagagaataaaagcaggcttcctgaggtagcagtggcaacctggtagggtgtgcttccaaagtgtggaaggttccttctttcactctttgcggtaaatcttgctgctgttcactgtttggg

SEQ ID NO: 3358 - DNA, 1652 bp, Artificial sequence
  DNA replication origin
ggggcacgggggtgcgggtgccgagcgcgcctctcgtcgcttctgcccccgtcgccagccagccggccggccagcacctcagcggccgctgccagcgcagcccgccctgcctggagcctcctctcagggcgctgccatcgcgggtcccctcggagccactgccgcggtgcccgctcttcccggtcaacgccggcccctcatcgcccggggcgctgccccgtagccccggccctctgcgtgcacacactcgctccttgccgcgctgggcggcccgaaccccctcccccacgcgcccgtcggccgcccacggagaaccccaggcgagcgaccgctacaacttgagaaggtggttggtacaggcgactggggagtgtgtgcgcgtgtgcgcgcgccagggcgcgcggcccggggaggggcctcgcaaggggtgggaaggaggagtttgactgacaacttccgcggggtcccgcccgcctcttggtgcggcggcgggggagggggcgggaaagcatgccagccctcttagccaatcacacggctaagcggcagcgacggcgtgaggtgcggcctcttgaggcagaggagtggggcgggctgtgtgacgggcttcggccacagccaatcgtaagtgaagacggcgagcggggtgcccctgcgtcagaacaaatgcggcaaatcgcttgggagggaggggaagcgctcctccaccagcgggcatttttgcgctcacgcgcgactgctccaggctgtcattgctctcctgaccgtctacgagaagactgggaaacttgagagggtgcgttcagagagcaaaatagagcgccccttcccttccctcacctctctgctggccaatgaagaactgaagcgattggtggggcgccggagggctggggcgcgaaagagcgccaggtgttacaccactgaaagggggcgcagcagaggtcaggtggcgagcaagcagtgtgattgacgggcgaggggcccggggaaggcgagaaggtgagctcgtccaatcgttgcgaggtctggacacctgggcgggtcttggcgccttactggccccaaaccgcaaaattggtagttgcggaataaatttgtagctcttgggaggttcggactccgcaactccagagagctactctcgcgtggggtttgggcagtctagcatctgctgcttcaaagagttctgcaagtccacgccctctaaaaagagatttctcattcccaatttagtatcctgctaattttcacccctccttgagccaaaggccctcaactactccaacgagaagagtacaaattcattggtcagtggtgtgtggatatggaggcttgccatgtactcttaccggaatctctttcttggagattccgtctagattttgaatttcttaaggacgaggactggtcatcttagtttttcgtgcagtgctttccatacggtggccgttaataattattaatctgaacagtcagcctccctttgcgccaatggacccaaatctgtaatcccctccctcgagctccagaccttttcctttcaacataataaaagtaattgtcgtatatttaaacgaagccacctgatgcatatgtacagaagattccaaatttggcaggaagttgaattctagacctagaaccaaaca

SEQ ID NO: 3359 - DNA, 929 bp, Artificial sequence
  DNA replication origin
ctccgtcagccccgggagctcgccgcgcgccggggaccaggaacctccagcgctgagatgtggccgtgaggcgttggcgggcggcgaggagaagctcggcggcgtcccggggccggagggccgtggggccggggcgcaggggcgcgagcaccccgcgcctctcccccgcctcctcctgccgtctccgccgctgcccgtgccttgcaagcagcagccggagctgccaagcgtcagggccgcggagatgtcgtcgtcgtcgccgccggcgggggctgccagcgccgccatctcggcctcggagaaagtggacggcttcacccggaaatcggtccgcaaggcgcagaggcagaagcgctcccagggctcgtcgcagtttcgcagccagggcagccaggcagagctgcacccgctgccccagctcaaaggtaacctccgagggcgcagccccagcagcgagcgcaggggctggcaacgcttgcctctgcgccagcagagccatttcctgctgggtttctcctgctcagttgggactggtagtgtgtgagccgagttccccacaatgccttggcgtcacctcacgccctcctccttattcaaacaggttttctgtgaagtcttggctgtttccttctaattcccacctgaactctttccatcctaggggaggccaacacccttccccacctgcgcgcttgcttaacctgcacttcctatcttgcgtcccgtgaagtagagtccttcactcctcttccaggtttgccctttcccggtcttgctttaacaaccgcacgaaccttccccgaccttcactttcccgagtgtcagctcctctgttcggccacttttagctagtcctttacttttacagttataaagccgtctgcacccaccttcttctcaacttcacttcccattgattgcccctaaga

SEQ ID NO: 3360 - DNA, 926 bp, Artificial sequence
  DNA replication origin
ggtgaggggcgcctctgcccggccgcccctactgggaagtgaggacccctctgcccggccagccgccccgtccgggagggaggtgggggggggtcagcaccccgcccggccagccgccccgtccgggagggaggtggggggatcagccccctgcctggccagccgccccgtccgggaggtgaggggcgcctctgcccggccgcccctactgggaagtgaggacccctctgcccggccagccgccccgtccgggagggaggtggggggaacagccccccgcccggccagccgccctatccaggaggtgaggggcgcctctgcccggccgcccctactgggaagtgaggagcccctctgcctggccagccgccccgtccgggagggcggtgggggggtcagccccccgcccggccagccgccccatctgggaggtgaggggcacttctgccgggccgcccctactgggaagcgaggagcccctctgcccggccacgaccccgtctgggaggtgtgcccagcggctcattggggatgggccatgatgacaatggcggttttgtggaatagaaaggcgggaagggtggggaaaaaattgagaaatcggatggttgctgggtctgtgtggatagaagtagacatgggagacttttcattttgttctgtactaagaaaaattcttctgccttgggatcctgttgatctgtggaccttatccccaaccctgtgctctctgagacatgtgctgtgtccactcagggttagatggattaagggcggtgcaagatgtgctttgttgaacagatgcttgagggcagcatgctcgttgagagtcatcaccactccctaatcttaagtacccagggacacaaacgctgcggaaggccgcagggtcctctgcctaggaaaaccagagacctttgttcact

SEQ ID NO: 3361 - DNA, 1059 bp, Artificial sequence
  DNA replication origin
ggaggcgggggggtcagccccccgcccggccagccgccccgtccgggaggtgaggggcgcctctacctggccgcccctactgggaagtgaggagcccctctgcccggccagccgccccgtccaggagggaggtgggggggtcagccccccgcccggccagccgcaccatccgggaggtgaggggcgcctctgcccggccgcccctactgggaagagaggagcccctctgcccggccagccgccccatccgggagggaggtgggggggtcagccccccgcccggccagccgccccatccgggagggaggcggggagggaggcagggaggtcagccccccgcccggccagctgccccgtccgggagggaggcgggggggtcagccccccgcccggacagccgccccgtctgggaggtgaggggcgcctctgcccggccgcccctactgggaagtgaggagcccctctgtccagccaccaccccgtctgggaggtgtactcaacagctcattgagaacgggccatgatgacaatggcggttttgtggaatagaaaggggggaaaggtggggaaaagattgagaaatcggatggttgccatgtctgtgtagaaagaggtagacatgggagacttttgattttgttctgtactaagaaacattcttctgccttgggatcccgttgatctgtgaccttacccccaaccctgtgctctctgaaacatgtgctgtgtccactcagggttgaatggattaagggtggtgcaagatgtgatttgttaaacagatgcttgaaggcagcatgctcgttaagagtcatcaccactccctaatctcaagtacccagggacacaaacactgcggaaggccgcagggtcctctgcctaggaaaaccagagacctttgttcacttatctgctgaccttccctccactattgtcctgtgaccctgccaaatccccctctgcgagaaacacccaagaatgatcaataaaaaaaaaaaaaaaaaaaaacaatctgtaagaaaaagaacacataggctgggcacagtggctcatgcctgt

SEQ ID NO: 3362 - DNA, 1325 bp, Artificial sequence
  DNA replication origin
gaggcgcccctcacctcccggacggggcggctggccgggcggggggctgacccccccgcctccctcccggacggggcggctggccgggcagaggggctcctcacttcccaataggggcggccaggtagaggcgcccctcacctcccggacggggcggctggccgggcggggggctgacccccccgcctccctcccggacggggcggctggccgggcagaggggctcctctcttcccagtaggggcggccggcagaggcgcccctcacctcctggatggggcggctggccaggcggggggctgacccccccacatccttcccagacggggcggctggccgggcagaggggctcctcacttcccagtaggggcggccgggcagaggcgcccctcacctcccggacggggcggctggccgggcgaggggctgacccccccacctcccttccggacggggcggctggccgggcggggggctgacccccacctccctcccagacggggtggctgccaggcggagacgctcctcacttcccagacggagtggctgccgggcggaggggctcctcacttctcagacggtgtggctgccgggcggaggggctcctcacttctcagacggggcggttgccaggcagagggtctcctcacttctcagacggggcggccgggcagagacgctcctcacatcccagacagggtggcagggcagaggtgctccccacatctcagacgatgggcggcctggcagagatgctcctcacttcctagatgggatggcggccgggcagagacactcctcactttccagactgggcagccaggcagagaggctcctcacatcccagacgatgggcggccaggcagagacgctcctcacttcccagacggggtggccgccgggcagaggctgcaatctcggcactttgcggggccaaggcaggcagctgggaggtggaggttgtagcgagccgagatcatgccactgcactccagcctgggcaccattgagcactgagtgaacgcgactccgtctgccatcccggcacctcgggaggcccaggctggcggatcactcgcggttaggagctggagaccagcccggccaacacagcgaaaccccgtctccaccaaaaaaatacgaaaaccagtcaggcgtggcggcgcgcgcctgcaatcgcaggcactcggcaggctgaggcaggagaatcaggcagggaggttgcagtgagccgagatggcagcagtacagtccagctttggctcagcatcagggggagaccgtggaaagagagggagagggagaccgtggggagagggagactg

SEQ ID NO: 3363 - DNA, 1749 bp, Artificial sequence
  DNA replication origin
gcgcaggaggcgcgcgaagggcgggagttctcgggtccccgccctcggggaggctctgggcgcggggcgggactccgggacgctgggcgggcgtgctagggccccgccgccctggcccggccttgccttgcgctgcgcgctcaccatggtgggccccgcgccgcggcggcggctgcggccgctggcagcgctggccctggtcctggcgctggccccggggctgcccacagcccgggccgggcagacaccgcgccctgccgagcgggggcccccagtgcggcttttcaccgaggaggagctggcccgctatggcggggaggaggtaggcgggggtgtcgcgggccgagggacccggggtggcgtccgatctgcggcgagccgagcggggacccaggaggcgccggcggcccaggaagctctgggggacgcgcggcccgcggcgggcgccctgggccggcggggggcctcctctctctaggccccgaaggatggccgaggggtgaggacgagtcctcaacagtcggagcgctccgctttgcccgcacaccccaccctgaacttctccctcggtccccgggagatttcccctctagccgccttttcgttgatgatctgcgtacagacctcagaactttttggttttcatgttagcatcagccgaggcgtttactgtgcccacgcatagtggggagtggcgggggacggagggagggaagcagagcctgctccctgggttaggtgggaattgagacaggtcctgggataagccagtctttgcctgcacttccttttcctgcccctgtatcccaggcctctgcatcggactcctcaaacccacttttaggtcatgtacccctggggctcagccaaagctggaagtgagcgcagagggtggactggaggttagagacccccacaacccccccgccacacgtcaatagagacccccccgcccacacacacccacacacgtcaatagtctagaggcgtccagaaaactcacaaccacctgcccacctgggttggttgggactggagccgcacgacaaggaccaacagggggctgatattagatgtggagcgggggaacggcattggggggaggtcatagtaccatagtatttcagagctggcaggaacccatctcctgcttttacacataaggaaactgaggcctgccacctgttagtggtagagcaggaagaggcctgatgtttttcaaaaccctctggcctggtctcgctaattcctgagttaattggccttatatggactaggattgcatgggggtatcagaaacctggcccttagtcagtgatgccagtttgggcatcatttgtgaaggggccatttagaaccatgagtcagtgaggacaccgagggagggagacatggctgggatgtgaggatgttaagggatgcctttttgccggtagcagagggaaccagatggttcagagtccaggcatccgtgcagaaaagaattaacatggcaggcctgctctccttagaaaagcctacttgcaagggtgggacttgtctagtgtctggatttctcacccttccctacccaataacggtggactcacttgcctaggccgtatatacagatggtgtggttagtattgaacactgtatatgctaggcagagggtgccccatgtgaccagcccccagtgaaaaccttgggtgctgagtctaatgggcatctctagcagaggaatgttctgccagaagaatggcacatact

SEQ ID NO: 3364 - DNA, 2047 bp, Artificial sequence
  DNA replication origin
cctcggaggaaagacacgtcccgtgtgcggggcggggcggggcggggcggggcgggggggggttgtcattccaccctaagcttctggaaccccaaacttaaaccattaccccaccccgcagctccctctcgggtgtcggtgacggcagaggaggccagtcccttagcagctgtgaaatcctgtgacataggccgggtcgccgcagggcagccttggactgcccgactgtggccccctaggcggtctgtaggatctagggcccgccgcctctggagcaggcgctctcctgagcccctcacaggaggccgcctggggagccactgggtccctcagcttcctcagcccgagcccagcacagtccggcggcgctggctccggctgtttctggctggggccggcgcctccagtccgcgaggacctggcgggggcgcgcggctcagagcgtagagatggaggggcgcggggcacggcggcgcgctcggggcccacgtggcgggggctgggaggctgcggggggcgggcagagcactgcgaagtccttgccggctccaggacccgccgggtcctctaacgaagtcccggcttcatggccggcacagagaggtagcgttgaggtgtggagtcttgaagacgctgcccagactgatgccacctctgtgtccccaggatgcgtggcgacagcaggagaggcccctccctgacccccaaccgcccccaacgcagaagctcaaggaggctgcggcctacttggtgagaggcccagaggctgctgcaggtagagagggctgcggcgcccgcggtggtggggaagggtcatttggtctgaatgtggtttccaaactgccccggtcggctttatcctccctgatggaaggcagtagggcagcagcacaggtgggcgccagggcaggcggggcaagggacgggagctctctgtgactcctttgcctctggaaaacggggacggcactgagcctcgtctgcagcagtgtcgcatgcatgagcgagatgtgcaatgtcagctccggaagcgacagctcggctgcctcactgcctggcctgcgccctccacaggaagtcctcctcctgccttcccttcacacctccttggcaactgtccagagtccagggagtgagctgcctgggaagaatgcagcgacaaaaatacttagccgcatccggaacttccctggtggcagctggtcaccgaccatgggcttcccctggcaactgttgtgttggtgaatgaattccgagtctgaccctggctctggcacgcccctggggggtcttggagaagtcacccaaactctcagcctcagttcccacccctgtcaactagggctaataatacctccccaaatgccccctgggagtattaaataatataatgtcgatggccacctttctttactcagaagaacaatgagaggatagagtgccacaggaaggacacagggcgcccagtagcgatgctgagggaactacccggaggcacgtggcggttacctggagactgtacaccagcaaacagccactcaggggcgcttgctgggcgccggcactgtgctgaatctctacgcaagccccttgagttaagcattatcctccttgtgcacatgagggaaggagaccctagagagactaaggaacctgtctgaggtcacccagcaccaggattcaaaccctagctgtcttctgccaaggcccccgctgccagccacttcacggtgctgcccgctgggggtgaggtgccagggtctgtcccagctgggcttgaggggctgagtcactaattcttcccatgtgatctccctgggactccactccctcatctgtaaagtgggcatgatcatgccagctcaaaatggatgttgtgacatcgactaccaaggggtcctcacccctctgcattgctcagcaggagacactttataaacagaggattacctctgctgccttgagccaaatggcttgccctgccaaattgttggaatggttcagtgacaagtgtgctattaggaagaaatttatgatgcttcattca

SEQ ID NO: 3365 - DNA, 1066 bp, Artificial sequence
  DNA replication origin
tctctacgctctgagccgcgcgcccccgccaggtcctcgcggactggaggcgccggccccagccagaaacagccggagccagcgccgccggactgtgctgggctcgggctgaggaagctgagggacccagtggctccccaggcggcctcctgtgaggggctcaggagagcgcctgctccagaggcggcgggccctagatcctacagaccgcctagggggccacagtcgggcagtccaaggctgccctgcggcgacccggcctatgtcacaggatttcacagctgctaagggactggcctcctctgccgtcaccgacacccgagagggagctgcggggtggggtaatggtttaagtttggggttccagaagcttagggtggaatgacaacccccccccgccccgccccgccccgccccgccccgcacacgggacgtgtctttcctccgagggtgaccctggggaggtcctttcacctgtgggctgtctccgcactgcttcagggcctgtgacatggagggctgctgtggaggaaggagcctagaacttgctagaccttcatacacaccttcccgggagcctggcctccctgcagagcagtctctgacacagaaaaggaaggaattagcataatcaccaattacactctctccactagcttccctgtgaaaataatttgccggtgcccagaggcagggctcctctaaacagccaccaggtcgggcgacgtgaggctcagggaattgtggaattaagctaattaagtggaagccgtcctcctggggctgtgtgttcctgcggctctgaacgcatcgtcttacacacaaaagcagctctagaaaatgtggagaaggcacggagtgatgccaatgacgaagatgattagagggttggaaaatgagatggatgtcagattaaaggttaaggcaactaggagtgtttagccggaaggaggaaagaatgaggagcaggagcaggcaacttaatcatcttttcccatgttgcgtgaagaagatacccctcggctccttccctccccgagactgcgctctcccgccctcactccct

SEQ ID NO: 3366 - DNA, 1323 bp, Artificial sequence
  DNA replication origin
cgccagatgtgcgtactcgctgctgcgtgttccaggcatgaccaatggtgcccaagccagcggcatgactccaccgcgctggcatctgtccctccgctaggttgaagagcggggggggcggggaaggtggggaggcgggtcccggccccagcccagactaggtgaggctgggaagcgggcacgacctttctctaaaatgcgtggtcattttctggagcttcaggaaaataccccctcccccactggcctcctacttctctagcaggggcggagtaggggcagaagcgttagtctgtggtgtggggaaggtgtccaaagtcacccttcggtgtatccacgccgttacccgccgggtgtgacctctgcggcggggaccgcgagaagcccgccggttaacacaaaagcggagggcagccctcggctggcaccgtgcgcccgagcccgcagccccggacactccacatggacgcacacgcaggacagctccgggctccgaaactagggcgagtggtaggaccgtatcggttcgatttttttttttttacaatcacaaagcgtttgaaattgacaagaacatgtcagtgaaaccaacaagagcgtgaaaagatcggagtccaggaggaatcagaggcaacccggtgggagggtaggagggggcggaagccagcggccaggaggagggggaaagagaaggtgctttggggtccgcgaacctgcccaggcctgggggtcgccccgctctcaggcaatatttagggaaaacccatgttcagctttcacgtgttcttctgctcccagagccgattggactgggaccggacggcccggaatggggacgcaatgaccacaggcggaacccgcagcagaaatcccctctgccctcaagccagggtggcgggaaaggcggggccccgtggtccgagattcgagctgagacctcagcagaactgggtttgaaccttaaaaacgatttcctggttcttattccccgaccccaacaatttctgctcagagagcggcagaaccaaggaaccttcttgactgcccgtggatgactatttgtagacacaagtgtggcctgggactttcgcacctgcctgggagggagacctgcgcggccgcagggtgtgggggcacggtgaagggcagaaacacctgctcctttccacctgcctctgggagagaggcggccgaaggtcacagtttggtaatttggggtagaaactagaggtgtctggagcctgggtctcacttgaagtccccagttccccccaccggggttcctcgccgccaagcccgacctcactcagaccacccacctct

SEQ ID NO: 3367 - DNA, 971 bp, Artificial sequence
  DNA replication origin
ggcagcctcggacaccccaacgcacccgcccacccaccttacgccctctcccagccgggcaagccagcgccgtcggcggagagaagcggcgctcgaggctggcggcagagtggacgcccgacctccgtcaccaggaacctttcgcgccccaagtcaaaagagaaagttagttctttcgctttgcgggaaacttttcgaagcgccgaggagcagcggtggcttagaagaagtttaagccagagttatttccaagccggaggctgggggcgcggatccggggtgggtcaggggtcggcggactggttacttagaggggcgcgaagggaatgaaggcgagcagccctcgtcgcgctcactccctcggcttccagcgctcacctccaggctccgctcggggcggccagggtcgggacggggtcgggcgggctgtttgtctggccggcgggcgagcaccgaggactcacggccggcgcgcgggctgaagggtgcgctcgggcggcggcgagagaagagagctgtgcagtgcgcgcctggctgcgtgcgactgtggcttggagagcgttgcatcaccccttttatagccctcaggctggcggcgcggtcgtttactccgtgttgccagtcccaggctgacgtaatgctattaatagcttcccgggagaaccggccgaacggagcggaggaaggggggtggaggaggggccaaggcggggccgaaggcgggtggagagagggggcactggtgatgcaagttcggggaggagccagcccaggcgcgttcccccagcctcgctcactgagacacacaccagcccgccctctctctccatatcaggaccggagccgcccgggatagccgccagatgtgcgtactcgctgctgcgtgttccaggcatgaccaatggtgcccaagccagcggcatgactccaccgcgctggcatctgtccctccgctaggttgaagagcgggg

SEQ ID NO: 3368 - DNA, 967 bp, Artificial sequence
  DNA replication origin
gcctcgagcgccgcttctctccgccgacggcgctggcttgcccggctgggagagggcgtaaggtgggtgggcgggtgcgttggggtgtccgaggctgcctcgctcgccgtcccgctccatccctcgcttcgagacacggcactgtgggagccgatccttcccgggtgggggggggggggcgcagagaggcacgaaggccggaggcttgcgggagggctgccccacgcgccgagaggaatgaatggggaaggggcgagagggcgggaggcgtcccgggcgcggccgctgggggtcgccctgggtaccccgcagcactggcggcaggaccgtgaaggcaaccccgagaaaaagttagctgggataagcttggaagtggcgagcgctggtgtcgcgctgtcccggggcggaagacggggagggctcccggcaacggctggtgtccggaccccgagcccgggactcccacacacctgggactctcactctggcttttccttcggcgggtccgcgggagacccaccgtggcggggaagcgagggtgtggagccacttgtgcagatatttgagagaatggctttgtggtctagtgccaggactctgagcgcttacactgcaatcgatgtcgttgggcctcagtatgcggagccgggaaataagggcacatgggcagtaccggccccctctgcgtgttggagggcacaatgcagtggttggaccagataactactaaggtcctttctgtctggagattttcagattttggagtggtgtagtggggagaaaaggagccagtgaggggacttgaatggggtgggtctctatctaatgtcattcaccagtgtccagacagtgggggaaaggggacttttctgcagggcatcttttccctcaccagctttctttccactggattcgttctccttctctgctccccccactcccattttcatttctcatctacttcctt

SEQ ID NO: 3369 - DNA, 752 bp, Artificial sequence
  DNA replication origin
gtgctgattcacctataatcagctcaatccctcagctggcggccacccctgagcaggcagctggcagagctgcgagctggtaaagatgagcgtcatccaggcagtgtggctctagtctcctggcagtggggtgacagagcgtggaatggctgcaagacaggtcccctgaggggctgggatcccgactcaaggggacagtgagtaactgccaagagtcggggtggggtggagttcatgtcagggtccctctgcaggcgctggtcatttgagaaacaattgttgagcacctacgatgggccaagacgggaaatcaggcacagtgaagatgctgccatacacagcagtaacacaaacccaagtgggggatggctctcgggcagcacgcagaaggaggctttgcagaggaggggaggtctgagcagaaacagcaggctgagcgctcctggaagaggctatggcatgacagggaaagagaagggcttgggtgacatgggcctcttcatagatggcagacaagctcagtgtgcccaggcgcaatgtgtgatgtgctggaggagagtagggggtggggggcgagcagtgggaaggagcatgacagtgtgaggaaaattaggctgaaaggaggatgagatctggaagggaggtggaactgactaaagcagagtgtcttccccctgcagggactgttggttgtaaaggggacagcaagaagagaggctcacaggaaagcaaggaggagtgtgtggctttcc

SEQ ID NO: 3370 - DNA, 1259 bp, Artificial sequence
  DNA replication origin
agcgtcctgcagaggagcgtcgcggcgcccgggaaccagccgcagccgcagccgcagcagcaggtagagggcgagaggctcagggagggccgtggggtgcggggaccggcgcgccgcggggggcgaggaggtgggtgctggagttccgtggtggtgactgcggaggtgcagaggtggcgggtgcggccggagacaagcagaggtaggggcgtagggatgttggggaatgggggcgatccagggaccctgtcgtgcgcacagtgtccgcggctcctggaatggctcctgagccagctcctgcgccctctgggggaagaagcccgagggcgccgacgcctggctgggccgggcatggccggtgctccccggcacgtgggctccgcactgccctgagggccgccccatcctggcgcagccagcgactgccaccccaccacccgcgcctgtagcccctccaggattcccccgggtggggggggtgctgccgcgggaatggagaacgccggactagtcagcctgggcggagggaacccacaaagggccgactccgcccccagctggtggaaaccctttgccccttcccagttcgctgtcccctagcaacgtttacagcggcgcagtcaggaaggagaccaggttggccacagggacggccgtctggaaactttgcctgggtcttggccacctgccttacgacgaagactgggtcttttcatccttactccccaccttcccaattcagcgcccggcccatgtcatcaggtgtcgctggagtgtcacagagatctgagtttgggcctgggctttgccacacacaggctgagcagccttgagcaatttgtttaacctctcggaccgtccatttccccatctgtaaaatgaatatagtaacatcaacctctcaggatttttgagactgaatcagatatggttaataacataatactatctctaactttcgctcacctctttctgtcttgattaaatgtttctgctgggttggcaggtgtgatcatggtgatgagtccagtttagagtcagctccccgagggcagtatgcaggctgctttcttgtgctagtgactttttgattacagagagcaaagaggcatgagaagcactatgcagaatacatttttttttaaagtagcaacttcaacaaaggcaggtaacttcttgagggcatactgtatgctgggagctttaggacaaaatctcatttcatcgcatcccaatcctaagcattaggctgttagcac

SEQ ID NO: 3371 - DNA, 735 bp, Artificial sequence
  DNA replication origin
gcctcgcgtgggtgggcttcgcgttccctccggggtttcagagccaccacgtgacttccacgaagcgcggggcgccggcggaaagccgcggcaggggtgggatttgggaccccgaggtgcggagagagggcgggcagaggaggaaacgaggcgggggtgggagaaggagggcggggcagacgtgggacgggaaggacggctgccgggactggcgcgcggggacactgggccgacgcgtggagtagcggggagagcgggaagcctgagggggcggggccggcgcgaggccgtgggtgcggcacgaggatgccggcggcgggacagcgcccgtaggcagccccacgggcagggcgcgcgggcggggcggggcgggccgggccagaggagcgcccggcatgtcgcaagggctcccggccgccggcagcgtcctgcagaggagcgtcgcggcgcccgggaaccagccgcagccgcagccgcagcagcaggtagagggcgagaggctcagggagggccgtggggtgcggggaccggcgcgccgcggggggcgaggaggtgggtgctggagttccgtggtggtgactgcggaggtgcagaggtggcgggtgcggccggagacaagcagaggtaggggcgtagggatgttggggaatgggggcgatccagggaccctgtcgtgcgcacagtgtccgcggctcctggaatggctcctgagccagctcctgcgccctctggggg

SEQ ID NO: 3372 - DNA, 1032 bp, Artificial sequence
  DNA replication origin
tgggcagatcactcacggtcaggagctggagaccagcccggccaacacagtgaaaccccgtctccaccaaaaaatacgaaaaccagtcaggcgtggcggcgcgcgcctgcaatcccaggcactcggcaggctgaggcaggagaatcaggcagggaggttgcagtgagccgagatggcggcagtacagtccagcctcggctcggcatcagagggagaccgtggagagagagggagaggaagagggagaccgtggagagagagggagagggagaccgtggagagggagagggagagggggagggggctaggtttttttaaaaggtttattgctaccatgactctgcttgttttattttattttatttgttgattgtttgtttgtttgtttgtacaggcgaggtctcactgtgttgtacaggctgatctcgaactcctgggctcaaatgatcctcttgccttggcctgccaaaatgcctaggattacaggtgtgagccaccacacctggcctctgcttgattttaaatgtctaaacatgtaatctatcaaattatcttgaaactgctttggaagatcgtatattactctcctgtcttcagaagtgatgagatttttaagttaccagttgctcgtattaaaaaaaaagaaatccccaaactagtggcttaaaacaaccaagtggttatttgctcacaattctataatctgagctgggcttagctggatggtctgctggtcttgctggtgttcactcatgtgtctgtattcagttgggttggctggagactgggttctttgggacactggaatgtctgagcttctctccctttccctgtagtctcagagccactccctttccaagtggactctccacacagtttctccagcagagtagcaggtctttgctcatggtagctaagggatctcaaaaccacaaaagcagaaactgccagctcttcgtggccttacacctggaattggcacaacaccacttctactatatcctgttaattaaagcagatcacagcccagct

SEQ ID NO: 3373 - DNA, 1667 bp, Artificial sequence
  DNA replication origin
tggggctcctcacttcccagtaggggcggccaggcagaggcgcccctcacctcccagatggggcagctgaccgggcggggggctgacccccccacctccctcccggacggggtggctggccgggtggggggctgacacccccacctccctcccggacggggcggctggctgggcggggggctgacccccccacctccctcccggacggggcggctggccgtgcagaggggctcctcacttcccagtaggggcggccgggcagaggcgcccctcacctcccggacggggcggctggccgggcggggggctgacccccccacctccctctgagatggggcggctggccgggaggggggctgacccccccacctccctcccggacggggcggctggctgggcggggggctgacccccacctccctccgagacggggcggctggccgggaggggggctgaccccaccccccacctccctcccagacggggcggctggccgggcggagacgctcctcacttcccagacggtgtggttgccgggcggaggggctcctcatttctcagatggggcggttgccaggcggagggtctcctcacttctcagacggggcggccgggcagagacgctcctcacttcctagatggggtcgtggccgggcagaggcgctccccacatctcagacgatgggcggccgggcagagacgctcctcacttcctagatgggatggcggccgggaagaggcgctcctcacttcctagatgggatggcggctgggcagagacgctcctcactttccagactgggcagccgggcagaggggctcctcacatcccagacgataggcggccaggcagagacgctcctcacttcccagacggggtggcggccgggcagaggctgcaatctcggcactttgggaggccaaggcaggctgctgggaggtggaggttgtagcgagccgagatcacgccactgcactccagcctgggcaccattgagcactgagtgaacgagactccgtctgcaatcccggcacctcgggaggccgaggctggcagatcactcgcggttaggagctggagaccagcccggccaacacagtgaaaccccgtctccaccaaaaaaatacgaaaaccagtcaggcgtggcggcgcgcgcctgcaatcgcaggcactcagcaggctgaggcaggagaatcaggcagggaggttgcagtgagccgagatggcagcagtacagtccagcttcggctcggcatcagagggagaccgtggggagaggggagagagaggagagaggagagagcgaaaactgacgcttttaaagagggttgtctgtttttcaaaactaggcagtgtgtataacattgattcaacttagttacattatgaactttgggggatacaaagataaagcagacagattctccccataaagagcttatgtctgagtaggagaaataaaagatgaacataaaacaggattctttcatgccccctaactggttcctttgccacctttccctgtttgagtaagtggcatctatgcctacatgttgctttagctgaagttaaccttgattccttcttctgtcaagctcctcatacccagtccatcaataagtcccataaattgttcttaatataatctcacattcgttgacttctc

SEQ ID NO: 3374 - DNA, 917 bp, Artificial sequence
  DNA replication origin
cagccagccgccccgtccgggagggaggtgggggtgtcagccccccacccggccagccaccccgtccgggagggaggtgggggggtcagccccccgcccggtcagctgccccatctgggaggtgaggggcgcctctgcctggccgcccctactgggaagtgaggagccccactgcccggccagccgccccatccgggagggaggtgggggggtcagccccccgcccagccagccgccccgtccgggagggaggtgggggggtcagccccccgcccggccagccgccccgtccgggagggaggtgggggggtcagccccccgcccgaccagccgccccgtccgggagggaggtgggggggtcagccccccgcccgaacagccacccagtccgggaggtgaggggcgcctctgcccggccgcccctactgggaagtgaggagcccctctgcccggccgccaccccgtctgggaggtgtacccaacagctcattgagaacgggccatgatgacaatggcggttttgtggaatagaaaggggggaaaggtggggaaaagattgagaaatcggatggttgccgtgtctgtgtagaaagaagtagacatgggaaacttttcattttgttctgtactaagaaaaattcttcggccttgggatcctgttgatctgtgaccttacccccaaccctgtgctctctgaaacatgtgctgtgtccactcagggttaaatggattaagggtggtgcaagatgtgctttgttaaacagatgcttgaaggcagcgtgctcgttgagagtcatcaccactccctaatctcaagtacccagggacacaaacactgcggaaggccgcagggtcctctgcctaggaaaaccagagacctttgttcacttgtttatctgctgaccttccctccacta

SEQ ID NO: 3375 - DNA, 1253 bp, Artificial sequence
  DNA replication origin
tgccacgaagcttcacacacacctaaacccggggggttggggatggaggggcacaaggagcttgggggatgcggagcgcaagatgtggggagaagaaagacagcttgtgtagcatgaaggaacaggaggttcccgcaaggctccacacattcctgggtcctcagatgtggccaagagaggaggggagccacgaacgtgctggcatgtgagcgcccagagctggcgcgagggcgctgcagcagccttggcttgcaaggcggcccgctttcttccaggaagccctcccggaccccggcggggatctagtggaaagagctccatccgcccccttttccccgagttccagcgcctatcaccgggagggactggctgcaggcgggcggcgcgcaggaagggcgcgcggcagctccaagatcctacctcgggacggttggcttcatggctgcagagcctctccgggcggcgggagagcaggggctgctgctgctgctgctgggcctggggctggggctggggctgctggggcttgctggggccgtcgcctcattccatgtcccattctcgaatgttattctgtgacatataaccaagtcacccgggcagccgccgatgttccgaatgcgtctattggccaccgcaacaaagaggggcgggtcccgggctcgggactctacaaccccgggctccgcgacgctctgattggctccaggggttctctggcgggaggggacaggagtagggggagcctggcggccacgcgaaatccgatcgctgtggtgtcctgagagccccgcgggctggagcgtttggccatgggacttaagatcgagtttccccaggggtcgtggcacttcgagggtttgcaactgtggaagcagaggagaaacaaaaccacccgagaagtgaccccgcggaagcagagggtttggcatcagaagagcattccctgagggacgctggacacacttacctgcctctacccgggatgatgagttgttcatcctctacctgggatgatgaggggctgttcatacctatgcgtgaaattaaatcttttttaaatcccgcatttaaaaattcctcaaaattaacaagtgggtgcagctttggatcctctggtattagtcatggttaataaagtccctttaagcccaagttgagaggagacaataaaactcaagaggtcaggcaggccctgactgttctgccacagctgttgagtgagaggagggatggagagatgcttccaaacc

SEQ ID NO: 3376 - DNA, 1260 bp, Artificial sequence
  DNA replication origin
atcgcagggctggaagcccgtcatcgattctcagggaggctgtcagcgtgcaggggggagcggggagtgtcgtggagacactccgggacccctcactcggttccgctgtgcgtccacttagctgtggtgtcagctgtgtctccgctgatttcaggcaccgccggtaagcagggagcctccgcggagctcccgccgccgctcccccttggtgagtcctgccgcagcgagaggcatggagaaggccgcccccgcggggcgctgatcccctcgccgcgcccgcgcgcacacgccccccgccgccgccgccgctgccgccgccgcgcgcccccagtacctcgctccccgcccaggccccaccatgaccggctccgcggccgacactcaccgctgcccccaccccaaaggcgccaaaggcacccggtcccggagcagccacgcgcggcccgtgagcctcgccaccagcgggggctcagaggaggaggacaaagacggcggggtgctgttccacgtcaacaagagcggcttccccatcgacagccacacctgggagcgcatgtggatgcacgtggccaaggtgcaccctaaggggggagaaatggtgggcgccatcaggaacgccgccttcttggcaaaggtcagtggcttccagggcggagttggggggctgggggtaggtaggcagcgatgggaccgtttcagcctatacatagcaaacacaggcaatctccattttcctagtcctgctacaaactcccttcctctccccattccttcctgccagcccttttctaattgagatatttagattggaagcctaagaaatggggaagggagaggtagcgggcttgctatcctgggactgtgtaattggattgtgccaaggtgtctttgaagctccagccaaactctattatttactcacccccacatacatcctccttcagcaaaagctagagccaccaggtaccagcgatgccaaagaatgcacagaccccagggatcccaccctgcttgttctctttggagtgtcttgctcctcctctgctcccctcttcccccagcaaatgatttattaagctgtgaatgaatttgaaatcaaccagtcagacttctcagtgtgaataatttccagactttttgccagttttttttcttttctttctggtttttttgtgtgtgtgtgtgtgacagtgactttcacctctgaaacttgcaaaacggtgaactctctctctctcttcccagcttatttgtgctcca

SEQ ID NO: 3377 - DNA, 907 bp, Artificial sequence
  DNA replication origin
cgtccgggaggtgaggggcgcctctgcccggccgcccctactgggaagtgaggagcccctctgcccggccagccgccccgtccgggagggaggtgggggggtcagccccccgcctggccagccgccccatccgggagggaggtgggggggtcagccccccgcccggccagccgccccatccgggagggaggtgggggggtcagccccccgcccagccagcccccccatccgggaggtgaggggcgcctctgcccggccgcccctactgggaagtgaggagcccctctgcccggccagctgccccgtccgggagggaggtggggggggtcagccccctgcccggccagccgccccatccgggagggaggtgggggggtcagcccccctgcccggccagctgccccgcccaggaggtgaggggcgcctctgcccggccacccctactgggaagtgaggagcccctctgcccggccaccaccccgtctgggaggtgtgcccaacggctcattgagaacgggccaggatgacaatggcggctttgtggaatagaaaggcaggaaaggtggggaaaagattgagaaatcggatggttgccgtgtctgtgtagaaagaagtagacatgggagacttttcattttgttctgtactaagaaaaattcttctgccttgggatcctgttgatctgtgaccttacctccaaccctgtgctctctgaaacatgtgctgtgtccactcagggttgaatggattaagggcggtgcaagatgtgctttgttaaacagatgcttgaaggcagcgtgctcgttaagagtcatcaccactccctaatctcaagtacccagggacacaaacactgcggaaggccgcagggtcctctgcctaggaaaaccagagacctttgttcact

SEQ ID NO: 3378 - DNA, 1228 bp, Artificial sequence
  DNA replication origin
cctcacctcccggacggggcagctggccgggcggggggctaacccccccacctccctcccggacggggcggctggctgggcagaggggctcctcacttcccagtaggggcggccgggcagaggcgcccctcacctcctggacggggcagctggccgggcggggggctgaccccccacctccctcctggacggggcggctggccgggcggggggctgatgcccccacctccctcccggacggggcggctggcctggcggggggctgatccccctacctccctcccggatggggcggctggccgggcagggggctgaccccccccacctccctcccggacggggcggctgatggggcggggggctgacccccccacctccctcccggacggggtggctgccgggcggagacgctcctcacttcccagacggggcggctgccgggcggaggggctcctcacttcccagacggggtggctgccgggcggaggggctcctcacttctcagacggggcggccgggtagagatgctcctcacctcccagacggggttgccgccgggcagaggtgctcctcacatcccagacggggcggcggggcagaggcgctccccacatctcagacgatgggcggccgggcagagacgctcctcacttcctagatgtgatggcggccgggcagaggtgctcctcacttcctaggtgggatggcggccgggcggagacgctcctcactttccagactgggcagccaggcagaggggctcctcacatcccagatgatgggccgccaggcagagatgctcctcacttcccagacggggtggcggccgggcagaggctgcaatgtcggcactttgggaggccaaggcaggcggctgggaggtggaggttgtagcgagccgagatcacgctactgcactccagcctgggcaccattgagcactgagtgaacgagactccatctgcaatcccggcacctcaggaggccgaggctggtggatcacgtgcggttaggggctggagaccggcctggccaacacagcgaaaccccgtctccaccaaaaccagtcaggcctggcggcgcgagtctgcaatcgcaggcactcggcaggctgagtcaggagagtcaggcagggaggttgcagtgagccgagatggcagcagtacagtctagcttcggctcagcatgagagggagaccgtggaaagagagggagagggagaccgtgg

SEQ ID NO: 3379 - DNA, 1061 bp, Artificial sequence
  DNA replication origin
gcagaaagggagatttccatcccttcaaacgtgcacgcccctcccgcggtcccgggagggagtcccccctcccaggtcgagcgcgtccaccggctgtccccacagcaacaggcgggcggcgggggaggagaggccgcgggggcagcgcaggcctggcggcggccgaaatcccccggccaccacgacgttccccggctctgcggcgcgccgggagcaggtggttgccctctgcgtccagggcgtgtactgagcccaggctagctgagcgaggctgcagcccctgcgatggcccgggaagaggcaagtgccgcggggccagagcgaggagggaccagcagggcggcctggacccccacttggccgcgcaggcaggaggggcgcgccctctgcggagcgcggcgccgcggcagccgcagcatctggcgctcgctctctctggccggagaggccgcgacacctagcgcggggccgaggctaggaagggcgggccggggagggaggagggcactgggaggaagccgcgggcgaggaagccccgctcctgccgagtgcctggagaggagattcccagccttcctgcccaacccgaaacttttccaacacacgcaggcgtattcctcgcaggattcggcggtcccgagtcgcagtcagggaggaggctcgggaagcacacgtgccctggcacactggaggaggtacacaggcacaccaggagggacagggcctcttgggaggcggctgagggcgtgaaggcagcaggcggccacacatccgaaagggactccctgcgagcgggatcgagcgcttaaaaccctgccacagcttggaagtgtagcggtgcccagaggctttgcgtaactttgcccactgcgcccccgcgtgcaaaggtgtccccttcacactcacaccctcaccccatctcactccccttgagttgcggcccgagactgcctttgtacttaagcgacagcaaaagatatgtggatttgaaccaaagatggtgggcaagagtgttgtaaattgtgtaaattccactcgcgggaacccccagatacgtaggg

SEQ ID NO: 3380 - DNA, 1746 bp, Artificial sequence
  DNA replication origin
taggccgggcaggagaacagcaagtcccccacctggaagggctgcagagcccgcagcccccggcctttgcccgggctgcagaagcgctccaggccgccgaggccctcggccctcatggtggcggcggggcgcggccgccggctgtgcccgagctgcggctcccggcgagctgttattggagacgcgtcacctagagctgcggggggcggggtgggagccgcccggcggacgcggcggcggctccccgctccccggaagggagggcggccccgcccgggcctcgcgcgcccccgcggggagggggacgggcccggcggccccgcctagcgccgcgaccctcggcggccgccccgcgcgcgctccgggccgtttccggtgtggccgcgacaaagagccgcagcccctgtggcttctgcgaggaggcgtgaggcgtgtgcgcctccgcggcgtctccacggagcgagcgggacgcgccctcctcctcggtgggagggaggggggtcacctgcggggaccaggtatccgagggccacccctagacagtcagcctggcccgaaggatgaccagcccccggtaaatagaagggggcgaagccagctccgaaaccttacgttcgctgtcccttgtaaagaccctagaggcagtgatcggggaacgccaaggagaaagcggcagaggggaaaccacagtagagaagtttggtgtgcagagggttgaagtgtgcttttccaaggttagaggtttttaaaccttgtggctttaatgggaacgtagtttgccctctgctcctctagtggaattacatggacggaagaggaaatgcattggccggcccagctcaccgagtctctgaggcatgctgcgaacgttgcagaggaagccagagagaaccttgccttcaaggaatttaggctgttgggggataatgcgatgctgtggccagtgtccaggacactgcgctagagtttgcagtagttttaatatgcttgaccacccacgaactgtgatcttagaaaagtcacttgggttaggagtcaaaggatttaaagcccacaaagcctgaaacgtaaatcctatacacatgcacgctattacttttcatatgagaaaggaaaatataatccgtgttccacatgattatgtaaagactggaattgatgtacatgcagtaaagactaaaattgtgacgagatcatttagcagaaaccactacttcaaaataggacctcaaacagttacctgtgtaagttcaggactggttgagcaaagggaaaggattaatatgattggagatgtaaaatcagtggaatttttggcatttcagtaaaatgtctttatcagctgggtgtggtggctcagccctgtaatcccaacactgtgggaggccaaggtgggaggatcatttgagcccaggaattggagagttggagaccagcttgggcaacataaagaccccgtctctatgggaaattaaccacctctcaagtggtgctgaggtgggaggatagcttgagcctgggaagtcaaggttgcagtgagctgtggtgactccattatactccagcctgggtgacagagcaggaccttgtctcaaaagaaaacaaaaaagcccttattagtggcaaactaaataagcctctaacccgtcttcaagtaaaggaagttatgatagtattttcatttatgcattttaagaaacttcgactgactatggccagcaactgggatagaaagatggacatcag

SEQ ID NO: 3381 - DNA, 1119 bp, Artificial sequence
  DNA replication origin
tcccttccggggagcggggagccgccgccgcgtccgccgggcggctcccaccccgccccccgcagctctaggtgacgcgtctccaataacagctcgccgggagccgcagctcgggcacagccggcggccgcgccccgccgccaccatgagggccgagggcctcggcggcctggagcgcttctgcagcccgggcaaaggccgggggctgcgggctctgcagcccttccaggtgggggacttgctgttctcctgcccggcctatgcctacgtgctcacggtcaacgagcggggcaaccactgcgagtactgcttcaccaggtagggcggcggcggcggcggcggcgggcgggagccgggggcgccgagcgggaggcttggacggcggcgccaggaagtgcgtgcggctcgcggggtcctagcgccggcccttggggcggggtggggggcggggaggggaggaggccccgcgctgcggccccgcgctgcagccccacgccaggcgccacgtgcgagaggaaacaggaccggtgccccgctgcacgccctgcactgcacgttttcagagttgctcacgctggatgcgcaaacccgggcgtgcaggttcctgccctcaaatgtgggctccgagccaggcttgttccaagcctgggcactcactgccctcccggtgcattggcagcggagccccaaatttgggcagccacgggctgtcacctttaacttatgcttcctgcggtgtgttctgttacccacagtccagccctgcctcagattggccgtttcttccaaggaatttaatgacttagtatatgtcttgtaaagtacgcttacatgttaaagtacgcttacatgggtgtttggagggacgccagtgggcactgaccacaccccctggattctgaggtgctgcgacgatgagttgcagtgtccagtttcggtttgggattaggaaaacatggtcgcaggaagggattgggcaagatgtgtggttgctaatggtatttaattgtaagataccatatgtatatatgtgtctgtgtttgtatatatgatgcatatacatttgcacacaccaacacataattatatcctcaactcttatgagagtttcagagctta

SEQ ID NO: 3382 - DNA, 1425 bp, Artificial sequence
  DNA replication origin
ggctcagctgggaggggaaggagcgccagtggccacttgatgtctgtctagggctccccgaggacctgagccaggagagcaggcggctgagcccggagaagcacagcaacctgcccccgagtctgcgcccgctgcgctcactccgccgagaaaaagttggaaagaactttgaggggccgggagagccagagcggcaggaaatgcgagcggccgggagaggagggaggaaggggccgtgcgagtgggaggggacggagcaggcgccggcggccacggctcccccaccccagagccgggctccgcggccctgggggccgggaggcggagggagcgctgggcgcgcggccgggggcggggaggaatgcggcccgggagggcgcgcgccgggggcgccgcgggcgcgcgctgaaacgtggagccccagctcccgagctcccgagctggaggcgcgccgtccttggggacgtcacagcgctggaatccgaggaatgccgggctgcaggagctccttctgcaggcccggagaagtcgcacacttttaatggggtagttttggaaaatgttttaaaaggtgggggccgaggacggaggaccggatgaaactccctggagtaagagacgtggaagtggagagagcaaggcgaccgcagccaccccaaccctgggctgctcccgccgttggggagaaagaggcaaggcaaggaagagcccacctagacttccgaggaccgcagagacggggcggcggcaggaacttgctcaccccgacctacattcagaatagtccaccttatattggggaaccctccaagcaggacgtttcatgcagccaccccacaggggaaaacagaccaggagaaagtaaggtggcctcaccaagtaggcaatctcagagatctctccctagaatctctgggtactggacccggtgtcttagccttctctccctgccccctcccgccccgtaggaatgataaaaagcagcctgtgtgctgagagttggaaaatgtcgttttcccggtttgttccatgccacagaatcgccccaccctgcctgggtaggcactgggagggaacttccttagcactttcggaggtggagttaatgagacgcagctggtatgatggaaaaagctcggagccaggcgactgaacctgggttttaggccctgcccgattggataactgaggagtatcccagcccctgagatcctaggtttctgtagctgcaaaattaaataatttgtctagatttctgtggtcctttgcattgctacaaacatgtcttgggatttatctcggtaagattccagtcctttgttgaaaagggaccttgaagtcgttggcacacaatgtattgtcccaaatcacttcagtgtccggcaactcatgcaaaaattcctggcctcttggggaagagaattg

SEQ ID NO: 3383 - DNA, 2387 bp, Artificial sequence
  DNA replication origin
gagcccgagccggggcctggtggggccggggccgcccccttggggaccctgcgggcctcctcgggcgcacccgggcgctggaagctgcacctgacggagcgcgccgacttccagtacagccagcgcgagctggacaccattgaggtcttccccaccaagagcgcccgccgcaaccgcgtctcctgcatgtatgttcgctgcgtgactggtgccaggtacacggtcctcttctcgcacagcaatgccgtggacctgggccagatgagcagcttctacattggcctgggctcccgcctccattgcaacatcttctcctacgactactccggctacggtgccagctcgggtaggccttccgagaggaacctctatgccgacatcgacgccgcctggcaggccctgcgcaccaggtgagggcaaccctgggggcagctcagcctgggcacacccaagaggggaccaggccgggggccggggggcgggcttccctgggaggaaggtgggcggctctgcaggaggggagccacagtggatgcacagggccagagagccggacaggcgagcttgggtgtgcaggtgcagcctccacatggctgaggtgtggccaggcggtccttccacaccctggcctgtggagccaggctccctgggaacccctggcctgaggacgggaaggggctgagcttgtcacaggggcgtggatgccacccggcgggagggagtgggtggtgtctgggggtctgtgcacgtgtggctggggccccatcggccgaggcagcacttggggccaagtgaggcgaggctgctgcatccaggtcccgaggcctggcccatgaggccctgtggctgcggagcttggccatcctggggcagggcctgcagggtcaggtgcagacccccagcacacatccaaggtctgggccagcctccattccagatccagccctcctagtcatccaggtccccagccctgcgcttgcctggggccttcactggtgtttgagcaccgcccgggccagtgctgctttggatgaggagacccgggtgggcctctggtgacctttcctgctcgccatccactggggctgtctcgtcctggccctgcccagcccactggtctgacctgctcccgcagggaccaggcatagctctgagaagtcagaggccctggggaggtggggtcctcgttgccttggtgatattgcaggcagtccctgctgtgggcctgggagctggtcccctggcaccaccctggctccaggggcctcccagcagtgtggggcgctgacaccaaccacttcatgcgacttcctcggcccctcctgtctctactgcctgggccactggcagagtcacacccgccatggccagctctgagctctgtctgctcggccatctgtcctgctgccactttgtcctgcaggaacctaggcccagagctgtgagggggaggccagagcatgcccagggcctccactggggatgtgtcctgttcgtttgagtggtgacatccaggtggcagctgggggctcctgcctggtagcaggtgacagggctgggctggctcagcacactactgaccatggctgccagggagcaggccagggaggctaaggcagagctggggccacaggcacaagccaggcagcatcctttggggcatgggtgagtggcgagctgtggagtgctgccaggaggctgggattccaggccagggagggggacagccctgctggtggagtccgaatgccaggcagaggggacgcacacctgcccatgctcctgccttgcaagagggcatctgcctgggatcagagcctggagcgtgtgggaggagagttgtggggtcccggcatgggcagggtggcaggtgggtcccgcgtggttgggactgggcacgaggaggccttgtaactggtgctggatcagctgggtcacgggctgcacaccagtgacctgggggtgggggtggccctgggtgggagctggtgatgctgaggtggccgaggacttgtccactcccaagggaaggtgctggtgggagggggtgccacctccgcagccacgaccctcgatgctgacctgggttgcactggcatctcattgggcgtggggactccgagagtccaaaattgggtggagacatttggggacacagctgcctgaattcctcatggccaagggggtgggcaagggctgcagggaggaagagtgtccgctgtcctggccagtgcaccaggaacggctttctaacccgggcaggaaggcgtgaagcattcaggatgtggggggcacacagttcccagtgtgcacctaggggtgatcaggaggagaggcgccagggcctcccctacctccgccccagggccactccgtaggcgggatcc

SEQ ID NO: 3384 - DNA, 788 bp, Artificial sequence
  DNA replication origin
aggcgccatggagtgcggccctggggcccaggggcgcgggccggggtgggcttcccacggcgtgacatggagacctgtggttgcgaggctccctggggctcggcttggaccgcgatggggctgggccctggcctcctaacggggctgccgtctggggccgtagctgggggggcgccctcccccctgcccgcgactcggagcacccccacccctcccctgccgggccaggccgggcggcgttgttggctggggccccggtgggggcctggcccgggcggcgcccgccatgaacgggctgtcgctgagtgagctctgctgcctcttctgctgcccgccctgccccggccgcatcgctgccaagctcgccttcctgccgccggaggccacctattccttggtgactgagcccgagccggggcctggtggggccggggccgcccccttggggaccctgcgggcctcctcgggcgcacccgggcgctggaagctgcacctgacggagcgcgccgacttccagtacagccagcgcgagctggacaccattgaggtcttccccaccaagagcgcccgccgcaaccgcgtctcctgcatgtatgttcgctgcgtgactggtgccaggtacacggtcctcttctcgcacagcaatgccgtggacctgggccagatgagcagcttctacattggcctgggctcccgcctccattgcaacatcttctcctacgactactccggctacggtgccagctcgggtaggccttccgagaggaacctctatgccgacatcgacg

SEQ ID NO: 3385 - DNA, 1088 bp, Artificial sequence
  DNA replication origin
cggccccaccaggccccggctcgggctcagtcaccaaggaataggtggcctccggcggcaggaaggcgagcttggcagcgatgcggccggggcagggcgggcagcagaagaggcagcagagctcactcagcgacagcccgttcatggcgggcgccgcccgggccaggcccccaccggggccccagccaacaacgccgcccggcctggcccggcaggggaggggtgggggtgctccgagtcgcgggcaggggggagggcgcccccccagctacggccccagacggcagccccgttaggaggccagggcccagccccatcgcggtccaagccgagccccagggagcctcgcaaccacaggtctccatgtcacgccgtgggaagcccaccccggcccgcgcccctgggccccagggccgcactccatggcgcctggccgcctgcccgtgcgtccgtcggtccctccgcgccccggccggcctcctgcatcgccaccgccgcagctccccccgaagaatccgctttgaatctctaaggttgtactgtatatgtctttcctggtcagtgtctgtctggagcatgactttaccaccttttgcagtgattctagtactaatacggcattcactcttcattcatgcatgcattcattattaaaaaatgataactgcttggaaggagatgggctacctgtgctgtgagtaactatgatgggaaactatggccgggtcagggatctcagaaaagtttcccagaggaagagggacaaagtgtgagtggtaattaaccatgtgaagagggaaagaggagcatatgcagaatatcttgtcatgcattttctttgtttataggacctatttcacctgaaaaccttatggcaaaatattatttttttcttagcttttatttttggttcaggggtacacatgcaggtttgttttacaggtagactcatgtcatgggggattgttgtacagattattttgttgcccaggtactaagcctaatactcaatagttattttttcttctgctcttcctcctccaactctccaccctcaaggaggcctcagtgtctgttgttcccttctt

SEQ ID NO: 3386 - DNA, 929 bp, Artificial sequence
  DNA replication origin
tcctggagggagatgggggggtcagcccccccacccggccagccgccccgtccgggagggaggtgggggggtcagccctccgcccggccagccgccccatctgggaggtgaggggcgcctctgcccggccgcccctactgggaagtgaggagcccctctgcccggccagccgccccgtccgggaggtgaggggcgcctctgcccggccgcccctactgggaagtgaggagcccctctgcccggccagccgccccgtccgggagggaggtgggggggtcggccccccgcccggccagccgccccgtccgggagggaggtgggggtgtcggccccccgcccggccagccgccccgtccgggagggaggtggggggggtcagcccccctgcccggccagcctccccgtccgggaggtgaggggcgcctctgcccggccgcccctactgggaagtgaggagcccctctgcccggccaccaccccgtctgggaggtgtgcccaacagctcattgagaacgggccatgatgacaatggcggctttgtggaatagaaaggcgggaaaggtggggaaaagattgagaaatcggatggttgccctgtctgtgtagaaagaagtagacatgggagacttttcattttgttctgcactaagaaaaattcctctgccttgggatcctgttgatctgtgaccttacccccaaccctgtgctctctgaaacatgtgctgtgtccactcagggttaaatggattaagggcggtgcaagatgtgctttgttaaacagatgcttgaaggcagcatgctcgttaagagtcatcaccaatccctaatctcaagtaatcagggacacaaacactgcggaaggccgcagggtcctctgcctaggaaaaccagagacctttgttcacttgtttatctgctgaccttccctc

SEQ ID NO: 3387 - DNA, 1017 bp, Artificial sequence
  DNA replication origin
cttcctgttcttagccttgatagtgccatggaacttgccatggatgaaatcatactggaacatgtagaccatgtagctgaggtcaatgaaggaatcattgagggtgacaatatctactttgacagaattaaaagcagccctggtgaccaggtgcccaatacggccaaaaccatttactccatccttcactttaaccatggtgtcttagggatgcggctggcactgcacaagaagatgtggctgtctgtcgaataggaggagcagagaggtgcggagccgggacagtcgcggcgctgacgcccgcgggccccagctgcagatatgaagcggagccgctgccgcgaccgactgcagccgccgccgcccgaccgcagccgccgccgcccgaccaccgggaggatggagttcagcgggcagcggagctgtctcagtctttgccgccgcgccggcgagcaccgcccgggaggcagcggctggaggagcggacgggccccgcggggcccaagggcaaggagcagccgcctgccttggcctcccaaagtgccgagattgcagcctctgcccggccgccaccccgtctgggaagtgaggagtgtctctgcctggccgcccatcgtctgggatgtgaggagcccctctgcctggctgcccagtctggaaagtgaggagcgtctccgcccggccgccatcccatctaggaagtgaggagcgcctcttcccagccgccatcacatctaggaagtgaggagcgtctctgcccgcccgcccattgtctgagatgtggggagcgcctctgccccgccgccccatctgggatgtgaggagcgcctctgccctgccgagaccccgtctgggaggtgaggagcgtctctgcccggccgccccgtctgagaagtgaggagaccctctgcctggcaaccaccccgtctgagaagtgaggagcccctccgcccggcagctgccccgtctgagaagtgaggagcctctccgcccggcagccaccccatctgggaagtg

SEQ ID NO: 3388 - DNA, 1090 bp, Artificial sequence
  DNA replication origin
ggcgggcgggcagagacgctcctcacttcctagatgtgatggcggctgggaagaggcgctcctcacttcctagatgggatggcggccgggcggagacgctcctcactttccagactgggcagccaggcagaggggctcctcacatcccagacgatgggcggccaggcagagacactcctcacttcccagacggggtggcggccgggcagaggctgcaatctcggcactttgggaggccaaggcaggcggctgctccttgcccttgggccccgcggggcccgtccgctcctccagccgctgcctcccgggcggtgctcgccggcgcggcggcaaagactgagacagctccgctgcccgctgaactccatcctcccggtggtcgggcggcggcggctgcggtcgggcggcggcggctgcagtcggtcgcggcagcggctccgcttcatatctgcagctggggcccgcgggcgtcagcgccgcgactgtcccggctccgcacctctctgctcctcctattcgacagacagccacatcttcttgtgcagtgccagccgcatccctaagacaccatggttaaagtgaaggatggagtaaatggttttggccgtattgggcacctggtcaccagggctgcttttaattctgtcaaagtagatattgtcaccctcaatgattccttcattgacctcagctacatggtctacatgttccagtatgatttcatccatggcaagttccatggcactatcaaggctaagaacaggaagtttgtcatcaatggaaatcccatcattatcttccaggagtaagagcccatcacaatcaaatgggatgatactggtgctgattatgttgtggaatccaccagcattttcactactgtggagaaagatggggctcatggggtgggaagtcaaaagagtcatcatctctgctccctttgctgattccccctgttcatgatggtcataaagcatgagaattataaatcagcaatgccacctgtaccaccaactgagtagccccctagccaaggtcatccaagacaaccttggaaatcatggagggactcatgaccacactcatgatc

SEQ ID NO: 3389 - DNA, 1625 bp, Artificial sequence
  DNA replication origin
taaaataccttagtcatgtaaagttggtgtgtgtgtggtgtgtgcactgagggaaggtaactgcccaggaagacttagaatgaaaaagatttagccagatcaggaagcacattataggtgacctagagactttgtaaggattgtgagaggatcagattcacattttagaaaggacatctgattgtattacttttgagcacataagttgagaaaaatgtgtttgaattccagcaggaaggatattaggaagatttttttttaataggggaaagaggtgctgaatgtattctggaatctagaaaaaattgcatttttatcattgacggtaacagttttgcaaaagatttacaagctttttttcccctacaattacgtctatatttttcactaagaagttcttgtaactgggaaaatactccaatctggccgagcagcagttatggaagaaaaactctagcaaacagcagttgggatgggagggtggaggtcatcaggggattcccgctgagaaagtgggaaggaagagagtttagaaacggattgaagttccactacatcacgtgtgttgttagagaattcgcctattacgacgacagcaacgtctgatctcctggctttcttcccctccttggtgggttccgttccgtccccctgtcgctgcgagtttggctgtccctacgccggggtcttggagtttgggcggggtctggtacctgccaaatacggatcctgatggggaggaggtcggggagcgctaagttcaggctggagtctgagttctcccaccctgctgctcccacccaccgcgcttagaaacctatgtttccagcaaaggggtcttgctctgagagaacctaaccgggttttcttccattccctttgcatctctagatgtcttcgccctggctccaggtgcgttccccatccttttcggtcccggacgttctgcagattatagcgcccagctcatgtccagcaccgccggaggtgaagtggggcgagctggtgactccttaacccttcccgaaggtgtagactggaagaagccagggtcttcattacctcccctactccagggctctcaaggcgccaacggggacacttccctgtacaggtctggggggccacgagggcgaggaggacgccctagtgcaggggtccaaggactcgcgtcccagagcttggtcccacacccggtcccacaccccgaacgctggtcgggaaggagataggatgcagcgcagtgtgatgtggatgccagacagcgagagtgaggattttgcggggtggggatgggggttagtggaaggggctgagaggggaggaggcagcaggtgagccaaggggttgtgcccccaggaagagggaagagaggatctttagaagggagcatcttgcaggggcgacgcaggcaagggtagggctaggaggaggtgcggggaagcaagccctggcggtgagacaggagggggaggaggcgaagaggagggagttccgaaaggagggaaacgagccggcaaggggcgacaggagcgagccgggaagggagagcagcggagggctgcagagctgcgggcgcccggaccgtgccacacaccccccgcggggcacggagggcattgcgg

SEQ ID NO: 3390 - DNA, 1082 bp, Artificial sequence
  DNA replication origin
atttttatatttgatgaaaaagagcctaaacgcttctgatttgggataaagaaaaaggagcattaaccttgactatgcctttggctccagccacctttttaagagtaaattgctgggcaggtgggggagggctagtcacggaacgaaactgtaagccggaccaggtgtgaggaggggaggtgataaaaagattatagggtggaggagcagaggctgaggaagaattgggacctagctcggcctggcgaggagcagcctggggaggaaggaagaggtcagatttgtctgtagaaaaggaagattagaaagactcagcgacacttggggttggtactgaggggacaggcgggagggaaagaaggaagatttgggatgagttgccctgagcacagagattaggaagggactgatgtgtaaaagaatgcctcgacgtcaggcacctcagaccgtttgcctattttacgacaagaattatttagattttgcaggatggaaaaattcaaagtgccattttctggctatttggaactactgtcaagtttgtattggggtcaagcggcattgcagaagaaaataaggcatttaggttttaggtcaggtgtgagttgaagaggttttaagtttttgagaacacaggccaagggagtagaaggaggaatggagggtggaaggttgcccacagtgaaggaagcaagcctagagaaaagagagagtagagaaatggagagaaggggtttgggggttcttatcttccagaaaagtgggaaagggggttggggcacagagataagaggttggggtgtggaaataagggattggggtgcagagatataagaggttggggtgcagaaataagggattggggcacagaggtaagaggtcagggtgcggaaataagggattggggcacagagataagaggttggggcgtggaaataagggattgggggtttttgccccgtagaaaagtgggactcgccgctaagggtgaaggagaaggggttgaggggtagttgcccctctcctagaaaagcgggacttgctgctaagggtgaaggaccaaggcaggcatccctgggtgg

SEQ ID NO: 3391 - DNA, 1048 bp, Artificial sequence
  DNA replication origin
gagcgctgcggtattttgtcccgaacggtgacccctcctcccaggcaggctgcggcggcgtcggtggcagcggagcacggagaagaggcccgggcggcccggcggcctggaggccgcgaaaggtggaggccgggccgcccttgtgcaccgcaggattgacccgggaaggggcagaagctagcgagccccgcccggccgccgggaaggtgggggaagccccgtgcaccccccgccctccggccgccgccgccccgctggccctgcagccgtcgccgctgcctcgggctacagccccgggctcggcggtcccggctggggaaggagggcggcgagcgcgtccggagccgccggagatggcgggagggcactgcggcagcttccccgcggcggcggccggcagcggcgagatcgtccaactgaacgtaggggggaccaggtgagtcggcgggtagcgggcttgcagcggggatgccttggcggcctcctcctttggtgtcgacggggaccgagagtcgcaggaacgagggcgagcgtgggaggccaagcctggaggggaacgtgggggcctccaggcggcaagaacgtcgggcggattttggagctggtgaagcatctgctctgggaagggagaggcagaagggacgcttggaattaccgaggaccaggcccatgtggcagagtagctgctgtcctagaatgccaacctttgcccctcccaacaggcaaggagaaccattacacagccttccttacctcatctcagattagagtgtatttgaggactttatttagtagaaacctggctttgtggtttggatgttggagatgaacttgctttcctttctctttggtcaacgaggtgtcggttttcttagggaagagtgcggtgttcttttccgcgcctaattaggggatttgtaatttgaaagatttctgtgatgggagtgcagtaggtttgcagtacctagttatttattttcagaatttcttggtgcatgggcttgaaggatctgttcaacttctaggacagtgtgtccagaaactgcag

SEQ ID NO: 3392 - DNA, 1183 bp, Artificial sequence
  DNA replication origin
agcctggccatttggcaccatccctctgcggtgcggggacagatctctcttaatcaaaatctcagaaccgccctgggcggaaagcggggaaaggagaggaaggagaggctgggactagccggaaatagagtcagggtcaggtccctgaattccaggtaaactgggcgctgcggcacctttttccagcggctgcggccaggactcgcttgctgtgagagcaaaggtgcaagcggatcgcggcggtcggtccacaggccttgaccttgtcctctttttctaaatgccagagccgcagactatgcggttttagaaatcaaacgtcaaggggacgggaccacagcaggctggcgaggttcctcgagcctcagcccggagcaagagaaacgtagccgcgccaaacacgcggggaagagctgtgcgctcggagccgcagccaggcgctctttctctcaggcgcgcagcggctggctggaaactcgcgcacggcgggtcaaagtgccctttcccgcctgagctgaggtacacttttgggggtacggggtgtggagaaagttgtgactgaaaataacctcgggtcttggatccatgaggccgaaaatgagaggccagagcgggggtagggaggaattaagaacaagtaagtggagaccgctggcttcgcttctctggcgcgcagggccctgtgccctcactgcgcgcatcgagatcaacttcttaggcaccaccagtttctccttcctctgtagatgtcgcagttagagtccccttttggccacattcccccaaaagtgcccaggcggtctttgcggatagattagcagggagagaagatccagcgccagtctgtgtcggtgccatttggaggagacctactccccagggtgtgtgcgcccgaagttccccgtcacaaaccatgggggctggagcgcggtctgttcccagctcgcatccccagttccctcccgagctcacattgcagcagcagtctggttcagacaggacccggggcgcccgcatctggcccggagctgcccagattctcaacctggccctcccaaaaccgctttccaaaactcaactgcaaagttaaaagcagaaacaagtttctgccactaactctgggccacattcggggatatgggtagatgcgaaacttagtacatcttcataggcagaaaccggt

SEQ ID NO: 3393 - DNA, 731 bp, Artificial sequence
  DNA replication origin
taaattctaataaaattaaatttcatctctctctcccaatctatcccctcacaactactgcaaagggggcgggggtgggagtaaggtcgtccccagaaaaggggggatcttgagcaaaatgcacgcctgctcctcttatttgttagttgcttcggtcaaaaagtttgctatttataggctacacgcggcagcccgaatccccgcgcccgcttccgagtgcaaagtgagagcgatcccggaggcgcccagcggcccgactccgtcgtgtcccgtgatttgttttgttttatttctgctctcacgcggcaagcagccagggagaagaccgtggggagccccgaaacaccctctggtagtggcaaagaaaacagttctgcagtcggtgaatgtgggtccgcgcctgaccccgcttcgcgcgcgcgggcgaaaaggctgggaggaggtgcagccgccctgccgccgccgccgccaacaccgccgccgccgccgccgcgcgcgcgccccttgctcagtccttggcctccgcctctgccccttcaacctccagctccacacgctttctcttgtccctcctccccctttgatttctcccttctcattctctatttcgctgtatctcttaccctcccctcacctctttggccctaccctcaacttccagctgagtttgcatctgggcgcaaaatgagtcaagactggcctttacgtgggaggcggggtgggcgtgtgtg

SEQ ID NO: 3394 - DNA, 1591 bp, Artificial sequence
  DNA replication origin
gcactcggaagcgggcgcggggattcgggctgccgcgtgtagcctataaatagcaaactttttgaccgaagcaactaacaaataagaggagcaggcgtgcattttgctcaagatccccccttttctggggacgaccttactcccacccccgccccctttgcagtagttgtgaggggatagattgggagagagagatgaaatttaattttattagaatttacagtagtggtgttaatttttgcggaagggggtaagaatctcgccatttatctgaccttctctacccacctacctttgctacccttctcccccacccaacaactggcactggatgggaagggcaaagagcggagctcccagggagggtggctgttgaagacagggggcggagggcgatccggagccgggtttctctctgggagtaccggagtgagtgggagggaaagggaaagcaacgccaggagttggcgttttcctgaggtactgggacaggaatttaggtaacccagaattttagatggaagtgcgaaaggtgagtgcggaaggcacaaaggagttcctgcagtgcagatttcctttcccagaagcgacaataacccactcagcaactttacttcaaccctaggctctggcctaccgggagggcaaacgcgggcacccgggtcacgtcatcgcttgcttgggggcgccagctctagcgtaagcctgagctgcgagatagctccgtggggttttgccatggggtcttgcttactaatcaccccgcacgccctcacccctgtccctggacgcccttttgctgcacccgctcacatctgcagacccaacggatgggatctacttgactgagattcctgaacacaacttactgcccgcccttcccctttccttttggccaggccggattgtgggtggtgattggctcagtaggattttcattttcattctaggtgcttccttaaaaataaagccccccgaatataacagacactcgctccatacaccaaacttcccagttcctgaggttgctacgctaaatttatcctgaatgtcgcacagaaaccagggtcaataggacgatcagcacggatgggtgtggggattgaggaaattggagatattgcagctgacgccaggtaccgggagaggagagtccgcagatgcagggacgttgctctgctcctctttggacgttctctgcctcagtgtcaggcctgcgaaatgggagtcaagcccgtcccgtgggcctaaagcgactagtagctgggggggagggagccggaggacagtggtgctttttctttccagtgccccacctctgcccaatgccagcagccagtacactacacaagaggtcaaacgcctaacctctactagtaccccaaagggcaaaaaccaaacagggtcccccatgcagtttatgtagtggcgttgctgacccaatcgcgcctttcctaacaccgctgcccaccagttacctcctcctaagaccgcttcccactagttacctcctcttaaacgcaaaagttactctgtcccagaatccagtttggaaagagtggaaaaatgcagaaatactaagggggctcag

SEQ ID NO: 3395 - DNA, 914 bp, Artificial sequence
  DNA replication origin
cgtctgagaagtgaggagcctccgcccggcagccaccccgtctgggaagtgaggagcgtctctgcccggcagccaccccgtctgggagggaggtgggggggtcagccccccgcctggccagccgccccatccgggaggtgaggggcacctctgcctggccgcccctactgggaagtgaggagcccctctgcccggccagccgccccgtccgggagggaggtgtgggggtcagccccccgcccggccaactgccccgtccgggagggaggtgtgggggtcagccccccgcccggccagccgccccatccgggagggaggtgtgggggtcagccccccgcccggccagccaccccgtccaggagggaggtgggggggtcagccccccacctggccagccgccccgtccgggaggtgaggggcgcctctgcccggccgcccctactgggaagtgaggagcccctctgcccggccaccaccccgtctgggaggtgtacccaacagctcattgagaatgggccatgatgacaatggcggttttgtggaatagaaaggggggaaaggtggggaaaagattgagaaatcggatggttgtcgtgtctgtgtagaaagaggtagacatgggagacttttcattttgttctgtactaagaaaaattcttctgccttgggatcctgttgatctgtgaccttacccccaaccctgtgctctctgaaacatgtgctgtgtccactcagggttaaatggattaagggcggtgcaagttgtgccttgttaaacagacgcttgaaggcagcatgctcgttaagagtcatcaccactccctaatctcaagtacccagggacacaaacactgcggaaggctgcagggtcctctgcctaggaaaaccagagacctttgttcacttgtttatct

SEQ ID NO: 3396 - DNA, 1211 bp, Artificial sequence
  DNA replication origin
ttccacaaaaccgccattgtcatcatggcccattctcaatgagctgttgggtacacctcccagacggggtggtggccgggcagaggggctcctcacttcccagtaggggcggccgggcagaggcgcccctcacctcccggacggggcggctggccaggtggggggctgacccccccacctccctcctggacggggtggctggccgggcggggggctgacccccacacctccctcccggatggggcggctggccgggcggggggctgacccccacacctccctcccggacggggcagttggccgggcggggggctgacccccacacctccctcccggacggggcggctggccgggcagaggggctcctcacttcccagtaggggcggccaggcagaggtgcccctcacctcccggatggggcggctggccaggcggggggctgacccccccacctccctcccagacggggtggctgccgggcagagacgctcctcacttcccagacggggtggctgccgggcggaggctcctcacttctcagacggggcggctgctgggcggaggggctcctcacttctcagacagggcggttgccaggcagagggtctcctcacttctcagacggggcggccgggcagagacgctcctcacttcctagatgggatggcggctgggaagaggcgctcctcacttcctagatgggatggcggctgggcagagacactcctcactttccagactgagcagccaggcagaggggctcctcacatcccagacgatgggcggccaggcagagacgctcctcacttcccagacggggtggcggccgggcagaggctgcaatctcggctctttaggaggccaaggcaggctgctgggaggtggatgttgtagcgagctgagatcacgccactgcactccagcctcggcaccattgagcactgagtgaaggagactccgtctgcaatcccggcacctcgggaggccgaggctggcggatcactcgcggttaggagctggagaccagccctgccaacacagcgaaaccccgtctccacccaaaaaatacgaaaaccagtcaggcgtggcagcgcgcacctgcaattgcaggcactcggcaggcttaggcaggagaatcaggcagggaggttgcagtgagccgagatggcagcagtacagtccagcttcggcttggcatcagagggagaccg

SEQ ID NO: 3397 - DNA, 958 bp, Artificial sequence
  DNA replication origin
tctagccgattagtggggggcaaggcgaggttcctttaacctaacgaggtctgtggaactccgccgtgagagtctcccggtcggctcccgggacgtggggtgcggagaggccgcgacgcggcgggacagggcaaggccccggcgaggtgccgtcccgagacgccgttcgcgtccccgctggggcgcgggctggggccgctctgggtcccggcgccgcccgggactggagggcgcgcagcgggtcggcggctcttcggcttccctacccgctcactcgggggcgcactggcacccccaggccccggccgcggaggagcgagcctccctcgccccgcagcgcgactccgactgggaagccgcggcaggggtgatggaggagacaccccccgtttgggcggagggaagccgccgcaccccgggcagcggggaggggtccggcgctgcgcgagcagggttggccctgctcgacctgggacccctgctgggtaaagtgcggaacaggacggggaggagggagcgacccgcgccgggccaggcgagggcggactggaagcagcggggctcacgcgggagcgcctcaaggctctagaccataagccgagccctaccgcctcggtgatgagcccgcacctcttccctatttcggaccggccagacctcccacccagtcttctcggtcctgctgatgacccgttgctgactaaaactgttttgggtctagagggtcgcgcacgtctggccaccacagctttggggcgaaggaattgggtttcacttagtcaaactgccccgcgatttactttcttccttcccctcaacctgcatccccttagcggtgattgatccgtaagagcccagagaaagtcactccccccgcttcttaatcagctgcctctatctatttataaccacacaactttgctggcggtaggtcaacaaaggcgtggagagcggcgga

SEQ ID NO: 3398 - DNA, 1428 bp, Artificial sequence
  DNA replication origin
ttgaggcgctcccgcgtgagccccgctgcttccagtccgccctcgcctggcccggcgcgggtcgctccctcctccccgtcctgttccgcactttacccagcaggggtcccaggtcgagcagggccaaccctgctcgcgcagcgccggacccctccccgctgcccggggtgcggcggcttccctccgcccaaacggggggtgtctcctccatcacccctgccgcggcttcccagtcggagtcgcgctgcggggcgagggaggctcgctcctccgcggccggggcctgggggtgccagtgcgcccccgagtgagcgggtagggaagccgaagagccgccgacccgctgcgcgccctccagtcccgggcggcgccgggacccagagcggccccagcccgcgccccagcggggacgcgaacggcgtctcgggacggcacctcgccggggccttgccctgtcccgccgcgtcgcggcctctccgcaccccacgtcccgggagccgaccgggagactctcacggcggagttccacagacctcgttaggttaaaggaacctcgccttgccccccactaatcggctagagagggaggccggcgaaacaaaagccgtagaggaaaattaagcgacttccccctcggcggggaacttggaggtgggggagcggggagcggcgcggggcgcaaggagaaggaagtgctgagctgggttgccgacgaaccccgggcagggggaggtggggggctgcggcagaagaaagacaaacatctggggatcggaccatatgccggagctttgtcttgtccttcaaagttcggctgcccttgaagtgatttgtcaggcggcccacgggtgacagggaggatgtgcagcggggagcgggggcgggacatgccggggggagcggagagggctagaagagaggggaggaaggggggacgccaacaagagggggagcaaagtgaccccgccgcccgaggaacggtagaaaccgggatcgcggaggtgcgagcccgagcccgggagcggagcgcttcccggggagacgccaagacggcgagaaaggaggagcgggaacgcagaggttaagcggagggaaggccgaggagaaacagccagaggacgggaaggaggaaatagacggggagaagaaactgaagattagtcgttgaggtgtattaagaaagaggacatgtcgcctattttaggaaaagtggctttgagctccccccgcacccccaccattttttctttctcttttgcccgccaaccgctgaactgattagactgtaattaaggccataaagccctcagattatacacctgtttattcactgaagtcggggtctcatcaagcaaattagctgcttgcaggctacacattgggcctcgagcttgcctgattaatgaagtttattgggagctgttaaaa

SEQ ID NO: 3399 - DNA, 940 bp, Artificial sequence
  DNA replication origin
ctggggacgggctggggacgcactggggcggaggaccagggcacaggcgagctagcggaggagtcggctgaggccattcagccgctgattttcgtcctggaacggacttcgcgtaaacacaccgagccattcagagctctctccaagtcacattctgaggctccggccccggaactctgggctagacgaccccgccccggaaccttgtgttaccggcactaaatgcagaagttcctctggttgccaccggacgcaactgtcaggtgacgcttccggcgcagaaaaatggcagccgccgctccggactcacgtgtgagtgaggaagaaaacctgaaaaagaccccaaagaagaagatgaaaatggtaactggagccgtagcgtcggtgctggaagacgaggccacagacacttctgatagtgaaggtaatgtggtagggctgagctttggtgtctgggaggaaaggcggggctgagttcgtgtcaagcagcgcttgcgacttcatttgctgctagccacctgggttttatcttggcaccacttcagaggggcgactttggcttagtgaggaggcttggggaagtcgtgttcagagaagtaacgctgtcaactgtaattttgagtttccacattcttttactaggtattttcagggtcaccattattaattataataaaatgggtgaaacacctgcagctaccgagaaacttacagtagcaaagggtgaaaggaagagggtacttgaaaacaggagaagaatgggtctcatagggtgtaagaagcaaaaggttaaaagaggtaagaggaagaagggggtgtacttgactttttgtgcggtagatgtgtgcgtgttttagagactaaataatagtgaatgaaagaagagtttggtggttaaggtcgattaaaaactggtagtgtttgataactatgtctctca

SEQ ID NO: 3400 - DNA, 1317 bp, Artificial sequence
  DNA replication origin
agtaggggcggccgggcagaagcgcccctcacctcccggatggggcggctggccgggcggggggctgaaccccccacctccctcccggacgtggcggctggccgggcagaggggctcctcacttcccagtaggggtagccgggcagaggcgcccctcacctcccagtaggggtagccgggcagaggcgcccctcacctcccggatggggcggctggccgggcggggggctgacccccccatctccctcccggacgtggcggctggccgggcagaggggctcctcacttcccagtaggggtagccgggcagaggcgcccctcacctcccagtaggggtagccgggcagaggcgcccctcacctcccggacggggcggctggccgggcggggggcttacccccccacctccctccaggacggggccgctggcctggcggggctgacccccacctccctcccggacggggtggctgccgggcagagacgctcctcacttcccagacggggtggctgccggacggaggggctcctcacttctcagacggggcggttgccaggcagagggtctcctcacttctcagatggggcggccgggcagagacgctcctcacctcccagacggggtcccggccgggcagaggcgctcctcacatcctagacggggcggcggggcagaggcgctccccacatcccagacgatgggcggccgggcagacacgctcctcacttcctagatgggatggcggcggggaagaggcgctcctcacttcctagatgggatggcggccgggcagagacgctcctcactttccagactgggcagccaggcagaggggctcctcacatcccagacgatgggcggccaggcagagacgctcctcacttcccagatggggtggcggccgggcagaggctgcaatctcggctctttgggaggccaaggcaggcagctgggaggtggttgtagcgagccgagatcacgccactgcactccagcctgggcaccattgagcactgagtgaacgagactccgtctgcaatcccggcacctcgggaggccgaggctggcagatcactcgcggttaggagctggagaccagcccggccaacacagcgaaaccccgtctccaccaaaaaaataggaaaaccagtcaggcgtggcggcgcgtgcctgcaatcgcaggcactcggcaggcactcggcaggagaatcaggcagggaggttgcagtgagcccagatggcagcagtacagtccagctttggctcggcatcagagggagaccgtggaaagagagggagagggagactgtgggaga

SEQ ID NO: 3401 - DNA, 946 bp, Artificial sequence
  DNA replication origin
gagggaggtgggggtcagccccgccaggccagcggccccgtcctggagggaggtgggggggtaagccccccgcccggccagccgccccgtccgggaggtgaggggcgcctctgcccggctacccctactgggaggtgaggggcgcctctgcccggctacccctactgggaagtgaggagcccctctgcccggccagccgccacgtccgggagggagatgggggggtcagccccccgcccggccagccgccccatccgggaggtgaggggcgcctctgcccggctacccctactgggaggtgaggggcgcctctgcccggctacccctactgggaagtgaggagcccctctgcccggccagccgccacgtccgggagggaggtggggggttcagccccccgcccggccagccgccccatccgggaggtgaggggcgcttctgcccggccgcccctactgggaagtgaggagcccctctgccgggccacgaccccgtctgggaggtgtacccaacagctcattgagaacgggccatgatgacaatggccgttttgtggaatagaaaggcgggaaaggtggggaaaagattgagaaatcggatggttgccgtgtctgtgtagagagaagtagacatgggagacttttcattttgttctgtactaagaaaaattcttctgccttgggatcctgttgatctgtgaccttacccccaaccctgtgctctctgaaacatgtgctgtgtccactcagggttaaatggattaagggcagtgcaagatgtgctttgttaaacagatgcttgaaggcagcatgctcgttaagagtcatcaccactccctaatcttaagtacccagggacacaaacactgcggaaggccgcagggtcctctgcctaggaaaaccagagacctttgttcacttgtttatctgctgacattccctccact

SEQ ID NO: 3402 - DNA, 1065 bp, Artificial sequence
  DNA replication origin
cgctgtactacaaagccaaatgtgcttcaggttggaaatgcaaaaataaaataaaataaaataaaataaaataaaacacaaggcacaccctttcaaaatgaaatgtacgaaattctgaaagcctatatagtatctaataaaccagccttggaactttatactacttggggaaaggcttattaaacactttgatgataaaaataggtggaaggcttcaataaagcaaattaacctttcttggctatgtcactgtaattttagttcctaatgtagattctcgttcacttcctgacaggttattttccttctttgagagagtcttacctcaagagtcactcatttgtcagccatttgttctcaaaatctgaatgggggaaatgcagatgaaagaagggagagtgtggggggatgatcaacactttcggaatgggaggtagcagaaggccacagtctccgggatggaagagagtgggagctggggcaataccagagtggagcgctgacatgtggcaaggaacggggaggatgcgatcacggagcaggcaacatgaaacagggaacgaccccaggctgaagatgggagacggagaagatactcagagagaaagctaggaatgtgtgggggtggggggagggagggagaaagcggtgataggcagaggcgagaggaaacaagacgcagtttttagccaggggtcagagggcctaaggagaaaagctgggtcgagaggaagacaacacaaatggggcttcaggacgaggtgggcagggtgtcatcccggagcggaggggaggcacggggagaactgggggtccagagggcagaggcaggaggcgcagagcgagtaggagactcgaacccgtgagcagaggccgcgggtgacgagggaaggaagggcgaggccagagaggcacttactggggtccctccgcaaggcgccgctgaggatctcctcccgcaggtgaggaaagaggaagtcccgggcggcctggaggtcctggaagtagcagaactggacaatggagcaggccatggctccagggaaccccactacggcactcacc

SEQ ID NO: 3403 - DNA, 945 bp, Artificial sequence
  DNA replication origin
cctctctgcctggcagccaccccgtctgggaagtgaggagcgtctccgcccggccagccaccccgtccaggagggaggtgggggggtcagccccccgccaggccagccgccccatccgggagggaggtgggggcgtcagccccccgcccggccagcctccccgtccgggaggtgaggggcgcctctgcccggccacccctactgggaagtgaggagcccctctgcctggccagccgccccgtccgggagggaggtaggggggtcagcaccccgcccagccagccgccccgtccgggaggtgaggggcgcctctgcccggccgcccctactgggaagtgaggagcccctctgcccggccagccgccccatccgggagggaggtgggggggtcagccccctgcccggccagccgccccgtccaggaggtgaggggcacctctgcccggccgccccttctgggaagtgaggagcccctctgcccggccaccaccccgtctgggaggtgtacccaacagctcattgagaacgggccaggatgacgatggcggttttgtggaatagaaaggggggaggggtggggaaaagattgagaaattggatggttgccctgtctgtgtggaaggaagtagacatgggagacttttcattttgttctgtactaagaaagattcttctgccttgggatcctgttgatctgtgaccttgcccccaaccctgtgctctctgaaacatgtgctgtgtccactcagggttaaatggattaagggtggtgcaagatgtgctttgttaaacagatgcttgaaggcagcatgctcgttaagggtcatcaccactccctaatctcaagtacccagggacacaaacactgcagagggccgcagggtcctctgcctaggaaaaccagagacttttgttcacttgttaatctgctgaccttccctccac

SEQ ID NO: 3404 - DNA, 1342 bp, Artificial sequence
  DNA replication origin
tcctggcccgttctcaatgagctgttgggtacacctcccagacggggtggtggccgggcagaggggctcctcacttcccagaaggggcggccgggcagaggtgcccctcacctcctggacggggcggctggccgggcagggggctgacccccccacctccctcccggatggggcggctggccgggcagaggggctcctcacttcccagtaggggcggccgggcagaggcgcccctcacctcccggacggggcggctggctgggcggggtgctgacccccctacctccctcccggacggggcggctggccaggcagaggggctcctcacttcccagtaggggtggccgggcagaggcgcccctcacctcccggacggggaggctggccgggcggggggctgacgcccccacctccctcccggatggggcggctggcctggcggggggctgacccccccacctccctcctggacggggtggctggccgggcggagacgctcctcacttcccagacggggtggctgccaggcagagaggctcctcacttctcagacagggcggctgccgggcggaggggctcctcacttctcagacggggtggttgccaggcagagggtctcctcacttctcagatggggcggccgggcagagacgctctttacctcccagacggggtcgcggccgggcagaggcgctcctcacatcccagacggggcggtggggcagaggcgctccccacatctcagatgatgggcggccgggcagagagctcctcacttcctagatgtgatggcggcccggaagaggcgctcctcacttcctagatgggatggcggccgggcagagacgctcctcactttccagactgggcagccaggcagaggggctcctcacatcccagatgatgggcggccaggcagagacgctcctcacttcccagacggggtggcggccgggcagaggctgcaatctcggcactttgggaggccaaggcaggcggctgggaggtggaggttgtagcgagccgagatcacgccactgcactccagcctgggcaccattgagcactgagtgaacaagactccgtctgcaatcccggcaccttgggaggccgaggctggcggatcactcgcggttaggagctggagaccagcccggccaactcagtgaaaccccgtctccaccaaaaaaatacgaaagccagtcaggcgtggtggcacgcgcctgcaatcgcaggcacttggcaggctgaggcaggagaatcaggcagggaggttgcagtgagccgagatggcagcagtacagtccagctttggctcggcatcagagggagatcgtggaaa

SEQ ID NO: 3405 - DNA, 1269 bp, Artificial sequence
  DNA replication origin
agagcccttcagcccaccgctgcattgtgggagcccctttctgggctggccaaggccggagctcactccctcagcttgcggggaggtgtggagggagaggcgcgagcaggaaccggggctgcgtgcggagcttgcgggccagctggagttctgggtgggcgtgggcttggcgggccctgcactcggagcagccggccggccccgcactcggagcagccggccggccctgccggccccgggcagtgaggggcttagcacccgggccagcggctgcggggggtgtactgggtcccccagcagtgccggcccaccgccgctgtgctcgatttctcgccaggccttagctgccttcccacggggcagggctcgggacctgcagcccgccatgcctgagcctcccaccctctccgtgggctcctgtgccgcccgagcctccccgacgagtgccgccccctgctccacggcgcccagtcccatcgaccccccaacggctgaggagtgcgagcgcacagcaccgggactggcaggcagctccacctgcagcccccgtgctggatccactgggtgaagccagctgggctcctgagtctggtggggatgtggagagtctttatgtatagctcagggattgtaaatacaccaatcggcactctgtatctagctcaaggtttgtaaacacaccaatcagcaccctgtgtctagctcagggtttctgaatgcaccaatcgacactctgtatctagctactctggtgaggtcttggagaacctttatgtctagctcagggattgtaaacgcaccaatcagcgccctgtcaaaacaggccactgggctctaccaatcagcaggatgtgggtggggccagataagagaataaaagcaggctgccccagcgagcagaggcaaccctctggtttcctttctactgtgtggaagctttgtgtttttgctctttgcaataaatgttgctattgttcattttttggggccacgctgcttgcatgaggtgtaacaccgcgaaggtctgtagcttcactcctgaaccagcgatcccacgagcctattgggaggaatgaacaactacagacacgccgccttacgagctgtaacacacactgggaaggtttgcagcttcattcctgagccagtgagaccacgaatcaaccaaaacaaagaaactccgaacacatctgaacatcagaagggacaaactacagacgtgccaccttaggcgtgctgtgagctgtaccactcaccacgagggttctc

SEQ ID NO: 3406 - DNA, 1008 bp, Artificial sequence
  DNA replication origin
tccacgcctcatcctgccagcctcgccgccccgccagcgccgggcaaccgcctcgcccgaagccctccctcgttactgtccgcataccccggcggcgccgccgcgggaagcggctccccctcctcttcctccgcgtcctcttccctctttcccccgccggggccgcttgttgcaccgccccgcggcctgcgggagccgctcgccccggccttgtgctcgcgtccgcacccctttcctgtcgccccccggggcccgcaccacagcccggccggcgagaccccggccagaccccgctgcccgcacaaaatgtcggcccggacgccattgccgacggtgaacgagcgggacacggaaaatgtgagtaaccggagcctccctcgggagcagtgggggcgagaccctcctctgatccccacttcacccgcgcttgggccgtcccccgtgcctcggcgcggccacccgcggcagggtctccacctggagcccggcgtgaccctcacccactgctcagccctattcttcattccaaccccatttcgcttgtttcccctcaagggtgagggtagggaaccgtaagtggcgccctctcgctcggaggtggtcctccaggggcggatggggtgatggagggcagagaagcagaatgggatggcagagtgggcagtcaggattgctttatttctacctctgcattctgtgcccccacccgaatgaatgcttgctttacaatagcagacgagccggctacctctcacactcttgcttttctggatctttcaatcctttgcactctcccctcctccccccgcattgccccatgactttgctttttgtaacattgtgtccacattttgggtcatgggcaccaaagcgagaaggatgggaatggaagtggagatgtgtgcgtgtttgtgtatgagtttatactgctgtgacactcttagtagggatgagtagaagaatttcacgaacagcatctatggccctggggttacagcaaaatgttga

SEQ ID NO: 3407 - DNA, 935 bp, Artificial sequence
  DNA replication origin
tgtgggtgtctgcttagggtcctaccctaacccaccgtgacactgtaccttggagagtcaaagaagtgtgcttggctctatagtgtcattcattaccaattcctttcacctactgatttatttattttgaggcagggtctttgtcacccaggctggagtgcagtggtgcaatcacagctcactgcagtctcaacttcctgagttcaagggatgccctgcctcagcctcccaagtagctgggactacaggcatgcaccaccatgcccggctaattctttcatctatttagtcactcagacatttaacaaatgttacctgacacctgctctgcacctgtcactaggctgggacagtgcacaagcaaccaggggcatggtgcctgcctccttgcctcctactgaggggcagaccaaggataaaagacaaatgagtagtcagctgctatgggggaagcaaatgaggaggccttagcctccggtggatgggcagggaggcctgtgggaggacttgacagccttggggcaggcgctctgggcagggataagagctgcgaggttgtcagaagggatgccttcagtgccttcaggagggtgggggctcagcgtggttgggaagggaagccagtttcgctggagaggggagaggaagggagtgggggtgggaagtggaggtgccttctccccacttcctgtaggctgtattgacagcgaggggaagtgaaggggaaacttttgataggctctaagtagtggggaggcgtggcagtaggatccactccatggtttgaaaagatccctctaactgctatgggaacaggctggcctggggtgtgccttgctgaagcagagaggagtggaaggggccttgggtggtccaggagcaatggaaaagagaaagcccactggagccatattgaggaaatgggtgcattggct

SEQ ID NO: 3408 - DNA, 1134 bp, Artificial sequence
  DNA replication origin
tgaacttggccttcccagataaacgaccaacggcccaacagtcagcccagaaactcaggtggcaaacctctatagtccttcccagatagatcgggccccacctgcccccccgctcctcatcccaggcaggctccgcgctgccccgcgcccgcgctgtgctgtacctgtcccgcaggttgccgctgcgcagccccatggccgtgcactcagcctcgctcaccggcacccctttgcaggatttcaccgggtagatccagagcttcgccacggtgcccacctgctgcagccgccggcgccgcctgggccatgcgcggcgccaggcgacagtccccagggccacggcggccagtcctagcgcggcgaccccgagccacctgggccagggccgggctgggaggccgaggcgggccagcgcggaggagctggaagcgcccatggcagagcgagggcgggcgcggaccggcgcacagacccggcagcgaccggagaccgggaggacgaggaggcccttaaggatccgggcaggcgagaggagtcaaagttgacccaactacggaccctctcacactttcaccgccgagacggcagagcagttccgcggagagcgggaatgccttaatgcggtgaccaagcctgcgcggtaatggaggaagacaggcagacagcggcgggggtaccctgggcgccgtgggagcgacgccgcccaaagcaagcgagctaatggggcggcctctggggtggtcagtgtctcctccctcttccccgcccctacaacacgacagttacccatgcaacatgaccttcagcgccagcactctgccacccccttctctgctaatactgcacgcttagtcgctcgacaagatcaccgcagaacgtgaaggcgggttgcccaacggaggatttacaaacatttgggaacgactttttctggcaggtcgctgtgagaactgcaggactttctgcacacaaagacacagtctaaacctctgcactcaaagacgaggaactctagcgtggcttataggagcatgactcaaggtcccccaccctccgctgccgcctaacctcgaccccagtaaaatgtcttcccgagaaagctcaaggcagccaggagaattccccgtttattct

SEQ ID NO: 3409 - DNA, 1503 bp, Artificial sequence
  DNA replication origin
ccccgagcccaaaggctgggcagctcctgaacccttccgggccaatcagagcagtgcgtccttctggggggcggcgcggggagtgggaggtggtggctcagcttccacttggtcggcgccccactgcctctgcaaccttccgtcgcctgcgctgcagggcgctgtgccctcccccaccccacgatcgctgcaagtgaccaatttatttacttacgtatttatggggttatttgacctaaaataaacaatatacaacatttgcaggacaaagcgtgattttgaaattagaaatcagacagctggcagcagcctctcctgggaatagtggagagctggtaggccctgcctggcctgtgcagtgtccagctctctgctgccgccgccctcccctcagtctgcccaggggctaggagcttccagagagtgggggtctgatgaaggaggatgctaccaggccctccgcgccggcgagccaaggccagagttctcccggcggcccctgggagcggcaatgggcgtctgagagtgccttctacacggctcggggacgctcgactcctaccggcggggagcctcgagctggagctgcattggcaagggccttggctcagtttaacgctgcacaaggtccccgggctgcttccggcgggagggaaagtcacttggtcctgcaggcactcacctcagtcacttgtcacttccaaatcaggttatattccagacaacaatgttagcataccccgaacagcgtggtttaggagtcaggctcctgcttgatgtaccaagctattaaaggaaaaaaattccctcagacgcttgttaaaaaggtaaggaagactattcaaggctactgtaacaggggcatcacaataggggaaagagattaggctcaactctgtattacagcaaagacagctcaggattcatagccaaggagcgaagttcctcggggtcagtgaatggaaaatcactaagcggagacatcaagtgtagaggattcttgataaacccacttaacaggattctactgaacaaggcaaggacttacacactgagggtgacatatgaggaatctgagcagacatcaagggtgatcagatattaaggatgggagaatactctggaaactgactaagcaggattcttgctaaactgggctctgcagggagtagggtggcaaggtcaaggcctcatgaagaaaagggcacaggagagtccgaagtttggtcaaggagagtctgtgttatccccagctcagccatggtcccctgagccaggagtgtacattgcaagactcagccagaattgcccatgcagggcaagggtgcatggatgagaagcgggagttcgccaagagaaaagaacaacactcttcctccagctggcaactcactgcagagcagttcagtgctcagggaggctctgtctttattggcctgaacacttatctgtcctgtttttctgctctattctcttctcttccaaccccaggtcacaccttgt

SEQ ID NO: 3410 - DNA, 1779 bp, Artificial sequence
  DNA replication origin
gtggggcgccgaccaagtggaagctgagccaccacctcccactccccgcgccgccccccagaaggacgcactgctctgattggcccggaagggttcaggagctgcccagcctttgggctcggggccaaaggccgcaccttcccccagcggccccgggcgaccagcgcgctccggccttgccgccgccacctcgcggagaagccagccatgggcgccgccggctcctccgcgctggcgcgctttgtcctcctcgcgcaatcccggcccgggtggctcggggttgccgcgctgggcctgaccgcggtggcgctgggggctgtcgcctggcgccgcgcatggcccacgcggcgccggcggctgctgcagcaggtgggcacagtggcgcagctctggatctaccctgtgaaatcctgcaagggggtgccggtgagcgaggcggagtgcacggccatggggctgcgcagcggcaacctgcgggacaggtacggccaagcgccggcgcggggcagcgctgatccggctcggggcaagggggtgagaagggaggagcgcaggggaggtctgcagagtctgctaacaggtccttcctcctattacaaagaaactgggagttgggtgagacaaggccaaagagaaaaaggaaccctcaccccccagcatcagaccccagggctctgggactctgagcgcgtggacccgttttcccggggtgggcggatctccacctcccactggctctttggcgtcatgtgctcctgctgaggtgtggtatcgctcccaggtgtctgccagtgagcaaacttcttaatctccatttagtggaggcggctagcttgaagaggttggttcccagtcgctattttgagtgactttcttgagatcttggagaaagctgaactgtagagtccagccctccaagagcgcaccaaggcggagctcataatagtaatgacagcagttcaacgaataccttcgggcgcggtggctcacgcttgtaatcccagcactttgggaggccgaggcgggtgcattacctgaggtcaggagttcgagaccagcctgaccaacatggtgaaaccgcgtctctactaaaaacaaacaaacaaacaaaaaaacaaaaattagccgggcgtagtggcgcgcacctgtaatcccagctactcaggaggctgaggcaggagaatagcttgaacccgggaggtggaagttgcagtgagccaggattgcgccactgcactccagcctgggcaacagagcgagactccgaatcaaaaaaagaaagaaagaaagaaagagttgtgggggcattgcagatgctattttccccaattctctccaatgctctcaagcactcttgtggataaagaagttgaattcagagccacacagcagcagaaccaggactcttattttctttagcacactggggctttgtaaagagtgactttgttaatgtcctgtctgggttctgagagctgcgtggattcctggggttcagcgaaggctgcaaaacccgggagccggcagctttgtcctctttagggtctggcttcaggccagcctcgggtcttattgtgaggctgcacttgaaactcctttccagagcagccctcgcagttcagcaagtaacacaggactaatgggagctgtaacctttctcctaccagctccccagacagagggcaattcatgacatagttgaaaggtgagtgacgtatgcatctttgcttcaggaaggaagccaagaatcctaaatattccatgttttgggccaggcgc

SEQ ID NO: 3411 - DNA, 1049 bp, Artificial sequence
  DNA replication origin
tctgcgggctcagaactcggcgaggggcctgcaggggccaggcttgggcctggggaaggggtagagggggcggcgggggtcgctccaaagacttgtatttcgcgtttgcctccgggagctgggagtaaggccttggatggcgccgacgcggttgcgaggaagctgaggcctgggagagcaaggggcgcgcaggcgaagttgcaacttgcactccagccgcgggcctggcggagaaagggaggctcgcggcgccgcgaggagtcggcgggcctcggggcctcgctttcgccgcatctgcccagcgctccgggccttgaatctcggcagatgcgagttgtgggcacctagggaaccctgaggactcgcattcccccgggtctgtatcccgtgcccaccccggagcgtcgcaaaccttggaaagggtgaaagctgataggggagtcttatttcttaagagagagggtgagggcgcgcggcgctgcctcgggtaaggagtaaatgcacctctttcacaaccgtgagtttgggcttaggctgaggtctaaatgtttgcagtcaaattagaaacgcaatcaaactggaagtggcactagaaagcagagggctcacggcctccgctacgcacactcccaccgaaggctcaccagaaccctcagccagcgcctcaattgcccatgttgtacttgtcgctcctttgccttcaccttgacacagaaaaactggtcttaatacgtctctcgccccaggtacccctaccttcagccaaacacacccatctatctctggaaatagcacctctctcctggttgcgtggagcaggggaagaaaacctttcagtaaaagagagatggagagcgagagcgggagagctggagggcgggaggagggagagagagagggagagggagagatcttagtgctggctgatcagaagtgattgataattttccaggagaaagtcaaaagcttaaaaggatagcatctgcatcaaggggctagagaaaacaccagaaattaattttataagcccaaaccctgaactcgagata

SEQ ID NO: 3412 - DNA, 1208 bp, Artificial sequence
  DNA replication origin
gaggcgagggccggatctcggccggtcaccgcctcgctccctggcctcgctttaaaggcggcgcggcgcccgcactcctcgcgggctggatgagagcgaggggcgctggggccgcagggcgggcgggggagccagggagacgggagccggacaccgcaagaaaacccaaatagctaagccctaagagctaaatttaaaacaacaacaataatagtccgttagttagggggggggaaaagtaatagaaaaaaaaaaaaactcgtctctaaaaactcccaaagttttggcaggagctttcgagtcaggcccggggtaggacctcgatccgagcgctcattggtcatcctcgtgaccaatgggagcggggagtggaggggaattaggaacaagggggcctggccggaccctagccacgccccggccacgccaaagtttttgctgcggccgcgtgggcttagtagcgcacatcgcagtgcttcttgctactctgcgtaggggccaggcagccgctccggagggctctgactctcttctaacttctgcagctccgaaccgccacggggcaaggagggttgatcacaggagctttcctgaagcgcttgtcacccggggcgagttgggggcgtggggaagggacggtaatctcactctttagggctctgcaaagcccgcctcccggtggagagcggagcgcgctttggcccctttgcttcccttctcttgacctcattctgcttttattccaggagtccgtgtcctcggcaaagcccctcatctttcctgggcccttgcccaaatgttgccgccctgagtcccggcccaactcagcaccgcgtccgcctcgtgcctcccaggagatcctccgggaagcgaggaggaggggcggccgcaaattggttttattctgagctgtcacacagtgacaaattgaacgagtgacttttcaaacaaaataagacggatggctccaaacgtctctcttagacgcagccaaacctttccccggagcctcagaggctacaaaacaggctgcctcccgaaacccgggagagcggcacgcgcttccatcctttgcaggaggttgtaggaaatgttagcctcacccctccaccacatctccggatcacgtggggttcgttgttttgcaagtgcccacaagagcagatttccgtggggttcaatactgctttcaattctgtgacagcttc

SEQ ID NO: 3413 - DNA, 1305 bp, Artificial sequence
  DNA replication origin
aaacagctaaagactgaatcctggttcaattaaacacaagatgtgtcaacttggtccagttacttcctcttccttaatttgattatctgtaaaaactaggataataatactcatcatttggatcgaaagttcagttaaaatacagaatatctagaaccataaaaatcaacatccatcaaactcatataccatcccaggcactatgctaagtactttacatggattatctgatttaatcctcacaaaaattcctttacatgagtactataattattcccatttaccaactaggaaactgagattagagaggttaaatcgtttgcccaaaaccacagagctaggatgaggggagctgagctcatcagccccggcatactgattttagagttcacgttcttaaagcattctgttctataaaatgcaactgcgtctggaattggtgggttcttggtctcactgacttcaagaatgaagccacggaccctcgcggtgagtgttacagttcttaaaggcagcgtgtccagaatttgttccttctgatgttcagatgtgttcacagtttcttccttctgatgggttcgtggtctcgctggctcaggagtgaagctgcagaccttcgccatgagtgttacagctcttaaggcggcgcgtctggagttgtttgggcttcccggtgggctcgtgggtgtcgctggcttcaggagtgaagctgcagaccttcgcggtgagtgttacagctcataaaggcagtgtggactcaaagagtgaacagtggaaagatttattgcaaacatcgaaagaacaaagcttccacaatgtggaagggggaccccagcgggttgccactgctggctcgggcagcctgcttttattattatctggcccacccacgtcctgctgattggtagagcccagtggtctgttttgacagggcgctgattggtgcgtttacaatctctgagctagacacaaaggttctccacttccccaccagattagctagatacagagggtccacacaaaggttctccaaggccccaccagagtagctagatacagtgtcgattggtgcattcacaaaccctgagctagacacggggtgctgactggtgtgtttacaaaccttgagctagatacagagtgctgattggtgtatttacaatccctgagctagacataaaggttctcctcatccccaccagactcaggagtccagctggcttcacccagtggatcccgcaccaggactgcagttggagctgcctgccagtcacgcgctgtgcacccgcactcctcagcccttgg

SEQ ID NO: 3414 - DNA, 785 bp, Artificial sequence
  DNA replication origin
ttcagcctggtaaagggttaactgcatcctgccggttcggtttacatgtaaatagagagcagctgctccgcgcggccccggctggctcttttaagtttttgattggttgccaatgacatcaccgcccgtgttttaacaccgaggacccagagcagcttcggataaaccctccttaaagagatgaggccacgccttcttacccgccccctaggctgcccattggtcgcggggctctgtgaggtagcggtcggctttctccggattcttattggcccaacccgccgtcggtcggcggcgagtccgccccctcagaaccttacatttacagtgtagcaaaagagaaagtaactatgttgctgctggagatcaatgaagccgagtgaatgggggctgaatgtgcgagtccatagctgaagaggagcgccagatggtggaggaatacacttatttatgaagtaagtggaagtcaccgcgactactcctgagagcccgggactggaggtggaggattgtaaggcggtgcttgtgtgagtgtgagtgtgtgtgtttgtgtgtgtgtatctgtgtgtgtgtgagagagagacagagacagaaagatagagatgcgatgctgacggaggagctacagcaggtagggttataaggttccggccgttggctcctgctaccctgtgcgtttactccctgcagtctacttggatttggggcgaagaaaaaatgaggtttgttgggatgctttgcggcagttttaaatgctcggggctcattagtgcgctgtgtgccga

SEQ ID NO: 3415 - DNA, 1174 bp, Artificial sequence
  DNA replication origin
gaggcaggcactaggcctggaaatggcccgacagtcatgagttgggactaaatgggccactgtgagggaggagctgtgcctgttgaggctgctggcaggcaagcagaaatttggcctcgggcagctgccatgaggcaagagctgggcctggaaaaagcccctgggaggcaagagcagggcctgcagaggctgttctcaagtcaaagctgggcctgttcatgccaccgggaagcagaaggtgggcctggagagtttgacttgaggaagttttgggcctacattggccgccatgagctggacaggaactgggccaaaaaaggctgttgtgaggcagcagttgtgcctgtagacccagccaagaggaagaggtgggcctggagaagaccccatgaggcagaggttgggcctgtagatgctgacaggaggcaggagctgggcctggagaggtcaacttgaggagattttgggccttcataggccaccagaaggcagcagttgggaccagagagtctgacttgagtaagttttgggcccggagatgacgtcctgggacaggagttgggcctggagaggccaacgtgaggcatgagctggatgtagagaggccagtgtgaggcaagacctgggcctgtctaggctgctgggagacaagcaggaatctggccagggaaggttgccatgagacaaaagttgggcctgcaaaggcccttgtgaagcatgagcttggcctagagaggccactgggtggcaggagctgggtgtgtagaagctgctgaaaggttgggagcttggcttggggggtccacagtgaggcagatgctgggcctgaagaatctgctgtgaggcagatgttgggactgtagaggccgacgggaggcagaggctgggcctggaggggccaccaagatgcaggagctgggcctggagaggctgcaaagaagcatgaactgggcctggtgaggtcgacttgagaaagttcagggcctggagagaaggctgggaggcaggagctgggtctaaagaggccattgtaacgatggagctgtgcctgtggaggctgttgtgaggcagtaggctcatctgcggagactgccgtgaggtagggtatgggcctaaataggccattgtgagtcatgagcttggtctgtagaggctgactggagaaagttctggg

SEQ ID NO: 3416 - DNA, 1333 bp, Artificial sequence
  DNA replication origin
ccacctccctcccggacgtggggctgacacccccacctccctcccggacggggtggctggccgggcggggggctgacccccccacctccctcctggacggggcggctggccgggcggggggctgacccccccacctccctcccggacggggcggctggccgggtggggggctgactcccccacctccctcctggacagggtggctggccaggcagaggggctcctcacttcccagtaggggcggctgggcagaggcgcccctcacctcccggacggggcggctggccgggcagggggctgacccccccacctccctcccggacggggcggctggccgggcggggggctgaccgcccccacctccctcccggatggggggctgacccccccacctccctcctggatggggcggctggccgggtggggggctgaccccccccacctccctcccggacggggcggctgccgggcggagacgctcctcacttcccagacggggtggctgccgggcagagggactcctcacttctcagacggggcggctgccgggcggaggggctcctcacttctcagatggggcggatgctgggcggagggtctcctcacttctcagacggggcggctgggcagagacgctcctcacctcccagacggggtcgccgccgggcagaggcgctcctcacatcccagatggggcggcggggcagaggctctccccacatctcagacgatgggcggccgggcagagacgctcctcacttcccagatgggattgctgccggtaagaggcgctcctcacttcctagatgggatggcggccgggcagagacgctcctcactttccagactgggcagccaggcagaggggctcctcacgtcccagacgatgggcggccaggcagagacgctccttacttcccagacggggtggtggccgggcagaggctgcaatctcggcactttgggaggccaaggcaggcggctgggagatggaggttgtagcgagctgagatcacgccactgcactccagcctgggcaccattgagcactgagtgaaccagactccgtctgcaatcccggcacctcgggaggccaaggctggcggatcactcgcggttaggagctggagaccagcccggccaacacagcgaaaccccgtctccaccaaaaaagtacgaaaaccagtcaggcgtggtggcgcgcgcctgcaattgcaggcactcggcaggctgaggcaggagaatcaggcagggaggttgcagtgagccgagatggcagcagtacagtccagcttcggctcggcatcagagggagaccgtggaaagagaggga

SEQ ID NO: 3417 - DNA, 968 bp, Artificial sequence
  DNA replication origin
acgtccgggagggaggtgggggggttcagccccccgcccggccagccgccccgtctgggagggaggtggggtcagccccccgcccggccagccgccccgtccgggaggtgaggggcgcctctgcccagccgcccctactgggaagtgaggagcccctctgccgggccagccaccccgtccgggagggaggtggggggctcagccccccgcccggccagccgacccgtccgggagggaggtgggggggtcagccccccgcccggccagccgccccgtccaggaggtgaggggcgcctctgcccggccgcccctactgggaagtgaggagcccctctgcccagccagccgccccgtccgggagggaggtgggggggtcagccccccgcccggccagccgccccgtccgggagggaggtgggggggtcagccccccgcccggccagccgccccgtccgggaggtgaggggcgcctctgcccggccacccctactgggaagtgaggagcccctctgcccagccaccacctcgtctgggaggtgtacccaacagctcattgagaacgggccgggatgacaatggcggttttgtggaatagaaaggggggaaaggtggggaaaagattgagaaatcggatggttgccgtgtctgtgtagaaagaagtagacatgggagacttttcattttgttctgtactaagataaattcttctgccttgggatcctgttgatcggtgaccttacccccaaccctgtgctctctgaaacatgtgctgtgtccactcagggttaaatggattaagggcggtgcaagatgtgctttgttaaacagatgcttgaaggcagcatgctcgttaagaatcatcaccactccctaatctcaagtacccagggacacaaacactgcggaaggccgcagggtcctctgcctaggaaaaccagagacctttgttcacttgtttatctgccaac

SEQ ID NO: 3418 - DNA, 1686 bp, Artificial sequence
  DNA replication origin
gaactcccgtccccgcacagcccaggcggcgccgccgcggagacccccggggccggcggagaccccaaggccagccgccccgaggccagccgcccctccagcgcactcactgctgcattcgtcgtccgcgcagagtttgtgctccgagaaccgccggccagtgctggggtccagctggcccggcacccgccagggcagccggagcacgagcagccagacgagcagcccaggcgccgcagccatgttgtggtcacctcggggagccggtgacgcggaggaggaggccggggcgggcgcagaggggcgggacgggggcggggacggggcggggacgggggggctggggcgggggctggggcggggacggggcggggacgggggcggggacgggggcgggggcgggggcggggacggggcggggacgggggcagggacgggggcagggacgggggcagggacgcgggcagggaccaggcggagcgccgggggcatgtgggaagacaagcgcagaggggcggcgcccgcgaaggtctgagcagtttccgactgacacgtcagcagaggctctaggagggatgcgggagacctccaggaggaggactgacagcagcctcctcctctcctcgaagccttctcctctggtcgctgccgtggcaaccaggactccctcgcccaatcacctgcctttgccccagtccctcgcagcacctccgcgtgactccattcttagttcacccctccccgcgcgcttgggtcccccaaccctgcgccatctcaacaggtcccttctggcgccttctcgcagtttctggtttgtggcctgtcccgaaccagccccccacttcaccccgctacttcaccccgctacccccactcttggcatggtacctccttttctgaactgccaaatcccacccgcgatttgccactgttagtctctggtttcaggctccctccttttcagcctcccagggcttccttgggggcaccatcccgtggtgctctttgattaagaaagggggaggtgagtggaatagggggctgaggatataaatcagagcccgtggcctgcttggtcgttgatagaaatgggtaatggtccttgggctgagatcttgagattcctagatctatatccataggaaaaaagtaaattaatttaataacagtgtgatgagcttccattttatacttatttcatgccagaattaagattaatcttcacaacaatcgcaccttagagtagtaggtcctattatgatccccatttcagagatgactaccttaaggcattcaaacacctagtgagtgatggagctaagattcaaacccaggtagtatgctcctttttaatcacagctctgtaaagcctccatcaagcaacaagcaatttttgtactttctttctgagcagggaagcaaaatcttatttaaatcatactataactggatgatttatatgtgcagttaaaaaagcgggggactgcatgagcaggtcagcccagagaagagtggctacaatgctctccagaagagtggctacaatgctctccagccctggttgaagaacttggcatctgtctgtgaccagcagcttctcattgcaatctctaaggttactcatcaaccttgaacaacaaacccagcagctggtttcccaaacaaatcgtattacttaaaagcaag

SEQ ID NO: 3419 - DNA, 862 bp, Artificial sequence
  DNA replication origin
tcgtgctccggctgccctggcgggtgccgggccagctggaccccagcactggccggcggttctcggagcacaaactctgcgcggacgacgaatgcagcagtgagtgcgctggaggggcggctggcctcggggcggctggccttggggtctccgccggccccgggggtctccgcggcggcgccgcctgggctgtgcggggacgggagttccgcagcccctggccggcccgggggtcgcaggcgggatgggctgaacgcgggggtgggcgcgctccgggtccctgtgtctgccttctcccgctctgcctgcgcccggcccctcgggcctgaccatgggggctgcacctcccacttgttgccagcgttttatttttcctctgctgaggcggggggttgcttgcggtggtccccggcttccccaatagtggctcacagcgtccccttcccacccccccaatccgcctgggctcggagggtagatgtggttgcgcgccgcgcgtctgggctccccacgccgcaaccaaagctttcctgcccgcgctgcggggacctcggtgggtgcatcaccccggcagatgcgctaagggctcggtgggcgttttcccagtggcaggttgatggtggggtttgtttggaaaggctccctggcgctgctcctttgcccttctgctttattgggatttgggcttgtaccgccttttgaacaggaattgggagtttaggtttgggacgagtctggagtccaagcactcattgtattccgaggtctctgccccgactttgatcaatcctgtcgtttctgtgcttggaagccgccttgcagactgctaggcaggactgcaggaagaccaaaatctttcgct

SEQ ID NO: 3420 - DNA, 1066 bp, Artificial sequence
  DNA replication origin
ctgtttttacttatgtcaacttttaactagattgtgaggacagaggtcagtgtctgagtcatcttgtgcctcactgggcttgggcagaatagacgcttggtcaagcatttgcacactggtcgatggatacactagaaagagcaggagcgcgagagggaatttttttggcgcctgcctcgccctttcaagccaagcccctctgccctctgccccttgccagccgcccgtcgcccgccgccggcgatccctctcccggggagcggtagtcaagcgaggccagcgggccgggagcgggccgggagcgggcgaggggcgggacttccggtcccgctcgcgacgcggaccgcgccaggcggaagcccggctccgggccagcatccgagagcccggactggaggtgagttcgcagccggaacgttgcaggcacttgtttcctcagtggatgcctttcggcgcgccgccgcccggcgccgcgggactgggagaccgggtagggacgggagagtcggcatctcccgcgcgtgtggagggaaatccgggaccccaggcttgagagaagggccaggactgagaacggggaaccaggagagccctaagggcagcctttagggactgaggagggaggcaccggggaccctgaggccaaagaggccctgagactggaggttgcggatgacacggggcagagttgcatctcggaggaaagtagtcattcgtgggggcgtgtcccgggtcctggcggattgactgagaggatggcaggagatggcaaaggttggcttccagggagaggttacagaggagggagtcagtccttctctgagggtcgtaggtgagaaggacgtcttgacctaacgaaccagaaagatgaccagccacctattggatgctgaactcctattgcttcatttgcaattcatgcagtttgttttttgtttttagaaatatatcccgctccgcgcgtgtggatttcgggaaaatattgtatattcctagggaccgctcgaattcttgcttcacccagattctgcgtgtctttgtcaaactgatagtagttgagagttct

SEQ ID NO: 3421 - DNA, 1074 bp, Artificial sequence
  DNA replication origin
actgtgggaggccctctctgggctggctgaggccggagcaggatccctctgcttgctgggaggtgtggagggagaggcacaggcaggaaccagggctggggtgctcacgggccagcgcgaattctgggtgggcgtgggcttggcaggccctaactcggagcagccaggggcagtgaggggcttagcacccgggccaggagctgcgaagggggccccgggtcccccagcactgccggccccgccggcgccacactcgaattctcgacgggcctcagccgcctgcctgcagggcagggctcgggacctgcagcccgccatacccgagtccccctgtggtgggctctcacgcggccaagcctccccaacgggcgccgccccctgctccacggcgcccggtcccatcgaccacccaaggactgaagagcacaggcgcatggggtgggactggcgggcagctctgcccctagccctgacgcgggatccactaggcaaagccagctgggctcctgagtcaggtggggacttggagaacttttatgtctaggtagaggattgtaaatacaccaatcagcaccctgtgtctagctcaaggtttgtaaatgcactaatcagtgctctgtgtctagctaatctattgtaaatgcaccaatcagcaccctgtcaaaacggaccaatcagctctttgtaaaacagaccaatcagctctgtgtaaaatggaccaataagcaggatgtcggtggggccagataaggaaataaaagcaggctgcggcggccagcagtggcagcccactgcggtcgtctttcacaccgtggaaggtttgttcttttgctctttgcagtaaatcttgctgccgctcgctctttgggtctgcactacatttatgagctgtaacactcactgtgaaggtctgcagcttaattcctgaggccagcaagaccatgaacccacagggaggaatgaacaactccggatgggaagaatgaacaactccagacgcgccaccttaagagctgtaacactcaccgtgaaggtctatagattcactcctgaagccagcgaggccatgagccc

SEQ ID NO: 3422 - DNA, 1430 bp, Artificial sequence
  DNA replication origin
gggggcaatgctggcatgtgtgatctcgatagacactgtggaagtctgcagagaccggagcataacctctgcctcctctccccgggcctagcctctcacagccctcagagaaaaccctgagctgcggcgtggccgagacgggggcgtggcctggcaggtgggcgggcccttccgtgggcggggccgcgaggttttcaggagcccgagcgagggcgccgcttttgcgtccgggaggagccaaccgtggcgcaggcggcgcggggaggcgtcccagaggtgagcgccctgcagcggcaggggatgggccgggggccctaagtcgtaggcagcgcggggcggggacgcggctgcctgcggaggtcggactcctctccgccctcctcccgggctgtccgggtctattttccagtctatgtccaactcgcgccgcctcactaggcggcgctctctgccccgcggcacccgcgagacgtggggtccctcggcccagggacggggtgagcgtgtcatgtgggtgccctgtgcccggcaggttggagacgaagagacctcggcacagacgaagtcactcacatcctcgctttgaaacagagcgggtccttcttgtgctgtctcgctgtcactctcgcccccaccctgtggaagaggcaggtggcttgtccccagtcactttcttccttggaaaagggagacagagggccatctccagcagggccatggaaatcccagaaagtcactgagctgctcaacaaaaggccctaaacaccccaccccacagcaccaggcagtgcacactggccaagactccgtggtaaatattgctggcctttatgttgagagggggaaaaaaaagcctgcctgtgaagatcattgcccagtggccatgctcctgtgaaaacacaattggaaagccatttcctaaggggcgagggtgggtctgggaccatgctgtggcttgggtgattggtggttgcaggagtgagggtgctgccctgggaaggcgctgaggccctgttgggtgggaatcgacggctgcggctttctcccggaggagggagagcggtgttgttacctagtgttgggaacacatccgtccagcaccgtgaactgcaaacaagcagagtaaccctagtgtccttcagatactgttgctgagcagtcacctagtcaatgagatgatctgtttggacggcaagtgcatctgtaatgccgccctcttgctcagtgcctggaagaggcattggtgactccccgctaatgctaggggtagctaccgtgcaggagcagtcaggctcttgcagggccaatgtggtttcatcaattttctcctgcatttacccagcccctccgaattctgagaagtgcgtccaagatctcttggactccttgactcagttcacccttgttcttgtgggcagaaaacaattccc

SEQ ID NO: 3423 - DNA, 1751 bp, Artificial sequence
  DNA replication origin
tttgttggaaagatggtggtgggggtggatggatggaaagcgaatagctgcaaatcctgtcagcaggcagtgtaggggcagagagaggatgaaggaaaaagaaaagacaaagagataaagaaggaggaggaagggggaaaaagagcagaagaagagaaataagaagagagaaaggaggaaatgaaggggaaaaggaggaagaggaagaaggggaggaagggggaggaagaggaagagaaagagaagtcaggggagatgagaagcatggtgctttgtggcatattgacggtgggcaaggctgtggatttttctgagcagccttggtgtggagaaaagacctcccagggtgcatggcgcccgcagacaccctggctaggctgccccttgttgggtggaactgctccctccctctttgctgggcacctactttgtcccctggtgggtggctcctgtatgggtgaggtattccagctctctgggccctttccttctcaccctgtatcggcacagctccagcaccaggtcatggtcacagacagtcagaatgtgctgatggaattttcctgttgatttaagctagtgagaccttgcttgtcctggaaaaactggacatgagagaggtagggggaacaggaattgctttccaagaatctccctcatatggggtgctctgaaggcctcttttgtcatctccttctccttgggaaggggttcctggaaaggtgctggtgcaggagggcactggtgcaggtagcagctggtgcaggtgggcgctggtgcaggtgggagctggtgcaggtaggggctggtgcaggtgggggctggtgcaggtgggagctggtgcaggtgagggctggtgcaggtgggggctaatgcaggtgggggctggtgcagatgggggctggtgcaggtgggcgctggtgcaagtgggggctggtacatgtgggggctggtgcaggtgggagctggtgcaggtgggggctggtgcagatggggtctagtgcatgtgggggctggtgcaggtgggggctggtgcaggtggaggctggtgcagctgggggccggtgtaggcagatgctggtgcaggtggaggctgatacaggtgggcactggggaagttaggggctggtgcaggtgggggctggtgcaggtggacctgccaattgggactaggtgtcagccacagccaggcgagggggaagggaaggagctgtcctggctgggggcttggggcaccaatttgcaggtgagtgagaaaccccaagaccaaacgtttgattgcgtgcatcacctttgtgtcacctttcagtgctggacttgtgttccctggagacagggccatgatcttctctcccatgtgtcaaatcagacaatggacactgaaacactgcgctggggcctcaggaggaggatgaggaacaggatagggggacacccacctctctctgcccaggacgactcaggggtgtgcctcctagcagctgtgaaaacactaaaggatttacaacattcccgcttatgtgggatttggattcatttccacagctctacctatgagtaagagaatctattcagcaacatgacatcacggaatggcaagagtgacagctgcagaggtgccagatgttgtcccatctctgtctcactgtgctctggccttctctggcctctcctttctaacccaccaaccctgtctggctgggatataggcctggttcataagtcccctctgctatactccacctttgcct

SEQ ID NO: 3424 - DNA, 1256 bp, Artificial sequence
  DNA replication origin
gcagcagcagcagcaacctcagtccccccagagactcttggccgtgatcctgtggtttcagctggcgctgtgcttcggccctgcacagctcacgggcggtgagtgacccagctgtggtgggagggcctggggatggcccagaggggagaaagagcctagctgccaggacagccctgcacccctcccccatacacccagacttcaggaggatctgacaacgcgagggtgcctgcgtcccagcctatggccgcccttctccgaaaccgctggagttccctgaaaattcccatgtggagcccgcacagattcacacacccacattctgtctggagcttcccaccagcctccgggcctggcttctcccaaggaaagacaataaagcctggcccattattcccactttggccaaggaagcgggggcgggggggggaggggtggggggtgggggcagtggggagtggtgtatttgtggacctcttgccaatgccttcagcagatagaggtcagatttcagcctctggatttaagcaagagtttaagaaccacctttgagaatgtgaagggtctggaaacgtggtcagactggctgcggggcaggtttatttgaaagttaactttcccttcccctgtgtgtgcagcatgtatgtgtatgttgggggcgtggaggaggtgcagaggtattctttcaggtgtgcctctgacagattgctttgctcatcgaggtatgatttcagggaataaagtcagttgctcttctatgaagtagaagttagctgaaataaaattgatagcctcagcctccgtgggcggctaatctataacatatttggttctgggggaggggtatcttttagttgtggtagaggaagacagatggagttcctgtctgaatttgagagcctagtctccctgcctccactgctcattgctgtccatcattcctgtccattgcaaacgttctctagagcttgctgatgtggacgttaaaaggagctgagatactgttaatatataaataaattatctttggttgaaaagcaagtattgactgatgtaaataaaccattttagcgttttaaaatattgctgtttcagagaattcaaaggtgaaaatggaaaaaaaatgagtgaaaaattagcaaaagtggaggagaggtgtaataagttgggctttaacacagagtaatcaataacccaggcattccacttagacatctgaaagatgcccagagtataaaggtgtttattgcaatgtg

SEQ ID NO: 3425 - DNA, 962 bp, Artificial sequence
  DNA replication origin
agggtcttccattccgaggaggcgcgcgcaggccggggagggggagttggtgcctggtgcagctccccaagggagaattttttttttttttttgacagcgcagagaaatctcactggggactggggcagtaggatcgatcccaatcccgaggaaaaccagagaagtagctgggggagacggtgccacattgtgagattcccagagtgaaatgtataggcccagggaaaagtgtcttcgcggccccgagacgcggggaggctctagactttcctgtggtgggcacagctgctgaatcccggggaccggcgcggagccaatgtgcgctaacccctgccctccctcctgtcctccatcccccagcacgcgcagcatcccacggcggctgttactcagtgcacccggctcgggggaaggcgggggacctcgccgtgggaaagggggcgggggccgcgcgggggaggaaccaggatggagcctgggaagccgaggcgccgggtcccagagcggaggagggggagcgtggcccccgagcccggacagactggcttattgtggtgttccgcttctggttgcagactcttgcaagctggatgccctctgtggatgaaagatgtatcatggaatgaacccgagcaatggagatggatttctagagcagcagcagcagcagcagcaacctcagtccccccagagactcttggccgtgatcctgtggtttcagctggcgctgtgcttcggccctgcacagctcacgggcggtgagtgacccagctgtggtgggagggcctggggatggcccagaggggagaaagagcctagctgccaggacagccctgcacccctcccccatacacccagacttcaggaggatctgacaacgcgagggtgcctgcgtcccagcctatggccgcccttctccgaaaccgctggagttccctgaaaattcccatgtggagcccgc

SEQ ID NO: 3426 - DNA, 961 bp, Artificial sequence
  DNA replication origin
gcggaggccggggcgggcacctgagctggcgcgcagccggggcaggggctgcagtccagcgccggggaaggggcgaccgagctgcgtgcgtgtgcaagaccggccgccggcgcctcgcgccccgacaggtgcaggcgcgcgggcttcccattggtcgcggcggcgggcccctttccccgtccccgccctcgccagtctccggccacgccgcggcgccggctgggttggcagaggcgcgtgctcgcgcgcccgcgcacccctcgccccgtccccgcccccccactcaccccgtccccacccactccctctctccgcgccgccgccgccgcgcgctcgcgagttcaggtagcgggcgcgcgggcgcctccgcgggggcgcgcggccgggctcccgtcctcccccaacacccgcccgctcgggggcgcctggggagggagcgcgcgggcgggggagctggagccgagcgccgccgccgaagcttccgtctcgctcgctcgcgcagcggcggcagcagaggtcgcgcacagatgcgggttagactggcggggggaggaggcggaggagggaaggaagctgcatgcatgagacccacaggtaagaccgacagtcccggaagggtcttccattccgaggaggcgcgcgcaggccggggagggggagttggtgcctggtgcagctccccaagggagaattttttttttttttttgacagcgcagagaaatctcactggggactggggcagtaggatcgatcccaatcccgaggaaaaccagagaagtagctgggggagacggtgccacattgtgagattcccagagtgaaatgtataggcccagggaaaagtgtcttcgcggccccgagacgcggggaggctctagactttcctgtggtgggcacagctgctgaatcccggggaccggcgcggagccaatgtgcgctaacccctgccctccctcctgt

SEQ ID NO: 3427 - DNA, 1174 bp, Artificial sequence
  DNA replication origin
caggcgcccccgagcgggcgggtgttgggggaggacgggagcccggccgcgcgcccccgcggaggcgcccgcgcgcccgctacctgaactcgcgagcgcgcggcggcggcggcgcggagagagggagtgggtggggacggggtgagtgggggggcggggacggggcgaggggtgcgcgggcgcgcgagcacgcgcctctgccaacccagccggcgccgcggcgtggccggagactggcgagggcggggacggggaaaggggcccgccgccgcgaccaatgggaagcccgcgcgcctgcacctgtcggggcgcgaggcgccggcggccggtcttgcacacgcacgcagctcggtcgccccttccccggcgctggactgcagcccctgccccggctgcgcgccagctcaggtgcccgccccggcctccgcgcggcctctggtgcccccagcccgcggcgcggcgcgggagagcgctccgccctagaactaccgccgcggcggtggctgcagacccggggcgagtgcgcggccggcagctcccaaccccagaactctcgccacagacccggttaacttgagcaccgccaattgcccgagtctcttaatttcccgcgttaacccctccccgctcccatctccgccgaagctctgcgcgtccccagggagcccgaaggaccatctgaggcggctgagagacactctccccctcccccacacccttggtattttccctctgccagccgcaggtgttgcgagtgaggacccctgtccggtcttggagatgcgcggggccctcggagccttggcctgggaggcgctcccgggggcggggaggcgggggtagcgggtgattggtgacacgcagaaggttgggtacctggaggaggggaggcttccggggtcgtagatgggaagccaagggggtcggtggtaattgccctcccagccccaagtggagagagttggcctggtcggtcccctgtctctgcgccgattctggtgtcggagctcagcccgcagtggttgcagctctcactcgccgccggctctgatcgcccgcggtcggtttcaagatagggaagcccacattccagccacagtgattaagaggtgtcagctaatgaggtggcgtccaccggcagcgctttagagccagtgacactccatgattctgt

SEQ ID NO: 3428 - DNA, 837 bp, Artificial sequence
  DNA replication origin
gcttcggctgccccgcagtgaatctgagcacccgcgcctgcgaggccgcggggtgaacgaacagtgcgggtgcagccagcacgccccagcttcgctctccgcacccggagtcccggcccgggagcacgcggtggagtcggctccggacctctgcccgcccagccgctgcgtggactctcgttctccgccgggccgcgggggttcccagagatcccggtagggcggctgggagaagtggctgaagcctgccatccctccctctgggcacgcgcagcgtctgcccaaggggcctgagacctcccgaggacgctgcagacacccgccctgccccccggtcccgaggtccgggtcgcctgtgacgctcgggccacttcacaatgcgcctggcagctgggtcctcgcagtcttcagaccttgcccggcgccgcccaccccagctttgctagcacccggagcacctggaatgggaaggacaggaggctggggatgggggtggtgggggtcgggtgggggagagaggggttgtatgttggaggagggaatatgtaggaaatcagggtgacatttaaagctgagggtgcatagtgtcccccaccagtgtttcagggagaaatttgaactcgcatttgcacacaaacagcaggattttaagagagcccaggtgaaggcgtcaccctcagaatggaaggggtggggagaagggccggggtgcagtctcagggaggaggtacccttagctgcagaatcaccgtcctgcacgtgtgtacctctgcaatgtggtcaaatagaacggctgtggacgcgacaccacccatttgccttttaagttagcaagcc

SEQ ID NO: 3429 - DNA, 2042 bp, Artificial sequence
  DNA replication origin
cctcgggaggtctcaggccccttgggcagacgctgcgcgtgcccagagggagggatggcaggcttcagccacttctcccagccgccctaccgggatctctgggaacccccgcggcccggcggagaacgagagtccacgcagcggctgggcgggcagaggtccggagccgactccaccgcgtgctcccgggccgggactccgggtgcggagagcgaagctggggcgtgctggctgcacccgcactgttcgttcaccccgcggcctcgcaggcgcgggtgctcagattcactgcggggcagccgaagcctgagcgatgtggcccgcaggcccctggaacgttccaggaagcaccggccccgcagcaggcgcctggaagatgcctggggagagacaggaaccaagccccgcccggcttggcagccgcagacccagctgccaccccagcggccgcagccctgcccgcattaccctctggcccagggagactcgcccccgccttgccccggaggagctggcactcccctgagtggcacattcagggtagaaaaggcacagggtggagaccagtgggcagtgccactcggcagacatctaggtcgctggtccccttcctcagttccctcggagcggtcttctgtgccctcgcaaaagttcaagaggcactcagcctgcgtgtgcgcccagaagagagacagcagcgaccaggttgagtcattagccagccgggactcccagcccttggcctccagcaaagagatgcggagcccgcacacccaggtcctgaagagcaagctggaagaggtggtggtgtcctcccaggaccagcagattgtggccctggtgctgacccgtctcaagaaggcccagaggatacgggagctgcagcagcaggcggctaaggcctgggaggagctgaagcgctcggatcagaaggtccagatgaccctggagcgggagcgccggctgctgctgcggcagagccaggagcagtggcaggagaaggagcagcgcaagaccctccagagccctgagcagcgcggcctgcggcgggacagccagaggaagaacgtgcccccgggggaaagccggtggaaggagcaaccagaggaccaggagagcccgcgccaggagaagctggagaaggcgcgcgcccaggcagagcaccgaaaacagtgccaggtgcggcgcctgcgggagcaggagaagatgctacggaacctccgggagcagcacagcctgcagctgcagaggaggctggtggaagcctgtcgcaagaggcacctacatgccgtggagggccagaagaaggtccaggacaccaacctgagctccctcatcaattaccaggcccggaaggtcctcatggactgccaggccaaggctgaggagctccttaggcagctgtccctggaacaaagtttccagcggtcccaggagatacaccagggcctgaggaaggagcggcaacgcgagctgagggagaaggcccagaaggaggaagagcagttgcagcaggccaggtggcgcgcaggggagtcagaggaacagaggaagatgcgcaaaagaattctggtggagctggcggatgagaagatccgacaggccaggagtcacgtgcacaagaccactagggacaaggtgcagcacctccgggagctcaaccacctgagggagaaaaaccaccacatcctgaaactgaaagccgagaaggaggaaaagtgtcacattgagggcatcaaggaggccattaagaaaaaggagcagagggtgcagcacatttcccaagggaaagacccaaacttccaggagttccagaagctccctcaggcctccaggagagaggagagagcgcctcccaacagctcccttgatcagatggtactagaggcccagctccgtgcctgtcagcagaacaggggttactgagaaccaaggacgcctggcttacagtgcgcagccagaaggagatgtggcaatgtgattccttttgtaatctgattataattgaacattgattttaaaaaagcatgtaaaatagctgc

SEQ ID NO: 3430 - DNA, 916 bp, Artificial sequence
  DNA replication origin
gctccctcacctgcccatgctcagccccaatactctccatactctctggtggaggtgaggaggtagcgggggtgaggaggtgagagggtgaggaggtgggggggtgaggaggtgagagggtgaggaggtgagagggtgaggaggtgggggggtgaggaggttgggggtgaggaggttgggggtgaggaggttgggaggtgaggaggttggggggtgaggaggtgagagggtgaggaggtgggggggtgaggaggttgggggtgaggaggttgggaggtgaggaggttggggggtgagggggcgagaaggtgagaaggtgaggaggtaggagggtgaggaggtgggggggagggggttaggaggttgggggggtgagagagtgaggaggtaagagggtgaggaggtgagggaatgagggagcgaggaggtgtgggggtaaggaagtgaggaggtgagagggtggggaggtgagagggtgagggagtgaggaggtgagggagtgagggagagcacaagctgagaaaaccaactgcctaggtcctgcccagggcgacctctctggcagagtcgccaggcaaggaggacaaaataaggcaatgcaacacttaaatgaatagtcaaacttgccccaaatcacaatgcagaccttccggagccaggcgggatgcagagaggactcctttctcctcaacaagggagggctggggaaactcaagtcaagcagatcaaagagtaatttgcctgctttcccaaacccagacatcagctgctgccgttcctatgtgaggaagggtttaccccacagccgtgggaagaagggagcagcaacacttgtcccatgttttgggggtgagagggtaatgacagggagacagagggcctggggctgaaccctccacactcccagcctcagaga

SEQ ID NO: 3431 - DNA, 1181 bp, Artificial sequence
  DNA replication origin
gaatagtcaaacttgccccaaatcacaatgcagaccttccggagccaggcgggatgcagagaggactcctttctcctcaacaagggagggctggggaaactcaagtcaagcagatcaaagagtaatttgcctgctttcccaaacccagacatcagctgctgccgttcctatgtgaggaagggtttaccccacagccgtgggaagaagggagcagcaacacttgtcccatgttttgggggtgagagggtaatgacagggagacagagggcctggggctgaaccctccacactcccagcctcagagaggggccggagggcggtgcccacaccctgcaccctcacccgctcactctttacccttgtcgtgccccctacttccctccagctttaacataagaatcagaccaagcaggcagcccttctcctcttcgagagtgaagtgacatgggagaggaggcaggagccaagagatgccttgctcacctggctgtgggccagggaaggtctccttagcgtgaggcagccctgctggaactctgttctggtgagtggctctcagctcacctgcttgtcgcagctctttcctcttgtccgtttctgagcctgcatggtccctaaaagcttagtcttttcaccacgtctctctggatagcagcagcagcctccagacagcctgcagactgcgtgtgtgtggtgtgttgtggggtgtggggtgtgtgtggtgtgtgtagtgtgtcgggtgtatgtgtgtgtctggtatgtgcgttgcatgcatgtggtgtataggaatgtgtggtctgggctctgtgtggtgcatgtgtgtgagggtaattttgtggtgtggggtatgtgtgcactatgtgtataaaattgtgtgttggtggagggtgtgggttggggctgtgggatgatcatcactggaaggtgaaccgcagctccatgataaccttttgtgcatacacgtcatttgtaattagccaggtctggagagttcgaaactgggagaagagaaagaagagaagagagaaaaggaaaattaatgaaacaagtaacctgccttatatggatatttgatttgcttgtttgcacattgtttagtccttacaagctctgaaaataaaacacaagcacagtatcaggctcaattaggtgcttaagaaataccttttgatgatgacaaa

SEQ ID NO: 3432 - DNA, 712 bp, Artificial sequence
  DNA replication origin
aaggattctaacatcctaacactaaacagagtccgcatctcagtaatccaatggaagtccttggacctacttagtgcctctaaacgcatgtcctaagccaggcccaggtgatacagaggttagagcccccacagtggaactcacggtccagtaggagagacaggaatgaccatccacagtgatatcacagcacaagcagcctcatcacgggaggagacccctggggcagtgggagcccctacctgaggctggaggagtctgggatggcttcccagaggaggtgaggccaaggcccatattgaaggctgaccaggagctgtccagtgagattttgagggcagggtgggtagtgggtgggtgcctgttgagcacagggaatggataggatcaacagttgcatggctgggtgatggaggagaaagaagcaggccgctcatgggaggcctcgaaggctattctggatgtaggctttctcctgagggctgtggggaatcactgaaggattgctcaggaagaaacctacccaagtctgtgttctgactgtcaggtggaggatggtgaggagggtgctgcattactttacgtgagaaataaggacctgaatttaggcagtggctgtagggacagagtgcagggggtggactgcagagacatttagggtagaatgggtgaggagggaggagtggtggtgacccccagttttctggcttgg

SEQ ID NO: 3433 - DNA, 879 bp, Artificial sequence
  DNA replication origin
acattgtcattccttatctctagccccgtccccaagcagctgagtgttcttttactagccattgcctggggtgtatcttcagggctgttctcagggtggcacctggtccctggagcattgtttttgtccattcctggtaggtgggtggggtgtgggtgagggcgaggctgctgggggccgggaagcctggctgacttcagcatcagcactttttttttttttttttttttttgagaccgagtctcgctctgtcgcccaggctggagtgcagtggcgcgatctcggctcactgcaagctccgcctcccaggttcacgtcattctcctgcctcagcctcccgagtagctgggactacaggcgcccgctaccacgcccggctaattttttgtatttttagtagagacggggtttcaccgtgttagccaggatggtctcgatctcctgacctcgtgatccgcctgcctcggcctcccaaagtgctgggattacaggcgtgagccaccgcgcccggccagcatcagcactttttcgaggaagccaagtcagacccagacagaatgaagatttggggaaggattctaacatcctaacactaaacagagtccgcatctcagtaatccaatggaagtccttggacctacttagtgcctctaaacgcatgtcctaagccaggcccaggtgatacagaggttagagcccccacagtggaactcacggtccagtaggagagacaggaatgaccatccacagtgatatcacagcacaagcagcctcatcacgggaggagacccctggggcagtgggagcccctacctgaggctggaggagtctgggatggcttcccagaggaggtgaggccaaggcccatattgaaggctg

SEQ ID NO: 3434 - DNA, 1126 bp, Artificial sequence
  DNA replication origin
gatggccgggaaggacgggtcctggaagagcgtcccggcctccaggcactcgttccgcagcgcctcgtagtcctggttgaggtacttgatggccctgtcgtgggagcccagcccctcggccgcctcccggtccttcgccagcttggccgcgatgcccgccatgctgcggtcccggcggccgtactgcgcagagaaaggtcggggcgactccgcgctgcgctcggctggggcgcggccagggcccggcgcgctgctgcggccactgcgggcgccgccgctgcgagcgatgattcaccggagggaagcggcccggcccgcggggtgtggcctcagccgctcccggcctgctgggctcccggcccgggaccaggccatcctgcggcctgccgagcgccgggaacgccgcgacccggggccggtgctgccatctgcggacagctcccgggatggcgcggcccggcgccggggaggctcgcgaatcgcggtccagagttggggctcccaccggaacccgaggccacctttgcagcccatagggaagaaggctaggatagttgtggccgtccggaaaacacccggggagttagcagagggtcaggtagtgaagtcgaggaaactaaaccagctgccctgaactttgtgccaaacagcgtcttaacggctctgcatacatcatctcatttaatcctcccagcgactctgaagaaggcgctgatattgtccccattttacagatgagaaaactgagcctcggagacgctaaatgacgtccccaatgtggcacaacagtcacaggcagaacagggactctaagccaccggaggcctattgcaatcacaatgctgcaattactactgctcagctgtttatttgattatagatagggttgtcagatttggccaataaggctgggtgcggtagttcacacctgtaatcccaacactttgggaggccggaggcaggcggatcacctggggtcaggagttcgagaccagcctggtcaacatggtgaaattccgtctctactaaaaatacgtcgtggcaggcacctgtgatctcagttactcgggaggctgagacaggagaaacgcttgaacccaggagggagaagttgcagtgagacgag

SEQ ID NO: 3435 - DNA, 1016 bp, Artificial sequence
  DNA replication origin
gcggcggcgcccgcagtggccgcagcagcgcgccgggccctggccgcgccccagccgagcgcagcgcggagtcgccccgacctttctctgcgcagtacggccgccgggaccgcagcatggcgggcatcgcggccaagctggcgaaggaccgggaggcggccgaggggctgggctcccacgacagggccatcaagtacctcaaccaggactacgaggcgctgcggaacgagtgcctggaggccgggacgctcttccaggacccgtccttcccggccatcccctcggccctgggcttcaaggagttggggccctactccagcaaaacccggggcatcgagtggaagcgccccacggtaggaagcgcgcggcaggacgcgggcagggcggggtgccgggcagggcggggtgcaggccggcccgcggcgcgctggggcggggggcagcccgggtgctgcagtggggaagccgcaagccaggacctcgcagtcctgcgacacctccgcgccgccagagcccgggactctgttcgagcgtggggggactcccggggccttccctctcttccacccaccacgctttcctgggcgggtcgaggcgaatcactgccctcagatcccactagcaggccactttaggacttcacaaaaactcagggtgatgcaggaggccggggtgaaactttgattggactctagcggggagctggaagggaaggggaatcgggtctgcagggaagggacggtgagaggcagcatctaccagacaaagtccgtctccaactggggttctgtctgttcatggagggggacaggccatagcctggtcattttgtgactaaggatagtctcctgcagccctggggttagatttatttttccaaaggggagccagcgatacctcctcataacattgacactggtaattaacccaggacacggaggtgtctcatggtttccctggcgggaatcacccgggaaacctccgggagccctccagacccccttatcccgtccccc

SEQ ID NO: 3436 - DNA, 985 bp, Artificial sequence
  DNA replication origin
gagtggaactccctgcaggctggctgtggggggcccgtgaagggcttagaaggccccacaacccagagccactgcaggggcctccctacgggggctactcctgagcctggccaggctggtagttttgtttttccttggccaagctcccggtctgggatcccatccccagttctgcctctggggtcagctttccatgcaggggctgagatgaacacatggggaagggagggcaggagcccctgcgctctgcacctcatagatgccaaagccgatggtgtgcatgtcctcgcccatcttcctctgccgccgtcggtgcttctgaatgagccccaccaggaaggtgcagccgctctccccatcctcctcgtcctcatcctcctcctccagcttgatcaggtactgagggttcatccagaatgtgtctgcagccagaaaggggcagaggagcccagccctgagcaggaatgcatgggggtggggggtggccctggtctcaggcttggaggcttctgagagggatggagataaagggagatggtgggaggtggtgggagatggtaagaggtggtgggggatggtgggagatggcagagtatggcagaagatggtgggagacagcgggagatgtcagaaaatggcgggagatggtgggagttggcaagaggcggtgggaggctgtgggagacagtgggagatggtgggagatggcagaggatggcagaagatggtcagagacggcaggcgatgttgggagaggctaggaggtgggagacaccagggttggagtgtggactgcaggctttgttaggctggagacgggtgacggtagctgtggagagaggatgacctgcacttgtctgaatctaacaggaacctaaattagaaactttctcttgcagttctctctctggctccaggctggcttgtcttggggactggtctgtcactctggaacgcagggtggttagagctgtggcttcccctc

SEQ ID NO: 3437 - DNA, 1303 bp, Artificial sequence
  DNA replication origin
ctcccccaggccgccgggcgcgccgcgggcggggtcggcgcggggggcggagccggcacgggctcggctggggcccgacccgggattagttggtttcggagcggaggagggagccccgaccgtcacgagcgtcgaagagacaaagccgcgtcagggggcccggccggggcgggggagcccggggcttgttggtgccccagcccgcgcggagggcccttcggacccgcgcgccgccgctgccgccgccgccgcctcgcaacaggtccgggcggcctcgctctccgctcccctcccccgcatccgcgaccctccggggcacctcagctcggccggggccgcagtctggccacccgcttccatgcggttcgggtccaagatgatgccggtaagtgggcgagcggccagggcgtcgggcccggaagtgtgcggggtcgcgtgccgggggctggtccgcgccctcgggcgcgtcggggaaggagcctgggggccgcagcccgcgcggaggggccggggctttccgagcttcgagcgggtttcaggaaggggaggctccatcctctgggctctgcgcccacagccgtcgtgggggcgcggcgagaccctaacctcgaggcgggttcctccagctgctccggagtcaggcgagccgcccgcgagcccagcagccactcaaacttttcgtctttcactgggtcttgacttttttgcagttcttgaaggtcaagaatacgggaaccggggaccttgttctttgctgtgtctttttactttttactggagtgaaacatacgttactggaacgggtacctttgctttgtttttaattgaatttcgatcttgatatccacagtagcagctaagtcacccttacctctttgtggaaaggggttttggtaaatgcaatctcggaagttttagattgcaggaaagcgtacgtgcctggctcccttcgtttcccacagcttttagcaagacctccggagaggattagtgccttctttaggagctccgcaggcttttgacacggccaccaggccacagatgaacagcaggtttgagacatttcagaaatgtctctgtcattcagcgatcgcggaatggaggtttgcggtgtgttgcggtggcttctgcagacttcagtagcgagtttcttcgtggaagttgtatttgcacctctcccactgaagtggggacatcttgcaggcatcctatgcttgtggctccatttgttcagacaaagaaacaaaaagcttttacttttatgaagtctgtggaatggagtgatgacaaagtttgcagtcat

SEQ ID NO: 3438 - DNA, 921 bp, Artificial sequence
  DNA replication origin
tcactccaaataaattaccgaccaaaatatataatggtggaaatattccaaaattccatattttgggatttatacacaaaagataaacaaattagaagccaagaggctgccggaagggaaaaacggggcctggaaaggccgttgtgaggaatgagctgggcctaaagaggccactggcaggcagtagctggacctgccgaagtggccgaaaggcaggagctttggactggggaggccgcagtgaggcgagagctagctgggcgtggagagtccgctgtgaggcagaggctgggcctgtgcaggccttcgggaggcaggaggctgggccttgtcgaggcctgcagaggccaccaaaagtcaaaagcggggcttgggaaggccgccgggaggcatgagctgggctgggccgaaagaggccactgggaggcaggaggagctgggcctggagaggctgctgaaaggcaggagcttcgcctgaggatgccacagtgagacaccatctgggtctggagggtccactgtgaggcagaggctgggcgtgaagaatctgctgtgaggcagatgttgggattgtagaggccgacgggaggcacaggctgggcctggaggggccaccaagatgcaggagttgggcctggagaggctgcaaagaagcatgagctgggcctggtgaggtcgacttgagaaagttcagggcctggagagaaggctgggaggcaggagctgggtctaaagaggccattgtaacgatggagctgtgcctgtggaggctgttgtgaggcagtaggctcatctgcggagactgccgtgaggtagggtatgggcctaaataggccattgtgagtcatgagcttggtctgtagaggctgactggagaaagttctgggcctggagaggctgccgggaggtaggagctgggcc

SEQ ID NO: 3439 - DNA, 977 bp, Artificial sequence
  DNA replication origin
tgtgatggcggccgggaagaggcgctcctcacttcctagatgggatggcggccgggcagagacgctcctcactttccagactgggcagccaggcagaggggctcctcacatcccagacgatgggcggccaggcggagacgctcctcacttcccagacggggtggcggccgggcagaggctgcaatctcggcactttgggaggccaaggcaggctgctgggaggtggaggttgtagcgagccgagatcatgccactgcactccagcctgggcaccattgagcactgagtgaacgagactctgtctgcaatcctggcacctcgggaggctgaggctggcggatcactcgcggttaggagctggagacgagcccggccaacacagcgaaaccccgtctccaccaaaaaaacacgaaaaccagtcaggcgtggcggcgcgcgcctgcaatcgcaggcactcggcaggctgaggcaggagaatcaggcagggaggctgcagtgagccgagatggcagcagcaccgtccagcttcagctcggcatcagagggagaccgtggaaagagagggagagggagactgtggggagagggagaccgtggaaagagagggagagggagagggagagggagcactgacttctaaatctcctgtttgaaaatccattttagaacattttcattaccccacaaggaaaccccatactccttagttgaagtcattcttgactcctctctttcacatcccacatccagtccatcagcaaatcccataggctcaactttcgggaacacattgggaatcttaccacttgttaccatctctgctgcttgaccaagttgccatcatctcttgcctgggttattgtaacagcctcttagctgatgtccctgcatcctccctgaccccctttcaatctattctcaatccagcagctagaatgatcttattgtaatataagtctgatcacatctctttgctc

SEQ ID NO: 3440 - DNA, 1084 bp, Artificial sequence
  DNA replication origin
catgtttcagagagcacagggttgggggtaaggtcacagatcaacaggatcccaaggcagaagaatttttcttagtacagaacaaaatgaaaagtctcccatgtctacttctctctacacagacacggcaaccatctgatttctcaatcttttccccacctttcccccctttctattcgacaaaaccgccattgtcatcatggcccgttctcaatgagctgttgggtacacctaccagacggggtggtggccgggcagaggggctcctcacttcccagtaggggcggccgggcagaggcgcccctcacctcccggacggggcggctggccaggcggggggctgacccccccacctccctcccggacggggcggctggccgggcggggggctgaccccccagctccctcccggacgaggtggctgccgggcggagacgctcctcacttcccagacggggtggctgctgggcggaggggctcctcacctctcagacggggcggttgccgggcagagggtctcctcacttctcagacggggcggctgggcagagacgctcctcacatcccagacggggcggcagggcagaggtgctccccacatcttagacgatgggcggccgggcagagacgctcctcacttcccagatgtgatggcggccgggaagaggcgctcctcacttcctagatgggatggcggccgggcagagacgctcctcactttccagactgggcagccaggcagaggggctcctcacatcccagacgatgggcggccaggcggagacgctcctcacttcccagacggggtggcggccgggcagaggctgcaatctcggcactttgggaggccaaggcaggctgctgggaggtggaggttgtagcgagccgagatcatgccactgcactccagcctgggcaccattgagcactgagtgaacgagactctgtctgcaatcctggcacctcgggaggctgaggctggcggatcactcgcggttaggagctggagacgagcccggccaacacagcgaaaccccgtctccaccaaaaaaacacgaaaaccagtcaggcgtggcggcgcgcg

SEQ ID NO: 3441 - DNA, 949 bp, Artificial sequence
  DNA replication origin
gaggagcgtctctgcccggccgccatcccatctaggaagtgaggagcgcctcttcccggccgccatcacatctgggaagtgaggagcgtctctgcccggccgcccatcgtctaagatgtggggagcacctctgccctgccgccccgtctgggatgtgaggagcgtctctgcccagccgccccgtctgagaagtgaggagaccctctgcccggcaaccgccccgtctgagaggtgaggagcccctccgcccagcagccaccccgtctgggaagtgaggagcgtctccgcccggcagccacctcgtccgggagggagctggggggtcagccccccgcccggccagccgccccgtccgggagggaggtgggggggtcagccccccgcctggccagccgccccgtccgggaggtgaggggcgcctctgcccggccgcccctactgggaagtgaggagcccctctgcccggccaccaccccgtctggtaggtgtacccaacagctcattgagaacgggccatgatgacaatggcggttttgtcgaatagaaaggggggaaaggtggggaaaagattgagaaatcagatggttgccgtgtctgtgtagagagaagtagacatgggagacttttcattttgttctgtactaagaaaaattcttctgccttgggatcctgttgatctgtgaccttacccccaaccctgtgctctctgaaacatgtgctgtgtccactcagggttaaatggattaagggcggtgcaagatgtgctttgttaaacagatgcttgaaggcagcatgctccttaagagtcatcaccactccctaatctcaagtacccagggacacaaacactgcggaaggccgcagggtcctctgcctaggaaaaccagagacctttgttcacttgtttatctgctgaccttccctccactattgtcctgtgaccctgcca

SEQ ID NO: 3442 - DNA, 1139 bp, Artificial sequence
  DNA replication origin
gcccgcgggtcagcgcgggagaggctgggcgaggagcggggggagggacgggtcctcggagccgcgcagctccgacccttccgcgaagaggcgcaggcgcgtccccgagcgcgggagtccccgccaggcccacgccggccggttggggcgaagggtgtccccggctgtgccagccttgagtagatcttttcgctagaagattcctgtgccctcaggtgggcgccctttcctctcaccactccctctcctccggagcgggccgaggtgagcgggtgccggccttggggctgcctgagtgctaggcagggtgtggtcctgggcatccttgggcctaccagcgagccctgctcagggtgtcgggcgccggcgggcagtactggcgggggcggccgcagtcccggccttgggcccgttaagggggccggcgtccctccatatgccccccggggcttctcggacttgatgggccctggtcggttcacgccgcttgtcccattgatcctcacgacaagcctgggacgtaagaacggcggattcgtaggcatttttcatccatctcggttttgtggatgaaaagactgaaaatggaagacttgccaaataaggaaaatatgtggcgtggcctgctggtcccctgacagctaattgagaggccttaactctccagaggattcgggccttctgtgttacatagagaatgctcatctctcccaggctactcctaatatgctagggattgtgtggaatgctttacaaacattacccaatttcatcctcttggtaattctacttggttggtattatcgctgttttaaaaaatgaaataagaacgcgtgactaaatgctagggggattctaatgcgcattcggttgcctcttccagagcacgtgtttgttttttgtttgtttgttttttgagactgcacgtgtttgttttttgtttgtttgtttgtttgttttttgagactgagtctcactctgttgctcatgctggagtgcagtggcgcgatctccactcgctgcaacctctgcctcctgggttcaagcgattcttctgtctcagcctcccgagtagctgggattacaggttcccaccactacgcctggctaatgtttgtatcttttttagttagagacgg

SEQ ID NO: 3443 - DNA, 1266 bp, Artificial sequence
  DNA replication origin
atgactcttaaggagcatgctgctttcaagcatctgtttaacaaagcacatcttgcaccgcccttaatccatttaaccctgagtggacacagcacatgtttcagagagcacggggttgggggtaaggttatagattaacagcatcccaaggcagaataatttttcttagtacagaacaaaatggagtctcctatgtctacttctttctacacagacacagtaacaatctgatctctctttcttttcccatttcccccttttctattcgacaaaaccgccatcgtcatcatggcccgttctcaatgagctgttgggtacacctcccagacggggtggcggccgggcagaggggctcctcacctcccagacggggtggccgggcagaggcgccccccacctcccgaacggggcggctggccgggcgggggctgccccccacctccctcctggacggggcggctgccgggcggagatgctcctcacttcccagacggggcggctgctgggcggaggggctcctcacttctcagacggggcggccaggcagagacgctcctcacctcccagacggggtggcagtcgggcagagacactcctcagatcccagatggggtcgcggccaggcagaggcgctcctcacatcccagacggggcatcggggcagaggagcttcccacatctcagaggatgggcggcgggcagagacgctcctcacttcctagatgggatggcagctgggaagaggcactcctcacttcccagactgggcggctgggcagaggggctcctcacatcccagacgatgggcggccaggcagagacgctcctcacttcccagacggggtggctgccgggcagaggctgcaatctcggcactttgggaggccaaggcaggcggctgggaggtggaggttgtagcgagccaaaatcacgccactgcactccagcctgggcaagattgagcactgagtgagcgagactctgtctgcaatcccggcaccgtgggaggcacaggcgggcagatcactcgcggtcaggagctggagaccagtccggccaacactgcgaaaccccgtctccaccaaaaaatacaaaaaccagtcaggtgtggcggcgcacgcctgcaatcccaggcactcggcaggctgaggcaggagaatcaggcagggaggttgcagtgagctgagatggcggcagtacagtccagcctcggctggacatcagagggagaccgtggaaagtgggagacgggagagggagacggga

SEQ ID NO: 3444 - DNA, 1828 bp, Artificial sequence
  DNA replication origin
agaccccggaactcgcctgcttgtcggcccagaacggggagtcgtccccctcgtcgtcgtcgtccgcgggggacctggcccacgccaatgggctcctgccttccgccccctccgccgccagcaacaatagcaacagcctgaatgtcaataacggggttcccggcggggcggccgccgcatcctcagccaccgtcgcagctgcctccgccaccaccgccgcctcctcttccttggccaccccagaactgggcagcagcctcaagaagaagaagcggctctcccagtcagatgaggatgtcattaggctaataggacagcacttgaatggcttagggctcaagtaagtatcccttaccgccagctggtgatggacagaccgagggacggaggctccaggggggtaggggaaggggcggaggggggaggggggcttgaaagagctcggtcaaagagaatgagtgctgggcacgcaggacccagtacacaggaggacgcggctcagggcgaccggggaggaggagcggacctgaaaggaaataggggaaaatcaatcagtctgacaaattgtgagacgagacaggcgttgaggggttaggaagggttaggagaaacccaaagaatgacttctccccacgcaccttcagagcttaattgtctgtcaataaagacagatgcgggagtgtgtttctgtatgtgttgggggaggggtggattagagctggtggaaataatgaaccttggaggatttgtttttcaagtgtatcttggaggcatctttgtgggacacctccccacccccaaccgtggcagacaacaacccaagcaaactaccaatcaggaaagacaatcacctacaagtgtttatgggaacggaggggctgggatcatttggaaagaggttgttgaataaatctgatgcgaataatgaagatacagtgttgatgtcgtttaaaggcccttgtgtgtgtgtacaagaggcctaaccctaactagtctgaaatctcagtttaataccaagaagatgatcgcctctgaaaaggggacatctgatctggtgaaccatttgttttcaaatacaatttaggtggccttgtatacctaacatagggtgaaggtagacagcgaccttggacaaaaaccaccgttttgtatacacacaaagaaaaactaagggggtggaaggtaggattggtgggagtgcctgatgaaggaggtgcaagagacggagtcagaatgaaatgaaggggggaggacgtgcagcagcagtcagtttcctacattcagagtgtagattaagctctcaggctagccgatgtgtacttttgcatttatggatttcttggggagtggggaggagaacagaactttttaaaagtggcacaagtatttcggttttcaggcagatcattgcactgtttagctaaaaattaagttttaaagctgaataagaaagcattgaaacataagcacaaaaaatagactgataaatgaaggttcttagataccagaatacatgagggaagaaaatacagttgatgaatcttttaagtgctcaaagacaaatatgtggtaggaagaattcactttattccctagggaaaaggattagtatgaaaacagattttgtaaatgctaacagaacatattactgagacaagaagcaagctgacagcagcaggaggaaataactcgtgactgtttggaacctacaccatagtaaatttgctatttttagtatagagagaaagggaatgatttttgatgctggatttgttttaattttaaagattgacctagtagaatttctatgcaatataatacctggata

SEQ ID NO: 3445 - DNA, 1589 bp, Artificial sequence
  DNA replication origin
ggacgacgaggacggaggggagaggcctgctctgcctgccgaagccccgggctctcctactccctccgccgccgaggctcggggtttcttccgcgggggcggggaggctccgccggtgtccgagtcggaggaggaggaagcggaggccagagtttcctcgccgagagaggccgtggtgggaagccggtggggcgaggcgggggaggggaggcgggggccggggagagggtcggggtgaggggggccggggaggcggggagggggtcagggtaggagggtgagggtgagggtgagaggagggggaggaggaggagggggagaaggaggatccgggccctttcccccccccctcccggaggcagctcggggtgcgcggcccgggggtcgcgccggggggcgccgcggggcggctgcgggggcgcggggcccgccgctgggctgagccccggcagtggctgcggcggcggcggcggcgggcggcagcggaggcagctgccgcctctgtcctcggatccgctccgctctgctccctggtgtgttgattcttcccccagctgctgcctaatggagtccaggcgctcgcgtcacaggaaatgcctatactgccctcctcactcacttccggtggcaggtatggaacctatagggggcctgtcacccagcacgtgcatcgggggctgtcccgggggtcaggggagggaggccagcgggccggcggggtccgccccgaccccatccacgaccccgactcctatccgatcctatccccggccccgctcgggcctttccccttgcgccctggctcggctggctcgacgagcagtaagttcgtagccgccctccgaagccgggcgtgcatgggatggcagagttggcgtgcgtgcgtgagtccaccagtgtggcatgggcatgtaaggtgcgcggagggactgcaccttctccatcaggtgcagaaggtgaggatggggcagggggctaggagcttcgacaggcaggaacttccaggcacagggctgtggtaggcccctctcaatggtaaccaggaccgaaatcgggtttcacaacctacttgttttagggtggaaaaacttgaatttccacagccaagtgccacacagttgctgtacccggggccatcccgggagctgtgagataatgagccggtgagactctgctccaccctgggaaggggagttagtctagaggagcatatcttatggggacaagaagtcacaaaaaggctgtgtggtgtgtagagaaggggagggactctgctgttgaggcttcactcttttttagcacttgcccagcacctccttctctcttccagctgcctcttgagtcactgcccagtttagggagcagtaacataaaccaaacagttgcctccaaaatatgcattctgagaaggattcaggcacccattcagatccaggcttgaaatttttacgtggcatgtgagccttctgtgtcatcatgacttaccaatttatgtgaatgtagaaatgcagcaacaaagactgggctgaatcttaatcattggcaaatggtgtgcattatccccaaacaattattttcatgtatgtggt

SEQ ID NO: 3446 - DNA, 1613 bp, Artificial sequence
  DNA replication origin
gccgggcagcgctctttcccgagagaaggagtctttaggtagccgggaggaggtaggtcccgttggtcctgcgccccagacgcggcttccagcgcagccgtgcgctccgaggcgcgcccgtccccaaccgtgactccggccagccggcctccgcaacccaagtgtcccggaaaccgggggtcggaccggggcgagcactggctccacccaacgggccaactccagcccgggtggctgcagcagtgggtttcaggccaaacgctgtagctcgctccacctgctgctgccgctgccgccgccgccgccgccgcctttgccactgcgagaactgtagcggtgcgacccgggattccctcctctcggcgccccaccctcgactcctgttccgctgagcgcgccctccccggcgggcggagactgcagcgccgggggctgaggaaaggtgggtggcgaagcgccgccgggcgcttggtggccgctgccgccgccactgcagctgtgcacgcccgcctctcggaggaaacttgaagccagcagtacaagcagggctggaggccgagcggaggtggggcgggaccggttggagcagggactctttaaacacgtgcgtctggaggaggtgggaagctgcggaagggtatggtgtgtgcctcgcgcctaaacgccgcagccgcccctcccggttcttgcagtttcgcctatcggagtgggaagtgtggggacttggggcgttgcctagtgttggttggggatacagtgcaagccttggatcccaaagctgcttggatggattttaccaaactgtagcatactcagtgcttagggctgcgtttactgctctgctcccagaccctgcaaaattctccattaacgtccttccgttgcatcctctaccctccccagccatccgaccttgggactagggaaacgtggacttggtgggctattctgcgctgaagaggcagcaacgagggctcggtggtattggtgttggtcctagtggaattgtcaagaggatgcttttgaaggtagaccgttttctagctgcaagttacctaacctctttaatccttagtttccttatcagaaaaacataaataagagtagagtcaagccatttcaaaggattaaaagggaacataagtaaaaaacctagcacttggtatacgttcaataagtggtagggattattaattgcaccctttcccccagtggcccagcatcttggaagttcaccatgcttgctttgcaagagattcctgacgctgcagtgaaagaggtccagtcattccagagagaacttcagtttcagacaagtcatcaaatccagaaagcaaggaaaaataccctgaaagacgactggcaaatctcggtgaaagagtagacgcacttcatggattggagtgaatcttagagcacctggtaccttgcacagggtgggaactagataaataactattgcttgattctgactctggtgtgctagttttcctgttcacagatgtgattccaatgccttgagagctggaagggatgaattccagcaagatagagatacagctttctagtgacagaactggaatcctgtctgcggactcctaatcctgggctct

SEQ ID NO: 3447 - DNA, 1151 bp, Artificial sequence
  DNA replication origin
acacggacagcagtctcaaagccacggagaggccaagataagcactaaatggtgcccagagattgccacagaccactgatgtcctcatcaagtgctgagctgagaaggggcgggggcacaagtcaggtggccagaaaggaaacaagtgtctttggaaaagagataagatacacaaatagcaaaatgctgacacttgccaattctgagtggtggatgcagagggctttgttttattagtctccgtggtttctgagtgtctgatgtcagaatccaaagaggtgacggcaggcaggatgtggtgagacaaaaccactctgcaagggaagagaggttgagcagcatttagagggcctggggaccaaaggcttgtctgcagctcagaggcaccacagcctttgaatctgccagggggtggggacgggtggacctgcgaagggcagtggctgaagacacagacaggtggggaaaagtgatggagcaatgtccacagataactaggaggggaggaagtggcctcagatgagggacagactctgctgcttctgagtctgagaaggaaaaataaatcattaatcagaattctggggaggggcaggatcctgaggcatccctgtctgatcatctctatcttctccaggagctggaattaaagtcatctgctcagaggcagtcaggggtgggggacagttttgggagcttcagggggctctgagaaaatgacaacaatctacaacagtgttgtggaagctgaaggaactgactcacatccagctgatgagttagaaggcaatactgaggccagctaaggtcaaaccgtgcatccgcctgggacccagcagctcccgggtacctggggtgagagaagagagggaagagagtagactcctgggagactgaggcatccactacaggagcgacaggaaacagaggacgcagcagtggagagcagcagcaggagctaagtggtggatgatgaggggtaatgacacagaggaggaagtaaatcctagaggagcgatgcattgagagaagaaggaaaagccacagtcaaaggagggccaagagcccctggggcagcagagtgcgggagtagagaacagggagctcactgcagaggcaggtccagggcaggtcagggggctcagggacca

SEQ ID NO: 3448 - DNA, 952 bp, Artificial sequence
  DNA replication origin
cgaggccccggcagttctggaggataactgaagctaaagagtcaacctgggcttggaggacagataacgtctgtgacatatctgtaatgctagcagagaagtcattagagaggctgcaaaatgttgtgacagagattgaaatgcctgctattccagttccaagtgcaatagtggaggcagaaagtcctagacccacaagtaaagggattagtgggatgacttttttttgttgtgttgatgtcatgagggggacaggcagtttttcattcccatctgcaaactggattttgggggtaaggaagactagagtacgtgtgtccatccagttggcaggtaggcacatgtaggtggaagagccacataaaaagaagagacctagtgtcaggcagaaccggaaatataaagtgaaaaggtgagagggtgtactgaaagaggagtcctgcacccaaaatcctagagatccagcaagggaagcagccattagaggttgtaatggggattgatggtgcaactgcatagagggagaggttcggttcttatggtgtatgagaaagaacatagtgtctatgagtaacctttcactactattcatggggctgggtataagcaaacaagaggaggggccaggaggagagtcagatgagcagatggagggtagcgaaggatggagtgagatgcagggtaggtgtcttcctaaacaatagtgactgccaatgttttttagtttgtcagtaatgatagagggcttatcggtaatgcgaagttggaatcctcccatctgtttggtaatgtgtgtggctgggttctgaagatgaagagtaaaggaacatttggatggtggaaggttgcctaaagtgattccagtagggtgttgtcgggagatgcataaaggagcagccacagggatggttgtttgtgtgctgaggggtccaaatatggggggtgagggtgg

SEQ ID NO: 3449 - DNA, 826 bp, Artificial sequence
  DNA replication origin
tcctgttagtggcagggatgagagaatagtaacaaaaaaattccttcacacactgttagtgtaaatatgaattcttacagccactgaacattgatagccgatgtattgtccaattgcggcacagtgtgtatgctaaactagcatttgtggaaaaaaaaaaaaagacaggaaaacagaaagaaagggggagaggagggccgggcgcggtgggtaatcccagcactttgggaggccgaggccgccagatcacgaggtcaggagatcgagaccatgctggttaacacagtgaaaccctgtccgagcgtggtggtgcgcgcctgtagtcccagctacgcgggaggctgaggcaggagaatcgcttgaacccgggaggtggaggttgcagtgagccgaggtcgcgccactgcactccagctgggcgacagagcaagactccgtcaagaaaggaagggaggaagggagggagggagggggataggaagagggaggcggaggtgataaatagttgaagagcacagggaggatagaaagaagggagaggagaagcgaaggaaggagagagaagaaaagaagtcaacctatgtgcaaatagaatgtctgtgtaaggatacacaagaattctgtcaatggtggcctcaagggagaggatctgacggctaaagtcgggagtggaagaaaacttactttctcttgtttgtttttgcgctttttgaattcagtaccacgtgcctgctttgcctattcaaacaacagcaattaaacagctcaatgcctgttcaacaacaacaaaaaagaactagtggataaaagtgtatgtcccagggca

SEQ ID NO: 3450 - DNA, 801 bp, Artificial sequence
  DNA replication origin
ttctccgggagccgtccgtgtcaccgccggaacctggcgcaggtgagtgcttccacccccgccctgctcccagctccccgcggcgcgttcttcgaggggccgctgggggaggaagcccgaggccggcgcagcggccgggccggggaccctgggcgcggggcctggcgcggcggccttcccctcctctcctcgcctcctcgtctcctcccctcctcgccttttctggcccagtcgggtggtcggggcggcggcgggcgaggctggagctcgcccgagccgggcccgctgcggaaatggagctgggggttttaaactgcggacgtttccctccatgttggcggcgcggcgcggctgtggagcggcggcggcagggagggttcgtgggcgcctttgtcctgccccaccgcagcctggctcccggcccctccgagcgcccgtctgacagatgagcaggcggccccgcggtcctgcagtaggaggctgacagggcgcggcggcctggcgggacggggaagggtctgcggccgaggtgggcttagattcgcgctgcttgtcactggctttgagggtcgtggtcgtcgcggtttggtgattctccaggcacactgcatggctgctcgctcctatgcgttgaattccttcgcccggacagtctcaaaaatcgggtatttaggcgggtgtgcgtgttcctgctaaagcacggtcctgctttttcacctttttgagggttcagaaaaatgttctaatgacagccagcctcgcactgccagtagcctcaaggggcacttagtaaagcacttg

SEQ ID NO: 3451 - DNA, 888 bp, Artificial sequence
  DNA replication origin
ccctcgcctcccctccccaccggcgaggccgcccggggctcccattggctcctcgaccttttgaatcatccccggcgctgtcgattggtcgcgcgccgtggcgcgtccgccccgccccaccctgcctgggggcggggaggccggtgagcgggggaaaccgagtctggcggggcggcccggagcgcgacgtttgccaccgccttatctcagccgcccaggcgccctcgcagcacacggagcccgcgcgctcccgccctttccctcccagcgctcgcagcagtgtttggggtgccaggtggcttggcgaacgagatttttttttaagctacaaagaaaactaatacattcttgaagtgatcaccaaagatccgagctcgaaagcgtttctcggtaaaacactatgagtgccctccttagcgtgttaaaatcccacagaagcccctggaccaagcagcggcatcgaaggcgagcaggggcgcttttgtgtccgcggccgctgaacctgcgtagaagcgaacccggaccgatgctgggaccggcggcgggagggagggggaagaatggccgagggctcctacgacttacgctgcgaggaggggctcggttgttacccgagatgctgtcgagatgcagtagaaaatccccaacaccgcggagcgtggaacaagaagttttatgcgttacacaccgaaacacaacttgacctgcaacctacaagcctggttttaattgaaccccaaaatgctgagtcatgtcattgttgactccgaatctgttacggatcctaagcttttttttttctgctagttttcattatcggttagttgatttccttcctttgaggtcgagagtttaaagcagtccattgaagttccctattttgcagtg

SEQ ID NO: 3452 - DNA, 1507 bp, Artificial sequence
  DNA replication origin
gacacctcccatcaggtggggacctgcagcccattcccaggtgggggtctgcacaaggacaagtttgggatgaagcctcaggtcacctggcttcctggatctataaactgtcatctaagtgacaggcttggctcaggaaagccgctcggtgccaaccagcttgagagcctagctcccgggggcaggccaccgcacagagaacacacacgctttcctaacagccttgctggggaaatttggccactggctgcaaaacctcactggaagtaaaaaataggagtgtcagatcctgtagctgaatgaaagaaatttggaccagccagggttaaggaagacagactttctgctctccagagtctgcctgtgctctcaggacaggcctcggtgtggcagcacgtgaaccagtggcaggctgtttttctttctttccatgttcccagcccctggcacatggtaggtgctcagaaagtgctaaggacttcctaaatgcaaacctacacagcctagcccgtgcagcagggaacggagatcaccgggcactcgggagccatccactcggtggtgggcgatttgagccgctgtcttcaggaccgagaccaggcatcagggaccccagattgtggagcagacaacaacgccggctgacctcggacgacgtctcgtcccgtattctatgtctcatgtcctctgtgaaatggaagagcctccatccctaaggggacagagtttcgggcttggtgaatggagcctggtgcgaagcaggaaggaagccccttggctcccacctgccagctactccggggcactcccccgaccttctggccatctccattgctcagagccccactgtgggaggtctgagctctcagaggctgcagtgaagagtgacaaggatgacgcccccaccaaccccatcagggttcctgggggtgcggatgacatgtgggccacctgggcttgtctttagcgttttggggagatgaatagtttgagtgactgtctgcttgcacctgcctcaggacagagtagtgagaggtaggaggaaggcgtagaggggaagggagcttcagaggtaacccccgactgaaccgagagtgcacaggtggtcatcctgcacccagtcctcctgtcaacaccagtaagtgggcggtcccctccctgggcagggcaagacccctgggcctgagggaggtgggaacgagtgcaggtggcgggggtaaacatctctgcaggaggcagagcctgtgagccagtgcctccggccagcccctactgccgggtgtaacgggtgtgaagggagacatgtggaccggcaccttgttccggtcacttccactctgagcttttcccgcccatcacaccaaactgctggtggtgcccccgccctgcactgccgccgcctgaggccctatccaagccatctctgatagagctgagcctcgaggggcaggactcccctaaaaacatcccctgtcttcagcaggggtccagggacctagacaggtgg

SEQ ID NO: 3453 - DNA, 1214 bp, Artificial sequence
  DNA replication origin
gataccacctgtgaggtggaaacggatggacaggagtgtagaagacagtgccacaggcgggattctccaggaggccaaccctgagtcagagttaggagagcaaaagatttattgggagccaggcacggtggctcacgcctgtaatcccggcacttggggaggccagggtgagtggattgcttaagaccaggagtttgagaccggcctgggcaatgtggcaagaccttgtctctacaaaaaatacaaaaattagctgggcatggtggctcgcacttgtaatcccagcacttggagaggccaaggcaagcaaatcgcttaagtccaggaaaatttgagaccagcctgggcaacatggcaagaccttgtctctacaaaaaatacaaaaattagccaggtgtggtggtgcacacctgttgtcccagtgtgtccggaattggtgggttcttggtctcactgacttcaagaatgaagccgcggactctcgcggtgagtgttaacagctcttaaggtggtgcgtctggagtctgtcctttctgatgttaagatgcgttcggagtttcttccttctgatgggttcgtggtctcgctggctcaggagtgaagctgcagaccttcgcggtgagtgttacagctcttaaggcagcgcctctggagttgttcgttcctcccggtgggctcgtggtcttgctgggctgaggagtgaagctgcagatcttcccggtgagtgttacagctcataaaagcagcgtggacctaaagagtgtgcagtagcaagatttattgcaaagagccaaagaacaaagcttccacagtgtggaaggagacccgagcgggttgctactgctggttctggcagcctgcttttattctcttatctggccccacctacatcctgctgattggtagagcctagtggcctgttttgacagggtgctgactggtgcatttataatccctgagctagatacaaaggttctccacgtccccttagttagatacagagtatccacacaaaggttctccaaggccccaccagagcagctagatacagagtgttgattggtgccccctgagctaaacacagggtgatgattggtgtatttacaatccctgagctagacataaagactctccacatccccaccagactcaggagcccagctggcttcacctagtggatcccgcaccggggctgcaggtggagctgcctgcca

SEQ ID NO: 3454 - DNA, 1164 bp, Artificial sequence
  DNA replication origin
aaggccagccgggttctgccggggcccagggcctggacggtggcgctcgagcgacccctggcggtcatgctcggcagcgcgccccgtccaacgcgggtgcgcagcgccctctgccggccgacgggcgtccttgccttttcccggcctctcagtttgggattggagggtactggtaggatcctatttcacagctgagagacggaggcacagaagtgaagtaatgcatccgaggcgaagctgactgagaaaatacacgaatgcaggtattctgactgaagagtctgcatgaagtccagggtaacgaatatgacctttggttatgtcaacaaatgtgtccacagagccttttttctccgctcagctggtcggctggttccacggagctgtgttgagccctgggtaccccacttttgaagttcatcagcaaactacaacatgttcaggttgcgtggtgagagtggtgggggactccaaatccagtcgtatgaggaacaatggaaagaatggggtggcaggtttcttcaatccagaacattccactggccagggctgtcctccggaggaggaagcatcctcatgaagtggacatcctactcaccaggggcctagagagtgccgggctggccacttgctgactggtctggaagaattagaataattatgggaaggccctttaaggtgctcacaagcctctttaggagacacaggtactaatcattaggaacgaggcaggaggcatgcatggccagtgctgtggagtgggcacgaggctgtctcgtctcttcactgggcaggaggggaatcatgaggtcagagcgcttcgggaaggtgggcgcggcacagggttctggctcagccctgctgcagtgttgggtcagaggcatggataccacctgtgaggtggaaacggatggacaggagtgtagaagacagtgccacaggcgggattctccaggaggccaaccctgagtcagagttaggagagcaaaagatttattgggagccaggcacggtggctcacgcctgtaatcccggcacttggggaggccagggtgagtggattgcttaagaccaggagtttgagaccggcctgggcaatgtggcaagaccttgtctctacaaaaaatacaaaaattagctgggcatggtggctcgcacttgtaa

SEQ ID NO: 3455 - DNA, 1414 bp, Artificial sequence
  DNA replication origin
cctcccgcggctgcagcagctgccggttgcacacggcctcggcggcggcgcggcgagcgcgggcctgtggagcggcggccgggcgcgcggccccggcgggcacccctcagagggcggccgaggaagctccgggaggaggagcaggaccacgaggaggtgggaggcggcggccgcctggggaccagctccgcgcctcggcctctccgccccctccccagcctttctctcgccctcttctcccacactcccggccggcgcctcggctttgtgcgaggagatggtgtagccccctggccgccgaaggaggagccggacacttgtctcccgtctccgagctgctccccacccctggaggagagacccccccctcggctcggcgccttctgcgtctcccggctggtggggaagcctctgcgccgccggcaccatgaggtgaggggcgcgcggggcgggggccgggcgggccattgtgccgcgggagccgcgacccccgttctcctcggaccccgccttccctctcccggcccggcgcgtctcccctggtctccggtctgttcctcccccctccgccttttgtcccttccaatttctctttctttcttggaaacctccccaacccgtgtggtttgggggtctcgcttcatcgttctctcatttttcctcaaatgctcttctttcacccaggatttcccttcctaaatttaatttgcgcctggctccctcccccaagcctttgcaagcgaaacccgggagatggggaggggttcgagaatcgaagcgtgcgtgttgctgggaaacaggtattttttcgtatatatgtaaaaatttcatgcacttttgcctccgaactctcgtgtttaattaaaaaaggaagaaaagtttgaaaggtctgaaatctctgcgggtaataaagtgcctctggtaggggtaggtgaaggagctgtgaaaggtgaaatttcacgatggtgggggaagggaaagaattgattaggttcacgtggtgggggcagtaaaagactgggataagtaagttggtaggggtgtgtaagcgggggcggggaagggatctgtttggaaaagccttttctcccctttctctgtagcagcctgtgttgcattgcagcagctgctttttccctttgctctgtactcaataaaacaggagctaaattatttttgcggccccgaagaattgaatgtactgtcgtaaaatatttttttaattgatacgatgaaacatatggtatgatatttttctttattgtttctcaaattgtgtaggagaataaaccgtgatgtggtgtgtcattcattggagattttttttccagcctttcctaaacctgttctgtgtccataaccttctcttttcggattggtgcaagacttcgtgtgaaatgggacttggtagact

SEQ ID NO: 3456 - DNA, 1004 bp, Artificial sequence
  DNA replication origin
ggcggggggccgggcgcactcccccgcgccggcggccgggcccccgccggactgcggagagcgaggctgggagagagcgagcgcgacggcggcggcggcggagagaggctctttgttgcctccctaccccgccccctgcacccctctgggattcgggcgggccaccacccccccctcccgcccaacacctccggccagttgtcggccggggttcctcgcccgtggttgtccttgaccgtcggccccctccccgtcgcctcccgctccccagaggcttggggagctccgaggcctcccccacggccacggtgcggagaccgaggcgccgagacctcctgggcgccagacccgtaggcaccggcgtggggagcttggacgcgtgactgggcacagggccgggccaggagactccgggtcggctcgcggccgggtgccctcgcgcggggcgagtgctcagcccgccctgttgcggtctcaggacggggatgagggaatcggggggcatcccggtcagcccaactgcccgccctcgccgcggctgcgcccagcgattcctgcggagttgaggaggggcatataaatggaaaatatggtcatcattgttcccttcgctccttttcttcccgaggaatcccagcgtgctgcgccgatggaacgagttgatgtgcacactaggtatagggatgacttcatccccaaacgaacgcagccgactctcggggaaacgcagtcgccgggagacgcgcgcggaacagtgtgttgccgcaagagtggaagaagagaaacgcagccagtggagccgctttccagcgtcattagcaaagagggaatcccgggcagggggcggggagagagaggaactaatgataattttaaatttttcgtcattcccaatggtcttgaagtcacctcccttaaaaagtagatataaaatactggcgaggcaatttcatttcaagtcaagtcggggaggagggcatccaggaagccagaattgatcgttg

SEQ ID NO: 3457 - DNA, 1406 bp, Artificial sequence
  DNA replication origin
cagcagagggggcctgctcctgcagtgcagggctgccccacaggcagtgtgctgagagcagcagctctgggcgattctgcagtcatgttgatacccacttttagttacatgcagattaaggggcagtttatgcagacatttctaggaaaagggtagtaacttttgggtcctcgggtcattgccatggaaggggggtgataactccaggggcgtgccctggtaaactgacatggcacactgatatgatgggcatatcttatgctcatcttccacccagtccctgttttagctagtcctcaatttggtcctcaatctggtgtccaagccccacctctggcgttaagtcctgactcctacctgtttcaccatcactgcagttttaagagtaacgaatttgggtcccctggtgaagtggccagaggcagagcttctgtgtgaactatttggaggggaggggaaagaactctcccagactgcaggttctgaaaggaatacagagatgtcagagactgcagttgcaagagaaagcttttataggagggtgtagaattaaaggacaagaggactctacatgtggatggaggagggcaccctgtccggcagtactgcaagagcaaaagtttggaggtgggagtgaggtgagtgcgtctgccggccagaattcttgggccagggtgagcagaaaggttggaggccaagggaaggtgggtggtggtgaaccttatcctgaagtgtgcaaggtgacagtcagaagcttagaactccagccacgggccctgcatgtggcctcctagctgtagtctgtccaccgagatcgtgaggatgctggtggttgaaagaactgcacctctgagcaggtgaagagagaagctaaggaggggtgatggcagaggcgatgggacaggctttctaacgatgaggggctggggatcaacgctctcacggaagctaaaagagccccagcaaccacccgcctgggccctgagctctctccaaagcgggaggggattcactaagaggttgctcccctggcattgaactcagcatcctatactggtcctcaccatgaagacccccaagagtgcttcagaccattgcttctcacattctctgtataaagacactaatttgtttttagatttccaagcatgtcacggaccaatatgtttgttaaatatactaagaatgaattgctagaaagatgaaattaaaaagacatacaccgccaggtgcagtggctcacgcccataatctcaccactttgggaggcggaggtaggtgcatcgcttgagcccaggagttcaagatcagcctaggcaacaaagtgagacccccgtatctacaaaacttaaaaaattagccaggtgtggtggcgcagtctgtagtcccagctattctggaggccg

SEQ ID NO: 3458 - DNA, 1327 bp, Artificial sequence
  DNA replication origin
tgcagagggacttgtagttggtccgcccccagctcctgccccggccaggagactgcgcgtgccgcctactgggggaaggagcctgcaggcgaccgcggacttctcgcagggaattccgcgtcccagactgtgggcggacgccgcagggagggaggctcgcgaccccgagagcgcaccgcgtcccctggcctgggcgagctctgcttccagggccgtggctcgctcggcggtgaaatgcacttaatttgtcacccaagtcggaacactgattttcatgcgcgtccgtgtgaagagaccaccaaacaggctttgtgtgagcaacatggctgtttatttcacctgggtgcaggcgggctgagtccgaaaagagtcagccaagggagataggggtggggccgttttataggatttgggtaggtaaaggaaaattacagtcaaaggggggttctctggcgggcagagtggggggggtcacaaggtgctcagtaggggagcttttgagccaggatgagccaggagaaggaatttcacaagacaatgtcatcagttaaggcaggaacaggtcattttcacttttgtggtggaatgacatcagttaaggcaggaaccggccatctggatgtgtaggtgcaggccacaggggatatgatggcttagcttcggctcagaggcctgacactgatcacaccttttagttgaaatgcgctttcatctccatctgctgccgcagccgccgcccggcaccccctcgctctggtctcgggattgaaggccagccctctcctcttgtagaacaggaaacttgcccgggagttcaccttgtagttgaagccagggaatgtggtcaacctgagcaaaagcgccgcggagaccgagtggccgcctgcctccctccctggcagatgtcggttttctctgagcttctggctccttccttgccctggcggctcccgagatcttggaggtggggtgcctagcaatgttgtaatcctaattttgacttttttttcttaaagttgaatgccccctccatagcccacctcccattgtttaaacttcaggttccgcaaagcctggatccgcccctacaggcaacactcgttgtcctggaagttctgtgagggctcagcttgtggctggaggtgggaggtgagggggacccatgcacttggcaggcccgcttccaggacagccctttgctgggattgatgagctgttggtggaaaattgttgaggaccttggggttggtggctgtttcggtaccactgtgcagcctcctctgcatccagcataatttaaaataaacattttcaggaagccacactt

SEQ ID NO: 3459 - DNA, 1208 bp, Artificial sequence
  DNA replication origin
gtctgttgtttttccatttttctagatcatatatatataatatttatactatatataatatgtatatagtgtgtgtatatatatatataatatgtatatattaggtcaagtgtaaataaaatcagggacagggttggagcgcagcaggaaagagcctgctggggatcagagtctctgggctgtcagggccgggctgggcgggctccgttgttaatggcttcccctcatcttgcaggagccatgtggctagaaatcctcctcacttcagtgctgggctttgccatctactggttcatctcccgggacaaagaggaaactttgccacttgaagatgggtggtgggggccaggcacgaggtccgcagccagggaggacgacagcatccgccctttcaaggtggaaacgtcagatgaggagatccacgtaaggcaccttgggccgggccgggctgggcagtggagagggtggtgtgtcgaagacaggggttgggtcttaggccagatgcgggaggggacgggggcttgggaatggtccatcctacttgggagtgtgtttcagtctgcttttcctctgctgggcaggtgcaggttgctttggagagggatgcccagccctcccactttctctcttctcctttccctacccaaggcccagcagtgctcaggcaggagatggggtaacctgtatcaaaggtcacagaaagcagctgtcatcacctcctctatgccctgcctgaagccttgggagtgaggttgtgggagaaagtgagcaggttcccgtcagagacccaggaagcactgagaaggcagggatgctactggttaggcaccggctgtgtgtcagccattcctggtcacattcaatccctacggtgatcccgcggggtgaggattgttgttcccaaactgcagatgcagaagctgaagctcaggggcataaagcaactcgttcaaggcggcctagctaacatgcggaaggatttgaagtccaatctaatcctgaagctgctgcccctcctctgcacagggatagagtcaggaaggaggtgactgggcaggtggggtgaactgagaatgcattctcggggaggagcaaggcttgagtgggggacaggacggtaggcaggcctggcatggccctgccaatcctttctttcattccgtgggttttgagcacctactgtgtgcaggcccagtgagtgcttggga

SEQ ID NO: 3460 - DNA, 1513 bp, Artificial sequence
  DNA replication origin
acgtttgcagatgctctccctgcgccgcgaccaccctgtgcttggcccagttctcccggaggcgtccagagactgggctcgtgccgggggacggaagagggtgcgccccggcggatcccttcttggagcctggacgtgagctggccggtccggggcttgcagacctccgggaggagctgcggggctgagcggcgaccaggaggccaggccggggcagaggaccgccgagggccaccgcgggaggcgcagtcagctgcgtacaggcttgcgccgccgcgggccaagactccaaattgggaaaggggtggccgcagctctgcgcatgtgcaggaggcgccggagtttcactttgtaacttttaagtggtcggaacacgccccgcgctgctgggtcccgccagacacgccgccgccgcaggtacaggggacagggggcgtgaggaggggcaatgcaccctccgcctttcccgggacgtgcgcgccaggtgtccggttccggaacggctcccagcctacgcagaccccagagcccccgaccccaagcagggggtgacgacgcgggattgggtgggaggagagggtccgggcagcgcctccattccagccctgcgctccttgggaattcctggcggcttttcaggactttcctctccggcttttcgctttcagggctggtatctccttcttccccacccctctctttgggatttgtcggcggagtccgacctcccacctaactaggagtgcagctatgggctcctcggaccctatacgaggccgggctgggaaagggccaagcgtccgactctcctgacgccaggaaggcagaggccacccctcgggctgttcctgggtgaccacttcctgcagccttggcggagtcctgaggagggaggctggggactcggggactggggggaagggcgggggcggaaagggtgaggcgagctctgctaagaaaccaaatccgcaaaggttccagcacctgataagactagctacctgaggccctggaggggccttggtcattcagccccaggcaggtggtgtcctcttcaagggcaggggtggacagcgtggcggacccactgaccctcccttgacacctctcaggtcatcctcaagtctgctgtgccttcaagggggatatgaacggaagccgaggctccttttcccttcacacgcccctctcctttgtttagtgtgggggcaaaggtctctcctagctgttcgttgggctctaacagagaagacgtcaggtgggatcctgcccttgtgtttcccattagctggaggggcgacttaaaataaaggcagacagcttctaattgcttgctagggccgggtcctgggctaagtgctttacaggtgttgtttgggatctgtgcctcccaacagctccgtgagagaaagtcatcactcgcatttcctggcgaaggaagccaaggcacagagtggttaggctgcttgtctgaactgcgtggtgctgagaccctaactccagagcctgctca

SEQ ID NO: 3461 - DNA, 1486 bp, Artificial sequence
  DNA replication origin
tgcacaggcacgggcggctgtccccgcgcagcgcccgggcccgggtgaccgtcgagtggctgcgcgtccgcgacgacggctccaaccgcacctccctcatcgactccaggtgggggtcgcgggggcgcgcagggtagggggagggcgctgctaggcccggcttgggggcggggacgcgggggggcggtgcggggtcctcggggcccgtcccagtccccgccctcaagcggcgctgggtctctgtgtcatgtctcaggctggtgtccgtccacgagagcggctggaaggccttcgacgtgaccgaggccgtgaacttctggcagcagctgagccggccccggcagccgctgctgctacaggtgtcggtgcagagggagcatctgggcccgctggcgtccggcgcccacaagctggtccgctttgcctcgcagggggcgccagccgggcttggggagccccagctggagctgcacaccctggaccttggggactatgggtaggtgctgagggtcaaactggtaagccggaataaagagacaggcaattacatttattttgaaatggacaacttttcagagtgctgtgggaatgaatgagacaatgtatacaattcttcctctgactcttaggagatcctcagtaaatatcggttattaattttcaagttatttctagctgtccatcctatatcacaaacatccagctttttgaagttgagaggtggatcataaatctccatcccagacgccctctgacctcagccctcccagctgaccgctgaccctgctctctttgcccacacagagctcagggcgactgtgaccctgaagcaccaatgaccgagggcacccgctgctgccgccaggagatgtacattgacctgcaggggatgaagtgggccgagaactgggtgctggagcccccgggcttcctggcttatgagtgtgtgggcacctgccggcagcccccggaggccctggccttcaagtggccgtttctggggcctcgacagtgcatcgcctcggagactgactcgctgcccatgatcgtcagcatcaaggagggaggcaggaccaggccccaggtggtcagcctgcccaacatgagggtgcagaagtgcagctgtgcctcggatggtgcgctcgtgccaaggaggctccagccataggcgcctagtgtagccatcgagggacttgacttgtgtgtgtttctgaagtgttcgagggtaccaggagagctggcgatgactgaactgctgatggacaaatgctctgtgctctctagtgagccctgaatttgcttcctctgacaagttacctcacctaatttttgcttctcaggaatgagaatctttggccactggagagcccttgctcagttttctctattcttattattcactgcactatattctaagcacttacatgtggagatactgtaacctgagggcagaaagcccaatgtgtcattgtttacttgtcctgtc

SEQ ID NO: 3462 - DNA, 1222 bp, Artificial sequence
  DNA replication origin
agacttgccctatctagacagccccctcctcccagctcagggactcgtctggctgtgagcttccaggaggtctcaggggtgtgacctccctccctccttccctccccactccctacctcctccctccaccccaggctataaagctgcccaggcttggctctcagcacatccagctgcctgagaccctcctgcagccttctcaagggacagccccactctgcctcttgctcctccagggcagcaccatgcagcccctgtggctctgctgggcactctgggtgttgcccctggccagccccggggccgccctgaccggggagcagctcctgggcagcctgctgcggcagctgcagctcaaagaggtgcccaccctggacagggccgacatggaggagctggtcatccccacccacgtgagggcccagtacgtggccctgctgcagcgcagccacggggaccgctcccgcggaaagaggttcagccagagcttccgaggtgaggccctccctccctgctgcccctggtcccatggggcaggtcagatgtgcccactccggtggtgtcaaagggctcctggccttgcagaggtctgtgggaggctgagtgagggccacggtctaaggggcagtgaggtggggccgggcctgtgaggatggcggggcctcagcatgcagcggtgcatgcagtcaggactccgggggtctgttttcgtactgccactctggtctgagttctacttggagcatattgctttaaaatcatctcacaaccatttgctcacatggaactggggtataactatgtcttgcccatcttccagcattgtgaacatcaaaatgagtcattgtaaatagaagcgtgtttgggtaactgaaaaatactgcacttgagtagacaacctgggttatacctggctgtcaggggtgcagcgggcctgaatcctcctgcagccggcctgaatcctcctgcagcctctcgcctccctagctcctcagtgcccagagctagacccaatgccaggcacctgggtgaggattctgctcccagcatctcagctgaggcaaacttgctagccagggtcccacaggcgcccctgcctgctggatggaaattgttactaaacaaggcccagatccaaggaagatttgtaaactgggtttgccccagaaatagaacagggccggtgtctcctggcctggctgccagctcagtggccctgcca

SEQ ID NO: 3463 - DNA, 1532 bp, Artificial sequence
  DNA replication origin
cctcactgccccttagaccgtggccctcactcagcctcccacagacctctgcaaggccaggagccctttgacaccaccggagtgggcacatctgacctgccccatgggaccaggggcagcagggagggagggcctcacctcggaagctctggctgaacctctttccgcgggagcggtccccgtggctgcgctgcagcagggccacgtactgggccctcacgtgggtggggatgaccagctcctccatgtcggccctgtccagggtgggcacctctttgagctgcagctgccgcagcaggctgcccaggagctgctccccggtcagggcggccccggggctggccaggggcaacacccagagtgcccagcagagccacaggggctgcatggtgctgccctggaggagcaagaggcagagtggggctgtcccttgagaaggctgcaggagggtctcaggcagctggatgtgctgagagccaagcctgggcagctttatagcctggggtggagggaggaggtagggagtggggagggaaggagggagggaggtcacacccctgagacctcctggaagctcacagccagacgagtccctgagctgggaggagggggctgtctagatagggcaagtctgtctgggctgtgaacagctggctacagctgtctatacaatggtcatgaacccctaatgtgggttgaggcctgaccagttaaattaaaaagctcatttcctagagtagaggtggggctctcgttctctgcaagaggctcagttcccccagctgctggtaagtggacctagagtcttgttccttgctgcaaccaaacaactgacaggaaccagaatggctcaggcaacgccagggctctaagggccaatccagtctgcagggatgagcatccgggcccgtgctcagagggtcccggggcctcatgagatcctgagctggtggtccccagttgtgaaaccagatttcccactgttctggggggaccttcctaggcaagggagcctaggagcatttagttccaacggggttttgtccaataaggaaggagcctcatcctctccctcatccctgctgttcacagaattagagtttagagttgaaaggaatatccaggctaccttctcccccaatttttttttcttttgagacagagtttcattcttgttgcccaggctggagtacaatggcgcagtctcggctcacggcaacctctcccaatttttgagctgaaaaaaaaccgaggctcagaggtgtcaacttcccgaagctcacaaagttaatgatcaatgtccatataaagtcaggtcttgcaattcacaaagttcttggcacactcaaattatttacagcctagttttgatctatgccctaaagggagccaggtggtctcaatccaggtgatcaggtctaggctggggcagggggacaatcccccaagacagaggacccctatcctgaatgtggatttgtaagctggttgaagagttttgctggggaaataaaacatttgggtgatcagcc

SEQ ID NO: 3464 - DNA, 1128 bp, Artificial sequence
  DNA replication origin
ggcgcctggagctcacgccaagctgccacaggggcttccgggactccagcccggagttccgccctccagtcgcgagcggaggaggcgggcacgcggcctggctcgggccgcggattggcctgccccgagatcctggccactgattggtcgcccggacggggcggggccacgtggcctaaggcgccatcagccgcccgggagatatccgccgggggagaatagggttgcaccatcccagaagctgctgttagctcgccggtcctcggcacgccgcccgttcgcccctgcgctgtccgcccttcccctagcgttacttccggtccctcgctgagggggttcgtgcggctcccaggaggcgtgaaccgcggaccatgagcgtgggcttcatcggggccggccagctggcctatgctctggcgcggggcttcacggccgcaggcaagcgcgtggaggcgggaggcggcttcgcgggcggtcccgaggcccgagggggcctccgtcccaccagcatgagcgaatgaaaggggagtttgcgtccggtggggtagatgagactctggttgagcagcaagtgcgtcttctgtcctcgtagagggttgagggggagagggagactggcactgttaggacggctctgggttttagagccagggaaagcgtggtaacgggctgggccgcgacccctagttgaaaagctctgtcttctgcaggcatcctgtcggctcacaagataatagccagctccccagaaatgaacctgcccacggtgtccgcgctcagggtaggtggagccgggcggagtgggaagcgggtggaggcccaggaaaaggatgacctgagatgaagtgagtctggccggcccctgcgcccaagtgctggtctttggccggcggtgacctttactccaggaacgtgacaatctttccaccttctcttgggcagctcaatgtggtgggaacacccagggagacataactgggggtcagatccagacactggagtggtagaggattaactgaggtgattatgtgatgaaagcacctggcacatagtaggtacctaataaatactcattttttaaattttttttcagacagggtcttactctgtcgcccaagctggagtgca

SEQ ID NO: 3465 - DNA, 932 bp, Artificial sequence
  DNA replication origin
tccaggagccggtccccaaggccgcgctgcacaggcacgggcggctgtccccgcgcagcgcccaggcccgggtgaccgtcgagtggctgcgcgtccgcgacgacggctccaaccgcacctccctcatcgactccaggtgggggtcgcgcgggcgcgcagggcaggagtaggaggctgctcggcccggcttgggggcggggacgcagggggcggtgcagggtcctcggggcccgtcccagtccccgccctcaagcggcgctgggtctccgtgtcgtgtgtatcatgtctcaggctggtgtccgtccacgagagcggctggaaggccttcgacgtgaccgaggccgtgaacttctggcagcagctgagccggccccggcagccgctgctgctacaggtgtcggtgcagagggagcatctgggcccgctggcgtccggcgcccacaagctggtccgctttgcctcgcagggggcgccagccgggcttggggagccccagctggagctgcacaccctggacctcagggactatgggtaggtgcaggactgggcagaagggaggcaagcagccactgagtggtccagacccccgtccccaggactgtctgggggaccggatggtggcggtgggctaggggtagggagagcgcggtgcagactgtcccaggatgccagcgattgcccactacatgtcagggtttctaatggcagaaattgtattgttggccaggcgtggtggctcagacctgtaatcctagcactttgggaggccgaggcgggctggatcacaagatcaggagtttgagaccagcctgaccaacatgatgaaaccccgtgtctaccaaaaatacaaaaattagccgggcgtggtggcgcgtgcctgtaatcccagctactcaggaggctgaggcaggagaatcacttgaatccgggag

SEQ ID NO: 3466 - DNA, 1244 bp, Artificial sequence
  DNA replication origin
aggaaaattcaacaggcactaaaaatattgtcaagctgctgacagcacagccagaggccccaggcctgggtggcatccagacagccctgtcctttctagacagccccctcctccaggctcagggacctgtctggctgtgagctcccaggaggtcccaggggtgtgacctccctccctccctccctccctcttcccttcaccccaggccagcccagggccagctataaagctggcccagcctggctctcagcacacccagctgcctgagaccctccttcaacctccctagaggacagccccactctgcctcctgctcccccagggcagcaccatgtggcccctgtggctctgctgggcactctgggtgctgcccctggctggccccggggcggccctgaccgaggagcagctcctgggcagcctgctgcggcagctgcagctcagcgaggtgcccgtactggacagggccgacatggagaagctggtcatccccgcccacgtgagggcccagtatgtagtcctgctgcggcgcagccacggggaccgctcccgcggaaagaggttcagccagagcttccgaggtgagaccctccctccctgctggccccggtcccatggtcgggggcaggccggttgtgcccactctggaggtgtcgaagggcccctggccttttgggactctgtgggaggctgtgtgagggccacggtccaaggagcagtgaggaggagccgggcctgggtccagggtctccagctgtgcactgaggcccccctccagcccaggggaggtgcaccaggctagacctgctggaaaaaccaagacttcagagaaggggagggtagaggagagaaagtagagctgggggagcaggtgagtgtgtgcctcaaggcacttggtgcagctggactcccagggtatgttttcacactgccactctggtctgagcctgaccttgagtaaatggctttaaaatcctctctccaccatgtgctcatctggaacaggggtatgactatgtcttcgccatctcccagcactgtgaacgtcaaagtgagtccttgtggatagaagcgtgtttggataactgaaaaatacctaagtagactacctgggttatacctggctgtcaggggtgcaactgggcctgaatcctcctgcagcctctcgcctccctagctcctcagtgcccagagctagagccagtgccaggcacctgggtgaggattctgctcccagcatctca

SEQ ID NO: 3467 - DNA, 1271 bp, Artificial sequence
  DNA replication origin
atgggaccggggccagcagggagggagggtctcacctcggaagctctggctgaacctctttccgcgggagcggtccccgtggctgcgccgcagcaggactacatactgggccctcacgtgggcggggatgaccagcttctccatgtcggccctgtccagtacgggcacctcgctgagctgcagctgccgcagcaggctgcccaggagctgctcctcggtcagggccgccccggggccagccaggggcagcacccagagtgcccagcagagccacaggggccacatggtgctgccctgggggagcaggaggcagagtggggctgtcctctagggaggttgaaggagggtctcaggcagctgggtgtgctgagagccaggctgggccagctttatagctggccctgggctggcctggggtgaagggaagagggagggagggagggagggaggtcacacccctgggacctcctgggagctcacagccagacaggtccctgagcctggaggagggggctgtctagaaaggacagggctgtctggatgccacccaggcctggggcctctggctgtgctgtcagcagcttgacaatatttttagtgcctgttgaattttcctggccttaccccagccctgttctatgaaaaagtgagtctattctgtgaaaaacaaagtcctgctagccagctgcttaaatctctttaagtctcttctggaggctgggctgggtccaggtctgcaaatcataaaggaagggcgggaaggattctgccttcctgctggttctggccacattcacagaagccccttggtcatctccctccaacctacactccttgcacaccccctgcctctccccacaccaggggtccctcagggttgtcgcaccgtccttgccctccccccatgacatcctctgtctagacacggtcaggacacaaatctggcagctctactgtctttaggagtcccaggaacagcaatttcagcaagtgcctttgcagtcacgtgaccacagcacaggagtcctcccttcagacagcagaattattctggggtgtgctctccccagtgagctggctggccggttcatgccaccagcactcagctggagcccaggtcatttccagacacagacaagggacagggacttagaaagcagaggccagagctgcccaaaggcatggcctgtccaaagccacaggtactgggggcagattgaggtgggagcccccctgtgtctcttcaaacacacattttagactggccacgt

SEQ ID NO: 3468 - DNA, 1252 bp, Artificial sequence
  DNA replication origin
gaagaaactgagaccttcagtccagctccatgatctgcagggtatagtgcaaggaagaggaagagaggggaaaactaggcttcctagccgtcgaactcagccttttccaaggccatacatcaccttctactattagtatcatttatttatttatttttgagacggggtctcactctgttacccaggctggagcgcagtgacgcgattatagctcactgcggcctcaacctccccaggctcaagtgatcctcccactcagcctcctaagtagctgggactacacacgcaccaccatgcctggctaatttttttttttttttttttttttttttttttagtagagacagggttttgccctgctgcccaagctggtctcaaacacctgggctcaagggattcgcctaccttgggcttccaaaatgctgggattacaggcataaaccaccgtgcctggttctattagtacttttataaacagcatctaggacaagtgagcaagtgacaacaaatcacgccaggtggcacccccagccagccggccagcgccacatccaagcgcaccgaggcatccttactgagccctgaacacagcagtgaccccgatgggcctgtgccatgaggcccacattccactgaggggagacagacataagcctccagggaaaccagataatgggaaggaagcaaacagggtgatgaaagggagtgactaaggagggctcgctgaggaggtgacttgagaatgaacggcacaaaaaggcctgggaaggtagttccagacagagggagcaaggggcggggttgagaaagggcttggcgtagttcaggataagaatagagcaggaggcgaaagccaggggccacaggaggaaacccaggccgtggtgaggctctgaccctgacagccataggcagccactgaggagcttcaagcaaaagagtgacatagtctgatttgcatttaaaaaaaaaatcagaccaggtgcggtggctcacgcctgtaatctcagcattttgtgaggccgaggcaggccgatcacctgaggtcaggagttcgagaccagcctggccaacatggtgaaatcccatctccactaaaaatacaaaaattagccaggcatagtggtgtggaactgtaatcccagctactcgggaggctgaggcaggagaattgcttgaacccgggaggcggaggttgcagtgagctgggattgcgccactgcactccagctgagaggtgacagcgtgctgg

SEQ ID NO: 3469 - DNA, 918 bp, Artificial sequence
  DNA replication origin
cggcggggaggggagggaggggctgcccccgcgcgggccccggcgcgcgcccccgaggagacccgggcggcagtgggggaggaggacgcggtcggccgggtcgccgcgccccattggaaaacgctccccagcaggaagctggcaaataggaatccagcgtcccgcgcccgctgtcggacctggccgctgcggcagcgggaggggcggaccgacggcctccttcccgcctgcgcgctcggccaagtgcggccgggtcctgcgggaccggcccgagtccgccgtagacaacttgatccgctaagactcctgggccggccgcctgcgtgcagggcagcccctcgccggtgttggcctccgggatcaggggacggggctcgctctcctcccgggcccgggcccccgacgcaagatggctgtgtcgcgtcggcctctaaacaatgtgtggagcgcgcagctcctgcaccagggcctggtggcttgtcctgcccgcccgtgggggccgtgtgatctgttttcggtaggattgctttggaaaggaattgccgaatatagatagtcaaatgtccgcagcttctgcatagtttagaagaggctgaaaacggcagaaagaaggcaaacgtggtttgggaattagtacatatacctgttttccaattctcagtagcataggaaacggacttttcatggcccaagttatcctcacgacttgtcagttgattggctttggaacctctgaaccgtccctagatggtattgacgcttcacaactgtgtgtaaaggttttcaatggaagggtcatgcaaatatcccgtagggtagtgaaggaggaaaatttcataaatgaagggcagtaattatttgtaatctgaagatctcacaaagcggcttagtgataaacattatcccgaaacagataca

SEQ ID NO: 3470 - DNA, 1220 bp, Artificial sequence
  DNA replication origin
acagcgggcgcgggacgctggattcctatttgccagcttcctgctggggagcgttttccaatggggcgcggcgacccggccgaccgcgtcctcctcccccactgccgcccgggtctcctcgggggcgcgcgccggggcccgcgcgggggcagcccctccctcccctccccgccgcggcccgagacgcccgcaggccgggcgttcacccgccgcgcctccgcccgccttcccctccccccacttccctccgggcgccccaaacccgggcttcgggggttcgacgccgtgcgcacacggagcgggatgggagtgcagggccgggggcgggggctggccgggtgcgggcggcagtctcggcgggagccggcggcccctcagcgtgtcttttgtgtttgtacacacacggcgcgaggcggcctggaggagggagcgggcggcgcgcgggggaggggcgagcgcgcgccagcgaacgggcgcgcggggggaagggcgggggcggggcgcgagaggagctatgggggcggggccgagccttccctccattgtgtgtgattggctggcgcgcggcgcgggggcggggcggcgtgtgttgggggatagcctcggtgtcagccatctttcaattgtgttcgcagccgccgccgcgccgccgtcgctctccaacgccagcgccgcctctcgctcgccgagctccagccgaaggagaaggggggtaagtttccccgtctgcccgcttccccggaaccgagccccgcttgccgtcagccccgagccgggccctggcggtgccgggaggggacccatagcccctccggcttagcccacaaactttttggcccagaaatggaggtgaggagcgagtttccctgttccctctggcggcggcggctcccccgtctctcgccgcctcagcccaacagcagcaaccgccgcggcgccgagcctgctctccctcctcctccccgcgcccctggctcctctttcttcggtgaaatcccgcccgccgccccttccccggaccccaaaccttcaccatgacccgcgcgggcctcttaactaccgcccccgggccccagcccccagttttcgagcgggaaaggggtggaaatcgccgccgcttcgcaccctggggtaactcgctttttgctgcctccccacagttgttgctaagcttcaccatcttgtctctcttctctggtcaccgaccatattttttcccc

SEQ ID NO: 3471 - DNA, 890 bp, Artificial sequence
  DNA replication origin
ctggcggcggcggctcccccgtctctcgccgcctcagcccaacagcagcaaccgccgcggcgccgagcctgctctccctcctcctccccgcgcccctggctcctctttcttcggtgaaatcccgcccgccgccccttccccggaccccaaaccttcaccatgacccgcgcgggcctcttaactaccgcccccgggccccagcccccagttttcgagcgggaaaggggtggaaatcgccgccgcttcgcaccctggggtaactcgctttttgctgcctccccacagttgttgctaagcttcaccatcttgtctctcttctctggtcaccgaccatattttttcccccgtttctctcttccccatttcaaaaaagcaagaatttttaaaagagggacgtttttttcccttttttggagaggcggaaacttgatgcatttgaaatgcaaaaaaaacttttgcattttggagggcggcacgtggcaggggataggggtattttcgagcgatttggtgttttgtctctttggaacggaatcggatacgttttgcgattgtttccattttgttctggtcggggagccgagttggttcctgctcgaggcgctgggagcgaggcgggcaggttgggggaccctgtgccgagggacccgaaggaggcaaaaccaaaagtttatgtggtgcttggggtggaccggtcggcggatgtcgtgcgttaattaaagcctgggtgcggggcactttttatttcactgcgaagcctgtgaggactggacgcgaggacggggctttgtagaatgctcgctggtggtagctgttgttcctctcttgttttttcgagacgcctttttgtcaacataactgtaaagatgcaaaaccaagaatattttcag

SEQ ID NO: 3472 - DNA, 1920 bp, Artificial sequence
  DNA replication origin
gtgggcaaagcggggtcatttgtgttgaggacgcaaatctttccaggaagtttgtgcctattaatatttcagttcctggcagccgcctcgagtgcggggcgggggagttcagtgctgcgggggagggaggcgcctgcagctgccctggcccactggcctcggctggccgcttgcggcgaggccgaggggcagcccctgggcctcctgggcgccccccgacccccgccaccactggggaaggcagggccggcgcggacccccagaggcgcgcggatccccagaggcaagccgacctgcttccggagccacgcgcggggcgaaagaggcggccccggatgctgcgaccagagcgagggcgccagctcggggcttcccggagcgggggcggaggaggcagcagcccggagaggctgcttagccaccagatgtccgcgggtggcccgcgcggcgcgggcggaggaaggaagggcggctctaggggcgtcctggctagtcgtccgcgaccgcgctctcgggtagccggggatggcggggcctggggcccggggccttgctgaccttgctccagccacacagccggagggagctgcagcagaaacttgccattttaaagctcggctacccctcaccaccacctggcaagattgtcatcatctccaatctacagaagcggaagccggagctaaatagcctgctagaggtcacggtgctgctgcccaacggcgggagcccggatttctgacatgtcttgcaagaaagagtcccttggaagcaaatgcaattatattcttctgtggtatcaaccaacagaatccccccactaaggggaactcaagataccgatggaactctaggctggagcggcgggagtttgccagatactcgtaatcttcgttccccagcataagtgcctgctcactctttccagccagtcacatctggaacacccatcattttcccaaagaaactatttttaacacccccaggtgcatatttagataaaggcatttgaagcagttgacatagccacctctggagtgtgggctcctgacaaggacacttcaaatgctaactgtccccaggggataaatttaagtcgtcaagcacacagggacatcacactgtctcttcctcagtattctaacgtcattggtagaccctatggccgccttcctgcgcaggattatcagcccactgctcagggactctgtccagctctgcatggaagtcactggcaccaggtcattagcaccagggccaagacttggaaacctctgggcaaagggagggtttgtctcataaaccttctcactccagggtcctcctcccctttgtagctccttccccattctacctttcactggcacacctgttcctttcactggcacacctgttcctcccaggtggccaatgggcccgtagggaggatatgacagattctggcattttaaggtaggactcgctgagtccccaagggagtgtgagcagagctggctatagcatctgcctccctgagatgccaggcttggtgatgcagtggaggaatctcagctcccatggccgcaggcagcaggagacgcgttttggaggcttaagtccttgagcatggctggtcctatgagccttcccagctcggagccatacccaaagtgccctgcttctgtttgcattcacgcccacgagggttcagtgagggaggtccatgaaataaatgccctctcctcggcttgggtgggccaggccctgccagctgccttcacttttggctgcagaaagcctgccaggctgcagtgtgcaaaggcctggaacaatgactggtagcatcagctattttaatgcagagttaggcacacaatccttgctaaatataaatacaaaggaaaaccccaaagtagctaagcctattttaataccttttat

SEQ ID NO: 3473 - DNA, 854 bp, Artificial sequence
  DNA replication origin
cccggccgccccgtctgagaagtgaggagaccctctgcctggcaaccgccctgtctgagaagtgaggagcccctccgcccagcagccgccccgtctgagaagtggggagcccctccgcccggcagccaccccgtctgggaagtgaggagcgtctccgcccggcagccaccccgtccgggagggaggtgggggggtcagccccctgcctggccagccgccccctccgggaggtgaggggcgcctctgcccggccgccctactgggaagtgaggagcccctctgcctggccggccgccccgaccgggagggaggtggggggggtcagccccccacccggccagccgccccgtccgggagggaggtgggggggtcagccccccgcccggccagccgccccatccgggaggtgaggggcgcctctgcccggccgcccctactgggaagtgaggagcccctctgcccggccaccaccccgtctgggaggtgtacccaacagctcattgagaacgggccatgatgacaatggcagttttgtggaacagaaagggggcaaaggtggggaaaagattgagaaatcggatggttgctgtgtctgtgtagaaagaggtagacatgggagacttttcattttgttctgtactaagaaaaattcttctgccttgggatcctgttgatctgtgaccttacccccaaccctgtgctctctgaaacatgtgctgtgtccactcagggttaaatggattaagggcggtgcaagatgtgctttgttaaacagatgcttgaaggcagcatgctcgttaagagtcatcaccactccctaatctcaagtacccagggacacaaacactgcggaa

SEQ ID NO: 3474 - DNA, 1169 bp, Artificial sequence
  DNA replication origin
atttctcaatcttttccccacctttgccccctttctgttccacaaaactgccattgtcatcatggcccgttctcaatgagctgttgggtacacctcccagacggggtggtggccgggcagaggggctcctcacttcccagtaggggcggccgggcagaggcgcccctcacctcccggatggggcggctggccgggcggggggctgacccccccacctccctcccggacggggcggctggccgggtggggggctgaccccccccacctccctcccggtcggggcggccggccaggcagaggggctcctcacttcccagtagggcggccgggcagaggcgcccctcacctcccggagggggcggctggccaggcagggggctgacccccccacctccctcccggacggggtggctgccgggcggagacgctcctcacttcccagacggggtggctgccgggcggaggggctccccacttctcagacggggcggctgctgggcggaggggctcctcacttctcagacagggcggttgccaggcagagggtctcctcacttctcagacggggcggccgggcagagacgctcctcacatcccggacggggcgacagggcagaggcgctccccacatctcagacaatgggcggccgggcagagacgctcctcacttcctacatgggatggcggccgggaagaggcgctcctcacttcctagatgagatggcggctgggcagagacgctcctcactttccagactgggcagccaggcagaggggctcctcacatcccagacgatgggcggccaggcagagacgctcctcacttcccagacggggtggcggccaggcagaggctgcaatctcagcactttgggaggccaaggcaggcggctgggaggtagatgttgtagcgagccgagatcacgccactgcactccagcctgggcaccattgagcactgagtgaaggagactccgtctgcaatcctggcacctcgggaggccgaggctggcggatcactcgcggttaggagctggagaccagcccggccaacacagcgaaacccaaaaaatacgaaaaccagtcaggcgtggcggtgcgcgcctgaggcactcggcaggctgaggcaggagaatcaggcagggaggttgcagtgagccgagatggca

SEQ ID NO: 3475 - DNA, 930 bp, Artificial sequence
  DNA replication origin
tttccagactgggcagccaggcagaggggctcctcacatcccagacgatgggcggccaggcagagacgctcctcacttcccagacggggtggcggccaggcagaggctgcaatctcagcactttgggaggccaaggcaggcggctgggaggtagatgttgtagcgagccgagatcacgccactgcactccagcctgggcaccattgagcactgagtgaaggagactccgtctgcaatcctggcacctcgggaggccgaggctggcggatcactcgcggttaggagctggagaccagcccggccaacacagcgaaacccaaaaaatacgaaaaccagtcaggcgtggcggtgcgcgcctgaggcactcggcaggctgaggcaggagaatcaggcagggaggttgcagtgagccgagatggcagcagtacagtccagcttcggctcggcatcagagggagacagtggaaagaggggagggggagggggaggtggagggagagggagagttaagcctgactttctaagggttgtccctggaagccagtgattggtcagaggttgtgagaaacaatttgagccagtaaagcttccactgtttgctaatggatctgtgtgtagattgtgaggaacatattcaaagtccagacaactttacaagtctgatgctgcttttgctttcccccaggccctttcctgtctcctctgcagtgtgccagtcacgatgttctcctccgcatgtgtgggtagctagggccctctctggtctctcttgagtgtgatgcaaactttcgcatgcctgcagccttccagaccactgagggtgtgaggccgcttacccactaatccctccttctcagaggagggtcagggtgagccgtgttcgggcccttagtgccacagtcaagaaggatgcctgggccgggcgcagtg

SEQ ID NO: 3476 - DNA, 972 bp, Artificial sequence
  DNA replication origin
acaatttgagccagtaaagcttccactgtttgctaatggatctgtgtgtagattgtgaggaacatattcaaagtccagacaactttacaagtctgatgctgcttttgctttcccccaggccctttcctgtctcctctgcagtgtgccagtcacgatgttctcctccgcatgtgtgggtagctagggccctctctggtctctcttgagtgtgatgcaaactttcgcatgcctgcagccttccagaccactgagggtgtgaggccgcttacccactaatccctccttctcagaggagggtcagggtgagccgtgttcgggcccttagtgccacagtcaagaaggatgcctgggccgggcgcagtggctcatgcccgtaatcccagaactttgggatgctgaggcaggtggatcacctgaggtcagcagttctagaccagcctggccaacatggtgaaaccccgtctctactaaaaatacaaaaattagccagatgtggtggcgggtgcctgtaatcccagctactcgggaggctgaggcaggagaatcgcttgaacccaggaggcagaggatgcggtgagctgagattgtgccattgcactccagctgggcgacaagagtgaaactccgtctcaaaacaaaaaggatgccaggacctcaggcacagcccagaagcacatgctcccctgctgaggtgctgcagggaaaatgggggtctttctgctcccatagaaagatgacttctgctcccaggccaattctacatggccttctcccttctcttccccttcacaaatatattcaacggtccacaggcaggggccttggggaaagagataacaaagacaaggttctcaatgacaagaaactcgggctagccttaagtgattaactctctcttttttttttttcttttttttttttttgaaatggagtcagtcaggctggagtgcagtggtgcaatcttggctcact

SEQ ID NO: 3477 - DNA, 1668 bp, Artificial sequence
  DNA replication origin
caggtgagagggtggaaagcctgtgctcgttccaccagctttttggatttaatgaaaaattcacaacgttcaggagattgatttttgggctttttgtttgttttgttttgttttttgttgtttgcttttttgagacagggtctcactctgtcacccaggctggagtacagtggtgcgaccttggctcactgcaacctctgctcactggttcaagtgattctcttgcctcagcctcccaagtagctgggactacaggcgtacatcactacgcctggctaatgtttgtatttttagtagagacggggtttcactgtcttggccaggctggtctcgaactcctggcctcaaatgatccacccacctctgcctctcaaagtgctgggattacaagtgtgagccactgtgccccgccaacgttcaggagatttaaaagcagcaagtgagcaatggtatttactaatgggtccctccccagaaccaaggggccccaggaaggccgaggcttgagtggccagggtgagctgaggctggtgggccaagatatggcccagaattcccgtgcagttctggagcctgagtggccatttcctccatccctctgtgtccagagagatgccctactgagtttggcaatgctgtggttgagcgagggtgggagtccccaagccaggtgggacaagcaaagtcagaatcttcacaaggagaacccactcctggtagagctacagcctgggaggccgtgcctggcacaccttgggtgcctggccagtgagggtgctccctgcatggcctcccggtctcttccagtcgagcctagtggagcaaaggatctcccctaggagatggggcacaagagaggaaacaggtaggaaggggcccagcttcagcatcctctggccaaggaagggtagaatcctcctggactccctgctggagtggatgcagagggaatgggagggaaccaggctcagaggcccgttagagaacgtcctaggcgcccatcaggtgagccggcagcatgctccagctgaaccacaggcccatccttggccctggaaccatttttaccacggaagtacttattttacagtaagactcatttccaaatccgctggcctgttacaaatattcattcacaggtgatttgcctacaatttactcaatgagaaaaatcccgttgcaaataatttcgtaagtggaggaatcccttttcaagcagattatcagcttctgcttgttgggatggatctccttttaccgagcacgcttaaaggaagggctgtacatcattttccaggctcgtattgagcagtgacaagatcacagctttggtgggtggtgcacttggaaatgaggggccctgcctcccaccttcctttaaaatacagtcgtaaggcagttagtaggacgtcgtcagtgcccttgctaagagagttcccacgcggggcctcaggggcggcggggccgccttcccccacggccagcctagggagcttgggaatcgcgacccaatgcacagacgggcagtgctcgctctctcttcacaggcgggaaaccgaggcacaacgacggctagcacctgccccgaggtcacacggcgacccaactcggttctctggccggcggccttgttggttccggtctgggaaagggaccccgcaatcgtcc

SEQ ID NO: 3478 - DNA, 1601 bp, Artificial sequence
  DNA replication origin
gccccagcctggccgtcccgcggtttcccgccgcctcaccagtctcgggcgggaggggccccggcgctggcgtggccgcggctcccacaacgcagccaggactgcactcggggctgctggggcccgcgtgcgtcccgggcggctccacgcgtcggggtcgcccccgcgcctcccacccccggcctctcggggccgccggctcgcgcgccttccaggcgaaggccagaggccgcagtgaggggcaccgagtggcgggctcctccgcaccacccccgggctttataataaaagtcgccgttgtttaagagccaggtcggaggcgccgctttctgggcggtgaaagccgaagcgagagcgggcaattcgctgcggcggcggccgcttcctgggcgtcggtccagtgccccggcccggcctgggagacccgcaccaaccccgggagggaggacggggcgcgggcgcagcctaggggccgaagcactgcacgcacggccggcgcgggggcagaggggagacagggaagcctgagctccgcgctgctgaaggctccggggatgggtgggcggcggtgaggtagtcttgcccgggccctgcccgcgtgggcgctttctgagtctctgtcgcgtgacggaggcgggacctaggctgtgtctcctgcggggcgaaagcacggaagagatccgagggcatttcttgagcctggcaggaggccaggggttttacagggcaggaaggaacctggaggaaccgaggagccacgttgttggttggaaagaagggtggccaggtggggaggagtctggcaaagggtcccagacagcaggaagggcacctgtgaagccgccctgccgagtgtgtggtagaggcggggtgaaatgagcactgctcataaaagtgactgttgtgattttttatgagatggagtctcgctctgtcgcccaggctggagtgcaggggagcaacctcggctcactgcaacctccgcctcccgggttcacgccattctcctgcctcggcctccccagtagctaagattacaaggcgcccgccaccacgcccggctaatttttttgtagttttagtagagacggggttttgccatgttggccaggctggtctcaaactcctgagctcaagtgatccgcccctctcggcctcccaaagtgctgggattacatgcgtgagcccccagcctaaaagtgactgtttactacaataagtacaaataataggtgaccagcacttgtctgctgaggccctggggctgggtgtgtttaggggacccctctcctctccaggccctccccaagcctgcccactgatggggaagctgcagggctatccctccaaggggaggccctgccaggccagggaaggtccaagtgggtgctcaccaagcttcctaggttcccagttttcttgaaaccatcttcccagcacagtcatctcccgtggttgcctttagcaagtcacatcccctgactctttaacatctcggtcctggcagtttcttggtatggcaccatctccctatgtggaccacaggttatctatcacactgacccgctgtccctcacacacagtcactcacctgtgacact

SEQ ID NO: 3479 - DNA, 1489 bp, Artificial sequence
  DNA replication origin
taaaatgtcccggtaacctctgggaggcgggacatgactgctaaaccaaggttgcaggcccgtcaggggtgtgacctagtggccaagcgggtagtgacaaacttcgggtacccccaaggagggaaccccgcttgagtcaccacagcccagtatgagtgggtgagggcaagtctggtccagtcaccctggggaccacagcccacgccgggctcccggggccgggcagaagcggcgggggtggggctggcccggctcacctttgaagaagcgcagtgccaggccgtacaactcctccaggccgaaaccccagcgctgctccagccgccgcgcctcctccgccgcgcccccagccgccgcctccccgggctcgggctgctcccctgaggcgcccgggccgcgaccggatccaggtggcgagggcggtggcagcggtggcggcagcagcggggcgccctccgccccaggccgctcctccgggtccgggctgagcgtgaggccgtcgacggacacctcgagtcgctctgcgttcagcaccgccgccatctccggctgctgcacctcctcagcggggacagacggcagccacgtatcgacttcctgctgacctctgacctccgcttaccgacaccggaacttccgctgctgaggaggctggagggctccgggagaggggctgaggcctggcgccccaccccctccggaatcgtcagttgccctggctcagcgaccacccttcaggctccccaactcccgttggtcccgaactcccctcccccgcaccccatcctttcggatcccagttgctccaggtgggcgggtgctaccacccccaccgctcggttcggtgctgcggctgtcagtgcccagcaggggcggggtcagtggagccccgcgcgggggtcggagtagggaggattgacgaggtcggccagcacccaaccctccaggtcagaggcccttcacatttgcaggggcctgcgtggttggcagagctcttttgcccaccaccatctcgtttggccttcacagcaactctaaggaaatgcagggcaaattcccaatttttttaaaaggggaaactgagactgcagagaaattcagtgactttgaggttgcagacggggctgatcctggttttgcaggaagcgcagctcatacaatttgtggggaccctcattaggaaagagtacaaaaagttacgcgcagaagggtaggaaagtgaatgtatatttagaaagagaaagaaaaaacaaatgatattttaaaagttaataaaacccacaaacatcacacacataaccgtaatattttcattgactgcctgatattcttctacagggcgtctgagagcccagaaacctatttttttctaaaagattgaagtcgcccccgacattatgtatattcacctgtgtttccagactttgggagcaccatttatgatcatttttcccacctttgttttggctgcgtacttctgattgccttt

SEQ ID NO: 3480 - DNA, 1703 bp, Artificial sequence
  DNA replication origin
gccggcccggggtcccggccgaggaagcccgcaaaggtcgctgggccggggcccgcgggcggcgcagggagcagggctgccgcagggctcgggggcggcaggagcgccccgccggcgtggggggcccggtacgctggaaacgcggcgccctcggcaaactggagcgcacgggactcggctgtggccatcgctccggaacccagcgcgccgctcggaggggcgcgggccgcacttataccctcccgggccaggggctgggaaggcggggcggtgcgatcaaaggtgggctcggggagacccgtgtctcctccgggtgcgagcccgcccccggccccgccagacgccggggaataatcgcttccgccggctgcgggatgcaggagggaggcgtgaacttgggtcccggccccctccgtgttcttccccgcccacccgcccggacggcgcaatccacatccccgaaggactatttgcctgggaggggcagcccggaggggcccgggtgcgcgggccgcaggcgacagaactctcttctccgggtcaaatccccgttaagagcggcggaagcaccttgcctggcctgtgccttacatggcctgggccttgagccttgccctagtcccgtctgtcctcatcaaagctatttatttaccacccctgctatgtgctagaccctgtaccaggttggtcaaacagcccggcccctgtcttctgcaagcctccctaacacatcctgaatccaagcggggaggggggtgaagataaaggatccagggggcagcacattcctcctgattaaatgggtggggggagtgggggggtctggctggaatgtccatgggcccaccaataaagataccctaggtagggcggggttggcaacgtgccccattagcagaggatacggcgcagtttggcctttctggagatactcaacaatgcttaagacccgtctattggatgggaggagatgaaagccacctcatgaagtttccacgcgccctgaatcatcattctttcctctgccccttggggctctgaaagctcccattttctctactttgtgctatggttatggtttctctatctgctagatataaagtcttagcaagcaggaacccacctctccctttctgagtttattgagtgtctgctttgtacacctattctgcgtgaggcgcggtgctaggccccttagtgaatgtctgtcgaattggatgtcactgagctctccttattgaaagagaaacccatggtccactatgggaactgccccaccacagtgcaagaactcaagagaggaacacagaggcccaggtctttttgcccccagcacctgagcgctgatttcaccgggatcactcactgtggtcgactcaaagggagatctttattgggaggatctttcagggcacaatccccgtcctgtctctgcattctagaaggtcaaaagacagtctcagaagagcttggatctttttatcctgggtggacattccaggtggcaaagcggaaagttttcttggagctgctgcagagaagaattttgggcttgattctctcctggctgtggtaaggggtggggttggcagggactgtgtcctgtgtagcccctgaggcccttctgggcagctgatatacttacctcctgctcttccatcttccttccaccccttctcctttctttccccctcttctcttgg

SEQ ID NO: 3481 - DNA, 1144 bp, Artificial sequence
  DNA replication origin
ggtctccccgagcccacctttgatcgcaccgccccgccttcccagcccctggcccgggagggtataagtgcggcccgcgcccctccgagcggcgcgctgggttccggagcgatggccacagccgagtcccgtgcgctccagtttgccgagggcgccgcgtttccagcgtaccgggccccccacgccggcggggcgctcctgccgcccccgagccctgcggcagccctgctccctgcgccgcccgcgggccccggcccagcgacctttgcgggcttcctcggccgggaccccgggccggccccgccgccccccgccagcctgggctcgcctgcgccccccaaaggcgcggccgccccgtcggcgtcgcagcgccgcaagcgcacgtctttcagcgccgaacagctgcagctgctggagctcgtcttccgccggacccggtaccccgacatccacttgcgcgagcgcctggccgcgctcaccctgctccccgagtccaggatccaggtgagggcccgctgcgttcgcaagtgcgcgctggagcggaggcgctgcggactctaggtctggactgcgggctcctgaggccacacccgggacgttgcaggcacggtgcttcccctgaggctctgcgtactagactgaaatagggggtgatatcggcacctgctgcatagggtggttgcgaggcctgtgtgaaataatttaggcctgcactgaacgatttctctcattattaaatataataagggctcctaggaggctagccggtcccctgaaatggccagaaagtaattcccagcaggaagataagaagttttacactttttctttatccgggaagaagacacagatgaggggcagttggggttttcctctggctttgagcgtgagaatggtagctgaaaacggggaaggctggctcgccaagttacccccatgctactttcttggcaagtgttacgttttgggattagatttgaaaggatgtagcgaattgagataaagcgagaagcacctggagcttgttttcagtttgaaaaatctagtgcaaggtgtgtttatttttatttatttagtttttatttgagatggagttttaactcttgttgcccaggctggagtgcaatggcgcgatctgggctca

SEQ ID NO: 3482 - DNA, 2269 bp, Artificial sequence
  DNA replication origin
acagtggggctggcagtcagcccacctgcccagcggagggcacggccgtccgtcccggccggtgcaaccgctgggcaagcagcaggcgggaaaaggggggggtgctttgaggtgctactcactctcgtcaggcaactggtcgagctccgccatcttgaacgagccgcgccgctttttcaaaggctgcccgccgcggtgcattgtggggcggagactgtctttgcgagggaggttcgaatgcggagctcgctgcccgcggcgccgcgctgcgctgctcccgccgcggctggctgaggcgggcccggctccgcccgcgcctgcccggggaggaggtgccgccgaaggggggccgcgcctcgcccctccgccgccgcctccggccgagccgggcgggaggaagggaggaaggaggccgcacggcgaggcccggcgccggagcgcggggggagcagtaccagctccggagtcccgcccgggccccgctcccggcgcatgttccgcggcccgcgctgcagctgcgggaactgcaggctgtttgttccgagtggagaacgggagggaggccccggcggggggaaagaagccctcggttctgggtcgcattgcccgagggggctctacgcaaagtgaaatactcacagttcccgaaacccacgttgcttgggcgcctccgtcccctcacttttcccgagaccgccggccgcagcagccccctgcgcgtcgcgacgtccgggactcggtcccagcggcccctcgcgatccgggcacgcctttcccgaatgttggaagctgagctgcgtgcagccggggagcgagaccttgagaggtcatgaagttggtcatttaggccgacagctaaagaactgttctgctcagctgtttcatccattcgacactagatcgtgcagtgggctggaagagaattagaaaacgagtaacaggaggcttcgagaggatacagaaaggaacagtgacactacaaggtgataaagtacctgatccaaatgttatgagaatactggacgagaattgaacgaaattgaaagaagcccaaggaaaaatttcacaatatctgtctgtaacactttccagtaataaaacactgttgcttttcaaaaattcatttaacgaatgtcattgagctccaatccttttctccaggaatttatgggggttggaggaatgagaccgttaagcagtcaaaagacaacgtgggtgaattccaggaactacaaagttaaaaggcggtagactaaggtgacagagtggtacacagaggcccgcccaggctaaggagttgaacttgcttagtccactggagcagtggaaaagtcgggtgtaagaggggcacgtttctatttgtgttttagaacaaaaatatgggaaatggattggtgggggacaagatgagagcctagaaaccagtcaggaagaagcttatttggggcatgcaaaggacagaagagagatgcctgcactggtagctagagaggtgcagcgggtgggctctggagccccagggcctcgatgggaagaatccagatgggctgctagttgtataatctcaggcacgttggtttcttaaccgaattctctgtgcctcagtttcttatctgtaaaatgcaaataacagggttattttgagggctaaacgatttgatagatgtaaggaccttatactagctgctagcacccatcagctagccactattaccaccattaccacagcataggcagtattagagagaggtggcagcatgcactccacctttcaagacgtggaaaataaaggattgggtgagtcactgggtgtgaggagaaggaagtctcattgctgatgccagctctgtgccttgggtaactgggtgctgccatgctaaggtaggagggagagcagggagtgagcagggagggtgaaagttcaattttacaaagtaatccttccttcagagctagcttaacctctcctttgccttctaaacacactctgatctgctccctaagaagattaaaacactggtccttgttgtcagcacctagggggtgcttcagcagcttgcacttcagtatcaatttggagatgagatcaagaaaaggtcagccctttaagaatggaagaatagaaattaaaaaaacatgagaggttaccagagtgggagaagcaaaagctttgtgaatgtcatgatagtcaaggtgtcattagaccaaggcaaacctggttttattctgaggcagttttcatgtacacgcaacaacacaactactgttt

SEQ ID NO: 3483 - DNA, 1085 bp, Artificial sequence
  DNA replication origin
gccagagccggctccctcagcttgcagggaggtgtggagggagaggagtgagcgggaaccagggctgcgcgcggggcttgcgggccagctggagttccggtgggcgtgggcttggcggccccgcactcggagcagccagctggccctgccagccccgggcaatgagggacttagcacccgggccagcggctgcggagggtgtactgggtcccccagcagtgccagcccaccggcgctgtgctcgatttctcccgggccttagctgccttcccgaggggcagggctcgggacctgcagcccgccatgcctgagcctcccaccccctccatgggctcctgtgcggcccgagcctccctgacgagcgccacccctgctccatggtgcccagtcccatcgaccacccaaaggctgagaagcgcggccaaatggcgcgggactggcagggagctccacctgcagccctggtgcgtgatccactgggtgaagccagctgggctcctgagtctggtggggacgtggagaacctttatgtctagctcagggattgtaaatacaccaatcggcactctgtctctagctcaaggtttgtaaacacaccaatcagcacactgtgtctagctcagggtttgtgagtgcaccaatggacactctgtatctagctactctggtggggccttcgacaacctttgtgtctagctcagggattgtaaacgcaccaatcagcgccctgtcaaaacagaccactgggctctaccagtcagcgaacgtgggtggggccagataagagaataaaagtaggctgccggagccagcagcggcaaccctcctgggatattcttctgcagtgtggaagctttgttctttcgctctttgcaataaatcttgctactgctcactctttgggtccacgctttttttatgagctgtaacactcaccgccaaggtctgcagctttacttctgagccagcgaaaccacgaacccaccagaaagaagaaactcctaacacatccggccatcagaaggaacaaactccagacgcgccaccttaagagctgtaatgtaacactcaccgcgagggtccgc

SEQ ID NO: 3484 - DNA, 910 bp, Artificial sequence
  DNA replication origin
cacaaggaatggaaaatcagggcggagggaaagcagtggaagaggaccgcaaagggagctgtttgcccaggtgctggaaggggtggacacacctcgccctcccagacaggtgaactaggaaccttgaccacgaagccctgcgaactgggagtgtgtgcttggctgacaccgtcgggaaagcctcgaggctgagtcccctgatctagagcaagcctttggccagggacatggggacaagggacggaccgcgcggcgcctgacacctagtcggccttcagtgcattgtgatttaaatgattttgtttggggcgagcgcagtggctcccgtctgtattccccactttgggaggccaaggtgggagaattacttgtgcccaggagttcgaaaccagcctgggcaacgtagcgagacccccccccccccgccccagctctattttgtaaaaaaaaaaaaaaaaaaaaaaaatcacttaaaaaatatataggagtgaatttgtttcaagtgtcagagaaaaagcaatccagagatcggatcgataatagaggaaacagatttgcaaacaccaggccaggtctccgcaagactagttaaaagatgggacacttccctacacacacgcaccaaaagcagaaagaaatgcgcctgttgcaggcttgttgggaagcgttcaccatcccctgaactatactggaggaaacctgagccttctgtgagcccgacgtggtggttaaagagccagtgaggacacagcgccgtctggcgttaataatggggcagttggtagaagcaacagccggcagcttgaggtcctgtttgaattcgattttctgaataaggctgcttcgcctccgcacctggaaaaagtaaacggatgaaagttaccgcctctaacgttagggaggggttaaa

SEQ ID NO: 3485 - DNA, 940 bp, Artificial sequence
  DNA replication origin
ccaggaggtctccggccgcgcccttctctccccccacgccctcccgcggcggggtgggggtcgcaagggtcgcggcagccgtgtcttacccagtcccggcacgaaagtgttgaggaagaggcagatgacggccacggggaagggcatgtaggggatggcggcgcgcagggggcccttcttctcgcggacctgcaccaccaccccgctggacgaggacgccccccgggggtccgccgccgccaccgccgccgccgccgccgccgtctcggcgtctttgtgcgagggctccatggccgggcgcgctctcaggcagccgggcagcacggccggagctggcgcccagcgtacgggagcaggagactgtcggctgcgggctccgggctccgcgccgagctcaggcggccgccgtgctccgtgcgccgcgcggctcgcggagactcccgccctccggcgtccccacacgcccggcggaggggcggggagggcggcgcgacacccggtgacagcgctctgacgcccctcctcgccaggccccttccccgccccctccccccaaccaaaaccaccgctcacaaggaatggaaaatcagggcggagggaaagcagtggaagaggaccgcaaagggagctgtttgcccaggtgctggaaggggtggacacacctcgccctcccagacaggtgaactaggaaccttgaccacgaagccctgcgaactgggagtgtgtgcttggctgacaccgtcgggaaagcctcgaggctgagtcccctgatctagagcaagcctttggccagggacatggggacaagggacggaccgcgcggcgcctgacacctagtcggccttcagtgcattgtgatttaaatgattttgtttggggcgagcgcagtggctcccgtctgtattccccactttgggaggccaaggtgggagaattactt

SEQ ID NO: 3486 - DNA, 1505 bp, Artificial sequence
  DNA replication origin
atcccataggattctgatctcacaaagggaaaagctggatccccagggcaaggagccaggggtcagcggaatggacggtgccctgcagccgatgctgtcaatgcagcagggctaaggctgggaaaggcacctagtgaagggagaccagggagggtacacacaggtacatgcgtgggcagctgctgtctcctggggctggtctcccacaaggtggtttcctcgtgcagcagtgacttggtgcagcccctctcacctggcaccaatgcatttgtttcctcaaaagaccatagggtggcgtttacctcaccacttaaaaaaaaaaaaaaaggtggatcaagatgcatgctggctcaggaggatcttcatatccgccagagggaggggcaggcagtctctttttactccagcaggtgagaatttctgataaaactagattaacaccagctggcctccttgcagtgtctaaatgtgcaaagagagctgatctgatgacaccagccagggggacaggctgctggaggcaccccagaagagagaagcccaactaaaggccacctaacttactgctcagataggctgctctggccgcagcagccccttagggtagaaagacaagtaagctcggaggggaaagtgaacgggtcctgcgtgggtggctgtggccttggctgtcaccgcagcagaggcccctgctaagcaggcgaagagcgaggagaccgtgagaaaggccaaagtcaaactgaaaaccccttccagctggcctctgctcttgggaacttggaaccatacgttggcaacaggctcgccgacaggggcacgctttctcccggagagggcactggggcgcctggttcttcgggcgggcacgggagaggggggcacctcccagcacgcaggagcagccagtgccaagctggaggaggggaggggcgtgcaggcagagacctgggggtggagttaagggagggagggtcaggaaaacttctcattccctgcctccattcaccctcctgcaccatctctgtaaggggcctctgctttaaaacgtgggacatagatgccaccagaacccctgccggctgccggagtcctgcacagaattacatcggcgcactctctacttctcaggaacagaagggatccgagggagctatgggttcatctctggccacatgcatccaaactaataaaatcatcccccatccccctggcgccctgcggggtgctggcggaagtgcaggtacccctgaatgaggcggaggagactctggctagagttctcgtccccacgcggtccgcactccgcgaaccaaagggggctgcaggtatatctagcccggctcgtcctctttccccggctcagctgacttcgacgcccgggagtttgatcctcgccgccgaggccctagagctcattctgatccgaccccattcctctcggggaagtgggctcgcggacggatgcacacgacggagagaaggagcagaaatcggggcgccgggac

SEQ ID NO: 3487 - DNA, 1204 bp, Artificial sequence
  DNA replication origin
aaaaggggctctcctaccccgggaactcggagctgcctagctccctcattggggctgttcggagctagcttaacgatggccacggaagtggcagcgagagttacatccactgggccacaccgtccacaggatcttgccctcactgagccgtctgggagagcccgtgagcttgaggacctgcagcccccagaggccctggtggagaggcaggggcagtttctgggcagtgagacaagcccagccccagaaaggggcgggccccgcgatggagaaccccctgggaagatggggaaaggatatctgccctgtggcatgccgggctctggggagcctgaagtgggcaaaaggccagaggagacgactgtgagcgtgcaaagcgcagagtcctctgattccctgagctggtccaggctgcccagggccctggcctccgtaggccctgaggaggcccgaagtggggcccccgtgggcggggggcgttggcagctctccgacagagtggagggagggtccccaacgctgggcttgcttgggggcagcccctcagcacagccggggaccgggaatgtggaggcgggaattccttctggcagaatgctggagcctttgccctgttgggacgctgcgaaagatctgaaagaacctcagtgccctcctggggacagggtgggtgtgcagcctgggaactccagggtttggcagggcaccatggagaaagccggtttggcttggacgcgtggcacaggggtgcaatcagaggggacttgggaaagccagcggcaggacagtgatgccctcccaagtccggagctgctaccccaagatccggacaagcctttcctgaggaaggcctgcagccccagcaacatacctgctgtcatcattacagacatgggcacccaggaggatggggccttggaggagacgcagggaagccctcggggcaacctgcccctgaggaaactgtcctcttcctcggcctcctccacgggcttctcctcatcctacgaagactcagaggaggacatctccagtgaccctgagcgcaccctggaccccaactcagccttcctgcataccctggaccagcagaaacctagagtggtaagtcttgctctgagatttgcccagaactcatgctgatttcagcagacttttgatgccctatgcatccctttttcttaactttctacacagtcatgaa

SEQ ID NO: 3488 - DNA, 1419 bp, Artificial sequence
  DNA replication origin
atctccacagccgcacggttgtttatggagctttgggcgggggctgagcccgcggtcgtgcccccagcccgctgcccaggccatgccgccccatctgcgcgcggagccgcggctgccgggcctccggggctgagccgggagcgccgggaggaggaggcgccggcggcggagcaggagcgggagccgcggcggcgggcagcgcgggacccagtactatggctgtgtactgctatgcgctcaatagcctggtgatcatgaatagcgccaacgagatgaagagcggcggcggcccggggcccagtggcagcgagacgcccccgcccccgaggagggcagtgctgagccccggcagcgttttcagccccgggagaggcgcctctttcctcttccccccagccgagtcgctgtcccccgaggagccccggagccccgggggctggcggagcggccggcgcaggctgaatagtagcagcggcagtggcagcggcagcagcggcagtagcgtgagcagcccaagttgggctggtcgcctgcgaggggaccggcagcaggtggtggcagccggtaccctctccccgccagggccggaggaggccaagaggaagctgcggatcttgcagcgcgagttgcagaacgtgcaggtgaaccagaaagtgggcatgtttgaggcgcacatccaggcacagagctccgccattcaagcgccccgcagcccgcgtttgggcagggctcgctcgccctccccgtgccccttccgcagcagcagtcagccccctggaagggtcctggttcagggcgcccggagcgaggaacggaggacaaagtcctggggggagcaatgtccagagacttcaggaaccgactccgggaggaaaggagggcccagcctatgctcctcgcaggtgaagaaaggaatgccacctcttcccggccgggctgcccctacaggatcagaggctcagggtccatccgcttttgtaaggatggagaagggtatccctgccagtccccgctgtggctcacccacagctatggaaattgacaaaaggggctctcctaccccgggaactcggagctgcctagctccctcattggggctgttcggagctagcttaacgatggccacggaagtggcagcgagagttacatccactgggccacaccgtccacaggatcttgccctcactgagccgtctgggagagcccgtgagcttgaggacctgcagcccccagaggccctggtggagaggcaggggcagtttctgggcagtgagacaagcccagccccagaaaggggcgggccccgcgatggagaaccccctgggaagatggggaaaggatatctgccctgtggcatgccgggctctggggagcctgaagtgggcaaaaggccagaggagacgactgtgagcgtgcaaa

SEQ ID NO: 3489 - DNA, 966 bp, Artificial sequence
  DNA replication origin
gagggccctgccctgccctccgcacgcctctggccacggtcccttccccggctgtgggtctgcggcccctgcgtgcgcagcgctcctggcctctgcggccagcgcgggggcggagagaggagagtgcccggcaggcggcggctgggccggcccggaactgggtcgtggaaggatcgcggggagcggccctcaggccttcggcctcactgcgtccccacttccctgcgcccgcctgccgccgagccccggctgggggtgggcgcggcgcgagcggttaaagggccggtgcatttaaaggagcggtgcacgtgggtctctgaggcgtgtagcaggcgggggcgttttgttcttcttctctctcgccggagacctccgttgcgccgagtccattcggcctctagcaccgggtcctgggcatgctttccccgggaaggaggcgcgcgggggctctgcccgcacgtgaggggcagggccgcaggctcaagcctagagccggtttctgttagcagcggtgtttggctgttttatcaggcatttccagcagtgaggagacagccagaagcaagcttttggagctgaaggaacctgagacagaagctagtcccccctctgaattttactgatgaagaaactgaggccacagagctaaagtgacttttcccaaggtcgcccaggtacgatatagcagagccaggcttcgaccccagtgtcctggcttctagatctgctgtccatccctccgagcagacctcacccctgtttattgccttaataagtattccctttgaaaggtatgaacggtgttgagtgaagtaactgcatccctatttacaaatggagaacctgagagcattccatagagacgattgtagactaacttaactcagaagcgacagcctggggttgccaaggctgtctacgaagtaacttgattaggaccgaccccagcttccagtaaggaagcct

SEQ ID NO: 3490 - DNA, 1422 bp, Artificial sequence
  DNA replication origin
gccgggaggtggggaaaaggagaacaggagggccctgtccgctaaggtagcctcccattggctcctcttgctccgctctcggtcgcgattggctacgggccgggagcacgggccgagcacgctcccacgcgcagagcggcattcggcaggcggacggcggtgcagccaatgggagcggcccgcggggcggggcttgtgagctggggctcccccggagcgggcgagttggtaaacagatccggagcgcgtggcgggcgtcagcgcggtggccagcgcgcagaggcgggcgcggaggcggctagaaggtgaccgcggatcccagcttcctgcagccaggtaaggctgccacccgccggcccgccgcgtgcccaggcgccgtctggctgcggccagagctggggtcaacacccacctcagcccttcttgcattctcttcatgtgacagcgcagcttccccgcgagtttcgctggccgcgagcctcaggtccggacgcagtgggggcgcctcagttgcagggtgggtcctctgcagccgtctcacgtccctgggtccacctcagcccctcgttcctgcttcggggaggagacgagggccacgtgcagagccttgggtccctggaacacgcccgctgcttgcccgaccgccttcccgctgccgaatgcccgttgcccatgccctttggtcgccaatacagctttgatgcttcgctttctaataatgttgttcttcactcccagacccccttgcactgtgtgtctggggctctaggctcgttgccgctggctgcaggtttgggtgagaactttgacttccttggctggagccagctgttgggcttcgcaggtgggaattttgtgtgaacttgggacaggggatcctttttgatcctttcttcctttcgcttttctttggcctttcctcttctccaaactctggggggtcttgtgagtggtttgggcttactcccctaaactcgaacctttccgaggctcattctcacccattgcacagaggtaacagcccctctgccaaaccctctttgggcgatggggagtgctgcaggggcaggtttgggtgttgggactccccatttgggtgagagatgtcaggttcctgaagggtgagaggcttgtgtgcagtcttccagcctgagtcgggcctacagcctgttgaaaaacttgtgcacgttcacttgggccttggatctacgtgacaggattgagtagctggtcatgccaggcctacctgattgccaaaggatttgaacattccttgatgccagcctgccagttgtcacgctgtggatgggtaggtcatcctggcaggagggctcttgggagactcttcttttggaggaaggcctttctcccgaggagagacaaaaggggagctacaggagcagcatctgtaagactcaggcg

SEQ ID NO: 3491 - DNA, 982 bp, Artificial sequence
  DNA replication origin
gttttagacatgatgggagcctatgggacttctttccatcctgtttgatataatttgcatacggtaaattcatccttcttagtgtgcagttctgcgcagtttgacaaacgcacatagtcacataacccctaccacaatcaagctatagaacaatttcatcaccctccgaaatttccctgcacccctttccagttgcctgtgggtctttgaagtggtgatgcggtatgtgtgtgtgtaacttggtttgttctggaaatgggttcggttgttgagaggtcctgcctggcctgagtgtggggaggcatcagtgcagagcctgtggaggggctctggcaccccaggagccagtgcagatggcagggaggcaggggtgtcgaggaccagcctgggaactcccaggccttggagtaggtggagaaagaggagctgggggaggaagctgaggaggtgaggccagagaggagggaggagggagggcttctgggaagagtgtggggccagcagggaacactgtggggcagggggtggctgaggagacccactggcttgagccctcaggtgtcacagaggggcagcttggggttggggccagaaagtgtgtgccgagggagcagggaagatggcaagtgcactccatccttgggagatggtagccatgtccagagggtggaggagaagcagagcctatgggaggtttatttaaatgtttggtacaggagagcagagagtgggcttgtgggcttcaggggagggcttttatgattgaaggcaaaagaaaaaaataggtcaggggcaaggtcttgttgcgggaaggaggagggatggtcagtgtgggaggagattggacagaggcaggggaagggtctgagagatgtggccaagaatgtgcgggccctcctatctggttgcccccatttctggagtaacaaaggtccgctaaagaggggtcgaggccttctgtttaatgtgagagggccagggg

SEQ ID NO: 3492 - DNA, 2721 bp, Artificial sequence
  DNA replication origin
acccccacgggctgtctaaccggccagatacaagaagatatatcaataggaaaatgagttgtgtcctttttaaaaatgaattcaacagtcaatcctgacagacggcagatgagattatcacacactgtccactcaggacccaccagaaggaaggaattttactctgaggatcccttatacactccaagtccccccttcacagccaaaactcactgtctgtcactcatctcctctatgacagcaggccagggacgtcatctgcattaccaagccactgttcaatctcctccgtaaatacagagcacagcattataaaccagctcctccccagcaaagcatggtgtctgttctaaaagccaaggacccactgtcctgaagtctcttgcagtcatatctgccaccaaagcctagacatgactggtataagaagctagaagcaagtggcacaaaaagcctttcttctgggcaaagtgtgaaccagggaggtgggggggggggggcagggagagtgtgaatctgggagagtaggagccagggagagtgtgaactagggagagtgtgaaccagggagagtaggagccagggagagcgggagtcagggagagcagaagccagggagagcggaagccagggagagcaggagccagggaaagtgtgaaccagggagagtgagagccagggagagtgtgaaccagggagtggcagccagggagagtgtgaatcagggagagtgggagccagggagagtgtgaacgagggagtggcagccagggagagtgtgaaccagggagtggcagccagggagagtggcagccagggagagtgtgaaccagggagagtgagagccagggagagtgtgaaccagggagtgggagccagggagagtgtgaaccagggagagtgggagccagggagagtgtgaaccagggagagtgagagccagggagagtgtgaaccagggagtggcagccagggagagtgtgaacgagggagagtgggagccagggagagtgtgaaccagggagtggcagccagggagagtgtgaaccagggagtggcagccagggagagtgtgaaccagggagagtgggagccagggagagtgtgaaccagggagtggcagccagggagagtggcagccagggagagtgtgaaccagggagagtgagagccagggagagtgtgaaccagggagtgggagccagggagagtgtgaaccagggagagtgggagccagggagagtgtgaaccagggagtgggagccagggagagtgtgaaccagggagagtgggagccagggagagtgtgaaccagggagtggcagccagggagagtggcagccagggagagtgtgaatcagggagagcgggaaccagggagaatgggaaccagggagagtgtgaaccacggagagtgggaaccagggagagtgggagccagggagagtgtgaaccagggagagtgagagccagggagagtgtgaaccagggagagtggaagccagggagagtgtgaaccagggagagtgggagccagggagagtgtgaaccagggagtggcagccagggagagtggcagccagggagagtgtgaatcagggagagcgggaaccagggagagtgtgaaccagggagaatgggaaccagggagagtgtgaaccagggagagtgagagccagggagagtgtgaaccagggagagtgggaaccagggagagtgggagccagggagagtgagagccagggagagtgtgaaccagggagagtgggagccagggagagtgtgaaccagggagtggcagccagggagagtgtgaatcagggagagcgggaaccagggagaatgggaaccagggagagtgtgaaccagggagtggcagccagggagagtggcagccagggagagtgtgaaccagggagagtgagagccagggagagtgtgaaccagggagtgggagccagggagagtgtgaaccagggagagtgggagccagggagagtgtgaaccagggagtgggagccagggagagtgtgaaccagggagagtgggagccagggagagtgtgaaccagggagtgggagccagggagagtgggagccagggagagcgggaaccagggagaatgggaaccagggagagtgggagccagggagaatgggagccagggagagtgtgaaccagggagtgacagccagggagagtgtgaacccagggagtgggagccagggagagtgtgaaccagggagagtgggagccagggagagtgtgaaccagggagtggcagccagagagagtggcagccagggagagtaggagccagggagagtggcagccaaggagagtgtgaaccagggagagtggcagccagggagagtggcagccagggagagtgggagccagggagagtgggagccagggagagtgaaccaggaaaagcgggagccagggagagtgggagtcagggagagtccacgctgagaagccttccccagggcagctgtctgctgcaagcctagcaccccaaccacctataggtacctcctataggaagtacgtcccaaactgaccttaccacccacacctcatcctcccagggctcccaccctgaggaatgtggccaccatacgcttctttcaagcctcctcccttgccctcaagcatctgatattcccactgggtgatgcagcaaccgttcaccatggctctgcccttccctccact

SEQ ID NO: 3493 - DNA, 1734 bp, Artificial sequence
  DNA replication origin
ctaaacagtaggtcagcgatatttgtcaaaggggggtgggtacaggctgtggttttgaaatgagtctacatgttagtctgctcacaaatgacagactgtgtttattagcagcatctgtttattagcagtctgtgtttattgatttgagaagaacaggttttgcatcccagtatgcaggaccacatatctatggggtatttcccctattgggccctccttccagcggagtgggtgctcaccatctctgcttcctggctctggcgccactgtctagggtggggcttggcaccagttgggagttcactgggtatgtaggatgcaactgtttaggtaggaagaaagacacaaccaagtactgttcagtgtgtacttttttagatggcttatatatttgccactttgaaagtaggacaagtgaactaagaaagctacccacagtgctccttgatgcttcctttttgattctgcatcatgtggtagtgcttggtggtgttggtgcttggtggtggtgttggtgcttggtggtggtggtggtagtggtacttggtggtggtggtacttggtggtagtggtggtacttggtggtggtggtggtgatggtacttggtggtggtggtggtagtggtacttggtggtggtggtacttggtggtagtggtggtacttggtggtggtggtggtgatggtacttgtggtggtggtacttggtggtggtggtggtggtgatggtacttggtggtggtggtccttggtggtggtggtggtggtacttggtggcggtggtacttggtggtggtacttggtggtggtggcggtacttggtggtggtatcagtggtacttggtggtggtggtggtggtgcttggtggtggtggtggtacttggtggtgtcagtggtggtacttggtggtggcggtggtacttggtggtggtacttggtggtacttggtggtggtggcagtacttggtggtggtggcagtggtacttggtggtggtggtggtgcttggtggtggtggtggtgcttggtggtggtggttgtacttggtggtggtgtcaatggtacttggtggtggtggtggtgcttggtggtggtggtggcggcagtggcggtggtgatggtggtggtggtggtggtggtggtagtggtgcttggtggtggtggtggttgttcatttcttttgaatggtggttaggatcttccaaattattgcactgtgggtctggactgcagtttgaaaacattggtttggtgaatagttgaagctgagggtgggctgaccctgaggggtcagggaggggctctggttgtcccttggtctatggatatccgtcacaggcctcactgggcagagcaatggtggctgggcagggacaggcagcctcagcccctgtgggtttgggttggagcaccaatgccgtgagtggtcccttggaccttgcagggaagttctttgggaattggatgctcctctcccaacaggcagttttggtccagagggatgaaccctagactgggagtctgtgcgcctgactcaagtcctggttctgctgcgaatcatgaatcacgccacctgtctgtgcctcaggttttccgtagggtgcttgtgaggcccaggtgaggaaatgtgtgggaagcagcaagcacaccgcaccactgactcaacggcctttattctgctccattcccctggagtgtccagagtcacgtggagcctcccttgagccctgggccc

SEQ ID NO: 3494 - DNA, 1898 bp, Artificial sequence
  DNA replication origin
actccagaggcattgaggaagatccacacgcagacggttcccttggcactgctctccacaccccaggccccactaacaggaaagcccctgctgggctgacctcgcacctacctggcccgccccccgtgcctgaagaggcctgaggaggagcccggcctggtgttcacaggcagaaggcggcagggactcagtgcgccccactcctcatcacagcagcacgaatgcccaaagcctcagcgtggtccgttcgcaggacctctccacagagggcccggccacagcgggccaccaacctcagtgggatgagtgtcctgacctgaccacctgcctgaccctggctgtgaccttcacgtcagaggtgaggtgcctctgcatagactacagcctccccaggttactaagctggtgaggagaagcctgcagggtctgcctgcacacctcgcctgtccccagccacacctgacccggccagaccagcgacttccagagagcagggcagcagcaaaaggtgggtttacaaggaggtgtgcgggtgtgtggagggtaaggtgtgtgggtgtgtggtgggtgtgtggaggggtaaggaggtgcagtgttcagtgggtgattggtgggtgtgtggagggtgtgtaaggtggtgtgcaggtatgaggtgggtgtgtaaggaggtgtgtgcatggagggtgtgtaaggagctgtgcgggtgagaggtgggtgtgtacggaggtatgcgggtgtgaggtgggtgtgtaaggaggtgtgcaggtatgaggtgggtgtgtggaagatgtaaggaggtgtgcaggtgtgtggagggtgtgtaaggaggtgggcaggtgtgtggagggtaaggaggtgggcgggtgtgtggagtgtaaggtgggcgggtgtgtagagggtagagtgtgtggagagtgtgtaaggtggtgtgtggctgtggggggtgtgtggagggtaaggaggtgcagtgttcagtgggtgttcggtgggtgtgtggaggatgtgtaaggaggtgtgcaggtatttggtgggtgtggagggtgtgtaaggaggtgtgtgggtgagaggtgggtgtgtggagggtgtgcaaggtgtgcgggtgtttggagggtatgtggagggtgtgtaaggaggtgttcgggtgggtggagggtgggtggaggataaagaggtgtgcaggtgtgtggtgggtgggtggagggtgtgtaaggaggtgtgcgggtgttcagtgggtgcggaggctgtgtaagcaggtgtgtgtggtgggtgtgtagagggtgtgtaaggaggtgtgcaggtatgaggtgggtgtgtggaggatgtaaaaaggtgcgtgggtgtgtggagggtaagatgtgtgggtgtttggtgggtgtgcagggggtgtgtgacgtgtgcgggtgttcggtgggtgtgcaggggtaaggtgtgcgggtgttcggtgggtgtgcaaggggtgtgtaaggtctgtgggtgttcggtgggtgtgcaggaggtataaggaggtgtgtgggtgttcagtgggtgtgcaaggggtatgtaaggtgcgggtgtttggtgggtgggcaaggggtgtgtaaggtgtgcgcgtgttcgctgggtgtggaaggggtaaggtctgcgggtgttcggtgggtgtgcaggggttgtgtgtgggtgttcagtgggtgtgcagggggtgtgtaaggtgtccaggtgtgcagaaggcgtgtggatgtgcaggcagccaaaaagaaggggctgggtggccactttgggctgggaggaggaagggcctccagcctcaccccctctaaagcaggtcaatctgtctgtatgaacagcctcatcaccccagggacgccacttacgtggaaccccatgcaaatgcggcccagctggctgacactcccagagca

SEQ ID NO: 3495 - DNA, 1280 bp, Artificial sequence
  DNA replication origin
ccgggcagaagcgcccctcacctcccggatggggcagctggccaggcggggggctgtccgcccccacctcctcccggactgggcggctggccgggcagaggggctcctcacttcccagtaggggcggccgggcagaggcgcccctcacctcccagacggggcagctggccgggcggggggctgacccccccacctccctcccagacggggcagccggccaggcagaggggttcctcagttcccagtaggggtggccgggcagaggtgcccctcgcctcccggacagggcggctggccgggcggggggctgacccccccacctccctcccggacggggcggctggcctggtgggggctgacccccacctccctcccggacggggtggctgccgggcggagatgctcctcacttcccagacggggtggctgccggacggcggggctcctcacttctcagacagggcggctgccgggcggaggggctcctcacctctcagtcggggcggttgccaggcagagggtctcctcacttctcagacggggcggccgggcagagacgctcctcacctcccagacggggttgcggccgggcagaggcgctcctcacatcccagacggggcggcggggcagaggcgctctccacatcccagacgatgggcgggcgggcagagacgctcctcacttcctagatgggatggtggtggggaagaggcgctcctcacttcctagatgggatggcggccgggcagagacgatcctcactttccagactgggcagccaggcagaggggctcctcacatcccagacgatgggcggccaggcagagacgctcctcacttcccagacggggtggcagccaggcagaggctgcaatctcggctctttgggaggccaaggcaggcggctgggaggtagatgttgtagcgagccgagatcacgccactgcactccagcctgggcaccattgagcactgagtgaacgagactccgtctgcaatcccggcacctcgggaggccgaggctggcggatcactcgcggttaggagctggagaccagcccggccaacacagcgaaaccccgtctccaccaaaaaaatacgaaaaccagtcaggtgtggcggcgcgcctgaggcactcggcaggctgaggcaggagaatcaggcagggaggttgcagtgagccgagatggtagcagtactctccagctttggctcggcatcagagggagaccgtggaaagagagggagaggaagaccgtggggagagggagagggagag

SEQ ID NO: 3496 - DNA, 947 bp, Artificial sequence
  DNA replication origin
aagtgaggagccccgccgtccggcagccaccccgtctgggaagtgaggagcatctccgcccggcagccaccccgtccgggagggaggtgggggtcagcccccaccaggccagccgccccgtccgggagggaggtgggggggtcagccccccgcccggccagccgccctgtccgggaggcgaggggcacctctgcccggccacccctactgggaactgaggaacccctctgcctggccggctgccccgtctgggagggaggtgggggggtcagccccccgcccggccagctgccccgtctgggaggtgaggggcgcctctgcccggccgcccctactgggaagtgaggagcccctctgcccggccagccgcccagtccgggaggaggtgggggcggacagccccccgcctggccagctgccccatccgggaggtgaggggcgcttctgcccggccgcccctactgggaagtgaggagcccctctgcccggccacgaccccatctgggaggtgtacccaacagctcattgagaacgggccatgatgacaatggcggttttgtggaatagaaaggggggaagggtggggaaaagattgagaaatcggatggttgccgtgtctgtgcagagagaagtagacatgggagacttttcattttgttctgtactaagaaaaattcttctgccttgggatcctattgatctgtgaccttacccccaaccctgtgctctctgaaacatgtgctgtgtccactcagggttaaatggattaagggcggtgcaagatgtgctttgttaaacagatgcttgaaggcagcatgctcgttgagagtcatcaccactccctaatcttaagtacccagggacacaaacactgcggaaggccgcagggtcctctgcctaggaaaaccagagacctttgttcacttgtttatctgctgacattccct

SEQ ID NO: 3497 - DNA, 1041 bp, Artificial sequence
  DNA replication origin
caacaatctgatctctctttcctttccccacatttcccccctttctattagacaaaaccgccatcgtcatcatggcccgctctcaaggagctgttgggcacacctcccagacggggcggcggctgggcagaggcgccccgcacctcccggacggggtgactgccgggagggggctgccccccacctcccgaacggggcggctggccgagcgggggctgccccccgacctccctcccggacggggcagctgccaggcggagacgctcctcacttcccagacggggcggctgctgggcggaggggctcctcacttctcagacggggcggccgggcagagacgctcctcacctcccagacacgctcctcacctcccagacgggttggcagtcgggcagagacgctcctcagatcccagacggggtcgcggccgggcagaggcgctcctcacatcccagacggggcggcggggcagaggcgctccccacatctcagacgatgggcggcagggcagagacgctcctcacttcctagacgtgatggcggccgggaagaggcgctcctcacttcccagactgggcggccgggcagaggggctcctcacatcccagacgatgggcagccaggcagagacgctcctcacttcccagagggggtggcggctgggcagaggctgccatctcggcactttgggaggccaaggcaggtggctgggaggtggaggttgtagcgagccgagatcaggccactgcactccagcctgggcaacattgagcactgagtgagcgagactccgtctgcaatcccggcacctcgggaggcccaggcgggcagatcactcgcggttaggagctggagaccagcccggcgaacatggcgaaaccccttctccaccaaaaaatacaaaaaccagtcaggcgtggcggcgcgtgcctgcaatcccaggcactcggcaggctgaggcaggagaatcaggcagggaggttgcagtgagccgagatggcggcagtacagtccagcctccgcttggcatcagagggagac

SEQ ID NO: 3498 - DNA, 1243 bp, Artificial sequence
  DNA replication origin
tcccaaccactcccttcctctcccttccagccctcccccgccttccctctcctctcgcgctcgcgccctgggctcagcgaggctcctccagtcccgccgcacagaggcggaggcttgcggacgagtctggatccaatatggcggcctggccccccggccccggcacacgcgcgcgcacacgccctccactccccgcccccgccctgcccgagcctcagccccagccggcggccaagccgggcggggtccggccggcgcgcccagcggaggcccccaagggggcgcgggctcggggcccgagtggctgcgccagcccgaggggaggggtgtggactgcctaggcggcgaggctgcggctgccgcagcgtggaatgcggagctgcgggagggctgagggaggcccgggcggcggtggcggagcatatggaggcgggatgaccgggccgcgccgggagctgcggcgggactgggcgcaggctgggaactgcgccaccgccgcgccgtggccccggctccccgaggcttctggtgcagatcgcgaaggggggctcctgctcgtcctcggagacatcacctgtctggcgcgtttgttaagggcgcccagaagcagagggctttaggcttccgacagagctggaggagacggtgcctttcagccccttacctgctccccaccggccccccagattcggttcgcgcacactccagagtaatcgtttcttaggtgtctaattacagcacttcgtgtgtcatttcccaggacaaaaacaatgacagacttgtccgagctaccatcgaagtcttgggtctgcacgcaaaggatggaatcccccatctccattcccaaaagtttccctacgggagcctggtgttgtctcctccggaactgtcctcgcggctgcctgtttttccctagccatggttactgcctgcgggggattcagcctgtgaaggcagtcaaggcagttcaccactgtcatcaaacctacacccctgtgtgcatgcgcacacacacttgtaacccagtggcacaatgcaggaattagggaagcaaaggcaaatcgctgaatagctagggcacctgatccctgtagggcccttccaggtttttgtgaatctcggttttaggagagctccctttataaaattctcatggaagatgccacatttaaattaacaccacaaaactaggtcattgcagttctgttactttctctcaaaattgccatctcctttatggtcg

SEQ ID NO: 3499 - DNA, 1313 bp, Artificial sequence
  DNA replication origin
gggaaccagatcggtgccaaggttggtggccggggctctgagggcccagcgcgggcctgccgggtggcccgagaagatgttggcagcggctggggctgtattgcggccccccgtctccgcgcctgggacgcggtggagctgggtggctggctaggcagccagggcggacccccagggatccagcggcctgggggtggggataggagaggggctggggagcctcgggctccctggcctccgtgactcagccctggcctgtttggcccctcgtgtctctcgcagttctgggaggtgatctctgatgaacatgccatcgactctgctggcacctgccacggggacagggacctgcagctggagcgcatcaacatgtactacaacgaggccagcggtgagacccctgtccttccccagccgccctcctgggaatggcggccctctcctcgctgatgtcctcccgcccccgtcaggtggcaggtacgtgccccgccctgtgcttgtggatgtggagccgggcaccatcggctctgtgtgctcagcgccattcgggaggatcttcaggccggacgacttcatcttcggtgagctgcgggtgaggactggggtgaggctccttagccagggccgctcaaattcaaggagtgccccaaagtcatcgctgtgggaactgtggagctagggcccctgaacaccctcccatcctgagtcacgcaatctccttctcctaaacgggctttgggaggaaggcccagctgtctgcctgagaggagctgctgatgcaatctttctgcagggagctgggctgggggcagtggctgctgcttttcttggggatgggcaggagccacctgcagccaggtctgttgtgttaggctgtctcaggttcggctcctgacttaacttctaacaggggaggctgctgtccttcagctttgggggagggaggtccacctgctccacctgcagggtgaatggtgctttcacctcacacgtgacacttggcccttttttgcattgtggtgacccctgatgactgtatatctggccatccagcgacttgctgtgttgtcttacaggtcagtgtggggccgggaacaactgggccaaggggcactacacagaaggtgcagagctgaaggagacgctgatggatgttgtgaaaaagaatctgagagctgtgactgcctgcagggtttccagcttacccactccctgggtgggggtaccgggtctctgatggatactcttctcatcagtaagatctgggaggagtacccagacaggatcataaacacattcagtgttctgccttt

SEQ ID NO: 3500 - DNA, 1796 bp, Artificial sequence
  DNA replication origin
ggggcggaagcggctgtccgggctgctgctttggacttctccgccctctggccggcccggccgcgtcgcccagggctccagggccgcctggcgccaccctctcccagcgccgcggtccctccggtacctccctggcggctgcggagccctcctgggacagggtccataaactctctagagcgggaagtcgcgcagtcgcggggccgtcacggggaccgctcgagatccgagcccactgggtgccccggacccttctctcgccggcccggccccgcgcccagacctagcggccgctggcgcctggcccgctgcgtgggtcttcggtgagctagctgcccacccagtgctgcggcctcggctcccgcatgcgcgctctggtggttccttgctaggggcgaccctgtgggccagcttcccacgcccggtccccaggccgcgcccaacccggctccctgggctagggtactggctcctcctgggggccgtgggactgggaggcaggggcgttaagggagacggtgggaccgagggcagcccctgctgagtgcaccgcgaggtcgagcgcaggcctctgttgcacagtgcgcggcttttgctgggactgtgctggggctcagagggtggtatcagtgccagaggcgatgtcagggaggcttcaccaagaagaagccgcggagctgacccctggggtgtgagcaggtcttcttcaggtggaagagggcaggaccgaattgcaggtggagtcaactgtgttttcgcacacctggggggtgaaggggacgcagtctgtctacctgacccgtgaaatgtaggagactgtaccccagaagcagcgggtttactgctgcattgattaaccaagtctggaacaaacatgtagctaagctgcgagttctgtgccagtggtcccaacacccactcccccaggaaaacacagctttggaggttgggtgcttgtcaggcctcagaatggagagcaggggccagagacaccaagcagggggaacccaccctaggcctcttgagggacgacgatgtggggagctggtggcagagcctgagctggcccgaggttgcatggtggggacagattcgaggcatagtagggactggtgacctcagttcccagaatgtcccagcctggcctcctggtccagctagcaagtagtgggtgctgccctgcaaagactctgggggtgcctgggccccccctcaccaaacttgactggtgacttctgtgttcatcctcacaagaagagggattttctctcactttcaggcaagcccaggaaagtcaggggcctatgtgagccaaagaggagagaaggcgatgctttagcccattgtttctgccccgcctggtttgtggccttggggacttgatttgcaccacaggataaagggcaatgaaagcccctccctgactggcttctcactccactctgaccagcccattgcacagcgcccaccctgcagctccaggtacagcctgtgcacctgcagctccaggtacagaggctgggctggttctgggctgacctcagggccttctgatggttgcaaccctcaggatgcctcatgctcaccccttggcacccacctgacagctcagcatgtctgctatatgccatcctcaatgcctgctctagacaagcccaagtcccccaggagtggcagagggaactgagctgggaactaagtcccagctcactgaaccccaagtgggcctcccactttaggtcacagccccaggcaagttcccttcagggatgtgatcccaggggccacagcagcac

SEQ ID NO: 3501 - DNA, 1108 bp, Artificial sequence
  DNA replication origin
ggcggccctggagccctgggcgacgcggccgggccggccagagggcggagaagtccaaagcagcagcccggacagccgcttccgcccctgcgccgccctcccggcccaggtgaccggtcgccctacccggggagcagcgccctcctcctcctgggccggagccgggcgtgggggtcgcaggctggtgccacagcctgaggacaccgcggcctctgccccggggagcacgccaaatgccggacggagcggctgttgcagacggtgaggccgcagccccgcttgagggtagggtcgggcggggtgtcggggtcctggcagaggccgcggcgagggcaggagccggtgcgctggccgctgcacatgcgccgcccggcaccgggaccctgcgggcgcgccccctggtggcagccagcgggaggtggcgtccctgtccccagccaggcggcagcgcgaagctgcctccccgcggggggagcggaagtggcccagctgctcgagtgacttactagttaaaaagctggggttggagctgccacgcggggaagtgtggaggcctgcggggctccgcctagactttctgggtgtcctcctgggacctcaggttcctcacctgtcgcagaggactgatgggctgctatggcagggttgtttggaggattaggccaaatagtcccagtaaagccccattagcctccctggcctctggatttttttttttttttctggcttgggtaactgcggaatgtggccaggtgctgaagcgggaaggctggactctccctaggcgtcggggttccttcctggcgccccctcttcttaggctcttttcaagcacatacccggcaacgtgtgctctacccaagagcgcttcacagatcttcctgtgggcctaaaaccagaacgctttgttccctgaccccggctctcatatcaccccaaagccaagtcttttggcggagctggcttcagattcgagtctcagtttaatgcttgttctctaaggtctgcccagggctcttatgatggggcgttgttccactccacccgaccctgtgcctcccaatgcgctgggggcctcaactgcagggacttggaactgggagccctc

SEQ ID NO: 3502 - DNA, 1727 bp, Artificial sequence
  DNA replication origin
gctcttatgatggggcgttgttccactccacccgaccctgtgcctcccaatgcgctgggggcctcaactgcagggacttggaactgggagccctccctgacaggctggcctggccatggactggtggatctcagtcccagggcgagataccccgggcagggactctcatcccggcttttgtacactccagccatttaacctggtgtggtggcctcgctgagaccccaggtctgtggggcaggatttcttccttgtgtcatagtggaggaaactgaggcagagggccggtgaatgacaaagtcagggaaatgctctgattgtgaaatgccccctaggcctcacaggtcccttcaagacacagcatccctcgggttgctgcatcaatgggctgttggcttgggcaccccaagctcagcgccatgtggggatgaagctggggaatgtgggggcagggaaattcgtcccccatatcggcacagcaggaatttcattctctgatatgtgtggacaccactgcatgtgtgggtgtgggtggggcccccattgtgttgattaagaaagagcccttcctggggcctctggggaagtgaggggcaccatgtgtgcctggcagctggttggggtgtggaggggctcgtctggactctgtcctgttgtcaccttttcagggccagctagaccctgaagtcttagtgccagtcatgcccagttgcatgctgccctttacttgccttccccccccccgcccctgcctgactcccccagctcagcccctgccaggatttctcaggcctctgtggaccctggatgggatcccaggagatggcaactccactgcctgcctctgcctgaagtctggggtccctgtgcagggtgggtgaacaggtcaggggtcaacttttggctgagtgcggggcctttccctgatccccaccccacactgctggaaccactgtgcacggctggtcccggggctgcactgggtcccccagcctactgctggaccggatagaggagaatacttgtgcacatggcttgacctgttgttaatgctcagtccaaatcagaactaaccagctgtttccctggggtcagggcccaggcctgaggctgccatgaccagcccattctctgccttcttgggggccatcggcggccagtgtttggtggtccccaaaagacatgatggctaggactggagagctgggggttaggtcaggagaccccctgaccatgggggtccacaggggctgtccctgagctgtgggtccctatgggatgcaggtacatgtggatgctttaggaggtgagcatgggtccttctggctggcaggatcttggtgggcactggacatgtggggccaggttaggtgggatgggcagaattgggcctggctggggagtgtgactggtgtggccagagtctgcagtgagcccctcacatctaggttgcacattgacagaatgacaagtggcgggtcaaccatcccagctgggtctggggaagcaggcctacccagtgggacccccacccttgtcctggccccaagcccagactgcctgcctccactgagcattgtctagccttggcagggaagcccgggtgtgatgatcaggtgttatgtctctgggtctcaggccttggtgggccctagggagatgggcaggcactgggcagggggagggtctgggagccacctgagtgcatctgcccctgggtgtgtgcc

SEQ ID NO: 3503 - DNA, 1106 bp, Artificial sequence
  DNA replication origin
ctttgggctctccaggcagcctcccttccgctgaagctccaggccttcccccggctcccgagctcccgaaaccacatcgggcccgctcaggacggggtgtgctccgaggcgtcagggcccagggcccacggtcctgggtcctgggatcccctctggtcgtccgccttagcgctgagggattgttttggatccctcgctgcccctcctgcaaggccccctcttgccccacccaatcagagccgccagggctgcccaagggcgataagccgacccagccccgcgggccctctttctcacaaagccttcaccaccgttgcctttcccgaggaggaccctgcctgtgggcaacaaggggtccggcggaggggcactgtttgccccgcgctggcaccaaagccggcagtctgatcccgtgagacagggggtgaggcccacccaggcacaactaatgaccaccacgagctaaaccaccgcaccccccccccccacaaagggtgcacgcgcgtgggcaaacacacacacagacacacagacaaagacacatacagagacagcttgaaggagagcaaagaatgagagatggagagatagaaacggcggaagagagagacagcagtagagagagaggcagggtgagggtgaagacagaagggtgagagagagagagagagagaaaaggtgacagaaagagcgcgaggtaaagggggaagaagagaaagagagagggtgaggaacctagaaagcgagagccatagagccttggagaggaagcgttctgctccagtacacagggcccctttgagcaggctggggtagggtggagggtgcttgagctgagccagaacagggcggcagggccgcccacgagggtgggccaatggagccctgaaacgtgttttttcttggattggttggttgcgttggaggtgtgtttcgtagggttttcccttaatttgctccttcctgtccacttgttgcggtgggccccgagatttgtagactgccccagtctgtctggcgagagccctgacgccgagagtgcccatggggcctgaggcctgggtctctcttgtgtccttgggactggagtttacatgaagttgttg

SEQ ID NO: 3504 - DNA, 1385 bp, Artificial sequence
  DNA replication origin
ctcccagttaagtactaaccaggcctgaccctacttagcctcgagagatcagacgagattggacgcgttcagggtggtatggccatagacgcctggcagccctaagagctccgctcagtcttgcgcgcccgactccaggcatcccggcaaccccgggtccacggggctcggatcaagtacccctgagctgctcgccggcggccgggctggtctgctctccccctctaccggccgctctccccctctacgcccgagcaccgtccaccgcgcgctgcgccttccgctggcctcccagagcctcccgcagtagctggtggccaggccaagcgtgggacagccacagcgccgccctgctgccgggcgtgggcgccagaggcctctgtctcctgcacaggcttcgggctctcgaggtggcctcccttccgccgaagctccaggcctttccccagctcccgagctcccgagcttccactacatcgggcccgctcaggaccgggtgtgctccgagacgtcagggcccagggcccacggtcctggtatccccgccggtcttctgtcttagcagtgagggattgttttggatccctctgcaaggtcccctcttgccccacccacccagagcctctagggctggccaagggcgatcagccgacccagtcctgcgggccctctttctcaaaacgccttcaaccctgtcccctgtcccgacgaggacccagcccgtgggcaacaagggggccgggtgggttctgctttgccccgcgctggcaccaaagccggcagcctgatcctgggagagaggggctgaggcacacccagacacaactcacgaccaccatgagcaaaaccacccattcacacaggggcgcaagcttgcggccacacacacacacacacacacacacagcttgaaggagagcaagagcaagagggatggagagatagaaacggagggagagagagacagcgatagagaaacatagtgagggaagagagaaagacagagagagagaaggcgacagaaagagcgcaaggtggagggggaaaaagagaaagagagagggtgagggaactagagagcgaaagcgatagagccctggagagagagcgctctccaagccatagagagagagacagggtgagggaggagagagagaaagagagagagagagagaaaaggcgacaaaaaaagcgcgaggtggaggggaagaagagaaagagagggtgagagacctagagagcgagagcaatagagctttggagagggagcgctctgctctggtagatagggcccctttgagcaggcctgggtaggtggagggtgcttgggctgggccagaacaggctttgggctctccaggcagcctcccttccgctgaagctcc

SEQ ID NO: 3505 - DNA, 949 bp, Artificial sequence
  DNA replication origin
ctctcccaggatcaggctgccggctttggtgccagcgcggggcaaagcagaacccacccggcccccttgttgcccacgggctgggtcctcgtcgggacaggggacagggttgaaggcgttttgagaaagagggcccgcaggactgggtcggctgatcgcccttggccagccctagaggctctgggtgggtggggcaagaggggaccttgcagagggatccaaaacaatccctcactgctaagacagaagaccggcggggataccaggaccgtgggccctgggccctgacgtctcggagcacacccggtcctgagcgggcccgatgtagtggaagctcgggagctcgggagctggggaaaggcctggagcttcggcggaagggaggccacctcgagagcccgaagcctgtgcaggagacagaggcctctggcgcccacgcccggcagcagggcggcgctgtggctgtcccacgcttggcctggccaccagctactgcgggaggctctgggaggccagcggaaggcgcagcgcgcggtggacggtgctcgggcgtagagggggagagcggccggtagagggggagagcagaccagcccggccgccggcgagcagctcaggggtacttgatccgagccccgtggacccggggttgccgggatgcctggagtcgggcgcgcaagactgagcggagctcttagggctgccaggcgtctatggccataccaccctgaacgcgtccaatctcgtctgatctctcgaggctaagtagggtcaggcctggttagtacttaactgggagaccgcctgggaataacgggtgctgtaggctttttggtttcccggtccctcccactttcctccttttatcgcgatgcctcccaaccgcaccctgactctgctcctccttttccgcccgcctgcgccctcgcggtaccctgggacctcctcg

SEQ ID NO: 3506 - DNA, 1359 bp, Artificial sequence
  DNA replication origin
tcttagggctgccaggcgtctatggccataccaccctgaacgcgtccaatctcgtctgatctctcgaggctaagtagggtcaggcctggttagtacttaactgggagaccgcctgggaataacgggtgctgtaggctttttggtttcccggtccctcccactttcctccttttatcgcgatgcctcccaaccgcaccctgactctgctcctccttttccgcccgcctgcgccctcgcggtaccctgggacctcctcgtggggcgtccgccactgcagcaccgccagttagcagcttcccagctcttccgcctggcagccaccccatcagtagcccagctcgctgcccggggcggggcggggagggccgggccggggccaacctcgaaggctcaggggcgggttccctgccgtccagggtgtcttccctctcccgggacgcccagggaatttaattcactcatccagcgccgctggcactgtccaagccgggggaaggggcgggcaggggaagcgggccccacaagacaccagccaagacctccgctccagaacgcatgggctactttccccaggggaaggacattgccttctccagccaccaggaaaaccgtccctgtgcactcggaatcccattgccaccaacttcgtataaactccattccggaggacacgagacagacccaggcctctgccccgtgggcatgctcggtgccacagctctcgctagagggacggttgcactctacaaatctcggggcccaccgcaccaagaggacagggaggagccaacaaaggaaaagtcctatgaaacgcaccaccaaagcaaccaatccaacaaaaaatacgtctcagggctctgttgggtcactccgttagcccttccaccctgttctggcccagcccaagcaccctccaccctaccctgtcctgctcaaaggggccctgtctaccggagcagaacactccctctccaaggctctatggctctgtaagtccctcatcctctctcttcttcttccccctccacctcgtgctctttctgtagccttctctctctctctctctctctcaatcctgactcactctgcctctctatcactgtctttctctccctccgtttctatgtctccatccctctctcttgctctccttcaagctgcctgtgtctgtgtctttgtctgtgtgtctgtgtgtgggtgtatgtttgcaggaggggcagcgaggtgtgtctgggtgcgtctcagcccctctctcccgggatccagggtgtgtgtgttggggggaagctgtggaaagggtgttgaaggaaagtgacaatcagcttcctgaagggcactgacaggccattattcctgtgg

SEQ ID NO: 3507 - DNA, 978 bp, Artificial sequence
  DNA replication origin
ccccccgcctggccagccaccctgtccgggaaggaggtgggggggacagccccccgcccggccagccgccctgtccgggagggaggtgggggggtcagccccccgcccggccagccgccccgtccggcaggtgaggggcgcctctgcccggccgcccctactgggaagtgaggagcccctctgcccggccagccgccccgtccgggagggaggtgggggggtcagccccccgcctggccagccgccccctccgggagggaggtggggggtcagcccccccacccggccagccgccccatctgggaggtgaggggcgcctctgccccgccgcccctactgggaagtgaggagcccctctgcctggccagctgccccttccgggagggaggtgggagggtcagccccccgcccggccagccgccccatccgggaggtgaggggcgcctctgcccggccgcccctactgggaagtgaggagcctctctgcccggccaccaccccgtctgggaggtgtactcaacagctcattcagaacgggccatgatgacaatggcggttttgtggaatagaaaggggggaaaggtggggaaaagactgagaaatcggatggttgccgtgtctgtgtagaaggaggtagacatgggagacttttcattttgttctgtactaagaaaaattcttctgccttgggatcctgttgatctgtgaccttacccccaaccctgtgctctctgaaacatgtgctgtgtccactcagggttgaatggattaagggtggtgcaagatgtcctttgttaaacagatgcttgaaggcagcatgctcgttaagagtcatcaccactccctaatctcaagtacccagggacacaaacactgcggaaggccgcagggtcctctgcctaggaaaaccagagacctttgttcacttgtttatctgctgaccttccctccactattgtcctgtgaccctgccaaatt

SEQ ID NO: 3508 - DNA, 1460 bp, Artificial sequence
  DNA replication origin
ctcccggatggggcggctggccgggcggggggctgaccctcccacctccctcccggaaggggcagctggccaggcagaggggctcctcacttcccagtaggggcggcggggcagaggcgcccctcacctcccagatggggcggctggccgggtgggggggctgaccccccacctccctcccggagggggcggctggccaggcggggggctgacccccccacctccctcccggacggggcggctggccgggcagaggggctcctcacttcccagtaggggcggccgggcagaggcgcccctcacctgccggacggggcggctggccgggcggggggctgacccccccacctccctcccggacagggcggctggccgggcggggggctgtcccccccacctccttcccggacagggtggctggccaggcggggggtgacccccacctccctcccggacagggtggctgccgggcggagacgctcctcacttcccagacggggtggctgccgggcggaggggctcctcacttctcagacggtgtggctgccgggcggaggggctcctcacttctcagacggggcagttgccaggcagagggtctcctcacttctcagacggggcggccgggcagagacgctcctcacatcccagatggggcggcagggcagaggcgctccccacgtctcagacgatgggcggcctggcagagacgctcctcacttcctagatgggatggcggccgggcagagacgctcctcactttccagactgggcagccaggcagagaggctcctcacatcccagacgatgggcggccaggcagagacgctcctcacttcccagacggggtggcggccgggcagaggctgcaatctcggcactttggggggccaaggcaggcagctgggaggtggaggttgtagcgagcagagatcacgccactgcactccagcctgggcaccattgagcactgagtgaacgcgactccgtctgccatcccggcacctcgggaggccgaggctggcggatcactcgcagttaggagctggagaccagcccggccaacacagcgaaaccccgtctccaccaaaaaatacgaaaaccagtcaggtgtggcggcgcgcacctgcaatcgcaggcactcggcaggctgaggcaggagaatcaggcagggaggttgcagtgagccgagatggcagcagtacagtccagctttggctcggcatcagagggacgaggccaacatttctgagactgggcagtttacaaaggaaagagccaaactgtaataaaaactttgaacacagactcgaatgagatccttgtgttgtcaatgtcctgtgggtactgatatgtattgttggcagaaatagacaatgaccacaaggctccacaaagagcaaacaactagaaacttgtgccaggtggttcacagatcctgtgctatgcaccctgttcct

SEQ ID NO: 3509 - DNA, 1642 bp, Artificial sequence
  DNA replication origin
ggtcttgggtattaccttcaaatccggccatcttcccgccacagcgaaggagaatcagacagcccgtgccagggacgtgggccaggtcctcactgcccttgcttctgggaccctgtgagggcaggaaccggagccttgccctcatgactttggttgggggcagtgccaggtgggaggtttcctgtcgggcactaggttggggcgggaggcggggcggggccgggagggacaggcggggagggggcgggaggctggatcgagagggcaggggcgggaggaaggaggcgggaccggggcgggagagccaggtggggcggggctgggagggaggcggggagaggacgggatgggaggggcaggcggggcaggcagggcgggcggcggggcccaggacgaccctggggcttccctggcttcaggtcccttctgagcacagcggggcccgccccccccgctccggtggcaagcaccggccctgcagccccagccaagaaacccagtaacaacccttccctacccttgtgttccgggcagcgggacgcccagggtccagcgaaccctgcaggtgcaggagcaatgaggcgagcctgggaaaacctcctagcccggaggtgcccgttgactcaccgcctgtggttccagcagggactctgtgcgccacagactgtacaaccccaggtccttgttctcccagcccggcaggctgctgtctgttcagaaggaactccaggcaacttaaatatgtggaatcaatcagtgcacttcaaacttatgaaaaggtcgaagaagaaatgaaaagggacattagaaaatacactgaatggccgggcgtggtggctcaggcctataatcccagcactttgggaggccgaggtgggtggatcacctgaggtcaggagttcgagatcagcctaaccaacacgatgaaacccccgtctctactaaaaatagaaaagttagccgggcgtggtagcgcaggcctgtaatcccagctacttgggaggctgaggcaggagattcgcttgaacctgggaggcggaggttgcagtgagccaagactgtgccactgcactccagcctgggcaacggagtgagactgtctctaaagaaaaagaaaacgaggaggtctgagaagttcccaggtatgtgcagttatctcttcacgtcacctcatgggtcccatgtgcaaactgagggggagttagtatgaaacatgcatcgaaattcaggccatgaagtcaacaagctcattctgtggaaattccggctggccatattggttccaattggtttcaggcagttttttcttttttaagagacagcctccctccatgttgcccaggctggggcacagtggcctggaactcctgggctcaagcgacccacccacctcagcctccctaacagctgggaccacagcatgcccgaccacgctagacttatttttactttttgtagggacagtgtctccctgtttttttctccctcaattttttttcttgatatcataacatgggggagtttcagggtttcagcaagttgtttattttcttatgtgccatcctgcaagctcaagaatttctgctagtcattggtctttggtgtgaggttttgagactatgttttctgaagaggccatata

SEQ ID NO: 3510 - DNA, 1886 bp, Artificial sequence
  DNA replication origin
tgtacagtctgtggcgcacagagtccctgctggaaccacaggcggtgagtcaacgggcacctccgggctaggaggttttcccaggctcgcctcattgctcctgcacctgcagggttcgctggaccctgggcgtcccgctgcccggaacacaagggtagggaagggttgttactgggtttcttggctggggctgcagggccggtgcttgccaccggagcggggggggcgggccccgctgtgctcagaagggacctgaagccagggaagccccagggtcgtcctgggccccgccgcccgccctgcctgccccgcctgcccctcccatcccgtcctctccccgcctccctcccagccccgccccacctggctctcccgccccggtcccgcctccttcctcccgcccctgccctctcgatccagcctcccgccccctccccgcctgtccctcccggccccgccccgcctcccgccccaacctagtgcccgacaggaaacctcccacctggcactgcccccaaccaaagtcatgagggcaaggctccggttcctgccctcacagggtcccagaagcaagggcagtgaggacctggcccacgtccctggcacgggctgtctgattctccttcgctgtggcgggaagatggccggatttgaaggtaatacccaagaccccgattcccgacaggagaggcgaggggaacggtctcgggagcaggcaggccctgccgcggagccgaaggcctccgatgggagcaggcacgcatctctgagtggggccgcgggggtggacactctggtgccttcacgcaggggaggggggcggcaggctgcagaggaaggccaggatccacgagctgcggctctctaggtggggcgaggggtccaggcggggtctgattagggcgtggggccccaggtggggtctatctggggtgtgcgtctgcaggattctgcccgtggattttcctctagcttcaggacagggtttggctctcccagaggaacagggtaggagcccagctccagctgttttcctgtaggtcagagcctgcagtgggagggtaactggggcctgtggaaggggacttctggggtcagaccccaggcaggagtgagaggcccaggtccctggagttcctgcctccagggctgctgactttgggggtacagacaacaggacactggacatcttggtccctacccttggcttctaggccagtggaacaagtcactgacttggaaaccagggcctgccttctttctgcctggggacccaaggtgcagctggtagttgcagttctgtgggacgctggcacaatcacctgccaaaaccacccacagtggtggatgggggacagggctgaggttgacactctggagcatggatgagcaaagggaaggatgtggccttggatgtggctctcagggatgccccagacctgggatgtgggcttcagggtagctggccaaggagctgccccttcggctgggtcagcaggcggaaaggcacaagcatgaggatggtcttggtccctgggggaggcaccttctccggaggccacagcccccaggatgcagggagcctggttttgccacagccagcaacaacttgacctggggctcctgtctccacctccatggattccagccaatcacaattgcaagcccagggcagggcaggcacgtgctggaggagcccctaggccccatcatgttccctcactctgtgtcctcccaggctagagtctgtgcagacagcagggcctgacttttccagccttcctatgggggcccacaggtcccactccccaaggaatctgggccactgcacgccctcacccaggcatggtggggtgcacagccattgtccccacacttgcaagtat

SEQ ID NO: 3511 - DNA, 1249 bp, Artificial sequence
  DNA replication origin
cctgcacggcgcatagctcctgctgcaagaagcgccacatgttggccaggttgaagccattgacccagttgtggttgatggagatggtgtcatcctggaaggggcacagtgcaggcaggcctgagcccatggcaggtgccccctgaccaacccacatctcctgcgccaggaacccactgtggggtccagccctctgcagccaagagggccctcctgtctcccagcagggcttgctcagcagggaagtgggtggcgggctcggaccacctcaggccacagtgaacccagagcaagtagacccagggaccggcagtgggtgaaacagaggctaggcctcagcgacaccaccttgtgaaggggtcagcctcacccatgagccaccccattccagcccagctctggctgggagagtggggaggtggtgctgccgtcttcctgcaggaaggcccctgatagggggcaggagaagcagcacattaccaggttgtgcacctggtggtgccagccactgggcacaaacaccatctcgcccgcttcctgcgtgatctccaagggtgggccagcaagctggttccgtgggtgcaggtgtgtgtcgcagagtgctggggaggtcacgtcgtagggcaggttgccgtggcggtcccgcagggcctcttcctgccctggggggaagaggagccacttcttcctcccacagacattgacagaccagctgaaggagcggaagatgtcagcatggaacggggacctgcggcagcaagagcgcctggttcatgcctgtaggggctggtatgggctttgcttggcaccccagaggcctggtccaactgaaggaggggtggccccttggtctcaagggatggcacccactgtgaggcctgtgccaagcagcccccctcctgccaccctgggcctcccagtccgttctgtcaccaggccccttcgggttccactcccacatccgtggcctcaccagctgcccgcaggccccgcgtagacaaagcggtagtcatccacatccagtgcatcccagaactcattcagccagtcggacgagaagtacacaggcagggtgaaaacgtcctccaccggaaagtccctgtgaggagggcgcaagggcaccaccgacagcacgtgaggcacgaggagactagggcagcacgagtggggcaactgagaccaatcggctccagtggagcttccagatggctgcagcccccaaagagccccagaccctcctctgagccag

SEQ ID NO: 3512 - DNA, 940 bp, Artificial sequence
  DNA replication origin
gcggcgagccgcgcgcatgcgtgcaggcccggagccccaggcgctggcggggcagaaacgcggcgccctgcgtcttctggttccgaggctggtcctcaccgtttccgctccggcggaagtgaggaggagggtccttcgacccgtgctgagctggatggaccgcgagacgcgcgccctcgccgacagccacttccgaggcctgggggtcgatgtccccggcgtcggccaggctccgggccgggtagccttcgtctcggagccgggcgccttctcctacgccgactttgtgcggggcttcttgctgcccaacctgccctgcgtgttttccagcgccttcacgcagggctggggcagccggcggcgctgggtgacgcccgcggggaggcccgacttcgaccacctgctacggacctacggtggggcggcggccgcagaccccgggcggggaggaaaggccggcgggacccaggcccgggaggcccccgcctagagaggggcaccagggagggtgagggaggccaggcgcgtggcccctggagagttcctctgcagacggtttggagtgaggacggggcccagggagatggcatggaccgtgcctttcatttcaggagacgtggttgtaccagttgcaaactgtggggtccaggaatacaactcgaaccccaaagagcacatgactctcagagactacatcacctactggaaagagtacatacaggcgggctactcctctcccaggggctgtctctacctcaaagactggcacttgtgcaggtaatggggcttgggacgcaccgaggcgctgccttccctagcgctgcgtgaacccagaggcctttctgatgaaggtggcccctgggtgcacaacggagctatttttccccgtgaggcactttaatcagtttaaaagaaactggattgtcttccgcatggctgc

SEQ ID NO: 3513 - DNA, 1305 bp, Artificial sequence
  DNA replication origin
gcccggagcctggccgacgccggggacatcgacccccaggcctcggaagtggctgtcggcgagggcgcgcgtctcgcggtccatccagctcagcacgggtcgaaggaccctcctcctcacttccgccggagcggaaacggtgaggaccagcctcggaaccagaagacgcagggcgccgcgtttctgccccgccagcgcctggggctccgggcctgcacgcatgcgcgcggctcgccgcggtcttcactgcgcaggcgccgagcggccgaggcgccgcggtcggctctgggactcgtctggcgtccctcaggtgagcgacggtgttggtctgttgggcgcccggcccaagccaagccgtagcgtccgccctcggctcagtccgcgcgctgtggctgacacagcccgagccctccttcccgcatccccggggggtggggggtatgcgggctgcgctgggagaggggcggggacagaggcggttctgggggcgggagtgcggcggtgcgggggcgcccagggatgatgggacccggagagaacggtgggacccagagggagagctggggggccctgggatggtgggatctagcggagatggtagggtcctggaggagatggtggggacctggagaggacggtggcacttggaggggatggagacgggatctggaggggacggtgggacctggaggggatggggacagtggggacctggagaggacggtgggatctggaggggatgggtacagtggggacctggagaggacggtggggacctggagaggacggtggcacttggaggagatggggacattgaggacctggaggggacagtggggatttggaggggacggtagcacttggaagggatggggacagtgggttcctggagggatcagtggcacctggaggggacatgggatctagagaggatggtggggacctggaggaaaatggtgggagggctggagggggcagggtaacctagatgggcgaatggggcccacaggggacctggagggcatggcaaggggccccaggggatgacgggtgtctggagaagatggtggggaatgagggagggtgtgaaatgaaggtgtggtgggagtgtgggtagggatttggggctgtgtacacatgagcagggctgaagtgggaggacatcggagtagtgacatgaggagtgttttgccaaacttgcaactggagttaccccaaaagtggcggcaagggagttccccacactatcctcaggtgggaccagttgggataccaaagaaagaagtgctaaatgcatggtaagcc

SEQ ID NO: 3514 - DNA, 1850 bp, Artificial sequence
  DNA replication origin
tgggtgcccatggtgtgtagcgggccttgcggccctcccatgatagtgccttctgtagtgcgacagtcatgaaagcaccaactctctggagttttgcttgggccatggttggtgacagtgccttaggaaggcgaggaagccctccgaacagagacctgcggagtggagccaccaatgagactccctggtgtggaaaggctgctgggagcagagggcaggggaaggccagggcagggaggccgcaggtcctgcagagtccatgaggctgcggtaaggaacttggatctcattccaagtacacagggaaaggctttgggcagagaagtgacatattctaattctgttcaatgactatctcattgactgctggagggggaatgggtgatggggacaggatgaggtcaggaggttgcctgagatgttgtccaggtgtggagggagggaggactgccttggatggtggaactgtggaaagtaactaaaagtagattgtttcctggagattgagtctcattcagggggcacacatataatggaaagactgagagagacccattgtacagattgcagtgtgtgatgagtgagtccctgtgactacaacaccttcccccaagtgtgttgcttgtgctggttggcccagacaatgcctgtgccaggtcagtgatgtggtcttggggtggagggtggggacacagctgccaggacatgctcatggcatgtttcttgagggggaggaagagaggagtcagaagtcctgggcccgtggtgactttactgagagaggaactgactctggtgctgctacactggggtgcccattaggggtgggaggaggtgcccagcaggtgataggggaggagctgaaagctgaaggaggggctgtgaagttggggtgcccgttaggggtgggggcagatgcccagcgggtgacaggaggggctgtgaaattggggtgcctgttagggtcagggacagatgcccagcgggtgataggggagggcctgtgaagttgggttgcccgttagggatgggggcagatacccagcaggtgataggggaggagctgatggaaggaatgtgaagttcaagtgcctgttaggggtgggggcagatcagcgagtgatcagatgtccaagtttgaagcgtgagggagtctggctggagtgggtgtttgggaggcaacggcttgggggtgatgttgagtttctggcctgtgttgtctcacctggaaaaagagggtgcaaggaggagaggttgtgccctgtgcagtcaggtgcatgaggaggctatggccaaggagagtggacgcaggcactcatggaagtggggctggagacctggagagggtagtggccagggagccagggtgcagtgactctcagcaaggccccttggctcatgggccaggtccagctaccacatttttgtaagtgaggtcctgtggggtggcacaccccatgttgatgtcttgtgtgtggccactttcattccaccccagcagagctgtgtagtggtgacggagaccatgcgtggtccttcacggagagtgcagtgcctggcatgggagggccggagaggtctgggggctgagagagagagggtgggatcagggccccgggaggagggtctggccttggaggtgaaaagggaccacgttctcctgtggcctctgtgtggggccaggcgtgtcgtcgggtaggggaatggctggccggcgtgggggccgtgttcaagattgggctgcttctgatgttccatggggtgtcttcacttccgtccttgcactgcatctccgttgactaaggttttctgggaaagaagccctggaaacctgcagttggaaaagggtg

SEQ ID NO: 3515 - DNA, 1024 bp, Artificial sequence
  DNA replication origin
ccccgttcctggtctggcttccctcacttccctatccctgatgtctctaatctaaactttcctcaattaatctgtgtcctctcctagtcaggggaaaaaacatgtgtgtgtacctaatgaatgtaagataatcatattcacagagtgtctccctagtacttgaaataagggtcttaatcagtgtatgaccgccctggcttctttgagctcaccgaccatgtcggggccaacagccccatgtgactttgggcgcctgcagtccccgggggctggagaagctgcatggacaccatgctctgtcctgagcgcacctgacacaagtgtcgctctcctgcctgggcccactgggagtgtgtggagcaggcgagttggagaacaggttatggccagaggggatggtgggactggccacccccaaggtgactgggctctgcgggggcactgaacgcagcacccaccctccgaggctagccaggcaggagtgggccttgcttgtgagtgaggaggggtggggaggccaggctccttctccactcaggctctcagcgtcccgtactttcctgcttttccaggctgttcatgtcaagtgttcatcacgacacaggcaggaggtcaatattttggggggctgtgaggttttgtgatgctgtttttatttatggccttgacagcagtcagatagaagcgctgagctaagccgccatgtttggggatctgtgcctttactatgagttcctattactcatgcccctgacaccacattgcatgcactttctaaatgctgatccataagaagaggctgggaatggggacagggtgccctgcagcccaacatgcacacagcaggaggccatgtcccaggggcgccctggaccaggtgtgggggccctgcatgcacgtagcttgagggtgccctgtaactcagacttatggcagctgagtggaggcggcatcacaggggaacaccacgccttcccttttaacctgtatgctctttggctaatgggtttgtgacagtgaacgc

SEQ ID NO: 3516 - DNA, 920 bp, Artificial sequence
  DNA replication origin
agaagcgcggtcctgaggccgccggattccgatccaaggcccagagtgtccgcgacagagccgggcttcaccgaaagcacacgctcagcggccttcccggcgagcgcgcagccccagtgaacctatggctcagcattttcagaagaaagcctgtcggcatagactttccgtgatttcaaaggagacgcttccaaaaccaaggtcttgacctagatttggaagcgatccctccagagcttacatttggagaccggtagagaccgggcctgttgggacaacagctccgagggctacgctgcgtggactaggttccagacgcgctctgaggaggcgcctcccggctagttcctgagcgcgctcgagaggagcgtgccccgcaggtgcaggcgccgggactagccagggcagagctagcagttcgccgcgggcgagggaggggctgtgggtgtggccaggcgggggcggggttagggcgcggcctgggtgggccgtgacggtgagcgtgagctggggtatgcgtagggcacggcctaggggtgagcacgacacaggggcgggccttgggtggacgcagaaggcgtgggatgggaggggagggagtgggtggggagaagggcggggccatggtatgggtggcagggtgggcggggtcctgggtgggtaggggcgggcggagggcgtgggaagcgatggttaggtcctaggtgcgggcgtgatagtggggctgggacgaagtgggcgggccgtgggtgggcgcagaaggcgtggggtggggacagagggcgtgtccgggcgaagtggtcggcctgggactggggtctgtagacacccgcgttgggatctgggcggggcgatcggcgcggaaggagtgtcgggcccgggggcgggagcagggcgtccagcggagaaggcagaggagg

SEQ ID NO: 3517 - DNA, 779 bp, Artificial sequence
  DNA replication origin
ggcgtgatagtggggctgggacgaagtgggcgggccgtgggtgggcgcagaaggcgtggggtggggacagagggcgtgtccgggcgaagtggtcggcctgggactggggtctgtagacacccgcgttgggatctgggcggggcgatcggcgcggaaggagtgtcgggcccgggggcgggagcagggcgtccagcggagaaggcagaggaggggagatgcgggctcctccaggtagcgcaggagcccctccggctgccggagccccgcgagggcgcgagtggagggcaggagcccgggcggcggaggagcggaagggatgctgcgttgccttggagtgtcagggtgggggaggaaagaccaagggacccacgtccttcgcccccgccgcggagtcccgggccggcgagacttccgcagcctgcccagcgccggggacctagggctttgcaggagtccgcccgggagctctatcagagcgggcgtcctccccgccgctccaaaggtggcttggggcaggtggggcgtcccggagggaatggagggaccctgcctagggaaggtgagtcgtgtgtggtcgggtgtgtgtgcactgcgtggtgtgtgtacactcaggtgtgtgagtgtaagtgtgtgcactgcgtggtgtgtgtgcgctcgggtttgcttgtctgtgggggcggggccgtatccactggacactaagaactctgttgctttcaagcccccatttggggaccattctggatttttcacatttcttccagtctggcacattcctc

SEQ ID NO: 3518 - DNA, 954 bp, Artificial sequence
  DNA replication origin
ggggttgggggagctcccgtgggaaggagtgggtggggggagctcccgtgggaagaagggggtggtggagggagctcacgagggaaggaggaggttgggggagctcccgtgggaaggagggggttgggggagctcccctggaaggagggtgttggggggagctcccgtgggaaggagagggtggggggagctcccgtgggaaggagggggttgggggagctcctgtgggaacgagggggtggtggagggagctcctgagggaaggaggaactagtgtggggagctcctgagggaaggagggggtggggggcacctcctgagggaagccgggggtggtggggggagctcctgagggaaggcggggctgggggggcggctcctgtgggaaggaggggttgggggcacctcctgagggaaagaggagttcaggaggtcgtgggaggacacctgccggggccctggcgaggctgcggtgcctgtgctgcccgctggcttggaaggcagcctggtctatcgagaagggacctgccctggggcccagccccgcctgtgtgttgctgcccctccccacagctgggcctgtcccaaggtgtcttcctccaaccctctttgcccctcataggagaacagcagtgtgaggcgcggtgtgaggctgctgggtggcctggaggatccctgcctagagaagcccctggggtctggagcgcaggtgtctgagcacactgcttcctttggcgctgggccctgcagctcctgccccaatgcctgaccttcccagctaccctctgtgtcctgccagggaccctcctgccagggccacaccacccctcagccctgagccagccacagtgcccctctcaccctctgtgatcccccagtccagggcccagcctctctgtaagtctcagccaaagtggaactgatctctgtctcctccccagcacccagtgggcc

SEQ ID NO: 3519 - DNA, 1179 bp, Artificial sequence
  DNA replication origin
aggggccaagactgatgcccacgatgaacatcaaggcctccaggggtctccaggctgcagtgtgtcggtctccccataccatcctgtccatcgggctacaggtggaccctgtgcacacaccttcccagcctccccggggacccaccaaggctctggtcacttgcccaggtgacaggggccaggagatgtgggcctgttgccgtgggctccaagtggcatccatgtggggatgacctcacgacacagcatactacggtcccatctcacagaggaaatggtcctcagagaggctaaaacagcttggtgacacccaggtgaggggcagagggggattcagactcagtggccccacctctggccacactcactctagacaagactcgctcccaggaggaggaaggatgaataccagtggctgccatgtgagcccagccagctggctggcatgcaccgagtgtctacagagacgtggggatgccaagcagaccccatgtgcgtgggcaagtgaggctaggaggggctgagcagttagctgaggctacctgcaggtgggggtgggcagaggtccctggaagtagggccaggcggacactccagatgatgggggtccgggggtccgtcggggccagagctagggatgggcacacagggagctagggatgcgcacacagggagctagggatgggcaaacagggagctagggatgggcacacaggctccgtgcaattggtactcagaggaccatgaacagagccagcgcagctgccccagccctgagaaccggaaacactggcttgggcggccaaggaaacactgggcttggttgggcctctctggcttgggctgcgagccccagcccagctcctgaggccttcagctggtgtccccagaagagtcaaccagacctggtgagccaaactgctttattctgctctccggcttttctagcttctgtccttgaggttggagtaccccatgaggactctgattcttgatttaatggatctgtgggaaaggggtggtcttgcttcaccatcaggagccagagagccctccagagaccccagtgaccacacctgaagccaaggcctggacacccgtgctggcccagccagtcagtgtgcctcaacctctgacctccacgtcactgggcctggtgggtgagccccttccccttgg

SEQ ID NO: 3520 - DNA, 994 bp, Artificial sequence
  DNA replication origin
gagaggggccttgggcggctcccaaggagtagacagagggaggacaggagctttccaacagagttgtgggtgggtgggggtcccatggtcccagggacaaggtgaggaaaggggctttcaggggggtctgcagggaggggtcaggtctaggtgaagaggcaaagaggtctatcactgggcatgggagttggggggcaccagggccagtgggcctctgactcacggatccccctcccctccaaatgtcctacccgatgcagagatgccttgaacgcccttgtgggtgggggtcctgcagcccctcctctgggcttcctcctgcggtgtgggcgggggactctgagacctcctatctgtgcacacaggagtgatggcccctgcagggaggcctgaacagtgctcactcaggaacagctaatgtactcctgattccatgcgcgggcccagatgggcagcccagcccagggcaccccagactgggggtggaggggtagtgcagccagctccctggggtgcccttgtccccctgccctgccccgcctctccacacgggcaggacaggaacaggaccggacttggacgaggctaggctgagggggaggggccaagactgatgcccacgatgaacatcaaggcctccaggggtctccaggctgcagtgtgtcggtctccccataccatcctgtccatcgggctacaggtggaccctgtgcacacaccttcccagcctccccggggacccaccaaggctctggtcacttgcccaggtgacaggggccaggagatgtgggcctgttgccgtgggctccaagtggcatccatgtggggatgacctcacgacacagcatactacggtcccatctcacagaggaaatggtcctcagagaggctaaaacagcttggtgacacccaggtgaggggcagagggggattcagactcagtggccccacctctggccacactcactctagacaagactcgctcccaggagga

SEQ ID NO: 3521 - DNA, 918 bp, Artificial sequence
  DNA replication origin
gcaggggctttgctctggccccaaaggtcacagggaggccatcctgggtgcctagcacttattaagcacagacagtgtgcagaaccctggcggaggaagggcggagtcctgttgtgagggttggaacctcagcctggcctgcatccggacctccccaccacaggctgctcacctgcaaaggggggccacacctgcctctggggtctcagattgagaccctatgggacagctggcctgtggtctgcacacaggcatgtatttgagtctgcagcggtggtgcagacagagttctgggcctgccctgctcacagcagctgcaccctccgcctgccctctgctgcacctgggcccctgaacttccagggcacagggaacaggcagcgccccacaggaggctggcaggagagcagggagggtagggtgaggagcggggatgacagagggagggggccttcgggggttcccatgaagggggtgggtgggtgaagagaggggccttgggcggctcccaaggagtagacagagggaggacaggagctttccaacagagttgtgggtgggtgggggtcccatggtcccagggacaaggtgaggaaaggggctttcaggggggtctgcagggaggggtcaggtctaggtgaagaggcaaagaggtctatcactgggcatgggagttggggggcaccagggccagtgggcctctgactcacggatccccctcccctccaaatgtcctacccgatgcagagatgccttgaacgcccttgtgggtgggggtcctgcagcccctcctctgggcttcctcctgcggtgtgggcgggggactctgagacctcctatctgtgcacacaggagtgatggcccctgcagggaggcctgaacagtgctcactcaggaacagctaatgtactcctgatt

SEQ ID NO: 3522 - DNA, 1760 bp, Artificial sequence
  DNA replication origin
cgggcctggcttccggttccttcttccactcgggggtggggtcccaccctgcagggtcggcgaaggggttgggccccaaggaaggctggctggctgcagccccggccccagtcccccgccccctgcccggcccaggagggcgtccccagcgctgcttctgagggagacaatcgctgcgggctgcgtcggaaaaaatgttctcattgtgaacataaacaggctgcccggtctcagccagatgttcctggagaatgtttaggatccaggcagcgtatgaaattcccatcaaactgttattaatcagcaggcatttgttgtcaaccctgcctgatactcctggatgtcctggaagggcctgtccagccccccacccctgcagccagcagagaggctcagcgccggggtgggggtcggggtcgtgggtggggaggtacctgcgtggggagggctgcagctgcccggtcctggacagggtgtctggagctcccagggcgacccccaggcttcccgggctcccgttccgcctctctccacccaccctgtcaccgtccgacccagctgtttccaggggttctggacagctccgcggtgatctcttttatggggtgggagacttgtaaagacgcaagagccccacttaggagctgagaagcttggctggctctgctgctcaggaggggagcaccataggcctgggggaaggtgggggagaggcctggggggaacagtcctagggagggagcatccggggaaggggtcagcggagaggtctcgggtgggggaggctgggcaggggagaggtctgggaatcccaggagatccaggcagccctatctctgtgactgagctggtgggtgggaccctcccacctggagccccatgggggtccctctgcaggatacccctggccccgcctaagctcttgctgcagccacggagccccccactgtccccttggcctcaagcctgccccagggccacaggggagtcccagccagtctgttggacaagggagggcgcagggagggaccccagctgtctggtgctgactggcttacagatcatgctgtgtttatgccagctctggacaggctggggccagggtagagcctgagaacaagggactcccttgccccccagcacagtactaggcttacttcccaagtggttgggggacacgggccccaccccattttgctcttcctgtaagcagacaggagtgactgcccacaccccggggtccagtcctgccctgactacccttgtctgtaatggcccaggttgggtggccactggctgcccccaacaggtaagttctcacaggctagactgggcctgcctcctcagctggcctcgggccaccatggctgactcatggcctctgggtgaacagcggaacaggaacagcgtgggatcggctcatgggttgggtcctggctgcagtcaaaaaatggctttttaccgggagggtctgttttggtcgttaaactactgaggagaggccagtagacctgcctgcgagtctggtgggtgaggagctgtctatgtgattagctgggctgccggcaacgtgggcctgtctcacagcccctgcagggtcacaaggggtggtgaaggggtcctgctgccctctctttacccatctccctggggcaggggctttgctctggccccaaaggtcacagggaggccatcctgggtgcctagcacttattaagcacagacagtgtgcagaaccctggcggaggaagggcggagtc

SEQ ID NO: 3523 - DNA, 1813 bp, Artificial sequence
  DNA replication origin
atcctctgagccttccttctggctccacagctccctcgagaaaggccaggaggggtcagaggtcctccccagagcaggataaggggggttgccctaggtagcagggacagtcgctgggagtggcatttctagatctgaggggagagtggctggagcatggggaggggcagaccaggaggggatggagggaggcagtgtcctgggtggctctgtgcagcaggtggctgcccccagtgagtgtctgcagcgaaggggaaagtgaggctggagagtggccaagcctcagaggccacagggcagcaccagcccctacctgctccactcacccctctcccagatgcataccctgagccccttcccaccgtgggtgccacagagcccccagagctacctgggaaggggtctacagtggggaggggagtgggccacagggcctcccatgggaggtgctagggctgtggtgcatgggagcagcccccgccctcccaggctcctgggtgcatgggtagggcaggggagtgggggggtagggagcgggcagggctggtggataatgctatctgtagctgagtgacaagaggatggccctatcagtgctgtcggaaggacagagctcctccaggagatagtggccagcggttggtggtgacacctgataatgctggcctgaccaggtcagggggtgaagagccagcccaggaccctccgccagctgcagtcttgctctctgggctgtgggcaccaggatgtgggcacctgggccttgcatgcctgggccgtggacacctgagccatgcatgcctggcttgtggacatctgagccttagatacctgggctgtgggcacctggggcttggatacctgggctgtggacacttgggctgtgggcacctgagccctggacacctgatctctgggcacctgaagcctgggatgcctgagtgcgtgtctggactcggtgggggtggcaggtccctgaggcgctgcaggggaggccgggctgggcctacctacagggatttgttgacattgcctgtgtggtgggcaggtaggcgctgagatcagctctgcaggaaaacataaacaccagggaacacctgggctgtcacttagagcaagtgtttgggtgctgggagtgcctgtcccatccacccacatccttgcagtgctgggcacccctctggaggggaggcctgggccctcacacaggcctgcaggaccacattatccagcactgcaagcctagtggtgggggacacctgctcacagaggccgacccttctcctacccaacagaagcaggattcatccttgagctgctgtgggttcaggcccctccccttctttgcctgagcatggtccaccggcaggggttacagccaagaacaggcaccctgggccttaggtcccaggatagtggaccccgtaaagctccttcggggctgtggagggaggcctgggggtggccaccatccatcccctcctagcctggcccccaccgccttggggacccggtgcttccctgtttatgtgcaaagtgtcgacgggtctccaaggcccagcatgagctcattgggctcgacgccccctccccatgagtaggaaggctggtggcctggcgaggggagttcccggaggctcccagcctacagcccccagcgacacacgcatgcgcagcacccgcgcacacgttttataaggacatcggaggtggcgtctgcactccgctctgatgcattttattaaaaaggaagaggagggacaaagaaagaaaaataaatgagtggctcccacaaggaccacacacagtggcg

SEQ ID NO: 3524 - DNA, 1517 bp, Artificial sequence
  DNA replication origin
tggctgtgcacagtggcctgtccagccagtccacccaccagcgacttgtctcctcagcagcctggcccccgcctgcctgtcgcctgcacccggattgaattcagctatggtttcactgctgtcactcagaagaatggtctcattcaggccacctgctccctggctggacagctcacatccccctcccgcctgggcacagaggcccaagcccctgaccaccctgccctgcacaggcctgtccctccaggcagagctatccagtgtggcttcacccggcagtggccagaggctgagggccaggggccggcaccaggaagcccccaccggcctcttagtaggagctgtggccatgggtctggaaaggaagcctggactgttcccatcagggagataatcccacattcctcagtgggcagcccctccctccccggtgctgtggtgggcgtggacctggatgtctgggagggcacagaccagacgcgaggtggcaggagaggggcaggcagggtctggaagggcgagtgaggggtttcctgcagggcatgttgcagtggtgggggacccacaatgtgggctcagaagggtgatggaggtgagaggaaggtgaggactgtgggctgggaactggcttcgagtcagggaggtgaggggctatgcccagaagaccccacatgcagggcagggggatgatgaggccctgcttgtgacccagcaagagagtgaggggcctccttcagcaagaggctgtgggcaggagtgggatggagctaggtgtctgagaagacggggctggacagggcttcctgtggcaccccaggctctccagcctggacatgggaagcacagagactagggtcagctggggccatacacgcagcctggagatgcctgcccaacaaaggtgccaaatgtggctgggagatggggcttctcccccagggttccttcttaagtcctcctcctcccaacggtcctcctcttcctcagggctgtcctcctcaggtcctccttcttcccagggccctcctcctccccaggtcctcctcttcttcagggctgtcctcatcaagtcctccttcttcccagggccctcctcctctccagggccctcctcttccccagggccctcctcctcccgagggccctcctcttccacagggtcctcctcctccccaagtcctcttcccaagggcccttctcctccccaggtcctcctctttccccaggccctcctccccagggtcctcctcctctccagggtcctcctcctcctgagggtgctccttctccccagggccctcctcctgtccaggttcctcctcctccccagggtcctccttcgtggataccccttctccccaaaacctcccccttcctcctcctccctggtccctcctcccaatttctcctccttcccaggcatacctccccgagcccacctcctctccaaccctctttcttgtcctcctcttcgcagaggccaactcctaggcctcctcctcaggccctcctcctcg

SEQ ID NO: 3525 - DNA, 1987 bp, Artificial sequence
  DNA replication origin
tggaggtgtctgtgcatggatgcccacagtgccgccctgtgctcctgtcctgacccccagggcatttgaggggacctgcctgcactgcccttccttccctcacccaggcggcctcttccaacctcagcccacggcagtgtccaggctcagaggactggctggtccctcctgtcctccccatggggcccattgtgctgcatggggcccgtgcctctgggaccttggggatttgctagaagggcccttgggctcctcctctacccactccctggcagcctggcacatgggtgtgtgtcctgaatcctgggcatggcctccctaagtgaagaccccctctgcagcacctcttggtggttcactgactgatgggggccgttgcaggtccttctgcaactctggctcaactccgagggctcatgggtgctcgggctggctctgagcatcctgaagaagcagaccgcagcttagggggcaggacgtcagcttggccgggcagggtatctcagcatgaccaccaggtgggtggctcctgtggaggggctgtgggatccttcctggggccactacctgctccttctgtggcctgcgcctgtggccctggaggcaggtgcccctcagtagccttggggttacctatgtggccttgcctttgatggggtatgctagggagcctcttgggcccctcccctccataccgttgggcaggagctactccctcggggtgggtggcagggtctagcagggccatgtgagggtgtggggggagccttcccaagctggcaccccggtggctcccagcacatcctgagtctgccgttctctgctgggggtgggttggtcgtcatgtgtccagtgatgctttcaggaggggcctccaagccctggccctgtccaggtgggtgccctcctaagggctggagggctgagtctggcttgaggtggccgtgcctggggcccctgacattcagtccacccatgtggggacactgggctggcaggtctgacacagagctgcagagcatgctcggtcagtcccaggatagacaggtgacatggggtcggggtcagggtttggggttgagggctcttgactcgatatgggctgggctgggccagggcggggtgtgagggaagccttgtgaagtgagcccagcagcagcagcaggtgagccagcagccagctggggggagggggcacccagtggggtggagccgggttcctggagcagttgaggttggggatgcgtcctcagtgctgggtactggtgcaaggcctcgtgtaaagatggagggtggtgttcatcagctcagaggcccccaggggtggcctatggggatgggttagctggggtctgtcctgcaaaggaggatgtccagatttggtgaggtgagaggggtagagtgtcagagaaccaagagctgcttcccagtgccacacccaggcactgaggtggggagaccccagctggaacctggggacatatgcgtagactgcaggagtgctgggaagctgcagggggccacaggactgtagacatcccagcaggtcatggcagagggtagggggacctcaggcgggatcctgcgggtcagctggggccaaagagggtggaggatgtggcagacgcccatcaggcatagtttgggattcaggctccggagcctcctccctgcccacagccctaggcggggctgtcctcttgcgtatgttgtgtgtgttgtgggggtcttatctgtccagtgcagccagagtcagctagactccctgaaactgtgggggtcgagtcggcagcagagacagccctgtggtcactgagaccatgctcgctggagtgggggccatgggtgtgcagggggccaaggcccttctcgcctccctctcccctgcctggctcatcctggattctttctgccccctcacccccggatggacacgcctgtcccctgtaccctggccaccgagacacctggccaggctccagcaggg

SEQ ID NO: 3526 - DNA, 1054 bp, Artificial sequence
  DNA replication origin
gtcttccttctctccagctggcctgtgtcctcctgcatggctgcacctggaatgacagtcagaggtgggaagtggctggggcttgagaggtatgggtgtcccgtggagccgtcgtcatccgggcccttcaccggggagagcagtcatgaactggtgctgccgtgagcctggcaggggtgcagccaggtcagaggccgctttcaggtcccagccctgcctctgcactcacaggctgcacatgccgctacactgtttaatcccctgaacctcagtttcttgccggtgtagcagagtcaaaaacacactcaccaggtagtttaggacatgaagacatgagacactggagagcatagatgcctgttttcagcaacaggcccacaagactcagaggcttttctgcttgaaacaactaaagcgaatttttacatggatcttatgtgtgtacatgcatgtatatgtatgtgtatgtgcatgtatgtgtgtttgtgtttggatggacatgtgcatgtgtgtatacatgtatgcatgtggggggttgtgtgtctgcacgtgcgtatgcgtgcatctctatcggtttacgggttcatatgggtgtgtctgtgtgtacacatgagtgtatgggtgtatctgtgtgtgtgggtgtgttcgttcctgtggatgtgtgtatgcatgtgtctgtgtgtatgggtttatgggttcgtatgggtgtgtttgtgtgtgtgtgtgtgagggggtttgtgtgggtgtgtttgttcctgtacgtgtgtatgcgtgtgtctgtgtgtataggtttgtatgggtgtgtatgtatgggtatatgtgtgtgtgtatgcgtgtgtgtatgggtttatgggtttgtatgggggtgtgtgtgtacacatgtgtgtccgtgtgtatgggtgtatctgtgtgggggggtttgtgtgtgtgtgtatatttaactttataagtgtcaaagagctgatgaaatggttggtggggatccctagaaatagcaagaacagatgctgaacaagaaagtgtgaggttggtttggtctcatgggatgagggtg

SEQ ID NO: 3527 - DNA, 1437 bp, Artificial sequence
  DNA replication origin
ctgccaaacccttctggatgcagcatcttacatttctgccggcagtgcagaaaggctcctttctccacttcctcgctgacactggttttctgttttattttctaccgcagccatcctagtgggtgtggaatggcaccttgtggggctctgactgcatttgtcaggtggccagtggcgctgagcatcttttcgtggcctcatgggccatgggtcttctttggagaatgtccatgcagctcctttgcctgtttttagtggggctgcttgtctttctcctgttgagtttatgagagctctttatatatttggatttctccttggactgagaagaaccttgtctctagacctgtgagcctgtgggcgctcttacccctgcacaaggagccagcgacaccctggcagccccactgggtgggtgggggcagccaggacatcccccgttgcctagagcctggtgtggggcagttctgggtgctcaggggactctcaagaggaggctgcggagaggctgctgtcatgggcgtggggaggggatgtgtttctcacattagtgccaacatcagaccccgcagggtccaagagggaggctgctggctgtgggcaggacataccctgcctggtcccatggctctgcctctctgtgcatcaggcctggggcacagctggctgcctggatgaggggcacctgtgggtccctggcagggccggagaaggaggggtgggcctgaggtgtggaatcatggggctgtgtgctgggcaagagaagcctgggaaggagctggcaagaaggcggcatctggggtgaccccatggctggggcctgggtcgggtgctctgagcactgtgggccggggggtttgggagcagctgagagctcaggcttaggtttgggcaggcactgtcctggagacccaccccctccaacaacttaggacaccccaggaagcatgtggggcctggcatcaggaagaaaggccacacagagtgctctggagggccagaagggcagggaggaaaggggccagggagctgccttgtttcgagagatcgtggaagtggctcagtggggcagacctcagcagagggctgagaggaggggccctgggggccaggggactccctggggacttcttagcatggagaggagaggacagggccagtggaaagtcggggcatttctccaggactcctggactgggaccccgtggccagtagagggacccaggtgcttggcttccctgacagtggggccgtaagtgggagggtctggagtgtcagcctgatggcccctgcaggcgctggtggccttcctccttcctgctctgcacccaggggccttggaacccccagcctctccctgccccacctgcttgggggtcctggctccctggagggtgtggagggtgtgtggtaaggacggagcagcagtgcctggcc

SEQ ID NO: 3528 - DNA, 903 bp, Artificial sequence
  DNA replication origin
atagcaagagggtgggcctggtggtggtctgaggacatggtttgtcctccattgggaggcccctctcgcttcgcccttgctgggttgtggtttcagctgagatggtagatccggattagacgccggggctgcttctctcctgggcccagaccctctggatgtggagtcagggctgggcctgggtctgggggctgttcctgcccagcggggcttggacccccacccctggctgctaggctgcctggctccctggcaccttgcagccctttccttaggggtcctgggctggctcgggatgaggtctgaggcttcccactggagttcttttttaaagaccctgaggctgttttgtggtggtggcccttgcagtttacatcactcaggaaacatttgcaggttactttgcgggggcacgatggtgggaggccaggccctgccaatttgcccccttctctgggcctcagtagcctggaggcctgcctggaagaggcataaccaaggctggcactgagggattgttgaggtgcccccggctgtggccccagagccagccatcggggctggaaaggtgcttggaactggtccagaagccaggctggagggagtgaccactgtgaattgggggcctggtgggcctcagggctggctgaggctttttgttattggccgtaactcacgtcctgtaaaatccactcttttaatgtatacagccccgtgattttgagtacctcatttgccaggccatgcagctctcaccactgtttaattccagaacattttcctcaccccagaaacctcatacgcattaggcagtcgctgcccgttcccctcccccagtccctggcaaccacttgtctgcgttctttctccacgggtctgcctgtcctggacgtttcctagaaa

SEQ ID NO: 3529 - DNA, 1898 bp, Artificial sequence
  DNA replication origin
cctggacgccctgggccgctccctcagccgggccgccgccctccgccggtcacctgttcccggccctctggcctgagcgccagcgcgcggcgggctggccggcagagggccccgttggtccaggaatctggcacccgcccgggcagggagaggccgcctgggccgaggagccctgcaggtgtatcctgttctcaaagaaaataaaatattttcatgggaaactttccctttgtgtttttctttctctccctttcttctctctgttcctttcttctgggtcgtcttccagggtcagcccggtgtctcagttccctggggcccccacccgcagccctctcctggctccaactgtgggtacggccctgggcctgggctggcacgccactgcacgccatctgtgcaacccgtagcctcacccgggagggcaggagggagggccacaggtccgcggtgactcaccgtggccttgtcagccagctgtgcttccctgctctccggcccagcggaggctctgcttcttgggctggggacacaccctgggcttgtccaggctgcagcggctttgtccctgctgtgatccgattcctggagacggggtggcgctgggtcttggcctctccttctctgacctatctctgggctttgtgccctagagaaggtcaaggggctctgctgctttgtgtgcgtgtgtttcagctctcttgcagacagtaagtccaggctggtgccaggcgcatagcaaggacttaagtgctgttgtggcttctctggccaggcccccttggccctgcttcttggctccaaaggacccatcaagggagaattcctgagtcctgtctgagggcagctctccatgtagctgccctgtgggaagtccagagggcaagtgtgctgcctttggggacagctggcattgcagagggcagctaggactctgtttgactgatggagaatgagcaccttcctgaaccaggggctgggggggcatcctgggtcagggcaggccaggttccatctgggctgctggaggccttgggccccctgtaagtcagttcccaaggttgggctggggaggggaagcagggcacaaagggctccaggctgggttgtgcggaggcctctcctgctgtggctcctggcccagcaaaggcagggggtggcccagggcattaaaggccaggcggggctggagctggaggggggctggggtggcccttcccagctccagtccaggaagcagggagaaggggctgggatctagggccgttttctcccttccccctctcaaaagctctgcctggcacggagtctcccaggcaggaacacggctccagttacagcccaggaacccggagaggagaggctggcctgggggagggtcacgtggacccacgggagccctccctgcctgctccctgagctgcaacccaaccctggctggcgcccgctgccctcctagaggcctctggccaccaggctggaccccctgtggggaagaggctccccttggcctggccctgcaccttggcctggctagcaggtggcatctccatctggttctcccatggctatgtccatgtgcctcctcgctggcctggccccaagcccttctagacagaggggtaagcagggaggccagcccgaggtcatagggagggcttggggtacagactcagaccctctccccaaggttatagcaagagggtgggcctggtggtggtctgaggacatggtttgtcctccattgggaggcccctctcgcttcgcccttgctgggttgtggtttcagctgagatggtagatccggattagacgccggggctgcttctctcctgggcccagaccctctggatgtggagtcagggctgggcctgggtctgggggctgttcctgcccag

SEQ ID NO: 3530 - DNA, 939 bp, Artificial sequence
  DNA replication origin
gcagggcgcgccgcggccgccgccctcttatagcgcccggagcgcggccagctgggcccggccccgccccgcgcccgggaggggatcacgccggcgccgggggcgggccgaaacccgagccgcgcgcgccagcccgccagcccctcccggccactcggggccccggccgccgctcccggcgcgggtctcgggcgcgccctgcccggcggggatggaggaaggggaggcggagagcggtgggaaccgagggcggggcgtgcgagaacccggggcgaccacggcgggacggcattggggggccggaggcgggcatcgggaagcgggtagagcgttgggggcgctgcagtgggagcttggggcggcccccggggcgggattgagggggaggggaggggaggcgttggccgccgggctagccgccggcggggctccaggccgggacggtcggggatggttccacagaggacccagccgtctgccccgagctgggcgctgcgcggctgctccgggggaagcttggtgaggaggagtcgggccagccggtgatgcctgcgcctcttgcgcatgctgaccccctcaaggagcggggccagagaatcgctcctttctggcagggactgtggccgctttcggcctgggaatgaagcgacgtagcctgctggggctgtgaggtgagtagctctaccttttggggtcctgatggtctccccattcttaaattgtgggagtggagctagcggctaagtcaatgaaacaccagccatcgggcaacgcccttctcagagcctgtgtcctggccgggacggggagaaagaggactcctgggatggaaggtgcacacccaggcagctggaagcgctcagtcacagcccggggactcgtcccctctgcgatacggattcggagctgcttctgaagcagaatggtgtcagaggaccc

SEQ ID NO: 3531 - DNA, 1061 bp, Artificial sequence
  DNA replication origin
cccttctctggcgaaacagcagggtccttcccgagttcatggatgtcggatcatccttctcagcaccctcttgcaccaaatgtggtcctgagagtccaggactgggactagagccccctgcccctcagccggccaggcagctgcctccttccttggggaccactaagctgctgctgggagagtgcttcacccccagtggaagggagctctgtgatgccggaggcgcttgtgatgcacatttacaatctcacacgtcttcttggaggcagcctccatgcctttaagcatgccatcattgcaggggggtgtgtggggggtggggagggtctcccgtcctgtctgcttccctctgctgcctctcacttcctggtgctggagccagactttgggggctcactggagcccatggccgtggggcgggtgggcctcccactggggtcgctgcagcctgggtgggctgggctgccgtctgcactccctctgctgagtcagccccatttcaagggaggtggcccagccccctgagcaaaagaggacaaacaagtgccctctccccacaggaggggggtcctatggatggggaaggatgtgagaccagtcacacctagtggaaaagcagaaccaggggccagggctcccacacaggacatcatgccttggagaaaagccaccactcgctggagttggatgggtctcagatggggaaaccgaggccccgagagggagtgactgctcaggcccggtctcctcccttccccacccttgctttgccccacatgcacctgaagctcacctggcaaactggccatcagacactcagaaagggtatgctcacaggggtgacccacatggccaggctttcccagggaagcagggccgggagccctaggggtggcgaggttggctcagatcctcgtgggggccattttctgctgctcctatcttctttgtttttcctctgaggaccctcatattcgcctctgtcactgccactggcgggatttcacagccttccgggggcatgtgctccgccccccaggttctgcggtcactgtgccaga

SEQ ID NO: 3532 - DNA, 1586 bp, Artificial sequence
  DNA replication origin
gggcaaagcaagggtggggaagggaggagaccgggcctgagcagtcactccctctcggggcctcggtttccccatctgagacccatccaactccagcgagtggtggcttttctccaaggcatgatgtcctgtgtgggagccctggcccctggttctgcttttccactaggtgtgactggtctcacatccttccccatccataggacccccctcctgtggggagagggcacttgtttgtcctcttttgctcagggggctgggccacctcccttgaaatggggctgactcagcagagggagtgcagacggcagcccagcccacccaggctgcagcgaccccagtgggaggcccacccgccccacggccatgggctccagtgagcccccaaagtctggctccagcaccaggaagtgagaggcagcagagggaagcagacaggacgggagaccctccccaccccccacacacccccctgcaatgatggcatgcttaaaggcatggaggctgcctccaagaagacgtgtgagattgtaaatgtgcatcacaagcgcctccggcatcacagagctcccttccactgggggtgaagcactctcccagcagcagcttagtggtccccaaggaaggaggcagctgcctggccggctgaggggcagggggctctagtcccagtcctggactctcaggaccacatttggtgcaagagggtgctgagaaggatgatccgacatccatgaactcgggaaggaccctgctgtttcgccagagaagggaggccatcagctcatggcagcttttggtggtggtgggagtggcaggccagccctgagtggccccaccagacccccacttgaagccctggcccagctccagccaggagcctatcagaatgcccaggagcccagggcatgtggttggtaggacccagtgccccaggcagggtaatatcagagatacacctgaggtctggcagggctggcccagctcttacctccctgcacctaggatgatggcggcagatagaggcagtcccctcagcctacctggacccagggagaatcacaccccctcccacgaatgtcccaggctctaactccctttcacgtctggctgccctcgcccaccgtggcctacctgctgcctcagccacagccgctagtgtcccttcccagagggcagcattcacctgcccccacctcctgcttctctcaagccatatccagacaaccttgggcacagtgtgaggtggagacgtttcccaggaagtgtgggcttttttattctcatctgccataatgcagtctggcccctatgtttctgttggagaagctggggctggcggttctctggctggaaagtgcattgtaccccacaactccccacggcctcccaggcctaagaagctctccaggtaagggatggcttgtccaggtaggcaggacaagccatcactgggcccacagtcaggtgaacagaaatccacctccagtcaaaaacaggccaggtgtggtggcttacccctctactcccagcactttgggaggccaaggctggaggttcatttgaggcccagggtttgagaccag

SEQ ID NO: 3533 - DNA, 1425 bp, Artificial sequence
  DNA replication origin
ccactgcaaggcaggagctgggcctgtagaggctgcggaaaggcaggagcttcgcctgaggatgccacagtgagacaccatctgggtctggagggtccactgtgaggcagaggctggcctgtagagtccgacagtagacagaagttgggcaaaaggctgatttgaggaagttttgggcttcaagagtcagccacgaggcaggcactaggcctggaaatggcccgacagtcatgagttgggcctaaatgggccactgtgagggaggagctgtgcctgttgaggctgctggcaggcaggcagaaatttggcctggggcagctgccatgaggcaggagctgggtctggaaaaagcccctgggaggcaagagcagggcctgcagaggctgttctcaagtcaaagctgggcctgttcatgccaccgggaagcagaaggtgggcctggagagtttgacttgaggaagttttgggcctacattggccgccatgagctggacaggaactgggccaaaaaaggctgttgtgaggcagcagttgtgcctgtagacccagccaagaggaagaggtgggcctggagaagcccccatgaggcagaggttgggcctgtagacgctgacaggaggcaggagctgggcctggagaggtccacttgaggagattttgggccttcataggccaccaggaggcagcagttgggactagagagtctgacttgagtaagttttgggcccggagatgacgtcctgggacaggagttgggcctggagaggccaccgtgaggcatgagctggatgtagagaggccagtgtgaggcaagacctgggcctgtctaggctgctgggagacaggcaggaatctggccaggaaaggttgccatgagacaaaagttgagcctggaaaggcccttgtgaagcatgagcttggcctaaagaggccactgggtggcaggagttgggtgtgtagaagctgctgaaaggttgggagcttggcttggggggtccacagtgaggcagatgctgggcctgaagaatctgctgtgaggcagatgttgggattgtagaggccgacgggaggcagaggctgggcctggaggtgccaccaagatgcaggagctgggcctggagaggctgcaaagaagcatgagctgggcctggtgaggtcgacttgagaaagttcagggcctggagagaaggctgggaggcaggagctgggtctaaagaggccattgtaacgatggagctgtgcctgtggaggctgttgtgaggcagtaggctcatctgcggagactgccgtgaggtagggtatgggcctaaataggccattgtgagtcatgagcttggtctgtagaggctgactggagaaagttctgggcctggagaggctgctgggaggtaggagctgggccaaaagatttaagcacatttacat

SEQ ID NO: 3534 - DNA, 1310 bp, Artificial sequence
  DNA replication origin
tgcctctcagcaaacaagctcttttggctcagctcccgccggcatttgttgaccccgaagtttctgcaaccaagcgctcaggcccacatcccgcctccaatagcctgaacagtcccagctctggctggagaagagcgtctgcaggccccgctgttgcctcccaggggtgtctccaggcccagctctcgccccacagcgacctcccaggcccaagtccctgcctgcctcccagcagcccgcgtgcgaccctgctcctccctcacggtggcctgttgaggcaggggctcaggctgacctctgtcagcgcgggaggggccggtgtgaggcaagggctcacactgacctctctcagcgtgggaggagccagtgtgaggcaagggctcacgcctctgggcagtgtgccagatgcatgagttgggcatcaacaggccaccgtgagggaggagctgggccgcacgtgggctgctgggaggcaggcagggacttggccccgggaggccgccatgggggcaagagctgggcctggagaggcccctgggaggcaagcgcggggcctgcagaggctgttctccaaccagtgctgggcctgtacaggccaccgggcggcaggaattaggcccgaagaacttggctggagaaagttcggggcctacaaaggcggttgggagctgggcaggagttgagccaaaagagcttgcttacttgctgggaggcaggaccgggagaggccgacttcaggacaacttgggcctgcagaggtcgccgggaggcccaagcttggcgtggaggagcccaccgaccggagtccatttggggcctgcagatgccatcggagggcaggagctcatcctggagaggccaccgtgaggcctgagctgggcctggggagcttggcttcgggaagttgtgggcctaccagggccgctgggagctgggcaggagctgagtccaaagacgttgttgggaggccagagtcgggcctggagacgcagccgggaggaagagctgggcccggagaggacgccgggaggctgcaagtgggtctggagaggccgacttgaggaggcccggcctctgcctcctgcatggccacctctgcaggcccagctgttcctcctggctgcatctcccgcctcccagcaaacaagctctttcggctcagctcccgccagcctttgtacaccccgaagtttctgcaaccaagctcttcagacccacatcccgcctcccagtgcctgaacagtcccagctccggctggagaagagagtctgtaggcccagctgttgcctcccaggggtgtctccaggcc

SEQ ID NO: 3535 - DNA, 1074 bp, Artificial sequence
  DNA replication origin
cggaggccgcagtgaggcgagagctagctgggcgtggagagtccgctgtgaggccgaggccgggcccgtgcaggccttcgagaggcaggaggccgggcctgcaaaggcccactggaggtcaagttctgggcctgaagaggccgccaaaagtcaaaagcggggcctgggaaggccgccgagagccatgagctgggctgggccgaaagaggccactgggaggcaggaggagctgggcctggagaggctgactcgaggaagttttgcacctggagaggccgccgagaggacggagttgggcccggggaggccgacttgctgctcttccaggcccaattccaggccgatttgaggatgacttgggcctgcagaggccgccgggaggcccaagctgggcctggagaggccgacttcgggacgatttgggcctgcagaggccgccaggaggcccaagctgggcctagaggagcccaccgaccggaggccgtttggggcctgcagatgccatcggagggcaggagctgagcctggagaggccaccgtgaggcctgacctgggcctggggaacttggcttcgggaagttgtgggcctaccagggccactgggagctgggcaggagctgagtccaaagacgttgttgggaggccagagtcgggcctggagacgcagccgggaggaagagctgggcccggagaggacgccgggaggctgcaagtgggtctggagaggccgaattgaggaggcccggcctctgtctcccccatggcggcctctgcaggcccagctgttcctcctggctgcatctcccggcccagctcctgcctctcagcaaacaagctcttttggctcagctcccgccggcatttgttgaccccgaagtttctgcaaccaagcgctcaggcccacatcccgcctccaatagcctgaacagtcccagctctggctggagaagagcgtctgcaggccccgctgttgcctcccaggggtgtctccaggcccagctctcgccccacagcgacctcccaggcccaagtccctgcctgcctcccagcagcccgcgtgcgaccctgctcctc

SEQ ID NO: 3536 - DNA, 1521 bp, Artificial sequence
  DNA replication origin
cgacaggatgggcctcgtgacctcactgaagggggcaggtgagcgcagcctgctcagtcctgccctcttgccccttggtttcccaagcccctcctcctggctgctttcttctcccccatcaggccccatcctctgcccgtgccacctgggtagtacacacactgagatccggccgcttcccaggctgcagaagatgaagggaggagcagactccgaggccccaggcaggagctcagcctgcccaggccaggctctcaagcgagggctcctgtttctgaagactctggataccagggagccagggtaggctgcatggaggaacgagcggaggcttctggaactagctcctcggtacctgcctgtaccacgtggggctcctccttccctctgtgagcctccgagagcctcggctcctgagcagccaagtcagtggggctgggctggggtggggtggagagcagagtgggagagcaagggtgggaccccagctgggtgtcaggggcctgaggggcttctcctgagtgtcttccaggctcgggtgatgttgcctacagcacctcttgtcccttgcttggggtgcagaggaaggtgaggggcctccctggaagcgccctctgctgttgcctaaagggagctgtccctgaccagtctgtcaaggtctatgtccccacctgtgcattgcgctggggactgggatggcgtaggttgaggtcaaggcatagggcaggctcctgggggcatgccgggtggctgctgaacggtgactgagacccggtcctgtctccacagacctccttgttggccaggacacagacccacattccaacacttggaacggggaggtgggtgagacctttgcaagccagcgtcaggaaagggctaatcgtcctcagagagggcacgtgtgagaaggcctgacaaccgggcagctctggagctaagccctgagcagccagccatgtgtttgataaaacaaaactccccatgtatggatggtgctggagggaacatcatttctggcctgctggagggcccagggagcgtgctccctccttccagaataggcccccaggcgagaggaggcgctgcccaccccggaagctctgtaagatacctgcttgggtggggtaagccaggtgggaggggcatctctgatggacagtttgctgtgtgaggtagtgggttccctgtctacagcgggtgtgagtccctgttatgggtggggcaagccaggatttcagacactaactggtcatcttttgcttcctttttttctcatttgagcaaaaataagttgggggaaaacagagaaggggtttgggcagacagagttcaaggctctgggggctttctggctgagggaccctggaaggaacagcagcaggacagggtaggggtccagggtcagaagacggagtgcccctccacagtcagttccattggaacttggtcccttctggaagcttccctgaccttccttgtgggggtcactctttggatgccttctccataagcagtggg

SEQ ID NO: 3537 - DNA, 2386 bp, Artificial sequence
  DNA replication origin
agcgtgagcgccggggggggccgggccctgggagctggcgcggcggcgtcgctgggccctcctgcggccgcgggtgcgcgggtgtgcgcgggctccgagggcggcgctgcgccaggtgggccggcggccgggctgcgggccgaggcccggggcggcgcggggcggcgggggcggggcagcgccgcggggggcgcccgccggggccggggcccgggcggggcaggcaggggcaggcggggccacgggagcccgaaccgcggcggcggcgttggcccccgcctgctgccgtgggtgtcggtgtgtctgaggacgtgctggtgtgcgggcccccaggtgtgcgcggcgcgctggggtgcgccagatgggcaggcggccggcccggggccgcgcgatccgcaggcgccctcctggagctcccgggccgcgtcctgggtttccagccccgcgcgccctgcgctcacggtgggacccgcagtccccctctcgctcctggtctgtggcgagctccgtctcttgcccccgaggtggctgggctagggctccccttcatccatcaaccttctcggggcgggggtttggggagggagcggacggttgtcgggtgcacgtcctttggccccgtctgcctgcggccggactccttccgctgagaccagagctgcctgcgccttcggcggatagaaagggtccgggatgggtgcagcctgcaatggggacagcggccaggtggacctccaaggtgcagccacgcgtctgtgggtcacagctggggacgagtgggactctctctgtggcgcagggattgacccctccatttttctccccatcactccaccagggaagagaacagtggaagcccctgacgcgatgggacggtggggaagcgcagtgctgcccccaggttctgggaccaccaacctccaggtctgcccagagctatgcagcctgttccgacagagggatttctgactgtttagttaagctttaggagtttgctgatggagaggggaagacctgagagggaaagtgacttgcccaaggtcacccagtgaccagtcaactctccagctcccagtcatttgcatatccatgtgttgccccgggagccgcctggggagattgtaatttgcagaggggaagtgtccccagcctcccccgggggacctgataactgggatggttaagaggcactctcccatcgcggctggtcctcctgcagtcacactgtgacctaagctcagcaggaatcttggttaccgcgttggaattgaggaaggaggctccgggagcttctgagagctccaagcaactccagactcatccgtggtgtgttctctggggatactgcactgcccagcctgtgggctaggcctcctgtgcggctgcagagttgcgggagggaggtgcatggagaggcagggatgggcatgtggccgcttctgtgcagcttctcagggagggggtggctgagatgtccccaggtgtgtcactggctggctgatggaggcagctgcttcccacagtgtgccccactcacaacttggttctgcgtttgcagagggagcctgtggtcctgtggacaccggccctaggggtcacctggtgactatgtcaggagtcctgaattcagagtgacagcctttctctttgaaaaaaagttccctttgctcctcactaccttgggaatccagtttccgctacgcatgcccggccgcccacccgcttctcccaggcactgcggggcccccaccctcagagggaaagagggaagagctctggaatgaagcggcggtggggtcagggagggggaggggaggagcgtgtttgtgctcctctggacttggccttgcagcaaaaatcccacccaattgtggtactggggaaaacctgggctgcaggtggggtgggcgcctgagcccagcctgaggcacgcagactcttgttacccccacctccccagaaatgaggctcggggattagagccccctagaggatgccagctctgcccaccgacaggatgggcctcgtgacctcactgaagggggcaggtgagcgcagcctgctcagtcctgccctcttgccccttggtttcccaagcccctcctcctggctgctttcttctcccccatcaggccccatcctctgcccgtgccacctgggtagtacacacactgagatccggccgcttcccaggctgcagaagatgaagggaggagcagactccgaggccccaggcaggagctcagcctgcccaggccaggctctcaagcgagggctcctgtttctgaagactctggataccagggagccagggtaggctgcatggaggaacgagcggaggcttctggaactagctcctcggtacctgcctgtaccacgtggggct

SEQ ID NO: 3538 - DNA, 871 bp, Artificial sequence
  DNA replication origin
ggccccgcctgcccctgcctgccccgcccgggccccggccccggcgggcgccccccgcggcgctgccccgcccccgccgccccgcgccgccccgggcctcggcccgcagcccggccgccggcccacctggcgcagcgccgccctcggagcccgcgcacacccgcgcacccgcggccgcaggagggcccagcgacgccgccgcgccagctcccagggcccggccccccccggcgctcacgctctcggggcggactcccggccctccgcgccctctcgcgcggcgatggccccactcggatacttcttactcctctgcagcctgaagcaggctctgggcagctacccgatctggtggtgagtgagcctcctcgcgttcgcccctgcccctgtgcgccgcgcccgcagcagacggtcccctcgggcagggaccccgcggtggcccgagcccgcgcccttctgctccagccccgcgtgcgggccgcgggcggttggttttccttgacggccactttggacctgttcaggccgctgggacgcgtgggtggcggagtttccggagacattgattcccgagcgggggagtaggggaggttgcggaggtcctagctgcccctggcgtcggacagggcgagcagtgggctggggagaggctgaaagaaggtcggcacgcacggtcaccgaggggacaggcagctcgaggccaggggacaggcgagggaagagggccagcgagagagaattcgccggagactttcctcaaaaaccgtatcttacacacaaacacacacacacgttttaaaacaaagtcgatgagacaagactgaacagctcggagcagcgtggttacgtaaagaaagctgggacccggcgg

SEQ ID NO: 3539 - DNA, 1111 bp, Artificial sequence
  DNA replication origin
tctgctccagccccgcgtgcgggccgcgggcggttggttttccttgacggccactttggacctgttcaggccgctgggacgcgtgggtggcggagtttccggagacattgattcccgagcgggggagtaggggaggttgcggaggtcctagctgcccctggcgtcggacagggcgagcagtgggctggggagaggctgaaagaaggtcggcacgcacggtcaccgaggggacaggcagctcgaggccaggggacaggcgagggaagagggccagcgagagagaattcgccggagactttcctcaaaaaccgtatcttacacacaaacacacacacacgttttaaaacaaagtcgatgagacaagactgaacagctcggagcagcgtggttacgtaaagaaagctgggacccggcggggagtggcgcagagccggcggcggggcgcactgggggccggccctgggccccgcgcgcctccccgccgcagtccgggcacgggggtttccaggggccctctctgcgagccctccgcatgggtccacctggcaatgaggggctgctgtagagagagttaagggtgagttaagcacggggtgtgaggggctccaggaccctcaatcagaaagcgctgtgctgcgccctccacaccagaaaaggcgcgttccgtgagaccctccccagcctggcgatggaagtgcagataaaccaaaggaagggtcccgaaaggtctctctcaggcctcccacctccactgcacatatcctgtgggagggggaacggtggccacactttcgccagggcttgtgatccctcagagccctcaccaagcaaggatcaccccagttccgaattaagggcgctctgagatgcccaagattgaggaacacaagtgggaggaatgtgggcgcgcagggccgggcgcagcgctggtaggacccacagttggagagaagcctccccacaagcatgcacactcccccccatccttctccgacggcagcctggaattataataattacgccgaggggaaggggggagacccagcgagccgaggtacatctaatccgataataatttttctcttcgagatggttcaggagcgggggctcc

SEQ ID NO: 3540 - DNA, 984 bp, Artificial sequence
  DNA replication origin
tgtgccggtgatggtggaggggggagaatcaaggggccagcggcttcatgttagggaggggctgggggcacaggtgaggagttacagggaggccccccaccccagcctgctctgttccactggggctcaccaggagcccacctggcaggggccaaggtcccctcctcccctggtgatgcttaatctggggtggatgcggggaggcaggagaaaggaggagatgctctactgggtagaagaccagagaaagagagagaatcttccccggctattaaggctattaaactgtaggatgccagcggcaggggtccagcagcaggggtcctgcagcactgcgtccttctgtgagtcttcttccctatgctgccggggtgctgctcatgcctgggggaagccatgtctttgctccagcccgagcagcctgcctgggagcagagaggggatcaagaagggggcagacttgtccccagggagccagcctcccccaaggggaggctgcttctcaggaagcagagaatccccaagtgtgagaaccctactgagaacaaagtggtggtggggatgggggaggggtcctcaccacccaccccggtcagtgtcaggtggggttctatgccccgcttccctgtgtggccaaagggctgtcctggactcttgataggagggtgcggagggtacagggacttcacttctctgctcctcctggctcccctgcagaatgcctgactgtccccgagggtgtctcagggtccattcagggtagaacacagggggcccaggtgaaaaggaggtatacatgcatatgaggtggatggggaccgaggctaggaaccctcagggccgacaagacaaagatcctagggcgcggggttgccaggaggctggcgacatttatgggaagggcgcggggcgaaggagcttccttttgcgctcaggaacgcggcggcgggttctaattagaagcctggtgcgtaagccggcagc

SEQ ID NO: 3541 - DNA, 2120 bp, Artificial sequence
  DNA replication origin
tgtggaggcagggtgactctgggagtggcaaccatccctcctatcacaaggcccttcccatctgagcttctgggtaccctgggccatgtccctgccctgctcgactggcccctctcagtccccgaaacacccatgctgcagccacctgcccacacaccacacacgtatgcctgacccatcattccagccgagctccttctctcctgcaccctttcctggctcctgcctctctaagctgcctcttcacccgacccctcttccagtcaggctgtctccccaccacaatgaggcccaccaggactgaggacacaggggcgaagtgcctggcggtggtgcagtgcagacactggctgagcagggcctccaagtgtgctggccctccagcccatgaagggctaggaggaggggctgagctcttgtgcccaggaggttgtttgcacccatgagtgtgtaggagagtgggggcctgaaagggcctacatcttctgttgagggctgtgtgaggtgccctataaaaatggaggtcatgatgtgtttctgtcatagtgacaagctcgaggcccagagggatgtgagggagaccctggagggagcatgagcgaggctgtggagcaggccaggggcaggcaaaaggctggacacagcccacactgcacttcgctgggacaactggggtggccatctgcaagcagccaggcctctgtgcttgggatcccatagtccagcaggagctggtgacggccgggcagaaggaacggcctgagagggagagcagggctgggtaaggggtggagcttgctgtgctccactaggcagcgacggtggctatggccaggcctggcagcaactccaggtggctgggagggtgtgggtcccaggggagggccaggactgagaacggaagcaggaggtggccgtggcgggagtgccacagcccagtctggtaaaggcagcagagggacttgaaagatgaacaaaatccagttgcaagccctgaagtgggcttggaccctggggaggcggtggcgggaggcacaggcccacctctagggtcctggtggggtccctggggagatgacaagattccgttaacccagacatgggaagaagggagaggtgctcagagtgccctggagtgcgggtgtgcctggggattgttctcagatggagccatggtctccttgcagcgcagctgccctgtcctctgtccatgtgggctcttccaagaattcttgttcctgagaactcagcttagaaggggcgtgctgggaggctggggccactaggttcctgccgtctgtggcctcatgggacgcaggtgggcagatgcatatgcattggtctggtctcctgcctgtctcctctctgtcactggatgagctcagaatggatgcccctggacatctgtgcagctctgggccattcagtgttaggctaggcccgtctctctgcatttcagacccgctcagccttgggaccactggcatctgctgcgtgggtataagacacctctgggccacccagccctggggaggcaggtggcccttcacactctcacagggctgctggccacagggacacctttgcctctccctctgccaacttcaaaagcctaattaccctgatttgggctgtttcctggtttgtttctccaggtgaggagattccccttcactttcactttcatgtgccggtgatggtggaggggggagaatcaaggggccagcggcttcatgttagggaggggctgggggcacaggtgaggagttacagggaggccccccaccccagcctgctctgttccactggggctcaccaggagcccacctggcaggggccaaggtcccctcctcccctggtgatgcttaatctggggtggatgcggggaggcaggagaaaggaggagatgctctactgggtagaagaccagagaaagagagagaatcttccccggctattaaggctattaaactgtaggatgccagcggcaggggtccagcagcaggggtcctgcagcactgcgtccttctgtgagtcttcttccctatgctgccggggtgctgctcatgcctgggggaagccatgtctttgctccagcccgagcagcctgcctgggagca

SEQ ID NO: 3542 - DNA, 1064 bp, Artificial sequence
  DNA replication origin
cggtgatgtgcacaagggacccagtggaagaagtggccaccgggcagtcaccacccctaagactgggctgctatgactgtatctactcatcctgctctccctgctacaaaagattctaggaggcttatgcgaagcaaacatcgttagaacaagccccgtgagtcagaggggcagctggcctcaagggcccaagctggccagtgcctgaggtgcgagcaccaggcaggaggagctttgcactctggaagggtgctgtgcgtccctgaggcggctacggatcctggcagttatgcagggccaatgtctggttgcagacacttgacgtgtggccactcctgaccgtcaccctcaggaggggtttgtgtgtgggcagctctgagaagcaatgccacccccagggccctgagatcccacagctctgggagggctggcctggtggctccactcagctcgtttcacgagttttatttgctagtgactgctgtcctcagcaccagaggcagagacgagaggcagagactgcaaaagacagaaagacagagatgaaaagagatagagtgacagaaacaggcagagagagacaggacaaagactgaaagagagagacagacacagagagatagagacagagacgggcagagacagatacagggaagagagagagacagacagggagaaactgagagacaaaggtatggagatatggagggacagaggcagggaagagagaaacagagacagagagacacagacagatgcgggcgaagggagaaggaagaaggggctagggtgaggccaggcctgcagagggagtgggccagtggcaggctaatgtggaggcagggtgactctgggagtggcaaccatccctcctatcacaaggcccttcccatctgagcttctgggtaccctgggccatgtccctgccctgctcgactggcccctctcagtccccgaaacacccatgctgcagccacctgcccacacaccacacacgtatgcctgacccatcattccagccgagctccttctctcctgcaccctttcctggctcctgcctctct

SEQ ID NO: 3543 - DNA, 2205 bp, Artificial sequence
  DNA replication origin
aagcaaagtccttctcgtgcccatcgggaggccacaacaggcttccagagcagccaacgcgtgggcccttttcccccactgaggcctgaacacaggggaaggagaagaccctttgctgtggggcacacagggggactcagcccgcgccccggtccccgccggagcccgccggagccgacgcccgggcgcctcccctcgggggctgcccaccttccctcattcctgcggccccaggaggagccaggcggccgggagggggtgtcgcggtggcatttggtaatcatggcctgcacaaaaggccccggagccacctgagagcggaatgcggcccgcgccccaccgcggccacggcccctgacaccgccgggcggcccgcgcggccgggcgccgtgctgacccgctggggcgcttgaatccggctttgtgcgccactgtcacgccgagttaggcccacaatggccggcgatattttatatgaatttccccctagtcggtgattaggcgagcgcaggccagtcatagcaacctggaagtatgcgccgcgcgccaggccgtccggcgcgaggggaaatccccattcagacgctttaattcagcaccgcgaagggcgtgtgaaccgcccgcgcatttgcactctccccttgtgcttaatcttgtcgccgtcgctgggatattgtgctcccagccggacgcggcggggagtcggccggggttcccctcccactggggagagttaatgatataccagagaggccgctggagccaggggagccccccaccccaacgcatcttaaacggcaacactttccgatggggggggtcaggggtcgcaacctggctttggggacgctggttccctaaagagctgccctgtgtgtccccatgtcctagcaggcaggccccacccctgtgccggccctcataggcaggggacacacagggaggtggcggaccacccccgaggggctcctgggggctcagcggggaggagaggaggctgggctgtctcctgcctggggaagacgttggagagatgaagggggacttgtggggcacccaacaaggcttactgacatgtggtgcgcaggaccctttcattactctccccaccctttggggctggaggggtcctggggcaccaaccaggaatctggccgtgtgctttgagtggggataccctggggttcacagaatagggcagggggtggggactggaaatgcttgaagagggggtggtgtgtgaaggctgagtgggagggccactgctgcaggccccacccacactgggtacgaagaagcaaaccccagggctctgggaagtgtccactgggagttgtgggaagcacacttacttgggaagcacaagagattgcatacctccccatgccactccactccccccgacctatctggcaggtgccagggcccggggggactcctgggcccagcccatgttagagggcaccgagcatgtgggcacaggtggcatccctaggctccaggcctcgcccgctcctggcctctgtccccttctctaaggagcacatgccccacctggcctagagcaggccaggctctctgcagagccacgtgctgcctgagatccagctgctgggccctgggctgctgcatccactgcagccgtccctgccctttctctgtacctgtgtccttgccagctttaccttgccaggggtcaagagtgaggtgtctccagctctgcagggaagtgagccctcccagtgcctgggtcctgcggcaggggacagagaagctgcacggtgtgcccagtctccatgcacttaaaattcctcaaatgctttctaccccaggcaggttgaatgtcctgctccttttggaccccagaagagagggctcttcagggaccaggctcagcttctgtgacagagccccatgttccaaggactgatggtttctcccagcctcagtctggtggccccagtccccagccccaggccaggtggacggcagatggggatgaaagcaggaggtgtgaggatatgaagcttcttccttcatatgttcacactcatgcacacacacacacacacatgcacatgcatacacacaggcatgcacatatatggcttatgtgcacatataggcacacacatgcacccctcacaatgcacacgctagggtgtacactcacatgtgcacacacacacaagaggctgggcccct

SEQ ID NO: 3544 - DNA, 2197 bp, Artificial sequence
  DNA replication origin
ctgaatggggatttcccctcgcgccggacggcctggcgcgcggcgcatacttccaggttgctatgactggcctgcgctcgcctaatcaccgactagggggaaattcatataaaatatcgccggccattgtgggcctaactcggcgtgacagtggcgcacaaagccggattcaagcgccccagcgggtcagcacggcgcccggccgcgcgggccgcccggcggtgtcaggggccgtggccgcggtggggcgcgggccgcattccgctctcaggtggctccggggccttttgtgcaggccatgattaccaaatgccaccgcgacaccccctcccggccgcctggctcctcctggggccgcaggaatgagggaaggtgggcagcccccgaggggaggcgcccgggcgtcggctccggcgggctccggcggggaccggggcgcgggctgagtccccctgtgtgccccacagcaaagggtcttctccttcccctgtgttcaggcctcagtgggggaaaagggcccacgcgttggctgctctggaagcctgttgtggcctcccgatgggcacgagaaggactttgcttgtcctttttcaggggcgatggtccccagatgacatgacatttggggccacagtgacctgcaggcccctggccagtctggtcaggtggtcctagctgggatccaaggcacccccctcactcagccagccccttccagcagctgtggcgtgagcaggcaggagatgggggcagcaccaggagggagggacccaatgcattcggggtggccactgtccccacaactctatgggtcccaggtatgtggtgggggtgtggtaatcatacagggtgcagcgtgcacggggggctgtgttcgctgtgaccctccatcccccaggatgcctgaaggccagtccctggagtacagggagactgctcctcactggtgcatggaaagggctggcagatcaggcagggggaaggcctgtggggtggggcatttgccctgcagacctggggagagaagctggctgcagtagggtgcacttgggggacagagggcatttttttgtcacagtggaggtgagaacttcccggtggagattcagcagagtttttctcctgggcagtgggcaatgttgggagtctgggcccccagcacccggctggactggccaccatggagtcctgccctcggccagtgcatccctgccagagctgggggtgtccagccagacagtcagcattgccaggggaaagagacgaagccacaggtttccaggggctggggacagcattggagggccccaggaggcatggccaggtgagcatgggtcaacatcaagaagcagactgggcaaaggcggcatcccaagctcctaggaaaggaggtgtcagctgccccaggatggggccacagaggcagaaccatagcccccttcccagactaagcagcccagccaccagctgccagcagccagggccctgaatcccagagcctgtgaccaaggtacccacctccaggaagaggccaggccagagacccaatgaccactgtctactcatggggggatggccatcagcatatcagagacaccctcccaacccccttctcctggcaggctcctgttcagggtcttgtccagggtcccatagagcccttacaaagtcatggccaagctgtccatagccttctttctggtcacagcccagaggaggggtcagcacggaatggaatctgagcttgggagatctcatctcagttgatgcatcagaatcactggagaccctttaagatataggtgccccccaccccagttgaacttgggtccccagggcggccctgcagtgattcattggccccccagccatgaccattgttggaagcctccagtcctaattccctgatgggcttcccagaggggccagcctgggtgaagcccttcagactgagcactctgcctccccgaggagctggatttcattgtcctatggtcgcatttaacaacaatccccaccccctgacccagaactttccctccttcaagttgtttgtccctcagaaaagccactcaggagtcccctctggaccaacaggcatgtcccaggagcccaggagtcccaggctgtccctctcctctcgccctgtatcagcccccacagcctttccacagataggcatgtccccctcagccat

SEQ ID NO: 3545 - DNA, 931 bp, Artificial sequence
  DNA replication origin
cagtaatttagggggagggaggctgggagagcctcccaggcagcctggaggtgaaagacaacaagcgacttggtgggcagagcacagagtgtaatggaacaaagagcatcttgatctgcagaggccaacccaaaccaagccgtgtaaagcttcgtgagcctgtgtcttattctgtctgtgctgctacaacaaaataccttagactggataatttataaacaatgggagtttagtactcacagttctggagactgggaagtccaaggtcatggtactagcagataccttgtccggtgagggcctgctcctcatggatgatgccttctgtgtcctcacccagggtgtggatcgctctggggttacttttataagggcattgttttaggccattcttgcattgctacccgagactgggtaatttatgaagaaaagaggtttaattggctcatggatctgcaggctgcacaagcttggtaacagcatctgctcagcttcttgggaggcctcagggagattttacacatggcagaagtggagtggtagcaggcacgtcacatgggccagagcaggagcaaggaagacagagtgggggagaggtcgccacgcacagatcttgtgtgaactcactcattatcatgaggacagcacaagccattcatgagggatctgcccccataacccaaacacctcctaccaggtcccacgcccaacactggggattacacttcaacatgaaatttggagggaacacagatccaaaccgtatcaggcacgaatcccattcacgatgctccaccctcatgacttgacttgatcaccttctaaaggccctacctcttaatgctgtcaccttgagggtaaagatttctttctgggggggtggggacacagggtcttgctggatacagtggcaccatctcagctcactgca

SEQ ID NO: 3546 - DNA, 1217 bp, Artificial sequence
  DNA replication origin
actcctggcagctgacgtagcagcaccagtggaacacgcagcggcacttctcccggcgccgctccgctcgcgcgttgtggccgcggccgcagcacagcaggtcgcagccgtcgatgccgtgcgagctgacgttgcaggtgcggtcgcgcgtgccgaaggagcccgtctcagggttgggctcgcagaagttgggcgaggcctcgtagtagaccaggtcgcgctccgtgggcaccttgaagtaggtgtagcgcggccgcagggtctccacccagccgcgggactcccggtgcttctccaccaccatctccgaggcgctgtcgtacttgtccttgaggaagtcaccgatggcgcggaagtcgggttgcgaccaccagcatgtcttcacctcgcagctgcccgacagcccgtggcacttgcacttgaggtgcatgtggctggcgatggcctgcggggcacgcgcaggagccagcgtcagggcggccccctggtgcgtctccccgaggaaacagcattacatgtcgcctgcagcctacctgctccataaagcccccgggcagagggggcagactcccaggcagggccccagggccacccccttcctatggtgcagatactggtgcctgctcccttgccagacccaagccttcccaggtcagggcttggggggctcccctcttcccgtctcctagctgagtacttctacactgtctagggtggagcgaatgaaggacagagctgcagcgtgggatgccatacacgaagagccacagcagtcagagtgcagggatgcagggggataggcgttccttctgaccctgaggactcaggcacgctgcccagaggtgtatacggctgggtggaaaggcacgagtcctgagcatgagtaaagagagtggcccaggaagctggtcactgtatggggactgcagaggaagaggaaggcaatgttgggacataaggctgttgggggaccgggcaggacctcgctgaggagcgaacggtttcccctatgggcagtgtagaactcagcttcttttcccttctttctttggggaaggggtaggggtgagcgtgaaggggcatgtgaacatcagaacagtctaggtggcactgcactgtggcagccactggacagacaggagcccatgaggcatggcagtgtgaattcagaaatgctatacgtgccaactgcatgctggattcccaagacttagtgt

SEQ ID NO: 3547 - DNA, 1425 bp, Artificial sequence
  DNA replication origin
gccatcggtgacttcctcaaggacaagtacgacagcgcctcggagatggtggtggagaagcaccgggagtcccgcggctgggtggagaccctgcggccgcgctacacctacttcaaggtgcccacggagcgcgacctggtctactacgaggcctcgcccaacttctgcgagcccaaccctgagacgggctccttcggcacgcgcgaccgcacctgcaacgtcagctcgcacggcatcgacggctgcgacctgctgtgctgcggccgcggccacaacgcgcgagcggagcggcgccgggagaagtgccgctgcgtgttccactggtgctgctacgtcagctgccaggagtgcacgcgcgtctacgacgtgcacacctgcaagtaggcaccggccgcggctccccctggacggggcgggccctgcctgagggtgggcttttccctgggtggagcaggactcccacctaaacggggcagtactcctccctgggggcgggactcctccctgggggtggggctcctacctgggggcagaactcctacctgaaggcagggctcctccctggagctagtgtctcctctctggtggctgggctgctcctgaatgaggcggagctccaggatggggaggggctctgcgttggcttctccctggggacggggctcccctggacagaggcggggctacagattgggcggggcttctcttgggtgggacagggcttctcctgcgggggcgaggcccctcccagtaagggcgtggctctgggtgggcggggcactaggtaggcttctacctgcaggcggggctcctcctgaaggaggcggggctctaggatggggcacggctctggggtaggctgctccctgagggcggagcgcctccttaggagtggggttttatggtggatgaggcttcttcctggatggggcagagcttctcctgaccagggcaaggccccttccacgggggctgtggctctgggtgggcgtggcctgcataggctccttcctgtgggtggggcttctctgggaccaggctccaatggggcggggcttctctccgcgggtgggactcttccctgggaaccgccctcctgattaaggcgtggcttctgcaggaatcccggctccagagcaggaaattcagcccaccagccacctcatccccaaccccctgtaaggttccatccacccctgcgtcgagctgggaaggttccatgaagcgagtcgggtccccaacccgtgcccctgggatccgagggcccctctccaagcgcctggctttggaatgctccaggcgcgccgacgcctgtgccaccccttcctcagcctggggtttgaccacccacctgaccaggggccctacctggggaaagcctgaagggcctcccagcccccaaccccaagaccaagcttagtcctg

SEQ ID NO: 3548 - DNA, 1667 bp, Artificial sequence
  DNA replication origin
tcctgtgggtggggcttctctgggaccaggctccaatggggcggggcttctctccgcgggtgggactcttccctgggaaccgccctcctgattaaggcgtggcttctgcaggaatcccggctccagagcaggaaattcagcccaccagccacctcatccccaaccccctgtaaggttccatccacccctgcgtcgagctgggaaggttccatgaagcgagtcgggtccccaacccgtgcccctgggatccgagggcccctctccaagcgcctggctttggaatgctccaggcgcgccgacgcctgtgccaccccttcctcagcctggggtttgaccacccacctgaccaggggccctacctggggaaagcctgaagggcctcccagcccccaaccccaagaccaagcttagtcctgggagaggacagggacttcgcagaggcaagcgaccgaggccctcccaaagaggcccgccctgcccgggctcccacaccgtcaggtactcctgccagggaactggcctgctgcgccccaggccccgcccgtctctgctctgctcagctgcgcccccttctttgcagctgcccagcccctcctccctgccctcgggtctccccacctgcactccatccagctacaggagagatagaagcctctcgtcccgtccctccctttcctccgcctgtccacagccccttaagggaaaggtaggaagagaggtccagccccccaggctgcccagagctgctggtctcatttgggggcgttcgggaggtttggggggcatcaaccccccgactgtgctgctcgcgaaggtcccacagccctgagatgggccggcccccttcctggcccctcatggcgggactggagaaatggtccgctttcctggagccaatggcccggcccctcctgactcatccgcctggcccgggaatgaatggggaggccgctgaacccacccggcccatatccctggttgcctcatggccagcgcccctcagcctctgccactgtgaaccggctcccaccctcaaggtgcggggagaagaagcggccaggcggggcgccccaagagcccaaaagagggcacaccgccatcctctgcctcaaattctgcgtttttggttttaatgttatatctgatgctgctatatccactgtccaacggagttagacgaatagatgtgttgtgttttttttcccttttctttctatgaaagaaattgttttagtcatagcttgtgggtttcaaacaatgggaaaagtgaaaaaagagaaacaagccatcaaggctgtggtctgggctggatgtttggtggtgggtcagcacggtgttgaaagagtagagaagatgcccactcaggggctcagggcctgggtccgggggcagggggatgccccagggccgtgatgggcaggggacctccagagctggaattccatggggaaggaataaggatagccaagctgaggaaatgagggaacggccactggcaccaaggcctggagcagagtagagcctctgacagggagagagcagcaggcacctggaggccccaggtaggcagccctaaggtaagggggttggccgagcccccaacaagtcagtagagcagcaagacgcccaccacctcccctcccgcagagcctgtactcactcagctg

SEQ ID NO: 3549 - DNA, 1511 bp, Artificial sequence
  DNA replication origin
ggctcttgccccggcctatgctgactgctcaggtccctgcaacctggcagccatgcccatgatctcgtgccctctgcctgcccagccgcctcccggctgggtcagtgtctgtcatctgcaatgcccctggcactggggcccagtaggtgctaattagggtggctgtgacctgggtcccgactaagaggcactgtgcccatgggctggggctgaccaggggctcctgtggggcactgccctcccccaaggactgaccctttatggctattgctcaggaaggcctggcgggttgagcgggcttggggtccccccactggtgatgcaccacaggggtcctatgcccttagtcactggctccctctttgtagacggtagcacagctgcccttggtgccccccgggaattccagtggccctgcctatggagggtcagggctgccctggagcagtgggtgacccacctgggatgggtgtcacggccccagccaatgaggccatggctgggagtgatattggggtgcccaccagaccttgggggtgcatggaagctgaggcacagttttgggaggcaaaggagaggggtgcctgacctccagagtcctggaccgggtcccttctcccttggccctgacaggccctgggtagctctgtgctcccatggctggtggctctggagaaacactccctccctacaaccaccccagcagccacacttcagccctcatcccctcctgggcctggcctccttgactgtcctcgggtgggagcctctgcttcatgaggttctgcaaggctgctgcaggcaggggttgggcagcagccagacctgggcagaagccctgtgcagccagcagggtatggtagagggcggtatgctctcttgctccgtgggtgctgtgaggcttcactatgccagcactgtgaggaggccctgggcagtgagtggggtggaaagacctgacctggggtggggaggagcagggctctggtgggggccgggctggatctgtagccttagggaggtggatgaggcacaggaccagggggacctaggaagtggatagtgaggggcaggtggggggtttgggaaggccaggcttctagtggacccgtcacaaaggtcaggagcaagggctctagcttgaaaatggtgcccagagagggtggccaggcccagtgtggcctagagagggtgtcctgctgggcagccgtgagggcaccttggggtgagggtgtggggagggaggtcagcagtccctcaggcccctctgcccagccttagctgcatgccctgggcctgtgccctcagggtccaggacagcaggtgcgtggcagggtcaggggacactgttcctggaggggttatgctcctgcctggggctggcccttctctggctcttgaggcctggggattgtgttcccatgacctccatgcctaggacgctggtgcacccaccccactcctggggctgccttgaccccccttcctaccatggggcacactgggggatg

SEQ ID NO: 3550 - DNA, 3063 bp, Artificial sequence
  DNA replication origin
aaaaagacctcctccaggggaagctgcaaaggctccaccataccctcaggtgcccatggggagccctgccctccagacccagctgggatcagagcttcttggctgggtcacagcctgggtctccttccaacagcacacctcacctgcccacccagcagccagctgcagaattacaaactggaatgccaaggcccggtctcctggcaggagcaggaaacacagaagtccaggcgcaggcatatgggctggatgtgtggctgggaaaagtggatttccccaggtatctccccctcgttcacgaacctgaggtgggcagactatgccccagagccagtgcccgggctcctgtcttcttctgctgcccaaactcaccccaccatggcagaaggccaagaggccagactggcattgccctctccccactccatccaaggtctggcatgaggcaccggccctgcagtgccactcctcaatggagcaggcagcctgcagcaccaacaccaaaggctggggaggacatgggatgctggacatgggaaccatcaggagtgtgcaggaggggcagtgttggcgggtagtgtagaccagaatgtacagggcatgtagaagaatggatagtgtagacagggtagtgcagaggaatagcacaggtgggatagtgtagggggatagtgtggggggataatgtagggtgtatagtgtagagggatagtgtagggggatagtgtggggggataatgtagggggtatagtgtagagggatcgtgtagggggaatagcgtaggggggatagtgtagagggatagtgtaggggatagtgtatggggatagtgtaaggaggatagcatgggggatagtgtagagggatagtgtagggggcatagcgtaggggaatactgtaggggatagcacgggggatagtgtagagggatagtgtagggggaatagcatagggggatagtgtagagggatagtgtagggggaatagagtaggggaatactgtaggggatagcatgggggatagtgtacagggatagtgtagggggaatagcatagggggatagtgtagagggatagtgtaggggatagtgtagggggatagtgtaaggaggatagcatgggggatagtgtagagggatagtgtaggggatagtgtagggggatagtgtaaggaggatagcatgggggatagtgtagagggatagtgtagggggaatagcgtagggagacagtgtaaagggataatatagggaatagtgttaggggatagcatagggggatagtgtagggatatagtatagacggatagtgtaggggaaatagcatagggggatagcgtagggggataatgtaggggcgatagcataggggaaatagcgtgggggatagtgtagggggacagtgtaggggggatagtgtaagggacagtgtagggggatagtgtaaaggggatagtgtagggggatagagtaaagggaatagtgtaggagggatagtgtaggaggatagcatatagggatagtgtagcggggatagtgaagggggacagtgtaggggggatagtgtaaaagggatagtgtagggggatagtgtaggagggatagtgtaggaggatagcatatagggatatagagtaggggggatagcgtagtaggagcacggtgtagggggacagcatagggggatagcctaaaggtatagcgtagggggatagagtagcggggacagcacaggcagatagcataagggatagcgtaggatggcatggggggatagcctagggggatagtgcaggggggacagcgtagaaggatagcgtaggagggatagcatagggggatatcgtaggggggatagcatacgaggatagcataggagggatagcgtagggaaagagtaggaggatagtgtaaagggatagtgtagggggtacagtgtggggggcactgtgtaggggacagcataggggggattctgtagggggatagtggagggggcatagcataaaagggattgtgtagggggatagtgtagcggagagtgcgtagggggggtagtatagggggatagcgtcggggatagtgtatgggggatagtgtagggggacagtgtacgaggatagtgtagcggggatagaacaggaggatagcatgggggatactgtaggggggagagagtaggggagagtgtagggggatagtgtaggggtatagtgtagagggagtgtagcggggatagattgaggggatagggtagaaggacagcgtaggggaatagtgtaggggtatagtatagagggatagtgtgggggggatagattggggggatagggtagaagaacagcgtaggggaatagcgtagcaggggacagcgtagaagggatagcatagcggggagaacatagggggatagcgtaggagggatagcataggagggatagcatgggggatagcgtaggagggatagcatgggggatagcatagcagggatagtgtaggggggatagcatggggggatagcataggagggatggcatagggggatagcgtaggagggatagcatagggggatagcatagcacggatagcgtaggggggatagcatggggggatagcataggagggatggcatagggggacagcatagcagggatagcgtggggggatagcatggggggatagcatagggagatagcaaggggggatagtgtagaaggatagcgtagcagggatagcatagggggataaggtaaaggatagcgtagtgggatagcaaaagggaatagcatacagagatagtgtagggggatatcataggggaaatagcgtggagggatagcgaagggaaatagggtagaggaatagggtatggagacagtgtagggggatagtgtagggggtattttgcaggggggatagcagaggggagattttgtagggggatagtttaggggcgatagtggagggggatagcataggagggatagcgtagggggatatcgttgggggatagtgtaggtggatagtgtggggggaatagtgtaggggggatagtgtaggggg

SEQ ID NO: 3551 - DNA, 2808 bp, Artificial sequence
  DNA replication origin
atagggagatagcaaggggggatagtgtagaaggatagcgtagcagggatagcatagggggataaggtaaaggatagcgtagtgggatagcaaaagggaatagcatacagagatagtgtagggggatatcataggggaaatagcgtggagggatagcgaagggaaatagggtagaggaatagggtatggagacagtgtagggggatagtgtagggggtattttgcaggggggatagcagaggggagattttgtagggggatagtttaggggcgatagtggagggggatagcataggagggatagcgtagggggatatcgttgggggatagtgtaggtggatagtgtggggggaatagtgtaggggggatagtgtagggggatagcgtagggggatagaatagggggatagtgtagggggatagagtagggggatagagtaggggaatagcgtaggggggatagtgtaggggggtagtgtagggggatatcgtgggggataatgtagggggatattatgggggaatagtgtatggggacagtgtaaagggatagtgtggggggatagcgttgggggatagagtagggggagagtgtagggggatagtgtagaaaggatagtgtagggggatagtgtaggggagaatgtagggaggagagtgtaggggataaagtagggggatagtgcaaggggaaagtgcacagggatagtatagggggattatgtagggggatagcatagagaggatagtgtaggggaagagtgtaggagggatagtgtaggggaatagtgtaggggggatagtgtaggggggatactgtagagggatagtgtatagggatagtgtagggggatagtgtagtgggagagtgcaggggggacagggtagggggataatgtaggggagataatataggatacagtgtagggggatagcgtcgggggatagtgtagcggggatagtgtacgcggagagtgtagggggaattgagtagggggagagtgtagggggacagtgtatggagatagtgtagggggaacagtgtagcgggatagcgtagggggacagcgtcagggggatagagtagtgggatagcgtagggagtagcatggagggacaacaaagggggatagtgtaggggacatagcatagggggatagcgtaagggagacagcataggggtatagtgcaggggtatagcatagtggggacagtgtagagggataatgtttgggggatagagtaaggagaatagcatgggggcatagcgtacagtgaatagtgtagggggatagtatagggagatagtgtaggagggatagtgtagggtgacagtgtagggtgatatagcaggaaggatagtgtaggggggatagtgtagggtgatagtatagagggacagtgtacaggaagcatgcaggaggatagtgtagggcgatagtgtagagggatggtgtagggggataatgtaggggggatagtgtaagggtagagtgcagggggagagtgtagggtgatattgcagaagcaatagtgtagggtatagtgtaaagggatagtataggggggatagtgtagcgggatggtatagggggagagtgtaagggatagtgtaggggtgatagtgtagggggaatagtgtagggagatggtatagagggatagtgtagggggtagtgtaggggaataatgtagggtgaagagtgtagggggatagtgtagggcaatagtgtagggtgatattgccagggcgatagtgtagggtatcatgtaggggatgctgtaggggggatagtgtagggtaatagtgtagggggatagtgcaggaggatagtgtaggggatagtggagagaaatagtgtagggaggatagtgtaggggagtagtgtaggggaataatgtaggggggatagtgtaggggtgatagtgtaggagggatagttttggggatagtatggggtagagtgtagggtaatattgcaggggtgatagtgtaggggacagtgtagggcaatagtgtagggggatagtgtagggcaatagtgtaggaggatagtttggggggatagtgcagggggatagtgtaggtggatggtgttgaggggatagtgtagggggatagtgcaggggtataatgtaggggtatagtgtaggtggataatattgggggacagtttagggggagagtgtagggtgacattgcaggggtgatagtgtagagggatagtgtagaaggatagagtacgggggatagtgtaggcaggagagtataggggcatagtgtaggggagatagtgtagggcaatagcgtagggtgatattgcccaggctatagtatagggggtgctgtagagggatagtgtaggggaggaaagtgtaggggggatggtgtagagcgatagtataggtgatagtataaagggatagtgtagtggggatagtgtaggggaacagtgcaggggggatactgtacagggatagtatgggggagagtgtaggtggatagtgaaggcggatagtgtggggcatagtgcaggtagatagtgtaggacaatagtgtaggtgatagtgtagagggatagtgtagtggggatagtggaagggaatagtgtaggtggatagtgaaggggaatagtgtggggcatagtgtagagggatagtgtaggggatagtgcaggggtcacagtgctgttggggtgccaaggcaccgtgctcagtgtccatgatggtttgtgtgctttgtgtctggagcatcacgtggggaccctgcagacacagagtcctggtcaccctccctgtttctgtgtc

SEQ ID NO: 3552 - DNA, 1454 bp, Artificial sequence
  DNA replication origin
tgccccgggccgcggtcttagctcgcgcgcaccctaggggcgcgcacccgtctgcgcctgcgcctgtgagtcttccgcgaagacagcctgtggctcactcccgcccgtttggcgtatttggagactgaggcccggggggctcctgcagcaactggagctgcggggctggttgccaccttcctcctcccacacccggcagtcaccgggaggcctcggggactgcgtgaggacgggggtgcgaggcgcccctcgccggggttggggttcctggctcccaggctgcgcgggtccacgtgccccggccctgtggaaacctgtggcactcgcggggccacggcggaaggtccgaaggcgggaggcttgctgtgtccccgcactggcctcggcgccccggcggccgcagtgacgcgcgggctcatacctgggcccggagcagacgccggggagctggccgcagatgaagcaaaggaggaggtggcctggggaccccggggtgaggcgggggccgtgggggtggggcccagggttggggacggccgcccagaagggaggtcacagtggtctctaatgagctggcctttaagctgagatccagttgaggcggaggagatcccgctctcaggcacctgaacagaggaccgttgcagtccctctgtgttccgtgtgctggaggcctggctctgcccaccaccctcaggtcttcttgcctcttcccttgtgctgctgtgaggggttgggcttgtgggaaagtgtccctgcagcacagtgccctgggtattgtggaggtcgggaatcaacctgatttgtgcaggccgaggcccgggggcagggcctgaggggtgggatcactgggcctggcccaggcctcctgcgcccctttgctgcccccatcacctacgttgcttgccccttgggcagggcgtcctcactgcctctggaggctgcgatgggcagatctctcccccagggctgcacctgcgggggctacgaaggtccccaaaagcggtgaccctcctgcccccaaatttagtccctttttctgcctggggctcccttccgaaatctcacctctgtgaagctgtggcagggttgtctgtttaggggaaggacgtctcccaccctacaggcatctcagatactcttggaaagccccagggagggttgtggatgcctgtggaaccttctggttgtgctgcctctccctgctcagccagagcggggccatgtgcggacatttcacgggggttacatgtggttatggcctctttagggctgaagggacctggctttggttctctgctggcagagcgtggccaggggtggctccagggtcactgagcggggattgtgtgggaaccagagcctgcctccccttcctttaaaatactttttatttatttatttatttttgagatggagtcttgctctgtcgcccatactggagtgcagtgaca

SEQ ID NO: 3553 - DNA, 1504 bp, Artificial sequence
  DNA replication origin
cgccatcttgtgggagcaaaaccaacgcctggctcggagcagcagcctctgaggtgagggcgaggggcgcgggccggtgtgggccgcagagacgttggagccggcgggggctggggactggcctcggggcgacttgaggttcgcgaagggcacgtcgacccccgcggcggcggcggcgacagggccgggccgggggcggacgcagacgggccgggctgaggctggggcccggccggagtcggggctgggcggacgggcgggtcggtgagctcctcgcacccctcacaggttcccgaagtcgctcgcggccgcttgtcctcctctgcctgtccctgcccccgcccgtcgcccggaagtccgcttggacgccgggctcttctccaggaaacctgggcttcctgcttccctcgcctctgcctttctcgtttcccgaggccgcccgcgcgtggacggttgggattagcggccgcgggggccggtgggggtcgtggggcctcccccacccgagtacaggcgagcgagcggcatccgggcggacccccgcctcggggaccgggaaactgaggctcgggcggcctgagacgccgtcaaggtcatgtaggtggtgggggcttgcatcttcgcctcccgactccatccagttcgtgtttgctgtgaagacggtaccgggtcaggggtggtgagagcgggcgggcaggtggacaggaaccccgtgcccttccctgtctgctgaacggaatgcgtggacctccgggggagcccagagtgcctcccttcacaccagtgagacgcaatttggggtcagcactcagggcaccggtggcctccagagggccggtcgatcttcgctttaactccagggtggtttccttgacgttgtcggcagtagataagaaggcctcttctgagctggtgaatctttaacctacctgaatctttaacctgcctgcggaacgacctgctcgcagactctaggccgcagaggccggccccagcgctctctcggagcacagcctgggtggttacggcgtgtgagattggggctggacagccgtgcgcacctagagtgttaaataaccattccgacggcacctcctggcactccctttcagtccaggcagccagttgctgctttgcaggaattgagcagaaatgcactcggaatcgcgggcaggaaaagaagggaggtcggaggctttggatggtccccgaagtcgccgcctagttgagagctgtagagttggtgccactgcccctgttggagtgggcagttgtagttcttgtttcagaactagtggtcagcagttttctttgccggctgttgcaaggctggtggttctggcgttttccgcagtgtgttgggaggagtgtgagatgccgcggtgcagttgtgtgcggcccctgtggccctctgctgttgcgttagccattgtctaacacgtgtgaccgcatggatggtgtcctcatttaatttgaattttcaccagcactgcctaggtagcca

SEQ ID NO: 3554 - DNA, 1418 bp, Artificial sequence
  DNA replication origin
tccaggggagggcagcactgggctcgattgctcgggtgaggcggacccctgccgtactgtcttcatcgccatgtccctgcagtggctccgtgggccgcgtggcgatgtcccgagaggacaaggaggccgccaaactggggctgtctgtgttcacggtaatcccccgccccgcctgaccgcagcaggggctaacaggggtggggcggggcgggggcactgaacggagctccccggggcgctgcggggcgtggtgtggggccggcccgcagactcctccgcagagctcgcttctcccgcagcatcaccgcgtagagagcggcgggcccgggacctcggcagcctcggccaggaggaagccgcgggcggaggatcagacggaaagcaggtgaggctgtgccacctgggctagctgtgccccggggtggggggtctcgggaggaccggagcggctcccactcgggcaggtggcagcttctcttggcgcaccggcccggcgggtggcctgccctactttacttcctgtcccagttactcctaggtttttctctaggggagtttctcgggtcacccttgaagagaggtcctaagtactggcagtggtcgggcgctgtgccgtgggagggcactcaggacctggggcggggccttttcctgccgtgggtggcacctccagggcttctcctggatggtgagcctgggcctgaccctaagagtggcctggtgggtgcaggtaggaaggtgtcaacctgccaagggcacggctggggtggggcaggggcgtgctgtggagatggggatattgcatctgtttctaacccacgtagccactggccacgtgactacgtaactgaggagtggaatttgtagtttgatttaactgatttaaagacgcacttgtgggtggtggcttcatctggatggggcctgcttgtgttcactctcttggcttgcaagactagggtctgaggcacaccttgtatcctccttgtagttgtgagagccacaggaaaagcaagaaggagaagaagaaaaagaaaaagaggaaacacaagaaagagaagaagaagaaagacaaagagcacaggcggccagctgaggccacctcctctcccacatctcctgagaggtatgccctggtccatatctgcctcttgggggtgggggcctggttgactccttccgagtgactgactgccattggtctccccaggcccaggcaccaccaccatgactccgactccaactccccctgctgtaagaggaggaagcggggacacagtggggacaggaggagcccgtctcgcaggtggcatgacagaggctctgaggcctgatggctggaccctgctcactgctgttgtgggaccctgaaccctcccttcaccttgcttgcctcctgcctcggaagctccttgggt

SEQ ID NO: 3555 - DNA, 1002 bp, Artificial sequence
  DNA replication origin
tcgggttgcgggttgcaggttgcaagccgcaggccccaggcaactgccttcccggcgccatgttcggctccagtcgtggaggcgtgcgcggcgggcaggaccagttcaactgggaggacgtgaagactgacaagcagcgggagaactacctgggtgggtgcgcgcggtgggcgggctccgggctccgggctccgggatcccgggcgggcgctggactcacagcgtctacgtccgcaggcaactcgctgatggcgccggtaggccgctggcagaagggccgcgacctcacctggtacgccaagggccgggcgccatgcgcgggcccgagccgcgaggaggaactggcagccgtgcgggaggcggagcgcgaggcgctgctggccgccctgtgagtgtccgcggacggcagcggtcggtgcctgggacggcgctgccggggcagggtggggccggggccggggactgggggtcgggctgggcgggagcggggctgcggggactcgcgcgggcgggaccctgaggacgaaggctggagtggtgaggacctgtggtgggaggaggtccgtccgtcctgacgcctgccccggccctctcgcagtggctacaagaacgtgaagaagcagcccacgggcctgagcaaggaggtaactccccggggtggggggcgcgtggagggccgtgggtgtggggccgactcgagcgctccctgtgctctcgcacctgcaggacttcgcggaggtctgcaagcgggaaggaggcgaccccgaggagaagggcgtggaccggctgctggggctggggagcgcaaggtgcgggcgggtttccaggggagggcagcactgggctcgattgctcgggtgaggcggacccctgccgtactgtcttcatcgccatgtccctgcagtggctccgtgggccgcgtggcgatgtcccgagaggacaaggaggccgccaaactggggctgtctgtgttcacggtaatcccccgccccgcctgaccgc

SEQ ID NO: 3556 - DNA, 1583 bp, Artificial sequence
  DNA replication origin
gggccatgtgggcagggcccagctgtggagtctgaccactgactggatgtcaggtgtggtggagaggggatagcagggccaggtggacattgggcaggagtccaggacggctctgaggctctggtctgggcaactgtgaggatgaagcagccacctgtcaacatgaggaccaggtttgtggggaagacctggtcagttttgagcccattagcctgacaagccgtaggccacaggaggaggggtcaccagggtggaggttgcatggcctgtgcctgctgggtggaggcccagctgggggcactggtcacagtggtgtcctctgtgacagcagcgaagctggacccaggagggtggcggtcagggagtggaggggcagtggagatcccaggggaacccactatagtgggaggaggctgggtagtggagggggggggccaagtgagtgcacagagtggccgggcagctggctctatatgccacagggattgagccacaacttcagagacgggggctccagggaggctgctcaggaagtaaccctgcaaggcagagtcccaggcagccacacagcccatccacgtgaggtcaggcactgctcggtcacaaggacaggggcagggccagaggacatcccttgcaggctcttctcagcagagctgaaggccagcgggatgagcagagggccaggaacaagcttaaggggcaagggatgggcctgcaaggtggggacactgcccaggctcctcagttataagcactgtcatcacaggggcatgacagaacacactcccacacctccctggcaatcccagaacaccactgcaagaagtctttgtcgggcactccaggtgtcagagagacagcctgccaggtgggacccagtaacatcccaggacagggacaggaagcagtctgggccctgagctgtccaaaacctgggttgttgtgcgtgtggaaggtgcctgcacattagctggagctggtcctgagttaaatcagcctctggacagatgaagcagggtccgtggatctccctgggctgtgtgtaactgcagtgctctgcagaccccattaagagtcaaggacaaccagggctggctgctcctctggggaccctcccagggcaggaccttccctggggcagcctgggaatgcagggccagggcagggagctgcaggctgtggtccagatggtcctaggactgccccaccaaggttgatgcctgagtcccagaacacccagcccctcctaggaaccaacctgagggccactgtgctgtcagaagggcagtcaccttggtgcccctgaggctgggagggcagagcttagagcttggtggtgttgggtactgcccacatggttgtccacgtgcaccacagccccagagcagtgtccaaaacccacaggtttgatctacaccaaccctcaccctgctagtccactgagctctctctgtgcttgagctgatgcctttcaggggatgagctgccagtctggggcacacaccaagtggggagacagacacagactccaggtggcagcttcaagaacgagtgatttaagaacagccctcccatcttag

SEQ ID NO: 3557 - DNA, 1719 bp, Artificial sequence
  DNA replication origin
ctgttcccggcccacacgaggcgccaacctgcggccgccacagtcgctgcggaggggtctgaggacaggcggtcctgactcccgctgcccggtggaactaagaccagggacgaggccacgcaggagatcaaggtactcactgcgttgggtgctgctgcgctgcagcccacgacgtcactggcaggcgctgcgtcgcgcggtatgacgtgttccatggcagggagaggcaagagtgggcggtgagacacgaagatatacgcccctgttgggcggggccggcgcggcgtgatgtaatctcgggggcgggacgaagcctaggtgggcggggcctgcgggggcgctgtggcggtacaagaacccaggcggggccggcgagcaggtgacctccgtccctaccgggaggaccagggcgggccggcgaggtcgagggggacccgcgggtctgagggaggacggagtgggggagtgctgagggaggacccggggtggggagctgagggaggatccgcagggctgagggaggatccaggagagctgatagaggtcccggagggctgagggaggacccaggggtcctgagggaggacgcagggggctgagggaagacgcaggggggctgagggaggatcctcggagctgaaggggcatcagctgggctgagggaggacccagggggactgcgggagcacccgggcgggggctgagggaaggaggatccgcggggctgagtgggcaccagctgggctgagggaggatccagggggagctgcggaaggatctgcggggctgagagaggatctagaaggggtgagagaggtcccaggaggctaaggggggaatctgcagaactgagggaggtcccagggggcagtgagggaggatccatgggcgctgaggtgggaatctagggaggctgagggaggatctgtggggatgacggaagttcaaggggggctgaagaggcacgcagcgggctgaggaggacctgagaggctgaaggaggatccgaaaggctgatacagcggggctgaggggggatccgcggggttggcgggggctgagaaatgaccctgtagttcacagcaaaatggagtaatttatgtcacaacgtaaccaaaatggagtggggagggccctaaggaagcagctgtcacgcatttctgaaatgccagagaggctcgctattaccttgtaaacagagcttattccgggcatttccactggcctgcagtattccagatgagatgtttggaccagggcaggcagatagcatcgcctatctgcctcagcgaaccagggtcactttgtgcaatgagttcatgagaccagggcctttgttttgtgaaagttacaaataaggagtgaaatcactttgtcaggcccagacaaacagggctgggaagaacaggaggctcaggcttagtgtctgagataagaattattcgcaaggactttctaaaaaccccacaagaaacccttttgtgtcattcacgggtctcctactttgacaaaatttagaccatctttaggactgcagtaattcagttaagatgctcggaataaacacttgcccagtaatggcagcgccaccaatgaactgaggacaactttgagctttggcgttgggcccctggaaccaatgaactctttctaagcagcttctgtgaaccgctcccttttcgctgataaaagttcccttttcactgataaaaagttccc

SEQ ID NO: 3558 - DNA, 1484 bp, Artificial sequence
  DNA replication origin
ggaggtgggccggtgcggcgctgtcacgtaggttcagtgggcggaagaggtggccccggatgctgcggcgcccgctggccgggctggctgcggccgccctgggccgggccccaccggacggtgagtacgacaagcgcgatcgcgagggtgactcgggtcgaggcggcagcggtccctgcgctttgcggtcgcccagtccacgccgcctccggatctcctcctagccgagacgccctgtgccgcattcaactgtgggccctgagaacgggggagctctggagggcggacgggctggcaacgcagcggagcccgggtcccggagggcggggcgctcctcaggagctgggcaggccggcagttatcgcagtgtcgagctgctccccgggcgtataggagcgctcggtgtcttcccgacacctgggcgcgccgccaaagagagcagctgggagtccctaccgctggcccggcgcggtgtgcgctccggttcccacctcaccctgcaagccttggggtcctgggcggatggagccggctattccggggctcccaggattctgcctactccgcggcacggcgcagagacggggacttggggaaacagcaggccttcccgacgcatgggtgtggcatttggggttcggattctccaaagccagagtccgggttggggttcttgaagctgccctgctgccattcttgagcgtcgccttagaagtatgccccagtaaggactggtgtgggaagcaggtgcctcaaagttgattttgaccctgcgtgtggtgggcctcggtttcgtctttgcatgaaagaggtcggtcctgaggccccgggctgggtcctgctctgctgtctttgggctcatggccccttcctgtctcaggcttgctctgctctttacctggggttgctgtcgaggaccctgtgcaagactcggccggtttttctttctccctgatggacagacccaaacatagccgcgcagcatcgtgaagggctggggccttcactcctctgtggctctggaagagcccgatttcctcaggaggtaaaggaatgttcctgtcccccccggggaaagaaagtgaaaatgaaagcgccctggctgctcctggtgtggtcccatttaaaacgaggttgctgaaggccaggatgcgtgctacccggatgtgtgcccagaaaccctgcagccaagagcagccgcctggaccaccagcctccccttcatccacctggcccagcccagagcccaggcccacgtctggtggtttgtgtcttacgagaggccaggcgggggctgaattctctcggttctcagaaggtcaagccctctgttagcatctcctcgaacagtgggccgggggcaaggtggtgactctgttcagtccttaggatggctggaagccagaaggaggagattatgccgccacagcagggagtgcctttccaggaaagcggctgctggggcagcatgggagcccagtcca

SEQ ID NO: 3559 - DNA, 1331 bp, Artificial sequence
  DNA replication origin
gcctgtggatgtacacatacatctgtttgcattaaccctgtttgcatgtgtgtctgagcatgcacgtgtacatgtgtatgcatgtgtgtgcatgggtatctgcatatgcatgtgcgtgttcatgcatgtgcacgtgtgtgcatgtgtacacatgtgaatctgtgggtatgtatctgagtgtgtgtgcacatgtgaatgtgtgtggctctgaggggtactgcacagatgtgaggaagcagggccacttccccaggaaccctgactgccccctcttcctgccccgggtggggaggcctcagctgcataaagaggccgggagcctcaccagcgactgctgctggtcccacacctgccgctgctgcctcccaggccaggtaccgggagggggccagaggcggagggagctaaggggtctcctgcctcagcgacccaggagcaggtactggccctggggcaaccgccagcagagggtgggcaggggagctgcaggagctctccttctttggagcacaggccctgctgcacagccctttcctgggcacttgcccaccttgggcttggctggtctgcggcatagctgtctctgagggtcgcaggtgctgagtgtggcctcacatcactgggtctataacctcgctggacaccgtccctcctggacggacgactggcttcatcctgaccccagctagagatggtctgggttgagaccatggaggaccaggaacctagactgggcgggcggagccctgggaccctgggcacctgagaagggcagcgggaccagccgggggctggagggaggatggaggattttgtggaggtggagggaccccgacgcccctgtccagggtgtggagggaccccgacgcccctgtccagggtgtggagggaggcagagcagggcctctgggggccgaggggctatggggattgtggactggtggcactttggggtctgggagctgatggtggtgcaggcacggggggctgtgaaggactgagggctgatggggctgcaggggcttgggggctagggagctggaggggccaggagggattgagtggctaggcaggctggggagaccctttggatgctgaaactctgtgggaccctccccaacaacctggatgcggctggggctgggttggtggccatgggtgcagtggacactgagaccaccagtccccacacacttgagtggtgcttgcctcagtgtccccatctgcctcatgaaggcaactcacccagctggggccctgcatctgcacgagcaggggccggatcaggtgggggcttccacttccgtttaaggcggtaagctccacgtcat

SEQ ID NO: 3560 - DNA, 798 bp, Artificial sequence
  DNA replication origin
tttccaccggagccccccaaccctcctcctccctggcccagctcgcaagccagcgccctcagatccacacggtggtcttcccgtccctgctgctggcactgcccttctcggagccagccctgggcttggctcctggccgctcgtgggtgccgggccggccctgctccccgacagtgcccgcagaggtagcactgcccgtccgggacgcgggggcgcctgctctggggggcccccgggaggccgcagggaggccgacgcacggcgaactgtcccggtcgcggtccccagccgctgccccgtcgcgcagcgcctgcagggccaggtttgccaggttctggtcatgcgcccgagcgcgctcggccgcccgcaccaccaggctgtagtcgggcgggcaggccaagccagcggccgccgcagggaaggcgcagggcgggggccgcggcgcgggggcgggggcggaggccggggggccgcggcggccgcgcaccgcgtcctgcgcgctgcccaagcccaggtgggccatctcacagaggttgagcagcaggcacaggcagctgaccacgtacataaccagcaggaagaccgtcttttcagtagggcgcgacacgaagcagtccaccacgtgcgggcagggctggcggctgcagggaaagaacggtcgcacctcgaagccgtacagcaggtactggcccaccaggaaggccacctcgaaagctgccctggccaccagctgggccacgtacacgcgcatcaggccctcccgctggatgcgcctccgcccatcgtgttgcccggtcg

SEQ ID NO: 3561 - DNA, 1498 bp, Artificial sequence
  DNA replication origin
ttcctgctggttatgtacgtggtcagctgcctgtgcctgctgctcaacctctgtgagatggcccacctgggcttgggcagcgcgcaggacgcggtgcgcggccgccgcggccccccggcctccgcccccgcccccgcgccgcggcccccgccctgcgccttccctgcggcggccgctggcttggcctgcccgcccgactacagcctggtggtgcgggcggccgagcgcgctcgggcgcatgaccagaacctggcaaacctggccctgcaggcgctgcgcgacggggcagcggctggggaccgcgaccgggacagttcgccgtgcgtcggcctccctgcggcctcccgggggccccccagagcaggcgcccccgcgtcccggacgggcagtgctacctctgcgggcactgtcggggagcagggccggcccggcacccacgagcggccaggagccaagcccagggctggctccgagaagggcagtgccagcagcagggacgggaagaccaccgtgtggatctgagggcgctggcttgcgagctgggccagggaggaggagggttggggggctccggtggaaacctgcgaccccttctcctcagccttctccttagccggtggcctcaggcagactctgcccagaggggcagccaggctgctcagggaaggggctgaaagcggcagaggagtgccctggcttggtcaccactggggccaaggtggggtggagagaggcctaggagccagaaagggccctctgctgtggtctgaaccccagggggagtggggcattgactccacccctgtcctgagctggaataggtcctctgggatgccagctctcccctttgtgcttccctgcagcaacccatggagggcccagggtgcctggtatgggcatcagttggtgggggtgcgggggtgcgtgtccccattccctgcaacagcaaatggggctccttcttcagccctccccttcccagccccaaactgagacagactgggagctgggagcctggggtggacaggaccataccctctttgagcttctgcgatgccggccttccgttcctctgggaggcttgaagttctgcaaagatgttgatatgccttgcagcttggacccaatgggtggtggtcagggcctgggggcttggccatgctgggggaatggggctctgggttcctgcctgtggcctgtctgtcctcctccctaattcagacccagcctcaagaggaaagggagtaaaataaaactaacttgtttataaccttgtgtgtgcatgtgtatgcatgtgcacgtgtggctatgtgtgtgactgcatgcacatgtatgtgcattgtgtgcatgtctgggtgtatgcttatatgtgtatgcatgggtgtgtgtgcatggctaccacatggggagacatggcttagctccaggctggctgggagaggagacccctccccagggactggcaggggagtatggtcacaggcgagcccctgtagct

SEQ ID NO: 3562 - DNA, 1210 bp, Artificial sequence
  DNA replication origin
tctccttatcagcaggcaggggactggggcctggcacctgggggaggaaaccccgcccctgtcctggcttcagggaccaggctgaagcaggggccaggggagtgagaactggaaaatgcctgggcgtaggggtcgcagcccctgcttcccaggtactgtgggggggttgggggaaggtggtttcctgttattctcgcctcagggcttcctcccttcctagaggaaggagagtgccactgccctattctgagggagtctctgagcagctggcccctcaccccactatgcactcccatgagcagccgagagttttggctgaggttgtggaaacggatggaggtgagacatggagtcccatcccgccagcctgctccagcaccgcctgctctgggtgtgtcctgctgtgtacagggctgggcccaccagcgactggcccccctgccaacctgcctcagagctcggaagatgcaggacagaggagggaggggggctgtggtgtcagcagtgccaggctcagctcatcaccgtcgtggcctccccaggtggctggggaaaccaaggcaggggttttctaaaagtgactgatcaagcgccaggagtgcgagatgggtttagcttctgggggtccgcagactggagcaactaagataccacgtcccactgtagtgggagatgccaggcctgcgtggtggtgtggggctcaggcatgacattgtgggaacgtccagattatccaggacttggtcttagagggaggactagcagatggcgtggaggcttgggcttgcacagcctctcctggctagggccatcccgctgggagggtgtggtaacagagcctaagcccaccagcagatgctcacaaacctgatgtggcccacccacccccaaatgttcaagaagggaggtctgtcccagggtcccgtctccccttctcttgtggcaatccagcttcccactgggcatataccctctaataccagcagaattgtcccctcgaaactcctgtgctgaagccctaacctccaggaacttcagaatgtggctataattggagacaaagcctttaaagaggtgattaagttaaaatgagttcattggggtgggtcctaatccacggtggctggtgtccttaaaagaagaggagattaggacacagatgcacacagagggacagctgtgtgaggacacacgggggagatggcatcca

SEQ ID NO: 3563 - DNA, 1017 bp, Artificial sequence
  DNA replication origin
gaaagctctgtttcctttgagtccattcgaactgaagtggcccctggtgttggtggtggcttctttggggtgggggggcctaggcaggacagattcggagccagtgggcccggcccggggcaccaggttgccgcacgcctttcctgctgcctgtgcaggggtggaagcaaattcctcctctggctgaggaccaggctgacgtgagcccagaggaactcgacccccgcccgtgggtgttgtctgcgccactccctgccccgggtttcatcctgcctgccttccgctctgtccgcatggggctgcccggggggtaccgggtcaccctcaggaacgccaggctctggcagaggaaggggtggcggctgcagccagtggctagggagcgcattctaggcctggcctatctcagtcaggaagctggcgtctggcgggggactgaggcccagggaccttgggggacccagctgatttgctccaggctcctcaccatgcccggagcctcgcctggttgggtaggcagggtccggggcctcacagggcttggggcaggtggggatgctgtgaggagggtccagaagggcaagcgggagctccagggatgaggaagctgcagtgaagagagtgggctaacggcagggcctccatggccacatccagggcctgcgggaattcgctgactgcccaatgtcacctgagcccctaaggcatgccggctgctggcccaggccctcaggacacggcagggagctatggcagagactttctgcttggccaaactccggctgggatctggaactttctcctaggcccatctgtgcacttgcttggaaaatccagttttagtaagagccctactgagtcagtttagccagaaccccacaccctggatatctcaccctcgatgacatccaaccaggtccctcatcctccaccatcacctggtgacgtctgatcaccctgcctgcctagagcaaggaccctgtgaggtgggtttagccagacccctcagccctgatg

SEQ ID NO: 3564 - DNA, 986 bp, Artificial sequence
  DNA replication origin
cccgagcgccctcccagcacgcgctcacccgtacaagatgacgtcatagagcgtccggccctgcacgttcaggaagtgggcgtagcccgcgcgcgcagcaggcggggcccccgcggccgcaggactcggaagcggcagttcattggtcagcagccctagcaggaagggcgccgcgtcggggccacgcacgcgcagcagggtgcgcccgtccagccggaagcaggcccaggccgctccggccgttgggtcgccaccaggactgcaggagctgtgggccaggcggcaccttggggccgcgcgcagccgccagcgccagaccgggccgccgcgccccggagtggcgcctcgaagcagcgccgcggtcgccatcttggacaagagtggggcagcgggaagggcccaaggaagcgggaggggcgggtgccacagcggcccctggcggtggccgccggagggaggcgggaaggggcgggcgcagagtgcgtgcgtgaggggtgaacggaacgtgcgtgcctgaggggcggagcagcgccggttgaggccgactgagagtgcgtgcgtgaggagcagggcctcccgagctggaaggggcgggcggggcgagcgtgcctgctgggtgggtggggcatgcgtgtggggcggagcatcgtgcgcggggtgtgtttcggggcggggactcggcctatccgtcagcacgcaggctccaccctcggtaggtaacgaggtttctgccggcctcttaagcgccatcccatgtcccattcggtggccttcctcgttttcacccacccatgtcgggcaccgtcactcatctcgagaacctcttcatcctcccaacctgaaactccctgttaaacacccactcccgaggccctggagctcccattgtaccttctggctccatgagcgtgcctcctctagggacctcacaggagcagaatcctacgggatttgtcgtttgcgacggcttatttcactcagcatag

SEQ ID NO: 3565 - DNA, 1432 bp, Artificial sequence
  DNA replication origin
gctgcttcgaggcgccactccggggcgcggcggcccggtctggcgctggcggctgcgcgcggccccaaggtgccgcctggcccacagctcctgcagtcctggtggcgacccaacggccggagcggcctgggcctgcttccggctggacgggcgcaccctgctgcgcgtgcgtggccccgacgcggcgcccttcctgctagggctgctgaccaatgaactgccgcttccgagtcctgcggccgcgggggccccgcctgctgcgcgcgcgggctacgcccacttcctgaacgtgcagggccggacgctctatgacgtcatcttgtacgggtgagcgcgtgctgggagggcgctcgggggcgggcacccaggggagtggccagggaccggcacccagggacagggcgggcgcccggggcctgcagagggcgtggggggtgggcacccggggagggccgggatggggtggaagctcaagggtgggtgggccagcgactggcactcagggtcaggcacccaggagattccacttgggatggacacccaggggaagctcacccagggcccagcacccgggggagggcacccagaggagggcttggctcaacacccagggatgggtcagcgactcatccaggggaggcctgggggccagcccaccatatcagagcagaggcgtctctaggtgggcacctcccaagtgggccatctggtgacccttctccctccgcagggacaaggggttcaggggccccgcctggtggcagagctgtgtttctgagtgacagcttgtggtgacactcccgagttctgtttaccttgtgtttccctgtgtctccccatagctggtcacattggcatttggctcagtcatctgtgctgacatcacgactgtcagtgatgttcatgccgggtcagggccttgactgcttacagccttgggtttcccttgcccagcttccagggacctggatccctgaaacctccgcccggtggagtggatctggttcgcggccgcctgcctgctgtccctgctatggcggacccggttcttgttctcttcagcttactcctgtgttttggtttcaggggatggacacctttttaatgacttcctgagctacgtggggtgaatttttggactcattgtgtctctgctagtggctttacctgatatcctggctgggtgtaaaaatctagcttggaaattgtcaccgacaatgttcacatcacaactttgttttctcgctgccagcttttctgagaagtctggtgccgttcttatttgtatgtgaactgtgtttttctcagaagcttttctttattcttgatgtcgtgaaatgtcatgctgatgtgtcttagtttgggctttttccatatcacatctctgggcacttagtgggctctttaaatctagaaccagagttggtgaaat

SEQ ID NO: 3566 - DNA, 2152 bp, Artificial sequence
  DNA replication origin
gcgagccacgcccacagcgagccacgcccacagcgagccacgcccacagcgagccacgcccacagcgagccacgcccacagcgagccacgcccacagcgagccacgcccacagcgagccacgcccacagcgagccacgcccacagcgagccacgcccacagcgagccacgcccacagcgagccacgcccacagcgagccacgcccacagcgagccacgcccacagcgagccacgcccacagcgagccacgcccacagcgagccacgcccacagccacaccaggcagcacctcccaaggcgcgcatcacagctagatgcgggcaccttggagaccagcgcagagtgccgcgcccacagcaatgcgagggtgcgtgcagacaacgcacagcaggccaggcagggtacacctggaccagcgcatggaaagccctgcccacagccgtgcgcagctgagcctccggagctctcgtctaagcaggcaaagacgagctcacaggggccagcgcagacagaccctgtttgcccagggactggcagaactgcaatagcctgcccgagggcatcatccggagtagtcccagagcctagggcagaaatgacaacagtccgctggatgtgggagcagggatgggcagggccccgcaggggaacggtgtgcacagccactgagaaccagacctgcctgttccagcccagggaagccatcgaggagcccaagggtcctaaggtgggcaggagggaggagcaaggagcccaggaggttgtcagggaggtacagcatgcctgaggcccactctgcccatgcccaccacctgcctccccaagccaagtctcagaacccaatcggggccccagagccattctgacctgcactccaggcagccctcctcagaggatttgggcaggcaccacaagaatgacccctgaccagacggatggtgggaagaggagaggctgggcagcgtggggcatgtcgggggggggggcactaagtggagacacctggggtacagccacctccatggctggggttgattgcaggtatggactgcacagggcttcacaggctggtgggagctgagacagggaggtagtaagacccccagagggccttccagagacaagcccaagagcaggtggcccagccccttccagccaggagagggctcagtccttgccagttgcccagggcttcaggtgccaagcaggggcctgctgccctcatctctgcagtctcactctaccctgtggtcatgcccacgtgccagcagccacggagaacgttcacgctcatcacccagaaccagtaggcacaggtctcactgaggaccctgccgcagggagggtgggcatagccagctgtgacagccagtgaatctggcccacactccaggacagcggtcacaggacatcaaaaacaacacccacaagggaggggaacatatgtcatttacacacgtgggctaagatgacgggaggaacagcaaggacagcacagaggggcagccgcaggtgtgccgcggaaaggtcaccacgccaccagggaaacacaggcgatgtggcccagacagatgcagtggtgaacctgaacactggccagcatgaggagaaaccaggtcactggcatgctgctggtggggaggcaaaacgggtggccctctggaagacagggtgcaggtcctcacaacaccaaacaagcaactactccacgacctggccctctcacttccgggcatggatcactgagaaacgaagactgcagctcacacaaaacctgcagcgaaagctcacagcagccagctatactggtaacagccagaaagggagaatcaaggtgccactacaccatgtgggacttctcagcaagaacagggagctggagatggacagaagtgggtggatctgagggcactatggtgagggaaaagggtaaggctaaaaagtgacaggccgatgcatccatctatgacactcctgaaatgacacgattttacagctgagaacaggttttggggtgttgggggtgcccattcaggggcaggagcaggaagccgcgtgggcctgagaatggccacagatattcacacgtgataaaactgcagttatacacatgcgtgcacagacgcacaaagtaagacacacaaatccagag

SEQ ID NO: 3567 - DNA, 1192 bp, Artificial sequence
  DNA replication origin
cgtggctcgctgtgggcgtggctcgctgtgggcgtggctcgctgtgggcgtggctcgctgtgggcgtggctccctgcgtgtggtgacctgggcgcttgccttaaaggcgcagccccttgtggctgagggcagagctctttgcgttggtccacggtgtgctcctctgcccgggtaaggcgcgctccctcatgcagccctttctggcccactcagttggtgagctgccatgcgcccctgcctctctccctgcaggctccaggaacactcggaggtgtctggcttccttctggagtgtgacagctcggtgcagggcgcgctgcagaagcacctcgcgctatacaggatccggcggaaggtcacggtggagccgcacccggagctgcgagtgtgggcggtgttgcccagttcccctgaggcctgcggggctgcatcgctgcaggagagggcaggggctgccgccatcctcatccgcgacccgcgaacagcacgcatggggtggcggctcctcacccaggatgaaggcccagccctggtgcccgggggccggctcggggacttgtgggattatcaccagcaccgatacctgcaaggtatgggtggggtgggcacgctgggctggattgcacgggtggagctggacgatgttcaattctcgctggtttcccccctccaatccctgcaggcgttcctgagggggtccgagacttgcctcctggggtggccctgcccctggagtccaacctggccttcatgaacggcgtgagcttcaccaaaggctgctacattggccaggagctgacggcccgcacccaccacatgggcgtcatccgcaagcgcctcttccctgtccggttcttggacccccttcccaccagtggcatcacccctggtgccacggtgctgactgcctcaggacagactgtgggcaagttcagggctggccagggcaacgtggggctggccctgctgtggtcagagaagatcaagggtcctctgcacatcagagcctctgagggtgcccaggtggccttagccgcatctgtgccagactggtggcctacagtctccaagtagtccgaagccttggctggcgcaggctgatggggaggctggggcctggggcctttggcctctgtccagggtcttcccgtcccatctgtctgctgcgcctactgggtgggagccctggttt

SEQ ID NO: 3568 - DNA, 1162 bp, Artificial sequence
  DNA replication origin
cagtggcatcacccctggtgccacggtgctgactgcctcaggacagactgtgggcaagttcagggctggccagggcaacgtggggctggccctgctgtggtcagagaagatcaagggtcctctgcacatcagagcctctgagggtgcccaggtggccttagccgcatctgtgccagactggtggcctacagtctccaagtagtccgaagccttggctggcgcaggctgatggggaggctggggcctggggcctttggcctctgtccagggtcttcccgtcccatctgtctgctgcgcctactgggtgggagccctggtttccatctgggaaagtcccccttgtaggtgccctgcctggccccacccatgctcaggggccccaggcacgtgggttgttttctccctggacttcctgtggccccagaggagcccaccgtgtgagtgctgggctccagatggcgccgggtcccaatcgtggctccacacagggttgtctgggaggacgggacggtgtctctggccagcactggcagcttccgggccttgtaccccactctgcctggcatgagcctcatggggggttggtccctgtgcctggaagcggggtggtgtccagggtctgcaggctggggctcgggctttgggagttgtttcactgtgcttgcttccagcatgtctcagggtggggctatgcgtggtctagaggggtctggggcattggatcaggtggcatgtgggtgtctacacatcgagaagcacacagggatgagccactaggtatcccatgctggaggcttgtggaaggctgtgcccatctcccatgtttccccacctctgttcctcctcagagccctccaggagcgtggggtgggggccagcgcagggctcaggagccagcagggcagagttctgcctgtgtgtgctgggttttggcatagcctgtgtttgcagtgagagtgacttgctgtcagtcacggggcacagcctcctgttcacccactggcttcccccttcccactgaagtgtgagctctatgtttcagggcatctattaaagagtgagccacaggcagccccttgggagctctggtttcatttgggggagagggaggtgggggcttagtttttgtgatctggctgactggaccccgggaacagcgctc

SEQ ID NO: 3569 - DNA, 1834 bp, Artificial sequence
  DNA replication origin
agcatttacattcccaccagaagtgtgccaggttcttgtcatactgcgtcctcgccagcgcttggtgctgtcagtcttcttagtttccatttagagattcagtgtttaaattttgaacgtcttgggtgaacaccttggtttgagaaaagtaagaaaaagggtctgtctggctatgggccatggagacccagggcagtgctccacgtgccaaccctggggcagggagcccaagctaggactgtgactgtctgggctgtgggcatctgaccatctccagtgtccccgtctttgatttccctggcgatggtgctagcttagtttgtgcgcatcggcatttgtgggagaaatgaaggattaatacattttgttttatgtcagactctctcagtgagaagttctcagggacaataatagcagggggtcctgctgaagaaaaactgggagatggctgagctctggtccatctttcattgattcattcatttcttcattcattcaaccatgtattgaatgcttatagccaatgaaaataaagtacacagtatattttattgctacgggctctatggtgaaaaatgaagcaggaaagcgggacagggtgtgtgtggtggggacggggtgtgtatggtggggacggggtgtgtggtggggggacgggaagtgtgtggtggggacgaggtgtgtggtggggacggggtgtgtgtggtggggacggggtgtgtgcggtggggatggggtgtgcggtggggacggggtgtgtgtggtggggagatggggtgtgtgtggtggggacgaggtgtgcggtggggacggggtgtgtgtggtggggagatgaggtgtgtgcgctggggacggggtgtgtgcggtggggacggggtgtgtgtgctggggacggggtgtgtgcggtggggacggggtgtgtgcggtggggacggggtgtgtgcggtggggacggggtgtgtgcggtggggacggggtgtgtgtggggggatggggtgtgtgggggaggacggggtttgtatggtggggacggggtgtgtggtgggtggggtgtttgtggtggagacagggatggggcgtgtgagggcactggaggtgtggatagcagttggatgcccagctgggggtaggcagtctggagggtcctgaatttgggagctcagatgtgtgggccacccggacatgctggagaagggcatttggggaaaacggctctgaggggtggacacctgccctctggcctcaccagctgtggacaggtgtgtgctgattgtgtttctggtcttttaaggacatcgtgctgggctgcagatgttgctgttttttaattgaaactttattgcccgctggacatggtggctcatgccccctaatccccacctaaccctaatcctaatcacagcactttgggaggctgtggtgggaggatcacttaagcctaggaggttaagactggagtgctgtacaatcgcaccactgcattccacagcctgggcaacagagggggaccctgtctcaaaaaaaagagaaactgctgttgccataatagttgtaagaaataatacagagcgatcccttgttccctctgcccaacttttcctaacagtgagtctttgcagaacaccacagtctcacacaaggacatggactttgatgccatccggtggccttacttagcctccgcccatcttgcttagcatccccaggaagatccctgtgtggccctttcacacctatgtctctaacgccatcttatccctaatccctggcaaccatagcccatcttccgtttctagaattttgtcatctcagaaatatcatatccagctgggca

SEQ ID NO: 3570 - DNA, 900 bp, Artificial sequence
  DNA replication origin
aggagcctggtgcaccctgcttggccaggcccaggccactgcccacccgggggctctcctggaacactcagctgggtctcagagtcatccttacatgggagcacaggagtgtcctgtgagaacccagcctgaccggggggagggaccagccctggggaggggatgctgatggcaccctgcttcatacccaagaggggctggccctgtccccacggccctggccaggaagaagtgtggaccgggcactgggcaggccccaacgggggaagagcagccagagagggccacccagtgggagccctgtgcctttccatggagggcccaggtccagaggaggagccgagtctctacccacagaggcctccatggagggaggagggagccaggacggcatgtgaggcgggaccctgcaccccgcacctgggggcatttatcctgcggtgtgctgccaacagggccccagctaccagcaccagggagccaaagaaggggccggccgggcaggatctggagctgggcccaggaggacagctcaggctgtggcaggagggagggtggggaagatgggggtgctcagaatctgctctgtgcctccaggcttcgccccatccctgatccagtgccaggcctctatgtgtcctcacagcgtacctcaggctcttccgggcaatggccaacatctctcatgtgtcctcaatcagaaggagggtgaggggtctctggagtaacggttatgccattctgcagccttatctcatgactgatcacttccaaaagctcacgttctaatcctgtcaccttgggggtgagcatttcaacgtgtgaatctccgggacacacattcagtccacagcaccagggagaaaggaaaggctggaaggagagcccactcccccacca

SEQ ID NO: 3571 - DNA, 1684 bp, Artificial sequence
  DNA replication origin
cagcataggtgctgcctgcacagtgagtcagcagactggtgcccgctgcgcagtccagccctgctccagcctcagactgcccaaggggattaagggggattaactacctgaatcacaggaccaggaggagggcctgggaacgttgccctggctcagcccacagtgggcagcccaggcccagaagctggtggctctggcctgagagagagtacaggcgaggtgccctggcgggggcctctccaccatggggtggttgtgcctgccagggctggagggagttaaggcgccccgggccagcccagtgccagtggggcccactcacacccgctgttcctacagaagagctgcataggcacggtagtgtcaacccacaccatctatatggggggatctgtactggggcggctggcctgctgggctccgcctggggtggtcaaaggacagcatcacctggggcctttggcactggtgtccaccctcagccctgcagcatgtccagctggccagtgtggctgagaactgtggggtgaccaagttgggcctggctgacccagcccagctggtctcagcctggaggtctctagcccttccagggggatgttactggccttgccagctccagactctggggtcccccagctatgctcccaagccagatccctgactgtgccctgcccttgcatcccaatcccaccctggggctcagtgggggggcctgggagcaagcagctaagtggtttccagtccttcccgctcatggataaagagcatgcccctggggaggagggaggtgtgtgaccctgcagaagaggtgaggcccctctgcaacaagggcagcttcaggccggactggcccctcagtgcaacctggaggggctgctgaaggagagctgcgtaggggtcggggggaagaggagggagtaagggctttgcccagggcggagggtgcatctcacctagaagaggctcaaaggggagcctgccagggtggagaaccggtgacctccttgtgcgataggcagaggagacgggcatgagaccggtgcccatggtgggcctcctgcacccaggcctgccggggctcagcgagcctccccttcttgatgtgggggacacacaggccagctgaagttttaggcccgagaggcagcagtgtgtgcggtaggagaaaggataccaccccgcaggtagggagtggcctacagtgcaccaggcaggtctgcctgcctcaggaaggtgcagcaaagcttgtaggctgggaggaaccaaaaatagcgggcactgcgagggagggggccctgcctggttgctagggggtgtaggtttgggacatgtgctccagtaactgcagctgaggcagtgggtccctgtaggtagggagagggaaggagatgttctcagcggctagaagagccgtttgcaggtgaggttaccaaaccccaaatgcccagaaaggggcaagtctgcacttctgggtcacggtgccaaccggtgatgcttcctcagggcgcggggagtgggggggaaataggatgtgtggaggtgttgaactgggttcctcaggcggcacggtggggtgcacccgggcctcattccaatccccactaaggccatccccacctacttgcaggtccccgccgccaccctcatggatcagccacagttcagcggggcgccccgcttt

SEQ ID NO: 3572 - DNA, 1454 bp, Artificial sequence
  DNA replication origin
agtcccagctcggtcccacaagacccctgcccactccgtctccccttccccctaatcaccaccccgtgcccggcccgagcttgctcctccgcccccaccttacctgcccttcccgccccagtcccgcccctgcctgccccagtcccaactcgtacctcgcaagcccagtccgtctgcaccctgcccgcccccgtgcccgcccagcccgtgcggcctggctcccccctcccccgcccccggctcccttctcggtgcctccttgcccccgctacctccccgaagccgccctgtgccccgccccgtgccccgccccgcctgccttggactgcgagctccgccaccgtgcggctgccctctggcgtctcgcagatgtacaccgcgtcgtcgtcggccgagacattgcgcacggtcaggcggcgctcggtgccctcctcctcgatgccgtacttggcgctcgcccacaaccgcgtctcctccttgaaccacgcggcctcagtggacggctggggcacctcacataggaacgtggccgactccttctcccgcacctccagatcttgcagccgctttttgaagggaaccgcgggctctgccaggagagaagactggtgagaggggcggggccggagggtgcaggacgacggcggggtgggaagggggaaattgggggattgtgggcgggaaaggagactggaggatgcagaggtgagggtgtgggaaggaataggggacaggagcagaggggctgggaggctggaaaggagagggtgcagggtagaggagtgggctggggagaggagcgagcaggaggcagaggggctaagggttgggaagggcgcaggggaggagacaggaagttggggggcgggggagtagaagagcagaaggcagagtggtggaggttgggttgggagcagcgggagggagagggcggggctgaggaggtgggatcccctgcggccccgcccctctcacacctctcgcccctgtctgtgggccagcggtggcgggttgggggcgcggcatgcaaagggggcggggcgggcaggggactgggtggggaaagcgggttgcgggtgtttagaataggtcgtggggcgtcgcccgcattttgcgcaccaggaacggacacctgcaaccctggattccacgaccggacagacgcgggtgggaaacggcagaccgcaagggcgaaaggacccaggtgcacgggttgcggaggagcctgggcccgcgcgccccgcacccaggagctcaccgcgcactacgaccagcacagagctgtaggtctggcccacgaggttggacgccgtgcaggtgtagaggccgcggtccgactgcttgcagaagaggatcttgagcacgaagttctcctgcgcgtcctcgtacaccacgtggcgccggccctcggtcaccagctggccgtccttcttccacaccgtctcgggcttggg

SEQ ID NO: 3573 - DNA, 1747 bp, Artificial sequence
  DNA replication origin
gcccacaatcccccaatttcccccttcccaccccgccgtcgtcctgcaccctccggccccgcccctctcaccagtcttctctcctggcagagcccgcggttcccttcaaaaagcggctgcaagatctggaggtgcgggagaaggagtcggccacgttcctatgtgaggtgccccagccgtccactgaggccgcgtggttcaaggaggagacgcggttgtgggcgagcgccaagtacggcatcgaggaggagggcaccgagcgccgcctgaccgtgcgcaatgtctcggccgacgacgacgcggtgtacatctgcgagacgccagagggcagccgcacggtggcggagctcgcagtccaaggcaggcggggcggggcacggggcggggcacagggcggcttcggggaggtagcgggggcaaggaggcaccgagaagggagccgggggcgggggaggggggagccaggccgcacgggctgggcgggcacgggggcgggcagggtgcagacggactgggcttgcgaggtacgagttgggactggggcaggcaggggcgggactggggcgggaagggcaggtaaggtgggggcggaggagcaagctcgggccgggcacggggtggtgattagggggaaggggagacggagtgggcaggggtcttgtgggaccgagctgggacttgggccggcgggacaggtaaggggttgcgcgggggagtgaatcggaggcagttgggaaccgggagacagggggcaagcggaggagcgagtctggagcggggcgtgcaggggctggtctgactggcccggctccctccaccccaggaaacctcctccgaaagctccctcggaagacggcggtgcgcgtgggcgacacggctatgttttgcgtggagctggcggtcccggtgggccccgtccactggctgcggaaccaggaggaagtggtggcggggggccgcgtggccatctccgcggagggcacgcgccacacactaaccatctcccagtgctgcctggaggatgtgggccaggtggcctttatggctggcgactgccagacgtccacccagttctgcgtgtcgggtgagggcctgagggtgctcccaggatggcatcgcttccctgctgtctccctggtcccagtcccctgccctccattacctcagctctctgggcttcagcctgctgtaccgagggccgccgggcaagaccatagccctggccctccaacgttaggctccctgagcccccgcgcagtctttcagctgcaaccagagaagtggctgcaggtctggggctggaggttgtggccagtggtccaggtccccagagcagccccaagagagctggggatcctgtgacacccctccaggtgattccagacccagggctcaggaagaggctcccagtagttgacctctgcccaccctctacacagcccccaggaagcctcccctgcaaccccctgtggatcctgtggtaaaggccaggatggagagttccgtgattctcagctggtccccaccaccccatggggaacgccctgtcactatcgacggctacctggtagagaagaagaagcttggcacctacacctggatcaggtgccacgaggctgaatgggtggctacacctgagctgaccgtggctgatgtggcggaggaggggaacttccagttccgagtgtccgctctcaacagctttggtcagagtccctacctcgagttcccggggactgtccacctg

SEQ ID NO: 3574 - DNA, 955 bp, Artificial sequence
  DNA replication origin
agaggctcccagtagttgacctctgcccaccctctacacagcccccaggaagcctcccctgcaaccccctgtggatcctgtggtaaaggccaggatggagagttccgtgattctcagctggtccccaccaccccatggggaacgccctgtcactatcgacggctacctggtagagaagaagaagcttggcacctacacctggatcaggtgccacgaggctgaatgggtggctacacctgagctgaccgtggctgatgtggcggaggaggggaacttccagttccgagtgtccgctctcaacagctttggtcagagtccctacctcgagttcccggggactgtccacctgggtaagtgggacctccctgttacaacctacggggctgctcacctgccccggaatcccccaggtccagcttcaggggaggccagagtggcctcatggggaccttctgtggggaggggggctgccaaggccttgccctggtgcagtgtccgtggtgggaaggataggtgaccccactacagggcccctgggagcctgcctgtctccagcagacccaggggacggggctccagggctgccccactctggtggggcttgtaggatgctggaggggtctcagggcagctgtaccttgtccttgttccttcatgagcctgactcatgctatggtcgctctgtgtgttggctgggcttcctggaggaggaacatttaggtctaggctctgtaggaagagaaggggaaggcagagacctcctcagcactccccactcctcctcggcccctttctgacgctgcccgccccacagcccccaagctggccgtgaggacaccgctgaaggcggtgcaggcggtagagggtggcgaggtcactttctccgtggacctcacggtggcctcagcgggtgagtggttcctggatgggcaggccctgaaggccagcagtgtgt

SEQ ID NO: 3575 - DNA, 1088 bp, Artificial sequence
  DNA replication origin
cccaggctcaccaggctagagggaccctgcttgggcaagcagccagtgcggcctactgactctaaccttgggacttgtgcccaccagagcaaccacccagttatggagtccctccccctaccaagctgggctcgcctccactgccctgtccctcaccctccccacaaagtcagagaaccccgcagaggctgccagctgctcccaccttgcacggagagctggtaggcgatgcggcccccgcggctgacgcactcgtagaggcctgcatcgtcccgggccacatctcgcacaaggagcacccgccgcccggccgatgcctgcacctcatacttggggcctggggacagtgtgcgaccatccttcagccacgtcacagccgcagcctgatctgacagctcagccagcagctgcgcctcctcgtgcagccgagccagcacctcccgggcagctgcggctggcggcttgttggcagtcagccctggggccgctgggggccaggtatgcgtggccagaggggaatggacggaggggcacagaaaggtgaacagaggggaatggacggaaggggagacaaggagagacagacacggggcagagaaagataaagggagggacccaggagaacagcacaggaggacagcgagggagaggcaggcaggggagacaatggcagaacagaggtcacagatacaccagagaagcaggggagacagaggtggaacagccaggcatgggatggcagagacagaaaaaagcaggaaagaaacggaagggaaaagattaacaagatagaggaggcaggagggggaaaggaggaaagtggggagacagacatgaggctctgcccagcaggacccctgcagccccaggccctcacccagacaccagggaccagtgccaccagccagcctgggtgagtcctcacacgcccaccaccctgcctgcttcatcccagtgacctgcaggctgacagggtgtcctggggccctcagacctgtagcagccctacctggagccctgacaccgcccaccctggagaaatgaggctcagggtcccaagctggggccctccacctaccccggacctc

SEQ ID NO: 3576 - DNA, 939 bp, Artificial sequence
  DNA replication origin
gaggcagggaccagcaccatgctgagctgcgaggtggcccaagcccagacggaggttatgtggtacaaggacgggaagaagctgagctccagctcgaaaatgcgtgtggaggccgtgggctgcacacggaggctggtggtgcaggaggcaggccaggcggacgccggggagtacagctgcgaggctgggggccagcggctctccttccatctgcatgtggctggtgggtgccagggttaggcaaaatggaggtgatgctgagtgtcgggtgtgaaactacaagggcatgtttgggcggcccaaggtgctgtgggccctggcaccttccctctatgtaggcctcagaatctgtgtccccagctctccccagcagctctcaggccagtgtccttatgtcatgagactagagcaggcccatgggctgagttgaccatggtgtgtgccctgcagtggctgagccgggggtggtagggacagtagcatgatgtccttggggtgtgggtctggggtctgggtccggtctcatgtgaggacccctgtctgggtggtagggacagtagcgtgatgtcctcgggggtctggggtccgggtctggtcagatgtgatgatttctgtctgggtggtggggacagtggtgtgatgtccttggggtgggggtctgggtctggtctaatgtgatctgctgactcctctgtgggtgctgggccatgggagggcccggcagtgactggagagcgtgtactgggtggtgggggcttgtctctgtgctctgggccctagatctctgtaagcctgtgctgggccccttggtcatcaccatgtgtccacctgtctttctgatatccatctcccttccaccctgtccctgagctggggacaacagaccacactcagcttggcaccctctttccaatggccctgccaacactccgctgcctc

SEQ ID NO: 3577 - DNA, 1748 bp, Artificial sequence
  DNA replication origin
agctggagccccaaatttcagagagaccctgccgcagggagcctctggtggtcaaggagcatgaagacatcatcctgaccgccacactggccacaccctctgcggccacggtgacctggctcaaggatggtgtggagattcgccgcagcaagcggcatgagacagccagccagggggacacccacaccctgaccgtgcatggcgcccaggttctggacagcgccatctacagctgccgtgtgggcgcagaggggcaggacttcccagtgcaggtggaaggtgagccgggcatggggcgtggggcggggactcctccagacacctctgtcccagagctggacaggggcgaagctggggctcaagtctggtctgttaagagcccggctgatgtcccctttgtgcccacagaggtggccgccaagttctgccggctgctggagcctgtgtgcggcgagctgggtggcacggtgacactggcctgcgagctaagcccagcgtgtgcagaggtggtgtggcgctgcggcaacacgcagcttcgggtgggcaagcgcttccagatggtggccgaggggcccgtgcgctcactcactgtgttggggctgcgcgcagaggacgcaggggagtacgtgtgtgagagccgtgatgaccacaccagtgcgcagctcaccgtcagtggtatgtaaggggtcgagtgtccctatccagggcagcctcctggaggaggcggcctttggtactcctgcagcgtaagggctctgccagtcctgtgcgcccgcctcttaagcagtgctcctgtctgcagtgccccgagtggtgaagtttatgtctgggctgagcaccgtggtcgcagaggagggcggcgaggccaccttccagtgcgtggtgtcccccagtgatgtggcagtcgtgtggttccgggacggtgccctgcttcagcccagcgagaagtttgccatatcacagagtggcgccagccacagcctgaccatctcagacctggtgctggaggacgcgggccagatcaccgtggaggctgagggcgcctcatcctctgctgccctgagggtccgaggtgagtgtggggggcagcaggatttgcctggctggccagggctccttgcacaggcacctcccctgtgggctggttctgagtgggcacctggaactgctgtcctgttacggctggtccggctgacctcaggagacacggggtgtgtgggctgcagagaggagactccggtaggctggatgggccaggtgccttctcttggtatagagaagatacaatcctgcagttgcacctggtggggaatggggggaggctgaggcaatccagggaggctttctggagtaggtgggtgcatacttagcctgatggatggcagggaagagagagtggggttagcaccagtgcaagcagtgacatgggcttcccatgctgctgaagccagaagccagaacttgccctgaagggaagtgggagtcatggcaggttctagagtaagggagtgatgcagcagattcaccttctgcggagttgacgggtggcctgaggcagagaggcccgccagcgcctcttccttaacctgcgcaggagtcctgggctttgctaaaccgccgttgcgcctggggaagctctgtcttcccccctctgcagttcctgccagtgctactagtggggatcacgtctaggatttcgaggcacaagggcctggcgtcttgttcagagcaggggagctggaggtggg

SEQ ID NO: 3578 - DNA, 830 bp, Artificial sequence
  DNA replication origin
gggccgtagggttgggagaggggcaggtctcccgcccgaggggcgagcggtgggggtaggcgtggggcggcttcccggccctccccgagctcctggggaagccggctgtgccccagggttctaaaggcggtggtctcagagcagcggctgacccgtgacaccgcgtgtgcaccgcagtgcgccaggtacggctcgtacggggcctgcaggcagtggaggcacgggagcagggcacggctaccatggaggtgcagctgtcgcatgcggacgtggatggcagctggactcgtgacggtctgcggttccagcaggggcccacgtgccacctggctgtgcggggccccatgcacaccctcacactctcggggctgcggccagaggatagtggccttatggtcttcaaggccgaaggagtgcacacgtcggcgcggctcgtggtcaccggtgcgttggggggccggcagggcacagcacagagcacgcctgcctgtcccgagggggccccgggaaggtcggtgggttctctggggacctagatgagccagctccgtataactccgtccagctggggcactgccccacccctgtccctgtccccatcctgaaggcttctccaagccctttttctcttcccacctcctccttcctcctccccagagcttcccgtgagcttcagccgcccgctgcaggacgtggtgaccactgagaaggagaaggttaccctggagtgcgagctgtcgcgtcctaatgtggatgtgcgctggctgaaggtgcctccctgccgaccccactcggttgcctcctcccctcctctcatgtgggcgggccca

SEQ ID NO: 3579 - DNA, 998 bp, Artificial sequence
  DNA replication origin
tgtgtccgggtgtggcagggcctcccttgccaccctaggccgcaacatccagatcgtgaggcccctggaggatgtggaagtgatggagaaggacggtgccaccttctcctgtgaggtctcccacgacgaagtgcctggccagtggttctgggagggcagtaaactgcggcccactgacaacgtgcgcatccgccaggaaggttcgaggacaggcggctgtagcaggcacggcccggcccccaggtcttcctctgcccccgcccatactgagccgcctttgtccccaggaaggacatacactctcatctaccggagagtcctggcggaagatgcaggagagatccaatttgtagccgaaaatgcagaatcgcgagcccagctccgagtgaagggtgaggtgggggctgaggggagggcggggctggacggtgtgcatgtgtggccagctggctcagcacaggcccggacgccccaggcctgctctcaggacgaggacagcagggactcaggagggaagggggcgtcacctccttggcaggaagataggggccagagaagcggccatgaggggcttctcccttccttaaaacagatcctgaagaattctccctcgggctgcagcgagtgctggagaggccaggcatgaggtcctgtgggggaggcatggcaggggcggggggttctacctggtggcagcgaggaggaggatcagggaaagtggtgctggggtggcagggagggaggctctgcagacaggtggggtggggatgggccagtagggctaatcagaggtatgcggggagggacatgagttcctgggactgagctagggtatgtggttatggttcggaagtgggggtttggggagaggactgcagggggtggggctacatggggcaggacctaccctgctcttggtgggccgggacagcgggtaggacctgggcagtggaagtgggagtgtgggatatgggagggcagggcgggcagaggtgggc

SEQ ID NO: 3580 - DNA, 1249 bp, Artificial sequence
  DNA replication origin
aacagatcctgaagaattctccctcgggctgcagcgagtgctggagaggccaggcatgaggtcctgtgggggaggcatggcaggggcggggggttctacctggtggcagcgaggaggaggatcagggaaagtggtgctggggtggcagggagggaggctctgcagacaggtggggtggggatgggccagtagggctaatcagaggtatgcggggagggacatgagttcctgggactgagctagggtatgtggttatggttcggaagtgggggtttggggagaggactgcagggggtggggctacatggggcaggacctaccctgctcttggtgggccgggacagcgggtaggacctgggcagtggaagtgggagtgtgggatatgggagggcagggcgggcagaggtgggcgcactccccttgcttgtggtctgctctgtggagcaggtcctagcacagctccaagggggacacttggcctgaccacctgctggcccctggcgggcagacatgggctgttggggcctagtggggtccaactgagggcccaagaccctcagtgccttgtcggagcctgggcctgggagcctggagcaccatctctgatccaccccatgcccccaccacgttcacagagctgccagtgaccctcgtgcgcccgctgcgggacaagattgccatggagaagcaccgcggtgtgctggagtgtcaggtgtcccgggccagcgcccaggtgcggtggttcaagggcagtcaggagctgcagcccgggcccaagtacgagctggtcagtgatggcctctaccgcaagctgatcatcagtgatgtccacgcagaggacgaggacacctacacctgtgacgccggtgatgtcaagaccagtgcacagttcttcgtggaaggtgcaggcagggagggcagctctgcaggttgcttttgttggggggagtctcccaggtccatggtttgccctacactcctggagacgctgggtctgggcagctcaggaggatgctagcatgcatctagcagggcgggggcttgttcccaggaaggaaccctgccggaggggcagcatgtcctatccgcgggatccgccagcgactgctcctccccaacagagcaatccatcaccattgtgcggggtctgcaggacgtgacagtgatggagcccgctcctgcctggtttgagtgtgagacctccatcccctcagtgcggccacctaagtggctcctggggaagacggtg

SEQ ID NO: 3581 - DNA, 1633 bp, Artificial sequence
  DNA replication origin
tggtttgccctacactcctggagacgctgggtctgggcagctcaggaggatgctagcatgcatctagcagggcgggggcttgttcccaggaaggaaccctgccggaggggcagcatgtcctatccgcgggatccgccagcgactgctcctccccaacagagcaatccatcaccattgtgcggggtctgcaggacgtgacagtgatggagcccgctcctgcctggtttgagtgtgagacctccatcccctcagtgcggccacctaagtggctcctggggaagacggtgttgcaggctggggggaacgtgggcctggagcaggagggcacggtgcaccggctgatgctgcggcggacctgctccaccatgaccgggcccgtgcacttcaccgttggcaagtcgcgctcctctgcccgcctggtggtctcaggtgagcactcccgccccggtgggtggacgtggggcagagccacaagaggacaaggttcagggctgttgggaggcctggacagggctgtgggtgggtacagggcagggccatgggaggagaaggctcagggcagtgacaacacagttcagggccacagatggatatcaattagggccaggggaggacacagttcaggactgcagaggacacagctcagggccaggggaagacatagttcagggaatggtggacacagctcagggccaggggcggacacagttcaaggccataggtgagcaggctcagggcttggcaggcagggcagggtgattggttcctgtggtgccgtggcccagcctctccccactccctgcagacatccccgtagtcctcacacggccgttggagcccaagacagggcgtgagctgcagtcagtggtcctgtcctgcgacttccggccagcccccaaggctgtgcagtggtacaaggatgacacgcccctgtctccctctgagaagtttaagatgagcctggagggtcagatggctgagctgcgcatcctccggctcatgcctgctgatgctggtgtctaccggtgccaggcgggcagtgcccacagcagcactgaggtcactgtggaaggtggggcatgaggggcatggggctactgagagggttttggggaggggttgcctggtgatgtggacactgaggcccggtgtgtctcttgcagcgcgggaggtgacagtgacagggccgctacaggatgcagaggccacggaggagggctgggccagcttctcctgtgagctgtcccacgaggatgaggaggtcgagtggtcgctcaacgggatgcccctgtacaacgacagcttccatgagatctcacacaagggccggcgccacacgctggtactgaagagcatccagcgggctgatgcgggcatagtacgcgcctcctccctgaaggtgtcgacctctgcccgcctggaggtccgaggtgagtcatcccacgagtcttcgggactccccactaggaatgggacaggcgctggcctccctcaccctcctatccctcctgcagtgaagccggtggtgttcctgaaggcgctggatgacctgtccgcagaggagcgcggcaccctggccctgcagtgtgaagtctctgaccccgaggcccatgtggtgtggcgcaaagatggc

SEQ ID NO: 3582 - DNA, 1408 bp, Artificial sequence
  DNA replication origin
cacacaagggccggcgccacacgctggtactgaagagcatccagcgggctgatgcgggcatagtacgcgcctcctccctgaaggtgtcgacctctgcccgcctggaggtccgaggtgagtcatcccacgagtcttcgggactccccactaggaatgggacaggcgctggcctccctcaccctcctatccctcctgcagtgaagccggtggtgttcctgaaggcgctggatgacctgtccgcagaggagcgcggcaccctggccctgcagtgtgaagtctctgaccccgaggcccatgtggtgtggcgcaaagatggcgtgcagctgggccccagtgacaagtatgacttcctgcacacggcgggcacgcgggggctcgtggtgcatgacgtgagccctgaagacgccggcctgtacacctgccacgtgggctccgaggagacccgggcccgggtccgcgtgcacggtgtgtggctgcaggcacggcagagctcagggaagggaggcgtgctgggtgggcatggatgtggggccagccactacctgggtggcccacatcattctctgagattgaagggctgctctgctgagccggggaggtcaggggagccttctgggggagccatggcttgatgtggtcctgtgaggcctgggtgcaagcaggtggacccggggacagtgggtcccggagccagaaattgtccccggagccagggttggaggctgtgctgtccctgcccgctggtcccgacgacatagcctggggatgttgccctgtaccaggggacgtgtctgcatggaagtcatcaggccactgtggggacaccagtggggatagccagggagaagccgagatgccaggcaggggctgtgagtaggccacgtctctgtccttcacggggccccagcaaggccctaaggccactgggctggcagggtagagccatccctgaacccagccctgcagccttgggggcgtgcgtgccctggaacctgtcctgcttttcaggggaagttccctcaactgcagggtggctacctggccccctctgtgtgtgtgcccggtcccagtggcatcctggtgtgggtgacaggtggtgtaaccagcctgtttgctggtccttgacagtcttgtaacgagatgggaaggggcaggaggcatggtgagtttgtcctggagctgggactagcctgcctggaggcccctcatccggggtcctgtgcctcctctcctccctgtgatgaccatgggttctccctctccctgccacactgattggatcagagctgttggttatgcagatgccaggggcagccagctccagcagaggggcatctactcattggctggtgcaatgtggcaccctgtcccccagggcctggcctctcccagggtctggcacctccca

SEQ ID NO: 3583 - DNA, 1040 bp, Artificial sequence
  DNA replication origin
gtctgtctgtccatctctccccagccatgcctgcccacttcataggaagactgagacaccaagagagcatagaaggggccacagccacgctgcggtgtgagctgagcaaggcggcccccgtggagtggaggaaggggcgtgagagcctcagagatggggacagacatagcctgaggcaggacggggctgtgtgcgagctgcagatctgtggcctggctgtggcagatgctggggagtactcctgtgtgtgtggggaggagaggacctctgccactctcaccgtgaagggtaatgactgctcctggccacgtgcatgggtggctatgtctgagcgggtgtgcacattcctgctttgtgctcacgtctgcgctgtggccttccctgtctttctgcgtgtggttccttcattccttcagtagggattccccacacctgctgcgtgttacccgtctcaggagcaggaagacagcagagaagagagggctgtttgagccctacagagttgtaggcagagacagaggatgtggggagaaccaaatcattacaaaagtgagatcacagatcttctccagggtaaacactaggaaggcaggaaggcaatcaggaggagccccagaagcggaacacagacgggagtggggggatggcaggtgggctggagtgcacagccaggaaggggagggtccattgtgaggaggagagaggcagggtgactgtggggaggaggtgatgggggtgactgtggagaggaggtgatgggggtgactgtggggaggaggtgatgggggtgactgtggggaggaggtgatgggggtgactgtggggaggagcagccacagtgactctttgtgtgtcagccaagcagagcagctgtgtggagtggcagaaggggcccaagacaatctgaaatggaggctttgaccaggacagaacgtctggagccctgtggtccgcctacggcagatctagggtgtcctcacgtgtgggcggtgggagtggatctcagccatggctgggtcccctagggatgtgagactgca

SEQ ID NO: 3584 - DNA, 1517 bp, Artificial sequence
  DNA replication origin
tgccattgcctgccacagctctgcgcttactgccgctgaagcctctaacactgacagcagagggtgggatggctgcggtggctcagctccgggggctgacatgtgtccggcatgttggccgacagatcccgtggtggaggtggtcagtgccatgcaggacttggccgtggaggagggtggctcggctgagctcctctgccagtattcacggcccgtgcaggccacgtggaagatggacgagcgggaggtgcacacggatgggcaccgtgtcatcatagagcaggactggaacgtggccaggctgaccttcaggccggccttgccctgtgacagtggcatctattcttgtgaggctgcgggcacccgcgtagtggccctgctgcaagtgcaaggtgaggccgcctggtgagcagccctaggcccggggcagctttggcacagcttgggctgtgcagtgatagtggaatggcaggcagtgtccggtggcgctgggacacaggtggctcggacaggtgggaacaggccccgtaggtggcaagctcgctgcaccaggagctgagctgtgagtaggcacggcatgcacagctgctgaacttgtggcttccatgaagaatgtgtggccaaattcaagactcctacacgtgaacccacaagagaatgagaaagggaggggagagcggagggcagtggattagggaggaggtctctggttgttgtgagtctgagcatggcattccagggaccaggcagcaggtctggtagctctgttggggggtgcagagaaagggggatgttcccagaccgtgaagctgcagcagggccatggcgggtaaagcatggctctgagcctcatggctgtgtttgagcctggttgtgcggttggcgagtttctagtcttgtgaacacctgtgaggtttctcacctgtgaggtcagaagcccagtgccaaagtgggcagggcatagtggtggtggtggggggtgctgggtgaccacagaggcaagcatgggtggctccaccctggacgctgagtgcccacctccacatagcttctggggagggggcattttgtttggctctttgtagttttcagggcactcccaagggacgtggggaccctggaagcgcgggcatggtctgatcctccctctccccacagccaagaacacggtggtgcgggggctggagaatgtggaggcgctggagggcggcgaggcgctgttcgagtgccagctgtcccagcccgaggtggccgcccacacctggctgctggacgacgaacccgtgcacacctcggagaacgccgaggtggtcttcttcgagaacggcctgcgccacctgctgctgctcaaaaacttgcggccacaagacagctgccgggtgaccttcctggctggggatatggtgacgtccgcattcctcacggtccgaggtgactgcgctgtgctggtgcagggtggggtcagatccttcccactagagactggggtaggcgggcggcagagggggcggggctgc

SEQ ID NO: 3585 - DNA, 985 bp, Artificial sequence
  DNA replication origin
gcgaggcgctgttcgagtgccagctgtcccagcccgaggtggccgcccacacctggctgctggacgacgaacccgtgcacacctcggagaacgccgaggtggtcttcttcgagaacggcctgcgccacctgctgctgctcaaaaacttgcggccacaagacagctgccgggtgaccttcctggctggggatatggtgacgtccgcattcctcacggtccgaggtgactgcgctgtgctggtgcagggtggggtcagatccttcccactagagactggggtaggcgggcggcagagggggcggggctgcgggctgcagctgcagaggggacgtcagtctccgagaccctcccgcaggaggctgggccgccggagctgcagaggggctgaggccctgggagcggcacaaggggcagggttcgccaggggccggcccatcccacctgaggccgggagccacccgcttcgcagtgggtagaagcccccggggccgaggcccaggaagggtggaacggtgtggggcgccgtgcgctgagaccagaggctctccggagccaggagggggacctgttggtctctgggacccacaggaggctgggttgaaggcaggcaggactgggggccagatgagaggtgtctctcgcaggaggctgggctgtcttctggagaggggcttgctggggccgcaggtggggagcttcggcctcccagacccctcccacccacgcaggtgggacgaagcgagggtatgaagcccaggccctccctgctccggcgcttgccctcacaacccttccttgggcacatctgcaggctggcgcctggagatcctggagcctctgaaaaacgcggcggtccgggccggcgcacaggcatgcttcacctgcacgctcagcgaggcggtgcccgtgggagaggcgtcctggtacatcaatggcgcggcagtgcagccggatgacagcgactggactgtcaccgccgacggca

SEQ ID NO: 3586 - DNA, 2247 bp, Artificial sequence
  DNA replication origin
ggctgggctgtcttctggagaggggcttgctggggccgcaggtggggagcttcggcctcccagacccctcccacccacgcaggtgggacgaagcgagggtatgaagcccaggccctccctgctccggcgcttgccctcacaacccttccttgggcacatctgcaggctggcgcctggagatcctggagcctctgaaaaacgcggcggtccgggccggcgcacaggcatgcttcacctgcacgctcagcgaggcggtgcccgtgggagaggcgtcctggtacatcaatggcgcggcagtgcagccggatgacagcgactggactgtcaccgccgacggcagtcaccacgccctactgctgcgcagcgcccagccccaccacgccggggaggtcaccttcgcttgccgcgacgccgtggcctctgcgcggctcaccgtgctgggtgggtggtgggcgagcttttccctcccctgcaggtcgggtctggggcgcgccccgcctccagagcttgcgagtgcgtgggtgaccatcctgggctgggttctgcagcatctgcccactccagagcctggggttgactgcctgcggatatgggcctgaccatgggagtctgggaggctgctcttggccaggcataaccatgcatgagcctaccaccctgtggattcctaaggccaaggtcccttcatcctgccccatctccccctcagctccccggactcctaatgcagatctgagcccagctctggggagacaggaggtacagagactgccaggggctctccatgctgggtgggctctgggcacatatagtctccatgtgacatgcacctgcagccagtatcagagcccagtggcttccagagggactgttggtgccgacagggagccacccccctgaccagtcccccttttccccaggcctccctgatcccccagaggatgctgaggtggtggctcgcagcagccacactgtgacactgtcttgggcagctcccatgagtgatggaggcggtggtctctgtggctaccgcgtggaggtgaaggagggggccacaggccagtggcggctgtgccacgagctggtgcctggacccgagtgtgtggtggatggcctggcccccggggagacctaccgcttccgtgtggcagctgtgggccctgtgggtgctggggaaccggttcacctgccccagacagtgcggcttggtgagttgcttcattggggtctggggagttcacagcccccacaagctggaggagggagggatccccgggagtggggcctgcaccctgggtgcatctttgctgatggggcctgtcctctgtccgtggacgctgttccccagcagagccaccgaagcctgtgcctccccagccctcagcccctgagagccggcaggtggcagctggtgaagatgtctctctggagcttgaggtggtggctgaggctggtgaggtcatctggcacaagggaatggagcgcatccagcccggtgggcggttcgaggtggtctcccagggtcggcaacagatgctggtgatcaagggcttcacggcagaagaccagggcgagtaccactgtggcctggctcagggctccatctgccctgcggctgccaccttccagggtgcgttgtccctgtccttccaggttccagggtggggagctctggtgtgggggtgcagcttggccttcctctcacaggctctctcagggaagggctgagggtccttttgaggaccccatcacatgggagagactgaggctccacagggagatgcggcaaaccccatgttgcagagccttgatggcgtaggccaacctgcctgtccctgagcaggtcctgggtggtgcagcccttggttctcctattctggtccctttaagcttctgggcccctgcacacagacatcccctgtactctgaaccccctgaaacccccggtgctctgatccctcccacactctgaggcctgttccctgaactctgagcctaatcctccctgcatggcagccagcacccccataagtctaggcgctctatcccagaagcagggccagaagggctcaaatcagcccaatttgcttttgcagagtcctttcctgttccggtcatcacataccctatgcagggaggtagactgaggcctcactcaaagtgggggagctgaggctcaggggctctgagacttgcaaagattgtgccatctgaagtagctagtgccaggtggggagagaggcctag

SEQ ID NO: 3587 - DNA, 1537 bp, Artificial sequence
  DNA replication origin
aacatgggcccttcctgctgcttcatctccttccggaccttgtagcccttaaaggcagcctggatcttcacagctgccttgtccattgagggatcacccaggtctttggtgctcaggtctcccagtggtgggcgcacagcagccagtggctcctgctgctgctgtggcttcacagagggggctgctggggccccaacctgtgggcacagagcctgacgtcatggtgagatagggaatctgaggccaggaacagggcacaacaggtgtcaagcacatggcaggggcagctccaggtcttgctccagtatgccctttttcctcctaccaattggacccactctagcttcaactgacctagatgtctgacagcaccttccaaaaagcaagcccacttcctggaaatcgctttacacagtaactcagaccaggatgaacagggttgtgaagaacaccataaagagaccagttccaacttttcaggcaaaagttttaactgtcagatgtgtatatgaatggatggatgcagggtggatggagagatacatcgatgaatggatggttgaatgggagaacaggtgtatggatggctgcatggatgagtgagtgggtgggtgactggtggataagtgaatggttagacagatggtggtatggaaacaggctgacagataaacagacaaacaggtgagcaagtacaggaatagatcatggacaaatggtggatggatgggtgaatgagtaggtggatggatgataaacagcagatggatggagttgtatggttgtataggtgggtaaacaggctgacagataaatgaatgaacaggtgaacaggtgcaggagtggcagatggatagtagatggatggatgaatggaatggaatggaaggatggtgggtggatggtagatggatgaataacaggatggtgagtagatacatgaatggatagtgggtagatggatgcatgtcagataggaggatgggtgaatagatgaaaacaaggacggacggaagcatacatggacaaatggaaggatggtagatggatgatgaatggatacaagcatggatggaagaattacggaaagatggcagaatggtgaatagatgatagatggatgagtatgtagatggcagatgggtggatggatgactagatggaaggaggaatgtgtgcatggatggatagatggtggatggatagatggatagatggaagaaaggaaagaaagatgaacatatggatgaatagatggcagatgaatagatgaaaggaaacaaagatggacacataaataaatgggtggatgaaaagaagaaagaatgaatgcatgaatggatgaacgaatgaaaggaagaatggatacatggatggatggatagatagaagaatagacagatgcatggattgaaggatggatggtggacagacagaagagaataaatgcatgcactgatggatggatcatgtatggatggatagaaggatggatgaatggatggatggatggatggtagatggatgatgcataaac

SEQ ID NO: 3588 - DNA, 935 bp, Artificial sequence
  DNA replication origin
gtgccgccccgaatgctggagaggttcacccccaagaaagtgaagaaaggctccagcatcaccttctctgtgaaggtagaaggtaaggcgtttcctgcccgcagctatggaaagatcacccctgggggatgggacagaggtgccccctccccactcacatcatcccgagggaaggcctgtggcagggctttatctccagagaccccgctcctggcggggtgcacccaccacctcctgcctgcccctaggacgcccggtgcccaccgtgcactggctcagggaggaggctgagagaggcgtgctgtggattggccctgacacaccgggctacaccgtggccagctctgcgcagcagcacagcctggtcctgctggacgtgggccggcagcaccagggcacctacacatgcattgccagcaacgctgccggccaggccctctgctccgccagcctgcacgtctcgggccgtgagtgggggtggggggatggggggatggggggctggggcatggggggtgggcactgggtggctttggggtctccttggggcacactgcccatcaccaccatcttggctgggaccctgtgggaccccctccttcctcttttcattctctgacagcaccagggagaccccaaaatgggtcaggccctggtggtgctggtggttttgagcctcagagtcgcctctgggcccaggccccgtgggttctgcaccgctggctccagagacatttcctgaagccccctgcatcctgggccttgcttagcccctctgaggacaggaacccctgttctcctcccatcactgtcagggtgaccacgggccaagagtgggatggggaggtgagctcgggcacagcccctgctcagggcttcggagggacccagtccagatctggaatcagatgtgctggggttgggagcaccgtctg

SEQ ID NO: 3589 - DNA, 830 bp, Artificial sequence
  DNA replication origin
caccatcttggctgggaccctgtgggaccccctccttcctcttttcattctctgacagcaccagggagaccccaaaatgggtcaggccctggtggtgctggtggttttgagcctcagagtcgcctctgggcccaggccccgtgggttctgcaccgctggctccagagacatttcctgaagccccctgcatcctgggccttgcttagcccctctgaggacaggaacccctgttctcctcccatcactgtcagggtgaccacgggccaagagtgggatggggaggtgagctcgggcacagcccctgctcagggcttcggagggacccagtccagatctggaatcagatgtgctggggttgggagcaccgtctgatggcttgccggtcctcctgacagtgcctaaggtggaggagcaggagaaagtgaaggaagcgctgatttccactttcctgcaggggtgagtgagggttgcccctccaggccagtccggtcagggccagggaggacgctctaggagtgggggacaggacagcgctgcccctggggagagcacctgtcccggagcgtgtcctggctctgccccatgcaggccatgtggtttgggccagctctcttccttctctgcatctcagtttccccattgtaaagtgagggcttctgttgggcctctctggtatggagcctctttctctggtatcttggtttgttgcccccagaccctctttttgtcaggagcttctgcataaggacagagggtggtggggtccagcccaggcctctcaggacacccccttcacctgtttaggaccacacaagccatctcagcacagg

SEQ ID NO: 3590 - DNA, 1461 bp, Artificial sequence
  DNA replication origin
ccccggagggggctgaaggcagtcgctgtgcctcaccgcaggcctccgaggaggggcggggggtgctcggagagtcatgttccagggagtggctgtggccaggggccaagtgggtgccagaggcaggcagccggagggcagtctcgaatgagggggctttggccaggagggtggcctgctcctccctggcggcctcctcctccagcacgcggtgctccatcagtggctcgcgcaggcctggcagcgcccccgcaatgtacccgcccttcagcaggtgccgccgccgggccgggtgccgcctgctccccggggccagggccccgtgctcagggctctcacccgcctggtggtagaacaggctgcggatgacgctgtgccggggcacgcagccctgggcggccggtggcccggcaccctcgggagatgcaggcggagctggggcctcggtggagcgctcactggcctcggcttcctcaggcaggctggccgagggccgcaggaagccccgggggtgcagcagtggtgagtgtgtcaccggggagggtggcagtgacttagcccgggcaaatggggcgagctcgttgtcagaggaggaggaggaactggaggagccaccagtgtccctgcagaggtgccgggctacgccgagggaggggctgtcgggtgggccccgcagcagctcagggatggagcgcatcaccaggatggacttgtagctcatcagggaacgctggaaccgcatggggggcagcaggcatcaggtggggagacccaggagctctggggtcctctgcccccagggtgcagtcattccaccctcctgccccatgggattgtgtgcacccaaccccgctgtgcccagcagatgactcctgcctcctttcagcatgctcaaaggagcccagccccgcttccctgcacttctgggtgcgcagctggccccgtggggcctcagtttccccttcactggtccctactcagatggtcacggctcacctgccagcgacttcgggccaggaggaacttgagctgcttggtgttgatgaagtgggcctcctccgcaggcatggatttctgggagaccgaggtgggcagccacatggcagggagaccatggtgccctgataggggcccctcccatgatggaagcccttctgggcagccccagccctgggattccctggatccaggacaccacagccctcacccaagatgtccaggtggggcagatggcaaaggccagaggtcagaggtgacagcgaccccctgtccctgagctccttgcagttctccctgcctcctgctgggggttgggggctggggcactgaaatgtggttccagcctgaggttcccacagccctctcactaacgcacagggacaaacgtcctctgggctgggcagaggtcgggccacagccacagttctgtgctcacatgccctgttgcccagaggccctgcc

SEQ ID NO: 3591 - DNA, 1062 bp, Artificial sequence
  DNA replication origin
tctggagagctcctggtgggagccctgccgacctcaggcacaggccttgcactgacctggggcagtgggctctcagccctggcctcctgctgctcctccgactgggactcagccctggcctcctcctgctcctcctcctctgactgggacacagcccaggctatcctggcccacatgggcccctgccccagcatgccccctgcatctccaccaaaggcaaaggtgccatagccagccacgcctgcgtagcccccgcgaccacccagggagaacttgcgcatggtcgcctgttcctgaggccgctgcaaggtgggtgtggagtcggacagatcctcagcctcctgggtccagccctccgcatccagggaggggccaggctctgtgcccacctgggaggagcccaccctgagggagctcacttgggaagagctcgcctgggaggctgaccctggggaactgcaggggccgggttttggcctcccaggaagagagatgtctccaggccccatcttagagtccaatggggggcttgctttggcaggggcagggggtgcctggggctgtcccaagaaggggcttgagggtactaagggggcctctttgcaagatcctggagggaaggagccaggagggcatggggcaactgctgggtgggggctgcagccctcctggggggcagaaccctgcttggggtggcagaaaggggctggctgcccccaagggctgtccggggatggcctctctggctgagcagtgcctgggtggccaccagtggatggaagctgcttggagccctgagggtgccccatgtccctgataggggcccccccggagggggctgaaggcagtcgctgtgcctcaccgcaggcctccgaggaggggcggggggtgctcggagagtcatgttccagggagtggctgtggccaggggccaagtgggtgccagaggcaggcagccggagggcagtctcgaatgagggggctttggccaggagggtggcctgctcctccctggcggcctcctcctccagcacgcggtgctccatcagtggctcgcgcagg

SEQ ID NO: 3592 - DNA, 1128 bp, Artificial sequence
  DNA replication origin
gtcccagctgccctgtggggagggttgtcagggctgtagaggtgatcccaagattcagaggcctgaggcagggacaggaggtgtgggcagcacctggacaccagcggggggcccctgggagcctcctgccgtcacctggagtgcagtaaccttaggtacagaatgggggcccctggacatgcaggatgcttggggtggggtgggggttcaccttccggcctgcccttcaggatccgggagatgtgctccacggaggccttcactctctcacgcagccccagctctgcaggctcatccagcggcaggtgcctcccagggaagtggaagaggctgcgtgacggcgaggaccacttgcgcttcctgcccacggcagcctctgccagcagcgcgtccacatcctctgactcctctgtgatctccaggcctgcgtgggggcccagttcacctggccagggccacgtgggctccgggaactcggccagctcctcctcagccatgggggagggcggctctggctgagcggacttggggactttcctgaagatcataaactcgaatgggaggtacttgatatcgtacaggtctgagaggttgaggtaggcggggtccacctcggaaatgtccagggatattgtgtcggccgcctccgcatcacctgacaggtcccggatctgcaccagggagacctgcccgatgtcctcccatggggtgggctctggagagctcctggtgggagccctgccgacctcaggcacaggccttgcactgacctggggcagtgggctctcagccctggcctcctgctgctcctccgactgggactcagccctggcctcctcctgctcctcctcctctgactgggacacagcccaggctatcctggcccacatgggcccctgccccagcatgccccctgcatctccaccaaaggcaaaggtgccatagccagccacgcctgcgtagcccccgcgaccacccagggagaacttgcgcatggtcgcctgttcctgaggccgctgcaaggtgggtgtggagtcggacagatcctcagcctcctgggtccagccctccgcatccagggaggggccaggctctgtgcccacctgggaggagcccaccctgagggag

SEQ ID NO: 3593 - DNA, 1348 bp, Artificial sequence
  DNA replication origin
gtgacctccaggccccagagcatggcctggaccctggagacaccaggaggagccctgccccaccactgccaactccccagcctggcccatctgtaccaccatcacctcctccaggaagtcctccaagactgctcagttcactacacccaccaggacccctcatctgttcccgcacccatgtgagtgcaagcttgctccccaccggtctggccacgctggtgggaccctgagaggcagtggggcctggtctctgtgttgggcctgctcacctcggtcccagctcttcagacctgagagccggaaggaagcaaggcctggcttcttcctggggggcccctccttctccagacctgcaggaggaagagggccagtgaaggtcatggtcaggaggcctggcccctctgggtagtaccagctgcctctggctgcaaggaccccgagcagctgggacaggaagaaattggggtcggctggcccgctgcccactccccagacttccaggccacagaggacagaggaaacatgaagaccaggcaccctccccacctccaggcacggggtcaggagggtccagggccagggaggactatgtggttggggagaactatggggttgtgaacggtttgggggtctggaagggttttggggtcagggagggcctgaggtcaggagggtctggggtcaggtagggtatggagttggggagggtctggggtaaggtagggtctggggtcagagaggactatggggtcaaggaggactcaggaggatctggggttaggaaggtctgcagtcaggcaggatctggggttgggagagtgcagcgttggggtgtctggggtcagggagggcctggggccgttcgggaggactcggttcagggaggattatggttcaggaagactctggccccttcaaatgctttccccaggggcataccacctacagcctccccagacctccaccgctatgttaggtcccagggctgggtcccagctgccctgtggggagggttgtcagggctgtagaggtgatcccaagattcagaggcctgaggcagggacaggaggtgtgggcagcacctggacaccagcggggggcccctgggagcctcctgccgtcacctggagtgcagtaaccttaggtacagaatgggggcccctggacatgcaggatgcttggggtggggtgggggttcaccttccggcctgcccttcaggatccgggagatgtgctccacggaggccttcactctctcacgcagccccagctctgcaggctcatccagcggcaggtgcctcccagggaagtggaagaggctgcgtgacggcgaggaccacttgcgctt

SEQ ID NO: 3594 - DNA, 2013 bp, Artificial sequence
  DNA replication origin
tccacacacgcacccatggtctctaggtagtccttgaacttgtctgagggcagcaccttctcctggctgaggctctgtgcattgcccaggtccacgaccttgagcaggttgtattcggtgatgatcatgttctcggacctcaggtccaggtgcaggatgtgctggttgtgcaggtactgggtggcactcaacatctgccacaggtagtccttcacctcggattctgagtaggaggccctggggggcagaagctgctcagcccaggctccggggtgggggccaccagggccagggctgagactactccccgtggactgggaggggcactggctgtgcagaggggcctggtcctccagccccaccccagaggcctgggtccatcagtccatcagtccgtccatcagctcaaccacaccaccccaggccaccctcacctctcggccaggcaggggagcagctcgggcccagagcacagctccaagatgagcaccaggtgccgggggctgaggtaggctgcgtgcagctgggccaggtgcgggtggcgcaggcccttgagggcctcgtattcgcgcagcactgctgtcttgtccttggggtggtaggggatgatcttggcggccagcgcccgcccgctggccttctcccagcattgccgcaccacgctgaagcggcccctgctcaaggggacagcggtcaggctggtgggtggtcccctcccattccccgattcccaacactcagagcagcaggagcccagttcagcgagatggtgggtgtgggggcatgggtggtcaacaagggggggtccaggccctggccccacccgcctgcagccccccaggccactgcacctctggatctgtgtctggaatgcgaaggtctttgtgctgggcaggggttgggctgaccgcccctggctctcctcctcagaggctgtgggaggaggggcagatgataagagggggtgaagagggcatccccacagccccagctctccccacgtctcccatcaccccttcccaggcaccttgacagctgggactttgagttacgcactcccacctcttgttcctcaggttctgggggtatggggacagggagggggtacagcaagcagtgagaggcaacctgagtgagggtgtgtgtgagggctgcaggggcatttgagaatggaccacccatagcaatcatgccctctcttcctcccttgagcccagggcagacattactaatcaaccctagcattcctccaccaaagctagaggcagcacaggccagtcactaccaactctcactaccaacactcagaatgaagcagaatggacttgtgtgctcgtcaatgagtgcatgggagtgtaggtgagtgaagggggggcctgggggtgaggcggcccctaaagtgtgtaggcctcgaatgccaagcccaggagcagctgtctccccagaaggaagtggacagctatggagaccctgcacaggagggagcgtaatctgggtcttctagctgctgttcccaccctccaagccccgagtgtggtgtggctcacccaggtggctgggccctcccaggaggacttgctccgaggggctgctgtagggacccattcctgccttgctgacacatgccgtgcggaaggtgtaggtgccaccccgggagagcttgctggtcaggtagcagcagtcaaagatgtcggaggccagtgtggtccagctgccgcctggccacacaggagcacgtgaggggccactgaggcctccacacaccacgtcagtgggggtggagaaacccttccctgaggccacccatgggaacacagcaggccaggcatctccccaagggcccctagacatggctcccgggaggggtggccggagcctcgggtacaggggccacctcataccttctaggctgcactgcacaatgtaggtcacagggccgtaggattccacgggcttccagaccagcagcaccccatccgcgtacacctccccgatatccgggcatggcgaaga

SEQ ID NO: 3595 - DNA, 1310 bp, Artificial sequence
  DNA replication origin
aggctcagcacgtggcccagcggcgggaggggtgtggggaaggcaagtggaaaaggggagagggggaagggagagtaccgaggggaaagggagtgggggggcggggcggggcgggacggaaggaggagggggcgggacgggaggagggggcggggagaaggaggaggagaggggcgcgccttaccagggctgggcgcacagagtgctgcgcaggaaggccacggcgcccccggacagccccgcgtagcagcggctcagccggaccagccccttgcgcagtcctctctgcaggtcgcgtgcaccctcgctgctcaccgggtactcggcgctcagcctgcgcaggtggcgggtgcacgggccctgaggtcaccctccttgggtagaccagggcggagggggaggggatgcaggagcactgaggtcaccctcgggtggccggtgcaggggccgtgaggtcatcctcgggtggacgagggtgcaggggccgtgaggtcaccctcaggtggacgggggtgcaggggccctgaggtcaccctcgggtggaggggggagactgccccgcccacctagcaacccccagacaggttggaggactcacatgatgaaggctgtcacaccgatggcccagatgtctgtctgtggaacagccccctggccctccaggagctctggagctgggaggggcacatgtggttgggctcaggtggagggacacaggtggtgggcatgagtgagtggtcccaggtgggataggtggggcacaggtgtgtgggccaggtgtgtggctgagtgggtggcagtggagctgggagagaggacagcactggaggagagggggcttcttcctgccccccgccccaggtgaggtccccccaactgtccacacacgcacccatggtctctaggtagtccttgaacttgtctgagggcagcaccttctcctggctgaggctctgtgcattgcccaggtccacgaccttgagcaggttgtattcggtgatgatcatgttctcggacctcaggtccaggtgcaggatgtgctggttgtgcaggtactgggtggcactcaacatctgccacaggtagtccttcacctcggattctgagtaggaggccctggggggcagaagctgctcagcccaggctccggggtgggggccaccagggccagggctgagactactccccgtggactgggaggggcactggctgtgcagaggggcctggtcctccagccccaccccagaggcctgggtccatcagtccatcagtccgtccatcagctcaaccacaccaccccaggccaccct

SEQ ID NO: 3596 - DNA, 908 bp, Artificial sequence
  DNA replication origin
caggtcagggggcctggagtcagctctctccgcttggcaagcgtgcactgatgaggactgacggcactcccatgctgagaggccccgtgtgggctgggagtgtctgctatcatcttcccgtggggttcagctggatgtttttcccacaaaatggagaacgtgttccatgcccagcatggtgtagactcaaggggccccaagattcagagggaaatgggcccctgggcaattctggctcccacagaggagagaggccgtgtgtgagtgaattcagccactggtggggcagggctgccagacccaggtggagcccacaatgctgcagatgtggctgggcggctttgcacagggggtgacctgctgccggcctctggagcccagcagaacatcagtccaggcaccggctcctggtttcgattgtcatttctattgtaagcttttttctgtttttttgttttttgtttttttttttttgtttttttttttgtagatttaaggggtacaagtgcagtcagagtgtagccatcacccgaatggtgcacactgtacccagtaggtagtttcccccacctccaagtctgcagcatctgctcctccactccgtgtgccgcgtgcaccagcttggacatcagctggctttgagcctgggaagcgggaaggacgctcggctagcgtctgtagaaagactgaggaatattaggagagggtcctgtggtcagtaaattgtggggtggggaggtacccagaagactgaggaggagccctcagggagggcagagaggacaggtgttggagaagccaggaagggtttagaaggaaggtgagttgacctggaaatggggacccacagggtttgtgtgaagatgcaatttgggctttcagctgagacattgtggcatgtgggcggg

SEQ ID NO: 3597 - DNA, 1507 bp, Artificial sequence
  DNA replication origin
ccgaggccgcccgccgccgccccgcggacagtaccgccttcctcccctctgtccgcgccatggccgcccccgacctgtccaccaacctccaggaggaggccacctgcgccatctgcctcgactacttcacggatccggtgatgaccgactgcggccacaacttctgccgcgagtgcatccggcgctgctggggccagcccgagggcccgtacgcgtgccccgagtgccgcgagctgtccccgcagaggaacctgcggcccaaccgcccgcttgctaagatggccgagatggcgcggcgcctgcacccgccgtcgccggtcccgcagggcgtgtgccccgcgcaccgcgagccactggccgccttctgtggcgacgagctgcgcctcctgtgtgcggcctgcgagcgctctggggagcactgggcgcaccgcgtgcggccgctgcaggacgcggccgaagacctcaaggtgctcctgggcgggggtggcgtgcaggggcgtcggggagccggggactggggaggcctgggcgggtgggaggtttgggggactgctccgggagtaatctgtctctgtctagggcggggagctcaggatgcagcctgctgtgggcctgtgaggggggtgtcgcgcagggtggctgtgggggctcatgacacagcctgtttcaaccaggccccttgaggctgggaccatggccgccaatgagaccctgctctcgggggtgaggggcgtacctctcatagatagaggctaagagaggaaggtggaaggtggaaggtggtggagtgggggcaaggaaaatgtggccataccctggccagcaaggagctggaatcagaggaaagtgggagaacctcagaggtggccgatcctagatggactccctgcagggactgtgttagcaggtcagtacttaagtcctgggaaagccccagactgggcaggatgagggggacacagtcgtttcctctctaacctcccctccagggctgccctgcatttctgggtggggtactgggagccatctctgccatctgagatgccagggctcagcctgccttttctccccttgtcttgctgcttaaaacccaaataaaacccgagctgaagggcctggggcacacgttccctggcctgcgctccctcccgctgtcctctttcctcgctgacctgctgcaggtgtgctcctgggagcctacgtgtggggcagatggcagcatctttggagctttcttgattgcactttgtgtgttgcatcatggtcacttgtgtgtgccagatgagcagttaaggcagtgttagaatcagtactgagcttgatctgtccctatcacagagcaaacttctgggatactagaataaatctgaatctgtccccttctgctttggattttagcagaaaggtggtttagagccatatccgtgggcttgttcagacacagattcatttgggttttcttttctttgcccatgcaggaatgtctacacctgaaacatgttagccc

SEQ ID NO: 3598 - DNA, 1332 bp, Artificial sequence
  DNA replication origin
cggcagctcgcggggacgcggggtatccgggtgcggcggcgcaggctcgggcactccggggcgcgaggctcgggactcccgggtgctcgggctccggggcgcggggactccagggcgcaggactctgggtttcggtagcgctgggcgcgtaggctccgagcgctcgggggacgcgggacgtagggatcccggatgccggcaggaagaggagccgaggcggaagcaggaagcgactgggtgggttttgtgtgtttttttttttttttttttttttttttttttttttttggaacaacccgcttttgcctccgattggccgctgccagtcacgcggcccgcgggcgggacggaattggagagctttcacttgctgacctggcgtcaccaccgctccggttcttgtggccaggtcttttacccctgccctggggaggactcaggcgcaggggagggatggggacagggggcggggcgcaggggagggatggggacagggggcggggcgcaggggagggatggagcagggggcagggcaaggagggatggggactcagggcggggcacacggaagcaactgcaaggactaagggagtccgcagcctggggcattggagcccttcgccatacccctagtgcgtcctcaccccctcagcccgtgcttcccagggcgggtatcctcggaaggcccggccctcacagccttggcaggccaaggtcagaatgattggagttgggggatgggacgggggcatccctccaggaccagctctccaggaggcccacattctttctgcgggaaccactccaaaggggcatgctgttccaggcagcccctcgcgcagacactccggctttgtcgaggtaggagtacgcttactctggaattctgccttgctagtgactgacacaggctgttaaagtgcttgaccctgcaggggtgggtggggggttccttggaaaaggtaagggcgctgtggaaaagaggcccctacataaatcctaatctctttgggattttgcccctgctcgtgcaactttggggatcgaacgggatgggggtgggcagctctgaggctttttacgggttcagcctttcccattttcccccatcgaaggacccaataggatgcataggacatttctatgggcagcctgggaccatccctgacacagcaaccacccccgctcctccccaccataggatatttctacttctttgacagagtaacctaaacccctgggggggctgggagccacagattcctgtcattccaaagtgggggtgggggcatggctaaaaaaaacgtgaccacgctgttcctggtgtgtagg

SEQ ID NO: 3599 - DNA, 1508 bp, Artificial sequence
  DNA replication origin
gagccaggagcagtgcccgagtcccccggtctgtgtctatcctttcacccacatggtcactgtggagatgaccatctgaccagacttcggagcccccaggcagaagaaaggctgcagggggcctgggaaggtggcctgggagtaggtgtgcaggtgggacccatcgcttacactgtagaaggacacttccccggcttcgaagtccaggaagatgcccatgtggctgggaggctccatcagcatgaccggggttagggcagagaaggtggataagtacttggtccccttggacagctgcaccacccagaagccgttttcggggcacttggggaccctgtctttccggctcacgttgtccctgcacacacccagggcccacaacgcgtccccggtgatgttcatgcccacctcccagtagtgcctcccagaggagaaggccgtctggcccacagcacaggggtaagccacaaatcggtccttgctgcagaacccactgccctccggcgaagagccgaggtagcgcctctggcggctctcatacaggaggaggtaggggtacgcggaggtggcatcaggcaccacatcctctgtagatgggcgtggtggtggagagatggggagaggtgtggggcattcagggtcaaaggtgggagtccccgggccctagtggtggatgtggccaatggtcccctaactccgcagaggcctcccctgctgtgaatctggggttacttgatgcttccacacaccaattgtgtgtgggccttggtggcaataaggtacagggggctgggcagagagaccactgggaactcaacaagattcatcccatgaattagaaccaccagtaacgccgccctacgaaggcacagtgaatagccagtgaccgtcaccaggcagtgcacttgtagaaccccccccattggtggcttccgaggctagggggtacagtggggcatcgccaagagatcctgggtcagaggtcctggccctgggtgcccacttacctagaaagcctcttagcacttcaatctgtccgggaactctgcacacagtcctgggtctggttgggggggcaacctctgggcactgcacactcacgttgttcttcctccggtgggcacacacaggggagtcttattgactcccctggcccgacagtcttattgtcccccccgcccaccgctgccactgcccccgcccctgcctgaggggaccacatacctgctcaggggttccttcatgtcctgcaaaagacagggacggagggtggggagtgagccaagctcctggctcacctcaatgtccctgctcccttcttgtccgtgtcttagggcaagacccatcctgtcccctgggcattcccttcccacaattgagcttcatggcactcctgagccttccccactgccctagctcccactaccaccagagcccccagtgcctcacctaagctgagctaccctgtcagcccacggccacacgcctgaggtcctgcaactcaggag

SEQ ID NO: 3600 - DNA, 1401 bp, Artificial sequence
  DNA replication origin
tccagagtccctcaagcgggaacctgcctcgtgtctcccaggagccatggaggctgtggaactcgccagaaaactgcaggaggaagctacgtgctccatctgtctggattacttcacagaccctgtgatgaccacctgtggccacaacttctgccgagcctgcatccagctgagctgggaaaaggcgaggggcaagaaggggaggcggaagcggaagggctccttcccctgccccgagtgcagagagatgtccccgcagaggaacctgctgcccaaccggctgctgaccaaggtggccgagatggcgcagcagcatcctggtctgcagaagcaagacctgtgccaggagcaccacgagcccctcaagcttttctgccagaaggaccagagccccatctgtgtggtgtgcagggagtcccgggagcaccggctgcacagggtgctgcccgccgaggaggcagtgcaggggtacaaggtaggccacatcggggcccaggtcaaggggccggggaggaggcatccagggggacaaggtgacccagatcatgggggagggaggaggtgtccagggacaaagtggcccgagtcaggggctggggaggaggcatccaggggacaaggtggcctgtggctgggtaggggtgtccctggggacaatgtgggcctacactgtatgatgcaggcattgcaaaatcttacctctcctctcagagtattttgggtggctctgagaaccaaactgatttgagacagataagcagaagcaaagcactgaaattcattccctgtaagctttccatgacccaggagtcgctcccaaggagccagaggcccatggaagcatgttagagccaaacatgtacctgaggaggatgagggttagtttagcagggtccctttgcacagatttctctggtttcggctttcccgcccttggtaagaacatggctttcctcctggcctagggcagtcctctctggcatggtggctgtgccttctgctcttaggaaggccgagggtcacagcaattcttacacctgcccttttttaagtgccttcagctcaaaataatccaaggtggcacattctgggtgacgtattttgatcccctgcccctcctgaggagggtctctggggtgggtgcagtttcagcgagcacaactggactctaggcaggaggtagggggatcgctgatcccaaatcctgcggtttgtgtgtcccacagttgaagctggaggaggacatggagtaccttcgggagcagatcaccaggacagggaatctgcaggccagggaggagcagagcttagccgagtggcaggtgggtgcccagggctgtccagtccctttcctgctgctgctccatcttcctgcatttccacgtctgtgtctgcccgtgg

SEQ ID NO: 3601 - DNA, 840 bp, Artificial sequence
  DNA replication origin
cgtgtacctgtgtgtacatgcatgtatgtttaccgatatgtgcatctgtgcctgtgtgtgctgtgtttgtggatcagtgtttctgtgcgtacatgtttgtatttgtgtggtgtgtatgcgtgggtatgcgtgtgtgcacatgcacgtttgtatacatacatgggtatgtgtatgggtgttcgtctgtgcgtacatgcacacgcgtgttttttctgaaccccacctcactaccgaatggaagagagcttttttcctctgatagcccatcccttcttcctttggtgtacggggttttgttaaagaaaaaattctgacatttgaaaggctctttagtcaggctacttgcaatgggagagttgcgccagcaaagacagctggggatgtatgggggagttggagtggggatctgggtggggtcagtggatggaaagtgattaagggaaggctccaagggtaggggcttctccctaagctgacctagcaggcttctccagaaaggcaggttgaaggcctagccggcaacggtctgtcggggaggaggagctgatgagatgtggagctgggggtagccagcagcaggcggaagtggacgggtagggtccaggcccagtggagaggagaggcggaggggcctgcagagcattggtcagggagggtctgtgtagtttctggggaggcatctgtgtctgttgttgacaaggctaaaaatgatgactctggactctctaactggactgcagtcctagccctcctctgtaaagggaggctgtacaggacggttgcacactgccggcgcccagatcatcgggctgctccctccaactctctccagagtccctc

SEQ ID NO: 3602 - DNA, 628 bp, Artificial sequence
  DNA replication origin
cttcccgcctccgccggccgccgcgtccctggaggggctagcgcgcttcaacaaggtaactctaccgggaccctagcggaccagagcgggaaggacagccatcccggcagccagagccagagccccaggcccgctgccgctgtccctgcccggcttcggtcagggtgggctgggtgcctccgttagggctcttggggggagtcggagggctggcgccgggtggttggcgtgcagaaagctccgagaaactggacgtgggacagagccggggaagtctgagacccctagacgccctcgctttaggggatggcagaacggaaggggagaatcgtgcttgcagtgtagacgcgattttcaactccttctgcaactcggtccccatagcaaccccgtggcgtaggcgaaagtctgtagatctccactgcgtggggtcgcgagtgttgagattgcagggggcatctatgtgcatgcttgtgtgcctgtgcgtgtgtgcgcgcgtgtacctgtgtgtacatgcatgtatgtttaccgatatgtgcatctgtgcctgtgtgtgctgtgtttgtggatcagtgtttctgtgcgtacatgtttgtatttgtgtggtgtgtatgcgtgggtatgcgtg

SEQ ID NO: 3603 - DNA, 1159 bp, Artificial sequence
  DNA replication origin
taacggaggcacccagcccaccctgaccgaagccgggcagggacagcggcagcgggcctggggctctggctctggctgccgggatggctgtccttcccgctctggtccgctagggtcccggtagagttaccttgttgaagcgcgctagcccctccagggacgcggcggccggcggaggcgggaaggccgggcgttggagggcgaggaggaccgggttaggcttaggtcgtggcccaggcgccacaggagggtagcctaggcggcggggtgggggctactcaccgcggggaaggggggcccgcacagcgcctagtgcacctggccgagcgctcgctgccgggaaaggctgggtctgcccccacgaagcccaggaggctgcggcccggcccggggcgtggggacctggggtcgggaggcctagggactttgtggcgtcagcgggggctggggggcggcgggggaggggaatgctgggcgagggagtgttcggcggccgggactggggcggcgcctcttaggagaggttgggggtggcttggggaaggaaggcggcagggggtggaaggctctggacgagccggggacaggcgcagcgggtgctgactgggcggtggggaggatgtggtccacagcccagcgaagggaggagtcttgttggcctggggtgggacttttaggggaggttaagggagtgtggagggtggggagttggggggttacttgggggtggggagtggaatggggacagctggtggggctaggggcgggcaggcgagcgtcagggtggggggagtgggattggaagaggcttctcaacctggggttggggctgcgggagggcacgcgagccccaggctggagggttaggtgaggggctaagttggtcggggtaggggatggagaggagtttgtgtgggctggggtgggggcgaggcagcaggagcgagtgcctgttgagaagctatgaagggggtccccaggagcagccagtcagccgccaggtctgcccacatggttggcagtcagcatcaggctgagggtacagggaggggcgtcccaatcctgtgggcggaccagtttggagggaccacctggcaggtcaggtcccctagaaccaggcgggacggggtgggtcttgccgacaccccaggtggttttg

SEQ ID NO: 3604 - DNA, 1084 bp, Artificial sequence
  DNA replication origin
ttgtgctggagagagatgatccccaccaccgcggcctacccgcatcaacccttcacaatgctggtgccagctctggtggccacgaccaacaggcatgaatataagggagaggcgcccgagtggagttccctgtgggccaatcagagagcagtgggccatcacgccacctgaggccagccaatgggaacgcggcaagctctataaaagcgagcaatccgctgaggtctgggcagaggacaccgcggggccaacagtttcggattcatggcccgaaccaagcagactgcgcgcaagtcaacgggtggcaaggcgccgcgcaagcagctggccaccaaggtggctcgcaagagcgcacctgccactggcggcgtgaagaagccgcaccgctaccggcccggcacggtggcgcttcgcgagatccgccgctaccagaagtccactgagctgctaatccgcaagttgcccttccagcggctgatgcgcgagatcgctcaggactttaagaccgacctgcgcttccagagctcggccgtgatggcgctgcaggaggcgtgcgagtcttacctggtggggctgtttgaggacaccaacctgtgtgtcatccatgccaaacgggtcaccatcatgcctaaggacatccagctggcacgccgtatccgcggggagcgggcctaggagggctatctcgccacctgagaggttgcgcaacgttcaccccaaaggctcttttaagagccacccacctggtcgaagagttgctgtagcaagctagtctcttgggtttcggggggttccttccgctggcctgtgctggcttacctacttctgattagggtgggaggctggtgaatcctgtgttcaccctgtccagttaggaggccagctactcacacgcgttacctctcagcctgtctccagtcacaaatccagctagtagtgtgtggggctaacttggcctatccgtttagataagaatcatggttggtctgttttggggacggggtgttgagggtagcctaattggtctatctccagttaggtaagcaaccccagctagttgtgtcaactcagcctatctacagtt

SEQ ID NO: 3605 - DNA, 1763 bp, Artificial sequence
  DNA replication origin
ttcagctagagaactccggcctgtgtagtgccttcagctaaggcgaacagtgaaagatgtggaggaggggagttatgagaagcagtggtggagagggccggcgagttaaggcctggcatgtagatttcactggtgctgtctcctggctgataagcatctaaaatcatctcacatgattaaattgattccttcctggtggagaggcaaagacaactttgtccattttgtcctgcttttaggaaaataggggcaagcagaaagcttttttacatccgttgtttctcaacaatggattattattggccttcagctccaaataatccttgtgccaaagtggcatcctttggggaagaggtggcatcccttgaggagggggtggcaccttttagagatgggtggcttcctttggagagagggtggtatcctttggggaggggtggcattgtttaaggagggggtggcatcctttggagagggtgtggcatcattttggaaggggtggcatcctttggagggggtggcatcctttcgggaggggatagcacactctacagaggaggtgccatcctttggagagtcggtggcatcatttggggagggaatggcaccctttggagaggagggggcatcctttgggtggcatcatttggggaggggtggcatcctttggaggggggtagcatcgtttgaggagggctggcatcctttggggaggggatagcatcgtttgaggaagggtggcatcctttggagaaggtgtggcatttttgaggagaggtggcattgtttggggagagttggcatcctttggggagggggtggcattgtttggggaggggtggcaccctttgaagagggtgtggcatctttgggggaggggtggcatcatttgggaagggctggcatcctttggagagggtatgacatcctttggaaagtgtgtggcatcctttggagagaggtggcaacctttggggagggcacggcaccctttggggaggggtggcatcctttggggagggtgtggcatcctttggagaggagtggcatcctttggggagggtgtggcatcctttggggagggtgtggcatcctttggagagggggtggcatcctttggagagggtgtggtatcctttggagaggtggtggcacccttcagagagggtgtggcatcatctggggagggagtggtgtcatttgaagaggggtggcatcctttgaagagggtatggcatcctttggagagggtgtggcatcgtttgggggagggtatggcatcctttggggaggggtggcatcctttggagagggtgtggcattgttttgtggaggggtggcatcctttggggagggtgtggcatcctttggggagggggtggtatcctttggggaggatattctcctatctttcaagagcaatgtacgttgagtgtggaatgaagaataatgaattattatgacaaggatttgggctgttttagatttaatatggtccagctaatgctgactccccacctctttcaatgggatgaatagcattccctcactcttaaactaagaatccccaaatgagaggtgcactaattgcacctgagcacccccctttcatttgggggccctgtagccactcacagacccacaggcaggaaaggccaatttgcggttgtggggttgtttgttggcagttcacccctaaatcctggctaatgtgggaatccaagtccctgatttagtacactagagatatttagaagtctaca

SEQ ID NO: 3606 - DNA, 1065 bp, Artificial sequence
  DNA replication origin
ggggacgataggcgcaggccaccacgcccgttaactttttaaatttttttgtagagacgaggtctcgctatgtcgtgtcacccaagctggttttgaactcctggccccaagtgatcctccagcctcctttggaggacacagatggacagggacccggtggccagcccattttcccatcccggcctgggaaagaagcgtcaaatgcactcgggaaaataacccacttcacctagttaatgtcttgggcggttctgggaaaagcgtttctgcgcagtccagagacctggaccttcatctccagcctgcgccccacggaggcggcaccggagccggcttccttaggtgtgttggtgacgtgctgggcgggtctggcggaccagcctcgcacctcctcgggcgcaacgcgagtgggttccgtcttgggttcctgcgcgaaggggcagcccaggctcagggcatgcggcgccagggtgctctgcttcacgaatgccggggtaccgcagtgctggggtgccggacgcaagggtgtcagatggggtgctgctgggattataagggtcaccagttgcagggatgctgggggtgctggggttacaggggtgtgggggcagaggatatgaatgcaggggtgcagtggtacccgagtgcagaagtgcaggggtgccgggagcagagttgtcaaatggtgtggtgctgagttcacaggggtgccagggatagagggaagccccggcaccagagtgcaggagtgttgggatgctggggctgcaggggtgccggggaagatgggtacgcagtgcaggggtgccgcggtgctgtgacgccccaatactgaggggtgcagtatccagttggttctaaattcattctcacccgcctcacaccacaaaccaattggctgatgcgccttctcgagctttccaaagccacccttcattccgctgcctctctgcgaccctcggttttatttctgagtttggaatttgttgtatttcatgcacgtttgcgccttaatgttttctccccaatctttgcatgtcaccaagatttctcgacccccgtgtg

SEQ ID NO: 3607 - DNA, 1963 bp, Artificial sequence
  DNA replication origin
cctgttgctggtctccgtccggtcgccggccgtctaggtctccggccctccccagccgctcctgcgcccttgccggccccgccgcccgcagccctggcgctccctgcgggccccgccgaggccgcctgcgccctgtgccagcgcgcgccccgggaaccggtgcgcgccgactgcggccaccgcttctgtcgggcgtgcgtggtgcgcttctgggccgaggaggacgggcccttcccgtgccccgagtgcgccgacgactgctggcagcgcgccgtggagcccggcaggcccccgctcagccgccgccttctggcgctcgaggaggcggccgcggcgcccgcgcgcgacggcccggccagcgaggccgcgctgcagctgctgtgccgcgccgacgccggcccgctctgcgccgcctgccgtatggctgcgggccccgagccgcccgagtgggaaccgcgctggaggaaggcgctgcgcggcaaggtgcgcgccgcggggtcccgtgccccaccccggacggtgccctgcgcctctccgcccccgccccggtccccctgagccctgggcccttcccgtctccactgttcctgtccccggattgtccccgtccccggattgtccccctcccctcaccgccacgggtcccctctccagcgtgtgctgggcccctccctcctgcggcttgcctccccatatttcctgcgtctcttcggagtctggtccccttccccgtcttggtgtcccctgctgggcggtgccttatctccccaccccctaccttctacgaagtccttcccccaccagcgcccatctttgtggtcccatcactagctgtgccctgtctcgccctcatagaccccctctagttcctacagattgactcctccactcactcttcccttgggggagacatcacgcctcttgcccctctgtattccactgtgtccacaggcctggcccaccttctcgtctgctccccgggccacccagccctcgcctgcaccccctgtcccctctcccatctttcagaaacccgctctgagagtctggcagcagcgggtccgggagtctggagccttgcccatggcgggttggttgtgggacacagaataggagacaacagccagcctggggtcctgctcttcaatacaggggaggggaagccagccagactgtgtccctgggtgctcctcctgcattgggggtcctgccaccgggcagagcgacccccatccggctcaggcagggcagggtgtagggcaggctgtgcagacctttggtacaggccgaactcacactgaacagggccacttacagacacagaactcctaaacccacctagacagtccccttagccccagcacccagatccttctgaataggtgtgaagcccaagaaaccttttgactgcctgtgcgttcctgccctagacaaccgggcttcgaggttatctctgggatggtcagactgtgtgcagtcagctggggtgatgtccctcagtactgggctgggttgggggacccagagcttctgcccacccctggtgaccttcttttctttacaggagaacaaggggtctgtggaaatcatgagaaaggacttgaatgacgcccgggacctgcatggccaggcagagtcagcagctgcagtgtggaaggcaagtggggggacctggggcagcctggaatgaggggactgtgggctcagggctctagacaaagggaccaccaggccaagtgggccaggcctctgaactgctcagctggttggttggaggaggggcctctggacttaagtgagcttcagggtattttttttaggatgtgtttgtatttctcaaatagaatctagccaaagccagtggaagcctctttttctcctcacattttacctgtaggtgatggcagcatcagacttcttttttttttcccaagagacagagtctcacttcattacccaggct

SEQ ID NO: 3608 - DNA, 1494 bp, Artificial sequence
  DNA replication origin
ggtgaaaccccgtctctaggaaaaatagaacaaattagccgggcgtggtggcgggcgcctgtaggcccagcttctcgggagcctgaggccggagtatggcgtgaacccgggaggcggaacttgcagtgagccgagatggcgcgtctgcactccagcctgggtcacagagcgagactctgtctggaagaaaagtaaagaaaaagccattaaaaaaaaaaaaaaaaaaaagcctccagcacctggtattctcaggcggtctcccatccaagtactaaccaggctcgtccctgcttagcttccgagatcagtcgcgttcagggtggtatggtcgtaggcgccagaagaggagcctggctcccccaagtgcccggccagccttgccggccggattccagctgtcaccgcccgcccagggccgcggggctcggatcgtggaccctcgagccgctcgcccgcggccttcccgtggctcccgagctcccgggatcctgccacatccggcccgctcggaacagggagtgctccgaggcgtcacggcccagggcccacgatcctgggaccccttccattcctccgccctgtcgcggatgtatcgttttggatccctcgccgctcagaagatcctgcgaggccccatcttgccccaaccaaccagagccgtcaaggctggcccaaggacgaacagccggcccagcctcgcgggggtttttctcacaacgcccccacaacgttcgcttgtcccgaccaagacccggtctattggcaagagggcgtgggctatagcggttcagggtttggccctgctttgccccgggctggcactagaggcggcggcctgatcctgggtgtgaggggctgagagaaacccagacacaccccaccaccaccaggagcaaatctgcttccccacacaaatacacacctgggtgctctctcacgtgcgggcagacgcgcgcgcgcgcgcacacacacacacacacatcccaccaggaggaaatccactcccccacacacagacacacccgagctctcgcacgcgtgcgcgtgctcacacacacacacagggcttgaagaagaggtaggacgagatggatggagcgatagaaaccgagggagggatagaggcagcgatcgagacaggcgagagggaaagagacagacagaagggacagctattttaatgggagagacttccggctctctatccattctaatgatagagacacctgtgtgaccccaggcattctaatgggagcggtccctgactgatgtcagaccttctaatactagagactcctgggagacttcaggcattctaatgggagaggctcttggccgacctccagtcttccaataacagagacacctgggagaccccaggcattctgataagagagacttctggccaacgccagtcattccagtgattcagacaccttgacgaccacaggcattttgatgagagaaacttctggccgatgccaggcattctaa

SEQ ID NO: 3609 - DNA, 2130 bp, Artificial sequence
  DNA replication origin
gatttgctcctggtggtggtggggtgtgtctgggtttctctcagcccctcacacccaggatcaggccgccgcctctagtgccagcccggggcaaagcagggccaaaccctgaaccgctatagcccacgccctcttgccaatagaccgggtcttggtcgggacaagcgaacgttgtgggggcgttgtgagaaaaacccccgcgaggctgggccggctgttcgtccttgggccagccttgacggctctggttggttggggcaagatggggcctcgcaggatcttctgagcggcgagggatccaaaacgatacatccgcgacagggcggaggaatggaaggggtcccaggatcgtgggccctgggccgtgacgcctcggagcactccctgttccgagcgggccggatgtggcaggatcccgggagctcgggagccacgggaaggccgcgggcgagcggctcgagggtccacgatccgagccccgcggccctgggcgggcggtgacagctggaatccggccggcaaggctggccgggcacttgggggagccaggctcctcttctggcgcctacgaccataccaccctgaacgcgactgatctcggaagctaagcagggacgagcctggttagtacttggatgggagaccgcctgagaataccaggtgctggaggcttttttttttttttttttttaatggctttttctttacttttcttccagacagagtctcgctctgtgacccaggctggagtgcagacgcgccatctcggctcactgcaagttccgcctcccgggttcacgccatactccggcctcaggctcccgagaagctgggcctacaggcgcccgccaccacgcccggctaatttgttctatttttcctagagacggggtttcaccctgttagccgggatggtctcgatctcctgacctcgtgatccacccgcctcggcctcccagagtgctgggattacaggcgggagccaccgcgcccgcccggcctgctgtaggcttttttgggtttcccgctgcctcccttccccctgcagtcgccatgcttccgaaccttctctgactctgctctccctttatagcacacctataccccagcggcagccggggacatcctacttggggtcccagctactcaggagttcagaggtgtcagggcccagggcccacgatcctgggacgccctccggtcctccgccctgtcgcggaggcagcgttttggatccctcgccgcacaggggctcctgcgaggccccctcttgccccacccacccagagccgtcagggctggccgaaggcgaacagccggcccagccgcgcggggcctttctctcacaacgcccccaccacggtcgcttgtcccgaccaagacccggccgggggggcaagagggcgtggggtgtagcgggtcggggggtggccctgttttgccccgggctggcactagaggcggcggcctgatctcgggtgagagggcctgagagaaacccagacacaccccaccgccaccaggagcaaatccactcccccacacacagacacacccgggcgcgctcgcacgcgcgcgcgcggacacacacacgcacacacgcacgcgcacacgcacgcacacacacgcggcttgaaggagagcaaggacgagatggatggagagatagaaaccgagggagggagagagacagcgatcgagagagacaggggagggcgagagggaaggagacagacagagaggctgagaaagagagaggcacagagaaagagagagagagagacagagagacagagggaaaacgacagaagtaccgcgaggtccagggggaaacccagaagagagaggcggagggagctagagagcgagagcgatagagccttagagaggaagcgcccggctccgttaggcagcgccctcttgagcaggccgggatagggtggagggggcttgggctgcgcccagaacacgggggccaggcggtccgtgcgagaggaccaacggagcgctgaggcgggcgtcttcttggatgaattgcttgctttggaggtgggtttcgtaggctcctgcctttcttggcacctccctgtgctctgggtgccttgcggcgggccccgagatttgcagagc

SEQ ID NO: 3610 - DNA, 666 bp, Artificial sequence
  DNA replication origin
gagagagacaggggagggcgagagggaaggagacagacagagaggctgagaaagagagaggcacagagaaagagagagagagagacagagagacagagggaaaacgacagaagtaccgcgaggtccagggggaaacccagaagagagaggcggagggagctagagagcgagagcgatagagccttagagaggaagcgcccggctccgttaggcagcgccctcttgagcaggccgggatagggtggagggggcttgggctgcgcccagaacacgggggccaggcggtccgtgcgagaggaccaacggagcgctgaggcgggcgtcttcttggatgaattgcttgctttggaggtgggtttcgtaggctcctgcctttcttggcacctccctgtgctctgggtgccttgcggcgggccccgagatttgcagagcgcgcccgcccgtttggcgggagccgtggcaccgggcgggcccggaggcctgggtctctggcgagtcctcgggactggagtcgtcgacacgaagcggggggcattgggaatcccgggtgcacagggactgttttcccggtggctggcgaagcaatgtccttcccccgggtaaagcagcccatgcgttccggagccgacgtcttggctggcgtctgtggcacccgctgcccctgcc

SEQ ID NO: 3611 - DNA, 1149 bp, Artificial sequence
  DNA replication origin
  misc_feature (1094)..(1149): n is a, c, g, or t
tttggaggtgggtttcgtaggctcctgcctttcttggcacctccctgtgctctgggtgccttgcggcgggccccgagatttgcagagcgcgcccgcccgtttggcgggagccgtggcaccgggcgggcccggaggcctgggtctctggcgagtcctcgggactggagtcgtcgacacgaagcggggggcattgggaatcccgggtgcacagggactgttttcccggtggctggcgaagcaatgtccttcccccgggtaaagcagcccatgcgttccggagccgacgtcttggctggcgtctgtggcacccgctgcccctgcccgccccttcacccggtttggaagggtgcgacgacggcgcccgatgggtgaattgaatcgcctgggcgttccgggagcgggaaggcaccgcgaacggcagggaacccagcggctgcgcctttggggtccggccccctgccctcccaggctggagccgggctcctggcggggcggcggcgaggcggaagcggtgggatgctgctgcccggccggcgtgcagtaggggcggacccccagcaggaggaccccggctgcggctgcagcgggggtgtaggtgggcggtaaagggggagcagagtcaggggaggttgggaagcatggcgactgtggggggaagggaggcagcggggaagccacaaaagcctacagcaggccgggcgggcgcggtggctcgcgcctgtaatcccagcactctgggaggccgaggcgggtggatcacgaggtcaggagctccagaccatcccggctaacagggtgaaagcccgtctctaggaaaaatagaacaaagtagccgggcgtggtggcgggcgcctgtaggcccagctactcgggaggctgaggccggggaatggcgtgaacccgggaggcggagcttgcagtgagccgagatggcgccaccgcactccagcctgggcgacagggcgagactccgtctggaagaaaaggaaagaaacagcaaaaagccaaagaaaaagcctacagcacccggtattcccaggcggtctcccatccaagtactaaccaggcccgaccctgcttagcttccgagatcnnnnnnnnnnnnnnnnnnnnnnnnnnnnnnnnnnnnnnnnnnnnnnnnnnnnnnnn

SEQ ID NO: 3612 - DNA, 1415 bp, Artificial sequence
  DNA replication origin
  misc_feature (1)..(452): n is a, c, g, or t
nnnnnnnnnnnnnnnnnnnnnnnnnnnnnnnnnnnnnnnnnnnnnnnnnnnnnnnnnnnnnnnnnnnnnnnnnnnnnnnnnnnnnnnnnnnnnnnnnnnnnnnnnnnnnnnnnnnnnnnnnnnnnnnnnnnnnnnnnnnnnnnnnnnnnnnnnnnnnnnnnnnnnnnnnnnnnnnnnnnnnnnnnnnnnnnnnnnnnnnnnnnnnnnnnnnnnnnnnnnnnnnnnnnnnnnnnnnnnnnnnnnnnnnnnnnnnnnnnnnnnnnnnnnnnnnnnnnnnnnnnnnnnnnnnnnnnnnnnnnnnnnnnnnnnnnnnnnnnnnnnnnnnnnnnnnnnnnnnnnnnnnnnnnnnnnnnnnnnnnnnnnnnnnnnnnnnnnnnnnnnnnnnnnnnnnnnnnnnnnnnnnnnnnnnnnnnnnnnnnnnnnnnnnnnnnnnnnnnnnnnnnnnnnnnnnngatcctgggacgccctccggtcctccgccctgtcgcggaggcagcgttttggatccctcgccgcacaggggctcctgcgaggccccctcttgccccacccacccagagccgtcagggctggccgaaggcgaacagccggcccagccgcgcggggcctttctctcacaacgcccccaccacggtcgcttgtcccgaccaagacccggccgggggggcaagagggcgtggggtgtagcgggtcggggggtggccctgttttgccccgggctggcactagaggcggcggcctgatctcgggtgagagggcctgagagaaacccagacacaccccaccgccaccaggagcaaatccactcccccacacacagacacacccgggcgcgctcgcacgcgcgcgcgcggactcacacacacacacacagacacacagacacacacgcacacacgcacgcgcacacgcacgcacacacacacgcggcttgaaggagagcaaggacgagatggatggagagatagaaaccgagggagggagagagacagcgatcgagagagacaggggagggcgagagggaaggagacagacagagaggctgagaaagagagaggcacagagaaagagagagagagagacagagagacagagggaaaacgacaaaagtagcgcgaggtccagggggaaacccagaagagagaggcggagggagctagagagcgagagcgatagagccttagagaggaagcgcccggctccgttaggcagcgccctcttgagcaggccgggatagggtggagggggcttgggctgcgcccagaacacgggggccaggcggtccgtgcgagaggaccaacggagcgctgaggcgggcgttttcttggatgaattgcttgctttggaggtgggtttcgtaggctcctgcctttcttggcacctccctgtgctctgggtgccttgcggcgggcccc

SEQ ID NO: 3613 - DNA, 673 bp, Artificial sequence
  DNA replication origin
gatcgagagagacaggggagggcgagagggaaggagacagacagagaggctgagaaagagagaggcacagagaaagagagagagagagacagagagacagagggaaaacgacaaaagtagcgcgaggtccagggggaaacccagaagagagaggcggagggagctagagagcgagagcgatagagccttagagaggaagcgcccggctccgttaggcagcgccctcttgagcaggccgggatagggtggagggggcttgggctgcgcccagaacacgggggccaggcggtccgtgcgagaggaccaacggagcgctgaggcgggcgttttcttggatgaattgcttgctttggaggtgggtttcgtaggctcctgcctttcttggcacctccctgtgctctgggtgccttgcggcgggccccgagatttgcagagcgcgcccgcccgtttggcgggagccgtggcaccgggcgggcccggaggcctgggtctctggcgagtcctcgggactggagtcgtcgacacgaagcggggggcattgggaatcccgggtgcacagggcctgttttcccggtggctggcgaagcaatgtccttcccccgggtaaagcagcccatgcgttccggagccgacgtcttggctggcgtctgtggcacccgctgcccctgcccgc

SEQ ID NO: 3614 - DNA, 1185 bp, Artificial sequence
  DNA replication origin
tttcgtaggctcctgcctttcttggcacctccctgtgctctgggtgccttgcggcgggccccgagatttgcagagcgcgcccgcccgtttggcgggagccgtggcaccgggcgggcccggaggcctgggtctctggcgagtcctcgggactggagtcgtcgacacgaagcggggggcattgggaatcccgggtgcacagggcctgttttcccggtggctggcgaagcaatgtccttcccccgggtaaagcagcccatgcgttccggagccgacgtcttggctggcgtctgtggcacccgctgcccctgcccgccccttcccccggtttggaagggtgcgacgacggcgcccgatgggtgaattgaatcgcctgggcgttccgggagcgggaaggcaccgcgaacggcagggaacccagcggctgcgcctttggggtccggccccctgccctcccaggctggagccgggctcctggcggggcggcggcgaggcggaagcggtgggatgctgctgcccggccggcgtgcagtaggggcggacccccagcaggaggaccccggctgcggctgcggcgggggtgtaggtgggcggtaaagggggagcagagtcaggggaggttgggaagcatggcgactgtggggggaagggaggcagcggggaagccacaaaagcctacagcaggccgggcgggcgcggtggctcgcgcctgtaatcccagcactctgggaggccgaggcgggtggatcacgaggtcaggagctccagaccatcccggctaacagggtgaaagcccgtctctaggaaaaatagaacaaagtagccgggcgtggtggcgggcgcctgtaggcccagctactcgggaggctgaggccggggaatggcgtgaacccgggaggcggagcttgcagtgagccgagatggcgccactgcactccagcctgggcgacagggcgagactccgtctggaagaaaaggaaagaaacagcaaaaagccaaagaaaaagcctacagcacccggtattcccaggcggtctcccatccaagtactaaccaggcccgaccctgcttagcttccgagatcagacgagatcgggcgcgttcagggtggtatggccgtagacgctgaaggaggcgcctggctgccccaagagcccagcccggcccggccgtgcccgccggattgca

SEQ ID NO: 3615 - DNA, 1590 bp, Artificial sequence
  DNA replication origin
tggaagaaaaggaaagaaacagcaaaaagccaaagaaaaagcctacagcacccggtattcccaggcggtctcccatccaagtactaaccaggcccgaccctgcttagcttccgagatcagacgagatcgggcgcgttcagggtggtatggccgtagacgctgaaggaggcgcctggctgccccaagagcccagcccggcccggccgtgcccgccggattgcagccgacaccgccagcccggggccgcggggctcggatcggggacccccgagccgctggcccgcggccttcccccggctcccgcgctcccgagcttccaccacatcgggcccgctcggagcagggagtgctccgaggcgtcagggcccagggcccacgatcctgggacgccctccggtcctccgccctgtcgcggaggcagcgttttggatccctcgccgcacaggggctcctgcgaggccccctcttgccccacccacccagagccgtcagggctggccgaaggcgaacagccggcccagccgcgcggggcctttctctcacaacgcccccaccacggtcgcttgtcccgaccaagacccggccgggggggcaagagggcgtggggtgtagcgggtcggggggtggccctgttttgccccgggctggcactagaggcggcggcctgatctcgggtgagagggcctgagagaaacccagacacaccccaccgccaccaggagcaaatccactcccccacacacagacacacccgggcgcgctcgcacgcgcgcgcgcggactcacacacacacacacagacacacagacacacacgcacacacgcacgcgcacacgcacgcacacacacacgcggcttgaaggagagcaaggacgagatggatggagagatagaaaccgagggagggagagagacagcgatcgagagagacaggggagggcgagagggaaggagacagacagagaggctgagaaagagagaggcacagagaaagagagagagagagacagagagacagagggaaaacgacaaaagtagcgcgaggtccagggggaaacccagaagagagaggcggagggagctagagagcgagagcgatagagccttagagaggaagcgcccggctccgttaggcagcgccctcttgagcaggccgggatagggtggagggggcttgggctgcgcccagaacacggggtccaggcggtccgtgcgagaggaccaacggagcgctgaggcgggcgttttcttggatgaattgcttgctttggaggtgggtttcgtaggctcctgcctttcttggcacctccctgtgctctgggtgccttgcggcgggccccgagatttgcagagcgcgcccgcccgtttggcgggagccgtggcaccgggcgggcccggaggcctgggtctctggcgagtcctcgggactggagtcgtcgacacgaagcggggggcattgggaatcccgggtgcacagggcctgttttcccggtggctggcgaagcaatgtccttcccccgggtaaagcagcccatgcgttccggagccgacgtcttggctggcgtctgtggcacccgctgcccctgcccg

SEQ ID NO: 3616 - DNA, 1158 bp, Artificial sequence
  DNA replication origin
ctttcttggcacctccctgtgctctgggtgccttgcggcgggccccgagatttgcagagcgcgcccgcccgtttggcgggagccgtggcaccgggcgggcccggaggcctgggtctctggcgagtcctcgggactggagtcgtcgacacgaagcggggggcattgggaatcccgggtgcacagggcctgttttcccggtggctggcgaagcaatgtccttcccccgggtaaagcagcccatgcgttccggagccgacgtcttggctggcgtctgtggcacccgctgcccctgcccgccccttcccccggtttggaagggtgcgacgacggcgcccgatgggtgaattgaatcgcctgggcgttccgggagcgggaaggcaccgcaaacggcagggaacccagcggctgcgcctttggggtccggccccctgccctcccaggctggagccgggctcctggcggggcggcggcgaggcggaagcggtgggatgctgctgcccggccggcgtgcagtaggggcggacccccagcaggaggaccccggctgcggctgcggcgggggtgtaggtgggcggtaaagggggagcagagtcaggggaggttgggaagcatggcgactgtggggggaagggaggcagcggggaagccacaaaagcctacagcaggccgggcgggcgcggtggctcgcgcctgtaatcccagcactctgggaggccgaggcgggtggatcacgaggtcaggagctccagaccatcccggctaacagggtgaaagcccgtctctaggaaaaatagaacaaagtagccgggcgtggtggcgggcgcctgtaggcccagctactcgggaggctgaggccggggaatggcgtgaacccgggaggcggagcttgcagtgagccgagatggcgccactgcactccagcctgggcgacagggcgagactccgtctggaagaaaaggaaagaaacagcaaaaagccaaagaaaaagcctacagcacccggtattcccaggcggtctcccatccaagtactaaccaggcccgaccctgcttagcttccgagatcagacgagatcgggcgcgttcagggtggtatggccgtagacgctgaaggaggcgcctggctgccccaagagcccagcccggcccggccgtgccc

SEQ ID NO: 3617 - DNA, 1468 bp, Artificial sequence
  DNA replication origin
ccagctactcgggaggctgaggccggggaatggcgtgaacccgggaggcggagcttgcagtgagccgagatggcgccactgcactccagcctgggcgacagggcgagactccgtctggaagaaaaggaaagaaacagcaaaaagccaaagaaaaagcctacagcacccggtattcccaggcggtctcccatccaagtactaaccaggcccgaccctgcttagcttccgagatcagacgagatcgggcgcgttcagggtggtatggccgtagacgctgaaggaggcgcctggctgccccaagagcccagcccggcccggccgtgcccgccggattgcagccgacaccgccagcccggggccgcggggctcggatcggggacccccgagccgctggcccgcggccttcccccggctcccgcgctcccgagcttccaccacatcgggcccgctcggagcagggagtgctccgaggcgtcagggcccagggcccacgatcctgggacgccctccggtcctccgccctgtcgcggaggcagcgttttggatccctcgccgcacaggggctcctgcgaggccccctcttgccccacccacccagagccgtcagggctggccgaaggcgaacagccggcccagccgcgcggggcctttctctcacaacgcccccaccacggtcgcttgtcccgaccaagacccggccgggggggcaagagggcgtggggtgtagcgggtcggggggtggccctgttttgccccgggctggcactagaggcggcggcctgatctcgggtgagagggcctgagagaaacccagacacaccccaccgccaccaggagcaaatccactcccccacacacagacacacccgggcgcgctcgcacgcgcgcgcgcggactcacacacacacacacagacacacagacacacacgcacacacgcacgcgcacacgcacgcacacacacacgcggcttgaaggagagcaaggacgagatggatggagagatagaaaccgagggagggagagagacagcgatcgagagagacaggggagggcgagagggaaggagacagacagagaggctgagaaagagagaggcacagagaaagagagagagagagacagagagacagagggaaaacgacaaaagtagcgcgaggtccagggggaaacccagaagagagaggcggagggagctagagagcgagagcgatagagccttagagaggaagcgcccggctccgttaggcagcgccctcttgagcaggccgggatagggtggagggggcttgggctgcgcccagaacacgggggccaggcggtccgtgcgagaggaccaacggagcgctgaggcgggcgttttcttggatgaattgcttgctttggaggtgggtttcgtaggctcctgcctttcttggcacctccctgtgctctgggtgccttgcggcgggccccgagatttgcagag

SEQ ID NO: 3618 - DNA, 652 bp, Artificial sequence
  DNA replication origin
gagagagacaggggagggcgagagggaaggagacagacagagaggctgagaaagagagaggcacagagaaagagagagagagagacagagagacagagggaaaacgacaaaagtagcgcgaggtccagggggaaacccagaagagagaggcggagggagctagagagcgagagcgatagagccttagagaggaagcgcccggctccgttaggcagcgccctcttgagcaggccgggatagggtggagggggcttgggctgcgcccagaacacgggggccaggcggtccgtgcgagaggaccaacggagcgctgaggcgggcgttttcttggatgaattgcttgctttggaggtgggtttcgtaggctcctgcctttcttggcacctccctgtgctctgggtgccttgcggcgggccccgagatttgcagagcgcgcccgcccgtttggcgggagccgtggcaccgggcgggcccggaggcctgggtctctggcgagtcctcgggactggagtcgtcgacacgaagcggggggcattgggaatcccgggtgcacagggcctgttttcccggtggctggcgaagcaatgtccttcccccgggtaaagcagcccatgcgttccggagccgacgtcttggctggcgtctgtggcac

SEQ ID NO: 3619 - DNA, 1133 bp, Artificial sequence
  DNA replication origin
gctctgggtgccttgcggcgggccccgagatttgcagagcgcgcccgcccgtttggcgggagccgtggcaccgggcgggcccggaggcctgggtctctggcgagtcctcgggactggagtcgtcgacacgaagcggggggcattgggaatcccgggtgcacagggcctgttttcccggtggctggcgaagcaatgtccttcccccgggtaaagcagcccatgcgttccggagccgacgtcttggctggcgtctgtggcacccgctgcccctgcccgccccttcccccggtttggaagggtgcgacgacggcgcccgatgggtgaattgaatcgcctgggcgttccgggagcgggaaggcaccgcgaacggcagggaacccagcggctgcgcctttggggtccggccccctgccctcccaggctggagccgggctcctggcggggcggcggcgaggcggaagcggtgggatgctgctgcccggccggcgtgcagtaggggcggacccccagcaggaggaccccggctgcggctgcggcgggggtgtaggtgggcggtaaagggggagcagagtcaggggaggttgggtagcatggcgactgtggggggaagggaggcagcggggaagccacaaaagcctacagcaggccgggcgggcgcggtggctcgcgcctgtaatcccagcactctgggaggccgaggcgggtggatcacgaggtcaggagctccagaccatcccggctaacagggtgaaagcccgtctctaggaaaaatagaacaaagtagccgggcgtggtggcgggcgcctgtaggcccagctactcgggaggctgaggccggggaatggcgtgaacccgggaggcggagcttgcagtgagccgagatggcgccactgcactccagcctgggcgacagggcgagactccgtctggaagaaaaggaaagaaacagcaaaaagccaaagaaaaagcctacagcacccggtattcccaggcggtctcccatccaagtactaaccaggcccgaccctgcttagcttccgagatcagacgagatcgggcgcgttcagggtggtatggccgtagacgctgaaggaggcgcctggctgccccaagagcccagcccggcccggccg

SEQ ID NO: 3620 - DNA, 1331 bp, Artificial sequence
  DNA replication origin
aacagcaaaaagccaaagaaaaagcctacagcacccggtattcccaggcggtctcccatccaagtactaaccaggcccgaccctgcttagcttccgagatcagacgagatcgggcgcgttcagggtggtatggccgtagacgctgaaggaggcgcctggctgccccaagagcccagcccggcccggccgtgcccgccggattgcagccgacaccgccagcccggggccgcggggctcggatcggggacccccgagccgctggcccgcggccttcccccggctcccgcgctcccgagcttccaccacatcgggcccgctcggagcagggagtgctccgaggcgtcagggcccagggcccacgatcctgggacgccctccggtcctccgccctgtcgcggaggcagcgttttggatccctcgccgcacaggggctcctgcgaggccccctcttgccccacccacccagagccgtcagggctggccgaaggcgaacagccggcccagccgcgcggggcctttctctcacaacgcccccaccacggtcgcttgtcccgaccaagacccggccgggggggcaagagggcgtggggtgtagcgggtcggggggtggccctgttttgccccgggctggcactagaggcggcggcctgatctcgggtgagagggcctgagagaaacccagacacaccccaccgccaccaggagcaaatccactcccccacacacagacacacccgggcgcgctcgcacgcgcgcgcgcggactcacacacacacacacagacacacagacacacacgcacacacgcacgcgcacacgcacgcacacacacacgcggcttgaaggagagcaaggacgagatggatggagagatagaaaccgagggagggagagagacagcgatcgagagagacaggggagggcgagagggaaggagacagacagagaggctgagaaagagagaggcacagagaaagagagagagagagacagagagacagagggaaaacgacaaaagtagcgcgaggtccagggggaaacccagaagagagaggcggagggagctagagagcgagagcgatagagccttagagaggaagcgcccggctccgttaggcagcgccctcttgagcaggccgggatagggtggagggggcttgggctgcgcccagaacacggggtccaggcggtccgtgcgagaggaccaacggagcgctgaggcgggcgttttcttggatgaattgcttgctttggaggtgggtttcgtaggctcctgcctttcttggcacctccctgtgctctgggtgccttgcggcgggccccgagatttg

SEQ ID NO: 3621 - DNA, 659 bp, Artificial sequence
  DNA replication origin
gatcgagagagacaggggagggcgagagggaaggagacagacagagaggctgagaaagagagaggcacagagaaagagagagagagagacagagagacagagggaaaacgacaaaagtagcgcgaggtccagggggaaacccagaagagagaggcggagggagctagagagcgagagcgatagagccttagagaggaagcgcccggctccgttaggcagcgccctcttgagcaggccgggatagggtggagggggcttgggctgcgcccagaacacggggtccaggcggtccgtgcgagaggaccaacggagcgctgaggcgggcgttttcttggatgaattgcttgctttggaggtgggtttcgtaggctcctgcctttcttggcacctccctgtgctctgggtgccttgcggcgggccccgagatttgcagagcgcgcccgcccgtttggcgggagccgtggcaccgggcgggcccggaggcctgggtctctggcgagtcctcgggactggagtcgtcgacacgaagcggggggcattgggaatcccgggtgcacagggcctgttttcccggtggctggcgaagcaatgtccttcccccgggtaaagcagcccatgcgttccggagccgacgtcttggctggcgtctgtggcacccg

SEQ ID NO: 3622 - DNA, 1147 bp, Artificial sequence
  DNA replication origin
cctttcttggcacctccctgtgctctgggtgccttgcggcgggccccgagatttgcagagcgcgcccgcccgtttggcgggagccgtggcaccgggcgggcccggaggcctgggtctctggcgagtcctcgggactggagtcgtcgacacgaagcggggggcattgggaatcccgggtgcacagggcctgttttcccggtggctggcgaagcaatgtccttcccccgggtaaagcagcccatgcgttccggagccgacgtcttggctggcgtctgtggcacccgctgcccctgcccgccccttcccccggtttggaagggtgcgacgacggcgcccgatgggtgaattgaatcgcctgggcgttccgggagcgggaaggcaccgcgaacggcagggaacccagcggctgcgcctttggggtccggccccctgccctcccaggctggagccgggctcctggcggggcggcggcgaggcggaagcggtgggatgctgctgccgggccggcgtgcagtaggggcggacccccagcaggaggaccccggctgcggctgcggcgggggtgtaggtgggcggtaaagggggagcagagtcaggggaggttgggaagcatggcgactgtggggggaagggaggcagcggggaagccacaaaagcctacagcaggccgggcgggcgcggtggctcgcgcctgtaatcccagcactctgggaggccgaggcgggtggatcacgaggtcaggagctccagaccatcccggctaacagggtgaaagcccgtctctaggaaaaatagaacaaagtagccgggcgtggtggcgggcgcctgtaggcccagctactcgggaggctgaggccggggaatggcgtgaacccgggaggcggagcttgcagtgagccgagatggcgccactgcactccagcctgggcgacagggcgagactccgtctggaagaaaaggaaagaaacagcaaaaagccaaagaaaaagcctacagcacccggtattcccaggcggtctcccatccaagtactaaccaggcccgaccctgcttagcttccgagatcagacgagatcgggcgcgttcagggtggtatggccgtagacgctgaaggaggcgcctggctgccccaagagcccagcccggc

SEQ ID NO: 3623 - DNA, 1395 bp, Artificial sequence
  DNA replication origin
gaggcggagcttgcagtgagccgagatggcgccactgcactccagcctgggcgacagggcgagactccgtctggaagaaaaggaaagaaacagcaaaaagccaaagaaaaagcctacagcacccggtattcccaggcggtctcccatccaagtactaaccaggcccgaccctgcttagcttccgagatcagacgagatcgggcgcgttcagggtggtatggccgtagacgctgaaggaggcgcctggctgccccaagagcccagcccggcccggccgtgcccgccggattgcagccgacaccgccagcccggggccgcggggctcggatcggggacccccgagccgctggcccgcggccttcccccagctcccgcgctcccgagcttccaccacatcgggcccgctcggagcagggagtgctccgaggcgtcagggcccagggcccacgatcctgggacgccctccggtcctccgccctgtcgcggaggcagcgttttggatccctcgccgcacaggggctcctgcgaggccccctcttgccccacccacccagagccgtcagggctggccgaaggcgaacagccggcccagccgcgcggggcctttctctcacaacgcccccaccacggtcgcttgtcccgaccaagacccggccgggggggcaagagggcgtggggtgtagcgggtcggggggtggccctgttttgccccgggctggcactagaggcggcggcctgatctcgggtgagagggcctgagagaaacccagacacaccccaccgccaccaggagcaaatccactcccccacacacagacacacccgggcgcgctcgcacgcgcgcgcgcggactcacacacacacacacagacacacagacacacacgcacacacgcacgcgcacacgcacgcacacacacacgcggcttgaaggagagcaaggacgagatggatggagagatagaaaccgagggagggagagagacagcgatcgagagagacaggggagggcgagagggaaggagacagacagagaggctgagaaagagagaggcacagagaaagagagagagagagacagagagacagagggaaaacgacaaaagtagcgcgaggtccagggggaaacccagaagagagaggcggagggagctagagagcgagagcgatagagccttagagaggaagtgcccggctccgttaggcagcgccgtcttgagcaggtcgggatagggtggagggggcttgggctgcgcccagaacacgggggccaggcggtccgtgcgagaggaccaacggagcgctgaggcgggcgttttcttggatgaattgcttgctttggaggtgggtttcgtaggctcctgcctttcttggcagctccctgtgctctgggtg

SEQ ID NO: 3624 - DNA, 657 bp, Artificial sequence
  DNA replication origin
gatcgagagagacaggggagggcgagagggaaggagacagacagagaggctgagaaagagagaggcacagagaaagagagagagagagacagagagacagagggaaaacgacaaaagtagcgcgaggtccagggggaaacccagaagagagaggcggagggagctagagagcgagagcgatagagccttagagaggaagtgcccggctccgttaggcagcgccgtcttgagcaggtcgggatagggtggagggggcttgggctgcgcccagaacacgggggccaggcggtccgtgcgagaggaccaacggagcgctgaggcgggcgttttcttggatgaattgcttgctttggaggtgggtttcgtaggctcctgcctttcttggcagctccctgtgctctgggtgccttgcggcgggccccgagatttgcagagcgcgcccgcccgtttggcgggagccgtggcaccgggcgggcccggaggcctgggtctctggcgagtcctcgggactggagtcgtcgacacgaagcggggggcattgggaatcccgggtgcacagggcctgttttcccggtggctggcgaagcaatgtccttcccccgggtaaagcagcccatgcgttccggagccgacgtcttggctggcgtctgtggcacc

SEQ ID NO: 3625 - DNA, 1113 bp, Artificial sequence
  DNA replication origin
ggcgggccccgagatttgcagagcgcgcccgcccgtttggcgggagccgtggcaccgggcgggcccggaggcctgggtctctggcgagtcctcgggactggagtcgtcgacacgaagcggggggcattgggaatcccgggtgcacagggcctgttttcccggtggctggcgaagcaatgtccttcccccgggtaaagcagcccatgcgttccggagccgacgtcttggctggcgtctgtggcacccgctgcccctgcccgccccttcccccggtttggaagggtgcgacgacggcgcccgatgggtgaattgaatcgcctgggcgttccgggagcgggaaggcaccgcgaacggcagggaacccagcggctgcgcctttggggtccggccccctgccctcccaggctggagccgggctcctggcggggcggcggcgaggcggaagcggtgggatgctgctgccgggccggcgtgcagtaggggcggacccccagcaggaggaccccggctgcggctgcggcgggggtgtaggtgggcggtaaagggggagcagagtcaggggaggttgggtagcatggcgactgtggggggaagggaggcagcggggaagccacaaaagcctacagcaggccgggcgggcgcggtggctcgcgcctgtaatcccagcactctgggaggccgaggcgggtggatcacgaggtcaggagctccagaccatcccggctaacagggtgaaagcccgtctctaggaaaaatagaacaaagtagccgggcgtggtggcgggcgcctgtaggcccagctactcgggaggctgaggccggggaatggcgtgaacccgggaggcggagcttgcagtgagccgagatggcgccactgcactccagcctgggcgacagggcgagactccgtctggaagaaaaggaaagaaacagcaaaaagccaaagaaaaagcctacagcacccggtattcccaggcggtctcccatccaagtactaaccaggcccgaccctgcttagcttccgagatcagacgagatcgggcgcgttcagggtggtatggccgtagacgctgaaggaggcgcctggctgccccaagagcccagcccggcccg

SEQ ID NO: 3626 - DNA, 1322 bp, Artificial sequence
  DNA replication origin
ggaagaaaaggaaagaaacagcaaaaagccaaagaaaaagcctacagcacccggtattcccaggcggtctcccatccaagtactaaccaggcccgaccctgcttagcttccgagatcagacgagatcgggcgcgttcagggtggtatggccgtagacgctgaaggaggcgcctggctgccccaagagcccagcccggcccggccgtgcccgccggattgcagccgacaccgccagcccggggccgcggggctcggatcggggacccccgagccgctggcccgcggccttcccccggctcccgcgctcccgagcttccaccacatcgggcccgctcggagcagggagtgctccgaggcgtcagggcccagggcccacgatcctgggacgccctccggtcctccgccctgtcgcggaggcagcgttttggatccctcgccgcacaggggctcctgcgaggccccctcttgccccacccacccagagccgtcagggctggccgaaggcgaacagccggcccagccgcgcggggcctttctctcacaacgcccccaccacggtcgcttgtcccgaccaagacccggccgggggggcaagagggcgtggggtgtagcgggtcggggggtggccctgttttgccccgggctggcactagaggcggcggcctgatctcgggtgagagggcctgagagaaacccagacacaccccaccgccaccaggagcaaatccactcccccacacacagacacacccgggcgcgctcgcacccgcgcgcgcggacacacacacacacacagacacacacgcacacacgcacgcgcacacgcacgcacacacacacgcggcttgaaggagagcaaggacgagatggatggagagatagaaaccgagggagggagagagacagcgatcgagagagacaggggagggcgagagggaaggagacagacagagaggctgagaaagagagaggcacagagaaagagagagagagagacagagagacagagggaaaacgacaaaagtagcgcgaggtccagggggaaacccagaagagagaggcggagggagctagagagcgagagcgatagagccttagagaggaagcgcccggctccgttaggcagcgccctcttgagcaggccgggatagggtggagggggcttgggctgcgcccagaacacggggtccaggcggtccgtgcgagaggaccaacggagcgctgaggcgggcgttttcttggatgaattgcttgctttggaggtgggtttcgtaggctcctgcctttcttggcacctccctgtgctctgggtgccttgcggc

SEQ ID NO: 3627 - DNA, 1151 bp, Artificial sequence
  DNA replication origin
gtttcgtaggctcctgcctttcttggcacctccctgtgctctgggtgccttgcggcgggccccgagatttgcagagcgcgcccgcccgtttggcgggagccgtggcaccgggcgggcccggaggcctgggtctctggcgagtcctcgggactggagtcgtcgacacgcagcgggagggcattgggaatcccgggtgcacagggcctgttttcccggtggctggcgaagcaatgtccttcccccgggtaaagcagcccatgcgttctggagccgacgtcttggctggcgtctgtggcacccgctgcccctgcccgccccttcccccggtttggaagggtgcgacgacggcgcccgatgggtgaattgaatcacctgggcgttccgggagcgggaaggcaccgcgaacggcagggaacccagcggctgcgcctttggggtccggccccctgccctcccaggctggagccgggctcctggcggagcggtgggatgctgctgccgggccggcgtgcagtaggggcggacccccagcaggaggaccccggctgcggctgcggcgggggtgtaggtgggcggtaaaggcggagcagagtcaggggaggttgggaagcatggcgactgtggggggaagggaggcagccgggaagccacaaaagcctacagcaggccgggcgggcgcggtggctcgcgcctgtaatcccagcactctgggaggccgaggcgggtggatcacgaggtcaggagctccagaccatcccggctaacagggtgaaagcccgtctctaggaaaaatagaacaaagtagccgggcgtggtggcgggcgcctgtaggcccagctactcgggaggctgaggccggggaatggcgtgaacccgggaggcggagcttgcagtgagccgagatggcgccactgcactccagcctgggcgacagggcgagactccgtctggaagaaaaggaaagaaacagcaaaaagccaaagaaaaagcctacagcacccggtattcccaggcggtctcccatccaagtactaaccaggcccgaccctgcttagcttccgagatcagacgagatcgggcgcgttcagggtggtatggccgtagacgctgaaggaggcgcctggctgccccaagagcccagcccggcccgg

SEQ ID NO: 3628 - DNA, 1282 bp, Artificial sequence
  DNA replication origin
agccaaagaaaaagcctacagcacccggtattcccaggcggtctcccatccaagtactaaccaggcccgaccctgcttagcttccgagatcagacgagatcgggcgcgttcagggtggtatggccgtagacgctgaaggaggcgcctggctgccccaagagcccagcccggcccggccgtgcccgccggattgcagccgacaccgccagcccggggccgcggggctcggatcggggacccccgagccgctggcccgcggccttcccccagctcccgcgctcccgagcttccaccacatcgggcccgctcggagcagggagtgctccgaggcgtcagggcccagggcccacgatcctgggacgccctccggtcctccgccctgtcgcggaggcagcgttttggatccctcgccgcacaggggctcctgcgaggccccctcttgccccacccacccagagccgtcagggctggccgaaggcgaacagccggcccagccgcgcggggcctttctctcacaacgcccccaccacggtcgcttgtcccgaccaagacccggccgggggggcaagagggcgtggggtgtagcgggtcggggggtggccctgttttgccccgggctggcactagaggcggcggcctgatctcgggtgagagggcctgagagaaacccagacacaccccaccgccaccaggagcaaatccactcccccacacacagacacacccgggcgcgctcgcacgcgcgcgcgcggactcacacacacacacacacacgcacgcgcacacgcacgcacacacacacgcggcttgaaggagagcaaggacgagatggatggagagatagaaaccgagggagggagagagacagcgatcgagagagacaggggagggcgagagggaaggagacagacagagaggctgagaaagagagaggcacagagaaagagagagagagagacagagagacagagggaaaacgacagaagtagcgcgaggtccagggggaaacccagaagagagaggcggagggagctagagagcgagagcgatagagccttagagaggaagcgcccggctccgttaggcagcgccctcttgagcaggccgggatagggtggagggggcttgggctgcgcccagaacacgggggccaggcggtccgtgcgagaggaccaacggagcgctgaggcgggcgttttcttggatgaattgcttgctttggaggtgggtttcgtaggctcctgcctttcttggcacctccctgtgctctgggtgccttgcg

SEQ ID NO: 3629 - DNA, 1141 bp, Artificial sequence
  DNA replication origin
ggcacctccctgtgctctgggtgccttgcggcgggccccgagatttgcagagcgcgcccgcccgtttggcgggagccgtggcaccgggcgggcccggaggcctgggtctctggcgagtcctcgggactggagtcgtcgacacgcagcgggagggcattgggaatcccgggtgcacagggcctgttttcccggtggctggcgaagcaatgtccttcccccgggtaaagcagcccatgcgttccggagccgacgtcttggctggcgtctgtggcacccgctgcccctgcccgccccttcccccggtttggaagggtgcgacgacggcgcccgatgggtgaattgaatcgcctgggcgttccgggagcgggaaggcaccgcgaacggcagggaacccagcggctgcgcctttggggtccggccccctgccctcccaggctggagccgggctcctggcggggcggcggcgaggcggaagcggtgggatgctgctgcccggccggcgtgcagtaggggcggacccccagcaggaggaccccggctgcggctgcggcgggggtgtaggtgggcggtaaagggggagcagagtcaggggaggttgggtagcatggcgactgtggggggaagggaggcagcggggaagccacaaaagcctacagcaggccgggcgggcgcggtggctcgcgcctgtaatcccagcactctgggaggccgaggcgggtggatcacgaggtcaggagctccagaccatcccggctaacagggtgaaagcccgtctctaggaaaaatagaacaaagtagccgggcgtggtggcgggcgcctgtaggcccagctactcgggaggctgaggccggggaatggcgtgaacccgggaggcggagcttgcagtgagccgagatggcgccactgcactccagcctgggcgacagggcgagactccgtctggaagaaaaggaaagaaacagcaaaaagccaaagaaaaagcctacagcacccggtattcccaggcggtctcccatccaagtactaaccaggcccgaccctgcttagcttccgagatcagacgagatcgggcgcgttcagggtggtatggccgtagacgctgaaggaggcgcctggctgccccaagagcccagcccggcc

SEQ ID NO: 3630 - DNA, 1338 bp, Artificial sequence
  DNA replication origin
tctggaagaaaaggaaagaaacagcaaaaagccaaagaaaaagcctacagcacccggtattcccaggcggtctcccatccaagtactaaccaggcccgaccctgcttagcttccgagatcagacgagatcgggcgcgttcagggtggtatggccgtagacgctgaaggaggcgcctggctgccccaagagcccagcccggcccggccgtgcccgccggattgcagccgacaccgccagcccggggccgcggggctcggatcggggacccccgagccgctggcccgcggccttcccccagctcccgcgctcccgagcttccaccacatcgggcccgctcggagcagggagtgctccgaggcgtcagggcccagggcccacgatcctgggacgccctccggtcctccgccctgtcgcggaggcagcgttttggatccctcgccgcacaggggctcctgcgaggccccctcttgccccacccacccagagccgtcagggctggccgaaggcgaacagccggcccagccgcgcggggcctttctctcacaacgcccccaccacggtcgcttgtcccgaccaagacccggccgggggggcaagagggcgtggggtgtagcgggtcggggggtggccctgttttgccccgggctggcactagaggcggcggcctgatctcgggtgagagggcctgagagaaacccagacacaccccaccgccaccaggagcaaatccactcccccacacacagacacacccgggcgcgctcgcacgcgcgcgcgcggactcacacacacacacacagacacacagacacacacgcacacacgcacgcgcacacgcacgcacacacacacgcggcttgaaggagagcaaggacgagatggatggagagatagaaaccgagggagggagagagacagcgatcgagagagacaggggagggcgagagggaaggagacagacagagaggctgagaaagagagaggcacagagaaagagagagagagagacagagagacagagggaaaacgacaaaagtagcgcgaggtccagggggaaacccagaagagagaggcggagggagctagagagcgagagcgatagagccttagagaggaagcgcccggctccgttaggcagcgccctcttgagcaggccgggatagggtggagggggcttgggctgcgcccagaacacggggtccaggcggtccgtgcgagaggaccaacggagcgctgaggcgggcgttttcttggatgaattgcttgctttggaggtgggtttcgtaggctcctgcctttcttggcacctccctgtgctctgggtgccttgcggcggg

SEQ ID NO: 3631 - DNA, 648 bp, Artificial sequence
  DNA replication origin
gagggcgagagggaaggagacagacagagaggctgagaaagagagaggcacagagaaagagagagagagagacagagagacagagggaaaacgacaaaagtagcgcgaggtccagggggaaacccagaagagagaggcggagggagctagagagcgagagcgatagagccttagagaggaagcgcccggctccgttaggcagcgccctcttgagcaggccgggatagggtggagggggcttgggctgcgcccagaacacggggtccaggcggtccgtgcgagaggaccaacggagcgctgaggcgggcgttttcttggatgaattgcttgctttggaggtgggtttcgtaggctcctgcctttcttggcacctccctgtgctctgggtgccttgcggcgggccccgagatttgcagagcgcgcccgcccgtttggcgggagccgtggcaccgggcgggcccggaggcctgggtctctggcgagtcctcgggactggagtcgtcgacacgcagcgggagggcattgggaatcccgggtgcacagggcctgttttcccggtggctggcgaagcaatgtccttcccccgggtaaagcagcccatgcgttccggagccgacgtcttggctggcgtctgtggcacccgctgcc

SEQ ID NO: 3632 - DNA, 1155 bp, Artificial sequence
  DNA replication origin
ttcttggcacctccctgtgctctgggtgccttgcggcgggccccgagatttgcagagcgcgcccgcccgtttggcgggagccgtggcaccgggcgggcccggaggcctgggtctctggcgagtcctcgggactggagtcgtcgacacgcagcgggagggcattgggaatcccgggtgcacagggcctgttttcccggtggctggcgaagcaatgtccttcccccgggtaaagcagcccatgcgttccggagccgacgtcttggctggcgtctgtggcacccgctgcccctgcccgccccttcccccggtttggaagggtgcgacgacggcgcccgatgggtgaattgaatcgcctgggcgttccgggagcgggaaggcaccgcgaacggcagggaacccagcggctgcgcctttggggtccggccccctgccctcccaggctggagccgggctcctggcggggcggcggcgaggcggaagcggtgggatgctgctgccgggccggcgtgcagtaggggcggacccccagcaggaggaccccggctgcggctgcggcgggggtgtaggtgggcggtaaagggggagcagagtcaggggaggttgggaagcatggcgactgtggggggaagggaggcagcggggaagccacaaaagcctacagcaggccgggcgggcgcggtggctcgcgcctgtaatcccagcactctgggaggccgaggcgggtggatcacgaggtcaggagctccagaccatcccggctaacagggtgaaagcccgtctctaggaaaaatagaacaaagtagccgggcgtggtggcgggcgcctgtaggcccagctactcgggaggctgaggccggggaatggcgtgaacccgggaggcggagcttgcagtgagccgagatggcgccactgcactccagcctgggcgacagggcgagactccgtctggaagaaaaggaaagaaacagcaaaaagccaaagaaaaagcctacagcacccggtattcccaggcggtctcccatccaagtactaaccaggcccgaccctgcttagcttccgagatcagacgagatcgggcgcgttcagggtggtatggccgtagacgctgaaggaggcgcctggctgccccaagagcccagcccggcccggccgtgc

SEQ ID NO: 3633 - DNA, 1285 bp, Artificial sequence
  DNA replication origin
aagcctacagcacccggtattcccaggcggtctcccatccaagtactaaccaggcccgaccctgcttagcttccgagatcagacgagatcgggcgcgttcagggtggtatggccgtagacgctgaaggaggcgcctggctgccccaagagcccagcccggcccggccgtgcccgccggattgcagccgacaccgccagcccggggccgcggggctcggatcggggacccccgagccgctggcccgcggccttcccccggctcccgcgctcccgagcttccaccacatcgggcccgctcggagcagggagtgctccgaggcgtcagggcccagggcccacgatcctgggacgccctccggtcctccgccctgtcgcggaggcagcgttttggatccctcgccgcacaggggctcctgcgaggccccctcttgccccacccacccagagccgtcagggctggccgaaggcgaacagccggcccagccgcgcggggcctttctctcacaacgcccccaccacggtcgcttgtcccgaccaagacccggccgggggggcaagagggcgtggggtgtagcgggtcggggggtggccctgttttgccccgggctggcactagaggcggcggcctgatctcgggtgagagggcctgagagaaacccagacacaccccaccgccaccaggagcaaatccactcccccacacacagacacacccgggcgcgctcgcacgcgcgcgcgcggactcacacacacacacacagacacacagacacacgcacacacgcacgcgcacacgcacgcacacacacacgcggcttgaaggagagcaaggacgagatggatggagagatagaaaccgagggagggagagagacagcgatcgagagagacaggggagggcgagagggaaggagacagacagagaggctgagaaagagagaggcacagagaaagagagagagagagacagagagacagagggaaaacgacaaaagtagcgcgaggtccagggggaaacccagaagagagaggcggagggagctagagagcgagagcgatagagccttagagaggaagtgcccggctccgttaggcagcgccgtcttgagcaggtcgggatagggtggagggggcttgggctgcgcccagaacacgggggccaggcggtccgtgcgagaggaccaacggagcgctgaggcgggcgttttcttggatgaattgcttgctttggaggtgggtttcgtaggctcctgcctttcttggcagctccctgtgctctgggtgc

SEQ ID NO: 3634 - DNA, 674 bp, Artificial sequence
  DNA replication origin
gagagacagcgatcgagagagacaggggagggcgagagggaaggagacagacagagaggctgagaaagagagaggcacagagaaagagagagagagagacagagagacagagggaaaacgacaaaagtagcgcgaggtccagggggaaacccagaagagagaggcggagggagctagagagcgagagcgatagagccttagagaggaagtgcccggctccgttaggcagcgccgtcttgagcaggtcgggatagggtggagggggcttgggctgcgcccagaacacgggggccaggcggtccgtgcgagaggaccaacggagcgctgaggcgggcgttttcttggatgaattgcttgctttggaggtgggtttcgtaggctcctgcctttcttggcagctccctgtgctctgggtgccttgcggcgggccccgagatttgcagagcgcgcccgcccgtttggcgggagccgtggcaccgggcgggcccggaggcctgggtctctggcgagtcctcgggactggagtcgtcgacacgaagcggggggcattgggaatcccgggtgcacagggcctgttttcccggtggctggcgaagcaatgtccttcccccgggtaaagcagcccatgcgttccggagccgacgtcttggctggcgtctgtggcacccgctgcc

SEQ ID NO: 3635 - DNA, 1147 bp, Artificial sequence
  DNA replication origin
gtgctctgggtgccttgcggcgggccccgagatttgcagagcgcgcccgcccgtttggcgggagccgtggcaccgggcgggcccggaggcctgggtctctggcgagtcctcgggactggagtcgtcgacacgaagcggggggcattgggaatcccgggtgcacagggcctgttttcccggtggctggcgaagcaatgtccttcccccgggtaaagcagcccatgcgttccggagccgacgtcttggctggcgtctgtggcacccgctgcccctgcccgccccttcccccggtttggaagggtgcgacgacggcgcccgatgggtgaattgaatcgcctgggcgttccgggagcgggaaggcaccgcgaacggcagggaacccagcggctgcgcctttggggtccggccccctgccctcccaggctggagccgggctcctggcggggcggcggcgaggcggaagcggtgggatgctgctgccgggccggcgtgcagtaggggcggacccccagcaggaggaccccggctgcggctgcggcgggggtgtaggtgggcggtaaagggggagcagagtcaggggaggttgggtagcatggcgactgtggggggaagggaggcagccgggaagccacaaaagcctacagcaggccgggcgggcgcggtggctcgcgcctgtaatcccagcactctgggaggccgaggcgggtggatcacgaggtcaggagctccagaccatcccggctaacagggtgaaagcccgtctctaggaaaaatagaacaaagtagccgggcgtggtggcgggcgcctgtaggcccagctactcgggaggctgaggccggggaatggcgtgaacccgggaggcggagcttgcagtgagccgagatggcgccactgcactccagcctgggcgacagggcgagactccgtctggaagaaaaggaaagaaacagcaaaaagccaaagaaaaagcctacagcacccggtattcccaggcggtctcccgtccaagtactaaccaggcccgaccctgcttagcttccgagatcagacgagatcgggcgcgttcagggtggtatggccgtagacgctgaaggaggcgcctggctgccccaagagcccagcccggcccggccgtgcccgccggat

SEQ ID NO: 3636 - DNA, 1303 bp, Artificial sequence
  DNA replication origin
aagccaaagaaaaagcctacagcacccggtattcccaggcggtctcccgtccaagtactaaccaggcccgaccctgcttagcttccgagatcagacgagatcgggcgcgttcagggtggtatggccgtagacgctgaaggaggcgcctggctgccccaagagcccagcccggcccggccgtgcccgccggattgcagccgacaccgccagcccggggccgcggggctcggatcggggacccccgagccgctggcccgcggccttcccccggctcccgcgctcccgagcttccaccacatcgggcccgctcggagcagggagtgctccgaggcgtcagggcccagggcccacgatcctgggacgccctccggtcctccgccctgtcgcggaggcagcgttttggatccctcgccgcacaggggctcctgcgaggccccctcttgccccacccacccagagccgtcagggctggccgaaggcgaacagccggcccagccgcgcggggcctttctctcacaacgcccccaccacggtcgcttgtcccgaccaagacccggccgggggggcaagagggcgtggggtgtagcgggtcggggggtggccctgttttgccccgggctggcactagaggcggcggcctgatctcgggtgagagggcctgagagaaacccagacacaccccaccgccaccaggagcaaatccactcccccacacacagacacacccgggcgcgctcgcacgcgcgcgcgcggactcacacacacacacacagacacacagacacacacgcacacacgcacgcgcacacgcacgcacacacacacgcggcttgaaggagagcaaggacgagatggatggagagatagaaaccgagggagggagagagacagcgatcgagagagacaggggagggcgagagggaaggagacagacagagaggctgagaaagagagaggcacagagaaagagagagagagagacagagagacagagggaaaacgacaaaagtagcgcgaggtccagggggaaacccagaagagagaggcggagggagctagagagcgagagcgatagagccttagagaggaagcgcccggctccgttaggcagcgccctcttgagcaggccgggatagggtggagggggcttgggctgcgcccagaacacggggtccaggcggtccgtgcgagaggaccaacggagcgctgaggcgggcgttttcttggatgaattgcttgctttggaggtgggtttcgtaggctcctgcctttcttggcacctccctgtgctctgggtgccttg

SEQ ID NO: 3637 - DNA, 1157 bp, Artificial sequence
  DNA replication origin
ctttcttggcacctccctgtgctctgggtgccttgcggcgggccccgagatttgcagagcgcgcccgcccgtttggcgggagccgtggcaccgggcgggcccggaggcctgggtctctggcgagtcctcgggactggagtcgtcgacacgcagcgggagggcattgggaatcccgggtgcacagggcctgttttcccggtggctggcgaagcaatgtccttcccccgggtaaagcagcccatgcgttccggagccgacgtcttggctggcgtctgtggcacccgctgcccctgcccgccccttcccccggtttggaagggtgcgacgacggcgcccgatgggtgaattgaatcgcctgggcgttccgggagcgggaaggcaccgcgaacggcagggaacccagcggctgcgcctttggggtccggccccctgccctcccaggctggagccgggctcctggcggggcggcggcgaggcggaagcggtgggatgctgctgccgggccggcgtgcagtaggggcggacccccagcaggaggaccccggctgcggctgcggcgggggtgtaggtgggcggtaaagggggagcagagtcaggggaggttgggaagcatggcgactgtggggggaagggaggcagcggggaagccacaaaagcctacagcaggccgggcgggcgcggtggctcgcgcctgtaatcccagcactctgggaggccgaggcgggtggatcacgaggtcaggagctccagaccatcccggctaacagggtgaaagcccgtctctaggaaaaatagaacaaagtagccgggcgtggtggcgggcgcctgtaggcccagctactcgggaggctgaggccggggaatggcgtgaacccgggaggcggagcttgcagtgagccgagatggcgccactgcactccagcctgggcgacagggcgagactccgtctggaagaaaaggaaagaaacagcaaaaagccaaagaaaaagcctacagcacccggtattcccaggcggtctcccatccaagtactaaccaggcccgaccctgcttagcttccgagatcagacgagatcgggcgcgttcagggtggtatggccgtagacgctgaaggaggcgcctggctgccccaagagcccagcccggcccggccgtgc

SEQ ID NO: 3638 - DNA, 1324 bp, Artificial sequence
  DNA replication origin
agcaaaaagccaaagaaaaagcctacagcacccggtattcccaggcggtctcccatccaagtactaaccaggcccgaccctgcttagcttccgagatcagacgagatcgggcgcgttcagggtggtatggccgtagacgctgaaggaggcgcctggctgccccaagagcccagcccggcccggccgtgcccgccggattgcagccgacaccgccagcccggggccgcggggctcggatcggggacccccgagccgctggcccgcggccttcccccggctcccgcgctcccgagcttccaccacatcgggcccgctcggagcagggagtgctccgaggcgtcagggcccagggcccacgatcctgggacgccctccggtcctccgccctgtcgcggaggcagcgttttggatccctcgccgcacaggggctcctgcgaggccccctcttgccccacccacccagagccgtcagggctggccgaaggcgaacagccggcccagccgcgcggggcctttctctcacaacgcccccaccacggtcgcttgtcccgaccaagacccggccgggggggcaagagggcgtggggtgtagcgggtcggggggtggccctgttttgccccgggctggcactagaggcggcggcctgatctcgggtgagagggcctgagagaaacccagacacaccccaccgccaccaggagcaaatccactcccccacacacagacacacccgggcgcgctcgcacgcgcgcgcgcggactcacacacacacacacagacacacagacacacacgcacacacgcacgcgcacacgcacgcacacacacacgcggcttgaaggagagcaaggacgagatggatggagagatagaaaccgagggagggagagagacagcgatcgagagagacaggggagggcgagagggaaggagacagacagagaggctgagaaagagagaggcacagagaaagagagagagagagacagagagacagagggaaaacgacaaaagtagcgcgaggtccagggggaaacccagaagagagaggcggagggagctagagagcgagagcgatagagccttagagaggaagcgcccggctccgttaggcagcgccctcttgagcaggccgggatagggtggagggggcttgggctgcgcccagaacacgggggccaggcggtccgtgcgagaggaccaacggagcgctgaggcgggcgttttcttggatgaattgcttgctttggaggtgggtttcgtaggctcctgcctttcttggcacctccctgtgctctgggtgccttgcggcgggccccgaga

SEQ ID NO: 3639 - DNA, 655 bp, Artificial sequence
  DNA replication origin
tcgagagagacaggggagggcgagagggaaggagacagacagagaggctgagaaagagagaggcacagagaaagagagagagagagacagagagacagagggaaaacgacaaaagtagcgcgaggtccagggggaaacccagaagagagaggcggagggagctagagagcgagagcgatagagccttagagaggaagcgcccggctccgttaggcagcgccctcttgagcaggccgggatagggtggagggggcttgggctgcgcccagaacacgggggccaggcggtccgtgcgagaggaccaacggagcgctgaggcgggcgttttcttggatgaattgcttgctttggaggtgggtttcgtaggctcctgcctttcttggcacctccctgtgctctgggtgccttgcggcgggccccgagatttgcagagcgcgcccgcccgtttggcgggagccgtggcaccgggcgggcccggaggcctgggtctctggcgagtcctcgggactggagtcgtcgacacgaagcggggggcattgggaatcccgggtgcacagggcctgttttcccggtggctggcgaagcaatgtccttcccccgggtaaagcagcccatgcgttccggagccgacgtcttggctggcgtctgtggcacc

SEQ ID NO: 3640 - DNA, 1115 bp, Artificial sequence
  DNA replication origin
gccttgcggcgggccccgagatttgcagagcgcgcccgcccgtttggcgggagccgtggcaccgggcgggcccggaggcctgggtctctggcgagtcctcgggactggagtcgtcgacacgaagcggggggcattgggaatcccgggtgcacagggcctgttttcccggtggctggcgaagcaatgtccttcccccgggtaaagcagcccatgcgttccggagccgacgtcttggctggcgtctgtggcacccgctgcccctgcccgccccttcccccggtttggaagggtgcgacgacggcgcccgatgggtgaattgaatcgcctgggcgttccgggagcgggaaggcaccgcgaacggcagggaacccagcggctgcgcctttggggtccggccccctgccctcccaggctggagccgggctcctggcggggcggcggcgaggcggaagcggtgggatgctgctgccgggccggcgtgcagtaggggcggacccccagcaggaggaccccggctgcggctgcggcgggggtgtaggtgggcggtaaagggggagcagagtcaggggaggttgggtagcatggcgactgtggggggaagggaggcagcggggaagccacaaaagcctacagcaggccgggcgggcgcggtggctcgcgcctgtaatcccagcactctgggaggccgaggcgggtggatcacgaggtcaggagctccagaccatcccggctaacagggtgaaagcccgtctctaggaaaaatagaacaaagtagccgggcgtggtggcgggcgcctgtaggcccagctactcgggaggctgaggccggggaatggcgtgaacccgggaggcggagcttgcagtgagccgagatggcgccactgcactccagcctgggcgacagggcgagactccgtctggaagaaaaggaaagaaacagcaaaaagccaaagaaaaagcctacagcacccggtattcccaggcggtctcccatccaagtactaaccaggcccgaccctgcttagcttccgagatcagacgagatcgggcgcgttcagggtggtatggccgtagacgctgaaggaggcgcctggctgccccaagagcccagcccg

SEQ ID NO: 3641 - DNA, 1325 bp, Artificial sequence
  DNA replication origin
aaaagccaaagaaaaagcctacagcacccggtattcccaggcggtctcccatccaagtactaaccaggcccgaccctgcttagcttccgagatcagacgagatcgggcgcgttcagggtggtatggccgtagacgctgaaggaggcgcctggctgccccaagagcccagcccggcccggccgtgcccgccggattgcagccgacaccgccagcccggggccgcggggctcggatcggggacccccgagccgctggcccgcggccttcccccggctcccgcgctcccgagcttccaccacatcgggcccgctcggagcagggagtgctccgaggcgtcagggcccagggcccacgatcctgggacgccctccggtcctccgccctgtcgcggaggcagcgttttggatccctcgccgcacaggggctcctgcgaggcctcctcttgccccacccacccagagccgtcagggctggccgaaggcgaacagccggcccagccgcgcggggcctttctctcacaacgcccccaccacggtcgcttgtcccgaccaagacccggccgggggggcaagagggcgtggggtgtagcgggtcggggggtggccctgttttgccccgggctggcactagaggcggcggcctgatctcgggtgagagggcctgagagaaacccagacacaccccaccgccaccaggagcaaatccactcccccacacacagacacacccgggcgcgctcgcacgcgcgcgcgcggactcacacacacacacacagacacacagacacacacgcacacacgcacgcgcacacgcacgcacacacacacgcggcttgaaggagagcaaggacgagatggatggagagatagaaaccgagggagggagagagacagcgatcgagagagacaggggagggcgagagggaaggagacagacagagaggctgagaaagagagaggcacagagaaagagagagagagagacagagagacagagggaaaacgacagaagtagcgcgaggtccagggggaaacccagaagagagaggcggagggagctagagagcgagagcgatagagccttagagaggaagtgcccggctccgttaggcagcgccctcttgagcaggccgggatagggtggagggggcttgggctgcgccagaacacgggggccaggcggtccgtgcgagaggaccaacggagcgctgaggcgggcgttttcttggatgaattgcttgctttggaggtgggtttcgtaggctcctgcctttcttggcacctccctgtgctctgggtgccttgcggcgggccccgagatttgca

SEQ ID NO: 3642 - DNA, 654 bp, Artificial sequence
  DNA replication origin
gatcgagagagacaggggagggcgagagggaaggagacagacagagaggctgagaaagagagaggcacagagaaagagagagagagagacagagagacagagggaaaacgacagaagtagcgcgaggtccagggggaaacccagaagagagaggcggagggagctagagagcgagagcgatagagccttagagaggaagtgcccggctccgttaggcagcgccctcttgagcaggccgggatagggtggagggggcttgggctgcgccagaacacgggggccaggcggtccgtgcgagaggaccaacggagcgctgaggcgggcgttttcttggatgaattgcttgctttggaggtgggtttcgtaggctcctgcctttcttggcacctccctgtgctctgggtgccttgcggcgggccccgagatttgcagagcgcgcccgcccgtttggcgggagccgtggcaccgggcgggcccggaggcctgggtctctggcgagtcctcgggactggagtcgtcgacacgaagcggggggcattgggaatcccgggtgcacagggcctgttttcccggtggctggcgaagcaatgtccttcccccgggtaaagcagcccatgcgttccggagccgacgtcttggctggcgtctgtggca

SEQ ID NO: 3643 - DNA, 1156 bp, Artificial sequence
  DNA replication origin
ttcttggcacctccctgtgctctgggtgccttgcggcgggccccgagatttgcagagcgcgcccgcccgtttggcgggagccgtggcaccgggcgggcccggaggcctgggtctctggcgagtcctcgggactggagtcgtcgacacgaagcggggggcattgggaatcccgggtgcacagggcctgttttcccggtggctggcgaagcaatgtccttcccccgggtaaagcagcccatgcgttccggagccgacgtcttggctggcgtctgtggcacccgctgcccctgcccgccccttcccccggtttggaagggtgcgacgacggcgcccgatgggtgaattgaatcgcctgggcgttccgggagcgggaaggcaccgcgaacggcagggaacccagcggctgcgcctttggggtccggccccctgccctcccaggctggagccgggctcctggcggggcggcggcgaggcggaagcggtgggatgctgctgcccggccggcgtgcagtaggggcggacccccagcaggaggaccccggctgcggctgcggcgggggtgtaggtgggcggtaaagggggagcagagtcaggggaggttgggtagcatggcgactgtggggggaagggaggcagcggggaagccacaaaagcctacagcaggccgggcgggcgcggtggctcgcgcctgtaatcccagcactctgggaggccgaggcgggtggatcacgaggtcaggagctccagaccatcccggctaacagggtgaaagcccgtctctaggaaaaatagaacaaagtagccgggcgtggtggcgggcgcctgtaggcccagctactcgggaggctgaggccggggaatggcgtgaacccgggaggcggagcttgcagtgagccgagatggcgccactgcactccagcctgggcgacagggcgagactccgtctggaagaaaaggaaagaaacagcaaaaagccaaagaaaaagcctacagcacccggtattcccaggcggtctcccatccaagtactaaccaggcccgaccctgcttagcttccgagatcagacgagatcgggcgcgttcagggtggtatggccgtagacgctgaaggaggcgcctggctgccccaagagcccagcccggcccggccgtgccc

SEQ ID NO: 3644 - DNA, 1245 bp, Artificial sequence
  DNA replication origin
ggcccgaccctgcttagcttccgagatcagacgagatcgggcgcgttcagggtggtatggccgtagacgctgaaggaggcgcctggctgccccaagagcccagcccggcccggccgtgcccgccggattgcagccgacaccgccagcccggggccgcggggctcggatcggggacccccgagccgctggcccgcggccttcccccggctcccgcgctcccgagcttccaccacatcgggcccgctcggagcagggagtgctccgaggcgtcagggcccagggcccacgatcctgggacgccctccggtcctccgccctgtcgcggaggcagcgttttggatccctcgccgcacaggggctcctgcgaggccccctcttgccccacccacccagagccgtcagggctggccgaaggcgaacagccggcccagccgcgccgggcctttctctcacaacgcccccaccacggtcgcttgtcccgaccaagacccggccggggggcaagagggcgtggggtgtagcgggtcggggggtggccctgttttgccccgggctggcactagaggcggcggcctgatctcgggtgagagggcctgagagaaacccagacacaccccaccgccaccaggagcaaatccactcccccacacacagacacacccgggcgcgctcgcacgcgcgcgcgcggacacacacacacacagacacacacgcacacacgcacgcgcacacgcacgcacacacacgcggcttgaaggagagcaaggacgagatggatggagagatagaaaccgagggagggagagagacagcgatcgagagagacaggggagggcgagagggaaggagacagacagagaggctgagaaagagagaggcacagagaaagagagagagagagacagagagacagagggaaaacgacagaagtagcgcgaggtccagggggaaacccagaagagagaggcggagggagctagagagcgagagcgatagagccttagagaggaagtgcccggctccgttaggcagcgccctcttgagcaggccgggatagggtggagggggcttgggctgcgccagaacacgggggccaggcggtccgtgcgagaggaccaacggagcgctgaggcgggcgttttcttggatgaattgcttgctttggaggtgggtttcgtaggctcctgcctttcttggcacctccctgtgctctgggtgccttgcggcgggccccgagatttgcag

SEQ ID NO: 3645 - DNA, 1129 bp, Artificial sequence
  DNA replication origin
gctctgggtgccttgcggcgggccccgagatttgcagagcgcgcccgcccgtttggcgggagccgtggcaccgggcgggcccggaggcctgggtctctggcgagtcctcgggactggagtcgtcgacacgaagcggggggcattgggaatcccgggtgcacagggcctgttttcccggtggctggcgaagcaatgtccttcccccgggtaaagcagcccatgcgttctggagccgacgtcttggctggcgtctgtggcacccgctgcccctgcccgccccttcccccggtttggaagggtgcgacgacggcgcccgatgggtgaattgaatcacctgggcgttccgggagcgggaaggcaccgcgaacggcagggaacccagcggctgcgcctttggggtccggccccctgccctcccaggctggagccgggctcctggcggggcggcggcgaggcggaagcggtgggatgctgctgcccggccggcgtgcagtaggggcggacccccagcaggaggaccccggctgcggctgcggcgggggtgtaggtgggcggtaaagggggagcagagtcaggggaggttgggtagcatggcgactgtggggggaagggaggcagccgggaagccacaaaagcctacagcaggccgggcgggcgcggtggctcgcgcctgtaatcccagcactctgggaggccgaggcgggtggatcacgaggtcaggagctccagaccatcccggctaacagggtgaaagcccgtctctaggaaaaatagaacaaagtagccgggcgtggtggcgggcgcctgtaggcccagctactcgggaggctgaggccggggaatggcgtgaacccgggaggcggagcttgcagtgagccgagatggcgccactgcactccagcctgggcgacagggcgagactccgtctggaagaaaaggaaagaaacagcaaaaagccaaagaaaaagcctacagcacccggtattcccaggcggtctcccatccaagtactaaccaggcccgaccctgcttagcttccgagatcagacgagatcgggcgcgttcagggtggtatggccgtagacgctgaaggaggcgcctggctgccccaagagcccagcccggcccg

SEQ ID NO: 3646 - DNA, 1477 bp, Artificial sequence
  DNA replication origin
tggcgggcgcctgtaggcccagctactcgggaggctgaggccggggaatggcgtgaacccgggaggcggagcttgcagtgagccgagatggcgccactgcactccagcctgggcgacagggcgagactccgtctggaagaaaaggaaagaaacagcaaaaagccaaagaaaaagcctacagcacccggtattcccaggcggtctcccatccaagtactaaccaggcccgaccctgcttagcttccgagatcagacgagatcgggcgcgttcagggtggtatggccgtagacgctgaaggaggcgcctggctgccccaagagcccagcccggcccggccgtgcccgccggattgcagccgacaccgccagcccggggccgcggggctcggatcggggacccccgagccgctggcccgcggccttcccccggctcccgcgctcccgagcttccaccacatcgggcccgctcggagcagggagtgctccgaggcgtcagggcccagggcccacgatcctgggacgccctccggtcctccgccctgtcgcggaggcagcgttttggatccctcgccgcacaggggctcctgcgaggccccctcttgccccacccacccagagccgtcagggctggccgaaggcgaacagccggcccagccgcgcggggcctttctctcacaacgcccccaccacggtcgcttgtcccgaccaagacccggccgggggggcaagagggcgtggggtgtagcgggtcggggggtggccctgttttgccccgggctggcactagaggcggcggcctgatctcggttgagagggcctgagagaaacccagacacaccccaccgccaccaggagcaaatccactcccccacacacagacacacccgggcgcgctcgcacgcgcgcgcgcggactcacacacacacacacagacacacagacacacacgcacacacgcacgcgcacacgcacgcacacacacacgcggcttgaaggagagcaaggacgagatggatggagagatagaaaccgagggagggagagagacagcgatcgagagagacaggggagggcgagagggaaggagacagacagagaggctgagaaagagagaggcacagagaaagagagagagagagacagagagacagagggaaaacgacaaaagtagcgcgaggtccagggggaaacccagaagagagaggcggagggagctagagagcgagagcgatagagccttagagaggaagcgcccggctccgttaggcagcgccctcttgagcaggccgggatagggtggagggggcttgggctgcgcccagaacacgggggccaggcggtccgtgcgagaggaccaacggagcgctgaggcgggcgttttcttggatgaattgcttgctttggaggtgggtttcgtaggctcctgcctttcttggcacctccctgtgctctgggtgccttgcggcgggccccgaga

SEQ ID NO: 3647 - DNA, 670 bp, Artificial sequence
  DNA replication origin
atcgagagagacaggggagggcgagagggaaggagacagacagagaggctgagaaagagagaggcacagagaaagagagagagagagacagagagacagagggaaaacgacaaaagtagcgcgaggtccagggggaaacccagaagagagaggcggagggagctagagagcgagagcgatagagccttagagaggaagcgcccggctccgttaggcagcgccctcttgagcaggccgggatagggtggagggggcttgggctgcgcccagaacacgggggccaggcggtccgtgcgagaggaccaacggagcgctgaggcgggcgttttcttggatgaattgcttgctttggaggtgggtttcgtaggctcctgcctttcttggcacctccctgtgctctgggtgccttgcggcgggccccgagatttgcagagcgcgcccgcccgtttggcgggagccgtggcaccgggcgggcccggaggcctgggtctctggcgagtcctcgggactggagtcgtcgacacgaagcggggggcattgggaatcccgggtgcacagggcctgttttcccggtggctggcgaagcaatgtccttcccccgggtaaagcagcccatgcgttccggagccgacgtcttggctggcgtctgtggcacccgctgcccctgccc

SEQ ID NO: 3648 - DNA, 1155 bp, Artificial sequence
  DNA replication origin
tggcacctccctgtgctctgggtgccttgcggcgggccccgagatttgcagagcgcgcccgcccgtttggcgggagccgtggcaccgggcgggcccggaggcctgggtctctggcgagtcctcgggactggagtcgtcgacacgaagcggggggcattgggaatcccgggtgcacagggcctgttttcccggtggctggcgaagcaatgtccttcccccgggtaaagcagcccatgcgttccggagccgacgtcttggctggcgtctgtggcacccgctgcccctgcccgccccttcccccggtttggaagggtgcgacgacggcgcccgatgggtgaattgaatcgcctgggcgttccgggagcgggaaggcaccgcgaacggcagggaacccagcggctgcgcctttggggtccggccccctgccctcccaggctggagccgggctcctggcggggcggcggcgaggcggaagcggtgggatgctgctgcccggccggcgtgcagtaggggcggacccccagcaggaggaccccggctgcggctgcggcgggggtgtaggtgggcggtaaagggggagcagagtcaggggaggttgggtagcatggcgactgtggggggaagggaggcagccgggaagccacaaaagcctacagcaggccgggcgggcgcggtggctcgcgcctgtaatcccagcactctgggaggccgaggcgggtggatcacgaggtcaggagctccagaccatcccggctaacagggtgaaagcccgtctctaggaaaaatagaacaaagtagccgggcgtggtggcgggcgcctgtaggcccagctactcgggaggctgaggccggggaatggcgtgaacccgggaggcggagcttgcagtgagccgagatggcgccactgcactccagcctgggcgacagggcgagactccgtctggaagaaaaggaaagaaacagcaaaaagccaaagaaaaagcctacagcacccggtattcccaggcggtctcccatccaagtactaaccaggcccgaccctgcttagcttccgagatcagacgagatcgggcgcgttcagggtggtatggccgtagacgctgaaggaggcgcctggctgccccaagagcccagcccggcccggccgtgcccgcc

SEQ ID NO: 3649 - DNA, 1267 bp, Artificial sequence
  DNA replication origin
tccaagtactaaccaggcccgaccctgcttagcttccgagatcagacgagatcgggcgcgttcagggtggtatggccgtagacgctgaaggaggcgcctggctgccccaagagcccagcccggcccggccgtgcccgccggattgcagccgacaccgccagcccggggccgcggggctcggatcggggacccccgagccgctggcccgcggccttcccccggctcccgcgctcccgagcttccaccacatcgggcccgctcggagcagggagtgctccgaggcgtcagggcccagggcccacgatcctgggacgccctccggtcctccgccctgtcgcggaggcagcgttttggatccctcgccgcacaggggctcctgcgagggctcctcttgccccacccacccagagccgtcagggctggccgaaggcgaacagccggcccagccgcgcggggcctttctctcacaacgcccccaccacggtcgcttgtcccgaccaagacccggccgggggggcaagagggcgtggggtgtagcgggtcggggggtggccctgttttgccccgggctggcactagaggcggcggcctgatctcgggtgagagggcctgagagaaacccagacacaccccaccgccaccaggagcaaatccactcccccacacacagacacacccgggcgcgctcgcacccgcgcgcgcggacacacacacacacacagacacacacgcacacacgcacgcgcacacgcacgcacacacacacgcggcttgaaggagagcaaggacgagatggatggagagatagaaaccgagggagggagagagacagcgatcgagagagacaggggagggcgagagggaaggagacagacagagaggctgagaaagagagaggcacagagaaagagagagagagagacagagagacagagggaaaacgacaaaagtagcgcgaggtccagggggaaacccagaagagagaggcggagggagctagagagcgagagcgatagagccttagagaggaagcgcccggctccgttaggcagcgccctcttgagcaggccgggatagggtggagggggcttgggctgcgcccagaacacgggggccaggcggtccgtgcgagaggaccaacggagcgctgaggcgggcgttttcttggatgaattgcttgctttggaggtgggtttcgtaggctcctgcctttcttggcacctccctgtgctctgggtgccttgcggcgggccccgagatttgcaga

SEQ ID NO: 3650 - DNA, 658 bp, Artificial sequence
  DNA replication origin
cgagagagacaggggagggcgagagggaaggagacagacagagaggctgagaaagagagaggcacagagaaagagagagagagagacagagagacagagggaaaacgacaaaagtagcgcgaggtccagggggaaacccagaagagagaggcggagggagctagagagcgagagcgatagagccttagagaggaagcgcccggctccgttaggcagcgccctcttgagcaggccgggatagggtggagggggcttgggctgcgcccagaacacgggggccaggcggtccgtgcgagaggaccaacggagcgctgaggcgggcgttttcttggatgaattgcttgctttggaggtgggtttcgtaggctcctgcctttcttggcacctccctgtgctctgggtgccttgcggcgggccccgagatttgcagagcgcgcccgcccgtttggcgggagccgtggcaccgggcgggcccggaggcctgggtctctggcgagtcctcgggactggagtcgtcgacacgaagcggggggcattgggaatcccgggtgcacagggcctgttttcccggtggctggcgaagcaatgtccttcccccgggtaaagcagcccatgcgttccggagccgacgtcttggctggcgtctgtggcacccgct

SEQ ID NO: 3651 - DNA, 1135 bp, Artificial sequence
  DNA replication origin
cttggcacctccctgtgctctgggtgccttgcggcgggccccgagatttgcagagcgcgcccgcccgtttggcgggagccgtggcaccgggcgggcccggaggcctgggtctctggcgagtcctcgggactggagtcgtcgacacgaagcggggggcattgggaatcccgggtgcacagggcctgttttcccggtggctggcgaagcaatgtccttcccccgggtaaagcagcccatgcgttccggagccgacgtcttggctggcgtctgtggcacccgctgcccctgcccgccccttcccccggtttggaagggtgcgacgacggcgcccgatgggtgaattgaatcgcctgggcgttccgggagcgggaaggcaccgcgaacggcagggaacccagcggctgcgcctttggggtccggccccctgccctcccaggctggagccgggctcctggcggggcggcggcgaggcggaagcggtgggatgctgctgcccggccggcgtgcagtaggggcggacccccagcaggaggaccccggctgcggctgcggcgggggtgtaggtgggcggtaaagggggagcagagtcaggggaggttgggtagcatggcgactgtggggggaagggaggcagcggggaagccacaaaagcctacagcaggccgggcgggcgcggtggctcgcgcctgtaatcccagcactctgggaggccgaggcgggtggatcacgaggtcaggagctccagaccatcccggctaacagggtgaaagcccgtctctaggaaaaatagaacaaagtagccgggcgtggtggcgggcgcctgtaggcccagctactcgggaggctgaggccggggaatggcgtgaacctgggaggcggagcttgcagtgagccgagatggcgccactgcactccagcctgggcgacagggcgagactccgtctggaagaaaaggaaagaaacagcaaaaagccaaagaaaaagcctacagcacccggtattcccaggcggtctcccatccaagtactaaccaggcccgaccctgcttagcttccgagatcagacgagatcgggcgcgttcagggtggtatggccgtagacgctgaaggaggcgcctggctgccccaagagcccg

SEQ ID NO: 3652 - DNA, 1321 bp, Artificial sequence
  DNA replication origin
gcaaaaagccaaagaaaaagcctacagcacccggtattcccaggcggtctcccatccaagtactaaccaggcccgaccctgcttagcttccgagatcagacgagatcgggcgcgttcagggtggtatggccgtagacgctgaaggaggcgcctggctgccccaagagcccggcccggcccggccgtgcccgccggattgcagccgacaccgccagcccggggccgcggggctcggatcggggacccccgagccgctggcccgcggccttcccccggctcccgcgctcccgagcttccaccacatcgggcccgctcggagcagggagtgctccgaggcgtcagggcccagggcccacgatcctgggacgccctccggtcctccgccctgtcgcggaggcagcgttttggatccctcgccgcacaggggctcctgcgaggccccctcttgccccacccacccagagccgtcagggctggccgaaggcgaacagccggcccagccgcgcggggcctttctctcacaacgcccccaccacggtcgcttgtcccgaccaagacccggccgggggggcaagagggcgtggggtgtagcgggtcggggggtggccctgttttgccccgggctggcactagaggcggcggcctgatctcgggtgagagggcctgagagaagcccagacacaccccaccgccaccaggagcaaatccactcccccacacacagacacacccgggcgcgctcgcacgcgcgcgcgcggactcacacacacacacacagacacacagacacacacgcacacacgcacgcgcacacgcacgcacacacacacgcggcttgaaggagagcaaggacgagatggatggagagatagaaaccgagggagggagagagacagcgatcgagagagacaggggagggcgagagggaaggagacagacagagaggctgagaaagagagaggcacagagaaagagagagagagagacagagagacagagggaaaacgacaaaagtagcgcgaggtccagggggaaacccagaagagagaggcggagggagctagagagcgagagcgatagagccttagagaggaagcgcccggctccgttaggcagcgccctcttgagcaggccgggatagggtggagggggcttgggctgcgcccagaacacggggtccaggcggtccgtgcgagaggaccaacggagcgctgaggcgggcgttttcttggatgaattgcttgctttggaggtgggtttcgtaggctcctgcctttcttggcacctccctgtgctctgggtgccttgcggcgggccccga

SEQ ID NO: 3653 - DNA, 661 bp, Artificial sequence
  DNA replication origin
gatcgagagagacaggggagggcgagagggaaggagacagacagagaggctgagaaagagagaggcacagagaaagagagagagagagacagagagacagagggaaaacgacaaaagtagcgcgaggtccagggggaaacccagaagagagaggcggagggagctagagagcgagagcgatagagccttagagaggaagcgcccggctccgttaggcagcgccctcttgagcaggccgggatagggtggagggggcttgggctgcgcccagaacacggggtccaggcggtccgtgcgagaggaccaacggagcgctgaggcgggcgttttcttggatgaattgcttgctttggaggtgggtttcgtaggctcctgcctttcttggcacctccctgtgctctgggtgccttgcggcgggccccgagatttgcagagcgcgcccgcccgtttggcgggagccgtggcaccgggcgggcccggaggcctgggtctctggcgagtcctcgggactggagtcgtcgacacgaagcggggggcattgggaatcccgggtgcacagggcctgttttcccggtggctggcgaagcaatgtccttcccccgggtaaagcagcccatgcgttccggagccgacgtcttggctggcgtctgtggcacccgct

SEQ ID NO: 3654 - DNA, 1120 bp, Artificial sequence
  DNA replication origin
tgtgctctgggtgccttgcggcgggccccgagatttgcagagcgcgcccgcccgtttggcgggagccgtggcaccgggcgggcccggaggcctgggtctctggcgagtcctcgggactggagtcgtcgacacgaagcggggggcattgggaatcccgggtgcacagggcctgttttcccggtggctggcgaagcaatgtccttcccccgggtaaagcagcccatgcgttccggagccgacgtcttggctggcgtctgtggcacccgctgcccctgcccgccccttcccccggtttggaagggtgcgacgacggcgcccgatgggtgaattgaatcgcctgggcgttccgggagcgggaaggcaccgcgaacggcagggaacccagcggctgcgcctttggggtccggccccctgccctcccaggctggagccgggctcctggcggggcggcggcgaggcggaagcggtgggatgctgctgcccggccggcgtgcagtaggggcggacccccagcaggaggaccccggctgcggctgcggcgggggtgtaggtgggcggtaaagggggagcagagtcaggggaggttgggtagcatggcgactgtggggggaagggaggcagcggggaagccacaaaagcctacagcaggccgggcgggcgcggtggctcgcgcctgtaatcccagcactctgggaggccgaggcgggtggatcacgaggtcaggagctccagaccatcccggctaacagggtgaaagcccgtctctaggaaaaatagaacaaagtagccgggcgtggtggcgggcgcctgtaggcccagctactcgggaggctgaggccggggaatggcgtgaacctgggaggcggagcttgcagtgagccgagatggcgccactgcactccagcctgggcgacagggcgagactccgtctggaagaaaaggaaagaaacagcaaaaagccaaagaaaaagcctacagcacccggtattcccaggcggtctcccatccaagtactaaccaggcccgaccctgcttagcttccgagatcagacgagatcgggcgcgttcagggtggtatggccgtagacgctgaaggaggcgcctggctgccccaagagcc

SEQ ID NO: 3655 - DNA, 1305 bp, Artificial sequence
  DNA replication origin
cagcaaaaagccaaagaaaaagcctacagcacccggtattcccaggcggtctcccatccaagtactaaccaggcccgaccctgcttagcttccgagatcagacgagatcgggcgcgttcagggtggtatggccgtagacgctgaaggaggcgcctggctgccccaagagcccggcccggcccggccgtgcccgccggattgcagccgacaccgccagcccggggccgcggggctcggatcggggacccccgagccgctggcccgcggccttcccccggctcccgcgctcccgagcttccaccacatcgggcccgctcggagcagggagtgctccgaggcgtcagggcccagggcccacgatcctgggacgccctccggtcctccgccctgtcgcggaggcagcgttttggatccctcgccgcacaggggctcctgcgaggccccctcttgccccacccacccagagccgtcagggctggccgaaggcgaacagccggcccagccgcgcggggcctttctctcacaacgcccccaccacggtcgcttgtcccgaccaagacccggccgggggggcaagagggcgtggggtgtagcgggtcggggggtggccctgttttgccccgggctggcactagaggcggcggcctgatctcgggtgagagggcctgagagaaacccagacacaccccaccgccaccaggagcaaatccactcccccacacacagacacacccgggcgcgctcgcacccgcgcgcgcggacacacacacacacacagacacacacgcacacacgcacgcgcacacgcacgcacacacacacgcggcttgaaggagagcaaggacgagatggatggagagatagaaaccgagggagggagagagacagcgatcgagagagacaggggagggcgagagggaaggagacagacagagaggctgagaaagagagaggcacagagaaagagagagagagagacagagagacagagggaaaacgacaaaagtagcgcgaggtccagggggaaacccagaagagagaggcggagggagctagagagcgagagcgatagagccttagagaggaagcgcccggctccgttaggcagcgccctcttgagcaggccgggatagggtggagggggcttgggctgcgcccagaacacgggggccaggcggtccgtgcgagaggaccaacggagcgctgaggcgggcgttttcttggatgaattgcttgctttggaggtgggtttcgtaggctcctgcctttcttggcacctccctgtgctctgggtgccttgcggcg

SEQ ID NO: 3656 - DNA, 691 bp, Artificial sequence
  DNA replication origin
agagagacaggggagggcgagagggaaggagacagacagagaggctgagaaagagagaggcacagagaaagagagagagagagacagagagacagagggaaaacgacaaaagtagcgcgaggtccagggggaaacccagaagagagaggcggagggagctagagagcgagagcgatagagccttagagaggaagcgcccggctccgttaggcagcgccctcttgagcaggccgggatagggtggagggggcttgggctgcgcccagaacacgggggccaggcggtccgtgcgagaggaccaacggagcgctgaggcgggcgttttcttggatgaattgcttgctttggaggtgggtttcgtaggctcctgcctttcttggcacctccctgtgctctgggtgccttgcggcgggccccgagatttgcagagcgcgcccgcccgtttggcgggagccgtggcaccgggcgggcccggaggcctgggtctctggcgagtcctcgggactggagtcgtcgacacgaagcggggggcattgggaatcccgggtgcacagggcctgttttcccggtggctggcgaagcaatgtccttcccccgggtaaagcagcccatgcgttccggagccgacgtcttggctggcgtctgtggcacccgctgcccctgcccgccccttcccccggtttggaagggt

SEQ ID NO: 3657 - DNA, 1165 bp, Artificial sequence
  DNA replication origin
ctttcttggcacctccctgtgctctgggtgccttgcggcgggccccgagatttgcagagcgcgcccgcccgtttggcgggagccgtggcaccgggcgggcccggaggcctgggtctctggcgagtcctcgggactggagtcgtcgacacgaagcggggggcattgggaatcccgggtgcacagggcctgttttcccggtggctggcgaagcaatgtccttcccccgggtaaagcagcccatgcgttccggagccgacgtcttggctggcgtctgtggcacccgctgcccctgcccgccccttcccccggtttggaagggtgcgacgacggcgcccgatgggtgaattgaatcgcctgggcgttccgggagcgggaaggcaccgcgaacggcagggaacccagcggctgcgcctttggggtccggccccctgccctcccaggctggagccgggctcctggcggggcggcggcgaggcggaagcggtgggatgctgctgccgggccggcgtgcagtaggggcggacccccagcaggaggaccccggctgcggctgcggcgggggtgtaggtgggcggtaaagggggagcagagtcaggggaggttgggaagcatggcgactgtggggggaagggaggcagcggggaagccacaaaagcctacagcaggccgggcgggcgcggtggctcgcgcctgtaatcccagcactctgggaggccgaggcgggtggatcacgaggtcaggagctccagaccatcccggctaacagggtgaaagcccgtctctaggaaaaatagaacaaagtagccgggcgtggtggcgggcgcctgtaggcccagctactcgggaggctgaggccggggaatggcgtgaacccgggaggcggagcttgcagtgagccgagatggcgccactgcactccagcctgggcgacagggcgagactccgtctggaagaaaaggaaagaaacagcaaaaagccaaagaaaaagcctacagcacccggtattcccaggcggtctcccatccaagtactaaccaggcccgaccctgcttagcttccgagatcagacgagatcgggcgcgttcagggtggtatggccgtagacgctgaaggaggcgcctggctgccccaagagcccagcccggcccggccgtgcccgccggat

SEQ ID NO: 3658 - DNA, 1484 bp, Artificial sequence
  DNA replication origin
gtgaaagcccgtctctaggaaaaatagaacaaagtagccgggcgtggtggcgggcgcctgtaggcccagctactcgggaggctgaggccggggaatggcgtgaacccgggaggcggagcttgcagtgagccgagatggcgccactgcactccagcctgggcgacagggcgagactccgtctggaagaaaaggaaagaaacagcaaaaagccaaagaaaaagcctacagcacccggtattcccaggcggtctcccatccaagtactaaccaggcccgaccctgcttagcttccgagatcagacgagatcgggcgcgttcagggtggtatggccgtagacgctgaaggaggcgcctggctgccccaagagcccagcccggcccggccgtgcccgccggattgcagccgacaccgccagcccggggccgcggggctcggatcggggacccccgagccgctggcccgcggccttcccccggctcccgcgctcccgagcttccaccacatcgggcccgctcggagcagggagtgctccgaggcgtcagggcccagggcccacgatcctgggacgccctccggtcctccgccctgtcgcggaggcagcgttttggatccctcgccgcacaggggctcctgcgaggccccctcttgccccacccacccagagccgtcagggctggccgaaggcgaacagccggcccagccgcgcggggcctttctctcacaacgcccccaccacggtcgcttgtcccgaccaagacccggccgggggggcaagagggcgtggggtgtagcgggtcggggggtggccctgttttgccccgggctggcactagaggcggcggcctgatctcgggtgagagggcctgagagaaacccagacacaccccaccgccaccaggagcaaatccactcccccacacacagacacacccgttcgttctcgttccggaacccgcacgcgagcacgggtgcgcagacgcacgcacacacacacacggtgaaacacagacacacacggcttgaaggagagcaaggagaagatggatggagagatagaaaccgagggagggagagagacagcgatcgagagagaccggagaggtggagaggtaaagagagagaggctaagagggacagagaaagggagaagtacagaggtacagagggaaggctagagaaataacgcgaggtccagggggaaacccagaagagtgaggaggagggagctagagagcgagaacgtttgagccttagagaggaagcaccctacttcggtaggcagcccccttttgagcagtccggaatagggtggaggggtttgagctgtgcctgagcagggcggccaggcggcccgtgcgagaggaccaacggagcgctgagacgggttttttcttggatgaattgcttgctttggaggtgggtttcgtaggctccattctttcttggcacctcactgtgctcttggtacctcactgtgctcttg

SEQ ID NO: 3659 - DNA, 1086 bp, Artificial sequence
  DNA replication origin
ggagagagacagcgatcgagagagaccggagaggtggagaggtaaagagagagaggctaagagggacagagaaagggagaagtacagaggtacagagggaaggctagagaaataacgcgaggtccagggggaaacccagaagagtgaggaggagggagctagagagcgagaacgtttgagccttagagaggaagcaccctacttcggtaggcagcccccttttgagcagtccggaatagggtggaggggtttgagctgtgcctgagcagggcggccaggcggcccgtgcgagaggaccaacggagcgctgagacgggttttttcttggatgaattgcttgctttggaggtgggtttcgtaggctccattctttcttggcacctcactgtgctcttggtacctcactgtgctcttggtgcggtgcagtgggccccgagatttgcagagtgcgcccgcccttttggcgggagccgtggtaccgggcgcgtccggaggcctgggtctctggcgtgtcctcggtactggagttgacacgaagtgcggggcaataggaatccgggtgcacagggactgttttcctggtggttggcgaagcaatgtccttcctcccgggtaaagcagtccatgcgttctggagcggagatcttggctggcgtctgtggtacccgctgcccctgcccgccccttcccccggtttataaggttgcgactgcgccggatgagtgaattgaattgcctggtggatccgggagcgggaaggcaccgcgaacggcagggaatcctggcctgcaccttagtgatctgaggcgtggtgtttctgctggatccggtttcatcgtgttgcgccgcccatcctgaatagttgtgatgttgttgcctggctgtgctgcaggttagcccacactaagcggtcccgggctgttgtgtgggcttgggcgtgtgaaaagagggagcagatttacggtgcggttgagaagtacggcgaccaaacggtaaagagggaggaacttgaagtctaaacaagcctgcgtctcctggttttctcaagtggcgtttcatctaagtagcggtctggcccagaccctg

SEQ ID NO: 3660 - DNA, 1334 bp, Artificial sequence
  DNA replication origin
agagtggcggttccgggccgcacggccagtagacaaaggcggccagggagggtcgtggctccgcgctccggcggcgccagccgctctgccctgcgctgttggaggacagcggtccgagcgccgtggatcccaagcgctctgtctccgcccggcttcccggcgacacgacgcgtggggggcgggcaggcgggcgggctggcggggagggaaaagaggcgggtctggccgagcggctcggtccccgcgccaagaccacagcgccccccgcctgcgcgccgcgcgcctgcacccgcgcccgaggcgccgccgcgaccaggcggggactgcgaacactggcgcgggaggacctggaacacacgttccgggggaccccgcgcacccggtccgggaagcgacgcccgaaggagccgggccagcctccgcagcctcctccccagctcccaagagggtgaccaccgcgcgactggcccgggaggttccgctttctggcgcccacgcgagccaggaagcctgagccgcctcctattcactccgtggagcccccggctggccacggctccacccagggggaaaaatgaagtgtcctggaggcctgtcctgcgaatgagattgaattaacagacagcttttttccttaagtctaactgcagctgatcgtgtgattttttctcattttgaagcaaaaggatgccagctccattgtgaatgctcctttgactttgtctttcggcatgccgtgaacctttatacatgtatgctccagaaatttttttatacccccaattccttcatttacttaaaggtaattcggagacattaatatgtctgaaaaaatattccgtttccctttgattcatttctctctctgccttccttctacatgtggtcaacagtctattcagaaaaaggacgcctcttagccaagtcagaataccaagagtcctgggggtgtacagcgtggtgtgagaagggccacatattattaatacacattgatactagtggtagtaaaaataacaataacaaatactgaactttcataatgtgtcagatactgttgtaagcactcttcaagaactaattcttttaatcttaacattacttacagatgagaacacctgaggcacagagatattaagtaacgttttgggattccacaagctagtaagtggcaatgccaggatccaaacccaaatagtctagccccagagcctgagcttctaaccaaaatcctggaggcaaaaataagtcagtatgataaacgtaatcttgaacgtatggccatggtcagaatgcagagatggatttatcaagaagttagaagcttgaatcca

SEQ ID NO: 3661 - DNA, 1085 bp, Artificial sequence
  DNA replication origin
gagcctaaacgctatctgatttgggataaagaaaaaggagcattaaccttgactatgccttcagctccagccacctttttaagaataaattgctgggcaggtgggggagggctagtcacagaatgaaactgtaagccagaccgggtgtgaggaggggaggtgataaaaggattatagggtggaggagcggaggctgaggaagaattgggacctagctcggcctggtgaggaggggagaggtcggatgggtctgtagaaaaggaagatttgaaagactcagtgacgcttggggttgggactgaggggacaggcgggagggaaagaaggaagatttgggaggagttgcactgggcacagagactaggaagggactgatgtgtaaaagaatgcctggatgtcaggcacctcagaacatttgcctattttacgacaagaattatttagatcttgcaggatggaaaaattccaagtgccattttctggctatttggaactactatcgagtttgtattggggtcaagcagcattgcagaagaaaataaggcatttaggttttaggtcaggcgtgagttgaagaagttttaagtttttgagaacacaggccaagggagtagaaggaggaatggagggtggaaggttgcctatagtgaaggaagcaagcctagagaaaagagagagtagagaaatggagggaaggggttcgggggttcttaccttccagaaaagtgggaaaatgggttgggtcgcagagataagaggtcggggtgtggaaataagggattggggtgcagagatataagaggttggggcgcggaaataagggattggggcacagagataagaggtcggggtgcagaaataagggattggggcgcagagataagaggttggggcacggaaataagggattggggcgcagagataagaggttgcggcatggaaataagggattaggggttcttgccccatagaaaagcgggacttgctgctaagtgtgaaggagaaggggttgaggggtacttgcccctctcccagaaaagcagagaaggggtagagacatggagagaaggggttgaggtacttgc

SEQ ID NO: 3662 - DNA, 1031 bp, Artificial sequence
  DNA replication origin
cctgctcactttttctccatgctcttcatttccctgtatccaggcctgagaccaacgcctgtgggtacaagggagcctctgtaggcatagggctgggatatacagaggggaggctgagccacccacagggtgaaaagaaggccagtggaaaccccattccacttccctcagctttttacgtgcattctataaacctcatctagtctcttggtcagcagaagcaaaattagccacaatttgctcacactgcacccatccccaaccccactccaccctaccagggctaagagatgtcagcaaaaataaaccccacgagagtgttcttcatagcccgatgcacagaactggcagtgccatgtgggcatcaccctggatggtgtgcatcctcaccatacccaggcacctacctggtcagatgtgacaagagttgctctagggacctgggatcccagagagggtgggtgggtgggatggggacacaacctcagctggctcagaggagggtacagctcagtgcccaggctcggctcagcctggcttaggggaccattcaggcctggattggcaccagtggtttggttggggactagtctggaaggttccacacctctaatcttcaaatgatgctgggtctgtcttccaactggggggctggtctaggtgccttctgtccacaggggtagcttagtttgtttcctttgaaggcctgggtctctttctggagggataagggtcatgtgggtaggggaccagtttgttctggctttagccctgaaagtcctgcatcccaggaagccactcaatcctgggcacactggaaggggtgtccaccttgtgggatgcagcacgtcatgtgttaatcttggtctagatccccgcaggagagctgtgtggctctaggatgtgatagggcactttgggacgcagaattgctggggaaaaaaagaactaactatctcccaccaccagattagatatgggctacttagaagtttctttcttttcttttctttttcttttcttttttcttt

SEQ ID NO: 3663 - DNA, 1205 bp, Artificial sequence
  DNA replication origin
gtcccccggctccggccggcgccaccgccaccctcaagacccccgcagcccaggcccggccccgcgccaccgacgccccccgcggcccgacccgcgcgccccgccagcccgggcctcgtaccgtaggtttcggacatggccgtctgcgacatcttgggagcggcgccgcctctcgccgggtcaccggctgcactcgcccgcggtccgccggcgcgtctcggtggggaaggacctggggcgggggaccggaggagggaggggcccgaccggtccccacggcaaccgccggtctcccagcggctgcggcccagccggactccagctccgcgcaggcgcagggccctccaccctccgtccggccgcgaccgcgaggaggaagaggagatgggctacgcgaggcccggcccaccccgcgttcgcgcgtgcgcacggggaggccggggcggggcgcgtgaggacttcggcgcgcgccggaagcacgtgcgcgggctgggcgctctggcggtgtgcgctgaggtgggcagagcggcaggtgggggcgttgggggctgagtcccgatttccctgagggagggtcgggtagaggcgggcggtgggcaggtttgggggtgacagagggctggggacagtggggtccagttgccggacagaggaggaaggtgcccgcactggggaggaaagcagtccatttgccaaattggcccgtctcagttaagacgttgtcttcggtcatcatctgcggctgtcagccaggaaaaaacttccctgacgctgttacgatggaggccagaacttggttaatgtgtaacaaggaggcagtaggccccaggtgtccagccagaggccgccctgtgaatgggaggcaggttcatttacccgttgggaagctaagctttcactccaaactgccgggccctcttggatggagctgagcgggtgtgggcggaatgacagaagcgcaagatgcccaggtgctaaaaggtcatcgcaagactacaggctgcagcctctccacatcccattttagagggttctggattacggttgagaagtatctcccggccctcagctggggatgtgtttccaaatttaggagtttttttaatttttattttttaacagggtctggcactgtcagcccagcccaaccgattctcctgcctcagcctcctgagtagctggggctaggggctcacacgaccaca

SEQ ID NO: 3664 - DNA, 833 bp, Artificial sequence
  DNA replication origin
tcctcttcctcctcgcggtcgcggccggacggagggtggagggccctgcgcctgcgcggagctggagtccggctgggccgcagccgctgggagaccggcggttgccgtggggaccggtcgggcccctccctcctccggtcccccgccccaggtccttccccaccgagacgcgccggcggaccgcgggcgagtgcagccggtgacccggcgagaggcggcgccgctcccaagatgtcgcagacggccatgtccgaaacctacggtacgaggcccgggctggcggggcgcgcgggtcgggccgcggggggcgtcggtggcgcggggccgggcctgggctgcgggggtcttgagggtggcggtggcgccggccggagccgggggacggatctcggaggtgtctgggcttgggaccgggatgggggacgcgggccgctgggggctcgggtggggtagcgggtgcgcggggcgcgggggcgctgtgcacagcgcattggcgtgatccgccttttcaagtttcctcttgctctttctctgctcttgcactcttagcgcttttcccctctcagtctaatgtaaataactgaaggtttgaaaagccagcttgatgttcggtttcagctgcgatattatccccagcgagcctgtgaagggcttagggcgacgcctgtgttcctcaaatacttcagtttgacctttcctggtttggaattccttgctttacattgggattacagtgaggagttattaataggctaattcattcatctcttcctccggagacctcttgcttcgtttatttctccctccctctcagtgttttttagccttttctg

SEQ ID NO: 3665 - DNA, 1220 bp, Artificial sequence
  DNA replication origin
ggctccgggtttaaacgtcgcggcgggcagggccggcggaggggcggggcggcctctgtgtcgtgtaccgggtcccgtaggctgcgggcagcgaggagcggctggcgctcgaggcggcggacggcaccatgtccccggggagcggggtgaagagcgagtacatgaagcgctaccaggagccgcgctgggaggagtacgggccgtgctaccgcgagctgctgcactaccgcctaggccgccggctgctggagcaggcgcacgcgccctggctctgggacgactggggcccggccggctcctcggaggactcggcgtcgtcagagtcgtcgggcgccgggggccccgcaccccggtgcgccccgccctcgcccccgccgcccgtagagccggcgacccaggaggaggcggaacggcgggcgcgcggggccccggaggagcaggacgcggaggccggggacgcggaggccgaggacgcggaggacgcggctctgccaggtacccggcccggaggggagcgcgaggggcctgcacgcagggacggtttgctctaagctctgagcagctgatctcttatttcttgcgccactcggggctggctcttccttttttttttttcggttgacagaatccgtctctcttgacaaaatagggaaggtggcagcctttgccaccctttatttccttaattaggtggctttcggtcgagccagcggtgaactcaattgaagcgccgctggctgagtctggggtctttcctcgcgggcctctgcggcttggcaaacctctgaatcccatcttatttcttggcgaaccactgagtcccatctgcttatttctaggcgcccatttttgatcagaggagccccagctttaatcagattctcaaaggtaacccaaaaggttaagaaccacagagctaagctttgtctgatgaatggggccattgttttccgtattaactccccgacctcgctacgctgtccctaaagaatattttgcatttgtttacgtggagtgttgaataacttggctgtgagagcatctttataagtgctagggcctctccccttccgtccctccccatcctccctcgcctgtccagatccgaaagcgccggtggcgctgcgcgtgttttcaaggcatggccccttcaccttctttcctgcccagaggcttgcagggctggggacccagttgaacgcctcagtacagcctggagt

SEQ ID NO: 3666 - DNA, 960 bp, Artificial sequence
  DNA replication origin
agagcagaggcggggaccggggctgctggggtcgaggggcgcgccgccgaggagggctgctcagtgggcggaaggcagggaggctgcgggctggggcgaggggaccgcaggagactggggctgagcgggaggaggagcgagggaggggagcggcggggcccgtgatcgggtggtcctggggtctccggaggcgtcccctgagctaggcgtgcggtcccgcggggctgccttacctccttcccgccgcgcccggccgatcctctgcgcccaggcccgaggcgcgcgtggcgcagcagctaaagcgcagctcgctctcccgcgcgctttcctcctgagcaagatgtcgccgcggcggcccgcgctccagctgcaggcgggaggcggtggcgccgcctcagtcccggagcctccacgcgcgctcccggcccccgggcctccgcccgctccgtgggggcggctgcttccgtagagagcgcgaggcgcgggggtgcgggcgtgcctgccagtccgaggggcccaggcccaggtccctggcccacttatttgaggtgcccgtccaccctggtcccagcagacgctgtcccaggcacgcgtcactctgcaggagtcgtcagttaggggcaagagatgatccctccagatatgcagcccccccaggctgcggccgggggcgacactctctgtcctcactcgaaacctaccggttcttcctctctgtgttcacaacacctgttactctggctttaactcccttttatatctacactccccaaattcttttagattttgatcaaaaccatttcactcgctcagagattcgtttgcacataaaagcttgacagattaacttacgttgtgcagaagtatacaaagttgtcccatttgttacagtttcaaaagtggccccacactcttttccctttttacacataaaaccttcacagatccagttactttgtg

SEQ ID NO: 3667 - DNA, 959 bp, Artificial sequence
  DNA replication origin
gagagatgaaggggtgggggggagaagggagacggaaaggggaggaaagggaaggaagggagagggaactaggagaggagagaggaggagggggagggggggaggaggggacagggagaggtaggggaggggaagaggaggccgagggggagggcataaggcctgcctgcagctgtctgcagagccccacgcctgccacacggtgagtcacagtgccagctcccactgcctgcctctatttttatatcagcgcctgctcatatctgactcgttaactaagccttccaactggtggaggggaatctggtggcagaggatgagggccgagggaataatttagaagtctacataggaattataaagcgatccttctctcttatcaggagctctaagcctttttaataaccaggcgctttcagctgctgctctagagggctgtggggagttgccagccctcccagcagtaatcagtgttctgggaaggagaacagagtcaacaagaacaaccgcctgggctttggcaccaaagggtggtagcagctgcaggaggggctcagggaagctgtgctaataggcacttaaatgtgacacccacataataaggatcctaaacagatggtggggggctgctgctatcatgcggtgcgcataatagatgatcagagcaaatgacaggcacgccgcctggggctaccattctgcagagggttgattcgaatgggttgacacctgctggcttaggcaggcatccctttcctccctcactgctccatgtggatctctcctgaagctgcgtgctgggtggaagaggagaatcttctctgatagaggacaacggttctgtggtcaagtgtataccactcccctgctagaaccgcggaacgagctcaaaccagaagatgaatgttgaacatgtacatcctgttgccttcaaaatactcagaagaggggaattcagg

SEQ ID NO: 3668 - DNA, 890 bp, Artificial sequence
  DNA replication origin
agcggaagcgctcgttgccgatggtgatgacctgcccgtctggcagctcgtagctcttttccagggaggaggaggaggcggccgtcgccatctcgttctcgaagtccagggccacgtagcacagcttctccttgatgtcgcgcacgatctcgcgctcagctgcggagggcagaagcaggagaggagccctcactcaggggccgccgccggccctcccgcccggggtgcaggggcgccgcgcacctgtggtcacgaaggagtagccacgctcagtgaggatcttcatcaggtagtcggtgagatcgcggcccgccaggtccaggcgcatgatggcgtgcggcagcgcgtagccctcataaatgggcacgttgtgggtgacgccgtcgccggagtccagcacgatgcctgtgcgcgcgcgggagagagtgagtggctgggggcgaggccgaggctaggctctcagcgctagcggcgggggcgggggcgggggcgggggcgggagaggggactgggggcagcgggcactcaccggtggtcctgccggaggcgtagagggacagcacggcctggatggccacgtacatggcgggcacgttgaaggtctcaaacatgatctgggtcatcttctcgcggttggccttgggattgaggggggcctcggtgagcagggtggggtgctcctcgggagccacgcgaagctcgttgtagaaggtgtggtgccagatcttctccatgtcatcccagttggtgatgatgccgtgctcgatagggtacttcagggtcaggatacctctcttgctctgagcctcgtcgcccacgtaggaatctttctgacccataccgaccatgacgccctgcagagccgagacaccacgcacccgttaacgccg

SEQ ID NO: 3669 - DNA, 1304 bp, Artificial sequence
  DNA replication origin
ctccacacgactccctcttcccggtagtcgcaagtgggagtttggggatctgagcaaagaacccgaagaggagttgaaatattggaagtcagcagtcaggcaccttcccgagcgcccagggcgctcagagtggacatggttggggaggcctttgggacaggtgcggttcccggagcgcaggcgcacacatgcacccaccggcgaacgcggtgaccctcgccccaccccatcccctccggcgggcaactgggtcgggtcaggaggggcaaacccgctagggagacactccatatacggcccggcccgcgttacctgggaccgggccaacccgctccttctttggtcaacgcaggggacccgggcgggggcccaggccgcgaaccggccgagggagggggctctagtgcccaacacccaaatatggctcgagaagggcagcgacattcctgcggggtggcgcggagggaatgcccgcgggctatataaaacctgagcagagggacaagcggccaccgcagcggacagcgccaagtgaagcctcgcttcccctccgcggcgaccagggcccgagccgagagtagcagttgtagctacccgcccaggtagggcaggagttgggaggggacagggggacagggcactaccgaggggaacctgaaggactccggggcagaacccagtcggttcacctggtcagccccaggcctgcgccctgagcgctgtgcctcgtctccggagccacacgcgctttaaaaaggaggcaagacagtcagcctctggaaattagacttctccaaatttttctctagcccctttgggctcctttacctggcatgtaggatgtgcctagggagataaacggttttgctttagttgtcgccaaggcagttcccttccaaactagcgctagagcgaatgagcgagcagccaggaccacccattctgggtttccaacaggcgaaaaggccctttctgagtttgaaatgtcacagggttcctaacaggccactcttccctggatggggtgccaacgcctttcccatgggcatctccttccaccctcacgctggcccagcaagcaggcagtgctgaggccttatctccctaggtgacagatgtggtcagggaggcgcagagaggatgggcactagcgtccagctcctggaacaggtgtcaggcagggagggcagacaggtcttggggaacatgttcccctggctatgtggacagaggacttctcagtggggtctcgcgaccctgtgccccttttcctggttcagggcagcccttagccggggcaaagg

SEQ ID NO: 3670 - DNA, 1431 bp, Artificial sequence
  DNA replication origin
tccgtgtcagtcagtcatggagcggccgcccagagcggcggcgggggcggcggggcgcggggcgcgggggcccagctgagccggccgtcggagtgagaccctgcggcagagacgacggaggcggaagcaacccgatcccggaggcggcggcggcggggggagccggagccgcctgggatgttcagtgagtgccgggagcacgggcggggagggccgggagggtcgcgaggcgcgcgcgcgcgcgggcgggcgggggccggggcggtggggcctcggcggggcgcgccttggctcccgccggcgggcggtgggggtggggcgcgggaggcggggctggggggcggcgggcggctctgcgcgggcgcgacggccgcgcctccgccctcggcctcccgagtcccgggctgcggccggcggcgtggcctgcagtcggcggctacacctggactggcgtcgcgttcctgcgcaggggtgggtcctgcgggttggatgccgggctcggggaggaggtggcgggcgcccgcggggaaggtatcccagtgcccgacagccaagcagggagcacggctccacagctcctttgcatgtaggggaaaaggaaatgtctttgcggcgaagtcgggattcaactttgcacatggtgatcgtgcgtgggtgggtgtggagtcgatctccgcgtgtgacacgggggagccagagttagactagctgctgcaggagagtgcttacctgcaagggtgtctctcggggctcgttgcctcatgacagcaaggtaaggttggtgcgcccatggtgtgggacgggttcaccacctccagctcgcgaagctgccaggcttttgaaaatgtattcgataaggcgttggtccgaagtgagtggatggttagaaacagtggtgtcattttagacttagcggaagtggagtgcaggaacgctacatgcagttctcccatcagttgtgaaagtcgttgtaatgcggatctcgcagtctttgtggttctgggatcagaaggtaagtgccagtcccatgcagtgtctgtcttaaattactgtacctaaactgaccttgcagattggaatctcggaatggtgactcctgctaacaagcagttgggagctgtgctgagaggaacattaagtgcggagcgtgtcttatatcaggcgattcaagtgtgccaacacctgagttggggatgtaggggaggacacggaggctgtgccccagttcctggtcacagctctacttggaagggggagtaggaaagggagttttgtgcttaataggttaaatgcatctggccacatctttaaactttggaacagcataatgtagtggatagagcttggtgacagtagacctaggatggaaaccatgtagccatctgcataacctctctgaactgtagtttcctcatctataaaatgcgatga

SEQ ID NO: 3671 - DNA, 950 bp, Artificial sequence
  DNA replication origin
ccgcagggtctcactccgacggccggctcagctgggcccccgcgccccgcgccccgccgcccccgccgccgctctgggcggccgctccatgactgactgacacggagcgggccgcgggctgggccgctcgggcctccaacgcgcaaccgtctccgccaatgggcgaggcgcctcggcgctcggctggcgacgcctggcgtgcgtgcagcccctccccgctgcgccgccggcgtccggcggaaggagcgcgggtaccggtcccacgtggtggggacgcgggacccgtacagcggcctccgccgcaccgggacagcagccgccgccgctgccgccgtcctcccctgtctacccggagctgtctcgagctgagccccctaccgggccggatcccgaggtgagtcccccacctgcggtcagcccctgcgggcagccaggtcccgaggtgagtccccccacccggggctggtccagaggagatccccctacctaaggccgggcccagatggggggccccccaaccctgcccagttccggtgccgccagcagactctgggctggagcggcttcggcacgctccattcgcgaaggcgaactccctcctggctcctagctgctctcccctggttcttgttgcttggtctctttctgctgggcagggagtgctggcagggctgtgctgtccgccctggacttcgcattgcccggtaagggcggttggaggcccggagagccgaactctggcggagccggggagagcatctcggttgtctttgtagccagttcagcaaacacctgttatgcactttgtagctgtcgcgatggcggttctatggtattgaacttagaaagtcaggcatcgttgaattcgttttggacattttgacaaaataggaaaactgacagcacttgacgttcttgttctctgcagtagagtgaaggataacttaatt

SEQ ID NO: 3672 - DNA, 961 bp, Artificial sequence
  DNA replication origin
gttgggggtaaggttatagatcaacaggatcccaaggcagaagaatttttcttagtacagaacaaaatgaagtctcccatgtctacctcttgccacacagacacagcaacaatctgatttctctatcctttccccacctttcccccttctctattccacaaaaccgccatcgtcatcatggcccgttctcaatgagctgttgggtacacctcccagacggggtggtggccgggcagaggggctcctcacttcccagaaggggcggctgccgggcggaggggctcctcacttctcagacggggcggctgccgggcggaggggctcctcacttctcagatggggcggctgctggacggaggggctcctcacttctcagatggggcggctgggcagagacgctcctcacttcctagacgggatggtggcagggaagaggcgctcctcacttcccagactgggtggctgggcagaggggctcctcacatcccagacgatgggcggccaggcagagacgctcctcacttcccagagggggtggcggccgggcagaggctgcaatcttggcactttgggaggccaaggcaggcggctgggaggtggaggttgtagcaagccgagatcacgccactgcactccagcctgggcaccattgagcactgagtgaacgagactccatctgcaatcccggcacctcgggaggccgaggctggcggatcactcgcggttaggagctggagaccagcccggccaacacagcgaaaccccgtctccaccaaaaaatacgaaaaccagtcaggcgtggcggcgcgcgcctgcaatcgcaggcactcggcaggctgaggcaggagaatcaggcagggaggttgcagtgagccgagatggtggcagtacagtccagcttcggctcggcatcagagggagaccgtgaaaagagagggagagggagatggtggggagacag

SEQ ID NO: 3673 - DNA, 903 bp, Artificial sequence
  DNA replication origin
tgtagtaggcgatgcccagcacccacaggaaggcgaagcagagcagcatccgcgagcgccgccgcattctcccaactcggccgccggcggggccgccgctgctcgcgagtgctgcctgggccggccgcgggcgcggtgggggccgggggaggagcggaggaaggggaagggcgcggcggcggctcctcctcccgcgcggtgctactgctcggcggcggcgcgcactcggcgcccgagctccgccccgggccggcggcgccgcgcggcaccagagcaggaagcagcggcctcggaggcggcgaggggggtcagggagcaaagggcgaccaatcggcggcggctgcgggggccggggcgcgggccgcgggaggggactgccgcgtctccatggctgcagcacgccgggctccgccgtgagggcctgggcgccgccccgcccccggccgcccgcccctcagcgtgctccccccgccggccgccccctcccccgtgagtgacaggtggctgccccgggacccgactggagcgcgcgcacacgtgggcaaagagccttgctcacgcacacggggcctctcgattacgggggcggtagtggcctcggtgcttcctgcccagactgtcacctcttcagccttggtctttggggccacctcagacccttaacgggcttgctcttattggccaactgacctgagtttttggtgcaaaccgcccgcttgaacccgactttgctgctgcttgctgcagttttctcactaatcttgcagcaaaacattcctgacccgctggtatcgattttatttatctatataggcagatgtggaggttttgagttggtaggaactgagaaggtaattttcaaaagaacatttttctgtgggtgacagagctatcaatggtaga

SEQ ID NO: 3674 - DNA, 791 bp, Artificial sequence
  DNA replication origin
agataacgctgctttcaaagccgaggagccagtaaaacactacaaacgtcccctgccggcatgctccagcacacagcccgacgccctgctctcccggccggcgctcggccgcaggaccgcgctgtcccggctcctctcggcgctcaccatcctcccgaatgcccagggcccggccgtccggagcggcggcacgaggacgcggaaccgcagagcggctcacacggtccccacagccagatcactcggcccctggagcatgttaaaaacacagccacagaagagggattctccctgaagcggggagtggggatggaaaatgcaagcgcaggaggccacgtccggctcgcgcgggagggccgggggccgggttgggcagagggtaacgctggggccgcaagggaacggccgggactggcctcgctcggggcgcaggggcgcactggcccctggctcgcacgggccctggggctttacttggcacgggagcggccgcccctgccccccaaaggtaaagggcaaagaaggtggcagaaacacggaacccacgccccgcggagtgacagggggaaagggacgaggatttgcagccgctggtatcaaagggctgaaaagaaacttggactcctctctcctgctgtacatgacgcgttggaaaagcggtcgcctctctctcctctcctccccaccccctttgtgtttcccaacacccccatccctaaacttccaaccgcaggggatggggctcccggcggccggacaagactcgaattacgacgagcagagagaggggc

SEQ ID NO: 3675 - DNA, 1093 bp, Artificial sequence
  DNA replication origin
ctttgataccagcggctgcaaatcctcgtccctttccccctgtcactccgcggggcgtgggttccgtgtttctgccaccttctttgccctttacctttggggggcaggggcggccgctcccgtgccaagtaaagccccagggcccgtgcgagccaggggccagtgcgcccctgcgccccgagcgaggccagtcccggccgttcccttgcggccccagcgttaccctctgcccaacccggcccccggccctcccgcgcgagccggacgtggcctcctgcgcttgcattttccatccccactccccgcttcagggagaatccctcttctgtggctgtgtttttaacatgctccaggggccgagtgatctggctgtggggaccgtgtgagccgctctgcggttccgcgtcctcgtgccgccgctccggacggccgggccctgggcattcgggaggatggtgagcgccgagaggagccgggacagcgcggtcctgcggccgagcgccggccgggagagcagggcgtcgggctgtgtgctggagcatgccggcaggggacgtttgtagtgttttactggctcctcggctttgaaagcagcgttatcttttccgaattcctgtaaccctcgttactgtgacatttagtgtcaccgcaaacccagaaaattctgagttaatggagatggactacgggtggttgggttggaacaagagagtggtatcctgaaacaagccagagggaactaactagatgaacagacttcagttctgaagtcagacccctaaatgtccacgccggggtttggctgcttcagaggttttttctttgcttcattcattcattcatagccgaagatgttaggtggaatgggtgccttatgtggtttctggtaaattacgtggatttgttttatctagaagggcagaaataaagccctctttccacgtgctgaatcggcctagcttctgagctgacattgtactcttagcgttgtttttgtaaaaaatggtataggtagtatatgtacgcgaagacttggtttattcttgaacagcaaagagcatgcaggcagcaaaagccgtgcagtccattcaga

SEQ ID NO: 3676 - DNA, 1240 bp, Artificial sequence
  DNA replication origin
aatcggtcaaagtgctgtgtaagtttccaggggcaccgtagaacaaagcaggcttaatggattaatggacatgattgagtgagctgatgggttggtgatttcataggtgtctggctttaagccctgccttgcctttgcagttccacagccattcaggctggtcatctcttcctagggcctctggagttggcctaccttggagagatctccaatgtgccattcctcctgcagccgactctccttatccctacttcctcagtgctgagccagaggagagtaccttttatcacttctgtatcatttatttatttcgggaagggagtgtagtggctgccaggagagggaggcacacatataaattgtggacaaagcctagaaacctaggcattgcccctgctcataggaagtcatatgcatggaacatacgcactggagtgctagttagacagctgggatgatagagcaggggatccaggctgatacatcaggggaacttgcagagagaataggggatccaggatgatagagcaggataaggacagctgtggatggagcaggacgactggataatggagcatggagccaggatgatggaacaagcagccaggatgatggacagggagctgggatgatggagccgggagctgggatgatggagcagagcagctgggatgatggagcagggcagctgggatgaaacagcagggagctggaatgatagagcacggcagttgggatgatggaggagggaagctgggatgatggagcagggaagccgggatgatggagcagggaagccgggatgatggagcagggagccaggatgatggagcagggagcctagatgatggagctggcagctgggatgacagagtggggagcaggatgatggagcagggagccaggatgatggagcgggggggccaggatgatggagcggggagctgggatgatggagcaggcagccaggatgatggagtggggagcccagatgttggagcaggcagccaggatgatggagtggggagcgaggatgatggagcaggggagccgggatgagggagcaggcagctgggatgacggagcagggagtgggatgatggagcagggagcgggatgatggagcggggagccaagatgatggagcagggagctgggatgttggagcagacagttgggatgatggagcagggggctgggatgatggagctggggggcccaatgatggaacaagaagcca

SEQ ID NO: 3677 - DNA, 1493 bp, Artificial sequence
  DNA replication origin
taccagtagcctctttttgttattcttttttttttttttaaacatatccccttgttaaagatcctcttgattgcaagcaaaagcagcctactgtgcaggctggcttaagcagaaaagggaatttattgtggggacatggtggggaggtgtctcattactgagaggaagaaggctggctggcctcagaaggcatgagaactgggacctgggtccagcccagtccatggtggccacagctggatctcagctctgctcctccaggccaggtggctgctttctcctctctctgcagtgggattttctctgcccaggactcatgtgtctacctgtgggtctaatctcctagcataggctgagcctgcacctccttgagaaaacagattagcttagcttagtctgagtgttcactccaggcgcaccctgagagggagtgcagcctgcacatggggtgggtagttcttaaagggagcctgcctccagaggcgccgggggagggggggggcctgcatttagagtgtgtgcgtggagcatgtagcttgttcctgttttcatggagtcgcagagatcagaaagcatttatgcctgtttctgacagagatgcacacagctggtctgaatgggcaggattggggtgagggcagtggaggagggatctggccacacaggcagtctgctgtgagggccacttcaagccactcttcccttgctgagctgtgattcgttcttttccaagtgacttaaacagaggccttttctcttgtttgtggggatgaggatggcgaagggaggaggagggagagggtggctgagtggaggaagcgcagttgtgctgcggagattcctgctctgcagcttgtctgctgtggattggcccagggggtaggtggcacagtgtgtgtggcaggggggtgggggggaccaggcctggctccgctggtccactcttgggctgtgagccaggacaaaatcttataccaagcaagcatcttttccagtaaaatagagtgtctccatgcccttaggaactgcctgggacagcctcattctgtcctggattttgttctgggctctgctgcctgttgagcgtggaccagtgacctcgtaactgtggcagaggtgaaggtctcagcaccttctgtgtgccctcttgcatgtgtgtttgccagcatgcttggggctttcttcaggtgtttctggcctgaggaagtgtcttacccccatgttatttgtgtggctgcacagcatctggagggagggatagagccccagcgctgggcacatcggatctgtgctctgaacagctctgttgatgccagagctgcctgacttgctctgtgtggtgctgtgaaggtcaggcttggagagtgaggagctgctgaaaaagggtgagttttgttctcttcttccagggctcagtcttccttgtaccagtttctttctctgttcttctctccttgactcaggaatccagtttgcgcagcacttacatggcg

SEQ ID NO: 3678 - DNA, 867 bp, Artificial sequence
  DNA replication origin
cccaaggaaatcccccgtgcggccctgaggtccacctcacaatggagatacaagccccacagtgcttggctctccggcctgggaagctggaggggctgagctagaaaagttcagcccagcagcatgaaggcaggcctggctgacagcacactagaccccgtggggttcagccccagagcctggagcagcaggagcagacagctctccaaccccagctgcaagagaagaggaactggagggagaggcacaggaaggggaggaggaggaaaagggagagcagtggtgggcgggggagcaaatcagggaaaaggaaagggggagagggagaaaggaaggaaaagaggagagggataggaaggggaaggcggaggaggaagaggaaggaggaaaggggaaaaagaaggggaaggggaaaaaagaagggtaggggaggaagaagaggaggaaggaaaaagggaagagaaggggaagggagggggggaggagggaggaggcagggaagccaagggaaaggaggagaggaggaggaaggaagggagaagagcagggaaaagggggaggaggagggaggaaaaagcgaagagaagagaaaggggagggggaggggcgtgctgtgctcagggccagtgcagccactgaacacaggagaccactggcggggatgcgaggaggaggagagcaggcggactctaggaggctcaccctaggacacttcaccatcccacctttaaggaggtgactcacagattctcacaggacacgggagggtctctgctgccagaggcttccacccaatcttagcgcctgctttaagagcctcagaaggagctcagaaaagaaaataataggccgggcgcggtggctcac

SEQ ID NO: 3679 - DNA, 3694 bp, Artificial sequence
  DNA replication origin
gcctgccgatcttccttgaggaggtctgacttcgctgtgtgtttgagctgtggaagagatcaccatcttaagtcacaggcccacgatttttgcctctgtgtatgcccaggcattccttgaggagatttggggaaaaatatcccagagctatttttatgtcagtgacatctttgggtaattaaaattacttttatatcattgttctcaggcatgaacttgataaatattcttaaatctcctcttgcttggattaatttgccatttaaagattcatctttataaaaatgtcactttatgtgtcaaaaactaggaattagaagactgggtagatttaaggaaacgagcaaatcttgattctgtattggttttgctatgcttcagaacttcaaaattatgaaagtcttacttttgctactggaatgctatggtggtgtttttactttgaattccataattagggagacaattagaaaatgtagccactgaggttagcaaagccagggttgtagttccacgtgataaagcagtacagcttgcaaggtgggcatccagatttctgagcgggaacagtgggaaggaattcctccacagtggcgggggtgaaggtgtggtgtgagcatgcaggcgcgtgtgcgggtgggcaatgggaggcctcagtggagtcttgattcccatctcttggaatcgggtcacagagagccgaggattcggcataaaccaggtgaactccctctccagtgacaacagtgcacctcccagctgtccttagaaaggacccccaaggcgtgactccaaacccctggaaagggccataggtgtgggacatttccaggagtgctctgacttccagcgtgattttaaatgtgagtggccattgtacatagcaccttgctaacaggcttgtcacactcattggtctgctccgcacacaatcccatggggagggtgcctctccgccagtgtatgcttccggttttaaatgcaaggaaatggaggctctgagagcagagtggcctgccgggatctcatgtcagtacacggtgttgtttcaggcggacaccatggttttgtaactccaaagccaggcccttcctatgatgcccccatgtgtgccgtcctcaggtgcctcaggataggtgtgtctctgggttgagtgtggtctcatgttcaggagcttgtggtccattccagatgaatgcagggggagggggggcaacaaaatgtaccttagctgtcaagggggctggaaggagaacctgatagtatgggtgagtggaggaggaccctggctgcggaagtagggggaagttgagggggaggaggatagagagtgaaagggaggatggtggggatgggggaggagggtggagagtgaaagggaggagcttggggagcaaagggggaggagggtgaagagagtaacttaagaatagggagtagaggagaaggagtgtggggtaaaagggaggagtgtgggggtaaaagggaagagtgtgggggtaaaaaggaggagtgtgggggtaaaagggaggagtgtgggggtaaaaaggaggaatgtgagtaaaagggaagagtgggggggtaaaaaggaatgtgggtaaaagggaggagtgtgggagtaaaagggatgagtatggggggtaaaggggaggagagtggagggtggagcagtaggaggagcagaaagagggaagcaaagggaagatggaggaaagagggaagcaaagggaagacggaagcaagggagcagaaagagggaagcaaagggaagaaagagggaagcaaaagaaagaggagcttgaggttggggaggagggtgggaagtaaaagggaggagctcagggatggggaggagcgtgaggaggggaggagggtgggagtaagagaggaacttggatggggaggagcatgaagagggggaggagggtaggaatgaggagctcagggatggggaggagtgtgggaatgacaggagctcagggatggggaggagtgtgaggaggggggaggagggtgggagtgaggagctcagggatggggaggagtgtgaggagaggaggggaggagggtgggaatgagaggagctcagggatggggaggagtgtgaggagagaagggggaggagggtgggaatgagagaggagctcagggatggggaggagcatgaggagaggaggggagggggttgggaatgagaggggagctgggatggggaggagtgtgaggaggaggggaggagggtgggaatgagagagaagctcagggatgggaaggagtgtgaggagaggaggggaggagggagggagtgagagaggagctcagggatggggaggagtgggaggagaggaggggaggagggtgggagtgagaggagctcagggatggggaggagcatgaggagaggaggggagggtgttgggagtgagaggagctgggatggggaggagtgtgaggagaggaggagaggagggtgggaatgagagaggagctcagggatggggagaagcgtgagggggggagaagggtgggaatgagagaggagctcggggatggggaggagggagggagagaggagctcggggatggggaggagtgtgaggagaggaggggaggagggtgggagaggagctcggggatggggaggagtgtgaggggaggagggagggagaggagcttggggatggggaggagtgtgaggggaggagggagtgagagaggagctctgggacggggaggagggagggagtgagaagagctcggggatggggaggagtgggaggagaggaagggaggaaggtgggaacgagaggagcttggggatcagcaggagcgtgagtggaggagaggagggtaggagtgagagaggagctcgaggatggggaggagcatgaggagaggggggaggagcatgagaggagggagggagtgagagaggagctcggggatagggaggagcgtgaggagaggaagggaggaaggtgggaatgagagaaccttggggattgggaggagcgtgagtggaggggaggagggtagggatgagagaggagctcggggatagggaggagcgtgaggagaggaagggaggaaggtgggaatgagaggaccttggggattgggaggagcgtgagtggaggggaggagggtaggaatgagagaggagctcggggatggagaggagcacaaggagaggaggggaggggggtgggcaatgaatggagcttggggttaggagaggagggcagggagtgaaaggagcttggggatgggaagaagcacagcgggaggattggaggaccctggccaactagggggaggagcagcacagggaggggcttggggagcagaggtggggtgtgggcagcgggggaggagcaccattagcagtgcctgacaatgagcaaatcctaggagcaggctccccctcctcatactcgaaaaccgccactcctgtagcacaatagaagggcagagtcagagttggtccctgtggagttttttaggggaaacgaaacggaggttcttgagggtactgggcacgtttatctagcatgctttgccctggtcctcaggcctgagacaggagggagcaccctccctggccctgtgggatgatccccatccaggagtggctgatctccagggagataaaataggcatggtttgttgaatatgagtataggatatggggtgg

SEQ ID NO: 3680 - DNA, 1312 bp, Artificial sequence
  DNA replication origin
ggcggcgggcgctgtgctgcgggctgcgctggtggggggcggcgggccgcggcgcgggcccagggcccggcgtgtgcggctgggaggcactgtgggggcgggcgcgcgggcggcggccggggccatggccgagggcggcgggggcgcgcggaggagggcgccggcgctgctcgaggctgcccgcgcgcgctacgagagcctgcacatctcggacgacgtgttcggcgagtccggcccggacagcggcgggaaccccttctacagcacctcggccgcctcgcgctcctcctcggccgcctcctcggacgacgagcgcgagcccccgggacccccaggggccgccccgccaccgccccgcgccccggacgcacaggagccggaggaggacgaggccggcgcgggctggagcgcagcgctgcgggaccgcccgcccccgcgcttcgaggataccggcggtaaggggctgcccgcgggtggatgtcgggggcggcgctggaaccgggcgcgggggaggcgtgggtgctggggcgggcgagtccagactctccgtgggctggcttgtgggtgtctctccggaaacaaatgaggctgcaggagcggtgatcggtctgactgctcctgggggctccgaacccgtgggtggagagggtaaggcggaggccgtggccagcacttttccagtgacaatgtcgtcggggaccttttccttcacttcctgggagcaccccagcccctgcatgggaagtctgtcacacctgtgggtcggacttttaggggtggattgaagttaggctttcctagttgagggggcttttctgaaagcccggcgtggctggtggaggcagggggagtcgttttttcactgacagcccaagagcaagccttacagcaggtgacgcgggcgaggcaggtaggagttggcccagtgagagttgagagagaggccacccgcggcgtcttgacttggcttagttttctccttaatctgagaaactttccctgtccgcgccattccagatctcttgttaagaatggggaggagtgaaggaagggaccgattgggcagcgttaaggtgcttgcttttccgccagaaggtactttcaggtgtgtcctgcttaccactgtggccacagacaagccccgaatacctggagaaggtggctagggtgctggcagctgcggctgccccactcctcttcactgtctgtttttgtgggagttggctgttgaaatatcaccacttcctctgcagaagctccgcagcctctgccttctttgaaagctgcagaccagccgccctctcatgctggt

SEQ ID NO: 3681 - DNA, 1256 bp, Artificial sequence
  DNA replication origin
ctcggcgcccgccgcctccctgcccgccctctccacggcctccggcgctcggctgccgaccttcccgggcgcgagccgccagaggcgggccctgccgcccctcacctcccgcccgccggccaatggggagcccggcccggacagccgcgggggagctgggcgggcccggcgcggggaacgcccccaccctcctccgcggggcggggcggggcgcgcggccggggctggcggttagggggagggccgccggcggcagtgccggtctcctcctacagggacgcgcagcccgggaccgccacgcgcagcgcgggagggggagggcgggaccggggaacaggaggggagggggacccgggtgcttccagcggtccgggcccgcggacggagtgcgggccgatcccgctcactgtccccttccgcagtccgcgtgcagctccagggagctgtccgccccggtggttctgaaccaggcgccgccgaaacgctccaggtaggcggcgggcccgaggtcaccacacccgcggcggcggctgctgccgaggtttcctgggggtcactgccagctgcgccgcatgctcccataaatacaggggctgtccagcttctgggaatctcgctctaattaggagcccgcctcgccggtccactgttggtcgctggtcagatgctaactccgtctcgcttcagtatccctgtaatttaagggtgccagcactggagttaagtagctagtcattcctcatcatcgttgacgtgtggcatcttttgaactcaaaatatccattacttccaaatactaattactctcacacctctattttaatatctccttcacacacacacttgaaacactcatgtactgaaatattgcatgatcacccaggcttcagtgctctcataaacaatagcacagaaaggttgcatccgcccctcttccttgggcaggaatgtgtggtggtcatcctgttgatggcgatacgcgtaacggagactgccttgtcttcttgctcccctcctcctccttcgaataatgcaataagtcacactaatggtaaatgggccataaagtcactttcactctgaaataaaataaatcctcagagatgtgaagggcttacaaatcctactgagcattaactaaattgtagttacatgaaacagaaaggcatgttgcgatttctacgaatgcataaaggatgaaggaccattttgccgccaagtggggtcacttctagtgtcgagcaggaaccttcact

SEQ ID NO: 3682 - DNA, 980 bp, Artificial sequence
  DNA replication origin
gagaattatgcagagataggtaacagatggagaagaaatttgagctttggagggggatacctgatatcctttggagaataaatgctgaagaagcagaagtgtgtcttgttgagaagattcaaaggaggggctacaaagaagaaggtcatcaatatattgaataaggtgagaagcagaggggtggaaagaaagtagatcatgagaaagagcttggctgaagtaaatgagggctgtccctgaaaccttgcggcagcacagcccaggtaagctgctgggactgttgggtgtcagggtcagtccaggtgacagcaaagagaggctgggatgaggggtgcaggggaatagtgaaaaaagcatctttaagatgaagcacagaatagtgagttgtggaggaaggtattgaggacaaaagagtgtacaggttgggcaccacagggtggataggcaaaacaatttggttggtaaggcgcagatcctgaactaatctgtaagacttgtcgggtttttggacaggtaaaatgggggaattgtaaggagagtttataggttttagaagcctatgctgtagcaggtcagtgataacaggctttaatccttttaaagcgtgcggtgggatgggatattggcgttgagtggggtaagggtgattaggtttagtgggatggtaatgggcatgtgatcggttgccagggaaggagtagagatgtcctatacttgtggttaaggtggggggatatgagaggaagacgcaaaggaggctttgggttggggagaagggtggcaatgagatgcagctgtagtccaggaatagtcagggaagcagataatttagtaagtgtctcggcctaataagggaactgggcaggtggggataactaaaaaggagtgcttaaaagagcattgtctaagttggcaccagagttggggagttttcagaggtttagaagcctggctgtcaatacccacaacagttatggagg

SEQ ID NO: 3683 - DNA, 1209 bp, Artificial sequence
  DNA replication origin
ggcggggcgcgggccgggagcggcgggcaggccgggcatggcgtccatggcggcggcgatcgcggcttcgcgctcggcggtcatgagcgggaaccggcctctggacgaccgggagcgaaagcgcttcacttacttctcgtcgctgagccccatggccaggaagatcatgcaggacaaggagaagatccgcgagaagtacgggcccgagtgggcgcggctgccgcccgcgcagcaggacgagatcatcgaccggtgcctggtggggccgcgcgccccggcgccccgagaccccggggactcggaggagctcacgcgcttccccggcttgcgcgggcccacgggccagaaggtggtgcgcttcggggacgaggtaggtgcgggcctggccgcggaccctcttcccctcccggcgccccgaggcgccccggcccggtgggcacctgccggcgtgaggccgccccagctggtaggggctggaaaagaaaaggcaggaatggcagtgggtgggaggggagccccagagccgaagttcggggggtgggggctccgctgggggagttggttaagagatcgccgagaggtgggtcgttaaagaacctccatctagacctgatccgccggctcgcacggactccagagacttctcccggagctgtcgtaagcgaggctgaccaaagtggaaacaacaagcaattttaaaccagacaagcctgggttttaatccagctctgctacttactacctgtatggcggtgggtcaattaacttcttagagcctcagtttccactgtgtaaaacgggggtaataacgccaccccgtgcctgcccgtgaagggactgagcaaatgatatatactaacatgaatacttgtgatgagatgtatggggaaagtaaaattgccaagccaggtaacaaggaagaaaaggtgtcttccaagataaggagggaaacccatccatcaccctaagatgttttccaagtgagcacaatgcccagcgtatgttttaagggtgagcatggtggccctgttttccaccaaaaaactaagggacgataagtttaaatgagctccagtaagtcttggccacataacagggcatgtttaggtctcagatctagacactgtccagactgctagagggacagtcatttgtgaaggtagaaacgctgaatctgttccagaaaaagctcagggatgacccacactt

SEQ ID NO: 3684 - DNA, 1487 bp, Artificial sequence
  DNA replication origin
tggcaacaggagtgccatgtcgctaggaagttcacatgggcattgtggaaggtgacagccgctgtaggtgccagacccaaagggagaaggggatggggacaacatgtggcaaggagattctctgggttctgcctgtccatgggtgggcacactgccacctgcgtcatcaggtgacctccttgcagcagctgctcaggggttgccggagctgtgtgactgttgtccttttgtggcagtcagcacccacagtctgcttcctgctgtggccatggcagcaacagtgaccatagcatagagcagaggggatgcggtaaaggtcggtgagatggcatttaacccagaccttcagaaattggtagaacttggacaggtgggcctgaggaagagcagctttctaaccaaatggcctgatgcaaaccaaagcacaaaggtcgcaatgaagatggactgtacccggggctttggtgatgtgctgtcactggtgatggctggtgaaggccagaaagagctgctgtctaaattaataacaaaaataaagacacccaaccagagagtctgtgaaagaggaggaggtcagcagaggggcgcagggtgattgcagaggaggaggcctgcagagggacgcacgttgattgaggagggggaggctggtagaggggggcagcgtgattggataggaggaggtctgcagagggacgcagggtgattgaggagggggaggctggcagaggggggcagggtgactggagagatggaggccagcagagggagagcagggtgactggagagggggaagccggcagagggagggcagggtgattgtggagggggaggccggcagaggggggcagactgattgaggagggggaggccggcagaggggggcagactgattgaggagggggaggctggcagaggcagggcagggtgattgaggaggggaaggatggcagaggcggggcagggtgattgtggagggggaggacggcagagagaggggcagggtgattgaggagggggaggctggcaaaggaggggcagggtgactgaggagggggaggccagcagaggaggggcagggtgattggagagggggaggccggcaaggggggtggagaggcagggtgattgaggagggggaggccagcagaggggtgcagattggagagggagtaacctggagttgggaaggccaggcacaccagatagacaattagacctggaatatgctagtggcagtggaagaggaaagaaaaggacggcatactttgaagaccattgcaagcatgacataactttttcctcgagtagacctgcagtatgaagccatgagctgaattattaatacaacatgacatttgggggccaacttgtaggggagatgccctcctccatccacctctcattcatttaaaaaggattaactgaaggctcccctgaggctctggccagtggttttcatggacccgaaggtggggagccatctg

SEQ ID NO: 3685 - DNA, 908 bp, Artificial sequence
  DNA replication origin
ggcgggcggcggcggctgcagcccgcagtccggggactggggggaccagtactctgccgagtgcggcggtgagtgggcggcggcgggcgtccgagtcggccggggcggcggggcagcggggctggggtcccgggccggggtacgggtcgcccgggcctcacgcctccggctgcggcgcgcgatccgcgggagccggctcggccaggggtcctggcgggcagcttcccgccgctgccacccacgccgccgcgcgccctcctgcagccgcctttgggcagggcggcgagtcgagaaatgagctgacagcatgctcctggggccagggcggcctctctcctgagtctgaagcaactgttggaagggtggcggaggagatggcaggtggcccggggcagccctgttcccgccgccggcctcccgaggatgccgaaggggcgagggaggggcgggcggacgagcaaccagcccggcggcttgcggagcccgcccccggagggagacgcctggcacatcttaggcctggaaatcaggcttcctgacctcccgggttaatgtctcgtatacaacagttcctaaaaattggatccctggaatggaaaaaaagagcaagcccatcttatctgctcgttgacatcttgcttccagttgtttaagatcaacctgcgatctgtcaggtgtctcccagagggaaaaaaggcccctgcaggccttgagcctgtgtgtcagtgccgtgtgtgtattggagctacgccagctcattcattaagaatgggcgctattggcttcagtttaataaatcatagcagatgcctctgggacaaaatacgtgtgtacatttttttgttttgaagttctgtcgtgggtctttttacccatcaatctcctccctttctctttcccccttctct

SEQ ID NO: 3686 - DNA, 1169 bp, Artificial sequence
  DNA replication origin
ccgtaccccggcccgggaccccagccccgctgccccgccgccccggccgactcggacgcccgccgccgcccactcaccgccgcactcggcagagtactggtccccccagtccccggactgcgggctgcagccgccgccgcccgccggggcctcctgctgctgccggtgctgcagctcctgcttgagcagggagagcggcgagtagtgctcggtggccagggcgcctggccgcagcccggcggacaggacccccagcagcagcagcagcaggacacgccgggcggcgcccgcggcggccacagcgccgccccagaagcagcagcagcagcagcagccggcaggtgccatcttccctcaaggcgcatgcgcgacagcccttgcccggctctcaggcctccccgcctctaacctacggcgggcaggtggaccgtggcaagggggcgggacaaggggagaagcattgtgtgctgggaatggtagtcccagctcggccagcccggggccgccttgccggtgccgggactacgaatcccaataagcccgcgcggcgcaagtcttccggtctggcgtctgacgtcttaccctccacagaatcggaagttctggactgcagttgagtggaaatgggcaacggcgggcggagcggcctgcagcaggggaaggggaacgtggatggggtggcagcgactcctactgctgcctcggcctcctgccagtacaggtgcatcgaatgcaaccaggaggccaaagagttgtaccgagactataaccacggtgtgctgaagataaccatctgtgtgagttgtcaggtgtggggtgcccttgagaagaaaatggcgcggcgggatttggggaccgcgaggagcagggtcctctgatacagtctttagttcggtagttgacattcccgcccgggatctttgcatgaatatctgtactgatagagaactcagctacccgacagcgcttttctcatactggggcatatttgggtgatatgacctaagccggcgaacggaccggaccgacagacagaggtagatgtgggcattttgcagagaaatttaaagatcaattaggttgacattttggttcatgccaaagctacttccttctagctcttctccctttgacagagagatggtaccatccttaccctccacaaccca

SEQ ID NO: 3687 - DNA, 883 bp, Artificial sequence
  DNA replication origin
gggaaagttcgcggggaccgcgctctgtccggaagtccccgcgcccacccgccctttcgggctcctccgccccaggcgccggcgccgtcctcccaacgacccccatttttctcgcgtgctccgtgcccacgattggaacccccgcgggagagccccgcgcgcagagggcggctttcttatgcccggcgccctcagtccggccccgctggctcggaaacctgggcgcccggaagcgctgtgcggggttcgtgcctggcctgggggcgggggcggccttgtcacctctccccgagtgaaacagaccttcccggtgggggaaaggctttcacagcggcccaacggattaacgcgattgcgttttcctaccacgaagaggacaacttttgtccgccgccagtgtagacagcagattggaacagcccggccccctttccggcgccccaggccgcgcgtccgtgatccgattaccgcgggatggccccggcgcacagatggctgcgaaagcagacgcgcaccccgggcgagggaggcggccgggtccctcagccccgcgaagctgattgcccaaaccctcttgagaaaggtgggaggtggctgtcctcccggtctgggtgctgtccatgtgagttcttcgccttgtgtctaagctccataccatgggctcagtgtttctctgtgcttgggaagtacattagctgtttgtggaccagaacacacatgatttagggtgacgctaaaagtaggacaagggcagggatttaggcaacagcgagtctttccccagctttctcggccaggcgtaggccaggcaagaagaaatcaaaaacttttcctcttttctaccatcttactggcccccatcacctcctcccaatcccctcgt

SEQ ID NO: 3688 - DNA, 1198 bp, Artificial sequence
  DNA replication origin
gcggttgggctgtagcgtttacttcttgatcttttctatctctaatctggttataactgcctgtcatttttacttttcctgggaggggcagagtctctctctctcttctcttttcctctgaggtgtgcgtcgtgtttatttttgcctgagctgatggataatttccgagatttaatccctttctctggtttcctgacatttccacttagagttactcttgtgtttatggccagaatgaaaggcatgtttactagtgttttgaagtttcaaaagtgggtctggcgttcttgctgactgctgcgggtactgctggacaaggccgtgctgagaaggccagcgcgcccggcggcaaggagcgacctgcccgggtctggggcccccagccgccccccgcggcgagtgggaggcagcaggaggcgggctggattccgccctcggggagggccgggggtcctgggaccagagccaggcctcctgccctcgacgtcctgccggttgtgagccagagcctcggtacccccaccccctgcaacggcctgcttcgtgggatctgaagctgggccgccccctgggcagggcagggatcggtgaggcaaggagctgaggagcgctggcaggtaagggggaagtctggagccgggttggaggtgagcgggcgttgaggggtgggacagagggagtggagacggggctgggggcgagccagtgaactgggggtggcacagaggaggtgggagcagagatgggggtgatccggaagcctggggtggggggtgagtgggttcggagctgagggtgagccagtgagctgagggtggcacagagggcgtgggggcggaactgggggtgagccgggaagctgggggttggcacagaggaggtggggacagagatgcgggtgagccgggaagctggggttcggggtggcgcgggtgagagggttcggagctaggggtgagccgggaagctgggaggtggttcagaggaggtggggacagagatgggggtgaaccgggaagctgcgggtcgcggggggcttagtaggttcggagctagggagtggcacagaagggttcgtgacggggctggaggtgagtcggggggttagagggtagtcacgcggagttggagatgaattagggcgctggaggggcgcgagggaggaggagacccgggtggaggcgagcccggctgctgg

SEQ ID NO: 3689 - DNA, 1091 bp, Artificial sequence
  DNA replication origin
tcccatgtctacttcttcctacacagacactgcaaccatccgatttctcaatcttttccccacctttcccccctttctattccacaaaaccgccattgtcatcatggcccgttctcaatgagctgttgggtacacctcccagacggggtggtggcctggcagaggggctcctcacttcccagtaggggtggccgggcagaggcgcccctcacctcccggacagggcggctggccgggcggggggctgacccccccacctccctcccggacggggtggctgccgggtggaggggctcctcacttctcagacggggcggctgccgggcggaggggctcctcacttctcagatggggcagttgccaggcagagggtctcctcacttctcagacggggcggccgggcagagacgctcctcacctcccagacggggtcgcagctgggcagaggcgctcctcacatcccagatggggcggcggggcagaggcgctccccacatctcagacgatgggcagccgggcagagacgctcctcacttcctagatgtgatggcggccaggaagaggcgctcctcacttcctagatgggatggcggctgggcagagacgctcctcactttccagactgggcagccaggcagaggggctcctcacatcccagacgatgggcggccaggcagagacgctcctcacttcccagacggggtggcggccgggcagaggctgcaatctcggcactttgggaggccaaggcaggcggctgggaggtggaggttgtagcgagccgagatcacgccactgcactccagcctgggcaccattgagcactgagtgaacgagactccgtctgcaatcccagcacctcgggaggccgaggctggcggatcactcgcagttaggagctggagaccggccaggccaacacagcgaaaccccgtctccaccagaaaaatacgaaaaccagtcaggcgtggtggcgcgcgcctgcaatcgcaggcactcggcaggctgaggcaggagaatcaggcagggaggttgcagtgagccgagatggcagcagtacagtccagcttcggctcggcatcagagggaga

SEQ ID NO: 3690 - DNA, 1303 bp, Artificial sequence
  DNA replication origin
gtgtgcggcggacgggaaggcggcaagcggagacgttccttttatgaatgggaaaatctccacattctccaacgccagccacgagctgcgggaacagcctcccacccgcggccccggctgtttggtctgctcggctgttcttccccgctgctgccgagggaaggctgggtgggggaggcagaggtgggtggggacgagcagaagaaagtgctggcagcgcagccggctctgcctacagaagtttcacgctggcatgaaacagatacaaattaggaaatcgtttatttaacaacgatatgaatattgaagtcatgcctccctccgtcccaggttctcccgtgctccaaacaaagactaaagaccggagtcgtagcgccaggcgcgggcccaggcttctgctagtccccgggtgaggaggcgcaggctggcggggtcaggcagggggaagctgcagcctgcgcccagggcttggggctctgtgcctaggggacaggaacccctgcagggggacccttggggaggcgcttggcgacgcgctcctggccgcagcacgaaggcccagagccttggaagtcaggacgccccgggaccactggccccactcagcagctcgcttaggctttccctcgctcggatcctgaaatgccaaatgaatattgtcataatactcatgtctgagaactaaacgagctagttgcaaatacagacggcgtttcctactttctgtttttgttgtgggggcggcggttggagtctctctgggtcgcccaggctggagtgcagtggcgtgatcatagctcactacagcctcgaactcctggactcaagcaatcctcctacctcagcctcccaagtagctgggactacaggcctgtgccaccacgccaggctctgttttaaaatcctatgaacctttagtccggctttgcagcttgcttccagtttgtgccaaagttgaagagtaggccaagctaaggccagatagagcatcgcacagcattaagagacctgactctacttcccctcagctaggggacttggaacaattatttaaccaggcatcagtagccacagatgggagatggtaacaaccttgtcctcatctgccttgtgtagataaagccacaatgagctggatcctgcctgcaactctcagataagccttccagaaatgtgctatggaatcttcagggtcatgtcagaaacgcagtgtatgggtaggtctgtaattgaatgcacttaaagatgcatttctgtgaccctagcaagtgccatcatttacgccggctcagcccagcctcct

SEQ ID NO: 3691 - DNA, 1496 bp, Artificial sequence
  DNA replication origin
agcccctggctccggtgggcggctaccccgaggccccccttctgccccggcccaactccttatcggggtgatagcgaggtgagacaggcaggtgcgaaggccgctcagccgtggggctgggatcagcaccacgaggcggcggacagcgcccgggagccgaaggtggggctccagctgcctgctcgccgacccctgggccgccacccgccgggtcgctggggccgcggccacctcggcgggacccgaccggcccggagacagccgctcaccctactcctgggcggctgtggacgccggctgactgcgccctggggctttctccctgcggccgggattgacccgcttccctggttcccagctgctgctcctgcggcgcctctgaccttgggccgcgcgacgctgcagccggcgggcggagggcgagcgtccggctggctcgggaatcccctccccgcctccctcccgccgctgccgctgcctccccgcgcggcgcgccgaggagttgtaatttccagagcagagagtaatggggaggaggggggaggaggcttcagctcagcgaataagggctcgcctcttgctgctagggaatcaaggggcaattttaagggttttgcagggaggatcattgttaataacaatccattatttggatggagattgtatcttgaatcagtacaacgacctgccccgccccgcccctgccatcgtctccctgggccactccagttccacaccccacccccaacccaccgccatagaagggtgaaaacgggatcctaaaaagccagtcgtttagaaatggataggcaacatggcctgacagtcgcttcctaaaactacgataaagcaaaaaaatccaagtcccaaaatgtcgggcagcctgaagtccaagggtgaggttttatttatgaattgaaccacaagccattttgtctcttcctttcaaccaagggtgctcatccgcgctccaggtcaactgtgtgcacggactgagagaggacacgcggtgccgctcacaaaatggggtttcctgagaaaggcgagagcgcgcccgggtagacccctgggaacccagcgcccccagacccagccctaccccgctgcggatgtggcggtgtgcggcggacgggaaggcggcaagcggagacgttccttttatgaatgggaaaatctccacattctccaacgccagccacgagctgcgggaacagcctcccacccgcggccccggctgtttggtctgctcggctgttcttccccgctgctgccgagggaaggctgggtgggggaggcagaggtgggtggggacgagcagaagaaagtgctggcagcgcagccggctctgcctacagaagtttcacgctggcatgaaacagatacaaattaggaaatcgtttatttaacaacgatatgaatattgaagtcatgcctccctccgtcccaggttctcccgtgctccaaacaaagactaaagaccggagtcgtagcgccag

SEQ ID NO: 3692 - DNA, 927 bp, Artificial sequence
  DNA replication origin
tctggcggggtgcggtcgcacagctggcagatggccaccgccgcggctgcagacgtccccggcacggccccgcggccctgctggtaccgctgcacgatggcctcgagcagccggttgcgctggaagccgcgcaggccgcggtggtccagggatgcgctgcggtggcactgcgggcacgtgatggagctcgaagacgaggacagcgaggagcaggcggcaccccgagccgccgcagccgaggagccgggtggtgcgggcaccatgggcagcacgcgaaccccgttgggggacttgaggctcggggtgtaggacccgtagccgctgtctgtctcgctgtacaagctgagcttgtccgcgtggtctccgccacctcccgcaccgccgccgaggccgccagctgcactcccgcctgcaccgccgcaggccgggccagccgcagcgtcgtgctccagagaggcagcggcggcggcgcccgcctgcagccccgatccccgggaaagcaggagcggctggggcaggtgctgctcaccgtccggggtctgcaccgcgatggtgcgagcgcaaggcaggcagacattgtgggaacagggcaggatgataggctcccgaaacagagagccgcacacgggacacttcagctcttcctccatcgcggcgccggctgccagcgctgctctgcgctggggatgaatggccggagctcgggagactggcggaggaggaccagcgcggtgcgccccggtgagacgacgggcgggggcatcacacgggcatgcccacttcacagccgaggggcacgcccctctctctgtcctgtagccaccgccctaagatgattgaggggcgagagaagggagggggtcctcacctcctgcccgagggtcccgcaccagcggcttcaacctgcggccagattccggagccggt

SEQ ID NO: 3693 - DNA, 1485 bp, Artificial sequence
  DNA replication origin
ggtgcccgcaccacccggctcctcggctgcggcggctcggggtgccgcctgctcctcgctgtcctcgtcttcgagctccatcacgtgcccgcagtgccaccgcagcgcatccctggaccaccgcggcctgcgcggcttccagcgcaaccggctgctcgaggccatcgtgcagcggtaccagcagggccgcggggccgtgccggggacgtctgcagccgcggcggtggccatctgccagctgtgcgaccgcaccccgccagagccagcagccacgctctgcgagcagtgcgacgtcctctactgctctgcctgccagctcaagtgccatccatcccggggacccttcgccaagcatcgcctggtgcagccgccgccgccgccgccgccgcccgccgaggcagcctccgggcccactggcaccgcccagggcgcccccagcggaggcggcggctgcaagagcccgggaggcgcgggggcgggggcgactgggggcagcacggcccgcaagttccccacgtgtcccgagcatgaaatggagaactacagcatgtactgcgtgagctgtcgaaccccggtgtgttatctgtgcctggaggagggccggcacgccaagcacgaggtgaagccgctgggggccatgtggaagcagcacaaggtgagcccgcgggacgcgggagtgcaggtgccagggaagagggtacgaggagaaaggcttttggcctctcccttggagagctgacagaaagtcggtcagagggtcaggcaggaattacctcactcattagccattcattccatcagatagtcatttgacaaacaggtaagggactcccggtactttggactggatgctggagatgggaagggtatggaaagatgacttattaggtccccacccacccgaggttttaggatttatgtaggcacagggcacccaaaacgcagacacagggctcttttactcccaacgtctgactaataagttaccttgatggtcccttttgagttaaggcatgcaggatctccttttcccctctgccaccctcagcaacttatggctggcaatgtgtccttgtatctgatactgcgagaaagagaggagccatcaaaatctggttaggtccttgatcagaccccaagtcaagactagagttggtttttctaacattcacctaaatttcccatccaaatgccaaagatgagcaattggactcacttccccagaggtcaatgaactaggcctggcagagttagaatcttgtgggaaggacccctaaccgcctctggaacttcagacaccaattattccttgtagtcttaccagtaaacagtcaccgcagaggcaagaggtctccacacagcccagccagaaatatatatttgaattgaggaggaaaataaagtaattggccaaggctatccaactggaaataagcaaaaaggtgagcacagatgagaggaagagactaagagactaaccattcc

SEQ ID NO: 3694 - DNA, 1441 bp, Artificial sequence
  DNA replication origin
aggggccagctcggtgccatagggagacctgtgatgcacggagtgtggcagggtgggagagcaggagcgccagagtcacggacctaggttcaagtcccagctcagcccctgacagccatgtgagctggggtgagaagcaccagtcagaatctgaggcttcccatttgtgaaaaagacaatcatttgttcaacaacaattatttgttcattcagaagtgcttggaaagtgtctaccatgtgccaggcactattccacatgctcaagatgcggttgaacaagtctaccaactcacaagattgggcttacgctctcgagaaggaaatagacactaaacaaatgtataatagaatgttggatggtggcaggtgctatgaagaggaatcagaggaagggccagcagtagatgccatgcggtgagatttgaggtgaggaggaggaagtggtggcagaggaggaggaggtggaggaggtagtcatggaggaggagatggaggaggaggaggtggtggctaagataatggaggaggaggaggaggtaatggtggaggaggagatggaggaggaggaagaggtagcggaggaggaggtagtggaggaggaggtggaagaggaggaggtggtggctgagatagtggaggaggaggaggtagtaggagaggagggggggtagtggagaaggaggaggtggtggcggaggaggaggaggtggaggcagtagtggtggtggtggtgcaggaggaggaggaagagaaggagggagaagaatctaggcgaagagttttgcaggcagcagagggatagcaagtccaaagtccctgaggcaagaatcagttttctctgtcccaagagcaagaaggtcagaggtgagagcagaatgagcaaggtgggttcagagaccctagagggttaagtaaagtttgcataacttgccccattatgaaatcagcaaatgctggccagaaccggagtcctactctgcatgctgcccctccacagatgtcaagggaggggaggtaaagctctttggtttttgtggactgagggccacacttgcagaatctgtgaactcaggaagtccttacctgcataatttgtggccattttaaactaaagaaggaagtctctctcacattgccatgctcactcccacacagcttgcacctccaggaaggtctggaaaggccatttgccccaggtgtaaatgacacgcagtgctgagaagcaggaggagcctggcagagtggatgagctgcagtggaagagagaggtccccttggaaagtgggggtgtggagggagggcttagggccactccagatgctgctcctagctggatgtggtcactggactggtcaggggtaactggactggatggggtcactggctggtcagcgttcagagaggaagcgggagagcagagcagcagggcccaggggatgga

SEQ ID NO: 3695 - DNA, 1362 bp, Artificial sequence
  DNA replication origin
agaaaggctaatggagcatggccagggctgtaaaacaaggtgggcaaggacagggagtaacggcagtggagtaaggcctcatgggcaagatcacgtgggtcttgaccagagatcaaggccagcaaattgaagctagatgggtaagaacaggtggataatggcgagcgggaagttctggccaggtgtgtaggggcagaacttttaggccatgaaattaagactcggtgagtatggccaggaggttaataaagccagatagataatgccaggtttgtaatagcatgaggataagatgagtgatgaagccaaagagcttaataagttctgctgagtgcagtcaggttgttaaaaccaggtgtttaagccaggcgtggtggctcacacctataatcgcagcacttcgggaggccgaggcaggtggatcacctgaggtcgggagtttgagaccagcctgaccaacatgaagaaaccccatctctactaaagatacaaaattagccaggcatgatggcacatgcgtaaatcccagctacttgggaggctgatgcaggagaatcgtttgaacccgggaggcggaggttgtggggaggcagaggttgtggtgagccgagattgccccattgcactccagcctgggcaacaagagcgaaactccatctcaaaacaaaaaacaacaaaaaacaaaaaaacacaagtgtttaaatcccgctgaataaaagacccacgctcggaaatcaacggaagaaacaccctgtaggattaagggcaagtcgccaaatcagacaaatgatgacccaaggctaatgctaggtaggtaagacagtgtggggaaagtgaggaggtgaagaccagctgaataaaaccagttggtcaatactagaagggtataaggccagcagattaacccatgctggctgaggccaagcaggtgaagagggcagatgagtatggccctaagcttaataaggtcaggtggggaaggcctagtgggtaaggccaggtaaataaggccatgtgggaatgccaccaggtgaaggccaggaaaggaaagccaaggtttgggacagaggatatgacaccaggttaagaccagtagggctggggcaattgaggaaggaagaatcgaacattgagactaattgttaaggcaaattaatgggtaaggtaaggcttaggtaagtgggtaaggctgaggaggtaagatcagttgggtgattcagattggtaaggacaggacattaatgccagtagggtaaggtcaggtgagtatgctaggtacataaggccaggagattcatactggatgagtaaggccaggaggttcataagggaggtgggtaaatctcagttagcaaaaccatg

SEQ ID NO: 3696 - DNA, 1014 bp, Artificial sequence
  DNA replication origin
caggtgcataaggccagggaattcatactgaatgcaaaaggccaggaggtttataaggcaggtggttaaatataagttggcaaaaccataaggttaagactgggtcaggaagccaagtgattgaaaagcctgggtgggtaatgccagtaagttaaggcctccctaaatatgggtaggtagatagctccacctgggtaatagtaagaggttaaagctaggcaggttagttcaggaggttaaagccatgtgagttagaacaaaaggttaaggccaggtgggaatgccaggttagtaagctatatcggtcatctaggtgggtaaggccataaagttaaggccaggtgggtaagtccaggtggctaatggggggtgtctaagtctgggggatggggtgagggagcagtggtaaatctggggaataagggcaaggggggataagtccagggaagtaaacctagggaggtaaatccagtggtttaagtcctggtagataaaaccagaaggctaaggacagttgtgtaaaccaagtgtgaaggccatgtgggtcatgtatggttgttgagactagatgggaaagctgggtggctaatccaggttgttagggccatgaggttaaggcccataggtttaggccaggtgagaaaggctaatggagcatggccagggctgtaaaacaaggtgggcaaggacagggagtaacggcagtggagtaaggcctcatgggcaagatcacgtgggtcttgaccagagatcaaggccagcaaattgaagctagatgggtaagaacaggtggataatggcgagcgggaagttctggccaggtgtgtaggggcagaacttttaggccatgaaattaagactcggtgagtatggccaggaggttaataaagccagatagataatgccaggtttgtaatagcatgaggataagatgagtgatgaagccaaagagcttaataagttctgctgagtgcagtcaggttgttaaaaccaggtgtttaagccaggcgtggt

SEQ ID NO: 3697 - DNA, 1220 bp, Artificial sequence
  DNA replication origin
agaacctgctgcgctgcagccgctgccgcagctccttctactgctgcaaggagcaccagcgtcaggactggaagaagcacaagctcgtgtgccagggcagcgagggcgccctcggccacggagtgggcccacaccagcattccggccccgcgccgccggctgcagtgccgccgcccagggccggggcccgggagcccaggaaggcagcggcgcgccgggacaacgcctccggggacgcggccaagggaaaagtaaaggccaagcccccggccgacccagcggcggccgcgtcgccgtgtcgtgcggccgccggcggccagggctcggcggtggctgccgaagccgagcccggcaaggaggagccgccggcccgctcatcgctgttccaggagaaggcgaacctgtaccccccaagcaacacgcccggggatgcgctgagccccggcggcggcctgcggcccaacgggcagacgaagcccctgccggcgctgaagctggcgctcgagtacatcgtgccgtgcatgaacaagcacggcatctgtgtggtggacgacttcctcggcaaggagaccggacagcagatcggcgacgaggtgcgcgccctgcacgacaccgggaagttcacggacgggcagctggtcagccagaagagtgactcgtccaaggacatccgaggcgataagatcacctggatcgagggcaaggagcccggctgcgaaaccattgggctgctcatgagcagcatggacgacctgatacgccactgtaacgggaagctgggcagctacaaaatcaatggccggacgaaagtaagtgtgtgctgcgggtttgtgctggacaggcccttctcggcgggcagcccctgcctgcgactgaaactgcctaggctgagaagcagcattcctctatatagaagggactcgctctttcttgtgtagctccccgtaaggaagacggacagaatttgtagtagctgtttatctagttagcccctttgtatccactgttttccacttactgcccgttcacaaacttctccggctaattgcatggttttttgactcaacgtaggcgctttaactttcctattttcttttttccattccactattggtcacaattcaaaccttagtggcgttttagccacccagtgaaggggtgttagagtaccacccaaagcaagtcctggttctgcatctgccttgtgtttgcataagctg

SEQ ID NO: 3698 - DNA, 860 bp, Artificial sequence
  DNA replication origin
cagcgccggcagccgcctcagcgcctcatcgccgccgagggctgagagaatagggcctgtgcggcgaatggcaacctgggctcaggcgcgcgggcctggggagcgcaagaccggccccctcggccgccgccgccgcctcagcgtcccgggcggcccggcccaggctgtggaggagcgcagggcatacgggcgccactcgctctgcgcgctctgcacgtacaccacggccccgcggcgacccgggcgggcggcgcgcgagggcggagggggcggagggagggccgggagggccggggggagggccgaggggcgggggctgcctgcgctcctccgcactcggcggggccgggcctcggcttctgcctcggaggtgggtcgcccgctttccctccgcccgggaccggactgggacgccgagaggccggtgcgctacctcagcccgcagcggcctcctcggggacgccgaggcgcaggcccgcgagcggcggaaaggcgtggggcagcgcggcagcgcctacacctgctggaggagggcgccagccgcaagcgggtagcggagcgaaggcggcgtaatcatggctgctcttcctccaggccggcgcggggtgtgcgaggctcgctccagtcaaggttgcaaggtggctattgcgatcctcattttgcagaggaggaaacggaaattcagagaagtaaagtaacttgcccaaggtcacgcaaaactgggactgaatccaggaatcaggctcccagattccaaggctgttttttccattacaccatacagcctctatttcaagaagccctgaaatggttaagaacaaaataagtattactatggtgttaatccaatctcttgcgcc

SEQ ID NO: 3699 - DNA, 1198 bp, Artificial sequence
  DNA replication origin
tcctcagggcgccccagccgccgccggcggcggcggcgtgagccaccgcgcaggtaggggagctgccacagagtcctagcacgtcctgggggggtcctggcaaggagggcgcgctctggcccccaggaagtcgcgtaggtcagggcgtgcctctgttaacaacccctttcgaggtgagggaaactgaggcaggacgcgaggcgtgcgaggttgagagaagagcgagtcttgggctgccagcccggcaccagcgccgagccgggccaggtccctgacccaggactgtgcagcgatccccgggacccgcagtttgcgaaactgtaggagtctgacccgcgcccccgctgcgtgtccaggtgaccgggaaaggttgcagaggcgtgcttggggtttggatccgtccccgtcctgggacacctgcgccgcctgcactctcgttgcggtgcgccccagcctgcgccccctcgggacaggggacgtcccgcccgccttaaccccaagacccagctggatctcgggttccaccccttcggggacctggagggaggaggctgggagcgggaccaggaactggtgcctgtgccttccctaggggctgctctgaaatcagtgtcaccgcccacttcctacttggctacagtaacggggatggcccaagccggagactgctcggtttccaccgcctggagcgcgggtctcgctgtcaactcttagtgatgattgtggatggttgtttttcaacaatgacaggacttctaccttctcactcttaaaatgtgaggttttccaaagacagtgagatttggagttagggagtgctgccttgtgttcttgctgggtgaggacagggctgggtcagtcgcttaacctctcagagcctcagtctcctgaaatgtaaaggagaacactcatagcctggcctccatgtgtcgttaggtttgttgtatgggaaatcaatttgcaaagtgttatcatcaactggacaaatttgaattggacagcactaggaccataggaactggggtttggagacagtctgcctgcatgtcaatcctggacatgcaggagactatgacagtacctgcttcatagggttgttatgcggtttaactgtgatggtggaagtgaagcacctcgcccaatgcctgaaatacccagtgcactctcaaaaaaccttagttgctatttttcctaggca

SEQ ID NO: 3700 - DNA, 1550 bp, Artificial sequence
  DNA replication origin
gggttgtattgttacccccagcttcagcacattcccggagtgtaagtgcaggctggcttctccataaagcaacacagcagtatgctctgagtgggagtacctccgaaactcagcttccaaaactgtgggctcaccagacctccttggtattttttttttttttttttgagacaaggtctccctctgttgcccatgctggagtgcagtggcatgatcacagctcactgcagcctctacttgctgggctcaaatgatcctcccatctctgctctgcaagtagctgggactataggagtgtgtcacaatgcctggctatttttatttttatttattttttgtagagacaggatctccctatgttacccgggctggtctcaaactgctgggctcaagaaaacctcctgcctctgtctcccaaagggctgggattataggcatgagccaccacgctgtgcccctccctggtttttgatccttggtctgacccctggattctcctggttgacttacactctttggagtgctgactagtatagactctcccaatgctgccttttggatgaatcctgtgatgccacattttccagccttaggacaaatgataacctaccctgtagtctgtccatgctctggagaccctgctggtcttacaagatgaactggacaactgctttcactgataggcctgaaggaaaagggttggaactgtcaaggttccccattaaataccaaccagcaatgacaatcaaggtgagctattcttgtgctgggtaggatgctatcttgggctctgagtgtgtccggaattggtgggttcttggtctcactgacttcaaaaatgaagccgcggaccctcgcggtgagtgttacagttcttaaaggcggcgtgtctggagtttgttccttctgatgttcggatgtgttcggagtttcttctttctagtgggttcgtggtctcgctggctcaagagtgaagctgcggaccttcgcggtgagtgttacagctcttaaggcggcgcgtctggagtcgttcgttcctccttgtaggttcgtggtctcgttggcttcaggagtgaagctgcagaccttcgtggtgactgttacagctcataaaggcagtgtggacccaaagagtgagcagcagcaaggtttgttgcaaacagcgaaagaacaaagcttccacaatgtgcaaagggaccggagagggttgccgctgctggcgcctgcagcctgcttttattctcttatctggccccacccacatcctgctgattggtacagcccagtcgtctgttttgacagggcgctgattggtacgtttacaatccctgagctagacacaaatgttcgccacctccccaccagattagctagatacagagtgtccattggtgcattcacaaaccctgagttagacacagggtgctgactggtgtttttacaatccctgagctagacataaaggttctccaaggccccaccagactcaggagcccagctggcttcacccagtggatcccgcaccggggctacaggtggagctgcctgcc

SEQ ID NO: 3701 - DNA, 1224 bp, Artificial sequence
  DNA replication origin
tgttaataccggaggttatattgaggcatgttcaaccctacttcccgtcatagcctgagccagtctttctggttaaattttagagttctctggcctggcaggaagtccatttacatggttgaggaacttagaattttgtttttggtttacaaagagaaagcagagaagggtgatgaatgactgagccacatcctggtgccagctctggaccgggtttggctgtggtctccacaaacatttttgaatgaatacatgagtgagcaagtgagtgagtgaatgggaggaaggccggcggggggaggtttgaggagagtggggaaaggtctgctgtggtgccttgaaggtggggagacctggcacggggaacacagaattgccaggtggatttggtgcccatttggaaggtggcccagtgacttctggggacagtgtccctgagatcatgcattttccccagctgtgctcagcagcctgcttcagggagagggaatggcaacagcgagcacgccaggctgggggtttccaggcaggtagaggagaaaggcaactgggttcgggagccgaacggagtggcaggaaggtgagtgaagtgatggatggctatgtctacactggaggctggtaaaggagggaaagtgataggttgaggggtgggtggctggatgtggtcgtggaacaggggcagaaataactagggtgtgggaaaagtagtggcaaggtggctgggagcttggtggctcagtttgggtgcagatgaagccaaggtgaagtgaggtgggatggtgagaccaaggacccagaagcccaggtgtcggcctggtgatgcaaggatggcggcagggctcggggtggggaggaggtggaggtccaggatcaaggcccccagagaagggggatgtcccagatgagagcaatgagaaggacagcttggggtgaagctgaatgccctgagccttcaagcagcaacagattatacctgaaggtagagccacgttagggacgtgggaggacactgactgcttgggtaggggtggggagtgagcatccacactcgagtggctgcagatgccatgagaccctccagggatgaccaggtcactgttagggcagagaggaggaggcagctttcagaaggagctgggcatgcagagcttgctaaccagtgatggaggatccaggcagtagggcaaagcccatggaggggcccacaggacgggacaactg

SEQ ID NO: 3702 - DNA, 931 bp, Artificial sequence
  DNA replication origin
gcaatctgctacgaaaagggcttctgggaaatgctggcatccagatgctggggaagctgcccagacagtagaagctgaattctggggaagctgtatgcttgcaggagtcagggggtgcagaagctgagtgctggagaagccactgtatcacaggagctgggtgcagaggaaacaacgcgtgcttcagaggctgggtgctagaggcctgtgcatgttgtaggagcagggtctagagaagccatctgcgtttcaggagctggctgagaacacactgatatgggcccgggggtggggtgggggtgggggtggggggaggtagaggagtggcagggagggaggtagtgggtggggcagtaggggagagggggttggggggttggggggaagggttgggggttggggggagggggtggaggtggggtgggaccctttcctcctgcaaggcctttctagctccctctactgacaaaacttaatactgtgtcagctagcaaagaaaatacctaaagggatcagctaaatttttgctgagcagtcaatgtacatttggagctgagaggcaataaactggcatagagaagtagcaatggctctgatctctgagggcctcgcagtcgtgttgatgattgtattcatttagatgctggttgtggttagtgcttgacattttaactaattttttcttccaattccaatgaaatagataattttattattcccactttacagacaagaaaactgaggctgagggaggttaaatcgcttgtccacaatcacatgctagtgcggcatggggccaggattcaaacatgagcagtcagtctaactccaaatctgcccccagactccataaagtcattactgatctttgaacagacagataaatgtatcaggaaagataaatacttaaaataactttgcagtcagtcct

SEQ ID NO: 3703 - DNA, 1518 bp, Artificial sequence
  DNA replication origin
ctgatttgggataaagaaaaaggagcattcaccttgattatgactttggctccagccacctttttaagagtaaattgctgggcaggtgggggagggctagtcacggaacgaaactgtaagccagaccgggtgtgaggaggggaggcgataaaaagattatagggtggaggagtggaggccgaggaataattgggacctagcttggcctggtgaggagcaggctggggaggaagggagaggtcagataggtctgtagaaaaggaagattagaaagactcagcgatgcttggggttggtactgaggggacaggtgggagggaaagaaggaagatttgggacaagttgcactgggcacagagactaggaagggactgatgtgtaaaagaatgcctggatgtcaggcacctcagaccgtttgcctattttacgacaagaagtatttggattttgcaggatggaaaaattcgaagtgccattttctggctatttggaactactgtcaagtttgtattggggtcaagcagcattgcagtagaaaataaggcatttaggtttgaggtcaggtgtgagttgaagaggttttaagtttttgagaacacaggccaagggagtagaaggaggaatggagggtggaaggttgcctatagtgaaggaagcaagcctggagaaaagagagagtagagaaatgaagggaagtttgggggttcttaccttccagaaaagtgggaaaaggggttggggcacagagataagaggtcggggtgtggaaataagggatggggtgcagaaataaggggtcagagcacagaaataaggggtcggggcacggaaataagggattggggcgcagagatataagaggttggggcacggaaataagggattggggcacagagatacgagattggggtacttgcccctcctctagaaaagcaggacttgccactaagggtgaaggagaaggggttgaggggtacttgcccctcccccagaaaagcagagaaggggtagagacaaggagagaaggggttggggtacttgcccctttcccagaaaagcgggacttgccgctaagggtgaaggaccaaggtgggcgtccctgcatggtctgacacctttgaaatgtgggtgaatgatcagagaggcgtccctgcaatgatgaaacaccaagggaagtctgccttcccagtccgtgaccagcgccgagttttgagtccatggttaaaatgtgtctcctttgtctctcccagaaaatgaaaggaattaaaattaagagaagggagagattgaagagtagaaaggagaaagtggttgagggacagtgagagaggttggagaagagagtaagaagaggccgcttacctgatttaaaattggtgagatgttccttgggctggtcggtctgaggacctggggtcgtaggtggatctttctcatggagcaaagaacaggaggacaggggattgacctcccaagggaggtcccccgatccaagtcacagcaccaaatttcatgcgc

SEQ ID NO: 3704 - DNA, 1123 bp, Artificial sequence
  DNA replication origin
gggataaagaaaaaggagcattaaccttgactatgcctttagctctagccacctttttaagagtaaattgctgggcaggtgggggagggctagtcacggaacgaaactgtaagccggagcaggtgtgaggaggggaggtgataaaaagattatagggtggaggagcggaggctgaggaagaattgggacctagctcggcctggagaggagcagcctggggaggaagggacaggtcagataggtctgtagaaaagggagattagaaagactcagcgatgcttggggttggtactgaggagacaggtgggagggaaagaaggaaggtttgggacaagttgcactgggcacagagactaggaagggactgatgtgtaaaagaatgcctggacatcaggcacctcagaccgtttgcctattttatgacaagaattatttagattttgcaggatggaaaaattcaaagtgccattttctggctatttggaactactgtcaagtttgtattggggtcaagtggcattgcagaaaaaaataaggcatttaggttttaggtcaggtgtgagttgaagaggttttaagtttttgagaacagaggccaagggagtagaaggaggaatggagggtggaatgttgcccatagtgaaggaagcaagcctagagaaaagagagagtagagaaatggagggaaggggtttgggggttcttaccttccagaaaagtgggaaaaggggttggggcgcagagataagaggtcggggcgtggaaataagggattggggcgcagagatataagaggttggggcacagaaataagggattagggcacagagataagaggttggggcgtggaaataagggattggggcacagagataagaggttggggcatggaaataagggattgggggttcttgctccatagaaaagcaggacttgccactaagggtgaaggagaaggggttgagggatacttgcccctctcccagaaaagcagagaaggggtagagacaaggagagaaggggttgaggtacttgcccctttcccggaaaagcgggacttgcagctaagggtgaaggaccaagacaggcttccctgagtggtctgacacccttgaaacgtggg

SEQ ID NO: 3705 - DNA, 1486 bp, Artificial sequence
  DNA replication origin
ggctgaccccccgacctccctcctggacggggcggctggccgggcagaggggctcctcacttcccagtaggggcggccgggcagaggtgcctctcacctcccggacggggggctgatccccccacctccctcccggacggggcggctggccgggcggggggctgacccccccacctccctcccggacggggcggctggccgggcggggggctgacccccccacctccctcccggacggggcggctggccgggcagaggggctcctcacttcccagtaggggcggccgggcagaggtgcctctcacctcccggacggggcggctggccgggcggggggctgatccccccacctccctcccggacggggcggctggccgggtggggggctgacccccccgcctccctcccagacgaggtggctgccgggcagagacgctcctcacttcccagacggggtggctgctgggtggaggggctcctcacttctcagaccaggcggctgccaggcagagacgctcctcacatcccggacggggcagcagggcagaggcgctccccacatctcagacgatgggcggccaggcagagacgctcctcacttcctagatgggatggcggccgggaagaggctctcctcacttcctagatgggatggtggccgggcagagacgctcctcacttcctagatgggatggcggccgggcagagacgctcctcactttccagactgggcagccaggcagaggcgctcctcacatcccagacagggtggcggggcagaggtgctccccacatctcagacgatgggcggccgggcagagacgctcctcacttcctagatgggatggcggccgggaagaggcgctcctcgcttcctagatgggatggcggccaggcagagacgctcgtcacttccctgactgggcagccaggcagaggggctcctcacattccagacgatgggcggccaggcagagacgctcctcacttcccagacggggtggcggccgggcagaggctgcaatctcggcactttgggaggccaaggcaggcggctgggaggtggaggttgtagcgagccgagatcacgccactgcactccagcctgggcgccattgagcactgagtgaacgagactccgtctgcaatcccggcacctcgggaggccgaggctggcggatcactcgcagttaggagctggagaccggccaggccaacacagcgaaaccccgtctccaccaaaaaaatacgaaaacaattcttcttccctccttgaagtaaaggttccttacggagtcaagctcattgagtctgagtctccccttaaaataagctttattttctgaaggtcctcagtcccagatagatagacaactgacaactctgtcccactgcacaattcagcaatttcaaggtttgcctagtgaggagaacatatttgagtccccaacccccagccctgaatgttgatatggtctgtgggtcc

SEQ ID NO: 3706 - DNA, 947 bp, Artificial sequence
  DNA replication origin
gaggcgggggggtcagccccccacccggccagccgccccgtccgggagggaggtggggggatcagccccccgcccggccagccgccccgtccgggaggtgagaggcacctctgcccggccgcccctactgggaagtgaggagcccctctgcccggccagccgccccgtccgggagggaggtgggggggtcagccccccgcccggccagccgccccgtccgggagggaggtgggggggtcagccccccgcccggccagccgccccgtccgggagggaggtggggggatcagccccccgtccgggaggtgagaggcacctctgcccggccgcccctactgggaagtgaggagcccctctgcccggccagccgccccgtccaggagggaggtcggggggtcagccgccccgttcaggaggtgaggggcgcctctgcccggccgcccctactgggaagtgaggagcccctctgcccggccagccgccccgtccgggaggtgtacccaacagctcattgagaacgggctatgatgacaatggcggttttgtggaatagaaaggggggaaaggtggggaaaagattgagaaatcggatggttgccgtgtctgtgtagaaagaggtagacatgggagacttttcattttgttctgtactaagaaaaattcttctgccttgggatcctgttgatctgtgaccttacccccaaccctgtgctctctgaaacatgtgctgtatccactcagggttgaatggattaagggcggtgcaagatgtgctttgttaaacagatacttgaaggcagcatgctcgttaagagtcatcgccactccctaatctcaagtacccagggacataaacactgtggaaggccgcagggtcctctgcctaggaaaaccagaggtcctttgttcacttgtttatctgctgaccttccctccactattgtcct

SEQ ID NO: 3707 - DNA, 805 bp, Artificial sequence
  DNA replication origin
agcagggcagggttcctgctgcccttttgccaggcaagtcaagcacgttacaggtgaagcgctcctccccactgagcttggctcaaagtcaaacggaaacactcatccttctttacagctcatgctcaaaggccccgaggcccaaaaacacgtggctcatccttcccaaggtgggtggatttcagagaagccagcaccaagcccggggcaaatgtgtgtgtgtggctctggcggggaggattgggatggagaaggtggagtcagagcttcaggccagagggcagggcggctcagccactgtgggacaggcaggcgaagaccggaggaggaaggggagggcaggggaagggggagacatgagggagaaaaagagaagaaggagggaaggagagaagaagaaggagagccagaagatgagggaggggaagggaggaagatggtagagaagggtaaggggaggacagaagaaggagggggaggggaaagggatgggagagcatgatggggagaaagaggagaagggaagagggagagaagaaaagggggaggggaggggcaaaagggaggaggaaggaggaggaaggagaagagacactgaggaaaggtaggaaaagggaggaagatgtgagccaagtcacaatggacattgggcagtggcataccttggggagaacacatttggaactgcctggcctctgtcatgatgtcattactcctcatcttgtcacttttaattctcttaggaggaaacacacactctgttaggaacgcacaccaactctccaagggaaagtgacggatgggc

SEQ ID NO: 3708 - DNA, 1316 bp, Artificial sequence
  DNA replication origin
tccccaagaagggcgtccgggcccctcctggacgcgcagctcccgcgcgccgcggggcctgggaacagcgcaccggctgcgcccggagccgggcggacggtgagactgacggcgtccgcgcccaatcgtggggcggggccgagggggcctgcaggcagcgaccaatgggagcccgcagagcgggcggggggcggtgccgctgggcgggcgggcggtggcatcgggagccggcgcggcagactgggagcccgggaggagctggcggagcgagaggaggaggaggacggaggaggagcaccgcgcccccgccggccgcccgagcgcaggccgagagctccagccgcagccagcgggtccgggccgcctccgccggagcccggcgcggggagagtccgggccgatgggcagccccgggcagcggcgggcggcgaggcggcagcccgggtacgcgccgcccggcgcgcacaggctgtagcaggttccggcggacggcgttgcgaaggttcgtgtcggggaatccgacgggcagcgtggcgagggtcggttcgggatgcctgcggccaggcggggactgtcccgaaggggaaggggatgcccttcggggcgctttggggggctgacggcggcgaggggtgcgaggggcgcgggggtgcgagggtcgcggcgcagggtccggcttgtagacgcagatgcgcccgcgctcccgatccccggctggaagaggagccgccgccgcctgttctctccaagttatcgatcggctgaaaggttattcccgtctcggcgacacaggcactgaggagggtcttctccaggtgcccagaacttcgctctgactaacgctctctggaagggctcgcggttgcccgacgcagcttccccggcgcgcctggccagctgacgccgaacttgctgcggggctaattccccttctagagggggtgcgcccggagcgcgcgccctcaccgggacggatccctctttgtaagaccgggagcctccggcgagcgctcttctcactcaccgcgacctttcttcccactttgccagctcctgggcctctccgggtcttcccgtgtcagtgagggtagtttgcccacgtcctgggaatatccctgggaacacctacagattaattttcagccgtgccgcaaacccaaagaatcaatttcggctcatcatctgcaagagagagccgaggcttctcggaaagagagaacaacttggcattacccctgtgggagatatttgtcatcattaacctgcttgagttaaattaattcagcccaagatgactctggcctgagtattggaaa

SEQ ID NO: 3709 - DNA, 1499 bp, Artificial sequence
  DNA replication origin
tagctgggattactggcatgtgccacaacacccagctcatttttgtatttttagtacaaactgggtttcaccatgttgggcaggctggcctcgaactcctgacctcaggtaatctgcccgcctcggcctcccaaagtgttgggattacaggcgtgagccacagctcctggaccaagagctagttaatttaaaaaatagtttacaagttatttaataaatgagaaaatggaaactcagccccaaggggaaacgggattctaagtttaacttccttaggcaggtccagttttgtgtggtttctgtggtatgggtgagtggttatcacacaatttgatctcatgagtaaaactgatgcaggaggacttttgttcactctgttttattaatgaaatgaatccagagctgcttttttatgctaaagactttagagtaaagacataataaagacagcccttcctcctcttgcctgagggaatttaggaagacattccttgaggaatctatttagggctttggagacaggaaaggtagcaggatatggtaagagcaaaagcatcagctacagtaggtaatgcctggggttgttgaaactgaaggaagaaaaggtttcctgtacaaaaaccaagcaccgttttattttaatgctcagccgagaccccttcctgagaaaaccagccacgtccgtgattcttgaagaaggtagttcctctgagccctgtgttcgccagaggcctggaggagtaagtgagaagtagagggtgctgccagcacgaatgctttgtcatttagaactgcccagggagcagttataaaacacacacctgcaaattacaagaggatggcatgggctcacaggtgcagcaagacatgaagtgacatctgtcctcagcgtcccttttcttggaatgctcccatgtagaaccctatgtcactttgaacgaacctctttctgaagtgcctggggagctctatctccaagcccctaccctaggtacttgcctctccacccaaccccaccccagtactgacgactcatcttaggaactggagatagtgaaagacaagaccaattgagcatttgggtgggagagaacatggcttacatgctctgctaatctgggatcacattcttccctacaagtctgaaagctaagtgacagccccaagtctccctcttagcaggttaggaggggaagcacaccaagaggcctcacaactgtgtgtggaatcactgtgttctcagtgagggagagaaaatagagaatttttaaagcattctccccagataatagaagttttgattcgttctttcccaagacaaaaccaaaagtttgtttaaatcttgtttcgtacacacattgaggagagcaactttgagcatctactgcatactaggcattgcactctgtgtggggcaatacaggggtgatatggggcggaataaggcaactcgagtggccactaggtgtactgcagaggtagttaacctgcactttgac

SEQ ID NO: 3710 - DNA, 587 bp, Artificial sequence
  DNA replication origin
aactggggcctgcacaggcctcttccccagggtcgtctcccagggcggaccttgggcctacttgcaggcacgtgcacccccagacgggcatgtgaatggggaggctccagtgcatgcaggcagcccctcacctggcaggatgtggggagagtggggaagagggtggtgtggtcttcacatgtgctcctgtcacaggctctgcagaagttagggctgcccacctgagcgtccaccgtgggctgcactgtcctaggtgccgggcagtgagcagctcatgggaaattctgaccacagacaaggcacatgcatcaggcagggattggaggggaggagaaagtggggcagggggacagcagtgctgtatggaaggctggccagggtctcttggataagctgggatttgatgggaggctgtgtgagtaagcgaaggagctgcaagcctgggagagggacactggggacagaggaggcagcagctgagggggccctggaaaggagaatgcttgacactgttgagggacagcaagagaccgtgtgctggggatgtgggctcataagagagggctgagagaagggagagaaggcgt

SEQ ID NO: 3711 - DNA, 1061 bp, Artificial sequence
  DNA replication origin
caggccctgcggccggcccgcccgccgcgcgctccttagccagagcctgggacgccccaccccaccctagccgcgccagggccgccccgccccctccggctccattccgcaccgcccccccacccccccgggcccgcccctaggccagtccccagggccttcccgcccctcccccagccgccccgccctctccaggttcattccgccctccttgacccgtcccgggcgcccagtctgcgcccgccctatgggaccgccttcctaggttcgccccacccttccccaccaactgcaccatcccgccccgccctcgccaggttcacttcccttttctgtgccagtccccagagcctcgtcccgcccctggcgcccgggcccgtcccccaccaccttgggccgggcccgccccctgggcccgcctggctggtcccaccccgcccccgccgcaggtgctccggagcaatggtgagccgcgcccacatggtctgggaggcgggatcggccgtcatccgctataaattttcgggagagtttaaattaagccaaaggtaagactgagggaggggacgcttctccaagaagcggtgggagagggttgagaagatgtggggctttagggtgtggcggggagagagagagttgcagttcagggagagtgacagaatctcagaacgggctacagaagaaattgtagcgcggtgccagacctgggccagtgcgagtggcaagtcaccatgctaagtgcgtttgagccaccgtgcatctcagaactgactaggttacagatcgcagcgcagagtgacccgtggtcggtatagtcccagaagctccatgatggtaaatcctttgcttatttttactgtctactcagatggaaaatgccccagtctccctggaaacccacaggtttgggtttaggaagcattggcaatggctgggtgccagacgttggtaggttactgtggcaggtgatgaggctaaaaagatagaagagcttagttattaaaattctaaaatattagattatcctgtagtaggccagaatttcctaacgtgtggat

SEQ ID NO: 3712 - DNA, 1101 bp, Artificial sequence
  DNA replication origin
ccgccaactacgtggctccctgccgcccggccgccagccccgcgccgccgccctcgcggcccagctccccggtacacgtcgccttcgagcggctggagctgaaggagctcatcggcgctgggggcttcgggcaggtgtaccgcgccacctggcagggccaggaggtggccgtgaaggcggcgcgccaggacccggagcaggacgcggcggcggctgccgagagcgtgcggcgcgaggctcggctcttcgccatgctgcggcaccccaacatcatcgagctgcgcggcgtgtgcctgcagcagccgcacctctgcctggtgctggagttcgcccgcggcggagcgctcaaccgagcgctggccgctgccaacgccgccccggacccgcgcgcgcccggcccccgccgcgcgcgccgcatccctccgcacgtgctggtcaactgggccgtgcagatagcgcggggcatgctctacctgcatgaggaggccttcgtgcccatcctgcaccgggacctcaagtccagcaacagtaagtggggccagagggaggtgggggaagactacctccgtgccagcccaggcgggctccacaggacatagtaccagatggaaagaggtgggagtcagccttagggcgccagcagcaactcatgcccaggccttcagggctcggaagtccagctagtccttggttacttgctttggggctggtgacacgcttaaccttgacttgcctttgggtgctttttaaaaaagttcagaccagacttgcttgtagaggaaacatttgtaaaatacctggatctcctagaaacctcagggggcagtctggcctttcaataccagaggtgattcatctgggtaggactttgcaaaccgaggccttctgcagattatatggaacccatgaccgtcttcacccggtggccttcatcaaagtccccgaatgcactcggggacgtcaactttacaagtgctgtattgaggttgctgtttgcctattcaaaatatgacttcatgtctcttaccttttccaaagactgttttcattcaaatgtctctctatgggccaggcgcggtggctcatacctgtaatcccagc

SEQ ID NO: 3713 - DNA, 900 bp, Artificial sequence
  DNA replication origin
agcttgcgcagctcctggcgcagcaggtcctcatagggcagctccaccgaggagaagaccactgcgccgaagaccaggtagagcaagtagcccagcaccaggaagccgaagcaccaggccgagcggtgccgctccaccaggcgcacgcacgagctgccggccagggactgcagcatcttctccaccgccgccgccaaggccaacgccgcagaccggccggagcgcggcccgccgcctcttctggccccgccgcccccgcccccgcccgggcctggctcccgcccgccgcccgctcccccgcgcgcccgcccgccccgctcctccgggcagcgccgtcttcctgcgattggctctctcgggcgatgtttttcttccttcttttcctgtttccttgcaatataaaaagcccagatgatgtggcgctgacgtggttgccggctcaggtaacccgagagtcagcggagaccgcgcgcaaacttggccagagcgcctgggctgggctgccggggcccgggacgcaccgccttctgcgcactccagaggtggggcgggcgctcggtggcgcccagaccccgacccgacagccaccagctcctcccgctccctcccttcctgggtccagtagccaaactctagctgaccgcgcgcggcgtgtgcgtgtgtgtgtgtgtgtgttcgcgcgcgtgtagtgtgggccgcttctggtcaatgcgctggccgtccaagccccctgtccaagctactcttgtttcccacttattttctcccaatcaaagccagtattacaaaacagcaagcgctgaagtactttccttctttgtcttattggtcgaaggattgagcaatctggtgccagtaatgacggtgaaaataccagaacatcagagttggaaggctcct

SEQ ID NO: 3714 - DNA, 862 bp, Artificial sequence
  DNA replication origin
ggctactggacccaggaagggagggagcgggaggagctggtggctgtcgggtcggggtctgggcgccaccgagcgcccgccccacctctggagtgcgcagaaggcggtgcgtcccgggccccggcagcccagcccaggcgctctggccaagtttgcgcgcggtctccgctgactctcgggttacctgagccggcaaccacgtcagcgccacatcatctgggctttttatattgcaaggaaacaggaaaagaaggaagaaaaacatcgcccgagagagccaatcgcaggaagacggcgctgcccggaggagcggggcgggcgggcgcgcgggggagcgggcggcgggcgggagccaggcccgggcgggggcgggggcggcggggccagaagaggcggcgggccgcgctccggccggtctgcggcgttggccttggcggcggcggtggagaagatgctgcagtccctggccggcagctcgtgcgtgcgcctggtggagcggcaccgctcggcctggtgcttcggcttcctggtgctgggctacttgctctacctggtcttcggcgcagtggtcttctcctcggtggagctgccctatgaggacctgctgcgccaggagctgcgcaagctgaagcgacgcttcttggaggagcacgagtgcctgtctgagcagcagctggagcagttcctgggccgggtgctggaggccagcaactacggcgtgtcggtgctcagcaacgcctcgggcaactggaactgggacttcacctccgcgctcttcttcgccagcaccgtgctctccaccacaggtagggtatcctgcgcgccccctggccgccccggccacctcgcccacaacccacac

SEQ ID NO: 3715 - DNA, 1466 bp, Artificial sequence
  DNA replication origin
ggtgggcagcgcactccagtcttcccaggctagcggctgcagggagctccggcccgcggcccctccgcctcaagtctgggagctgccggtcccactctgtctttgcctatggggattcgagagtttcccagcggcgcacccaggggcaagagcattgccgtgtgagtagcgccccgggcgtgggtgagcgagccggcgggcgggaggccggagcgccggggtagccctttgcagctgggacactgggcagtctgaggctcggggaagggcggcgcgcgcggtggagctgctcgggaagtttcagtcattctttccctcgccactcgccccaacccgcactgccccgagacgcccaggatagggcactggggacagctgcccggggaagtgggtgagtggcggcgggaagggaggagcgcgggctctgccgcggcgctcgcccccggagggccccggccgcgctcttgctctcgccctgggatctgctcctcacgaatcccctcctctctgtccatgctccccctgcccacccacctgcccgtggcgcctgcgaccgcagtggcatgaggaggtcaccggacgtcagcccccggagactgtccgacatcagcccccagctccggcagctcaagtacttggtggtggacgaggcgattaaggaggatctgaaatggtcgcgctccgtggaggatctcaccagcgggccggtggggctcacgtccatcgaggagcggatcctgcgcatcactggctactatggctaccagccctgggcagcgagctgcaaaagtaagaccccctcacgtcatgtttcccgttcactggtccatcttcttaccattgtcacagcagcctcggggagcgcacgcagtgaggcgtccagccaccccctcccgccctgcctgctgatacagacccaggtttgcaacttcgaggaagaggcccggagacggagttctcctggacctctgaggcgttctgatgcgttctcttacaccccttcctctcccacacacaggatctctctgtatccttatctctccactgccaaatacggaggacactcctatgtggcagaccgtgggaaacagatcagaaactcaaagtatcccggacagtgtggcttccccgcggatctgaaagtctcacagggccctcggtcaggtctcaccaggctcagatggagatgctgacttacatagccaggattttaactcttccttgcatctcctagccctgatgatagaggacaattcttggggtcttcattttggatgccgttcacgcccttctcccctggattttatcggtcttcagtaaggaggttctatagggatcattctagatagtggtgttggtccctgcaagttgaatgtttggtgtcaggtggagaagctgaaatgtttttctttccgtgggtcctagctaatggctttgaggatgctgtgatcaattagacagacatt

SEQ ID NO: 3716 - DNA, 1589 bp, Artificial sequence
  DNA replication origin
tttagagagggagcacctgggctcagggaaattaagagatagcaaagtgtcagagctggaatttgaaccaaagtctacacacacatacacgcacacacacgcacacacgcacattatttgtttttttctcactgcatactgcctaatacaagtagcctccctcatctgggggagaagtcatggaacctgagctaagataatggctgtgggaattaagaggaggaggtagaagtgataagacctggtgactggatttgaagtaaaggagaagaaggaatccaggatgattcccaaggtttgggcttgtctgactgggaaatgatggtacaatttacaaatataggccatgacagaaaatacaggtgtggtagagataagaattttgcatatatgaaagagatgaagagacatgtcagtgtcttgcacattcaagacacttgccaagtgaaggtgatgtgatggtggtggtagtgatggtgttatagggtgatggtggaggtggtgactgtgttggtggtggcagttcagatggtggtggtagtgacggtgttatagggtgatgatggaggtggtgactgtgttggtggtggtggtggcagttcagatggtggtggtagtgatggtgtcatagggtgatgatggaggtggtgactgtgttagtggtggtggtggtggcagttcagatggtggtggtagtgatggtgttatacggtgatgatggaggtggtgactgtgttggtggtgacagttcagatggtggtggtagtgacggtgtcatagggtgatgatggaggtggtgattgtgtgttggtggtggtggtggtggcagttcagatggtggtagtgatggtgttatagggtgatgatggaggtggtgattgtgttggtggtggtggtggcagttcagatggtggtggtagtgatggtgtcatagggtgatgatggaggtggtgattgtgttggtggtggtggtggcagttcagatggtggtggtagtgacagtgttatagggtgatgatggaggtggtgactgttggtggtggcagttcggatggtggtggtagtgactgtgttatagagtgatgatggtggtggtgattattggtggtggtggtggcaattcagatggcggtggtagtgacagtgttatagggtgatggtggtgactgtattggtggtggtggtggcagttcagatggtggtggtagtgacggtgttatagggtgatggtggtgactgtattggtggtggtagtggcagttcagatggcagtggtagtgatggtgttatagggtgatggtggtgactgtgttggtggtggtggtggcagttcagatggcggtggtagtgatggtgttatagggtcatgatggaggtggtgactatgttggtggtggtggcagttcagatggcggtggtagtgacggtgttatagggtgatggtggtgactgtgttggtggtggtggcagttcggatggtggtggtagtgatggtgttatagggtgatgatggaggtggtgactgtgttgctggtggtgatagcagtgcagatggtggtggtagtgatagtggtacctgcattgaagca

SEQ ID NO: 3717 - DNA, 1392 bp, Artificial sequence
  DNA replication origin
ggaggatgtgcgctgcagggcggccgccgcagtgagcaacgcggcaaccggagcccggcgggcagccggggaggccgggactgagaggggcgagccgctggtgctccccggcggcagagggccgcgtcggccacgggcccgggagagacgcgctccagccggccccaggatgtaggcgatcggcggcagcgctcctgcaggcggccggctcatcatgaagaagcactcggcccgggtggccccgctcagcgcctgcaacagtccggtcctgacccttaccaaagtggaaggtaatgcgcggccgcctcgccccgggggtccctgcaccctagccggggaatgctgccaccctgaggggggctgtctggctgcggggcgccggggctgggggtactgctcccccaggacgcggctccgcagtgcagagcgccgccgcctgcgtggggggatctggcagcttcaggggctgccctgagctccctggcgagcaggagtgagctgctgcggcgagtgagcacccggctccccaaccctctccttcctgggcagcacccagcgcatctggcagcagctgcaccctcacctccatcccagtttgtcctggggctcttgtctgttcggcaggagggggtcgtccagccgctcccagtgtccccttaccacacacacacttgagttgcctgggtgtggagctctgtgcctcacccccaggccgaccaaaggtgctgcccgcagttggtagaggcgggagagggctgcagcgggctaaggagacgtctgtcctgcgtgttccgaagcctttccggccaccagccaactgactgccctgctctttgggaatgggcggggcgcacaggtgagggaagagccagcaccagtctgtaaacaggctctttcccaggccctggagagggattggaagggctgtgagaggcccccagaaggtgtcctcctccccgtgttgtcctttctgcctggaactgctcccacccaggaaatgtgagcgagaggacaggggaagaagcagcccaccgaggagagcttcctcagacacagctggcttctgctggcctaaggggccttgctttccaatggagaaggggggcagagggccagtcccagttcttaactcctcctcccaggaggcagaggtggaatgactaactccctctgccaggagcaagccaccttggccaggtgaggcagacagaccatcccctgggtcccaggagctcccctctaggcttttgcttgtgctgagctaacagagcccatgagcatcagcggtgaatgaggggcagccatgggctccgacagagcctggcttctgcccttcccaggaagcctggacttctctaggctactgttgaccctgcttcccactcgtgactt

SEQ ID NO: 3718 - DNA, 1738 bp, Artificial sequence
  DNA replication origin
ttgagtgctctgagaattgggaggccctgtcggctgctgtatgtgttcaagtcagatggtgtcggtcgggggtaaggccagaccatggtgctgtcctaggagccaggcacagcacagaggaggtggcagacacggcagggtgtgatggtctcaaaatagcagaaaccacagccaagttcaagacccagttaccagttcatggggctggaaacctggaaaccaaggtgtgaaaccaaacaggtgggagcttgagcaccagcaatggtgtcttaaatagttccaagcccaagttgtatgggaaggttgggtgctaggtgcttgaaacaaaaaaagaagagaaactctgtgtggcagggagtagtggaattatgtgaatgcatgggtgcatgtatgcatgtgtctatgtgtgcatatgtgtataatagagcaatggttttaaactttgtcatttgattgttgggttggtcagttgattggctggtccattgtttgatagtttggttggctgttccattgttcggtaggttggttggctggtccatttttaggtgggttggttggctggtccattgtttggtgggttggttggttggtccattgtttggtgggttggttggttggttggtccattgcttggtggattgcttggctggtccattgttcagtaggttgattggatggtccattgttcagtgggttggttgcctggttcgttgttcagtgggttgattggctggtccattgtttggtgggttgaatggctggtctattgttcagtaggttggttggctggtccattgtttggggggctggttggctggtcagttgttctgtgggtcggttggctggtccattgttcagtgggttggttggctggtccattgtttggtgggtcggttggctggtccattgtttggtgggttggttggctggttcattgttcagtgggttggttggctggtccattgtttcatgggtcagttggctggtgcattgtttgatgggtcagttggctggtgcattgtttgatgggtcagttggctggtccgttgtttggtgggtaggttggttggtccattgcttggtgggttggttggttggtccattgcttggtggattgcttggctggtccattgttcagtaggttggttgactggttcgttgttcggtgggttgattggctggtccattgtttggtaggttgaatggctggtctattgttcagtaggttggttggctggtccattgtttggggggctggttggctggtcagttgttctgtgggtcggttggctggtccattgttcagtgggttggttggctggtccattgtttgatgggtcagttggctggtccattgtttggtgggttggttggttggtccattgtttggtgggtcggttgtttggtccattgtttgatgggtcagttggctggtccattgtttggtgggttggttggttggtccattgtttggtgggttggttggctggtccattgtttgatgggtcagttggccggtccattgttcagtgggttggttggctggtccattgtttgatgggtcagttggctggtgcattgtttggtgggttggttggctggtccattgtttgatgggtcagttggctggtgcattgtttggtgggttggttggctcgtccattgtttgatgggtcagttggctggtgcattgtttggtgggttggttggctggttcatttttggtttcaggggt

SEQ ID NO: 3719 - DNA, 929 bp, Artificial sequence
  DNA replication origin
ggcagcccatcgtctgagatgtggggagcacctctgccccgccgccctgtctgggatgtgaggagcgcctctgctgggcgcaaccctgtctgggaggtgaggagcgtctctgcccggccgccccatctgagaagtgaggaaaccctctgcctggcaaccgccccgtctgagaagtgaggagcccctccgtccggcagccaccccgtctgggaagtgaggagcgtctccgcccggcagccgccccgtccgggagggaggtgggggggtcagccccccgcctggccagccgccccatccaggaggtgaggggtgcctctgcccggccgcccctactgggaagtgaggacccctctgcccggccagccgccccgtccgggagggaggtgggggggtcagccccccgcccggccagccgccccatccgggaggtgaggggcgcttctgcccggccgcccctactgggaagtgaggagcccctctgcccggccacgaccccgtctgggaggtgtgcccagcggctcattggggatgggccatgatgacaatggcggttttgtggaatagaaaggcgggaagggtggggaaaaaattgagaaatcggatggttgccgggtctgtgtggatagaagtagacatgggagacttttcattttgttctgtactaagaaaaattcttctgccttgggatcctgttgatctgtgaccttatccccaaccctgtgctctctgaaacatgtgttgtgtccactcagggttaaatggattaagggcggtgcaagatgtgctttgttaaacagatgcttgaaggcagcatgctccttaagagtcatcaccactccctaatcttaagtacccagggacacaaacactgcggaaggccgcagggtcctctgcctaggaaaaccagagacctttgttcacttgtttat

SEQ ID NO: 3720 - DNA, 1252 bp, Artificial sequence
  DNA replication origin
ataaggtcacagatcaacaggatcccaaggcagaagaatttttcttagtacagaacaaaatgaaaagtctcccatgtctacttctatccacacagacccggcaaccatccgatttctcaattttttccccacccttcccgcctttctattccacaaaaccgccattgtcatcatggcccatccccaatgagccgctgggcacacctcccagacggggtcgtggccgggcagaggggctcctcacttcccagtaggggcggccgggcagaagcgcccctcacctcccggatggggcggctggccgggcggggggctgacccccccacctccctcccggacggggcggctggccgggcagaggggtcctcacttcccagtaggggcggccgggcagaggcacccctcacctcctggatggggcggctggccaggcggggggctgacccccccacctccctcccggacggggcggctgccgggcggagacgctcctcacttcccagacggggtggctgccggacggaggggctcctcacttctcagacggggcggttgccaggcagagggtttcctcacttctcagatggggcggccgggcagagacgctcctcacctcccagacagggttgcgcccagcagaggcgctcctcacatcccagacagggcggcggggcagaggtgctccccacatctcagacgatgggctgccgggcagagacgctcctcacttcctagatgggatggcagccgggcagagacgctcctcacttccctgactgggcagccaggcagaggggctcctcacatcccagacgatgggcggccaagcagagacgctcctcacttcccagacggggtggcggccgggcagaggctgcaatctcggctctttgggaggccaaggcaggcggctgggaggtggaggttgtagcgagccgagatcacgccactgcactccagcctgggcaacattgagcactgagtgaaccagactccgtctgcaatcccggcacctcgggaggccgaggctggcggatcactcgcgattaggagctggagaccagcccggccaacacagcgaaaccccgtctccaccaaaaaaaaacgaaaaccagtcaggcgtggcggcgcgcgcctgcaatcgcacgcactcggcaggctgtcaggagaatcaggcagggaggttgcagtgagccgagatggcagcagtaccgtccagctttggctcggcatcagagggagaccgtggaaa

SEQ ID NO: 3721 - DNA, 1369 bp, Artificial sequence
  DNA replication origin
ggcggacgcacgagcgcagggccgcgcccgccgccctcagcacgcgccggcggtggcgaggctgcagactggggtccgggccgcccgcggggcgtccgcgcaggctccgcagcagtggcacgaggtaccctgcagccacctcgcgcgccgcctccgggagcgcgcctgcgcccccgctgccgcgcgcctcctcgtcctcgagccgctgcagaaggaagcgcagcgtctccacgcgctccgcggatgcctccccttggcacagcgccccaagcagggcccgggggtcccggctctgcgagagcagcgcttccgcgagcacccactccatttgccgagcgcccgcgccaccggcccgggctcccaaaggaaggcgccggcgtgtgcgatgcgtgcgcacaggaccggccggcccctacgtgcgcgtgcgccgacggagccgggcgcgcggccgcagagagggggatcccagcccggcttggtgcagctcagcttcccttgggttcctgccaccaaccctgcctagatagaacccacctggtctcttatttttaggagaaacgaggccttcgttaaaagttaatgtagtatctacaccagcttcatcgattcctgattggaggttggtctgcccaggaccctaaatcaggcgtgcctgtgagcataaaccagttcacagaaggtgcacagcagaatcactttagattattttccaaacgttgcatgatgggcaccatccacaaagagactgacacagtaggtctgaaattggttctggacatctgcattaaaaataagtcatgaaaacacaagaatgatttagacgtaaggccaggagtgagaagtgttaccggtggagggtgtccaggtccaagaattggacaaagcgcacaaacaaagcaaagacagaatgaagccacaaaagcagagatttattgcaaaagtacactccacagggtgggggcagacccaagcaagccgctcaaggggggctggttacagaattttctggggtttaaatacctatagaggtttcaattggttacttggtgtacacactatgtaactgaagaggataaaatgaagttacaaagttatttacttggtgtactccctatgtaaatgaagaggatatttcctgtcatagctgaagtgtttctatctgatttggttctagggagtttttggattccctgcctccaggccctattctcctgccttagaggtacctatagcaatgtgctaggattcagctaaaaccaagatgcccacgccagccctcacagccaagtgcccaagatgactccaggatgcagagcctcctgcacaatgcatgtgctcccatgtgcaaactcaaaaatagtccctgtgt

SEQ ID NO: 3722 - DNA, 1725 bp, Artificial sequence
  DNA replication origin
gcagcgagcctggcccagccgccgacgccgcagccgccgcccgtgaacggcatcctggtgcccaacggcttctccaagctagaggagccgcccgagctgaatcgccagagcccgaacccgcggcgcggccacgcggtgccgcccaccctggtgccgctcatgaacggctcggccacgccgctgcccaccgcgctcggcctcggcggccgcgctgccgcctccttagccgcggtgtccggaaccgcggccgccagcctgggctccgcgcagcccaccgatctgggcgcccacaagcggccggcatccgtgtcgagcagcgctgccgtggagcacgagcagcgtgaggcggcagccaaggagaaacaaccgccgccgcctgcgcaccggggcccggccgacagcctgtccaccgcggccggggccgccgagctgagcgcggaaggtgcgggcaagagccgcgggtctggagagcaggactgggtcaacaggcccaagaccgtgcgcgacacgctgctggcgctgcaccagcacggccactcggggcccttcgagagcaagtttaagaaggagccggccctgactgcaggcaggttgttgggtttcgaggccaacggggccaacgggtctaaagcaggtaggggcggctgtgaagtgagggggtctaggggagaaaaggggacggagagcagaggaagggtggttctttggattcaccattttaccccagcccagaaacaacaaacaccccacttcctgatctgcctgaggcggaaccagtgcttggtggcaacgtgttcatgtgctgaagcagcataacagagatgagtcagactgggctgatacgctctgacacggggttttcctttcccagcacattcttggatgggagcatgagggcaccagtcaccttttaacctattgggggacattagcagtcacatgttgagtgcaaacgagggtacttttgtgcatgtgtacaaacaggcagttacaagcgtgtcattttcagtggctccattttaaatcagtctgctgcctcagaatcccgtacgcctgaaggttttaagttgcatgtgcacctgaaactcgtatatgagtattttctgtctgtgcttttagagaggaggaattctgtaacgacttttgtttcgggttaggaagagaatgatctctttcagtgcaccgccacttatgttacctttttccttttatttctttgtgtttccagttgcaagaacagcaaggaaaaggaagccctctccagaaccagaaggtgaagtcgggccccctaagatcaacggagaggcccagccgtggctgtccacatccacagaggggctcaagatccccatgactcctacatcctcttttgtgtctccgccaccacccactgcctcacctcattccaaccggaccacaccgcctgaagcggcccagaatggccagtcccccatggcagccctgatcttagtagcagacaatgcagggggcagtcatgcctcaaaagatgccaaccaggttcactccactaccaggaggaatagcaacagtccgccctctccgtcctctatgaaccaaagaaggctgggccccagagaggtggggggccagggagcaggcaacacaggaggactggagccagtgcaccctgccagcctcccggactcctctctggcaaccagtgccccgctgtgctgcaccctctgccacgagcggctggaggac

SEQ ID NO: 3723 - DNA, 1447 bp, Artificial sequence
  DNA replication origin
cccgtccagcccgccctgttcatcgggggcctcgccgcgccagtcgccccggctgccttatgtaggtatgcgcggcgggcgcgtgacgtgggcgcggggccgtgggcggccgccgccgcgagtgcgcacgctccgcgcagacgtgcctcggcgccgctggcactagggcctcgtggaacgaatgcacattccagggatccggggtctacggccagcgcggccgcgtcacagcgcaggctccacccccttcggcgagtctgggcgtcgaggcgccgcccccgggcccgaacttggactcgaggtggcgggaggcgagggcgcgagtggggggggggggggtcctgctcgcctccgcgaggttcccgagggccgtgggggcgaccggctggctggctggcccgccgtcccgcagggcgggccgccgacggaggcggacttttgccctatatgccacccaggccgggatgagcccggcctgcaggtctgccaccgttggcagcctcagactcagcccagactgaattgaatgtttgagtttcgcacttttatcgggaggaggagctagtgtgtgttatggtaaatcactttgggctggtcgttagtctccctaatacacgtaggcttagtcgctcttcaattgggacttttacacttaagctctttaagggcggcctctggagctgcttttgttgggaacacaggcccacaactctcccttgagactggaatgagctggttaagtgtgggaagaacagggtactaattatattatctttcctacaactggattggtaggtggagagaaaaaaaaaatcatgctgacgtttctctctagtcgttgctattgaaaataccaggttgcttcaaaggattaaccacaaggaagaggaaaaacacccttagagaaacagtggagggagctgcttaaaacacatgaaaaaacctgttcgaaaatggcacagaaaacgtaatgtcagacctaaatgtttttacaggctaaccttgaatgtcttttggggatttccatagaaggtgcgcctgttttaaaggtctctgcatctgttcctggatcttgccctgcaattgcaatcctgcctcaccctctccaagctgggagaatggggcctgtccagatccttcccgggagtagctggtgccagcgggtttggtcactcccaggccctgctgttgcacaccgctttcaagacctgtccctttggtcaccctcctcagagaccctgtgacactcattccagtacatgccttcacccactgcgtcactgcccaaaggggatgaagtccagtccttgtgctgcagagaaatgaaccaactcatcgcccccaagagacggccccactaagcattgactgaaacatactaaaagaaaacacaactcaccattagagttgtggcctaattatactcatttctctgcaagctggtact

SEQ ID NO: 3724 - DNA, 963 bp, Artificial sequence
  DNA replication origin
cttcaagtaatatccaggatgggatgaagctgcaggggagtgagcaaggtgtagacaggtagaaggtgaggttggaggagtgggtggacggggaggaatcatcccacagggccttgtacgcactgcaaaaactttagtcttttgctctaagaaattaagtccgttaattaaaaacaaatgaacagaaacaattttggcttttactctgaatgagaatccacttaggggttttgagcagaggtgagacatgatctaacttacattgcaagatggtctctctggctgctgtgttgggaacagactgtaggggcaagcgtgggcacttggagggcagggagggggccaccactgtagtcacccaggcagagaggtggtgacagacgaggtgtcaattgtggaggtgctaagaagtggtcacttcatctgtatatacaaaggagagccaaatagatttatagagcatagcagggaagaatcaagagtgactccaaggtttggggcaggggcatagggtagaaccaatggattgttggggatcatcctactggagacaaagaatggttggagtattggggagtgagttaaaaagagaagaggtagtgcctggagaacgggaggcttgacgttgagattatggaggagatgcaactactgggaatgataacaccaaaggtggaaccctgcgagtaggtagctgtgtggggtggagtcagtggtggggtggagagcaacagcattggagaagagggcaaggaactgggagtccagagagggaacaagtgaagactcaatgtgggtattgatgtcaccaagaattatgacatgagttgtgttagagacagggaacgtgagccatacactgaaatccttaataaatgaagagaggtgtcacagggagaagtagatgattgaagccaggaggggtagcccatgttctgcaacaggagtttcaaagttaggggt

SEQ ID NO: 3725 - DNA, 1290 bp, Artificial sequence
  DNA replication origin
agggactctgttttggacacaatccattggagttgcaggtagacattccagtggagaagacaagtggctggctggctctctgagcctggagttgagggggtgatgtgggctggagattggactttggcatcatcagtgttggtgaggcagctacaatcatgactctggatgagctcattgatgggggcagcaagtgtggacagagaagcaggaggtctgaagactgaggtctgaggtgtttggggagaagaggaggaacctgcaaaggagatagggagcaagcaaggaggcaggaggagagccgggcaggtgggctgcagccaagcaaggagagggggaggaggaaggggggaaggggaaaggcggggagtgggaagagggtaggagggggaggaggagagggggaagaggagagtagggggagtaggggtaggaggagaaggggaggaaggggaggaggaggggggaagggggtgagggagaggaaggggaggaaaggaggggtaaggggggaggaggagaggggaagaggggagaaggagtgaaatatacctgtcgtgggatttgacctatattagagaatcactgtgcagtgcaccaagcggcactggagaagtcatccccgaaataaattggattgtgtgacaagagatgggttcagcagatgcaactgacagggaggagggaaactggaccagccttggctgtggattggctgcgcgatcttggacaaatcacccatcatgctttccttccgtgttacgtggaaatgtctctgatatctgctgcccttacctcacagagtaaagacccaaaggagatgtcatgaaagcatttcgaaatgctgctgaacactcagcacagtggctggcacagactgggtagaactcaatggttggaaaatgtacttggctgttattgtgcctttttcatgaaaatatgaaaagctaaataaacctgaaacatgttggggactgagtgaggggagatgagcacgttctgagagtcctaggaccatgcactcttagagagtgcctttgctattgtttcgcctcccgtcctacagaggaagggcttaggtttgctgtgaatttcccccttgcctaccagcattgcgccaattaaggtttctacttcactgcacgtttcagccaaggatgtcaagggaatccactgctgctccagtgagacaaataacatatccagcatcaacactgccatcatcattagcatcattgtggccattaggatggttggcaaggcaataggttggcactactgatgggcagc

SEQ ID NO: 3726 - DNA, 879 bp, Artificial sequence
  DNA replication origin
atgtgaggtgccagaccaagtgttgtcctcagcaactgggaaaaaagagttaacgttctgcattaggctgttccagcattgccataaagaaataccagagactgggaagtctataaagaacagaggtttaattggctcacggttctgcaggctgtacaggaagcatggtgctggcatctgctttccttctggggaggcctcaggaagcttccaatcatggtggaaggcagagggagagtgggcatgtcacatggccagagcaggagcaagacagcaaggggggaggtgccacacacttttaaacaaccagatctcatgagaactctctctctatctgcaggatggcaccaagagagatggtgctaaaccattcatgagaaatctgcccccatgatacaatcgcctcccaccaggccccacctccaacattggggattacagtgaacatgagatctgagtggggacacagatacaaaccatatcatgttccctgagataggatggctgggggttgggggtgaacagtatttgggagggaaaatcagggactctgttttggacacaatccattggagttgcaggtagacattccagtggagaagacaagtggctggctggctctctgagcctggagttgagggggtgatgtgggctggagattggactttggcatcatcagtgttggtgaggcagctacaatcatgactctggatgagctcattgatgggggcagcaagtgtggacagagaagcaggaggtctgaagactgaggtctgaggtgtttggggagaagaggaggaacctgcaaaggagatagggagcaagcaaggaggcaggaggagagccgggcaggtgggctgcagccaagcaaggagaggg

SEQ ID NO: 3727 - DNA, 757 bp, Artificial sequence
  DNA replication origin
gcaaaatggacgagaattcctgctctccaggagcttcacttctaatgggggaagcagagcaacacacaagataaaatacacagcatgccagcggttgttaagtgccaaggaggaaaagtggagaaggtggaggggaagggctggtgggcagagggatatgcctactgctgaggaagctcccaccatgaaggtgacatttgcaaacaaacctgaaggaggtggaagactggccaggcagagacctccgggaagaggggctaggcccagacccaagcatgagggtggccagagtgttctggaaacacgaagaccagcgctgctgcaggtgggaggggatgtggggaagataagatgagacagagtaagggtgtgttggggggtgacagattatggagggccccagaggccatcctgaggatacaggagccattctttgagcagagaagtgacatagtccaatttcagtttctgcagggtccttctgggctctaggctgagagtggactgagggatgagggtggagtcaggggcatggattaggaggctatggctagtccaggcaagggggatggcagtctaaatcagggcagcagcagagtcaggttttggaaatgttttgaaaatagagccagtaggatttgccaacattggcaaagattggatgtgaggtgccagaccaagtgttgtcctcagcaactgggaaaaaagagttaacgttctgcattaggctgttccagcattgccataaagaaatacc

SEQ ID NO: 3728 - DNA, 1003 bp, Artificial sequence
  DNA replication origin
cagccccagtagacttactgacagtctgggacctcagcaatgttgcaagatctacctggtttcttaccacattaagaagtcttaacccaaatggggtggtccaatggtagtgggttatcagaacttattaagattagtgtcactaaagttggtgttcaacccccaactcagccactgctacatttgactgggaagaagaagaagaagaagaagaagaagaagaagaagaagaagaagaagaagaagaaggaggaggaggaggaggaggaggaggaggaggaggaggaggaggaggaggaggaggaggaggggggcggggtaggagaggagggggagggggaggggaggggaatgggagggggaggggaggggagggggagggaaaggggagggaaggagaggggagaggaggggaggggaggggagggaagaggcagggggaggggaaagaagaaggaagaaggaagaagaagagttaaccacaataaactgtgcaacagaaggagattccttttataatcaacaggctcagggcctatatttttgaagttgaaccacatgccctagtgccctggaggacaacaagtataatatatttttgctgttttggatgagcttgaggctacaggcacagagaaggggttcctgcagtcttttgaccctttattccatcccatgacctcaaccctgataaaataagcaggggcttttgaatcaagcttgtccactgcctggacaatgaggggcaagaagcacacggactctggatgcacccatatgggcctgcgattttcggggtacctggtgggaaagtaactttggagagtgagccatctgctcacatggaagaaagaagaatctgatgcctttctactcaccacaaaagctctcacctctagtttaataaactgtagctcattcccacgatgggatactgtgtggctattaaacagtatgagttagaccaaacatggaaatagggaaaaagaaaaaaaggagttgc

SEQ ID NO: 3729 - DNA, 1201 bp, Artificial sequence
  DNA replication origin
aagttgttgaaaggaccgtagcatcgtgtgtgtgtatgtgcacacacaatgtgcacacgcatcttaactccccaggtatgtgggcagtgtacaacccaattctgttggtcttttgactctttcctttccttctccttctctgttcttctcttttctcctcctctcccttctcttgcctctttccctaaatattcattatgtactctctgtgtaccaggtactatgctagacacgagggatgtgaggaagagaatcaagacctaatgtctgcctgcaaggagcttatagtccagtagctgagctggcaaggagaaaaaaattcttgcccagggagcagtgtgcaccaagggtgcgttgcactatgctggggaaatgtgttcatgggggtggtgcatggaagcatgagagacagaagatatttgctggtggggagggcgggcagagacactttgtgcaagacgatgcagtgtgtttgggaaaggtcaggcattggtgtagctggggatgaggaatgagatgggcctgggccagcaggaggcaggatgagggggaggcccgccagggagagccactgaggggtttcagctggaaaataaggtgatcagagcttcctgtcttagacggatgccctggtggtttgctgaggatggacagagaaaggcaagcctgcagggtgggttgaagagcactgcaaggccagatggaggtgctgaggtcaggaaacggtgctgtcaccgtggggatatggaggagtgggtgggagcaaagaccttactaaggttgaatctagaggacttggaatctacataactggtagtagacattttgaagcaaaaaagtaggtaagttgaatacgtgcagggagtcagggagagaagaaagataagaacaatacatttgggaaagaagtagggggaggatgaggagttgagttggggaatgttgagtttgaaaatctattgtccagtaggatgttgggcatttggatttggtgctcacaggggaaatttgtgcagaagatattggccgtcaaaagcagcaggtggttggagttgcaggatggaggcaccctctcagggaaaaggtgggggggttggcgagagaaaactctgggcagcaccgtcacttccaacagccatgggccatgatgggaaagttcctactggagggaaagcatgggcagcatcatcacctccaacaa

SEQ ID NO: 3730 - DNA, 1387 bp, Artificial sequence
  DNA replication origin
gtcacagatcaacaggatcccaaggccgaagaatttttcttagtacagaacaaaaggaaaagtctcccatgtctacttctttctacacagacacggcaaccatctgatttctcaatcttttccccacctttcccccctttctattccacaaaaccgccattgtcatcatggcccgttctcaatgagctgttgggtacacctcccagacggggtggcggccgggcagaggggctcctcacttcccagtaggggtggccgggcagaggcgcccctcacctcccggacggggcggctgaccgggcggggggctgacccccccacctccctcccggacggggcggctggccgggcagaggggctcctcactttccagtaggggcggccgggcagaggcgccccttacctcccggatggggcggctggccgggcggggggctgacccccccacctccctcccggacgggtggctgccgggcagagacgctcctcacttcccagacggggtggttgccgggcggaggggctcctcacttctcagatggggcggctgccgggcggaggggctcctcacttctcagatggggcggctgccgggcggaggggctcctcacttctcagatggggcggttgccaggtggagggtctccccacttctcagacggggcggccgggcagagacgctcctcacctcccagacggggtcacggccgggcagaggcgctcctcacatcccagacggggcggcggggcagaggtgctccccacatctcagacaatgggcggccgggcagagacgctcctcacttcctagatgggatggcggccgggaagaggcgctcctcacttcctagatgggatggcggccgggcagagacgctcgtcactttccagactgggcagccaggcagaggggctcctcacgtcccagacgatgggcggccaggcagagacgctcctcacttcccagatggggtggcagccgggcagaggctgcactctcggcactttgggaggccaaggcaggtggctgggaggtggaggttgtagcgagccgagatcacgccactgcactccagcctgggcaccattgagcactgagtgaaccagactccgtctgcaatcccggcacctcgggaggctgaggctggcggatcactcgcggttaggagctggagaccagcccggccaacacagcgaagccccgtctccaccaaaaaaatacaaaaaccagtcaggcgtggcagcgcgcacctgcaatcgcgggcactcggcaggctgaggcaggagaatcaggcagggaggttgcagtgagctgagatggcagcagtacagtccagcttcggctcggcatcagagggagaccgtggaaagagagggagagggagac

SEQ ID NO: 3731 - DNA, 876 bp, Artificial sequence
  DNA replication origin
cgtctctgcccggccgccccgtctgagaagtggggagaccctccacctggcaaccgccccatctgagaagtgaggagcccctccgcccggcagccgccccatctgagaagtgaggagcccctccgcccggcagccgccccatctgagaagtgaggagcccctccgcccggcaaccaccccgtctgggaagtgaggagcgtctctgcccggcagccacccgtccgggagggaggtgggggggtcagccccccgcccggccagccgccccatccgggaggtaaggggcgcctctgcccggccgcccctactggaaagtgaggagcccctctgcccggccagccgccccgtccgggagggaggtgggggggtcagccccccgcccggtcagccgccccgtccgggaggtgaggggcgcctctgcccggccacccctactgggaagtgaggagcccctctgcccggccgccaccccgtctgggaggtgtacccaacagctcattgagaacgggccatgatgacaatggcggttttgtggaatagaaaggggggaaaggtggggaaaagattgagaaatcagatggttgccgtgtctgtgtagaaagaagtagacatgggagacttttccttttgttctgtactaagaaaaattcttcggccttgggatcctgttgatctgtgaccttacttacccccaaccctgtgctctctgaaacatgtgctgtgtccactcagggttaaatggattaagggaggtgcaagatgtgctttgttaaacagatgcttgaaggcagcatgctccttaagagtcatcaccactccctaatctcaagtacccagggacacaaacactgcggaaggccacagggtcctctgcct

SEQ ID NO: 3732 - DNA, 1181 bp, Artificial sequence
  DNA replication origin
aaggtagggatattttctggggctttcgtggtctcctaagggggttcttttgggagtcgctgggcccggccaaggagcagaggaagatcgcggtggtggtccctgcggcgcccgaattcggggcctcggcctcccgggaacccccaccccccgcagccgctgtgtccgagccgccccctggctgggcggccgcacactcagcggtttagcggccgcggtcgggggcccgggcagggtgggggccgttccgcctccggggccctcggccctcacgttgtccccgcggcggggccagatgttgatctcgctcccacttgtcgggtctgagcccggaacgggacgtgggcaggggctctgtggcgggccggtcctgcccgcggcccacaggccctcctggcccctcggtggcccccggccggcctctcgctcggacgcggcgcgtgggggcgcggattcgctcggccgggcgccgaggccctaggggagagcggccggccctgcgccggacgccgggcttgttgtgagtttcttctctgacagaaatggcgtcattgtcgtagacgggaaactccgtcgggtctcgacaatggggacgggaagctgccgagctgtgtaggtggttgggtttgcggggatggcggggccggagggagccccgagtcggcgtgtgatggttcgggggctggcgcctggttgcggctctttcttcggggttcggacgtcgctcgcttctttccctccgcctccgccagtgcagaggggctcctgtggtgttgactgggtgtcttttgtttcccctccaggtgcagctgaacctggtgttttagaggataccttggtcccagagtcatcatgaaggtaagattgcctgcggaaaacgaatctctggggttatcgaattcaggaagtaggaggtttcgacgaggtcgtcgtgtggggcttccgagttttgcagaggaaggtgtgtttggtgacttggtgaccgagcccttccccagagagaccggggtcagctggcgggctttgctgtggagttggaggcagttataggatgtctcaactgaagatgattctcccatattgaacatctctttttgtagggaatgagaggaataacggcatgaattaaagtgttttaaaaggtaaaataaaaagcaagtcaggtaatctgaccctagaaa

SEQ ID NO: 3733 - DNA, 1630 bp, Artificial sequence
  DNA replication origin
gctgccctccagaggacggcggcgatggaccctctgcagctccctccgggcaaaggtccaggcggtggccgtggcggcggcaagatgaagctcaagagtctccctccgcttcggcgaccgagctcctcactccggactcgactgacgggcaaacatcgcttcccccccaccgactctaggttccccccctttctcccctcccctagattttttttccccccctcccctacctctttcccggatggcctcttagacgaccttggattggttaaagttctttagaacccgcctatacactgttcctattggtccctggatacaaacaacgacgccattttcccaccagttctatggaaacagaaagttacgcctcaaggctttctgggaaataaagtccatactctggggccaacgcgcaaatcctcgtccgcgagaactgcaaggcccgcaatgccctgcgcctgcgtggaccggtgcgggggcgggggggaggtgaaaggggcggggcaacaaagcagtagggaggcggcaacgacgcctgcgcagtgtgaccgggatggcgcattttcttgcaccaactaatgcggtgtcgctggcggctgaggagggcggagagttctgtggtgaaatagtgggaaggattcatgtaggcatcgggaagagcctaagtccacattataaaataggaagttgatgcggggtacagttactcccggaccggcggcgtgaaagtcgtgatatcatcgttgaactgtgagcggcagtggcggcggctggggggaacccggatgggaagaagggcgggggaggctgggaggcggggcagaggaaagaaagaaaggagagtgaggacccggatgctgaaccggattgtgtatgaattttccatcccctagctttaagcgaggagggagaggaagggttggccaagtggggcggaagggagcatctgagcgaggaggaagcagaaacctcaccgtttcttcccctccggactctgtgctagcactgtatacgtttgcagttctctgcccagccgctgtggaaaatcggcctcgaagtgattgaaattccctgtttatatcaggcggcttctttcagatccatcgtctttctcccggagtatgaatggaaggattcagtatgcgcttcacatttgtatgtctctggccattctcaaaccaggcccttccctttgaaaagtcttttgcatgggatgttcacttcttagacgcaaggttgtgtgccctggtttcatcgtctaacgcgttagaaggcgctttcatttcttcatgggtgttgagcgccgaccactggggtggcctctgccttcgtagacctgcgcctggtgagacggacagatgctgaacaaaacgatgtgaaattaccgcagtggcagtgccccagaggagagttccacggtgataggagaatgagggaatttggcttctttagggagggaaaggaagggtttctgagcaagtgaggatcgagctgagagctgaagggctagcaggagttaactaaggaaagagaaaaggaaaagacattccagacaaaaagactaacttgtcagaaagccctgtggcggaagggagcttttccaatatgaagaactgagcctggagag

SEQ ID NO: 3734 - DNA, 1249 bp, Artificial sequence
  DNA replication origin
ccctgcctgggcccagagcgggacttcagctcccggccggctggctggcgcgtgtggaaacgcgggaggagagggcggggcgagtgggagaaaaggtgggcggagccggtgggaaggccaggcggagggggcggggcttcggccggctaagccgcggccacccgcggtctgagggaccggaggagcggggccgggagctgcgaggagccccccagacgtcgccgagcgcgagggcgggcgtgctcggagtggtcgctcgtcagccgccgcccctcagtctccgcacttgcaggtcccctccctctccgccgggacgcgggagagcccggctcgcggcgggggcggccaatgcgaaactggctggtgctgctgtgcccgtgtgtgctcggggccgcgctgcacctctggctgcggctgcgctccccgccgcccgcctgcgcctccggggccggccctgcaggtgaggtcctggggccgggcgggttggcggccgccgggggggtgggaggcccggcttggtgccgcggggcttcgccgggaattgttggaggcgggggaagggccaaacgcgacggtccccagacgaaacaaacggctcttttcatccttggagcgttaacatcgggcaaacttgagggagcttttctcttttcgtgtccccgcctcttctcacttccccgtttcccttaacgcccgcagagccggcgcccgcagttgcaagtccttcgcctgtccccaggcctggttagtgatgtccgacgccgcccgttcgcccgggagcggaacctcgtgtgcccttcagccgccagcgctttctgctttgggagctctggctctgaagttgttttcttcccccccaagttgttggtctttctcggtcaagactggggttttagtgccgtggataatgtgtgtgcgtgttttcaaaggtggctcggttttgcttttaaggaataactttgctgtaagaatatactgtagttcgtattcttggattatgatgtaagtcggttaaacaaatctagacatgaaatagggcatggccgagagttggagttgttcctgtgagtttggatcgcataacctgctaatgcagtttacatggaaatatcaaattctttaacgatcgtgtccatttgctctaaaacttaatctctcgtaggaatgaaacctttgttcttgtttcgcgtcacagcctaatagaatgctttacttacggtgcccagcggattgttttgttagtgggttc

SEQ ID NO: 3735 - DNA, 972 bp, Artificial sequence
  DNA replication origin
cagcagcaccagccagtttcgcattggccgcccccgccgcgagccgggctctcccgcgtcccggcggagagggaggggacctgcaagtgcggagactgaggggcggcggctgacgagcgaccactccgagcacgcccgccctcgcgctcggcgacgtctggggggctcctcgcagctcccggccccgctcctccggtccctcagaccgcgggtggccgcggcttagccggccgaagccccgccccctccgcctggccttcccaccggctccgcccaccttttctcccactcgccccgccctctcctcccgcgtttccacacgcgccagccagccggccgggagctgaagtcccgctctgggcccaggcagggggcgcccgcggtttagaaaccacatttcccatgagcctaagcacgcgcttccgtcactcggcggccgcgggggcgaagggcgaggccccacacagagcatgcgcatcccccttgacgtttgctgccaccccacggcccaggggaggtagtgccggagacccggtgctcggaggctgcccggagccgcgaagggaaatgcgctttgcctcagatttgaaggaaatccgagtggctcttgtgtgaaatcacgcagagctcctttgttccgcgtgctctcttgctcgactgctgtgggaggtgggatcctgctgacgtctccttggcccgtagagtggggcgaggaagcccgagtgtccgcgcctggagcggtgactcatcagggattagctctggtgccgtgggttcccggctctttgcccggttctgtgctctgggaacgcagggtgacagacagcgagctggggactaggctgtggaacacgatgatgacgagccaatcagggtagaactgcacgtgctccgggttcatactggagctgggagcgaaacgggagccgggcgagctgggagaacgtgggctccggggacctggggaagggt

SEQ ID NO: 3736 - DNA, 1781 bp, Artificial sequence
  DNA replication origin
gccatctctccgtgtgtgtgtgtgtgctgatgtgtgtctgcgttgctgtgtgtctacacaaaatgagggaggagacacagtctagttcccaacccttcccagctgatgcaatgaaaaaaggactctgatgtgatttggatgtttgttccctccaaatctcatgacgaaatgcgattcccaatgtgggaggtgggtcctggtgggaggtactggatcacggggccagatcagtcaggaagggctcagcgccaccctttggtgataagtgaaagtcactctgagttcatccaagacctggttgtttaaaagtgtgtgtcgccttcctgctgtctctcttgctcccactcttgctgtgtgatagtatggctcccccttcaccttctgcatgagtggaagcttcctgaggcctcaccaggaacagatgctggctgccatgcttcctgtaccacctgcaggaccataagccaattaaacctctttcctttagaaattacccagtatcaagtattcctttacagcaacacaaaacagcctactacagaccctacagtgactgccttcaaatcttgatcctgctctccccattctagactccatccctctcgccccttgtctttgacttgggcatttaggagttgggggaggttcaggggaggaggaggtagagtttgggatcagcaggggtgaagccaagaggacatggagcagggcaaagggaggaggggagggctctgcactgtgtgtgagggagtctgtggtgagtaggagtgtgtgaaagtgtggggtgggggtgagcgtgtgagagtgtgtgggggtgagtgtgtgtgacagaaagtatgtgtgagggtgtgggtgagtgtgagtgtgtgaggtggggtgtgtgtgatgacagtgtatgtgagtgtgtgtgaaggtgtgggttggggtgtgtgtgagggtgaggggtgtgtgtgtgtgagagtgtgagagcatgtatgagggtcaggggtggggtgtgtgtgagtgtgtgtgtgagcacgtgtgtgagcatgtatgagggtgaggggtgggggtgtgtgtgtgagggtgggtgagcgtgtgtgagggtacagggtggggggtgagtgtgagagtgtggatggggggtgggggtgtgtgaatgtgaggtgggtgtgttgtgggtgtgtgtcagggtgtgggttggggttgtgaatgtgggagggtgtggggtggcggtgagtgtgagtgtgggagggcatggggtggggtgtgtgaatgtggggtggagtgtgagtgtgggagggtgttgggtgtgtgtgtgactgtggggtatgtgtgcgagtgttgggtgtctgtgtgtgagggtgtgtgtgggtgtgggtcagggttcagggtgggggtgagggtgagtgtgggagagtgtggggtgggggtgtgtgtgtgtgtgaaggtgagagtgtgaatacaggcacgtctcagagcatgcggggtgaacgtgtgtgtaagtgtatggagtgtgtgagagggtgtggggggtgtgtttgtgtctggagtgtgagtgtgtgggtataagtgtgagtccttgaggatgtgtgcacatgtgcacaggtgggtcatgtggcggggagggaacagctaacgttaccggggaaagcagcagagccgactctcagtcccgtcaggcccctgcagctgcgcccacctctctccctcccaggcgctgttcagacggccctgatccctcagcccttcctcattcttccgctgttcaaaagaagggctcgttttccacatgccctacc

SEQ ID NO: 3737 - DNA, 940 bp, Artificial sequence
  DNA replication origin
gcacgagctgaactgtgctgtgccctggctccccctgtctacctgcaaaatggacagctttggctctttctctgggcgccagcatgcctgtacagtgtcagcagggcaataatagcttttacaaacaacagtggcttagagccaaatgatgagccttccgatgttatggctatatggctgtgatgacaagtggagttatacgcctgcgctctaaacttgctgagtcactctggatgtttacctcagcctatccttgaccaaagcacagccatgttcctgacacgcgtgctctggccttacagcaagggaggcaagaaagtgagtctgccattgtcagcccctggggaggaaggagggccctgccggcagggcagcaagtcgggagcagctgtgggtggtgtcctacaggctctgctgtggaggaagagctgctgccctgagtggaggcaaggatggatgtgggtgtggagtggagtaggtggggtggggaacattaaggagggttctctgctaatggccattctgtgtagacagaggggctgaggtcctctgctgaggaggaaaggtcagaggtgatgaggaagtgatgaagactggaagaagaggatgaagggagggggagatgatttggggcaaggagtcctattgccaggtagctctgagggcctcgcagaggctggattgtggatgtctgatgggcagagtttagtggggggggtctctccagcagcgctgagcagccccttcgtgagtgtggagaggggaggagttgggtccataccgaagcaggttttagggacagaggaaagggccagagaagcagacggctcttgggagacagtggtggtagttgggtcatgctgttgaggctaagtatggagccaggggaggaggaagcagcagagaaggggctgagggagaagctggggtcggagagcac

SEQ ID NO: 3738 - DNA, 877 bp, Artificial sequence
  DNA replication origin
ccatttggcataggtttggctggagctggggctccttgtgttggggggcagagcgactgggcatgaaggtttgcagggtccaggggagcagtctggtgaggcccggggtggcctgtggccctgaagttgtgtttccagtctgctctgggtcagatctgagggttctctgtctgcctcgagctccccatctccccaaggtctgatatggagtccccaggcttttggggaaggctgctgagtttgaggagaggggaaccatgggacagggtggatggggactctgggagcaatgccagggagtccccacacctctagacatgtctctggttgtgctttcaggtgacctcaaagcagaagctctgaattcacctctcatctgacgactgacagctgctgccaccgccagcctctgtcccttgcccaggcctgtcacacggctgcctctcagcaggtaaggagagtgacttaccctgtgtaggggcaggaggacagcaggtgtcttcgccaggagcatgtgtgtgggctggggtgagactcagttctcaggatccttgatggtggccaggtcctcacagcatcactttcttctagcaatcatcactgtcctgtccccttctcccaccctccacggcagacacggggcccttagaaaccttttgccacctcctgttatcccctatgtgaatggatgtgcacctgttgggggagcaggggaggagaactgagccatccccgagggctgctgggccttggctggggaaccgtgctgtgtgcttccctgtgggaaaagagatgctattgcagtgagcttccttgttcagcaaggatgaaaggaggtccaccactcacttcctccccactcgcagtttaagctgct

SEQ ID NO: 3739 - DNA, 1688 bp, Artificial sequence
  DNA replication origin
aaaacccttggggaatgaactcattaccccagagtcagccatcctggagagactgtcctggagaagtcacagttacggaggatggctgcaaagggaaggcgaacagggctatgagtcttgaatgggctgtaagaaacctttcaaaggccaggcacagtggctcatggctgtaatcccagcactttgggaggccgtaggtgggaggatcccttgagcctaggagttcaagaccagcctgggcaacatagtgaaactccgtctctacaaaataaaaaaaaaaaaagtaaaaattagccaggcatggtagtggacgcctgtagtcccagctacacaggaggctcaggtggcaggctcgtttgagcccagttcaagcctacagtgagccgtgatttttccactgcactccagcctgggcaacgaagcgagaccctatctcaaaaaataaatattaaaaaaaaagagctttcgagtcgtctgatctcttctatgctaaatgtcctttggttgaaatcaaatttctaatgcatgtaagtatattatacatcaacaggctaaccatagttatctctgggaaaaggcattatcactggtctttattttctttgttgtaattatctttatctgcacattttttgataataggtgtttttttgttttgttttgttttttgctcttgttgcccaggcatgatcttggctcaccgcaacctctgcctgtcgggttcaaatgattctcccacctcagcttcccaactagctaggattacaggcatgtgccaccacgcctggctaattttgtattttttgtagagacagggtttctccatatttgtcaggctggtctcgaacttcccacctcagttgatctgcccacctcggcctcccaaaatgctgggattacaggcataagcccctgcgcccggccaggtgtgtgtgtgtgtgtgtgtgtgtgtgtgtgtgtgtgtgtgtgtattttgtttgtttgtttttgttttgtttttgtttttgagacagagtctcgctctgtcacccaggctggagtgcagtggagcgatcttggctcaccgcaagctccgcctcccgggttcacactattctcctgcctcagcctcccaggtagctgggactacaggcgcccaccatcacgcctggctaattttttgtatttttagtggagacggggtttcacccagttagccaagatggtctcgatctcctgacctcgtgatccgcccgcctcggcctcccaaagtgctgggattacaggcatgagccaccgcgcccggccccaagtgtatatttttataagaagaaaacacgtgacctgtttccatttggcataggtttggctggagctggggctccttgtgttggggggcagagcgactgggcatgaaggtttgcagggtccaggggagcagtctggtgaggcccggggtggcctgtggccctgaagttgtgtttccagtctgctctgggtcagatctgagggttctctgtctgcctcgagctccccatctccccaaggtctgatatggagtccccaggcttttggggaaggctgctgagtttgaggagaggggaaccatgggacagggtggatggggactctgggagcaatgccagggagtccccacacctctagacatgtctctggttgtgctttcaggtgacctcaaagcagaagct

SEQ ID NO: 3740 - DNA, 1001 bp, Artificial sequence
  DNA replication origin
gcccagacgccgcctcgggagcactcggggtgacgctggagccaccgcagctgagggtggttttcctcacctccttgatggcgtctgtccccgaggctggtgctgaactgaaatgtgcttcgttcgccgcgcgcgcccggcagcaaccggggagctttgtttggcttgattttttaaattgccttggaaataacgcgaaacggcgggagggtgaagtggggaggaggacagagcgtggtggggaaagactccttaatttaagatttgcttcatttcgagtatttggggctaaggtgttaggaaacccgaaaatgttaaagtttgatcaagtaataaagtggatgatggacgccgggcctcccaccgtctccccggccccgcggctgccgcgtctctcctctacccgtcgcctcccaggactgtcaaatgctggcaccgggcccgtgcctctcagccggagcaaaaggccgcctaggctgcgcccgtgtgctccattaaaacgtgccagtcctgtcgtctgctcatgagtgaggtgtgccgcttcccacagtggacaggaaatttgcagcggcgaatgcctcacagtagccatgggggacctgggctctgcggccggcttctcgattcctcccgcaactccttttcctgatttttgtatgaggcgggggaggggaaccagccgccatctgatctggccctgttccctgcaagaggcgactggggggacaactaagttgataaatggaaagccttttccagcccggagaaacagacagaggacctataaactggattgtttttgaaatgtagggtttgctcagtgaccggtcatgataagagatggctgtggcacttaataaatagtaggtgtaaatgcaaatgcaaggtttacagtgatgccttgcctgttaatgagcagcctcaccatggggttagttaggctgaaatgactatttaggacaatggacttcctgttggcccccacctccatgcacaactcc

SEQ ID NO: 3741 - DNA, 1090 bp, Artificial sequence
  DNA replication origin
gccctgcagggcgggaggcgcggcgcggggcggggccggtgacgggacgcggagaccccgcgggcggcgggaggggcacgaggcgcgcgtttgcacccgagcccggcccgcgccccgatgcggagcgatgccgctcggcctggccgccccccgcgagcaccgcgctgcagacgaagcccgcgcgtgatcccgctccgggtaagtgggcgcccggccggagccccgggtgtccgcggggagagcccagcccggtgcagccagacgcggaagggaaactcggggtgaaagtctccggacctagggagacggctctggcgccggtgtggtcctcacgccgccagctgctgctgcacgcgacacaaagacctgtggttccctcggcctcctctcccgggacctcccgccgggccccggggaagcccgcgcgcgggtgtggacagccccctcggagcgcgtccaggggcttccggggctgggggcgcccggtccctccggcatgaggcaggcgggggctcgggggtcccctcttccatttgtaggtcacagagcgtttgctgttttcccagcggggacgtcccccgtggaaaaggacctcagtggcaggagatggcgtggctggttgggcgttttctttggggaaatgtttctggcgagtgcctgaggaagccctcctggctccccagcagcccagacgccgcctcgggagcactcggggtgacgctggagccaccgcagctgagggtggttttcctcacctccttgatggcgtctgtccccgaggctggtgctgaactgaaatgtgcttcgttcgccgcgcgcgcccggcagcaaccggggagctttgtttggcttgattttttaaattgccttggaaataacgcgaaacggcgggagggtgaagtggggaggaggacagagcgtggtggggaaagactccttaatttaagatttgcttcatttcgagtatttggggctaaggtgttaggaaacccgaaaatgttaaagtttgatcaagtaataaagtggatgatggacgccgggcctcccaccgtctccccggccccgcggctgccgcgtctctcctctaccc

SEQ ID NO: 3742 - DNA, 1242 bp, Artificial sequence
  DNA replication origin
accactggaggggtctgtggggcggggccggggggtaaatcactgggggggggtctggggggcgcggcgggggggagatcactggagggatctgcggggcggggccgggggggaaatcaccggaggggtctggggcggggccggggttgctggaggggtctggggacggggccgcggtcagcgcgggctccccgaagcctcaggtaccgccctcgctcggggtgagctccagcgcctgggccgttggggcgcgggccgcttcccaccctgcaccaagggacgcctcggaagcctccggccaaggcggggaacggcggagaaacgcggaatacctgtgcgaattcgcgcggccgcgtcgccactaacccggcgaaggctgacccgacgttgctgagtgacggggaccaggggccggcgaggcccccactccggggggagcgaggccgggagggcggagggcgcgtgctggaggcgggggtgcccttcgcgccccggttctaggagcgactgctctccaggcctcgtccctgtggcaccgcaggcttttgcgctggagattttaaaacactttagtgattacagccctcttcctttcagggaaaaaacagtttaagcgccgtccattttccgacttggtaaaataatacgaaaccttgggaatagagaagcaacgaaaacatttcacgcagtgttggcaagatttgtagaaaaggaggccaatattaattccctttgtgaaaacaacaacataacatcatgatgaacgattaggaaatatttcgggaagatctgggcgcctcatcctcatccgccgtccacaagcggtccctgccacaaaggacacagggcgcgcttgttgctcagatccctggccccactggttggaccttgccctacacacacgtgtaccttctcggagcccaagggccagattggatgcgaacgcggagatcacaaaggcccgtaaacacggggccagcaaacacatcggtttttacaaagctctcaagtgcccatttaaggcacaaaattaaaccttggcaaaccgacgaagccagtccatgtccacctcacagacttttaaaagtgagaaagatatatgagtactgcattgaaaattcaagcaaatccaaaccctagctcattgttttcaccccaaaatcttatttctcctgcatttcctgcccacctcccgcccccgactggttggctaaggcagaatcctaggtttccttttatccc

SEQ ID NO: 3743 - DNA, 1336 bp, Artificial sequence
  DNA replication origin
gctggaggacggggatgacttcgtctctcctgccctggagctgagtggggcgctccgcttctacgacagatccgacatcgacgcagtctacgtgagtgagccccgggagggcgggcgaggggctgcagggcgcggcgggccgggggcgcccgtggagccggacggacttgggcgtagcaggcggggacccggacccgctggccgccggggcaccgggcacggcgcagggtctcccgcctctgcagggtccgcgaaggtcttcccgacccggtccctgctatccgaagagcgggtcgcggggtctgggtggctccgcgcgccccgggccgtgaccccggcacccatggaccccgcggagcttcctccccggcggctgtgggctgcatcgccgcagggaggtcagtccgcgtccctcggctgtccagtcccttcggggctaggacctggccggtcccgggtggagccaggttctcgcgcggagcctccgcagggcaagagccggagctggatcgcagtctgcgcgcgggccccgggactcttgtggctgcgggagagtttcgccggcagcctcctgtatttgtgtgtggactccggatgtgtcttggcagtgatgctgctttccagttgggctcgtttcagagtccagagtccagagcgggaaacacagggctcccagtgatcccatttcctgtggccaggcattgtcaccacggaggccccaaacgaggagcgggaccagatgacctacagctccctggatcctccccgtgactggccgggcctggggtcgctgtcaacttgttgaagtcctttcgtgccgctgccttcctcggccgcccaccatgtggatttcatataaggcttgtgtgcattccagaagtgtggggggttggccgggggaagggggttggaactgcaaacgcagcggctgcagcctgtcctgcccgtgaaatggctgtgctcccggtctggcctgggaacactgcgccttagacaacactcacgtggaacttgtaggctttgcctaaaacgaatgagcccttcaagtctggatccacaaagagccctcccccatgttggttgactgccctggcccctttgcacactggtgaagcctgtggatcccttttcagtataacgcttttattttagtttttagagagacgaggtcttgctctgttgcccaggctgggtgcagcggtgcgatcttgggtcactgcagcctccaactccttggctcaagctgtcctctggcctcagcctcctgagtagctgggaccacaggcgagtgtcaccatgctgggcagtataaagttttaaatgcataaaataaaat

SEQ ID NO: 3744 - DNA, 2274 bp, Artificial sequence
  DNA replication origin
atgtcggatctgtcgtagaagcggagcgccccactcagctccagggcaggagagacgaagtcatccccgtcctccagctccaggtccccctgtccggggccgaagggaaagagctcctggcggctcaggcagcccacaggccccgccagcagcagcggcagcagcagcgcccgcgtccacgcagcccggatccggctgctcgaggccaacatgttcccgaactgcggtcccgcaaacccggtcccgcggccaggacagaggaaggcggggatgtaaccggacgcccctggcagccccctctcctcccgcctcccggcgttcccaccccgggaaataggggaggggagcggaggggagagcggagggccccgccccgtccagcgggcgcgccgcggggcagcccaatggccgcgagggggagggcgaggggcgaagccgaacctcccgccttgggcgccggtgcctgcgattctcgaaaccagcccgactcccagcgaacggcgcctccgggagggggagcagagcgcgggacccgcaccgtggtcctctgattagggttgggtcgtggagagccggcgacgtggaaacgctccggattcaggaacggcgcccaccccattgccgctcggccgcgtccggggtccaattcgcttgaccctggtaggaagacggggtgggagctgggaatcagccaagggacagagccaccaacacgttcatgggctcatccacccattcattgcgcgttttttgagtgcctgatcctgtgctccctattgtggaggttcgccaggaaacggggtctcaccctccgaggcaaagtcaccagtgtacaacacaagccagtgtcagatgggggccccaagtcatcaaagacattagggctggaaaaactggcggggaaagctgcaggtgggacggcgggaatcaacccgggtgctctggaaggaatgggatgtcatcaggcggcagagaagggaggtggaggaccgagctgggtttattcagggcaccatcccccagcagaggatgtggggagggaccggttgaagtacagccttgaatcacaaatttaggaatttgaattcgctctgtcactcggagaagaaactattgaaagttcttgacaaagggagataagcgatttaagtggtatcctgaataatcggttgatcgttactttggcactagggtgaaagtagagacaggtaagttattagaggaccaagtctaaaacattgaaatgaaagaaggagcaaatcctgattataagattggcattgaagaggagaagaaacgaagttaaaattgagttcaagggtttgcacttggaggactggaaaaccagtactgccttttgacgtcagggaagaggatctgggacagctggagttggatatgtttgatgtcagacctatcagcggtcaacaggacgtccccgtttcctgtcagcagctaaaagtaacgaccttgaacctagtttataataatttttcagaaaacagcaaattctgtataaaatttagggggcatgagttctgaaccagcaaagacaggaagaaaaagcaaaggaaacatgccttctaagcaaaacacttttgatttactcatgagaacttgtctttttcttttgaattcattcgccatcagaaataacatttattacccatcagagacagcatgtgttctacaagtattcattcattttgcactcacagtaaccctaggaaacagaccttccctgttttacagagaaggggcatagaggcccagagaggttaagtcatgttgctaaggtcatgcagctgggagccggtaagtgaccctaggtgttccagctgcaaggaccccacttataaccactgcattaagtgccctctgtttactaccttttactgcagcctgcagtctgttgtcaaatatggtgcttttccttcagttccctcccaacaatacagcactgtgagcccccagcctgctccccagaagcacttctgactctactctatgccatctgtgtttctgactatttctgggcttctgggccccagcactgcctgtttcagctgctacaggatctctgtatggagattcttctctatcttcacccgcacgtgacacgggccccacgacttccccatgccctgtggttgagggaaaccccaagctcagtaggccttttttggcctgtgccttcaacactcctccttcaaaaaaccccaccccagcctctgtcacacatcagagctgtctctgaagctgtagtctgtgcct

SEQ ID NO: 3745 - DNA, 1424 bp, Artificial sequence
  DNA replication origin
gagcttgagccttttgcaccactctgctccatctttgaccgccacacaccctaaaaacaaaacaaaacccaaaacactccaccactgaacaattttggtgaccaccgtcccacctctgggagggctgggagtccccagaaaacacagaagtagctcccaggcccgtaattcaccccaacatttttggttctagaaacctggcaaagcagccacattggcccaagccagcgacaccgcgcggccccgcgcttcccacagccctgggcccggcaaggctgaaatcaagtctagaagatggcaaggtgggaaggaacgctcctctttcatcttgcttcagagaaaaccttcgccagtctcagcatcatcagtacacacgtggcctgctcttcagcggatctcaccagtaacaccttctggcatttgggctagagaccgggcccctgaggccgccctgggaagcctgaggtgtggagggggattcaggatgtgcctctgttcctgtatgtgcaagtgtgagtatgagtgtgtgtgtgaatgtggaggtgggtgagtgcatgaatgtgtgtgtgtgaatttgagtgtcatgtgggtgtctctgtatgcatgtgtgtgtgtacatggtgtctttgtatgcatgtgtgtgtgtgggtgttgtgtgtatgtgtacgtgtgtgcatgtgtatgtaaatgtaattctgtgggtgtgtgtgagtatatgtgtcagagtgtcatgtgggtacatgggagtgttgtgtgggtgtgagtgtgtgagtgctatgtgagtgtgtggtgtgtgtgtttgtgtgttatgtaggtgtgtttgtgggtgttgtatgtgtgaaggtggccgtgtatgtgggtgagtgttatgtgggggtgagtatgtgtacgcgtgggtgagtgtgggtgagtgttgtgttatgtgggtgtgagtgtgcatgagtgtgtgagtgctatgtgtgtggtgtgagtgtgtttgtgtgagagtgttatgtgggtgtctgtgggtgttgcgtgtgtgaatgtggatgtgcatgtgggtgagtgttacgtgggtgtgtgtgtggtgtgagtgtatgtgtgagtgttatgtgggtgtttgtgggtgttgtgtgcgtgaatgtggatgtgcatgtgggtgagtgttatgtgggtgtatgtgtatgcgtgggtgagtgtggtgagtgttgtgtcagtgtgagtgtccatgagtgtgtggtgtgtgtgagtgctatgtgagtgtgtgtgtggggtctgagtgtgtgtgagagtgttatgtgggtgttgtgtgtgtgaatgtggctgtgcatgtgtgttatgtgggtgtatgtgtatgcgtgggtgagtgtggggagtgtgagtgtgcatgagtgtgcatgagtgtgtgggcacagaatttatctgatcccaaaccattttcacac

SEQ ID NO: 3746 - DNA, 984 bp, Artificial sequence
  DNA replication origin
gcccgatggagaccccgccgtgggacccagcccgcaacgactcgctgccgcccacgctgaccccggccgtgcccccctacgtgaagcttggcctcaccgtcgtctacaccgtgttctacgcgctgctcttcgtgttcatctacgtgcagctctggctggtgctgcgttaccgccacaagcggctcagctaccagagcgtcttcctctttctctgcctcttctgggcctccctgcggaccgtcctcttctccttctacttcaaagacttcgtggcggccaattcgctcagccccttcgtcttctggctgctctactgcttccctgtgtgcctgcagtttttcaccctcacgctgatgaacttgtacttcacgcaggtgagtttcagagaggctcctggaggcgctcacctggcggggtggtccccgcggggcgcccgaggcaggggcgatggcagccgcgggggcgggtccggccctagggctgagagtgtagggagaaggcgccggctctggggtcgtccgaaccctgtcctgtttgcgggcatttgtcataggaaaccccctgccattcccaaaaggggcaaggagaaggcaggggagggctggaggccgccgctcactcgctgcccctggctccgcatcgtgcggtggattcggggcgcttctccgtgcgcagcgcgaagcagcagcgcctgcacacgccagttagtacggatggaaggtgtgcccccaagggaggcctgaactctagaatttgccctgcctccccaggcacctaactcccggcctggaaaggtcttctgcacgttggcctccagatttgggcctgacactgctgttttgagcgttggcagggtgagaccatgttggttttgatgagatgttttgaacctccggcttaggagctctacagaactgcggcttactaactcattccaccggattgctaaacagcaggctggggtaacacccagctccgagctgc

SEQ ID NO: 3747 - DNA, 979 bp, Artificial sequence
  DNA replication origin
ttgctggtagggaactaagaggcccctaaaagtcgaatccaggaactagtcctccgtgctcaccaggaaagggacgtgggtgattgtaggagtaaggggcttcggctgtggctcttggcggtcagtttagtcaagacgtgtttatcaaatacctgtcgtgtggcaggccctagtctaggagttgtgaagagggaagcttctaggccttttggtgattgtaaagaagtaagaggcttaggaaacagacaaggcgggccaagggcaaggactgtgctcagcctggcctctgggccctgcgcccatggcctcagcccctggcaccggctccctgcggagctagctcagtgggctcatggccagccagagttgtgtgtgcacctaggtgtgcgcctttgtatgtgtatgtgcatgtgtgcctgtgtgcacctgtgtgtatgtacatgtgtgcctgtgcacgtgtggctgcgtgcacctgtgtgtgtatgtgcatatgcgtgtgtgcctgtgtgcacctgtgtgtgtgtggggtttgtgtatgtgtgcctgtgtgtgtgcctgtgtgtgtacctgtgtgtgtgtgtgcctgcctctgtgtgcctgtgtctgtgtgggtctctgagtgtctgtgcatgtgtgtgtctgtgcctgtgtatgtctgtgcctgcgtgtgcctgtgtgtgtgcctctgtttgtgtctgtgcatgtgtgtgcccgtttgtgtttgtgtgtgtctgtgtgcctgtgtgtgtgtctgtgcctgtgtgtgcctgtgtatgtctgtgcccgtgtgtgtgcctgtgtttgtgtgtgtctgtgcctgtgtgtgtctttgcctgtgtttgtgtgtatgtgcctgtgtgtgtgtctgtgcatgtgtgtgcctgtgtgtgtggaaaggtttccttattttcttggtctgccgttcacccccagcacctcccgcaggccactttctaaacatacagcccagtttcccgag

SEQ ID NO: 3748 - DNA, 1219 bp, Artificial sequence
  DNA replication origin
cccgcgcttgggggcgtggccgaggagccaagcgagccgggggcggggccgcctgggggatgaagtgggggcgctcgcctttcctgcctcactcgcagctgccgggtgttggggaaagagtcgcctgcctccggactggagtgcagacctctgaccctggagtcgctcggccgctgggaaccgtccccttgggtcgtcgcctgggccgcccgtcgttccccggccccgaggggtccggctggccgcggtgtgggtagaggtcagcatgagccaaggggtccgccgggcaggcgctgggcagggggtagcggccgcggtgcagctgctggtcaccctgagcttcctgcggagcgtcgtcgaggcgcaggtaagcccgagtgatagcgggccgggaacccccggccgaacacccgcggccgctacacacgggccgcggctgtgacgcggggagggccgggcagggccgggccagaaaagaggtgatttctggcgagcagaaaacccggggagcagagacctgaccgtccagtgcgggaaacatctgcgaaccgcccgcagggtggggggacggcgacactccgggtaatggcagtcaaaagaggaagatggtgacggtccccctgagctgttttcgttttttcctctcggatgtgttaagcggctgggagtgtggcgggagatgggacgggcatgaaccacctcggctgtcttgcgaagggagcgagcgcccagagaaacggtgacgtccttcccttcaggagttagtgagggagggagactgagagttgggggcactccgcagacccccgaggccccgccaggcgcaggggattgggagggggcaagacttcactcgaactgtcggactagagctttctgggcttttactcttcctcgagcaccttcccttgctcaagattgctttatttttacccagctgagctgtgtctgccaagtggcatcgccaggtaagtcccaatacgagactgggggggtctgagtggggcgttgtggctcgtggatggaggctctggctctggcagtcgtgaggtgctggctggttgttgatgtgaagcgatgattacaagtgttctcagtgtgctagaaatctgaggcttagctgaccagatcctttcgccttcagagaggtgtttgcttctattcagtagaatttgaattgattgccaggtgctgctgcttgttgtctgcacctgctgca

SEQ ID NO: 3749 - DNA, 1285 bp, Artificial sequence
  DNA replication origin
cgggcagaggcgcccctcacctcccggacggggcggctggccgggcgggggggctgaccccccccacctccctcccggacggggcggctggccgggcggggggctgacccccccacctccctcccggacggggcggctggccaggcggggggccgacacccccacctccctcccggacggggcggctggccgggcggggggccgacccccccacctccctcccggatggggcggctggccgggcagaggggctcctcacttcccagtaggggcggccgggcagaggcgcccctcacctcccggacggggcggctggccgggcggggggctgacccccccacctccctcccggacggcacggctggccgggcgggggggctgaccccccacctccctcccggatggggcggctggccgggcggggggctgaccccccccacctccctcccggacggggtggctgccgggcggagacgctcctcacttcccagatggggtggctgccgggcggagaggctcctcacttctcagacagggcagctgccgggcggaggggctcctcacttctcagacggggcggttgccaggcagagggtctcctcacttctcagacggggcggccgggcagagacgctcctcacctcccagacggggtctcggccgggcagaggcgctcctcacatcccagatggggcggcggggcagaggcgctccccacatctcagacgatgggcggccgggcagagaggctcctcacttcctaaatgtgatggcggctgggaagaggcgctcctcacttcctagatgggatggcggccgggcggagatgctcctcactttccagactgggcagccaggcagaggggctcctcacatcccagacaatgggcggccaggcagagacactcctcacttcccagacggggtggcggccgggcagaggctgcaatctcggcactttgggaggccaaggcaggcggctgggaggtggaggttgtagcgagccgagatcacgccactgcactccagcctgggcaccattgagcactgagtgaacgagactccgtctgcaatcccggcacctcgggaggccgaggttggcggatcactcgcggttaggggctggagaccggcccggtcaacacagcgaaaccccgtctccaccaaaaccagtcaggcgtggcggcgcgtgcctgcaattgcaggcattcggcagactgaggcaggagaatcaggcagggaggttgcagtgagccgagatggcagcagtacagtccagctttgg

SEQ ID NO: 3750 - DNA, 965 bp, Artificial sequence
  DNA replication origin
cggccagccgccccatccgggagggaggtgggggggtcggccccccgcccggccagccgccccgtccgggagggaggtgggggtgtcggccccccgcctggccagccgccccgtccgggagggaggtgggggggtcagccccccgcccggccagccgccccgtccgggagggaggtggggggggtcagcccccccgcccggccagccgccccgtccgggaggtgaggggcgcctctgcccggccgcccctactgggaagtgaggagcccctctgaccagccagccgccccgtccgggagggaggtaggggggtcagccccccgcccggccagccgccccctccgggagggaggtggggggggtcagcccccctgcccggccagccgccccgtccgggaggtgaggggcgcctctgcccggccgcccctactgggaagtgaggagcccctctgcctggccaccaccccgtctgggaggtgtgcccaacagctcattgagaacgggccaggatgacaatggcggctttgtggaatagaaaggcgggaaaggtggggaaaagattgagaaatcggatggttgccgtgtctgtgtagaaagaagtagacatgggagacttttcattttgttctgcactaagaaaaattcctctgccttgggaatcctgttgatctgtgaccttacccccaaccctgtgctccctgaaacatgtgctgtgtccactcagggttaaatggattaagggcggtgcaagatgtgctttgttaaacagatgcttgaaggcagcatgctcgttaagagtcatcaccaatccctaatctcaagtaatcagggacacaaacactgcggaaggccgcagggtcctctgcctaggaaaaccagagacctttgttcactggtttatctgctgaccttccctccactattgtcccatgaccctgccaaatccccctctgtgagaaacaccc

SEQ ID NO: 3751 - DNA, 1156 bp, Artificial sequence
  DNA replication origin
aaagcaggaagtgagctcgtggaagaagcgaaggaggagaagaagaagggaggggaaggcggaggagggcaggggcgcgcagagccacggtttgctccaggcgcgtcggaaccgcaggacttttcatccccgtggtcccacggtcctcccgcgccccggaggcctgccagccccgctcggacgctcgtttgcccctaacccgccgccatggcttcaccggacgaccctctgcgcgcaggtaaagggacacagcgccgcgcccgctcctggagcgagcaccgcggggcgggagctcgggaggcgctcgcagcagccgcagggctatcgaggccgggcctcggcgacccccgagggaggcccgggaaccacccccgacccaggcgccagacccggagtcgcacggggctcccagtccagccccgcgagcggctgctgaccgcccctcccgcgctcgccagggcccctgccccgcgtcagccaccgcgcgccttccccctgcccatgccgcagcccccgtggcttttgttctggactcgggatgccaggttgagacacgtcctgcaaacctctggcagaaatgggcgcaagggggtggatttcgttttcgcctcccgggctttttctttctccccgctcacatgccttctcattactcctcttcctctctcccattgcactttgatgaaatggttttgtctgtctaaacattggccctcggagctatttcatcagatagtatccgcagaatcgagaggcggatcccacctgtgggatcccatctgtgattagaatggcctctagttctgtctttattttaaaatattgtgtgttggtacccgaggtcggagtggagatttttctctattctctcacgtgaatctaaaatccgtcccagacctcgctttcctggagttctctctctccgctgtcctataacctagacggtgacatccgtgggtgtttcttgaacacacgaatgaatgatctatccctcagagtacactggggctttacttggttttgttgaggttggaaacactgaagagagttacacagaacctgatataaccgtttagataaacgcgtttcctatttcatttcttgagcttgggcaggggccgagtttgaatgttccatccttaaattgtggcttcag

SEQ ID NO: 3752 - DNA, 1415 bp, Artificial sequence
  DNA replication origin
cccgtctctactaaaaatacaaaattagccgggtgtggtggcacatgcctgtaatcccagctactccggaggctgaggcaggagaatcgcttgaaccggagaggtggacgttgcggtgagccgagatcgtgctcttgcactccagcctgggcaacaagagtgaagctccatctcaaaacaaaacaaaacaaaacaaagttaatgcaacctgtttgctaattgttatctttctgcataaagccccaaacagtaacggtgagtgatgtaaaaattctaaggaacaatgataaatccagacaaactcaacttgaaacatgtccacaaattagtagccctgaatcacaaaaaattctgtagcatctgtgggcaacgtttattcaattgagatataaactgaattgcaggcaggcatcccatcagctcgtctggtgcctaaggcaacctctggtttacagtagttgcttaatacatatttgatttaaaaatttcagcctacttgtcccaagggtcctcattttgcttcctgcggcagcataactgatagggaacagctagccagcactagggggatgaaaaggcgttaagtgcaacccacagggcgacatggaaatataacacgaagctggccgcttgcccttcattgtcagctctcttaaatttatgcccggtaggtgagagctgacacttcctgcctttggtttggttcctaacattttaataggatggatccaaatcctgtgccttgatttccccaggtgagggtgaggaggagagaaagaagaggggggttctgtagcttttaaactttactccttaggggcctgtatgtatgtatgtgtgtgtgtgtgtgagagggaggaagagaaacagagagagagaagagagagacagagatgagagaggtatgagagacacaggagagagagacagatgagagagagaaagagagacacgacagagagagagagacgagagagagagagacacgggagagagagacagaggagagaagaggagaggagagagacacgagagacagatgagagacagtgagacacgagagagagagagagatgagaggagagagagacatgtgagagagacacaggagagacagagatgagagagagatatgagagagatctatgagagagagacactggagaaagagggacagagatgagagagagacagacgagagacagacacaagagagagggaccgatgagcggaaagagaggcacgagagagagatgagagagagagaagaggggtctccaatgaatatgtgggaatatatggaaaacgcgaatatccaaatgatatttggaaaacttggctgtgttggggtggtcagggacccagcctcttaggtgtccctcccctggctcgcgatcacccacccgggacaccga

SEQ ID NO: 3753 - DNA, 1019 bp, Artificial sequence
  DNA replication origin
gcggggccgggggcggtggcggcgggggcgtggccgggcggccacgtgacgggcggcgcggctattaagccgcgcggcagctgctcgcagccggagctggtgcttcgcccgagacccagcgcccaggcgtgtcgccccgagaggagccgcgcgaaggtcaccccgcgcccgccgcccgccgcccgccgcctccgtgggtccgtttgccagtcagcccgtgcgtccgagcccctcgcgccccgccgcagccccggccaaccgagcgccatgaaccagatagagcccggcgtgcagtacaactacgtgtacgacgaggatgagtacatgatccaggaggaggagtgggaccgcgacctgctcctggacccagcctgggagaagcagcagaggaaggtcagcaggggcccgcgggccgcccgcgcgtggtggggccgggtcccccgcggggctcccgtgcgcgtggccgcgtggcctggcgactggcgagagggcgctttgtggaggtgctgtgctgtcctgtgccctcgcagccccgggggccccttaggaaagaggacacgtccggggacaggcaggacactgggcgtcgtgtgtgtgcgcgcgcgctagcagcatcggaggtacagatgtggttctgttcctcacaccaacccgcgttagaccagatctgaaggggtctctggtctgctcctgaccccttgagtctgtgaccttggcccccgagttatactctcctggcccgcttgtgtccatttaccccagcctctctcttccccattgaaagaagcaaaagaacatcagcttcattgcaatttccaccgggctgcccctagagtcatggaaagtcatttattcaatcttttgggttccttggagagggatgttgtatgaacactagacatttaccgatagtgacaattatttcacactctatttataattcattgaggtaagcacacagggacgaaggagtcagccagcttctaaaagctccctccccattttgattggcgttctct

SEQ ID NO: 3754 - DNA, 1050 bp, Artificial sequence
  DNA replication origin
tgcggtggctcatgcttgtaatcctagcactttgggaggctgaggtgggtggatcacctaaggataggagtttgagaccagcatgaccaacatggtgaaacaccgtctctactaaaaatacaaaaaattagctgggcatggtggagtgcacctgtaatcccagctacttggaaggctgagtcaggagaattgcttgaaccccggaggtggaggttgcagtgagccaagattgcgccattgcactccagcctgggtgacaagagtgaaactctgtctcagaaaaaaacaaacaaacaaaaaaaagagacggtggtcagggaggcctcttggacaggatgtttcagccagcatccaaatagtgacaaggcaccagtcatgtgaccttcccagggagagtgctccacagaggagggcttagtgggtggccttggccagtgcggttaaagtgcattgaataaagggggcgggtatgggataatgagaggggtgggaaagaacagagaagcaggtccctgttaggtgtgtgattgagggcatggattctactcaaggacaaagagaagaggtatagggggactagaccgggcagaggcaggagagagaggctttggaagcagagcagagggtagggggccttggactagggcactggcaatgacgtaattagaagcatccagatttgagatatatttagaagtaggacttgctgatggattagacgtggggagtgagggaagacagttaatccaaagatgattcctgtgtctttggcttgataatgaggcaccatccactgagacggggaagactgaagaacaagaggtttggggaagagatttgggagatgggggctctgtctgggaaacgtcctatttgagctgtctgctgtgcattcccatggaggggctgcgtagatagttggatataattgtagagcttagggggagaggtggacgctggagataaactagaagtcacagcctagtggtgatatttggatgatcttatttggattctcacaatttctctggaggcagttataaaaaacag

SEQ ID NO: 3755 - DNA, 1154 bp, Artificial sequence
  DNA replication origin
ccgagccccgcggagctcggcggcggcggcggcccctggcgctgccttctgcttctgctgccgggagccgggggctggagggggccgcgctgccgggtgccgagcgccgggcggtccccgcctgcagagcggaggaggaggcgcggacgctcgggcgcgggtggtcgaggcgcggggcctccctgctccgcactgtgcgggaggagggcggcccgggcccggaggacgcggggaagcagccccgcagcccagccgcgctcgctgcctgcagccggcggtccgctcggccccggctcctccgagcaagtgcgcggagccagctgagccggggttagtgcagcggtgggggtggggtgtgggggcgggcggggaggagctcggcggctccccgctgctgcaggtaatccgcagcccgctcctccgggccgccaaacccgaggcccagcgccacttactggctgcgctgggaatcggggccggagcgcacccggcgagcgcacagcctcctacctgcgccccgctggggtccctgggctcattcccctgccccttccgagcttaaaaccgccggcacgacgccccttcctcctggactgggctagggcactaacttccacggcacttcggatcgcacggaagaatgatatctttcacctgggcgcacggggtggctaatctccaagtagagattacgcaacacctggtattttaaacgtggattacctctattcatgatcaaatgggaattcttcaagatctagttttagtgtaccatgcttttcgcagataatcgatgcaaagtgcacggttttggtgcacagaactttaacattcaacaaatatacagtgagcgcctatgccagacaatgtggtacaagacagacccagaagtgtgtagtctgtattcgaagtgcaagccttaattcaacaaggaattgcggtaaagtatgggatactatctataagtctgaaccactggatgggtctaaagtcagactgtgctacccattatccttgctgagagaagaaattcgagcattccaccgcagatagtaatatcttgctctcgcaatcctccatgcaatagtctaccaaatgcctacttaacaaacggctatgactaagaaaatacagggtctgagacaatttggaca

SEQ ID NO: 3756 - DNA, 830 bp, Artificial sequence
  DNA replication origin
cgggtgcgctccggccccgattcccagcgcagccagtaagtggcgctgggcctcgggtttggcggcccggaggagcgggctgcggattacctgcagcagcggggagccgccgagctcctccccgcccgcccccacaccccacccccaccgctgcactaaccccggctcagctggctccgcgcacttgctcggaggagccggggccgagcggaccgccggctgcaggcagcgagcgcggctgggctgcggggctgcttccccgcgtcctccgggcccgggccgccctcctcccgcacagtgcggagcagggaggccccgcgcctcgaccacccgcgcccgagcgtccgcgcctcctcctccgctctgcaggcggggaccgcccggcgctcggcacccggcagcgcggccccctccagcccccggctcccggcagcagaagcagaaggcagcgccaggggccgccgccgccgccgagctccgcggggctcgggagccggccccggcgaggaggcgcggaaccatggccgatgggggcgagggcgaagacgagatccagttcctgcgaactgtaagcgccgtgcgtcgcgtgtgctgtcaggggaagggggcgtcagggcatccactagcggggtccgggcagagtgacagcgggcagcggggactcgcgggcggggcgagggggtgccccctgaggatgcgggaggagcgggcatcaccaagtgtgtgcaggtgtgcgtgttggggcgagggaaggcaagggcgcgtgtctgtgcgcgcgtgtggaaagctagaggatggagcgcggctagccggcggcaggcgcccgggct

SEQ ID NO: 3757 - DNA, 1622 bp, Artificial sequence
  DNA replication origin
agcagaagcagaaggcagcgccaggggccgccgccgccgccgagctccgcggggctcgggagccggccccggcgaggaggcgcggaaccatggccgatgggggcgagggcgaagacgagatccagttcctgcgaactgtaagcgccgtgcgtcgcgtgtgctgtcaggggaagggggcgtcagggcatccactagcggggtccgggcagagtgacagcgggcagcggggactcgcgggcggggcgagggggtgccccctgaggatgcgggaggagcgggcatcaccaagtgtgtgcaggtgtgcgtgttggggcgagggaaggcaagggcgcgtgtctgtgcgcgcgtgtggaaagctagaggatggagcgcggctagccggcggcaggcgcccgggctcggacccggggcaccggggacaggagcgtcggagctgcgggaaccgggagaggaggggacggccggtccggcctgcctggtggcacggctgggacctcccgggcggccgggggcagggtgcagagcagggtggcccgtgggggcgcggggagcggcgggaactcgggctgtttctgggaataccgccgccgggaggtttcttgggctttcgggctggacccgcgcgttgtcacggagcgaagacgttggttcgcttactccgtgtagcgtgcggcgcagctgaccgggggcgggggtgatggtgcaggacgctgcgcggaggtttcccccaagtcaaggtgctgcgaaagcggaggaggagtcgcctccgtggtccccgcggttcccggggctggtgccatccgtggtggtgctgtgaccgcttgcaaagcgtggaaggcatgggaagcgagcgtgtgtttgcgtgtgtgcgcgcgcgcgggtggtggtggggagaacatcgtgaacgtgtcgttctctaaatgctggcttattgcatgccaagtgaagcaaagtgtgtgtgtgtaagtgtaagggcagggtggctgcccgggaaaggttggctccacactaatacaattctttctccttaagtacctcttggcactgctccttcctttctctcatttgttcgaacactgcagatacttcccaggctgaggcattgcacacctccaagctgggactggagagcctctccagaaaagaaaatgccctaacttcctgctaataataacctagttagcatcctttcagtcgttccttctccacttctgtcctccttcccgaaggatgttcccttgcaggattccccagacttccccaacctagaactgcagcttctgctggtacttctttcctcagcagtacaaaaacaaaacaaaacaaaacaaacaaacaaacaaaaccacttcccggttacagttacctataatcacagaaaatcgtagatacggtggaattttggaatattaacttttaggtgtgaaaatagtcttgatgtatttgggtactaaacatatgaaaacagcgaatttgcaaaggaacgttgtaaacgactgtctctttctcttttgtgcattaaacggactgggagaaagctttgggaaggataaaaacccagggtccacatcagatgacaacctaatagtaatccagtctaatagctgcaggttatgcaccat

SEQ ID NO: 3758 - DNA, 965 bp, Artificial sequence
  DNA replication origin
aggaagtgaggagcgtctctgcccggccgcccattgtctgggatgtgaggagcgcctctgccccgccgccccgtctgggatgtgaggagcacctctgcccggccgcgaccccgtctgggaggtgaggagcatctctgcccggccgccccgtctgagaagtgaggagaccctccgcccggcagccgccccgtctgggaagtgaggagcgtctccgcccggcagccaccccgtccgggagggaggtggggggggtcagccccccgccaggccagccgccccgtccgggagggaggtgggggcatcagccccccgcccggccagccgccccgtccgggaaggaggtgggggggtcagccccctgcccggccagccgcccccttctgggagggaggtgggggggtcagccccccgcccggccagccgccccgtccgggaggtgaggggcgcctctgcccagccgcccctactgggaagtgaggagcccctctgcccggccaccaccctgtctgggaggtgtacccaacagctcattgagaacgggccaggatgacaatggcggctttgtggaatagaaaggcgggaaaggtggggaaaagattgagaaatcggatggttgccctgtctgtgtagaaagaagtagacatgggagacttttcattttgttctgtactaagaaaaattcttctgccttgggatcctgttgatctgtgaccttacccccaaccctgtgctctctgaaacatgtgctgtgtccactcagggttaaatggattaagggcggtgcaagatgtgctttgttaagcagatgcttgaaggcagcatgctcgttaagagtcatcaccactccctaatctcaagtacccagggacacaaacactgcggaaggccacagggtcctctgcctaggaaaaccagagacctttgttcacttgtttatctgctgaccttccctccactattgtcct

SEQ ID NO: 3759 - DNA, 1952 bp, Artificial sequence
  DNA replication origin
tctattccacaaagccgccattgtcatcctggcccgttctcaatgagctgttgggtacacctcccagacagggtggtggccgggcagaggggctcctcacttcccagtaggggcggctgggcagaggcgcccctcacctcccggacggggcggctggccgggcggggggctgacccccccacctccctcccagaagggggcggctggccgggcagggggctgacccccccacctccttcccggacggggcggctggccgggcggggggctgatgcccccacctccctcccggacggggcggctggcctggcggggggctgaccccccccacctccctcccggacggggtggctgccgggcggagacgctcctcacttcccagacggggcggctgccgggcggagggtctcctcacttctcagacggggcggccgggcagagatgctcctcacctcccagacggggtcgcggccgggcagaggtgctcctcacatcccagacggggcggcggggcagaggcgctcctcacatcccagacaatgggcggccgggcagagacgctcctcacttcctagataggatggcggctgggcagaggtgctcctcacttcctaggtgggatggcggccgggcggagacgctcctcactttccagactgggcagccaggcagaggggctcctcacatcccagacgatgggcggccaggcagagatgctcctcacttcccagatggggtggcggccgggcagaggctgcaatctcggcactttgggaggccaaggcaggcggctgggaggtggaggttgtagcgagccgagatcacgccactgcactccagcctgggcaccattgagcactgagtgaacgagactccgtctgcaatcccggcacctcgggaggccgaggctggcggatcacttgcggttaggggctggagaccggcctggccaacacagcgaaaccctgtctccaccaaaaccagtcaggcgtggcggcacgagcctgcgatcgcaggcactcggcaggctgagtcaggagaatcaggcagggaggttgcagtgagccgagatggcagcagtacagtccagcttcggctcagcatgagagggagactgtggaaagagagggagaggcagaccgtggggagagggagagggagagggagagggactggaaagaatttttaaatcccttcagaaagttgttcaatttccctctgccagtgatagcaaagaaggtggtatagctagagtagggtgaataagggagtgagtggtaagagatcagagagaggtggcagtgcagattgtgtaggacctctttgagcagtttattaatttggaccatgactttgagtaagtcaagccatcagaagttttgagcagaagagtgacatgatctcagttacattttagtaaggccaccgtggctgccagaatagactgaatggcagggattgggaggtcgggatgggaaggaccaaaatacaatcacagagaactgctgcagctgcagagagctgttgcagtgatccaggggaggaatggtagtagctggcatcaggatgctagcaggagaggtggagaaaagaggttggattccggatatattttgaatatagagataacaggaacagaggttggatatgagtagaaaaggtgttaaagaagactttaaggttcttagcctaagcgatttgaaggatagagctgccattttctggtgtggagaagattgaaggaagagtagctttgagtgggaagaggaaaagtttatattttgacttgttaagtttgaaatacattttagacattcaagggcaaatggagaacaggtagttggacatctgactactttctgccacccccactacaaccttcccagcccaaggcactgccttctctcatctggattactgcagtgcagtagcatcccagctggtattcctgc

SEQ ID NO: 3760 - DNA, 1154 bp, Artificial sequence
  DNA replication origin
agcatgctgccttcaagcatctgtttaacaaagcacatcttgcaccgtccttaatccatttaaccctgagtggacacaatacatgtttcagagagcacagggttgggggtaaggtcacagatcaacaggatcccaaggcagaagaatttttcttagtacagaacaaaatgaaaagtctcccatgtatacttctttctacacagacacggcaaccatctgatttctcaatcttttccccacctttcccccctctctattccacaaaaccgccattgtcatcatggcccgttctcaatgagctgttgggtacacctcccagacggggtggtggcctggcagaggggctcctcacttcccagtaggggcggccgggcagaggcgcccctcacctcccggacggggcggctggccgggcggggggctgaccccccccacctccctcccgcacggggcggctgccgggcggaggggctcctcacttctcagacggggcagttgccaggcagagggtctcctcacttctcagacggggcggccgggcagagacgctcctcacatcccagacggggcggcagggcagaggcggtccccacatctcagaggatgggcggccgggcagagacgctcctcacttcctagatgtgatggcggctgggaagaggcgctcctcacttcctagatgggatggcggccgggcagagacgctcctcactttccagactgggcagccaggcagaggggctcctcacatcccagatgatgggcggccaggcagagacgctcctcacttcccagacggggtggcggccgggcagaggctgcaatctcggcattttgggaggccaaggcaggcggctgggaggtggaggttgtagcgagccgagatcacgccactgcactccagcctgggcaccattgagcactgagtgaacgagactccgtctgcaatcctggcacctccagaggccgaggctggcggatcacttgcggttaggggctggagaccggcctggccaacacagcgaaaccccgtctccaccaaaaaaatacgaaaaccagtcaggcgtggcggcgcgcgcctgcaatcgcaggcactcggcaggctgaggcaggagaatcaggcagggaggttgcagtgagccgagatggcagct

SEQ ID NO: 3761 - DNA, 917 bp, Artificial sequence
  DNA replication origin
gtctgtagaaaaggaagattagaaagactcaaagacgcttggggttgggactgaggggacaggcgggagggaaagaaggaagatttgggatgagttgcactgggcacagagactagggagggactgatgtgtaaaagaaggcctggacgtcaggcacctcagacagtttgcctattttacgacaagaattatttagatcttgcaagatggaaaaattgaaagtgccattttctgactatttggaactactgtcgagtttgtattggggtcaagcggcattgcagaagaaaataagatgcttagattttaggtcaggtgagaattgaagaggttttaagttcttaagaacacaggctaagggagaagaaagaggaatggagggtggaagattgcctatagtgaaggaggcaagcccagagaaaagagagagtagagacacggagggaaggggttcgggggttcttaccctccagaaaagcgagaaaggggtcggggtgcagaaataaggggttggggcgcagagataagaggtcggagtgtggaaataagagatgggggcgcagagatgagatctgggcatggaaataagggatcggggtgcagagataagaggtcggggtgcagaaataagggattggggcacagagataagaggtcagagtgcagaaataagggatggggtacagagataagaggctggggcatggaaataagggattggggtgcagagataagaggtcagggcacagaaataagggattgggggttcttgccccctagaaaagcgggacttgccgctaagagtgaaggagaaggggttgaggggttcttaaccctcctccagaaaagcggagaggggtagagacacggagagaaggggctggggtacttgcccttcccccagaaaagtgggactt

SEQ ID NO: 3762 - DNA, 1595 bp, Artificial sequence
  DNA replication origin
aaagtgaggcgggagacagagggaaaagggcgtgaacagaaagggccggagcgtgcaggggagcacagggcgcgggggcggcactgccgagccgggagcgctgccgcttgggcaggtgccgcggccgctgcccggaggcggcatgtgacgcgcggccgcagctgcccgcgggcggagcgctctcagaccccggagcgcacaccgcggggccatcggtgccatcgcggatctccaggctcctcatcagtccgccggggccgcagcagcgcttctgggaagacgggcgatgaactgaagggcggctccgggcaggggggcacgatcttaaggacagtcgctccctgaacgcggagccggaggagacgaagggaaggtggagcggacgccacccgcgcaccgggcaggcgcggagaccggcgtgggacagccacctggagcgcagctgccaggtagggacggcgcccgccacccaggcgctgggcagagcgggtggcggtagcggctgacctggtttcttgccttatctcgttgcgaaaggaggaaaaagttttcggcgcgggtaggagaggtcttgtgtttggagtccaaagaaggggctgggtagggacgagagaggctgttgatttggggaagatgggggcacttgaattccgacagcgcgatctggtgcggagttggagttctgggactgagggtggggaacgcccgctggcactcaagtgccccgaaagggacgggaatcatgcgagcggtggccgggagagagtcggggacgtcccaccccgctctccctcgcttcgattctctcttcgccactgccggatctgaggctccaaagtgcccgagcatgaggagctactgggctccgggtgtgtttgtgagcgcactcgtgtgttgagcgtttgtctcccatctccccatttggtttcctgtcatttctaagaaggctaaagctggcacccgccaacctcgcagtggggccgcaagttcggattgcatttcagggggcgagaaggcaaatttggcacttcgagtaacacttgggcgaaggtacctagcctagtgcgcatctttactgacccggggagagtctgcactcgcgaggcagcggccgctggactgcaccggttctcctctttggaacacttcctcagcatagcctcctaatagcgaggttaatttttgcgtgtttttaaacggcgggggcgggcggacagttgactccagcagcagaattcacttgtctacttcgcggtgtgcgtgctggaattgagatcctgttctgcatgcttgtgcgtgtgtccgactctccttgcacgcatttggaagtggtagaggcagcagggatttgggaactgcatccatatggataggtttcaagaatgcaaaccttcatttgtctgcaagtgttactggaacctgtccaaaggctgcaaggatatgtcccctcgatccccgccagtgtccgtgtttgcaatgtgaaagggcggccctctttaggacaaaaatgtatttatcaaagcgatgtgtggttaagaacactggttatttcaccatatgctttgcacagacttttcctttctctcttgccctct

SEQ ID NO: 3763 - DNA, 1209 bp, Artificial sequence
  DNA replication origin
tcttcttttttatttaacttttctcttggcaggtccagcagctttgaagatcagagtgcatcttccagctgacgatctcttcggtcggggacaatgcattcgattcgcacggtggagattaaagtccccgagatagaggaaacgtttttcgcgcccaggttcagcgaggagccgcgcgggggcagagggggcggcggcggcgggcggggagccaggcccgagctgcgttctgcgcagccattggtgggcgccgcgctctgcactgagcatgttcgcgccccgccggcccctagccgcagccgcagccgcagcgacggcagccacgggagccgccgcgcattatgcaaagcggcggcagatgcgagcggggccagccgggcgcgcgtcggcctcccctcccagcggctccccccgccgccgcctgactctcccgggagactccctaggcccggacctggggccgaggagggccgggatggcctgagtgcccgcggcgcggcggcgcagcagcgggattgcaccatggggaaccaggatgggaagctgaagaggagcgcaggtgatgctttgcacgaaggcggcggtggcgccgaggatgcgctggggcccagggatgtggaagccacaaagaaggggagcgggggcaagaaggcgctaggcaagcacggcaaggggggagggggcggcggcggcggcggggagtcgggcaagaagaagagcaagtccgactccagagcctcggtgttttccaacctgcggatcaggaagaatctgtccaaggggaaaggcgccggcggctcccgcgaagatgtactggattcccaggccctgcagaccggggagctggacagcgctcactccctgctcaccaagactccagacctcagcctctcggcggacgaggccggcctgtcggataccgagtgtgcggacccttttgaggtgaccggtccagggggtcctgggcctgccgaggctagggtcgggggccggccgatcgccgaggatgtggaaactgcagcaggggcgcaggatggacaaaggaccagctcgggctcggacacggacatctatagcttccattcggctacggagcaagaggatttgctttcagacatccagcaggcgatccgcctgcagcagcagcagcagcagcagctccagctccagctccagcaacagcagcagcagcagcagctccagggcgcc

SEQ ID NO: 3764 - DNA, 1280 bp, Artificial sequence
  DNA replication origin
gaggagggggtatgcccgctccgggtagagggggcggaggaggtatgcccactccgggtagagggggcggagggggtatgcccgctccgggtagagggggaggtgggggtatgcccgctccgggaagtgggggcggagggggtatgcccgctccgggtagagggggtggaggaggtatgcccgctccgggaagagggggaggagggggtatgcccgctccgggaagtgggggcggagggggtatgcccgctccgggaagtgggggcggagggggtatgcccgctccgggtagagggggtggaggaggtatgcccgctccgggaagagggggaggagggggtatgcccgctccgggaagtgggggcggagggggtatgcccgctccgggaagtgggggaggagggggtatgcccgctccgggtagagggggtggaggaggtattcctgctccgggaagagggggaggaaggggtatgcctgccccgggaagagggggcggagggggtattgccgctccgggtagagggggcggaggaggtattcccgctccgggtagagggggcagagggagtatgcctgctccgggtagaggcggcggaggaggtatgcccgctccgggaagaggagggggagggggtggcagcatttctgtaccctgcagaggaggaggttggggaatggctgtactgggcagagtaggcactgtcatgccagggagagggggaggtgggggaggcaccatgcccaggccaggcatggagctggaggactctgtgcaaggcagaggtggtggagatgggatgttacagctgtttttaaaggcagaggaaacagagtgttcgtggctggtttgaaactcggtagaaatagaatggggcggctgtgacccaggctgtccttgcccagcagaccacagaagggatggaggtggtggaggctgtgagatgctctgtgtgggctgatggctgtcgagctggactgatattcgccttggagacacaatcaaagaaatctctgaacagaactttgtctgaggtccactttcagccccaggggggcatggaggacgccctggcagcccatccacaggaggcagtgtcagcaccccgccctcttccgtgggggaagtctgtatcgatttcgcctctaaaatcctatgatgccgtacttccttttcttctaacctgagagcttcgagacagacatcgcctgaggctgtcactccattctcaagcccttgatgaccactggccacctctgtgtccagggcaggatactgc

SEQ ID NO: 3765 - DNA, 1251 bp, Artificial sequence
  DNA replication origin
tatttgtgcatctggtataacagtcacttattccaacttttttgaatttgcttttataggggaggactttttcctgaagatgtatctgtggtgttggtttgatgtagcattttgcctttgattctggatgaatacagcagtgtagtctctgtatgatttttttcatctgtaagtgtcagtagtgcttgtaatttcctcagtggcttagggtgtggttgttagtggaggtcatggtaaagttttgctggtgatgaggatgctaggtgggccagtcctcaatcactggcaggtgcttgaggtggcagtggcaggctgagcatgcctgtcctttggtcttagggtggtgtatgctggccctgatattagcaggttcagtcaggccagttggacctccaggtggcttgcttgggtgccagcagtggaagaagtgggctgggtggctgggagggtccttaggctcctaggcagtgggcatcgtgctgagggacgcagtagtagtggtgagacaagccttaggctcccaagtggtttgcgctggtgttgcagtggctatgacaggccacgcggggcagtctcaaggcttgcaggtggcatgggtgagtggatggtgtgggtgggtgggtgctagctgtggtgttagcagtaggttgggtgggtttgtcctcaggccctcagaaggagtgctcaggtgtcaatggtggtgaatggggcagggccattcccaagcctctgggtggtggtcttgggctctgggggagtgggatgggttttaacatggttaaatggtcctgttctctggcccctaggtggtacgtgtgggtgctggctgtggtaagtaggataggggtggaccccaggtcccccctacccctggcagaatagctggatgggggtggcagcgactgtgtggtggccctgaggccctgctgctggggagggtggagttaccatggcagcagttgtaaacaggtgactgggggagcttgtgctgtggctccatatggcggctgcaagaggggtgccccatcctcagggtgctcttaaatgcacagaggccttgttgctaggggcagcagggtcgttggcaaaggcttgtgctttggccctggctgcggttggaggatatcaggggagccccggggatgtggagatgcaggggctattgggccccaggccaggatgcagtctggtgggggctgacatttcaaaacagtgccctcctgtaactgcttgtgacacagcaggtgagtg

SEQ ID NO: 3766 - DNA, 973 bp, Artificial sequence
  DNA replication origin
ggcggcccaggggagcgggcgcgagtggcggctgccggagccgcctgtgcacgggcggcggcgaggcgagggtggcggtcgcctgagcagctagagccggggcggcgcggaatccgcatccgccgcgagtgtgatgaagctaccctgcctcgctgctccgcttgccgccagctgacaccgcctgcacccagcccgcccgggaggggagacgccgcggggccgtgaccttggcggaggaggtaaatagggaaggcgggcggggaggaggcagcgccacccagagccctcccggcccccggcccgcacccagccctcgctctgcgcagcgggagcgtccgcgggcgcagggcggccgcccccgggagccccgcgccggggctgggctacgggcgccgcgcgcaccccgcggtccacggtgctgaaactgctgcccggctccggcggccgccgcggcgcggggcacaggctcgcctgccatttgctgctgccgtgagagcgagcaaggggagcaggggcttgcctgttttctcctctttggctggttgctctggaggcttctgcagttaggcttttacccacggtgacccgggtaaaatggcctgaaggcttgacctcccactagttcttgttgccgggacatattctggtgtcttcttgcaaaaattaggcaggattacctccggacttccgaagcgaagtggggagaaaggagagcagccggtggctggcagcgcaggcaggtgaaagtaggcgaagcatatactccggctctgtgtgggagacccgggggaatagagaggaagcccgtgcgctggagaatgacaccgggaatgggcctctctgatgggctgcaggtggggacactagacagatacctaggagaaagtgtgctaacccgccccccactcccccaccgcatcccccaggtgttgcctttccaccctttggggaaaacatcaccaagttcagatgc

SEQ ID NO: 3767 - DNA, 1703 bp, Artificial sequence
  DNA replication origin
ggtgcaggcggtgtcagctggcggcaagcggagcagcgaggcagggtagcttcatcacactcgcggcggatgcggattccgcgccgccccggctctagctgctcaggcgaccgccaccctcgcctcgccgccgcccgtgcacaggcggctccggcagccgccactcgcgcccgctcccctgggccgcctcgctggctctctccctcctccgcttcttctcccggggactgggaccagccgagcgcgcgcgggagtcgagacgcccggcccgtgcgcgcgactgggaggagggaggaggggacagtcacgtgggacaggggcgtccgaaggtgccggctcggatgggctcggctcggccgccgccacaccgcccgggcctcccgggcctccccggcctcccgccctcgcgcccctcgggaggctgtagtcctgcccccggcgcggccagcccgcgctcccgcacaccccgcccgctcgcccgcgcgtgtgtacgtgcgccggaggcctggagagaccggagtttaacgcccagtgtaagccggaaagggaggaaggctgtgcgatgggtgggtgggtggtaggtgggtgggtggtctagtgaatggatggacagatggacggacggatgcacggatgaatggatggatggagccccgtgcaaaccaaggtttcatcacgtgcctaacgactccgctgaaagtcccagggaagcagatgatttattattattattattattattattattattattattattattattattatgcttaaataacagagtagagagatattgagacaccctaggaatgaaggaaatggccaggaccaaatgaatcattcatccccgtttgcctgcggttttcacagcttcttcctaagttggagaaatgggaaacgatttgaaagctgccaaccggaggtgaaaatcttgccacttgtgaaactgaaggaacatccccaaggcctggcttctccttttaacagaaggtgctcagaggaactttcctcttgcccactgccctcatcctctagcaattttcaaagagcttctgaggtgctgatcctcctagctatagtcttcgtactgctgccacaaattcttctgtaaggattagaatgacataaaggagacagatcacttttgtctcggtggtagtaaagcaacctgtgcctctggctttcagggggaagggctgggccgctgtaaatctagttttccttcctctcctgggccagctgtggaggagagggagggagagaaggagaagataatcaagatcagctgtaaatctagttttccttcctctactgggccaggtgtggaggagagggagggacagaaggagaagataatcaaggtcagcctttcctgaccccttggtctaagcagactagaccttattggagataacacttctactcaaacaggggtccatgtggaccaatgtattaccccagccccatgcaggtcttgtcaggtttctctcaaggaacaaatatttatctaacctagcccctgttccaagtactacaggagaaatatcattgtcccaaactacacacactctagtctgacctgtctcccactccaactccccacatctttccactgtagcctctggaacttagaatcttcttcagcaaaattctcttcgttttcgacttctcgaaatatttctttaacgtttttgctctcg

SEQ ID NO: 3768 - DNA, 804 bp, Artificial sequence
  DNA replication origin
aatgaaactgtctcattccctagaaagcattcaaaggtttacaagtactaatgagaatttttttttacacattgttattttggttttctactctcattttaggaaacaaatagtagtacatgaatctaatctcatcactccctccaactttcacgagttaatcactttttttcttgaatctcttgactctacaggccctcgtctctttcctcaaagtgtaaaaagccgtggtttcgtgccttgttgagtgatcttaggaggtaaaaacaaataagaaaggaggcgggccggggtttggggtcaacgtggggggcagatgagagaccacaggaatggagtcctggacagcgtggggcgggaggggacggaggaagaggaaggcacccgccatgcggctggggtcgggcagcgttgaggaggcgagcggggagcggggcggtgtagggcggggggcgcggggccgagcgggaagcggtgcggggcgggctggggggcggacgcacggagcgggcagcggggtggggagtggaagtttgcagaggggaggctgccttctcccagtccaactcaccgaagaggctgccgctaaacccgtcccacacgcagcccacggtgtcccacacccagccgttcctcaggcaggacacgaaggtaaaggtgaccccgaagagggacaccagcaggtcgctgaggctgatgttgaccaggaggaggtgagtgggagtgcggagccgctggaacttgtagtagaggacgagcaccagcaggttgttgccgacgcccagcagcccaatggagcccagc

SEQ ID NO: 3769 - DNA, 1702 bp, Artificial sequence
  DNA replication origin
tccagggtgcccggctccagatcagttagcacagcgcggggcacatacctgctacctgagcggggcggaagggcatcagcgaggggagggccgctgtgcccaggagggcagtgggggaaggacgggggtctcaccgctggcctcattgtagtatacgttgatacgcttcagcagcaggtccctgtccccgcggtaggtgccagcggagtcgatggcatgttcatcagagatcacctcccagaactgcgagagacaagaggggccagaaaagccaggactgagtcagcacagagagcaggaggcgccccagcccctctcccacctccacccccacccccaggccaccgggtccctgagggtccgccctggccgcctggccaggctcccagctccaccgggtccggggcagggagcccaggggcggcaatgcaggggcgccgcccccgccactgccagcatcttccccggccacccggcaggtccgcgctggaccctcaagggcccccccaccgccaaccttggcgccgatccggttcccgcactgccccgtctgcgtgagcacaatctccctcatggccaaggcgggactagggtggcaggagaaaagcgagaaggaggagcagacagacgcgcaatgacagggcccgcgctccaccaacgctgaaatagccccgcgcccacctcccccagcctcggattgggctcccagaataagcaacagctttacttccacacaggtgtacccacctgtgaatcccttggcgtgtaatgtttgttggagaggtcaggtgaccttgccgtggtcctttccacgttggggaaagctggtcagctggagaacttcctcccacgtctttagtaagactaaatccctagctgagctgaaactgaattttcctcccctgtgggaggggaagcctcttgtttccatattcacagattgcctttgcacctgtcctagattgatgacatattttcgtaattgatgagtcctttcatctattaggagatctgtggttaggaaaggcctcccatatgactcaacaggacttaattataagttttcctttggagcagttcaaaccctcagtaagctgtgggtgtcagggatagtcaggcctctgacttagctagagtcttctttagagtttgattagccctttcacctttccagaggactgtggcctccatgcagagtgaaggtgatattggattcctaaagctgaggataggtgttgggatacgtctgctgtgaaagatgggccactgtcacttttcaggcttttagatgacccaaactgaggaattatttcttctggtaaacactttttcagatagggtggggaatgcctcgatctaaccagcgaaggtatcagtgagcattagcaaatatttgaatcccctgcagaaaggcttctgagtaaattagagttgccagtcctcacctggataggttccttaatgttggacaggtttaactggaggagtaaaaaattgctggctgtttggttatttcagccacagagcttacagggctgagtcatctgttgtagtgtcttgaaaagatttatccccgtaaacgaatgagacattaactgaaataaagaatccttctaggatgaaacgaatcatgaaagagctgaattattttcctgtgattggtacttggcattagtaatttattaccatcagtctgccagcc

SEQ ID NO: 3770 - DNA, 1059 bp, Artificial sequence
  DNA replication origin
ccagctgaccagctttccccaacgtggaaaggaccacggcaaggtcacctgacctctccaacaaacattacacgccaagggattcacaggtgggtacacctgtgtggaagtaaagctgttgcttattctgggagcccaatccgaggctgggggaggtgggcgcggggctatttcagcgttggtggagcgcgggccctgtcattgcgcgtctgtctgctcctccttctcgcttttctcctgccaccctagtcccgccttggccatgagggagattgtgctcacgcagacggggcagtgcgggaaccggatcggcgccaaggttggcggtgggggggcccttgagggtccagcgcggacctgccgggtggccggggaagatgctggcagtggcgggggcggcgcccctgcattgccgcccctgggctccctgccccggacccggtggagctgggagcctggccaggcggccagggcggaccctcagggacccggtggcctgggggtgggggtggaggtgggagaggggctggggcgcctcctgctctctgtgctgactcagtcctggcttttctggcccctcttgtctctcgcagttctgggaggtgatctctgatgaacatgccatcgactccgctggcacctaccgcggggacagggacctgctgctgaagcgtatcaacgtatactacaatgaggccagcggtgagacccccgtccttcccccactgccctcctgggcacagcggccctcccctcgctgatgcccttccgccccgctcaggtagcaggtatgtgccccgcgctgtgctaactgatctggagccgggcaccctggactctgtgcgctccgggcccttcggccagatcttcaggccggagaacttcatcttgggtgagttgtgggtaaagactggggtgcggctccttagccaggtagctcaaagtcaaggagtgccccaaggtcatggctgtgggaactgtggagccagggcccctcaacaccctcttatcctctgagtcgctctatctccctctcctcaacgggctttgggaggaggg

SEQ ID NO: 3771 - DNA, 1283 bp, Artificial sequence
  DNA replication origin
ccccacccccgccgccgccgccgccccgggagccggcccgggtcccagtaggtgccgcaaggagccggcgagcggagcgcccgctcgggaccgcagccgccgggcgacgtcgccgccgcaccgggcacttctgtctccccggagcaggttcctttccctccctgtcccctctcgtcccccttctccccgtccgtccccctccgcccccgcccccgcccccgcccgcacctcgccctccctccttccgccccgcgcctcccgcgatcgccccctcccgcccggccgcgctcccagctggcgctcagcaccccgcgctccccgcgcccgctcgctcctccagctcctccagctcagtctccagctccacctccggctcccgctgggcctcccgctcgccctccgcgcccggctccccgcgcgcccgtcccgagtccgctgctcgccggcggccgcccggtcatgtcaggatggagatccggcagcacgagtggctctcggcctccccccatgagggcttcgagcagatgaggctcaaaagccgccccaaggagccctccccaagcctgacccgagtgggcgcgaacttctacagcagcgtcaagcagcaggactacagcgccagcgtctggcttcggaggaaagacaagctggagcacgtaagggcgactcgctcccgggggcctcggccaggcacctgccgcatgcaccctccccgtggtggtggcatgagcgcgcgcggggcgcggggggcaggcgaggggatcctggcaggcgccgacgtcctaggtcggattcgggggcttctctgcctgcagtttcttgccttaatgaccgggctgcggggaggggagggcaggttccctttcaggctcttggtccctgccgacccgacctgcccacctgcgtctcccggtagggttcatttgcacggggttctggaggtgcctgtgcagagtgagcacgaaggggaagtgccaccagcgtggctccgagcaacctggcgttgcatggtagtgggctttagagcggcgtttgcccgcgtctttgggggctgttttactcagtccaaaaactagcaaattaacgaatgagtaaagttggcgccgctagcgaccagcgtggacccgcgcacaagccattagagttttttgcagagtgtccgctgggatgagcagttggtgatcctctctacttgagcccaactagggagagatttgcgcgttgcaaggagaaaggctaaaagcgagcggatcgtcgggctccccagaaatcctcccctctgg

SEQ ID NO: 3772 - DNA, 1331 bp, Artificial sequence
  DNA replication origin
ggcgcggggagcgcggggtgctgagcgccagctgggagcgcggccgggcgggagggggcgatcgcgggaggcgcggggcggaaggagggagggcgaggtgcgggcgggggcgggggcgggggcggagggggacggacggggagaagggggacgagaggggacagggagggaaaggaacctgctccggggagacagaagtgcccggtgcggcggcgacgtcgcccggcggctgcggtcccgagcgggcgctccgctcgccggctccttgcggcacctactgggacccgggccggctcccggggcggcggcggcggcgggggtggggtgcggtgggaggggccgcggctggcccagccagcccgcgcctgcaggttggtgcagtgaggagccgccgccgcccctcccgccgcgcccaggcccgggcggccgcgctcccgctccgcacccgcctttcccgagcaggctacacctctccctggcgcatctttactggaaagccggcaggcgaggggagaagtgagcgccgtctccgcgcctcctcggtcctgctggctgagcgcggggatggctccggagggagacactcaggaaaccacctccgcccttcccccatctctatccagcggcgccccctcaccctgcccccggctcgcttgggctgcgccttcccccattctgaaagttcactaacttcccaccccaagggacttagagcagagggtgcccagcattcccccctgaaaatagccgagagacatgtgttttctggagccgtacacgctactttcatccgatggtgtggcgatgcaaatacgcccgggggcagtagcccctcgggcaggcacgcgggaccggttgctccccagccctcggtgtccacctagaaccgggctccccgggccgcacccattccgatcctgggagggtgatccagggctcctctgcaacgctccgcttgtgcggtgactgttccttaggtggacgtggcccaactgctgtgcatttgtttcttttctctgtttctaggcccctagggtccaggcttttccttcggggcccagccaagcgtgatgattattaggaatagggtggcttgttcgcgattaaatcttcaatctcttcatcttttgctatctttggagtcaacctctcgaaacattttttggttttatctaaatgctaaacagctggtgttcagggtgtctcgtgtctggttaaaagcttgggaagtgtatggaagctggagaggtatacaggggattttagagggtgttgccaagggtaaactgaaggctctctagccctcggcagaactgccctacttgaatgac

SEQ ID NO: 3773 - DNA, 966 bp, Artificial sequence
  DNA replication origin
gagctgtggactggggaggccgcagtgaggcgagagctagctgggcgtggagagtccgctgtgaggccgaggccgggcccgtgcaggccttcgagaggcaggaggccgggcctgcaaaggccgactggagatcaagttctgcgcctgaagaggctgccaaaagtcaaaagcggggcctgggaaggccgccgagagccatgagctgggctgggccgaaagaggccactgggaggcaggaggagctgggcctggagaggctgactcgaggaagttttgcacctggagaggccgccgagaggacagagctgggcccggggaggccaacttgctgctcttccaggcccacttccaggccgacttgaggacgacttgggcctgcagaggccgccaggaggcccaagctgggcctagaggagcccaccgaccggaggccgtttggggcctgcagatgccatcggagggcaggagctgagcctggagaggccaccgtgaggcctgagctgggcctagggagcttggcttagggaagttgtgggcctaccagggccgctgggagctgggcaggagctgagtccaaagacgttgttgggacctggagtcgggccagagtccggcctggagacgcagccgggaggaagagctgggcccggagaggacgccgggaggctgccaagtgggtctgagaggccgacttgaggaggcccggcctctgcctcccgcatggcccagctgttcctcctggctgcatctcccgcctcccagcaaacaagctcttttggctcagctcccgccggcctttgtagaccccgaagtttctgcaaccaagctcttcagacccacatcccttctcccagtgactgaacagtcccagctccggctggagaagagcgtctgcaaaacccgctgttgcctcccaggggagtctccaggcccagctctcgccccaccgcgacctcccaggcccaa

SEQ ID NO: 3774 - DNA, 1198 bp, Artificial sequence
  DNA replication origin
tgccaagtgggtctgagaggccgacttgaggaggcccggcctctgcctcccgcatggcccagctgttcctcctggctgcatctcccgcctcccagcaaacaagctcttttggctcagctcccgccggcctttgtagaccccgaagtttctgcaaccaagctcttcagacccacatcccttctcccagtgactgaacagtcccagctccggctggagaagagcgtctgcaaaacccgctgttgcctcccaggggagtctccaggcccagctctcgccccaccgcgacctcccaggcccaagtccctgcctacctcccagcagcccgcgtgcgaccctgctcctccctcacggtggcctgttgaggcaagggctcacgctgacctctgtccgcgtgggaggagccggtgtgaggcaaggggctcacgcctctgggcagggtgccagaggcatgagttgggcatcaacaggccaccgtgagggaggagctgggccgcacgcgggctgctgggaggcaggcagggacttggccccaggaggccgccgtgggggcaagagctgggcctggagaggcacctgggaggcaagggcggggcctgcagaggctgttctccaaccagtgctgggcctgtacaggccaccgggaggcaggaggtgggccctcagagcttggctgcagaaagttcggggcctagaaaggcggttgggagctgggcagttgagccaaaagagcttgcttacttgctgggaggcagggccgggagaggccgacttcaggacaacttgggcctgcagcagtcgctgggatggaggcccaagcagtggcatgcagcagtggcatggaggagcccaccgaccggagaccatttggggcctggagatgccatcggagggcagcagctcatcctggagaggccaccgtgaggcctgacctgggcctcgggagcttggcttgaggaagctgtgggccgaccaatgccgccaggagatgggtaggcactgagtccaaagaggttgttgagaggcaggagtcgggcctggaaacgcaaccaggaagaagagctgggcccggagaggacgcccggaggatgcaagtgggtctggagaggccgacttgaggaggttctgggcccggagaggccgccggaagggaaaaactgggcctggaaaggccgttgtgaggaatgagccccatgggcct

SEQ ID NO: 3775 - DNA, 1443 bp, Artificial sequence
  DNA replication origin
tgagttgggcctaaatgggccactgtgagggaggagctgtgcctgttgaggctgctggcaggcaggcagaaattcggcctggggcagctgccatgaggcaagagctgggcctggaaaaagcccctgggaggcaagagcagggcctgcagaggctgttctcaagtcaaagctgggccggttcatgccaccgggaagcagaaggtgggcctggagagtttgacttgaggaagttttgggcctacattggccgccatgagctggacaggaactgggccaaaaaaggctgttgtgaggcagcagttgtgcctgtagacccagccaagaggaagaggtgggcctggagaagcccccatgaggcagaggttgggcctctagacgctgacaggaggcaggagctgggcctggagaggccaacttgaggagattttgggccttcataggccaccaggaggcagcagttgggactagagagtctgacttgagtaagttttgggcccggagatgacgtcctgggacaggagttgggcctggagaggccaccgtgaggcataagctggatgtagagaggccagtgtgaggcaagacctgggcctgtctaggctgctgggagacaggcaggaatctggccagggaaggttgccatgagacaaaagttgggcctggaaaggcccttgtgaagcatgagcttggcctaaagaagccactgggtggcaggagctgggtgtgtagaagctgctgaaaggttgggagcttggcttggggggtccacagtgaggcagatgctgggcctgaagaatctgctgtgagacagatgttgggactgtagaggccgacgggaggcagaggctgggcctggaggggccaccaagatgcaggagctgggcctggagaggctgcaaagaagcatgagctgggcctggtgaggtcgacttgagaaagttcagggcctggagagaaggctgggaggcaggagctgggtctaaagaggccattgtaacgatggagctgtgcctgtggaggctgttgtgaggcagtagcctcatctgcggagactgccgtgacgtagggtatgggcctaaataggccattgtgagtcatgagcttggtctgtagaggctgactggagaaagttctgggcctggagaggctgccaggaggtaggagctgggccaaaagatgtaagcacatttgcatttattaggcactttatttccattattacactgtaatatataataaaataattatagaactcaccataatgtagaatcagtgggcgtgttaagcttgttttcctgcaactggatggtcccacctgagcgtgatgggagaaagtgacagatcaataggtattagattctcataaggacagcgcaacctagatccctcacatgcacagttcacaacagggtgcgttctcctatgagaatctaatgctgctgc

SEQ ID NO: 3776 - DNA, 1132 bp, Artificial sequence
  DNA replication origin
cctgcgcactaggcagtcggtctttgccgttaccgctatgtgtggggcgtgtgtggaataacgttattgcccagcggagctgagggccccggagctcgaccgcagcggcagcgacgacaacagcggcgacgacgacgacgacgaggtggggggaggacggcgtgcgagagactcacgggacgcgacgcgccccgcctcccccgtccggtccctctctccacggtaaggggtaagtgatgcgatcggctgctcggtgtaggcgccgcagccgcagccaccgccgcggctgctttccacatcctgctcctcgggtttgcggcgaggactcgggcgccgcccgccgcggggcgggggtgcggggctggaccgcgaagggggcgcttcccgggtgctccgcgcggcgccgccacccccaccctctgcccgcctgggacccggggcttgacgggaccacccttcccatcccccacccgccgccccccggagctccagtcctgcggccccccggctttcccgagccccttgctgccgcctccgcatcccctaagtgcattgaatcattttcagctttcgactggctttgtgcagccctcccccctccgccgtagcagtttgcgaggggtgcgggcggagcattggagggaatggctgcgctgccgctggggaagggatttttcccccattggagcagctccccgggccaatcccttttgtgtgattggttttggggtgtgaggcggttggcgaggtcaggcgagcaaccttttggacgcgttgggagggcgtggaagacgcggtgtcatgcaccctgcctggcgactgcaccccgtggaggctctggctctgtagtaaacccgggggaggagagagtggcttcctgtcggcttcattgtcctaggattcagatgtagggttttggtacgtttcgcttccattttatgcaagcgatgaaaaaataacatttgcagctgcctaacacagggcgggaagacgtgggatttgtatactaagtcacagaatctctgttcggtggtgtttcgtagagttttatttatttatttatttatttatttatttattttgaggaatgtaaggaagacagggactatgcctgctggagtccaagcactgc

SEQ ID NO: 3777 - DNA, 1490 bp, Artificial sequence
  DNA replication origin
tccccagcggcagcgcagccattccctccaatgctccgcccgcacccctcgcaaactgctacggcggaggggggagggctgcacaaagccagtcgaaagctgaaaatgattcaatgcacttaggggatgcggaggcggcagcaaggggctcgggaaagccggggggccgcaggactggagctccggggggcggcgggtgggggatgggaagggtggtcccgtcaagccccgggtcccaggcgggcagagggtgggggtggcggcgccgcgcggagcacccgggaagcgcccccttcgcggtccagccccgcacccccgccccgcggcgggcggcgcccgagtcctcgccgcaaacccgaggagcaggatgtggaaagcagccgcggcggtggctgcggctgcggcgcctacaccgagcagccgatcgcatcacttaccccttaccgtggagagagggaccggacgggggaggcggggcgcgtcgcgtcccgtgagtctctcgcacgccgtcctccccccacctcgtcgtcgtcgtcgtcgccgctgttgtcgtcgctgccgctgcggtcgagctccggggccctcagctccgctgggcaataacgttattccacacacgccccacacatagcggtaacggcaaagaccgactgcctagtgcgcaggcgcctcgggaaagggcgaggagccggaccctatcccctcctgcccagttccaacgatcccttactgcgcaggcgccacacacagacaatgaaaaggggttgtgcgagggtctcacccacacgcttttccagcttgcccactgcgcaggcgtgccccgaaagaccagcttgaacaatgaagaggacctcggcgttaggtgggaccgcaaccaacaaggactacagttcccagcgggcagagcgccaactccaagtgaaggtccggttgctgggcatgctaggagttgtagtgtcggccgcctttacaatctaggctgtttggaagatttagagcttctatttcttgaagatttattcgaccgttttaaaaaatctcgcaactgaagcagggttcagagtttactatctgcgtccttgagtagcctggggatcaactgctgcatattagcaaatttcgaagcgtcaaggccttcagtgagccctttctgtcatttgggtggtccaggcagctgaagagtgggatggaggcgggactaaaccaggctgggctggaggaaaagggcggggcctgcaagcctgtctcttggcagcaggctctggcagccaaaccgtccaagctagcgcctggagcgcagtggtttctgggaattgtagtgtaactggaaggccctgaggattgtcgagcttgcaggttctgaacgtgaggactacaactcccgacgtgcaaagcgagggccagtgggtgggaagagcccccaagagctctgtgcgggattctaggctcccctgtgacagccgcggcaggaagcaggcgggcgctccccg

SEQ ID NO: 3778 - DNA, 743 bp, Artificial sequence
  DNA replication origin
agcatttagaatcggggaaaaatctaccttctgtttagcagttgctcttttctgaagcagaaaattatctctagggatgacttagtaatagggtaccccattgccatgtgggtcagggattgggggaatgtccggatcctgccaatgcacctctgtaaaaggtggcattcagcctgggaggagaggagctggcagggcaggccgcccccagacacgcacaggcccaagctctgtcctgcagcccctcccggacacgcacaggccctgagccctgtcctacagcccctctcctgttgtcatttgctatcagggcagttctaccgccgccactaagctttgcttctcccaacacaaccaagagacggacatatagcagtgaatactgtctggatggtttagcatgtctggggcgggggtctttctattgcctgcaggggtttccgagtctacccagcaggtgctcaccaggagtgggggctgtgactgggacccatggcctgtggtgtgaggggtgaggggccactgtgtactgtaaccgggagcagcctggaagaaggcccctgctcccccttccctccggcgcctcttactcaggaaatcttaatgtgggaaggatgtgtatggggctccataagcaacactgacccagtcctggggagagacaaacccctcgtccgctctcagatcatcctcagagatcctctggggcctctgagttgaatcccaggctctcccctgctttc

SEQ ID NO: 3779 - DNA, 996 bp, Artificial sequence
  DNA replication origin
tggatggatggatggatggatggatgggtgggatggatggatggataggtgggatgggtgggatggatggatggatgggtggatggatggatggataggtgggatggatgggtgggtgggatggatgggtggatgggtgggatggatggatggatgggtggtatggatggatgggtgtgatggatggatggatgggtgggatggatggatggatgggtgggatggatggatgggtgggatggatggatggatggatgggtgggatggatgaatgggggatggatggatgggggatggatggatggatgggtgggatggatggatgggtgggatggatggatggatggatgggtgggatggatggatggatggatggatgggtggggtggatggatgggtggatggatggatgggtgggatggatggatgggtgggtgggatgggatgggatgggagaggttcagaaggcctagagggctcatctgtggaaccaggagactgagctgtggggatggtgactaggggtggtcccacccactgagagggtcacagagagaggagcattagaaggtgactccagtgtgtcaggtggtgagtttgaggtgggcttggaaatgcaagagagaggcccgaggctgagatcaagtgctcaggatccttggcctctccacttggagtcatgagtgtagattttaaaaatcatgcaggcggaacatttccagtcaggagagcactgagcccagccctgggtcacaccagcatttgaaggtctgatggaggaggaagagggaccaaaggggagtgagagacctgtacagagtctaagaaggagagtgatgagtcgcactgtgggccttgctctgtggccttggtggcttaggtaatcctggctctgccttaccttgtgtgcgcttgggcaaatgatcgcttctctgcaccttgcttctctcatgcataaaatgcagatgataaagtaacgtgtagtattgttatgag

SEQ ID NO: 3780 - DNA, 1268 bp, Artificial sequence
  DNA replication origin
agagactcacttgtaaaaaaaacatgctcaactcaaacaggacactgaggcatgaagagaaatggccaatattgcagatgagaagcctgggagggcttgcgcctgcttagacatggctcatgatcgtcgtatgctgagcacttttatgtcgggcactagacttactgtttatttagcactcacaattccatgaggcaggaactaattattatgccactttaaggttaaggaaactgaggcacagacaacatgaatcattgattcaaagtcactcagcgggcaagctgggatgggaaaggatgagtgggtgcttttctggccagggccaggggcggggccttcccacttcggggccgcactgcaaaggccaatgcgtgtctggaaactgcaagctgtgcagtgtggctgcaccagaggctgcaggctgctcagaggaaggcgacgctggactctgtagccaaaccagcaaatatggacttcgtcctgcaggcaatggcagtgccatttaacagacagaggatggcaggagggatcggcctggcgtagaagagacgttctggggtcagggcgagtccgaggtacctgtggaacacgcacccaccaggcagctatgcaacttggggcttaggaagggccgagctggagctctagctgggtgggccaaacctgctgggaggcgagaccatgaacgtgggggcaagatttgcctgggaagggttggcaaagattgtcagtgtggggagtttgttaaaaatgcagctctccgggcccgcacgacccccctagctgagaagctcttctgcagtgagagggaagggctcgccccaggataggggttaaggaacctccgccttcaatggctggcagtggactggaatccggcaagacactgagagtgggatcctggagggaggaaaactgggagacggaggtccagggaggagaggggtcagggcggagtggccggtttgtgggaaatgccacctggtggcggagcgccctgcggagcctcctggctggggcagaagccagatttcaggggctggaagagaaagcctcttctggtgaggggctgggctggcggggaggtcgcgagacggggtgcggagggtgggagccaccgaagccgctggggaggaggcactggaggagagaggggcaatcttcacggcagaggacggcggacttcccaagggaggagggcgccttaggcagaagactgagaccctccccccgaggcaagagtggaggcgggagcaggggcgggt

SEQ ID NO: 3781 - DNA, 1205 bp, Artificial sequence
  DNA replication origin
cggggccgccaccgccgccgccgccgttgcaggtaacagccaccgcccccaactctagccccctccccgcctggcctccactccctccgggccccgggccccggtccgccctccctgcctccctcaggcgggggatggcggcggggtggggtgaggcgggggcttctgggttgtcaccgcgccgggggcgtgggcgggggctgggtcaccggaggcttcgggtgtgggtgtggaggccgggggatgcccagcgcggttgacaccgacaccccccgctttccggggaaagctggggggcggcggtgcgcagcgggccgggggaggggtgttcccggcctagcggtaccgtctgtgtctgggctgccccggcccggcgcctgctgtctgcgcaactctcgctccttcccctcgcccctccccgcccgggccgcgcggcgtggggagggggcgcccgcctggaccgggggcggcggcgaggttatataacgcgtggagcgccggtgtcagtgtgtttgggttggggggagggagccgtctgccgcgcgccctggcgctgaggctgtctgcgcgtggggtggggtgaaggcgaggatgcacaggcgtccccggggtctccttccttcccccacccttccccgccactggcgcgcaggaaaagacggcactggtggggtgggggggggggtgtgtgtgtgggaggtgggtaacgtgcttgtctgtgtttttaatagtagtggggttttgatccgcttgggagttgtgtgctaagaatagaaatgtgcggaagatgctgggtttggctgatccagtgatgctgtcgctgctggcggcggcggcagctctggctgcaagtaaacagaccagcctcttccttgtccacctcctccggcgcatcggtccgcatcagccatgatgccggtggggcccttcagagcccaaagttgaagcctagctggttgctgtgttgaccctgacgccgaggcggggtcaccatcccttgtttgggatttcccgggaatctacagttagcctagagataaagaatctcgttggggccaggtttttccaataccggtatttactgtttatgttctgaaagcagaggaaatgcttacccacaagtcaaagctgggatgctcacatttcttccatcaaaataatgttgttatgaaaataaaaccaactcatttcaccaatgtggcatt

SEQ ID NO: 3782 - DNA, 1243 bp, Artificial sequence
  DNA replication origin
gccgccgccgatcggttctcgccgtcgccgcggggcttgttgttgactttgaggaaaactcctgacgtcaggggctggctctcggcgactggcgggagcggcttccccgcgtccccggccctgcccgccgcctctgctcccctccctgcccggccctcgtcctcaggcttccccgcgcccccaaaccagcggtgccccgcgccccctctcctctcgcgagaacatccccctagccagccagagccgggagcgggggcagtcgctcccgggcgggaagttctgggtttccccctcgcccgcgtggcccttggcgggcacccgaggcccgggagcggaggctcctcgcccagccgcttcctcggcgcatccgcccacccgccctggccgcggacgcgcgcgccgccaggccccgggcgtctcctccagtccgccgcggccccttggggagatgggcccggcgcgagggctcgcacctggaagcccacgaagtgggcggtgcccaatgaggtagggaccggagagcgcggagcagtccagaagccgaccccaccccctgcacctcggggaagagggaacccgggtcagcccgtagcaagaatcattcctgactatcccaggagaccacggcagaccaaaaacacctctctgaacagccttccgcaccgctcgctgcaagcattcgtccacacacggtacacagattgcgggcggatcgtaattcactcttgaaatcacaccctttttagggatattcgttttcaatgactttgggaaagccacgaggtactacatttactacgaagagaccgtttctttattttgaagtcagtgactcctgagactgcattggggacaacttttttgcacaatgaccatattttaccatgcagcgcacttcagaaaattataaaagtttacaagttttatcgcttctggaaacacctgggcagcatccctattatcccgccacgtggctctagccttgttgatgtacctgttactttctcccactgcaacatttttgttaatgtctgtggcttctttctgcagaagagttcctcctcctgacatgcacttcattctctgcttttctatgtcttgacaactctcttatggtagtcattttcttatactgtagccccctggtatttatgtactgtgtggtattaatatttatacttccaggttcacatcttttatgaactgtgcatctgttgggattgtggacaggagtaggaaacca

SEQ ID NO: 3783 - DNA, 939 bp, Artificial sequence
  DNA replication origin
tcccgcgcgttccaatcgcaggcagcaactgttggggtgggcggggctcgggcgggcggggatccggagcgaagcggcgcggggcggagtcctcgggcgcagcggcggtggcagcagcggcgcccctctgggtgacttggccgtgagaaagtgaaaggagcccgcaggcggcggcgacagctgcgctgggaggggcttgtttccaggctcagaggccccgcgcactctgcgggtgcggagcgagcttttcggtgtgcactgtgacaaccacaaacacacttttgaacgtagtggggcttggctgctgcgagttacgcaggtatcctggagaggcagggcacccggggacacggatgactcgaggccgacttcgggtggctctctctgctccttcctgtgggggtgaagacgcccgggtcctcgccggcccgtgcgcaggggagcgggaccgaggagcgctctcgctccgtcctgcggcgtcccgcgcccaggtgcacatcggggagctggggacgcaggcgactcaggcagtttctgggagtcgttcttacgtcatcatgtcacgggcagaacagggcagagcgcccgcctttctcgcaaaaccctcctgtcccttgtgtacttacactgttacaagtaaagacttccccaagtgaccaaattttagagcattacagtaaaattggtacttgcagatgcctcagcttgattccttaattgatacgtatctagccacaactttaaactaccgagggacgatgtaagactgctgtgtcgcttttctttccttcaaataaacttttactcggtacctgttcttggcaattagactgcgttaatcacagccacaaagacgtggaaatgtctgccgtcaagaaattggaaatcgtatcgaggcaagaattacaagtaaaaagttgaataacaagtggtggggga

SEQ ID NO: 3784 - DNA, 762 bp, Artificial sequence
  DNA replication origin
cgagggagcgagcgcggagccgccgggccgggtgggggggcgggggcggggggggggcgggcgcgggggagggggaggggagggggcgggaggacgcaccacgcacgcacgcggcggcgccggccagatgttccccccaccctcagtccgcccctctccttcccctgcctccctccctccgggcgttgggcttctgcgattgaccgaaagcggctggaccggcgctccccgcccgcccccagccctcagactcctccaatgggaaggcggctcttcgggaaggcggagggggtggtgggcagtcgtcggactgacaagggggcccagccaatgggggtggcgagccgtagctgccctcccgcgcgttccaatcgcaggcagcaactgttggggtgggcggggctcgggcgggcggggatccggagcgaagcggcgcggggcggagtcctcgggcgcagcggcggtggcagcagcggcgcccctctgggtgacttggccgtgagaaagtgaaaggagcccgcaggcggcggcgacagctgcgctgggaggggcttgtttccaggctcagaggccccgcgcactctgcgggtgcggagcgagcttttcggtgtgcactgtgacaaccacaaacacacttttgaacgtagtggggcttggctgctgcgagttacgcaggtatcctggagaggcagggcacccggggacacggatgactcgaggccgacttcgggtggctctctctgctccttcctgtgggggtga

SEQ ID NO: 3785 - DNA, 1185 bp, Artificial sequence
  DNA replication origin
ccccggcgggcggggggcgccagctgtgcggccccggccggctgggcggcgcgggcggagggcgggccgggtcgggggcgcccccgcgagtggagttagtttgtgtggttggagctgttggggcggcggggggcggcgcagctgcgggaggcccgggcgcggggacggggccgctgcagctgcggggtcgggcggggtgcgggttcccggctccgcgccgcgcccccgcgggccggtgcagctgcggcgcggggcgggctcccggccggtgcagctgcggtggcgcctctcgggtgcggagggcggcgggctgggggagggggcttgggagcagccgcagctgcagtggcgcccgggacggccgcggctccggggaccggtgcagctgcagtggcgcccgggggagggggccggcgggggagggggccctcccgggctggtgcagttgcccggaggccccgggggctcgcgcgtcgcggcatcggggaagcggtagcaaccactctcctcccgctggctgcttcttacgacttttcttttgttgttgccgtgacccgggtctgttttctcctctgttgtttaaggtgttttcctgctgcaccggctctgcgccctccacctccttccctgtggttttaaccttcctctttccccgtgtgttttatgcacggcgaactacgtaaagatttgcattgcttccccactcggcacccccgcccccacctctctgaaaaacaaaaccccaacctcacaaaacctctatggatccgcggtagcgagacgtgaaggggttgatttgtggagtgggagttgctggcccattgcggtgcccgggactcattaaactgtcactcaccccccaccccactgggtaaatggggtgattaatgtctgatatattggaatgggtcgagggcatttgtggagaataggtggtgtggctgggaagaaattgatctcccgaggatgtctcctggactaagtgttcataattatgtcactcaccgcgaagttggagaaagttaggtttgtgactttgggaaagcgagaaggacaggacggagtcgtcgggttttgttactctttaactctccgccacggctttctaatgggaacgaagtggttatcaccagggctgggacgctggcgcctcaggccccagttccttttctacccctcgccctc

SEQ ID NO: 3786 - DNA, 908 bp, Artificial sequence
  DNA replication origin
ttacaggcgtgagccactgcacctggccaacagacttttaaaatgagtaaacctcaatattttggaggctcttacactgtggcaggcacatatttagtcctgaaagcagctccctgaagtaaagtcctactattttcccaattttactgtaggaaaagccaagtcagaggcagtttattaactagccccaggtcacacagctaggcggtaggagaagcagaattcagccccaggtcatttcaagctgtgcttgactcagaagctacagagcctctgtcacacctgagcgtcacctgtactattatttatttaatagtcttctttaaagagtgtctctttccatttacttaaaatatggaatgccaaaggagatggcctgggctgggcccctgggtcccagggaacagcaaatgcagccatcaggaagatcaggaaaagggagggagaggtggatcttgggggagttgagccaggggtaggggtggcaatagccatgggggccagaggttgccagcaggggtttgggatgagaggcttcaagcagggcaaagctgggttctggaggctccgagacgactggagcctgatcacggcgggagctgaggggctggggaggaggctggggctgaggtcaaggtcactgggaaaggaggtgctgggagggcgtgcagagtggtaggggttgccgtcccaaggagccctggggagggctatggcaatggaagctggggattagcttgacacgggttagggctgaaggatgtacgaggcttggggcagtagaagttgctgggggctgaggagggggctaaaaagaagaggtggccagaaagcatcaatggggttccggtccccacagaactggctgagcacgctgtcctttcaagaccaactgggagtttgaaagc

SEQ ID NO: 3787 - DNA, 925 bp, Artificial sequence
  DNA replication origin
gctcaatttttaaatttctctgtagagaagaagcctccccatgttgccaggctggtcttgaacgcctggcctccaacaatattcccacctttacctccctaaacgctggccccttccccagcgttgacgctctaggtcaacggggaggggaaatccctgcctggaaggcgccagggactccaaagccgcttcaacagctgcacaatcaagtggagagcttccaggctcgcagtttggcgtttttagcttgctagtgaaaagggtaaactgagcagggagcggtggctcatgcctgtaatcccagcactttgggaggccgaggcaggtggatcacctgaggtcgcgagttcgagaccagcctgaccaacctggagaaaccccgtctctactaaaactacaaaattagccgggcatagtggcacatgcacaagtaattccagctacttgggaggctgaggcaggagaatcgcttgaacccgggaggcggaggttgcggtgagccgagatcgcgccattgcactccagcctgggcgacagagcaagactctgtctcaagaaagacggaaaggaaagaaaaagaagaaaagggtgagctagtgaaaagcttgccagctttggcgcgtgaggcagtgaggggagagggaggggtggatgctagtctggctgggaacagcctgcggagagaccattatcacagtttagtaactacccgtaaggtgtgtcgcgctttcagagtccccacagcactttcacttctactattttactttcatcctcacgagtctgtagagccggagtatcattagcaggtttttattgatgaggaaaaggaagacattcaagacccatctgggagcctccaggagtcctttccctttgttcttctaagtctagccctggtttccaaactcccctgtcccacccc

SEQ ID NO: 3788 - DNA, 1072 bp, Artificial sequence
  DNA replication origin
atgggagaaatacagtatgtttatgagctgatgggattaattcaatcgagaaggaaaatgcggaggtgcaggagagagaagacagagcggcaggagagatgtccgcgagtgggccgcaggggctgggatcccatcccacggaggggcaggtgggggcagggcagctcacccacgccgcggggagaaggctgagtgctcagacacagacacggggggtgggtgggcgcgctggtgagagcacgtaggagctcttttctggtggctgcgatgttcttggtggcataggaagcaaagttgctgagagggaggagggggaggaggtgttgaaggtgtagagagagaggagaaggtatgaaatcatcacctgggagagtgggagagaggagacgagagaagtgtgatacgtttgtggagcatcagtcagggcccactggattttgtcagcaatgcaaagggtgaacagaggctgactgagtttgttctccagccatggggcgatgcaggcccagagcggctggagagttccatttaaccaggggtgtgatttcatcagagagaacctcaaagcgagaaagaggtgaagaagtcggagggtataagcagatgaatgaccgtcatgattggatcaggagggaggggaggacgtgggggctgggggacagtgagaaggtggtgaggtctctatagggcaggactgtaggtcttggtggctcacaggattgctggaattggggggccgagggagtaagctggacagatagaggacatggtcaggagtggttggagagcgggtgtaggcgctgtaggtctggataatgatgaggttaagggtatgactctgggtggctgagaacagaggggtggaggttctgggcctgggcagcctcaggctacactgactggtgcttctgtgggcacttcggtcctcctggagagcctctatgagcgtcatgctctctgtgtgtaggtgccagcagctttgcttggggaagggaccccacaggtgccattggggcataaaggacaagaaagacagatgagagagaggggagaggggcaaaacaaacaatct

SEQ ID NO: 3789 - DNA, 716 bp, Artificial sequence
  DNA replication origin
ttgcatgtcatgtcaccaacgggtcaagcaagaagagggccgacaggtgaccatggaattcaccagtgacctgaacactgatttagtggcatggtgggggcaaaagtccagctgtggtgaattcgagtgaggaccggaggagagaaatcagaggcagagagaagaagagtgtcctccattctttcaaggagttttgttgtgaaagaaggtagagaagtggagtggaagctggagggggaagtgaagtgaagagagctgttttttcttttcttcttaagatgggagaaatacagtatgtttatgagctgatgggattaattcaatcgagaaggaaaatgcggaggtgcaggagagagaagacagagcggcaggagagatgtccgcgagtgggccgcaggggctgggatcccatcccacggaggggcaggtgggggcagggcagctcacccacgccgcggggagaaggctgagtgctcagacacagacacggggggtgggtgggcgcgctggtgagagcacgtaggagctcttttctggtggctgcgatgttcttggtggcataggaagcaaagttgctgagagggaggagggggaggaggtgttgaaggtgtagagagagaggagaaggtatgaaatcatcacctgggagagtgggagagaggagacgagagaagtgtgatacgtttgtggagcatcagtcagggcccactggattt

SEQ ID NO: 3790 - DNA, 1121 bp, Artificial sequence
  DNA replication origin
gcccaccccgcaggacaaagcagcggccccgcccctcggcgcgcgcccgaggctcgtgcgtgtgagcacgcgcgccggagacggttagaaatggcggttggggcggagcagggggctggcgcgggaagcggggctgtctggctcggttacgcccccacctcgccaggaatctaggagtcggtttgttttccgaacccatctccttccgctctcccgcccctgcaggctgtgtgccgagcttggaagaaagtgtgacccgttcgacggaacaaaggacatgacagcccggccccgtgcggccactgcggagcgttaggaacattccctaaaatggcggccggcgcgtcggaacagggcgggaggcggcggcgcgtgggggcgggacggggaggggcgcggccagccgggcttctgcttccgcgaccccggcggtgcagggcgggtggagtcgcggagtagtcctcatggccgccccgccggagcccggtgagcccgaggagaggaaggtaacctgggggtcggcggggcgcgcgccgcgggtgggcggtgggtaaggacgttctccgcggagctcctaggcccggagcacgtgtcactggcttctctgccacccatgggcttgaaactattttaactgttcctagtccttatcccaagcctccaacattttaatctaagtggccgggacaaaattgaccaaaactagggggaggaggggaccagtagtactaatgacttactacaggtcattatgaaataagctaacaatactgaatctttggcgagaaaattttgctgctaagggcactgcactgtaatttgttagtaaaggctaatagtagagattaaagctccgttgaggacaggtgccttgtctttaacacgttgtattcatcacatttaacataggagtaattgctgagggatgacttgattgtactacgatgagatgaagggttaagatttcttccccatcaccagtagcctccctagctggtgtccctgtctccatactctcctgaatccaccttccactattgtccgctggccctttccagcctgtaaactggacagttttcattcctctgcctaacatccagtcgtagcagcccatcctatct

SEQ ID NO: 3791 - DNA, 1059 bp, Artificial sequence
  DNA replication origin
gggaatcccagattagccgagaggcctcgggctcggggcgtgtgtgtgcgcgcgcgcgtgtgtgtgtgtgtgtgtgtgtgtgtcggcggtggcagcgcctccattatgtggctcgagagccggggggagctgcagctgccgctgtagggggaggagccgcgggcgggcggcgggagggagcccggtcggcccgcggtggcgccgtcgcgctgcgtgcgcgcggtgcgggcacatgtctcggggggaggggagaggccccaggtcccggggcgggcgcgctttggcggctcctcgccgctgtattgtgcaaggagcgcaggggctcggcgtgacgtcacttccggcgggaggagccgggcggggcggggcggggggcggaagatcagtacaatgcggccgcggggagcgcgggcccgcgggggaggggagcgccgccgcgccgggctcggcccctccccctctctgcgctctcttcgggatacacgtgggcttcgggcctgggccgcgcagtttttctttggctttctcgaatcatcgaggagactggcaaaattagtaatgtctttagactgcgtcactagcgccaatcgaattcgtagttgattgttctttgaattcacatttgagtcctcggttaaaacctcagttaaaaagcaggataaagtcgagctgctttggttctcggaacggaaaagcgtttttttgttgtttagaggcttggcctttatggggctcgtgtgtgttttaggggacggcaaaacagaacagaaaggcggagataaaaagaggggtgttaaaagaccacgagaagatcatggccgtggatattttgagtacattgaagagaacaagtatagcaggtataggatgctcacctagttttactcatcccttattcgttcgttgatcggaaagctgtatcaggagacaattctgtctttcagagccaaatctcctcagccacctgttgaagaagaagatgaacacttcgatgacacagtggtttgtcttgatacttgtaagtgaagctgtttctccccaattatgaaatgcggtgat

SEQ ID NO: 3792 - DNA, 1215 bp, Artificial sequence
  DNA replication origin
aagaagaaggcgggaggaggggagagagaagagggagggaagaggggagagaggcggggcggggcgggggagagaggcggggcggggcggggcggagcggcgggccgggcgggctacggggacgggggcagggcgactgctgctgccgggtggccccctcctcaggccgccctttccctgcgggtgggaactccagatggacgagggcccaccccacccggcgcttccccgtgcagcccggggtcgcggcgggcggcgagggcagcggctccccggctcccctaccttaccttccctgtccttctcgtccgccatcttgctgcggagccggtcgcctgggagatgcctaacgataacctcggccgcggtgtcccggcctgctcagcgccccgcggcgagcctggcctggaggaggggccgctctgaatcccgggggaggaagacccttgggcggggcggggcggggaggaggctccgagcgcgcgccctgtccccgtttcgcgccacgaccctcgcgctgggggaagaccagaggccccgtctgccacccggcccccggccttgtccctccagacccgaggccggagccggacttgtcccgggcctagcatgttgcttcatcacacggtccccaacccctcctttcccttatttctcatccatttggggacagcacgcgcgcgcacacacccctcgccccctcctgtcctgtttgtgcgacgtggcgttgctcgatttttgttgttaactgcagattttgaaaagcgccggagagctaggtgaagagctgggctcccaagggggtgatagaaccagcccgcggcccggcctcctcctcccgcttcccattcgcagcccgcctcccgccgggaagcggcccggctgctgcagaacggccgcgcctgccctcccggtttctcccgtccagtcttcaccgtcctttcccagagaaagcgacagcacagcctatgacaaccgaagctaaaacggaaaaactgggccgggcgcaagaggaaaccagagccattcgactattgctagaggagaggaatagctgcaggaaaacatgcgcaaaatagcacaaacattgcgtcgtcaaggctgcaatgtctaatacaaaatagaaggttctcatagcaacaaaaacgtgcccatgttgtgctcagtattacatgcgttaaaatgttcttagttgtgaaatttgacatgaccgct

SEQ ID NO: 3793 - DNA, 1392 bp, Artificial sequence
  DNA replication origin
gccaccagagtcagccgtaagggtggtgggcagagaagcacacacagcccagagaagggcttcaaagaccgtggtggagacacggaagcaacctgaggacctgctcagggaagagagggacttgctggggtgtgggattccaggattcctccaatgagggcttagaatcaagacccatttttctaagcagtgctgttgttgccccctggcttgactgtcatctcacagctgtgtgctgcctgaggctgggcaccagcacggaattgctaaagcctccaccatcactgctgcaaatgttccctttgccacttcccccttcacctcatcagctgcacagaatctgccatcacgtctccatcctctcaattctaaaggttcactagaaaatcaacagttctgatctactcacatggggcccattcaactcatgagttggaaatgcagtgtatctggatggaggaacagacaggtggatagatgggtgggtggacagatgggtgggtggacagatggatggacaggtggatgagtgaacagacaggtggacagagtgggtggacagatggacggatgggtggacgggtggacggacagacaggtgggcagatgggggagtggacagatggacggacaggtggatggacagacgggtgggtggacagatggacggacgtgtggatggacagacaggtggacaaagtgggtggacaaatggacagacgggtagatgggtggatggacagacaggtggacagagtggatggacagatggacggacgggtggacaggtggacggagagacaggcagacagacaggtgggcagatgggtgggtggacagatggacggacgggtgggtggacagacgggtgggtggacagatggacgggtggacaggtggacagacaggtggacagatggacagatgggtgggcagacagacgggtgggtggacagacaggtgggtggacagatggacggatgggtggacgggtggatggatagatggaagacgtatgaccttgggtgaagagagggatcaggtgagagtaactggtcagtagatgctcctaggtggggactgtagcagctcacagtttcctatgaaaaggctgagatggagagcaagctgtgacccttcctgctacttttctaattttaaaaaaaatcacaagatttaagtgtaaagcttcatttaaaaacaacagcataggtaagtgttggggaattcaggagttatggtctccacagcaacattcacgtggccacccaactactagcaaataaatgaaattaagcatttctattgcccttcacattcagccgtatgctaagcagtcactttattggtttataattcctcacagccacccgtgagggaggcagcctcctc

SEQ ID NO: 3794 - DNA, 964 bp, Artificial sequence
  DNA replication origin
ccgagccccggtctgtgatggactaagccgcccggggctgggacaggtgagcctggtgacccagcgggccgctgccgggcaggggaaactgagggcttcgccgcgctgcacgcggacgactctggcctggagagggggtgtggcgcgagctggccttggcctctccttgcgtgggatcgggcccctcgccccccgccgcccgtttcttcctgcgcctgggccccgcggggtctccggagcaccccgtcatcgctccctctccgatcgccccccgccccagtcccccggcgcagcgcccaggagcgcaggaagccggcgtatgccaggctccacacgtggctgctctggggtgtcatttttcatttcacgggaggacatttcttctggtgagccagcaggtctgttttgttgtgacctttaattaacaccccgcgagacgcctctggaaggactggccgggcgcagggatcacgtggggtgtaacggcatctccgcgcccgcggggagacccagcccgggggtgggcgagggcgcgaaggacgttcagggctttctggtcgctgacttccttctgagctgtggacgacgcaggagggggcaagaagacaaaggttcggggttctggaagcctggggccacgcccccactctgccttcctcggggacaatttcttctgtgcctcccgtgctctgccccactcctccccgctccagctcctgcgcgggaatatttcacagccaccaaagcgaggtaaaaaggtcaaaaggaagatggcaagaacagagtggacgtttccgttacgttcccacttccaatttaaaagcgatcctatcaataggggaccttagggggcaggtacacctccaggcagcacgcgccagctcccacccgcatctgtatttcgcgtaggtgccgcgaaacacatcatcgccattggccacgagccgcttatcagccaaaaagc

SEQ ID NO: 3795 - DNA, 1185 bp, Artificial sequence
  DNA replication origin
gtttgcccggcagctctccgagaacaaagggcggggggaggacccggcatgtttgtggacttgtttgtgactcaatcccttttgcacggcgtttcacagacagacctgcaagccttgtcaggaagagaaagaacttgggggcgggggaggctggggcaccgcatttccgtccagccacgctcgctcgcgcggcccccgggctccaggctcgcgcagcggcgtttcattagagccccgggcccgggccgcgcgccaggaacttccccgcacgcggcgagatcgacgatcccccgcccccagccccagcccggctccaggcctcgcaatgtcaggcacgagcgccgccacataaaatggatcccggccggcgcggcgagggcggcaggttcccgaggctcctccgcgctgcgcccgggcgcacacgcgcgctgtgaccgccgaccgctcccgggccacgcggagccgcccctctcccggccctcgcgcaactgtcaggcgaaacgggccggcggatattggctcggcgacacgccgaggctcctccccgagtctggatctttatattttgggagaatttctttgaactcagttaccaagctcggtgaaggagacaagttcccacagctgactcggctcggctctcccaccttcccggcagcggccgcgagccctgattgtatccctcgctttcctcgtgggggagcacggactgacttggctgaagaaaatgccagttctgtggatgtggccgtgacaagaggacgtgcggctggaagaggcagaaggggacgaggaaaagcatgctttgaagagaagaataaaccagcgaccccaaccctttctgcaaattggtgctattacttgtgggatccatttgctttcattccctcccaccccaccgctgaagaaaccttgccctgagggctgagagccagccccctgcagccgggggacgcttctgggttggaggaccttctggatgtagcgtcggtggaacctttagatactctcctctggaaaagccaccatgaattcggtagctgggaataaagagaggcttgcggtctccaccaggggcaagaaatacggggtaagttgtgacggtacgacgcggagacgcgttaccagacccatctcggcggaggtccccctttccccgggatcgtgcggccccggccccgagct

SEQ ID NO: 3796 - DNA, 1163 bp, Artificial sequence
  DNA replication origin
aagaggcagaaggggacgaggaaaagcatgctttgaagagaagaataaaccagcgaccccaaccctttctgcaaattggtgctattacttgtgggatccatttgctttcattccctcccaccccaccgctgaagaaaccttgccctgagggctgagagccagccccctgcagccgggggacgcttctgggttggaggaccttctggatgtagcgtcggtggaacctttagatactctcctctggaaaagccaccatgaattcggtagctgggaataaagagaggcttgcggtctccaccaggggcaagaaatacggggtaagttgtgacggtacgacgcggagacgcgttaccagacccatctcggcggaggtccccctttccccgggatcgtgcggccccggccccgagctctcccccgctgcagaggcgcccccggggctggcggggttgtgagtgcgcggaggcgggtcggccgcggggacgcccgcacgctcgcctcgctctcggaattttttcagccctctcgttccttcctttccacgcacccgtaacttttgccgcattcctgcacttctaggcagagtgaagccgaaggggagggtttcccatgaatgctgggcagtacctcggatcgtttagctggagccgtgagagcctctcgtttacctgcaggatccggagagttggaccccgtatgaataaaaatcctgaaatcacagccctccccctaccccccccatagggtcttccaggattttgttcccgggatcttgctgggataggtgccggcttcaaaagcgtggggcgctgaacctatggatcccccccgccttgcagaagccgtggaaacggccccgagcgagtccccttcctgaccccaggaggaggccaccggggaccagcgcaggggtcacctgggcggtggggactcacttaaggacaattaacgagacagacggagggcaatttggccgcagggcttggagaggtccccaaccgactcccgtgggcggttcgagcgggtacttggtggcgcacgtatgacccagctcctgggcgctgcagcccgccgccttgcagcccctgacaccggcgtgtcttccccgcaggtgaatgaagtctgctcgcccaccaagcccgcagcgcccttctccccggaaa

SEQ ID NO: 3797 - DNA, 1419 bp, Artificial sequence
  DNA replication origin
ggcatcggcactagttcgccgggctccttgggcggctctccgggcttcggcacaggctccccgggctccggcagcggcggcggctcctcccccggctcggaccgcggcgtctggtgcgagaactgcaacgcccgcctggtggagctcaagaggcaggccctgaggttgctcctcccggggcccttcccgggcaaggtgagcgccgcgcggggctggctggggaggcgccgggagggcggggccgggccgccacccacagcagctgctcagcccgccgcgaccttgcgcgccggctccacgcgagagcccccggcggcgctggggatgctccacacctcacggggctctagcacgcggggcgacccatgccccttcctcagccaggccgcccggggggcaggaggaccgagtcccgagcgcgaaggggcgcccgtggccacaggcctcacggcccacgggggaggcccccaggtggtctctcctgccgccccctcccagctctccctggcggctgcaggctgcgctttcgatgtttctccccacccccacctgtgatcctttacaaaaatgtcagcgggagctgtaaaagcaagctgatgctcggagctggcatttcccactgcctgtttgtggtccatcctttccgcggttgcagaaacagaaacatactcgaaagccagcattttccccttctcagtctgtgtgtgtgtctgaggaagatccggaggcgggtggctcttcggagcagtgctccctcctggcctgctcctgcgccaagcacactggttcctccatagcaaccctgcccgcagtgtgtgactggcccgagcccccaggggatagcaatgcgattgtatttgcactgttgggtccaagtactatcaaatgatcatatttactcggccacttcaaagagtttttatcagtggttagagagcaatatcaaggaaatagagtggattgctgtagaggtttttgacactgttggttcaacgtcaatttctggtttattatttccgtgactttagaaatgaaatactgtgatttcgagtaggcgtttaggaatgactgcgtctgctggcccaacctgcgtatgcagatacacacgttgatgttttcataggcaagggttaaattcaacaaatgcccacagacgctgtgaaacttaaaatgggggaaatgaccaccaggagaattggttttatgaatgcagaacttatctcaagaataatgaactcgtggatggttgtcagtgtaccgtttttgtagtttgatacatctgccgtgacatcccaaggatacatctcaaggaatcaaaaagcttatttcgctcttgcgtgctagaccttccgatttaacaccgtttcttcattcacagatttatttgctctcgtgatccttcatcaatattcattgatt

SEQ ID NO: 3798 - DNA, 1325 bp, Artificial sequence
  DNA replication origin
cagtgaaccaagattgtgccagtgcactctagcctgggcgacagagtgagagtccgcctcaaaaaaaaaaaaaaattctcaagcttggtggagggtaaatggatgttctttttcaccactattctttaaaccttatctttacactacatatacttttttgcacacaggttttacaataaaagtaaacaaataaaagagaggctgcacaggtaccagactgcctacagcccaagtctgaacagtgtcacagaccaataactccccagagccagcaaggttttccagtggtgaccttcaggtgaccttcctcttttccaagagggtaaaaagaaaaaaacagatggtgaaaggtactcatcatgaatggtttagggggcaacactctaaaaagaaagcatatggggtgtgaagaactgatgagtcggggcttgggcggattgggcttgaggtggttgggcttgcgcggattgggctcgcggtgggtgggcttaggcagattgggctcgcggtgggtgggcttgggcagattgggcttgctgtcggtggacttgtgcggattgagcttgctgtcagtggctgtgttgctctccggtaaaggcgtgttgtttttgacagtgacctctgggctgggatggtccatgctccaggtggtggcagggggagccaggctggagccatggctagtaggtggtagcagctggactcaccattgtagctgtagaatttgcaggccattaggtgttgcaagccatgaagcacatggagcctcaagcagaacaagtttttcaaagtctaccaaaatctgccttcggtggtggctactacagaggtgggtttgaacccaaaatgacaaaatgggaagcagcattaatactccatgtatgcccgactgccaataagggaaaataattgctgctcacagacaaattatgctctttttctttttttttaaaggagcggagagtttaataggcaagaaggggcaagaagggagaaggaagaagctcccctgtatagagacagagggagcgggggctccaaagcggagacagggaaacccacctgccccagataccagctaggtatacagaggctggaggaggcgatgtctgatttgcatagggcttaggggattggtttgattgggcatgtcattgatgtagccctggaaaaagctggccctcccaccctagccttctaatatgcaaatgcaggacacatgatgttctacacacttggggatacgtgggggcggccatgttgctaggaacaggtggggaaaggccaagaaagtgtgggaatcgccatgtttgggtggacccagt

SEQ ID NO: 3799 - DNA, 986 bp, Artificial sequence
  DNA replication origin
aaggtcacaatttcaagaggctttgtaacgaaattatgaacaagtttggaaaaactgcaagaaattcattgaacaaaattaagaagatcagccttttgagaaaggtctctcttgatggcaagaccgagcagcatctttcactgagccacagatttgtatggcggattggatttctggggaaggttctcctcagaacagtgcccttcagtccaccggaaagtgccactccaatttttagttaagaaaggctctgaaaagacccactctcaaaggtaccacctgttcatgtagtcattaatttgttaactaattaatcgacccatctatttattcgcttattcactcaaaagcatttaccaagctcctactgtgtgtcctcaaggacatccagctgtacgggaataaacaggggaagcatatggtggacttgaaggtggagttggtgtggaccctgccgtgggtggatggaggtggaggtggggtggtcctgccatgggtggatggaggtggaggtggggtagacccttatgtgggtggtgggaggtggaggtggggtgggccctgccatgggtggtgagaggtagagttggtgtggactctgccaggggtggttggaggtggaggtggggtggaccctgatgtgggtggttggaggtggaggtggggtgggccctgccatgggtggtgagaggtagagttggtgtggactctgccaggggtggttggaggtggaggtggggtggaccctgatgtgggtgattggaggtggaggtggggtgggctctgccatgcatggttggaggtggagttgatgtgggttctgcacagcttaggctgagcaggaagtgtattttcagacctggaatagactccctatggtggacagagttgctggaaaaaatatcagaatatattgtttaggacatctcatcttcaagacatagattccccttcttatggaattttgagatgtcctagctggagga

SEQ ID NO: 3800 - DNA, 784 bp, Artificial sequence
  DNA replication origin
agaggtagagttggtgtggactctgccaggggtggttggaggtggaggtggggtggaccctgatgtgggtggttggaggtggaggtggggtgggccctgccatgggtggtgagaggtagagttggtgtggactctgccaggggtggttggaggtggaggtggggtggaccctgatgtgggtgattggaggtggaggtggggtgggctctgccatgcatggttggaggtggagttgatgtgggttctgcacagcttaggctgagcaggaagtgtattttcagacctggaatagactccctatggtggacagagttgctggaaaaaatatcagaatatattgtttaggacatctcatcttcaagacatagattccccttcttatggaattttgagatgtcctagctggaggaagaagaattctttccatggaaacaataaacagtcaaaatgtttactatgaaattcatggaaatgctctgccagaggctcgggaatctctgcagagaacattttctgtactgcaggatgacagaggctgtcgagaataaaatgaagctgagtgcttgtggttgggattccttctttttcctcttttattgtttctccttagctttgtgcccaggtcatttgtctatcttccttcccttgaaatccctcctgctttggggccctgcactgcctctggagcatccagttctgagattccaatcacagggccaggcatgaaacacggccatccctcaggcacacggctgctgggatatggcaagcttgttaacacggc

SEQ ID NO: 3801 - DNA, 1633 bp, Artificial sequence
  DNA replication origin
tagggaaagtggaagagggagtggggggagagtggggaaagagtgggggagggagtggggacggagtggggggactgggggaagtgggagagggagtggagggagagtgggggagggagtggagggagagtgggggagggaggagggagggagtgggggagggagagtgggggagggagtaggggggtaatagggggacagtcgggggagagtcggggagggagtgggggaggaaataggggggtaatgggggaagagccgggggagagtcggggagggagtgggggagggagtggtggagggattgggggagggaatagcggggtaatggggggagagtcgggggagagtcggggagggagtgggggtgtcggaggatgtctgatatattcactccttcctttaatgatttcaaatgaagtgctttttttaaaaggcaggctcaccaatgaggtgcgggaagtccccgcagagagagagcccacgtagtaagtaaggaacgggggcggttagagattctggagaggccggatggaaaatgcacacacggtgagcagaaaccatgatcctgagacgctgatgtccaggagggagcctcagagcaggaacgcagccgcggcagggggcggtgggagtctgcggtatgacgtagggtacgaagggcctgggggtggcagagcagagcctgctgcggaggcacaggcttctcattccgcgcgagtgaccgagacatggatcgcgctcttgccggaggagggtgcacgtgcggaccagaggcttcccagcgccacggtgccaagttgtgggggtgctgagccaggagcttcagaagagcctcacaagcagggcacaagctgagaaaaatgacagctcacgacactctttcttcatatttaaaccagaggaccaaacaactcaaggtgctcttaagaaaagcccgcagtcgtccaagactttaaatgaaaacgcggatctgaaaatgggtgaaggaaatttgaggtacccacatttgccagaacatcgcgtccaccctgaagtaaggtgctacctgtggtggacacctttgtgacacttcgtctctaagtgagataggatttccagggagcgtgggactgtccctggattggtggctgctgaggaaggatttattttccatggagctctagttggctgtgagattttaggtcaacaactggctacagatgatagatggagagatagcccctgtacaatattcactgtggactattattatatagtgcatagtaataagacaatgtacaaaatgtgatagcgtacacttctttcgtatgtagaaaatgcagggatttttaaaaagtgagatttactttggtctgaagtcctcatcaggaggccaggcgtggtggctcaggcctgtaatcccagcactttgggaggcgaggtgggcagatcacttgaggtcaggagttcgagactagcctggccaacatggcaaaaccccatctctactataaatacaaaaatcagccgggcgtggtggtgggtgcctgtagtctcagctagtcgggaggctgaggcaggagaatcacttgaatgcaggaaatagagattgcagtgagccaagatggcaccactgcattccagctggggc

SEQ ID NO: 3802 - DNA, 1915 bp, Artificial sequence
  DNA replication origin
gggggcgagctggagccctggcccaccgcctgcggcagggacttggtggagaagctgagggttttggtggtggaggcggacgggccgcgcgctctggggctggccaggaggagtctgctcacggcggagatcttggactggccggccttgggcgaggccccggagctggggggcgaggtcccggcgctgcggcccaggctcctccccgcgcggggcatggtgccgtccttgcccgcgtgcagccgggagctcacggaggacaggctctcggcccgctccagggagaggcattcgtagtggctgactgtcgccctgcccagcgagttgcttctgctggccagctgctccagcttggcactgaagagcttgctgctgctgctggcgtccttcgtcttgccgctaggctcgtctgggaggcccgccgggaaggcggctggttggttcagggggctgctggtgccgctgccgctggcactgtgctgagggctggcccggttcttctggtccaggctggactttcggacagggggcagagggggagtccctttgggccgagccagaacacagtgcttgggggaagccaccttcccctccagggtagccttggagggcggggtgcccgaggctgcacccaccccgttggtctcagcagcgcagtaataggagaggctgtccggctcctcctgccggctggccttctgaaaggccctgggaaggctgctggacttgacgcttttgttgggatgcacggggctctgggtggccaaaccgggcagggccatctcacacccatccacgaccctcctgaagttgtcagtgaccggggaggccgacacctctccgctgctgctgctgagcctgtctcccggactgggctttccgtcctgctcctgctctgctctggtctcagcattcgaggggcccgtggcagtctcacacctcatcatcccttcttcattgggatgagccgtctcttttttcacttcctcttctcgtttcagccacgggtcctcaaatttcatctctttctttgcactgttttccttactctcccgggactgggctaatgtggggcctgctttgggggtggcggtgggggcctccggctcttggatgttccgggggctcatggcaatgcaggggtaaactgtgatattggtcttcatggggatgtacccctcgcagctgctcagattggccgtgttggagatggtgaccatggccttgctcactgtggatattttgcagcctttgatgggggctgctttgttgaaagagtcatctcccatctcagacaggatgagcaagttgtcggggctggccttgggcttctctctgcacaccacagcggtgttctggaggctgctgacaaactccgaggccacaggttctgccattgcctccccgtgcccaaaacacgtctgggctatgaaactgtggcacgactgctcaccctcactgcccgcgctcatctcgctcagccaggagctgatggaagagcgtctgctccctgcgtcctgggccttctcatccaggctcatcttcgggaggggcaagaactgtgtgatgctgacctcggagacgggggccgtgctggagtagcactccaggtcctcgctgatgctgctgatgatgctgacgggccgcgagcccgaggccagggcccgtgcagagcagtcgctgttgaagctgatgatgctggtggggcggccgctgtccaggaccccgctgatggtcagctcctccaccagcgtgaacaccagctcgtcctcaccgttcagctccagtggctgctgcaccgtcaccatcgtggtgctcaggatctccttcttggactctgaaggagtagctgcctgctgctcatcatcgacaggagtttccgggaacccttcgctcccagcagacatggattttt

SEQ ID NO: 3803 - DNA, 1196 bp, Artificial sequence
  DNA replication origin
ctcccgccggccatggggaagacggccctgttctaccacagcggcggcagcagcggctacgagagcgtgatgcgggacagcgaggccaccggcagcgcgtcctcggcgcaggactccacgagcgagaacagcagctccgtgggcggcaggtgccggagcctcaagaccccgaagaaacgctccaatccaggtaggcggctgggcgcagggacgcgggtgaggagggcggcaggtgggcgagctgcccaaaccccactgccagggtgtcccgtgccctggggagggggcgtccaggcctggcctctccttgcaggtgggcgaactgcccaaaccccactgccagggtgtcccgtgccctggggagggggcgtccaggcctggcctctcctttcccacggcccggcaccccgcggggctccgccggggacatcaccgcggagggtttctctgtgagaaactgccctactgcgtgccgtcatcaggcttagggccgtgaatcccttggcgctcagcagggtggaaaggcgagggcccggatgcaggtggcagcatgacccgcacctgctcgctctgggggcagcctggctcttcgccgtccattccctcacccctgcccctctgttcaacaaccaaggatcctgtggacggtttacagcctgttgagggatcaggtgagggtacctaccctcatgacctggtggcttcagaagcccctcctgtgaggttggtggcctgcaagaccctggcagcctctctcagggatgtgggataacgcacagattgtcccattgaaagtggaatggcgaggcccttcctccacctccaccccaaacatatttgtggacagtcatgtttgcacacctgccacagggcctgcagtgccccccgccacacacaccatgatgcctgaaatgcgtgattttggagaaagtctttgccatttctttttttcctttttttgagacagtcttactctatcgcccaggctggagtgcaatggcgtgatcttgccaaactgcaacctctgcttcctatgttcaagtgattctcctgcttcagcctcctgagtagctgggattacaagcgtgcaccaccgtgcctggctaatttttctatctttggtagagacaaggttttaccatgttgaccaggctggtctcgaactcctgacctcaagtgatccgcccgtctcagcc

SEQ ID NO: 3804 - DNA, 783 bp, Artificial sequence
  DNA replication origin
agccaggatggtctcgatctcctgacctcgtgatccacccgcctcggcctcccaaagtgctgggattacaggcgcccgccaccacgcccggctaattttttgtatttttagtagagacggggtttcaccatgttagccaggatggtctcgatctcctgacctcgtgatccgaccgcctcggcctcccaaagtgctgggattacaggcgcccgccaccacgcccggctaattttttgtatttttagtagagacggggtttcaccatgttagccaggatggtctcgatctcctgacctcgtgatccgaccgcctcagcctcccaaagtgctgggatgacaggcgcccgccaccacgcccggcccattattatttctttagagacggggtcctgctctgtcacccagcctagagtgcagtggtgcaatcatcgctcaccgcagcctcgacctcctgggctccagtgatccttccacctccctctcccaaagtgctgggatcacaggcctgagcctccgcgcccggccacctcctcttacagtagttcccaacccattcttcggcctcactgcatggctcacacggaaacatctcagtttaccaccgcacgatgtaagtgcgttctacactcaccaaagagaaaagaagtctgaaggataaggcagagaagagaaaggttgtaggtaggaggattggtgagcagggaagagatatgatggaagaggcggagggaaagacggtaaaggggcgaagaaatgccaagtgaagatgtgtaggcacacagaa

SEQ ID NO: 3805 - DNA, 1573 bp, Artificial sequence
  DNA replication origin
ttctgggttggggcaggggctccgtgggtgccactgcagccacccaaatcgtggctgcagaccaggcttcctgctctatggagcaggcaggcgccccgccttcctgggtggggctacagctgcccaaactgatgctggagatcggagcttccctgtgctcttggtgggggccgggagcagacaggatctgccctccagggtagagctgcagcctccctgctgcggctgcagacctgggcttcgcgctcaatcgagcaggcaggagccagggacaagagggagccccacctttactgagttggtggagcgtgaactccgcaggtgcagacctggcatctctgcagcctgcaccctggagggcccgggaagacccgccccccacttcatccctgcaggctcgggggtgtctgctcccgcttcccagcccctctcctctccagatgcctgctctgatctccgaccggggttggggccgagcccggggcagcaggaggcagagagattcctgggtggaaggcggcagtccccgtaaggcccctccttcagaccagggagggcctgaaggctgggggccaggatgccagtccgggaccggagtggggacttgtggtgcctcgtctgggtgcacatggaggaccatgggccaatcggcaggaacttcctcccctctgaggtccataaaagcctcaggctcagccagagcagggcacgtggagacaatgggcgaaccagctacagagaggagctgccctctgctgagagcttcagagacctgcagagatgtctgaacggcctgcttgtgaagaggagccaccatctccagggcctcctctctgctgagagctcaacactccactagatgacctgcctacagagaggaactacccacagtgggcttcctctgagctgttctgacactcaataaagctcctcttcatcttcttcaccttccacttctctgagtacctcattcttcctggacacaggacaaaaacgggcaaaggtgccaccagccacagaggtttccggccagaaaagcgacaccccgaagatcacataacactatgatttggaggcaaagaatggaggaaaatggagggaggaagaaaagatggagaaaaatctcttaggcatacatgcctgctgttcaacaaacactgtgctaggcaaggtatacaggccatctccaagaaaagatgactaagtgacttctggaacgaaaagcacaactgccatcctaaccccctccccaacattttccagggatcagccctttacttgttaataagcaagaagacaatgcatctgttgcaactgtgccatcagaggacaccagggcagagttactgcagcacttaattagcttagtgcacttgaaggctcagcctggagttctcaggtgagtggcaggaaaaccctacaactcagggtgggtcccaggacaaatgcagctgatgtcagaaaactatgtttggcaatgcagttagagacaaggagtagacgcctcatttgagaatcatttctcgaaagaaaattctagaaatgtgacagtagctggaggaggatgtggggt

SEQ ID NO: 3806 - DNA, 1130 bp, Artificial sequence
  DNA replication origin
agaagagtttttcttagtacagaacaaaatgaaaagtctcccatgtctacttctttctacacagacacggcaaccatccgatttctcagttttttccccacctttcccccttttctattccacaaaaccgccattgtcatcatggcccgttctcaatgaactgttgggtacacctcccagacggggtggtggccgggcagaggggctcctcacttcccagtaggggcggccgggcagaggcgcccctcacctcccggatggggcggctggccgggcggggggctgacccccccacctccctcccggacggggcggctggcctggcgggggctaacccccacctccctcccggacggggtggctgccgggcggagacgctcctcacttcccagacggggtggctgccgggcggaggggctcctcacttctcagacggggcggctgccgggcggaggggctcctcacttctcagacggggcggccaggcagagacgctcctcacctcccagaaggggcggtggggcagaggcgctccccacatctcagacgatgggcggccgggcagagacgctcctcacttcctagatgggatggcggctgggcagagacgctcctcactttccagactgggcagccaggcagaggggctcctcacatcccagacgatgggcggccaggcagagacgctcctcacttcccagacggggtggcggccgggcagaggctgcaatctcggcactttgggaggccaaggcaggcggctgggaggtggaggttgtagcgagccgagatcacgccactgcactccagcctgggcaccattgaccactgagtgaacgagactccgtctgcaatccctgcacctccgggaggccgaggctggcggatcactcgcggttaggagctggagaccagcccggccaacacagcgaaaccccgtctccaccaaaaaaatacgaaaaccagtcaggcgtggcggtgcgcgcctgcaatcgcaggcacttggcaggctgaggcgggagaatcaggcagggaggttgcagtgagccgagatggcagcagtacagtccagcttcggctcggcatcagagggagaccgtggaaagagagggagagggagaccgtggaga

SEQ ID NO: 3807 - DNA, 820 bp, Artificial sequence
  DNA replication origin
gtgaggagcgtctctgcccagccgccatcccatctaggaagtgaggagcgtctctgcccggccgcccatcgtctgagatgtggggagcgcctctgccccaccgccccttctgggaggtgaggagcgtctctgcctggccgccccgtctgagaagtgaggagcccctccgcccggcagccgccccgtctgagaagtgaggagcccctccgcccggcagccaccccgtctgggaagtgaggagcgtctccgcccggcagccaccccgtccgggagggaggtgggggttagcccccgccaggccagccgccccgtccgggagggaggtgggggggtcagccccccgcccggccagccgccccatccgggaggtgaggggcgcctctgcccggccgcccctactgggaagtgaggagcccctctgcccggccaccaccccgtctgggaggtgtacccaacagttcattgagaacgggccatgatgacaatggcggttttgtggaatagaaaagggggaaaggtggggaaaaaactgagaaatcggatggttgccgtgtctgtgtagaaagaagtagacatgggagacttttcattttgttctgtactaagaaaaactcttctgccttgggatcctgttgatctgtgaccttaccccccaaccctgtgctctctgaaacatgtgctgtgtccactcagggttgaatggattaagggctgtgcaagatgtgctttgttaaacagatgcttgaaggcagcatgctcgttaagagtcatcaccactccctaatctcaagtacccagggacacaaacactgcggaaggc

SEQ ID NO: 3808 - DNA, 1016 bp, Artificial sequence
  DNA replication origin
cggatcccttggcgtacacggtgtgcaaggggagtcgtggcgtcgtctgcgaccgctgccttctcgggtgcgtaaggagcgccctcgcctacctgagtcgcgagctgtgtggggtgctggggaggggggggcgtcgggcggccggcagccgcgggactcctgctggatggggctgcacaggcagcttggcggtgctgcccctgacgcgcgtgtgcccgggggcgggtcgctgctgacaggccccgcccggacacccccctaggttgccgcagcggggctgggagggggcccaggctcagccactgccccccaacctgggctgcggtggaaatgggaaagccattgggcagacttgagggggaagcgttgtgccggggataattttgctgggagacgaaaagtctgtgtgctggacagtcttccttggtgcggctgtggaaatcacacgtggcgggcgtggggctgggtgggagctgggatgagtataaatcaggctcccctgcagaggccccgccggtaaagcatcaggcttgcagcaggtggaagaatcttgatgtctacggtgcacctctgtggtctgggttgtgtgtggcctggggatacgaagaggaacgggacctcctcaaagagctgatcaagtgagagagagaattacagtgtaccagaagggctgaaatagaggggcaattaatgtgctgtgggagcatcagacacgggtcccccgtgtgctgtgccatttaatggctgtgcaggcatgtctaactcttaaccaccattctagatgcagggattcacgtgaaggtgttttggaagcctggacgcgctgtgccggtgtaaagtgctatgtgaaagcaatttatggaaatgtgtaacatacatgaataataggaactgcattcagtcaacaaatattattgagcttctgtgtgcgaggaagaagagttctattttgagatgagtgcgatgattttgtgcatggccgcttttcagacctgccagtctgagatttaggtggg

SEQ ID NO: 3809 - DNA, 1158 bp, Artificial sequence
  DNA replication origin
ttacagcctgtcatgggtacccttccttctaccaggcgagggacctggcagtgctgcattgagtctctggagctcatttgacagataaagaaactgaggcctccagagaggctttttctagtctagcctcctcactgtcagtcacacccatttgccttggcttggctgccccacacctgccaggctccctctgcacccgcgccccctatattcaagctcacctacaaaacccacctgttcctcaagacctgggctgtcgcagcctctccagctccacttggggacctgggagctcctgaaaacgtgttttcttggttttgtttttgtcttattttgttttgctttgagatagagtctcgctctgtcgcccaggctggagtgcagtggcgcgatctcggctcactgcagcctccacctcccgggttgaagcgattctcctgcctcagcctcctcagtaggtctcagtagctgggattacaggcgtgcgtcacccgcccgggagcgtgtttttaagtgttcaggtactatagcaatgaacatggatcattgtccatttcttggctcctggtagcactcagtcaatgtttgctgaagtgatgggaaaatcaatgaataagccacagcaccggcagccaggacaggatcctgctgaggactcagaccaggggcgccgcctcttgctcgcagcgcaggggaacgagcctcacctttgaccttgtctcagcagcgccacctcgtggtttccaaaaggaacagcatcatgctgggcgcaggggccctgccctgcggtgactgaaaggcgtgtgtgtgtgtgtgtgtgtgtgtgtgtgtgtgtgtgtgtgtaggcgtgtgtgtgtgtgtgtgtgtgtgtgtgtgtgtgtctgtgtgtgtgtggtgaggagggccctgcgccttgcctgtcagctttatggaggtgccccagctcgctggaggaaaagaatgctgaccagtggcccgaaaggattttcccgaatccactgggaatgggaaggatcctgtcaaaaatccaaagggaaatgatacaaccaggaagccttggtgcccttacaggaacagacaagcccctttcccacgctgtcatgtggcatgaggacactctcacaaccacagtcacacacccgggagccctgcctggct

SEQ ID NO: 3810 - DNA, 1557 bp, Artificial sequence
  DNA replication origin
caggattctgggggagccgcccggagcgcggtgaatcggggcggggagaggggcggggaaggcgcgcgaaagccccagcagagaccggcagcggcgggcggcccgcgtgggctactgctgggggctgcgttcgggcgaggaggggagattctgtctcagaggcctcgggctgcacgttcttccgggccgcgcatttgcagcccacagcaggccccagccggcccctctggagttgggccactgcttctgcaggcccagcaggcccctgggggcggccggaggccactaactggcttctccagctcagcattcttctctcatttgctgggtaccccactctcttctctacccctttgaaccatctttaccctcattcctcagggaacgtttaacgagttgaatgtttaccatgtagtcactctatatggaaatcataattcaattttgtaaacatcagactttgacaaaacaaatgatgatgttcttaaggaaagcagagagacacagtgtgaaatcgctgctctcagatcagcacacgggagaggccagcagtcaggagggggctcaccgagtttgtctgcactcgctccctccgcagccgccctctccagctggaagaagtcgtaatcgaacctgctcaggtcctcactgccccactccgaaggaaaccccacgtacaggtaggtgctgttggatcccaaaatcaggcggtcctggggaggagacggtgggctcaggaggggttcgaggccaaggagggtgaggtgaacctccccagtgagaaggatctgaggaatgtcctcccctcaggaatcccccagacagggagagacgcagacaggagggaggtggcctctggctcctgcgttcaccttcattgcacacattgagggcgtgactcccttggccctggggttctgtggggaccacccagagccaggccctccctccacgctttccaggctggtctgggtgagtgcagcaatggctgcaggggacaccaggacctaactcagactacaggctacagacggccttttccgaggcgtgatgcccaagctaagccctcctgggcggtaagtcttggtgaggcagagacggctgctgaacaaccaaaagaagggcagtgtggccagggacaggaggccgagggaggtcactgagggggctttccaaatggggagcggccaatccccatctgcctgtcctgtctgaaaggctgtggccaccagggaggggagagggctgctgggaagctggcaggggccccagggttggcagattggggaggaagaggcagcgatgtttgcaagatgctgttcaacccctctcagtgacaggctcttagaaaaatctaaaatggcacaaaatgttagagctggaagggaccttggagaacacctagttcagccctccttgttttccaggtgaggtcagaggagtgaagtgacttgcccaagaccacacagtgagtcaggagcaggcctgtccctccagcagtggtgccatgttgtccccaagccatggtggcagaggagctggtgtgaacgccccatc

SEQ ID NO: 3811 - DNA, 1509 bp, Artificial sequence
  DNA replication origin
cttaaaggaccttcttgcactaacgtcttacgaattaggaggggaattaaaagtcctctttgtaggacttaccgaaagatctcgtcttcacgcataagtgtgctgcattcctgctgctgccgggatcctgggctttgagaacagagccagagacacactagctatcccgtgactccccctggcaccgcagacccgccgcttaaaatgcctccctccttccagagccgtcggcctgtctccaggcagagcagcagctggggactcctgatcaggtgacctgggcacacctgctggagagggcccaggtgagcttcacctccgccacctgcggaggctgagcccagggcagggggccaggcacaggctgcagtctggctggccaggcccgactgtggcgaggcttttttggtgaatgtgtaatgtgtgactggtaatgatgctactggcagagctagggagagaacatcagggcatgccagcgagggaaacggggaggactcggggcctggcagggcgtaaggccgggtgtctatcctggcattcgctgatgatatcacaccctaaatgggctgtgattgaatttcggcctcccctggccaccccggcttccaccccaccccactccccgtggccacgaggccctgggaaaatcccaaagttgaggatcagacctggagtactaggggactggagctggggattccggaacctcatactgcctaactacggcctcagggcctggggggtggagcagggtggggtctgtggcatcaggaaaccagacagttagggctgtactgagtcacgttctgtgtaagtggtggctgggactctcagcttcaagggtcaagtaaggtcacatggaggaatacgggattttgggttctgcatatacagtaaaaattggaagggtttttgccctctttactctttgtcagagaggatttcaagctgtaaaagtcttcctcgtggctgcataatcatccccgttctgtttactgtcaaatccctacgccacaacaatccttgtgtggacgaatgacatgttcaggttgccaggcgagggttcgtgccataccccactttttgccatcaacatctgattctcagccagccagcagcacttcgggagaatgagaggctgcatggagacatggggaggggctgcccaggcaggggaccagagcggggcatgcagacagctggggagggcagccgggagacagctccttggaactgtccagtccagatgtactcagactcctgacggctggcctgcctgagactccaccccaccatcagcaatgccccagcccctctcagctttcctccctccccaggagggttgacaaggtgcacagagacgggaaagaagtgttgctctccccagtgggctggtgcggactggtgacacccaaccctctccacttctcctgcaggagcggcagatgatgaccttccctcaccttcttaacctcagcgaggaccctcagctcaccagggtgctca

SEQ ID NO: 3812 - DNA, 1347 bp, Artificial sequence
  DNA replication origin
gccgtacccgccaccgccaccgctcgccccctcgagccccatccgttggccccgcgcacgcccggcctaggcccggcgctcgcggggcagaagccccgccgccgccgccgccgccgccgccgccgccgcgggtccaggccgcgcgacccgccctccgccgcgcgggcccaaccccctccctcccttccccctacctgaacggggcgggtgagcgcgccgccgcgggccgagtccaccgggtcgccaggccaggcgcgagctcctcccgtgcgggtccgtcacagcatctcccgggagacgtggccgccacgggccgggctcacacccctccgcccggctgaagccgctcctctgcgctccggccgccgcctgcgacctccccggccacctcagagccacacgcccccgagagtgccttcgcgggctgtaggcctgcagaccgctcagcggctaaaacgcagtcgctgctcccgccgcgcttctgggtccttccccttgcaacgctgcctgctcgcctcggacagcgccggccccgctctgcgcattaccctgcgccgacaaaaccgagttccacacgccccggaagggagggagcagaggaaagggcggagagggaggggagaaccggcgggagatcgcggctgcagggaccagagttctcgcgatggttccgcgctctagcgccggctccgcgggaattttcaaactctcggtgaaagaaggaggtgggagggaaagggaggaaagagaagcagggcctggaagggcggatcatttacaaaaaaatcgggtctctccgcctccgaggagctggtggggagaaagactacgagtcccacagtgccttgcgcgtgaagccgccctggcggccccggcggcgcgccccgtgcgcagttgggagtggtagtcttcgctgggggtcgcgccgggctctgccagccgcctgctgcgattgcaggcggactctcttgtcacgtaatcgtgtggccctgccagctgggggccgagtgataatctttctcccataattggcagcttgcattctgtattttctgttctgtgctcccacttttctttttttctttttcttttttttggagacggagtcttgctctgttgcccaggctggagtgctgtggcacgatcttggctcactacaacctgtgctcccgcttttcatgccaaaggtgggctcccagacttctggggaaacgctttttccacggtgctgttttttctagcatcctcctgtgctttcatggccaaaaatgctcgcgcagcctagcctaatctttttagtcaaaattttaccccaaatcactgttatctttttggtcaccgcgggtt

SEQ ID NO: 3813 - DNA, 1247 bp, Artificial sequence
  DNA replication origin
ccttttctattccacaaaatcgccattgtcatcatggcccgttctcaatgagctgttgggtacacctcccagacggggtggtggccgggcagaggggctcctcacttcccagtaggggcggccgggcagaggtgcccctcacctcctggacggggcggctggccgggcgggggctgaccccccacctccctccaggacggggcggctggccgggcgggggctgaccccccacctccctcccggacggggcggctggccgggtgggggctgaccccccacctccctcctggaggtggcggctggccgggctgggtctgaacccccatctctctcccgtacggggcgggtggccgggcaggggctgaccccccacctccctcccagaaggggtggctggccgggcgggggctgacccccacctccctcccggacggggtggctgccaggcggagacgctcctcacttcccagacggggtggctgccgggcggaggggctcctcacttctcagatggggcggctgccgggcggagggtctcctcacttcttagacggggtggccgggcagagacgctcctcacctcccagacggggtcgtggccgggcagaggcgctcctcacatcccagacggggcagcggggcagaggcgctccccacatctcagacgatgggcggccgggcagagacactcctcacttcctagatgggatggcggctgggaagaggtgctcctcacttcctagatgggatggcggccgggcagagatgctcctcactttccagactgggcagccaggcagaggggctcctcacatcccagacgatgggcggccaggcagagacgctcctcacttcccagacggggtggcggccgggcagaggctgcaatctcggcactttgggaggccaaggcaggcggctgggaggtggaggttgtagcgagccgagatcacgccactgcactccagcctgggcaccattgagcactgagtgaacgagactccgtctgcaatcccggcaccttgggaggctgaggctggcgggtcactcgcggttaggagctggagaccagcccggccaacacaacgaaaccccgtctccaccaaaaaaatatgaaaaccagtcaggcgtggcggcgcgcgcctgcaatcgcaggcactgggcaggttgaggcaggagaatcaggcagggaggttgcagtgagccgaaatggcagcagcacagtccagcttcggctcagcatcaga

SEQ ID NO: 3814 - DNA, 1158 bp, Artificial sequence
  DNA replication origin
ctcgctgggtccctccgccccggccgctccccgcaccgcgcgcggtgcctacgagctccaaggcggcgccagccaagacggtcccggccaagcggcggtgggtgcgacccccaccacgggccccggcaccggcggggagggcgcgctcctaggctgcgggagcggacggacccctccgacttcggccacctggcgccgccgcctcctccccgccgaagtccctcccggggcagccgccgcaaactttccggagcgggagcgactgtgaacccgagtcctcccggcgccccgggcccttcgcgcgcctgccggtccccgtagcccggccctgcgcccgcccgggccccactactgcggccgagcgatccggcgtgaccgcgggacccacagggcgcccctgccccgcggctctctccacccccgcgcgctggggctgcggcgccgtgtctggcgcgaggctgggggccgagggtgcgtagtcgggggagacagccggtcctagggggccctttggccgggcgcgggggctcacgcctgtaatcccaaccactggggagactgaagcgggaggagcgcttcagtgcaggagttcgagagctggtggggaaaccagccccacaccacccggcgggtaccccgagtccggcgcagacaaaggatttagaaagagaatcacagtttaaccggcgggtccaggggaccagggcgtcggaggcttgctcgcggccccgagctctcggcctccacccaatttattggtttaccagctcttcgttcttagggcaaatgggaggggtgagaagggatgaggaaaaggattaatcaatgaaggagaactcgtgactcatttaataagatgtgtagccgtggcggtttctgtgaatttcctctagcaaaggcgtgtgtctaaactatttaagatctttaccttatccggactgaaatgcgtgggagcgggtttcaggagcagccaagatgtttgattgtactccactgcttcaagggagtgttatctccgccagcacctgtggcatgcgtaaagacatgaaggcaaaaaggagacttttctcctcagaggccgcccatggcttcccatggatgtctcacgcaggggggaccaactcatctggcattccagaaactctctttcccacatat

SEQ ID NO: 3815 - DNA, 1385 bp, Artificial sequence
  DNA replication origin
gcctctgcagccgcgtccctgggcccatgtcagggacggctctggctgaagcaggaggacggcgtttggagggtggggtgggcgcgtcctctcggcggcccgcgtggactgacagccaccactgcccccacgctgccctcgtgcccgcggttctaagaagtcgaatgccaggcggaggcgacggggcaaatggcccaggcttgggaggccgctggcggtccaggtcccgcaggatgtggaggattttcgaggagggcccaggggctggagggtgcacaggcccatcttgcacaggagccacggccccggccttagctgggcggagcaattccggtgccgccgccccttccccgcccggccatgctcgggctccaggcgggctgctgcagggggcctgatccggtggacgatcggctcctcaccccggcaagggcccccacctcggccgctgacagcctcgcagggaggccccagcgatgagcaagggggctggcgggaggacgggaggccccgccggcctgagtcctggacaggtgattggcaggtgaatgagctggagtgtgcagcgtgcctggctgggggccagggaagatctgccgggacctcaggggctgcaggctgccaactgcccgccccagctctggatgccctactcgaacctcagtttcctcacctgccaggaaggacccgtatgtcaggggtgttttgacgattaaactggacaatccaaataaactcgcattagccctccttggccgcacatctttctgactttgtacgaaactctggaatgcctgtaggtggggaggcaggcaggccagaccttggcccctggctgcattgtcccttctgggcgcccccactcctcctgggcccttttaaagcacatacctagcgaaacatctggacctcagagagcctcagagaactttgtgcatttccaaaaccaaaatgctttcttccctgaccccatgttctcatcttactccaaaacgcaaattccttgggcagccagcttcagaaaagggcctcaatttgatgtttgttctctgggacccaccccagggcccttttgatggagcatcattccacctccatccccaccccctccccccggggcttcccccagtacactgggggctcttaactgtaacaacctggatctggccactagactcccaaggcaggggacagggaacacagttcccccagcagactggcctagccatggcctgatgaacagtgatctctgggcaggagacccaggacaggaaatatctccgccctctactgtcagaccctcctgccttcggggtgagatcaccttttgccacagtgggaaaaacaggcacagggccagtgaccagcaaagtcagggagactgt

SEQ ID NO: 3816 - DNA, 1273 bp, Artificial sequence
  DNA replication origin
gcagctgtgtggtccaggagcagccaaggggtctctggaggtgtggctgccacaactctaccctgaaggtcttgcttgtcattggtggagaggagaggactcccaggaggtgctgcctgagggaccccatttccatctgtgaggggcacctagggtcctcctggggcgagtcagagactgggcccttggggtgaaagtcccttctctgggctgagaagcagcaggcactggggcgtgggctgcctcggggcccccgcccactcgcaccctctcctgcactgcagctgccctatcctcaggaggtgaggaagatgggaggatgaggctaagacacaggctggccgggggtgaggcctgctcctacccagcaagcccaggcctcaacaggcaggtgagggactgaggcctggggcatgacctccctaagtcacctcagggtagagaaggagctgggccacctagatgggtctgtatgcctggccctgggctctgggtagcaggcggggggtgggaggggacacccatgctgcagatggggagactgaggcgcggggctctgagggctccaggagcaaggaggaggccagggctggcctgtggggactttggtgttgactctgggtgaggtggacccctgcagatgtgagtacagcagagctcaggcggctgcaatggggtggatggacccaggcggtaagggcaccagcagatgactgccacagcccagtgcggggagggtgtctatgcggggctgtagattagtgccagcagggtttgggtttcccagcagatggctgtgtgtgtgagacagcaatcaggtggacaatgcccaggggttctggcttggaacagaggctggtgcacgttgctcagctgtagatggcctgggtggggaactgagacttggctttggagaagccaagagacgtgcacatgcgagtgagtgtcatgctgggatggacacggtgggggggcagtcacacaacctggggaccaatggtgtgtgggctgagcccccatgcctgctggagtggagcaggcaaggaggtgaggagcagccagcccgggagaaggaagtcgggggaagcccagggatctctgtcactgggatctctgtcagtgagaccgtcaactgtgatgcaggcaccccagggggccagaggccaggacagcagtggatcctgggataggatgagaattattttggctgtgctgtccccatggcccctactcctgaccacatactccggtactctcgccctgagtccctgct

SEQ ID NO: 3817 - DNA, 925 bp, Artificial sequence
  DNA replication origin
gggggtgacagcaaggtcatcacggggagggggcgtgtccctgtgggcgggtgacagcaaggtcatcacggggagggggcgtgtccctgtgggggggtgacagcaaggtcatcacggggagggggcgtgtccctgtgggggggtgacagcaaggtcatcacggggagggggcgtgtccctgtgggcgggtgacagcaaggtcatcacggggagggggcgtgtccctgtgggggggtgacagcaaggtcatcacggggagggggcgtgtccctgtgggcgggtgacagcaaggtcatcacggggagggggcgtgtccctgtgggggggtgacagcaaggtcatcacggggagggggcgtgtccctgtgggggggtgacagcaaggtcatcacggggagggggcgtgtccctgtgggggggtgacagcaaggtcatcacggggagggggcgtgtccctgtgggcgggtgacagcaaggtcatcacggggagggggcgtgtccctgtgggcgggtgacagcaaggtcatcacggggagggcttatcttcctcctggtcccctggtgccccctcctgggggatgacagttcagcatttccaagagtcttggcaggaaggccgcccccaaaccagtccttaggaaggagaaaaccgttgggctgagggtagaggctgcagcagccctggacaccagaagggggcagagacggggcctcctggatgccatcctcacccggtacccaccaagccctggagctctacagagggaggcctaggggcgcagattctagtgggccatcgctgcccagccatctctgaagctcccagttctccaggcagccggatttccccttctggtaaactgttcccaaggcctgtgccggttcatgcacccagctgggtcctgggccttctcctggtgggcctg

SEQ ID NO: 3818 - DNA, 1799 bp, Artificial sequence
  DNA replication origin
tgtgtcctcagccaccctcctgtcttttctgggtcctgggttcaaaactgtttgaggatgacctaatgtgcccacactggccctgtctcttggagtgtcataaatagtgaatgtcagctgttgggtcctcttctcccagaagacaaggtgaggtttaggggtggagcctctcagaggagcagctggatggcatgaatcccctgggaccgagaggagtctcctgggatactcttctatactcttcctctaaaaagctaatccactaggacttagatttttttttttctcttacccccgttatcactccttagagacaaaatgctggtcaggcagtcggatactggtattgagggaagaaagaatttctgccctctggattgtctcatgcttgtgaagggagaacagctattccaaagtacaaggaaaccccgccccgcagtgaggcaggaacctgaaaagcaaaatgcatttggggcacagtggggacacggcgcagttttctgggggagggtgggcattgagtacttcccccagcaggatggggtgggaggattcaggagatgagagggagggtggacattgagtacttcccccagcaggatggggtgggaggattcaggagatgagagggagggtggacattgagtacttccccgagcaggatggggtgggaggatcaggagatgagagggagggtggacattgagtacttcccccagcaggatggggtgggaggattcaggagatgagagggagggtggacattgagtacttcccccagcaggatggggtgggaggattcaggagatgagagggagggtgggcattgagtacttcccccagcaggatggggtgggaggattcaggagatgagagggagggtggacattgagtacttcccccagcaggatggggtgggaggattcaggagatgagagggagggtggacattgagtacttcccccagcaggatggggtgggaggattcaggagatgagagggagggtgggcattgagtacttcccccagcaggatggggtgggaggattcaggagatgagagggagggtggacattgagtacttcccccagcaggatggggtgggaggattcaggagatgagagggagggtgggcattgagtacttcccccagcaggatggggtgggaggattcaggagatgagagggagggtggacattgagtacttccccgagcaggatggggtgggaggattcaggagatgagagggagggtggacattgagtacttccccgagcaggatggggtgggaggattcaggagatgagagggagggtggacattgagtacttcccccagcaggatggggtgggaggattcaggagatgagagggagggtggacattgagtacttccccgagcaggatggggtgggaggattcaggagatgagagggagggtggacattgagtacttcccccagcaggatggggtgggaggattcaggagatgagagggagggtggacattgagtacttccccgagcaggatggggtgggaggattcaggagatgagagggagggtggacattgagtacttcccccagcaggatggggtgggaggattcaggagatgagagggagggtggacattgagtacttccccgagcaggatggggtgggaggattcaggagatgggatggtctgacttgacccttgagtcagccatgtccgtgctcgtcagtactgctactcgtttgtcaccttgaaaatacttgttcacttattttaacttcagtttttcgctgattgaaaaat

SEQ ID NO: 3819 - DNA, 1018 bp, Artificial sequence
  DNA replication origin
tcaaccctgagtggacacagcacatgtttcagagagcacagggttgggggtaaggtcacagatcaacaggatcccaaggcagaagaatttttcttagtacagaacaaaatgaaaagtctcccatgtctacctctttctacacagacacggcaaccatccgatttctcaatcttttccccacctttcccccttttctattccacaaaaccgccattgtcatcatggcccgttctcaatgaactgttgggtacacctcccagaccgggtggtggccgggcagaggggctcctcacttcccagtaggggcggccgggcagaggcgcccctcacctcccggacggggcggctggccgggcggggggctgacccccccacctccctcccggatggggtggctgccgggcggagacgctcctcacttcccagacggggcggctgccggtcggaggggctcctcacttctcagactgggcggccgggcagagacgctcctcacctcccagacggggcggtggggcagaggagctccccatatctcagacgatgggcggccgggtagagacgctcctcacttcccagacagggtggcggccgggcagaggctgcaatctcggcactttgggagtccaaggcaggcggctgggaggtggaggttgtagcgagccgagatcacgccactgcactccagcctgggcaccattgaccactgagtgaacgagactccgtctgcaatcccggcacctccgggaggccgaggctggcggatcactcgcggttaggagctggagaccagcccggccaacacagcgaaaccccgtctccaccaaaaaagtacgaaaaccagtcaggcgtggcggcgcgcccctgcaatcgcaggcactcggcaggctgaggcaggagaatcaggcagggaggttgcagtgagccgagatggcagcagtacagtccagcttcggctcggcatcagagggagaccgtggaaagagagggagagggagaccgtggagaaggagaggga

SEQ ID NO: 3820 - DNA, 905 bp, Artificial sequence
  DNA replication origin
ccaggctggagtgcagtggcgtgatctcggctcgctacaacctccacctcccagccgcctgccttggactcccaaagtgccgagattgcagcctctgcccggccgccaccctgtctgggaagtgaggagcgtctctacccggccgcccatcgtctgagatatggggagctcctctgccccaccgccccgtctgggaggtgaggagcgtctctgcccggccgcccagtctgagaagtgaggagcccctccgaccggcagccgccccgtctgggaagtgaggagcgtctccgcccggcagccaccccatccgggagggaggtgggggggtcagccccccgcccggccagccgccccgtccgggaggtgaggggcgcctctgcccggccgcccctactgggaagtgaggagcccctctgcccggccaccacccggtctgggaggtgtacccaacagttcattgagaacgggccatgatgacaatggcggttttgtggaatagaaaagggggaaaggtggggaaaagattgagaaatcggatggttgccgtgtctgtgtagaaagaggtagacatgggagacttttcattttgttctgtactaagaaaaattcttctgccttgggatcctgttgatctgtgaccttacccccaaccctgtgctctctgaaacatgtgctgtgtccactcagggttgaatggattaagggcggtgcaagatgtgctttgttaaacagatgcttgaaggcagcaggctcgttaagagtcatcaccactccctaatctcaagtacccagggacacaaacactgcggaaggccgcagggtcctctgcctaggaaaaccagagacctttgttcacttgtttatctgctgaccttccttccactattgtcctatgaccctgccaa

SEQ ID NO: 3821 - DNA, 969 bp, Artificial sequence
  DNA replication origin
attttttgtatttttagtagagacggggtttcaccgtgttagccaggatggtctggatctcctgacctcgtgatccgccctcctcggcctcccaaagtgctgggattacaggcgtgagccaccgcgcccggccactttatttattttttgagacaggatctcactctctcatccaggctggagtgcagtggcaccatcatagctcattgcagccttgaactcctgggcttaagctatcctcctacctcagcctcccaagtagccgggactacaggcatgcttcaccatgcctggctaattttttaatttatttttttgcagagacaaggttcaccatgttgcccagactggtcttgaactcctggcctcagtctcccaaagtgctgagattacaagtgtgagccaccttgctggccaaggtttgtatttttaaaggtggccccgctgcagtggggtgcagaggagagaaaaatggggtataagaggatagtggggtgcaggggggagggacagtggggaaaaagggagaagatggtgggatgctggggagagggcagcactgggggatttcaggtgagtttcaaggccactgagctaggacaggtgagattccagcatggtgcagtttggaggcaacaatatgggtgaagagaagtacagagatttgagaagtatttgggtggcaagctgggaggcaaacttccaggtttctacgtgagcacaggggcgatgtcttggggaggaaggaatattgcagcaggagttcagtgtggaacatgcagagtggaagggtagccatggcaggagacagctgaacatgcaagtccaaagaacagagagagctttaggctgctggggaaatgttgggggtcttgccctgttgctgtaattgaagttgtgagagtagatgaggtggttggggaagaaagcacccacagacaagtggccaggcgcggtggctcaggtttg

SEQ ID NO: 3822 - DNA, 1318 bp, Artificial sequence
  DNA replication origin
atttctgaaagtttttcatagttgactgctttatgggcaccctttttgagtcctgcaaggagacacacaatcatgtggtctcgatggcggcgtccagaagccccgtcttgataattctagagggggtcctgtttggggactgcctctgcaccagtaggctgcgcaggagcctggtgatgaattgtatcagcatgtgcctgagttagggtccagatacggtctcagtcttctggggtgagggtggaagacaggataatgtagaggtcatgccaggttagttcataagactgggtgaggtatgaaactcatatataagaggtagggtcttctggaagtgaatcaagtcttttgttaatttgagagagatcagtgagggagaatggaacatgaactctaacaataccttcagttcctgctacttcccgaagggggcgctgaagtaaaggtggggcatgggctgaagatggcgcccgagcgagtatgggcgggagagaaggaaaagccggaagtggttcctgctgagggtttgaagggggaagaggggttgagttaataggcggcggaggatagataggggtgtaaggtggcgggatgggtttacgggcctcaggagagagggcggtgatgaaggagaatggggacaggcaatactagaattgtcctgaggaggggacggtgtcggaagagaagtggatactgctgactgggaaggtggcggctgagaagataaagaggaggcttgggggtttaaaaaagacatttgagagggagaggaaggggctgggaggggtgggcagcagtctgctggatcaaacgaggaagaagaggtagggttgggaggagaaacgcgatcaaggtggaagaatggaggagaaacaggtaagcaagaacagcagaggtcgggctgtgatctgagtgcaaaaaggcctggacagaaggacataaggaatctctccccatttctccagtcgtcggaaataattgcttaagtcaggtaaaactgtaaagtcgaatgttccatttgcgggccatttggacccgttatctagttggtactgtggccagactgaattgaaaaaaagacaaggcgcttagggcggatatcttgcctgaggcctgaggtttgcaggtttttatgaggtagcctagcgggctgtcctttggaaaggaagactgagaatttcccataacagagggtaggctcaggagaacagggaaaaggagaccgtcctgcatggctggagggagacgataaaagaagcagtcatcaccgctgcctttttcgttcctggaacgggatcaaatggcttagaggcga

SEQ ID NO: 3823 - DNA, 1625 bp, Artificial sequence
  DNA replication origin
ggccctcctccgcctcactcacgttagttcattcatcaggcatctcctccgagcctccgacgcgccaggtgccgccgtgacaaagacggacgcggccgtctggttggagacgatccgagtggcagcccgggtgggcgccggtgctcgggggggcgggcctgagtagtcctgggcgctgcaggtgtgtgatgggcgccgcagggggccgccgagcagggcgggcggggcccaccccgggctccagatgccggagccgccctggaagcgatccggtggtggggagcgctgtaatgcgtccagcccgacgccgccacggcccccatatgggtttctgtgtatgttgttactttggaaagcaaagagattcagagcagtgggtgtttctggaaccactcagttgttccgtagcttttctggcatcacttgtctttctgtgaaatgggagtgaggcccgagtcccccttcccaccttgtgagctgttggaggttaagacgcggccacgctggacaacctcgtgcagatgggggagtggcaggcactgccggtcctaaggatcacagaggcctgatggcagagaaggggactgtgagtgtccccatgtgccctttcacgggcccagcgttctaaagtgggaatcataaacaccaggtatactggttgctggtctcttgccaccctagttgtggcaaaagtgtcggctagttgtctgcacaccagcggggaggtgtagggacccctgagtcccaccttgggggtgtggcagctgcagtgtccaggggttctttgagggctgagctgtgcagtgacggacccacttttctgtcctggccgaggaagggctttggcgagtgtgcagttgccttcaatgtggtttgaagagggcaaggatagagaatagggtggaggcgaggttgaaggtcagggcagaattggcagaaggctcataggaaaccactgatacttctagatgcagtgttatttgtccctggtagactgcatgtagctgtctcatgtgatgttttcccttgcctcccattgcagactctgctgggcaaagctgattctggctgggttgtccatccagcacgcagcaccatcagccctctgccaccagaagggtggattttccattcctggatgtgcttgaaggctcatccgatgcatgtctttgtcattccagctccatttgtaaaggtcttaataacaagaacagtgacttcggctccggagcttcaagatagtggcctgcttggcctgcccatctcggatctctccaggaggacccagccacccaaggtaccagagcgtcttgattacatctgcatgtggcgctgttggtttcctgggatgctcaaaacagcagtgtcacgttgaaatgccaccactttctcccagatttcctgtcttgttcatccagtcacccacttaacgggaatccacacgtaatggtactgatggggggagggcatctttctgtctgtttcatcctgtgtgtaaagaccagccacaccaacactccctacctttcccagggcttctccaaagggctggtctctgagggcattgacagtttccttgtcactgtcccccagaaatgaccacaggagaccagaacactgaagcc

SEQ ID NO: 3824 - DNA, 846 bp, Artificial sequence
  DNA replication origin
ccccgccccccggccgaggtgtgcgctgggggtgacatccgacacccccggcccgccccgctccgcgcgcgcctgggcctggccgccgggccgggggctttgtgggtcagccacgtcgccgcgcccgggcttccccgcgggcccgccggtccggaaggtcggcccggggctcttttctccgctgttctccttctctggcgcccccaggacacgcggccagtggacgcccggaacggccgaccgggagtcgcggctggggatggaagctggaattgggggtgcgggatggagcggagagaggaggccccgcgcgccgtcggccgcctcatttcagactcccctgcgaccccccccccgccgccagccgaagcccgggccgcccagcccctcctgccgctgcgggacgccgaaggtagcgctcacatccgcgccttccgggcctggcgcccacgtgcggagtccccgggttaggaaaggccgcgcatccggaggccacgcagagcctcggggcttgcgcagaggggctgcggtgagtcctgaccctgagtgggggtcacggggctcgttgctcgctgaagtgaacacggttgcagctgtgcacagtggcggagggagaggatgagggactctgacccaaggttatgtggcagtgaggggcaagcagaaatgggggcctccggaccccaccccgagacagggctgctggccgctgcactatgctgaatatagcccaaattcttacatgggtcgtccccggggaatgctcatttttcaggctccagagcttgagagaaagtgcgaacccggtccctgagcaggtctgattcccatggccccttcgccatc

SEQ ID NO: 3825 - DNA, 1170 bp, Artificial sequence
  DNA replication origin
tctttaataccatgactgttaccagcccctccccagcactcctgacttcctgatgcctctccactttcctttttttctgtagcacagatcaaagagagcaggtcatgttactgattttgcttcctccaatagccagttgtgttcacagatgtacctgagcacctggaaggctggctgcctagcactcatgagtgtacagtaggtactcggtataggtttgctgaatgactgaatctttgatcctgcacaaccatccaatgaggtagacagcatcatccctgttttctggatgaggaagttgaggtacagaaaggttatgtaggcctgaggtcacctggctaggaattcatagggcaggatttaatccgggtgcctgagtccagaaccttgactctgaagccctgttttgagctaaatgcagcagcagcataaacagcccgttttgtgcctcaaaaggtgaacagtgggaggcacagctgggcagggacgtgtcaggtcaggggaagaaactgaattgggtagtggggattaattggatgctgtctgccagcaatttctgcctcctgcattttatctgctttagggttgcaaggggcagagctatgaacacggatgcccactcaacagccagttcctgggccaatcaaagggttgggagctgtagcaccagagctctggaaccccacagactaggatgtttgctagagcacctaagccctaccagcctttgatgacccctcggttcctcccaattcctctcctccatgtcacggttcctggctggtgttcctgagagtgggctgtacatgagttctgtaaatgccagtccagttacgtcaaagggggtggctctcacttgtacctgtaggctccagctaagatctgcgtggccctgcccggcatctggctgtcatccgggaaacaatcactgttcacaaacaagggcttcactccttcgctcgctccatctcctgctaaagtcagaatgtgaacactgacaaacagcggctcccagtaactctgctagtcagaagtgattattccagcagttcagaggaggaagtggcggtgcccagggccacgggattagaagagcaacggagctaaaggatcccgtgcctcagtccaaccaccttgttcccacttactcagccgggccactttctttgg

SEQ ID NO: 3826 - DNA, 1123 bp, Artificial sequence
  DNA replication origin
taaatcagcgattctgcaatataacgccattggtgatcggtgtcatgaaagaaatacaacatggtggggaagagtgtgctggggatgttcaggtagggcctctgtcaggaggtgacatttgagtggagagcaggtggggggctcctgagcagaggtgtgtgggaagagtattccagcagaggaaacagcgtgtgcttgctcagctgggcagaggaatagtgagagaatggtgaggctggaaccaggtcaccagatgttatagtcattagagggtttcaagtaggagtgtggcctaacggaatcttgattttatcaagatcactgtgcagaacagatgaagcagagtctctgttaggaatcgttgtagagatcccggcaggagatgctcggttcctggagttgactggtggaggcacagctggtgaacagtaggcccaatccaggctctgtgttgaaggcatgctgcctgtgttagaggagtgaggaacggctgtgactggggctgaaactgggtgactgaacaggccttctagagatggcagatgcaaggaagcaggtttccaggaaggggttgggtttggggttgaattggtggatttgggacttgctggttttcagatgcccaggagacaagtggggatgaccctctgggatagaaagctgtggctggaggtggaaatctggagtcaccgtatgtagcaggagctggggcttgagagggttgagtgtgttttgagaagcagccccagggagggcagaccctgcgaaatgccagccctggaccgtgggagcccaaggggttagtggaggagaagggagagaaggggaagtaggaggaggaaagtgagggaggacgagggcaagagaagggggtagggagagctgctgccgccttgagataaaaggaaaattgcaggtgtggagccctggaatccaagtgagcacctgtgtttcaaggagagaaagaggtcagggggataaatcctgcgccaagatcaaatccgatgaggaaagaacactgcccattgaatctggtagagaggcccctgagcaaagcagacagtggagctcctgggctagggcactttctggaagagaagggagatgagagtggacacagccc

SEQ ID NO: 3827 - DNA, 868 bp, Artificial sequence
  DNA replication origin
catgtcctcccgcgtccagcggctgcgggctttcccgagagccttccccagggcgcctttctcgtcctctcagcgtggggatgagggaattcagcggcggttgcaggcagttgaagcgggtgcggcgctagtgcagacggcgtcaccgtggaaagggcggcagccgcgcgggaaggccgggcgctgagaccgcatgcgcagcagtgcactgcccccgaggggccgaggccaagtcgcgcgagaggcgccagggcggctggggtggccggggaaagccaggcgttccaccctgccggcgtccacgcggaaatgcggtgatggccggcgtcccacacacgaactggcagaggcagcggtgactgcaccgccccaggtacgtgtacgcggcgacgtcagggcggaatggcagctcccggagccggcgcggccaggccagaccaggagccagaggcctcagagggccgcaccgcacacccacgcgggccatggatttgcctgagcccccgcggttaactagcacttgggagaagctgcgagtgctgtggcaggaggtggagaagggcccggtcgctgaggaagtgggagtgtgcagtgggagggagaggaggacgttggtgcagttgccagtcacggccagaaagtaaaaggccgtgctgaccacaaacgggaccgtctccagctttggcctctccagaaccccagcagaatggcgtcaccccgcgagctctcattgaccctccatcgcccttggcctcatttgcctatttagagaggttcacaggctgcagtgattagaaaatggcacgtgttgttctgtcctctcagtgcggaggatccattccaccacccacagtttttagcgagtctc

SEQ ID NO: 3828 - DNA, 1166 bp, Artificial sequence
  DNA replication origin
aatttttcttagtacagaacaaaatggagtctcctatgtctacctccttctacacagacacagccacagtctgatttctctatcttttccccacatttcccccttttctattcaacaaaaccgccatcgtcatcatggcccattctcaatgagctgtggggtacacctcccagacggggtggcggccgggcagaggggctcctcacctcccagaaggggcggccgggcagaggcgtcccccacctcccagacggggcggcggccaggtggaggcgccccccacctccctcccggacagggcggctagccgggtgggggctgccccccacctccctcccggacagggcggctggctgggcgggggctgccccccacctcccagacagggcggctgccgggcggagacgctcctcactttccagatggggcggctgccaggcggaggggctcctcacttctcagacggggcggctgccaggcggaggggctcctcacttctcagatggggcggtcgggcagagacgctgctcaccttccagacggggttgcggccgggcagaggcgctcctcacatcccagacggggcagcggggcagaggcgctccccacatctcagacgatgggcagccgggcagagacgctcctcacttcctagacgggatggcggccaggaagaggcgctcctcacttcccagactgggcagccgggcagaggggctcctcacatcccagacgatgggcagccaggcagagatgctcctcacttcccagacggggtggtggccaggcagaggctgcaatctcggcactttgggaggccaaggcaggcggctgggaggtggaggttgtagcgagctgagatcatgccactgcgctccagcctgggcaacattgagcactgagtgaacgagactccgtctgcaatcccagcacctcaggaggccgaggctggcagatcactcgcggttaggagctggagtccagcccagccaacacagcgaaaccccgtctccaccaaaaaaatacgaaaaccagtcaggcgtcgtggcgccccctgcaatcccaggcactgggcaggctaaggcagtagaatcaggcagggaggttgcagtgagccaagatggcggcagtacagtccagcttccgctcggcatcagagggagacc

SEQ ID NO: 3829 - DNA, 1457 bp, Artificial sequence
  DNA replication origin
agagtacacaagccctgtctttatttaatggtgaggatgttatagatgaagtcctttgaggagaaatgcttgtgacgtgcatcagagaagtacaatggatctgtcgtttggaaactggcttctgaaacgccttctcttccgcatgcgtttattctcttatgctgcacagaatttgctccgtggtgagcctggaggagacgtctctggaggagtacagttccattcccagctacttctgcggagctggtggctcggaggtgggcacaaaggctgaaggtcgcacatcctgtgcttctggaggaggtgctgaaaccggagtccgaatgtttcctttccagcggggctcctctcaccttggtgcagtgctggtgtgagaatgggaaaaacaactggagagagaggcgagggaacgcagggacagagcgagcctagcacgggtctcagacggagcctggcgagtcacgggtgctggagcgccctcctgaggactggagccccctgaggactggagccgcctgaggactggagccccctgaggactggagccccctgaggactggagccgcctaagaactgaagccccatgaggactggagcccccctgaggactggatacccctgaggactggagcaccctgaggactggagccccctgaggactggagccgcctgaagactggagcccccctgaggactggatacccttgaagactggagcccccctgaggactggagccgcctgaggactggagccgcctgaggactgaagccccctgaggactggagccccctgaggaatggagccccctgaggactggagccgcctgaagactggagccccctgaggactggagccgcctgaggactggagccccctgaggactggagccaccctgaggactggagccccctgaggactggagccccctgaggactggagccgccctgaggactggagccccctgaggactggagcaccctgaggactggagccgcctgaagactggaaccccctgaggaatggagccgccctgaggactggagccccctgaggactggagcaccctgaggactggagccacctgaagactggagccccctgaggaatggagccccctgaggactggagccccctgaggactggagccgcctgaggactggagccgcctgaagactggagccccctgaggactggagcaccctgaggactggagccgcctgaagactggagccccctgaggaatggagccccctgaggactggagccccctgaggactggagcaccctgaggactggagccgcctgaagactggagccccctgaggactggagcagccctgaggactggagccccccgaggattggagccccccgaggactggagccccctgaggactggagctgcctgaagactggagcacactgaggactggagccccctgaggactggagccgc

SEQ ID NO: 3830 - DNA, 1533 bp, Artificial sequence
  DNA replication origin
ctttgttcaatcatatttctgtgcaattgtccatgcttcaatcatgactattcaataaagtctccatataagggccaaaaggagaggacagaaaacttctggacagctaaactcatgaagctgaacaggagggtgataagaacccatccatgtgcctggagggtggcatgtcccaactccacagaggcagaagctcttatgctcttccagacctcaccctctgtgtcttttcatctgactgtttctgtgtatcctttgtaatatcatttataacaagtggtaaacataggtaagtgtttccttgaattctgtgagcctttatagtaaactaactgaacccaaggaagggccgtgggatccccaatttacaatcacttggtcaaaagtacaggacaacttggggcttttaattggcactggaaatggaaggcagtgttatgggactgagccctcaccctgtgggatctgacactatctccagatagatagtggcagatggtcatgggagtttagcttgggctagagcatttgactgtagatagtggcagatggtcacgggagtttagcttgggctagcgcatttgactgtagatagtggcagatggtcacgggagtttagcttgggctagagcatttgactgtagatagtggcagatggtcacgggagtttagcttgggctagcgcatttgactgtagatagtggcagatggtcacgggagtttagcttgggctagcgcatttgactgtagatagtggcagatggtcacgggagtttagcttgggctagagcatttgactgtagatagtggcagatggtcacgggagtttagcttgggctagcgcatttgactgtagatagtggcagatggtcacgggagtttagcttgggctagcgcatttgactgtagatagtggcagatggtcacgggagtttagctagggctagagcatttgactgtagatagtggcagatggtcacgggagtttagcttgggctagagcatttgactgtagatagtggcagatggtcacgggagtttagcttgggctagcgcatttgactgtagatagtggcagatggtcacgggagtttagcttgggctagcgcatttgactgtagatagtggcagatggtcacgggagtttagcttgggctagagcatttgactgtagatagtggcagatggtcacgggagtttagcttgggctagagcatttgactgtagatagtggcagatggtcacgggagtttagcttgggctagagcatttgactgtagatagtggcagatggtcacgggagtttagcttgggctagagcatttgactgtagatagtggcagatggtcacgggagtttagcttgggctagagcatttgactgtagatagtggcagatggtcacgggagtttagcttggactagcgcatttgactgtagatagtggccgatggtcacgggagtttagcttgggctagcgcatttgactgtagatagtggcagatggtcataggagtttagcttgggctagcgc

SEQ ID NO: 3831 - DNA, 1042 bp, Artificial sequence
  DNA replication origin
cttaacgagcatgctgccttcaagcatctgtttaacaaagcacatcttgcactgcccttaatccatttaaccctgagtggacacagcacatgtttcagagagcacagggttggggggtaaggtcacagatcaacaggatcccaaggcagaagaatttatcttagtacagaacaaaatgaaaagtctcccatgtctacttctttctacacagacacggcaaccatccgatttctcaatcttttccccacctttcccgcctttctattccacaaaaccgccattgtcatcccggcccgttctcaatgagctgttgggtacacctcccggacggggcggctggccgggcagaggggctcctcacttcccagtaggggcggccgggcagaggcgcccctcacctcccggacggggcggctggccgggcggggggctgacccccccacctccctcccggacggggcggctgccaggcagaggggctcctcacttctcagacgatgggcggccaggcagagacgctcctcacttcccagacggggtggcggccgggcagagacgctcctcacctcccagacggggcggtggggcagaggagctccccatatctcagacgatgggcggccaggcagagacgctcctcacttcccagacggggtggcggccgggcagaggctgcaatctcggcactttgggaggccaaggcaggcggctgggaggtggaggttgtagcgagccgagatcacaccactgcactccagcctgggcaccattgagcactgagtgaacgagactccgtctgcaatcccggcacctccgggaggccgaggctggcggatcactcgcggttaggagctggagaccagcccggccaacacagcgaaaccccgtctccaccaaaaaaatacgaaaaccagtcaggcgtggcggtgcgcccctgcaatcgcaggcactcggcaggctgaggcaggagaatcaggcagggaggttgcagtgagccgagatcgcagcagtacagtccagcttcggctcggcatcagaggga

SEQ ID NO: 3832 - DNA, 914 bp, Artificial sequence
  DNA replication origin
cggagtctcgttcactcagtgctcaatggtgcccaggctggagtgcagtggtgtgatctcggctcgctacaacctccacctcccagccgcctgccttggcctcccaaagtgccgagattgcagcctctgcccggccgccaccccgtctgggaagtgaggagcgtctctgcctggccgcccatcgtctgagatatggggagctcctctgccccaccgccccgtctgggaggtgaggagcgtctctgcccggccgccaccccgtctgggaagtgaggagcgtctctgcctggccgcccatcgtctgagaagtgaggagcccctctgcctggcagccgccccgtccgggagggaggtgggggggtcagccccccgcccggccagccgccccgtccgggaggtgaggggcgcctctgcccggccgcccctactgggaagtgaggagcccctctgcccggccagccgccccgtccgggaggtgtacccaacagctcattgagaacgggccgggatgacaatggcggttttgtggaatagaaaggcgggaaaggtggggaaaagattgagaaatcggatggttgccgtgtctgtgtagaaagaagtagacatgggagacttttcattttgttctgtactaagataaattcttctgccttgggatcctgttgatctgtgaccttaccccccaaccctgtgctctctgaaacatgtgctgtgtccactcagggttaaatggattaagggcagtgcaagatgtgctttgttaaacagatgcttgaaggcagcatgctcgttaagagtcatcaccaatccctaatctcaagtaatcagggacacaaacactgcggaaggccgcagggtcctctgcctaggaaaaccagagacctttgttcacttgtttatctgctgaccttcct

SEQ ID NO: 3833 - DNA, 978 bp, Artificial sequence
  DNA replication origin
ggtgacgtgggaggctggcttgggaggtgatgcaggatgccctggcagcaatgggagaaatgttaaaatgattatgtggcactaactgaatgactcctcccgataagcagacccagaacatcttacttctgtgaacaaccagggagagttagaggctgctcacacagtaccctataaccttcagggaaatcggggaagtagaactacttggatgagggctcatgattcacgtttcactggtgaacattttctctccccacaattctcccaacatgaagtggtctctggagaaagacagacaaacattaaagctctctttaatgagagcttattacatgccaggcattgtgtcagccctttactagctcacatgttccttacaactataataggcaggaaccaatattcttagtactctaataaggatacctaagaacagataagctcagctgctttcctgaggccaggcagtcagttaagtggttgatcagaaggcaacactcaggactgtgtccccagcactgttctgtagactgtaagcattatgagggcaggagccgtgtctgctctttccttatgccgtgctgatgagtacactgcccaacaaagaaaggtgattggaggtctgcagaatgcaaaggggaatgtggctgggaacgcgagaatgaaggcagaaatgccggaataaaggctggactggggtagagaaagcaggtggggattcagaaatgcgggtgggaatcagagcagggatgtgggaatgcggaaacgcaggtgggaacgatggggagaaagtggcaacgttgggggatgcagttgggaatgcaggaatgagggtggaaatgtgggaatgcaggctggaagagtggagagtacaggaatgcaggagggaattcacgaatgcagcaggaacctgggaatgcgggaatgcagagagcgacgctgcgggaaatgcgggaggaccccaagccatccgct

SEQ ID NO: 3834 - DNA, 1623 bp, Artificial sequence
  DNA replication origin
atgatagctttgatctgtctggctttcagcttaagtcaagtcctatgagaaagaggaaaatcgatcccttttatcagagctggggacaagataagcagagagagaaaaatctttctgatgtcatgttgccctaggacacagttttagaattaaaaatcatagcagcttagacatcccagaaattttaaaagtgaaaggagctttaaatggatattactaaggaaagaagccgttttgaaaaggctacatactgtatgagttcaactataggatagtgtggaaaaggcaaaactctggaggcaataacaaagatcagtggttgtcagagcttagaggggagggagggatgcgtaggtagagcatagaggaattttaaggcagtggaaatactctatatggtactactacaatggtggatgtatatcattctacatttgtccaaactcatggaatatacaacaccaagggggaaccttaatgtaagctatcaactttgggtgaggctgtatcaatgtagcctcactgcttagaaaaaatgtacctctctggtggggatgttggcagcggggagattatgctctggtggggatgttggcagcgggggagattacgctctggtggggatgttggcagccgggggaggttacgctctggtggggatgttggcagcgggggagattatgctctggtggggatgttggcagtcgggggagattatgctctggtggggatgttggcagccggggaggttatgctctggtggggatgttggcagcgggggagattatgctctggtggggatgttggcagtcgggggagattatgctctggtggggatgttggcagccggggaggttatgctctggtggggatgttggcagccggggagattatgctctggtggggatgttggcagcggggagattatgctctggtggggatgttggcagccggggagattatgctctggtggggatgttggcagtcgggggagattatgctctggtggggatgttggcagcgggggagattatgctctggtggggatgttggcagccggggagattacgctctggtggggatgttggcagcgggggagattatgctctggtggggatgttggcagccggggagattatgctctggtggggatgttggcagcgggggaggttatgctctggtggggatgttggcagccagggagattatgctctggtggggatgttggcagcgggggaggttacgctctggtggggatgttggcagccgggtagattacgctctggtggggatgttggcagcgggggagattatgctctggtggggatgttggcagccgggggagattatgctctggtggggatgttggcagccgggggaggttacgctctggtggggatgttggcagccgggggaggttatgctctggtggggatgttggcagcgggggaggttatgcgtgtcaggtagatgagaaatttctatcacttctgcccaattttgctgtgaatctaaaactactctgaaaaaaaatgtgtatttaaaaaaaaacagtataaagaggttcggggctgggtgctgtggctcacacctgtaatcccagcaccttcggagaccgaggcg

SEQ ID NO: 3835 - DNA, 834 bp, Artificial sequence
  DNA replication origin
ttctcctttcccttgggtggacatctcaagcccaggcacttcagtgagtatctggatggcattaacatgtgacttacagcaattacacaggaaacaaatggggaaaaccagcacttcactatgcctcccctctttcttagtgattcaggttgtgtgagagggacattagtggccatcagtagttctcaaaccttgtgatctcaggccctctgttaagactctatgtcttaaaaattattgaggaccccaaagaacttttgtttatgtggactccatctatcagtatacactgtcttagaaattaaagctaagaaaatttagaaaccttaactagttaaaaagttaaagaacaacctccaaagcctatggctcaatacaatagatgtttattccttgctggagcagttcattgcagagtccaggccatgcgctccttctgtcttgtagctctggcccccactcaccgggtcttggcagctctgtgctgtatcctttgcatcttgccagcagtaggaaagagaggtagtggaggaaggcaggtgagtttctatgggttgggcctggatgtgaatgcatcacttcctcccacattccactggctaggacccggtaagacagtcatcttggctgtaagggaggctgagatagtcaggctctgccaaaatgtggctcaaaagcgtaagagtttaagagcactagtatccaggtacagtttgattttaatatttgttaagtgtcaattatagcatcatgaatcagtgtttaactgtaatcatggatttttcagcggcgtcaagcaccatgcttatcctgaacctcttatttcggttgttg

SEQ ID NO: 3836 - DNA, 904 bp, Artificial sequence
  DNA replication origin
atgccctgggtgggtgctggccgtgcgggcgatgccctgggtgggtgctggccgtgcgggggatgccctgggtgggtgctggccgtgcgggggatgccctgggtgggtgctggccgtgcgggcgatgccctgggtgggtgctgctggccgtgcgggcgatgccctgggtgggtgctgctggccgtgcgggcgatgccctgggtgggtgctggccgtgcgggcgatgccctgggtgggtgctggccgtgcgggtgatgccctgggtgggtgctggccgtgcgggggatgccctgggtgggtgctggccgtgcgggcgatgccctgggtgggtgctggccgtgcgggcgatgccctgggtgggtgctgctggccgtgcgggcgatgccctgggtgggtgctggccgtgcgggcgatgccctgggtgggtgctggccgtgcgggcgatgccctgggtgggtgctggccgtgcgggcgatgccctgggtgggtgctggccgtgcgggggatgccctgggtgggtgctggccgtgcgggcgatgccctgggtgggtgctgctggccatgtggacagccttcctgccttcctgtgtcctctcagccctggttcttcctttttcaaccattctcctttcccttgggtggacatctcaagtccagacacttcagtgtatatccggatggcattaacatcggacttacagcaattacacaggaaacaaatggggcaaaccagcacttccgccatgcctcccctctttcttagtgaagacagacattgcaagttgtgcgagagggactttagttccggtcagtagttctcaaattttgtgatctcaggccctctgttaagactctatgtcttaaaaattattgaggaccccaaagaactttcgtttatgtggac

SEQ ID NO: 3837 - DNA, 1075 bp, Artificial sequence
  DNA replication origin
cattcccaccctcactcttgctgcacagttgtgtttactttttctgggtagaggatgctgaactgactcagcaccctcctgcaggacggggttagggaatttggtgctcaattgctctcccttgctcttccccaaactgaaaatacctactgcaggatccctcggggcacactgaagcttggctgccaaccctcttacttcctttgttacagggaggggttggcttggggtgaaaagttctgccctccgcagggagcagctccagctgcctggcagtgctcccagtttgtagggaagccacaccagatctgggtgccttgggagaaccagtccttccttttgacccaccccaggaagatggagtgctcttttctaggcccatgttctgccagcaaccgggatgcgtgggcaactggactctgcacgggggtctacaggttgagggaggttggtcacaatgagaacctcggggtttgaggtggccatgggcagacagccgaaagggagggagggtgtgggtgtgcgtgtgtgcatgtgctggtgtgtaagggggaaagggtctttcctggttttatttaaataaagtagtttatgtaacagttaacatctactgtccttgctggaggaagagaaaaggggcaaagatgaggcaagggttgggcaagggaagagcagggttaggcggcaggctttttagatggtgtggtcagggaagggaggtgaaggaccagattgagtgagctgcgctatgcatgctcttgcgggggtggaaggccccatggccagggtggtcatgtacagggcaagtgtagagaagcaggggaggagttggtgcctcatggggccatgctgtgtgaggtgatgggtgccaggagagggtttggtagaaaggggcctgcggggtggagtgggctctgtctgagctaagagatgagagtgccagagggttgggatcttagatgtgtctggatgtgagcatgaatgtagagaagggacacaagtagtgatgccagatttatcaatacagtgaacccactgaaatttcagataggcagtatttttgtctgctgcagtg

SEQ ID NO: 3838 - DNA, 1171 bp, Artificial sequence
  DNA replication origin
ggcacccagatctggtgtggcttccctacaaactgggagcactgccaggcagctggagctgctccctgcggagggcagaacttttcaccccaagccaacccctccctgtaacaaaggaagtaagagggttggcagccaagcttcagtgtgccccgagggatcctgcagtaggtattttcagtttggggaagagcaagggagagcaattgagcaccaaattccctaaccccgtcctgcaggagggtgctgagtcagttcagcatcctctacccagaaaaagtaaacacaactgtgcagcaagagtgagggtgggaatgacaggggcctaagccttcaggacctcatgacttcacccccaacatgggccctcttagggacccactagcaccttggcaatgttgaggacccagcccagcggaaacaccatacccacaggagccagtctggagttggtgatgctccctatgttgacagtggggttgggtttctctccctgacaccagcttcctgcaggccctgtaagttctgctttggggcacacatcgcagagtgcctcaggtcatgaaagggaatgctgaagggaaaggtggtgtcttccggaggcacacagtacatcttacaggttacacacgggcaggctggagcaggacggggggcagggctcagcagcatacctagggtaccctccagagttgccttgggaaggggggcggggctggaaaccaacgggaggggtgactgtccatcccctccgacgggagtactcaggcccagcacccattttctctgatgagcttcccagtgccttctagaccaagttccctgagggaaaaagccaaacagatggaaagagagggagcagaaagggaaagcaaagggtcaatgccctgcagatcgtgatgagctggcaggcagaggcagacagagcgccgagggcgagccttctgaatgggtaaggcaaagagagccgcctgctgaggggaagggggaggctgtgagaacgccagggcaggcacagaggactcgaacacagctggcctctcccagggaagcactggagaaggggaccttcgggaagacgaggccccagaggagagggcgtgagaagactgtgggccccaaccggcccgtggtggcagattcaagccaggaaccctggcccctcggctac

SEQ ID NO: 3839 - DNA, 1096 bp, Artificial sequence
  DNA replication origin
catggggaagacgtggctcagaggcatgtgcctgtgatgtggtcctcgacggtcaggcagcagatccaagagagacagaaataagctgtcttgaggctcatagaccccgtgttcccctgcgtgtctcgggctctgtacacagttgggggtttgcagaggatgttcctgtttgggttccccccagggcgttgttcagattggcagcctggggcagatgccagagactgaagcatgggtcctggctcagtgatgtgtcctctgggccaggtgaatgaggcggaggaagagcggcttcgaggtgagcgggagcaccagcgagtgactcggctgtgccaacaggctgaggctcgggtccaagccctgcagaagaccctccggagggccatcggcaagagccgcccctactttgagctcaaggcccagttcagccagatcctggaggtagctgagtgggtgagggggaggaggaatgggtaggtgggggtgcaggctggaggggatgctggtcggcctctctgggccatcttggtgaggtggccagggtgaggcctccggctagcggtggggaagggtggtggcacacatgttccaaatgaccttgcaggagtgagaggcagggatgggggctggtgatgggggctggtgacggcgagaacgtagttggaagaagggaggtaaacaagaggaaaagaactggtggaaatctgggatggggaagaagaaccagccattgggtgaaagggaacagtggggagaggatgaggaagcaggagctggtggagaggaaggcctgagaggaaggctctggaaggtggggctcaggtcaggagcaggattgctggggaggaacaacgcagagcaagtggagcagggaagggtgttgtgggtctgtggtgggtgctgagagtggagcagggaaggctgttgtgggtctgtggtggatgctgagccagctgtccaggtattctgggagagcaggccctcagacctcagtgcagagtgctgaggaaggtggagacgtgccccatgggtcgccttgctctgctctgccctctgcaggagcacaaggccaaggtgacagaactggagcagcagg

SEQ ID NO: 3840 - DNA, 1069 bp, Artificial sequence
  DNA replication origin
agccactgccggaagtttaccagctcactttcggcgtcgcgcccgcctccgtggagcaggccggaagtggctttccggcagccgccgccgcagctccgtaaagcaagatggcactactcactctgaggctattatctccgttttatatctagtattcctcttctcaccagttactctcgatttccgtcccgcgccctaattttcttcagcaccacattctcatgtttttctttcattcagccttggtggagtatggtctggaggcaacctacggctagcctgagcaacgtggggcaccattttgtacggaaactgaaggcagggcgggggagtgtgaggcctcccgaggaggcccggcttgagagagagcgtgggagggagagcgttgttcaccgatgatgtatttccgcttctggtctgcctggtcgtttttggttggatcggcttgttgcggggagggagggggggagattgtttgcagcatagaagctccgcggacgggaaggtaaactgaggtaaggctgtgcggggggcttttgcgcatggctgggtagaatggacgggagtagggtccttgggattgcggaagagtgtggaattggagacgggaggcttagatgtctcgggttggacagagaaggtggggtggggctcggggttacaaggtgaatcgcaaagccgggctggggtggagtgggacgagcgggagaccacaggagatggaggagagcctaggggtgcagaggaaagtctcgaaggcgctggttgaggagggcctgggtcgagaggagctgggacgggggaagagtagaatctaaagtccttgagggctaaggagagaagttgaggtagggactggtcggaatacatgggtgggggcgtggtgagagtgtagtttttgggaggctgtagagttggaaggggctggtggctgcggttttgatgctgacatgaccatatacttggcctttgtttctctgcagctccccagagacgctcatcctacagcctcagctcgggcccagccttctctctccagctgccaccacagcctggaggcgcctgcctc

SEQ ID NO: 3841 - DNA, 1486 bp, Artificial sequence
  DNA replication origin
tcgccacatgcgtacggcttctcgcccgtgtgtgtgcgctggtggcgcaccagcgtggcgctctccaggaagcccttgccgcactccgggcacttgaagggtttctcccccgagtgcgtctgcaggtgtcgcgtcagcgtagagctcttgccaaagcacttgccgcacacgccacactggtgggcgtctgagacacggggtcgcgtggggctccgggacacgtggatgcgcgcgtgactccgcagcccggcgccgcttcggaaggctcgcgggcactgcgcgcagcggtggggtggggcagcagggtcagaggttgtccccaaggggtgcgcccgcgcctggtggaagagcagcgcgctctgccggaaggtgcgggcgcacagcgggcagcggcggggccgctctggcagatgctggcggcgccggtgtagcagcagcgccgggaggtgcgggaagcgccggccgcatgtgcggcaggggcaagtgcggcatcgctgccggtgtgcgcccaagtgtaggtcaagacggccgctgtggcggaagctttgtccgcactcactgcagatgtagagggtctggccagcatgcgtgcgcctgtgcgctcggaggtcagcagcccgtgcacagcgctcaccgcattctaggcaacggaagcggccgtcaccgccgtgagctcgttcatgtcgcagcagcactgagctgtagcagaagctcttgccacattcgctgcacgagtaaggcttccccgctgccactgccccagatgtggcaaacatggtgaggacgggttcacagggaagcgtgccactcacactctggggtccacctcctgacgctgcagctaagttttacttctcttaaggcctggaaagggcactgtaacagagaggaaagggggaggccgcaaaaactggtctgatttcagggttcttctctaaggggcagacattgtggctgttccagggtgagctgtggccaggttcaccctgcaccgtgagcctgtggggagaaggtcattgtgagcctctgcagcagctcctaaggaatggagaggggaacacgaactccctatttgttataacttctttaggtagtccatctccaggattcccttccccaagacaaagcaaagccatgggcatcccggaaatagggagggggtgtccttgaaccacttggaagggcaggagggaaactacaagtgtcctggagaacaaacaggaatggattcaaaggggagcttgcatttagcctgggaaccatcaacactgctctgagggaaaggaacgccaagcctgttcgctggccttagatggggatccttgtctggggatgcattaggaaatgaccaaggcaggatggggcagtgagaagtcccctgcgtttagactataccaacgccttcctccaaaacccagctttcctgagtcactgacatgaacccagccagacttgggctggaagaacaaagcgggtaatgtgatga

SEQ ID NO: 3842 - DNA, 968 bp, Artificial sequence
  DNA replication origin
ggcgagcggccacatgcgtgcgccacttgcggcaagggtttcgggcagcgctccgacctggtggtgcaccagcgcatccacacgggcgagaagcccttcgcgtgccccgagtgcggccgccgcttcagcgaccgctcggacctcaccaagcaccggcgcacgcacacgggcgagaagccctaccgctgcgaactgtgcggcaagcggttcacgtgcgtgtccaatctcaacgtgcatcggcgcaaccatgccggccacaagccacacaaatgccccgagtgcagcaaggccttcagcgtcgcctccaagcttgcactgcaccgcaagacgcacctgggcgaacggccagcggagtgcgcagagtgcggcaagtgcttcagccacagccgctcgctgtcacagcatcagcgggcccacacgcgcgcccgcaccgctgccgccgttgccatccagtccgcagtgggcactgccctcgtctttgaggggccggctgaacaggaaaagccagggttctctgtgtcctagttgagggaggcttgctgaggcttctctaaaggtggttgggcaagcacctatatagtatcacggggacagttgaggcaactcgtagatggagatttgggaaaagacgatgtggcctcctacctttccagtttctgttggcagcccttcacgtagcctcctgcctcgcctctacacctactaccctgtcggcccttttgccatgctgtcctcgtataactcggattctctcctcaggtgtaggtgcagggagtcagggaacccttagactcccctgtgtgcaagagcccaggtgttggtgtgtccctttaatgctactgtgctctctggtgtttctgattttcctgcctttattctgtcttctcttgtcctatctcattccagcccacatcttctcctttcctgattacttttgttgtcctgcctcttcaggtaatggtcacaga

SEQ ID NO: 3843 - DNA, 762 bp, Artificial sequence
  DNA replication origin
ttctgtatttctagaaagttggaaaagtgaactgatgagggaaatgcagacacagtagggcaagaaggcggccttaagacttgtggttttagatgaaaagagtggccaagaggcagattttgcccttacagtacacatgtgcaggcccggaacagaccaaaagttgtgtctatcctgagttgggctttaaccaagcaagtacagttgacggagagagggacaggaagattggtagtgtgaatgaaagaaggcaacaaagatggctgtggaaatgtagctgagcggggaaggggctcagagggaagatggtggggccagtggactggcctggaatcatgggattatcatagcaagaggacaagattggaggccctggcatgaaccaggatgtttgaaatcacaatttcttttttttctcctcctaacccactgtatcttagaagaaatagcaatttctgaagtggtgcagtgcatgggtgtgacctgagactggtggctgaggagggtgggcgatgaggtcagtgaggtgagggaacagagggctggagtgctgattgacagcaggagtagtggctgacaggagtagaggggctgaacctagagttgtgtggatggagggggagtgatggggccaaaggaggaggctgcaggtgtgtgtttgtgtggtctgatggtgcggtcttcagagaggtggggatgttagaggtggtctaaagggcaccatgagaagcaaagacaccttttttactgtacaccctgagg

SEQ ID NO: 3844 - DNA, 860 bp, Artificial sequence
  DNA replication origin
acaaaacgggaacaagtgaagaggcaacgtccccatacaggccgggtgggctggggttggagcacaggaggcctgaccctgtctcttccactttccctcaaacctttggtcaccaagcgcagacgctcaccacagaagccacccaaccacaactgccgcggggctccgcgacacgcgcgggcgacttgagtcgggcaaccacgattcccggcgggcgttgcgcggggcacccagtgcgcaggcgcacggcgtcggcctccgactcgcccctccctctggggcgcgggcctcagttccgggctacagcagccgacgccgagaggcaccgtttcttcttaaaagagaaacgctgcgcgcgcgaggtgggcccctgtcttccagcagctccgggcctgctcgctaggcccgggaggcgcaggcgcaggcgcagtgggggtgagggcgcgtgggggcgcacaggtaaggccggggtgggggtgggtcgcgacgggggctctgggcagcctgggaactgccattgggattagtccgctccactcactgtcagcattaagtgggggtgcccaagacggggtggatggggggcgccctccagacctctgaccacggcctcaccgccactcgacccaactatgaagagcgcccccagctgcacgccaggacacgacctttccttcccctagaaaccagtaaaggccgctgccctattcaagatgaaatgtgtggaccgcccccagcccagttgaaatttcccgtgaaagtctctcgccccttccccacagctccacttcagtggactggagggcgcaggcctttgttctgactgcttctgtctgcctgcctcccacccgacgacactc

SEQ ID NO: 3845 - DNA, 1379 bp, Artificial sequence
  DNA replication origin
tgacacagaaggaggcaatgtgacctcagagacagagattggagtgacgtggccacaagtcagagaatgctggccaccattagaagctagaagaagcaaggaaaggattctcccctagagcccttacaatggcctgtggccctgctgatgccttggcctccagaactgtgagaaaataaatttgagtaaagggagcaagtttgtggctgaaaacaacacacaacacaatttgttacaacaattacagaaaattaataccagtggcttggagtagggttttagcagttgagagggtcagaagtgattggatttaagataaatttttggagacaggaccaacaagatttgctgatgtatatggtttaggtatcataaaaggcaaagaatcaaggctgattcccttttttctgaacaagtgggtggatgatgacatagtttactggcatgggggagggtacaggcgttattgttatatgtttgccatatttatgttggagaaaatatcagctatcatgtgtcagcgctctctacatgccaggcactgtcctacattctttacacgtgttagctcagttaacacatgtaagtcaagcgggcagtaagatatatgactggagttgaaagagggctaggctaggagccatcagtgtatttaaagccatggaactaattagatcacccaggagaacatatgcagacgagagaagatctggttcaaggcctgagccagggcacacttcatcttttggcagaacagagggaatggatccaaaaaaaggatagaaggagccagtgaggagggtggaaaacctggagcatatgaagtcacagaagtaaaactggggcccaaaatgtagagggagccataaagatgaggaggacgagagctacatagtcgcgctctttctagggcagagaggcggacggaactgacagctgctatgtagcaatatgaccgtctcaagtgaccttgtgaagcgccactgcagtggctgggtggggaggaaagctccatcagagccatttgaagagaagaggatgggaagtgagcgtacacagagaatgcaggcaacttttaggaggaattctgatggtaatagaagtgggctgtagctggtgggactctgcggtccacagagggctctagctggaccctctgtgggtctttcaaagtgactgattctgcatcatgtttgcgggtggcaactgtgagggggaaatcgaaggtgaatacaaaacgggaacaagtgaagaggcaacgtccccatacaggccgggtgggctggggttggagcacaggaggcctgaccctgtctcttccactttccctcaaacctttggtcaccaagcgcagacgctcaccacagaagccacccaac

SEQ ID NO: 3846 - DNA, 1032 bp, Artificial sequence
  DNA replication origin
aggcatttctgagcctccgcgggcagcggggtccttcccagcccctggagagtgaagagatgcctgggtctgcagccacagcttgagccgcagtagctgtgcctgggagggcgggctcctggctgctcctggcccccaagagcacagggaggccttggtcggcagccacagccgggcggcagaggctgcacccgtgagcgcgaaggtcccaccctatcaactcaggagggggcggggcttctgcctgttcctggctccactcgcttcatggagcgctgcagccagcatcacggcagtggccaccctagacgggctgctgctgccatcagcacaaccacagcgagggtgggcagctgctgcttcagcaccaggagcaacatgtcgctccgctgccggcgtcgcgggctccgccgcgtcaagcacccctgcagacgctgaatttaccacggcgagtctcttggcggctggcttcctcctccttcatgtcgtctgccctccggcccggagccaaagctaacaggaccaacccaggcagctgggccagccaggagcaagggcaaccgcatctcttgtataccaccccaccctacctgggccacatggcatcacagagcgcccaggtcagccgcactagggcatgatcagactcagggtagaggcaccacccttcagttgtcaggggctcaggggaaacggaattgcactcccagcaatgatgactagttggaggatgaagacaccagtcactgagaggatgagggctgagaaagagggaggttcatgcaaatacctggagctgggctgggctgagggtgtctgtgggtctcgtggaatttggggtacaaagtcctgaaggagtgttccttttcccactgggaatacatctcaggatttgagggcagtgggttgactcaacttctgtagcaatttggctcattcctccttggatctggagagtggaaagtagtttttctctttggagagaagatactaaaagttcagagggtacagcaatattagatttggctgtgc

SEQ ID NO: 3847 - DNA, 2422 bp, Artificial sequence
  DNA replication origin
agtcccagctacttgggaggctgagtcagaagaattacttgaacccgggaggtggaggttgcagtgagccaagatcgcaccattgtactcaagcctgggtgacagagcaagactctgtctcaaaaataaataaataaataaataaataaaataaaaagaaaagaaagaaatggagaatccttttctgtcatcttgttctatccctaaggtggacaattttttatcactttggagtcctgtctgacgggagaaagtgaacaatggaggagggttgttttccattaccctcatatcctaatgcttctggtggcctatttggccttcagacccttctggccagcctgacctcacctccctgtctcccatatgccccagcaagcttggtaccttttcctaaaggtgcttgatctgtctttgttctttttgccttgcccagaaaagtcccttgctctagctgagccccatggaccagggatgctgcagagaataaaacaaattatctgtcctcaagatgctcacattccagcagaaacacctagactaaataaaataattatttggtggggatgggtagtgatacatactgttgagaaaaataacgcatagaaagaggttagggagagatgcaagtggttcagaaggtctctcagtatgtggcatttgagcagaaatttcaagagagtcaaggagtgactagataaaatatctgagggaagagggctccagggaaagagaagagcagaagaaaaggccaacaagaaatgcaaaacagacagtatggttgaaactgagtgagaggacctggtgctagcctttggattgacagtgagtgaaaaggaaggttttgagctgtgtgataagatctttcctgcttttcaaggatccccttggctggttatggtggctcatgcctgtaatcccaactcatgcctgtaatcccaaatctttgggagctcaaggagggaggatcacttgtgccaggagtttgagaccagcctggacaacatagtgggagaccatctctacaaaagatttaaagaatttgctgggcatgttggcatgcacctgtcgtcttagctacttgggggttgagatgggaggattgcttgagctaggacttcaaggatgcagtgagctgtgatcgtgccactgcattccagcctcagtgatggaacaagatactgtctcaagaaagaaaaacaaaaaggatcctctggctgcgtgtggagggtagaatatagaacacaagagtaaggcagagagaacagttgagaggtgctgcaagccacgttggtggactggatggcaacaggccgcgtggcaagcaagatttgaattctgggtatattttgcaggtagagttaataggatttgttgatgtgcaagaagtaaatgagccacaaaaaggattttttgacctgagcaatagaaggaaaaaactcatcatttactgacaaagggaaggctaaggggaggcagattatggaggagggagagttcagttttagaccttccagtttgagatacctaatagatgtgtcaagtaagcagttaggaacgatcctctggagtccaggggagaggtgatgctttgtgatcaagtcctgtccatttagttttcaaggtaaagcatctttcattatggtctgtcctaggggaaaaagcatggtgtggttagcctctgcatgagtacccagaaagtctaaatataggccaaaggctagaaataagtataggcttgaagcccaaggccctaatctagtggatcacagtctctgctcagggctccaaatgggatgtttagtcacaagctgttttaggtgctcctggagagagtgaactgaagactaacaatgaggaaaggggagacagagaattctttagttcccaccatgtttcccagttctgactggtgggaggcttcatttctaaccagctgaatgagcagtgtgaggagggtaagatctaccaggtcctggtgggtggaagcatggagagagagctagggcacaactcaaaaatagtctggtgagtggactaaacaggaggggaatgcaacaggaatagaactagaagaaatgtcttcaaattgttggtggctcaccaactcttctgtattagaagcttaatgctggaagatggctgaagagaaatggttgtttcattttttagcccaaatgccaaactttttaggtacagaaggaggaaatgagatgaggcaaggaaaaggggagaagatgaaggagagaaagagggggcaaaattatgcaatgagagagtcagaggcgagcaggaggaaggggcagttagaagtaaaacagaaggaacaacattatagcacccaggctgttcatgctgaggggcacctgcaggtcagtgctggtctgccctcagccctcacctcggcctccctcctgtgctc

SEQ ID NO: 3848 - DNA, 1107 bp, Artificial sequence
  DNA replication origin
gcccaaaaatatttcttaaaagtactttagacattctcttgtggctcttcatcaaagtatatatctcttattaagcaaaagagatgacaaatcattgaatcaagcattctcaaaatttatatcatgaaacccaaaaagtataacccatatgccccactcacaatcacaaattttctcaaaaatatctacagcacagccagtctacactgtcctcacccaccgagttccctctgttgtctggcctcaaattggatttgtagagaagaggctaatactgttatctcagtctagttggctacaggcagggctgccccaccttgagagaaccattaatgtagtgggcagtgtccagcactctaaaaaataaaatgaaagacaaaacaaaatgttggagcaacacatctgacagagacacattttgtttgcataactttttttcagttatgtaaccatgagtgtatgtctatgttaccatgcatgcgtcagtgcgtgagtgatttgtgagtggtatgtgcatgcctgcgtgtatattgtgggtgtgtggtgggtggtgaatgtgtgtgtctgtgatgtgtgatgtctgtggtgtgtagagaggtgtggctgtgtcgggggtggggaggtgtggtgtgtggtgcatgtgtgtatctgtgatgcatagcatctgcagtgtgatggggggctgtggatgtgtggggaggtgtgtggtgtgtgtgggtgtgtgtggtgtatgttgtgtgtgtggtgtgtggtgcgtgtgtgcatctgtgatgtgtggtgtgcggggtgtgtaatgtataatgtgtagtgtgggtggtctgtagcgtagctgggtgtgggtgtgtgtgggggtcggtgttggtgtgtatggtgcatgtgtgtatctgtgaggtgtggtatgtgtggtgtgtgtataatgtgtatgatgtggtatgtgtgtggtgcatgtagtgtgtggggtgagtgattgtaagtgggctgagtcctttcatgacatggattacttctgtagcccttagactggtaagagaccacatggtttgtgtagaatagtcaggagccaggcagcctaaacttgcatcttgacactggctcataggaactttg

SEQ ID NO: 3849 - DNA, 1609 bp, Artificial sequence
  DNA replication origin
cgcggccgcgacgcccgacgccaacgcaggcgcagcgctccgattcggcgcggctcatggtccggttcgggctcgcgagtctccgtctggggtagggcaggtaggcctcagtgtgctcgcgctgcaggcagggcttcgcttgagtacaggagtggttggcgttgatgttgcgttttctcaacggcggcatccgaggagttcgtcctcaccactgcgcgccgacggtgggctggcgggaccaggacaggaacaatgggattccgagggccgcaagggggcgctccttctgcgggttggggtgcgaggccggaggccgggccggctgagcgggaggcggagcggggtgggtggggaccagggcggggtcgggctaaagagggatggattcagggcggggtgggagggaccagggcaggctcgggcggggtgggcgggacgaaggaggcgggcggcctgaggctggcggcgggactgcgaatgccacgtcacatcctggggcggggtggctctgtgccggggcgcgctgggggcgggtcgtttttaactgcgtctgcctgggaagctgctgaggtttctgagggtctttgtttgcccttctttctcttttgctagtgaggtgaagagaagggagggttcttccgtatcccacaaaagccattctgagctgttgggtgaaggggtggcctgcccttccacacctgtgggatatcttgtcaggtgggaggagagactgagaaaagaaataagacacagagacaaagtatagagaaaccacagtgggcccaggggaccggcactcagcataccaaggacttgcaccagcaccggtctctgagttccctcagtttttattgattattgttttcattatctcagcaagaggaatgcggtaggagagcagggtgataaggaggtcagcaaagaaacatgtgagcaaaagaatttatgtcataagttcaagtggaggtactatgcctggatgtgcacgtaggccacatttatgtttctctctgcccaaacatttcagtggaataaagaataacagggcagcattgctgccaacatgtcttgcctcctgccatagggcagtttttctcctatctcagaattgaacaaatgtacaatcaggttttgtacggagacattcagttcccaggggcaggcaggacacagtggccttcatctatctcaactgcaagaggctttcctcttttactaatccacctcagcacagacgggtgtcgggctgggggacggtaaggtctttctcttcccacgaggctgtatttcagactatcacatggggagaaaccttggacaatacccggctttccagggcagaggtccctgtggcttttcatggtgcattgcgccccttgtttattgagactagagaatggtgatgacttttaccaagcatactgcttgtaaacattttgttaacaagacatgtcctgcacagccctagaccccttaaaccttgattccatacaacacatgtttttgtgaggtcaaggttggagcaaagaggttggggcaaagttacagattaagagcatctcagggcaaagcaattgttcaaggtacaggtcaaaatggaatttcttat

SEQ ID NO: 3850 - DNA, 1061 bp, Artificial sequence
  DNA replication origin
gcatctctagtgctggagtggatgggcacttgtcaattgtggttaggagggagaagaggtacctacgcagaaacaccctagaacttctcttaaggtgccccaatcggatgggcgcggtggctcacgcctgtaatcccagcactttgggaggccgaggcgggtggatcatgaggtcaggagatcgagaccatcctggctaacaaggtgaaaccccgtctctactaaaaatacaaaaaattagccgggcgcggtggcaggcgcctgtagtcccagctcttcgggaggctgaggcaggagaatggcgtgaacccgggaagtggagcttgcattgagccgagattgcgccactgcagtccgcagtccggcctgggcgacagagcgagactccgtctcaaaaaaaaaaaaaaaaaaaaaaaaaagatgccccaatcatcattcactctgcaataaaaatgtcagaatattgctagctacatgctgataagaaggacaaaggggacatttttaagagaaacctggcaccataagtacagattagggcagagaaagacattcaaaagaggcagctgcagtagatacaaacgtgaccgctgtcagcctgcctggtatggcgggaaggaggctggtgccagagtggattcggattgatcaccacacatgtacctcaatcaacagtgaggaggtcccacaaggctaagtggggcaagtcggggacctatggcagtagcaggaaaacgaaagaaaacaggcggagacttgagacagaggcaggaatgtgaagaagtccaaaataaaaatccctgcacaggactcttaggctgttttcatgcactatcagcctactcctccctatttttgtacaataagctctttactctgtatttcttttcaatgaagttatcttccatctttgtactgcctcttggtgaaaagctgtcttccaagttaataactgggacatcagctctccgcagtaatagctccttttcagttttaatttacagaactgatggggattaataactggcgctctgactttaagtggtgcaggaggtggccag

SEQ ID NO: 3851 - DNA, 939 bp, Artificial sequence
  DNA replication origin
gctgctccgcctttacggtaccccccaggtctgtgctgaacagaacacagctccgccctcgcagtgccctcagcccgcccgcccaggtctgacctgagaagaactctgctccgccttcgcaatacccccgaagtctgtgcagaggagaacgcagctccgccctggcgatgctctccgggtgtgtgctaaagagaacgcaactccgccctcgcaaaggcggcgcgccggcgcaggcgcagagaggcgcggcgcgccggcgcaggcgcagagaggcgcggcgcgccggcgcaggcgcagagaggcgcgcgcggcgctgttggggagacgcggcgcagggcatagacgcacgccggcgcctccccggaggggaggggtcgctgggcgggcgggagtgaggcgcggcgcaggcgcagagacgcacgtcgctcggctgagggtggcggggagtgttgcagtcgcacagtcgcgcgccgccgggcggggagcgcgggggtggcgcggtgcacgcgcagagacacacgtccccggcggcgcagagacgagtggaacctgagtaatctgaaaagcccgttttgggcgccccctgcttgcagccgggcactacaggaccagcttgcccacggtgctctgccattgcgccccctactggcgactaggacaactgcagggccctcttgtttacagtggtgtccaccgccccctgctagcgccggggcacggcagggctctcttgctcgcagtatagtggtggcacgccgcctgctggcagctagggacattgcagagccctcttcctcacattgtagtggcagcacacccgcctgctggcagctgggcacagtgccgggccctcttgctggcattgtcgtggctgcacgccacatgcaggcacatggggactacgcagggcactcttgctcccggtgtgacggctgccgt

SEQ ID NO: 3852 - DNA, 1257 bp, Artificial sequence
  DNA replication origin
aggcgcaccgcgcccgcgcaggcgcagagaggcgcaccgcgcccgcgcaggcgcagagaggcgcaccgcgcccgcgcaggcgcagagaggcgcaccgcgcccgcgcaggcgcagagaggcgcaccgcgcccgcgcaggcgcagagaggcgcaccgcgcccgcgcaggcgcagagaggcgcaccgcgcccgcgcaggcgcagagaggcgcaccgcgcccgcgcaggcgcagagaggcgcaccgcgcccgcgcaggcgcacacaggcgcaccgcgcccgcgcaggcgcacacaggcgcaccgcgcccgcgcaggcgcacacaggcgcaccgcgcccgcgcaggcgcacacaggcgcaccgcgcccgcgcaggcgcacacaggcgcaccgcgcccgcgcaggcgcacagagggtcgctgggcaggggttgggggtcgtactgcaggtgcacagctgcataagcgcacagtcgcaagccgccaggcgcggagcgtgggggtggcggggtgcaggcgcagagacggacgtccccgggggcgcggcacagagacaggtggaacctcaataatccgaaaagccgggctcgggaaccccctgcttgcaaccgggcactacaggatccgcttgcccacggtgctctgccagtgcgccccttgctggccactagggcaactgcagggctatcttgcttacagtggtgtccagcgccctctgctggcgtcggagcattgcagggctctcttgctcgcagtgtagtggcggcacgccgcctgctggcagctagggacattgcagagccctcttgctcacagtgtagtggcagcacgcccgcctcctggcagctagggacagtgccaggccctcttgctccaagtgtagtggcagctggctcccccgctggcagctggggacactgacgggccctcttgcttgcagtatagtcgtcgcacgccttctggccgctggcggcagtacaggatcctcttgctcacagtgtagggccctcttgctcccggtgtgacggctggcgtcccctactggccgcctcctgcaccaattaaagtcggagcaccggttacgccccatcacttctgtaaattcaaactgaaacggagctattagtggggagagctgatgtcccagttcttgtttaacttggaagaaagattttcaccaagaggcagtacaaagatgacagataacttcattgaaaagaaatacagtgtaaacaccttactgtagaaaaatagggaggacagg

SEQ ID NO: 3853 - DNA, 1195 bp, Artificial sequence
  DNA replication origin
gcgtcgcttccgagggcagcggcccgggggcgatcaagtgcccggggaacgaccctgggcccccggcccgcgccccggccccggtggcgcgcagggctattgcgcggaagccgttgagaccggactcgctgatcatctaccggcagaaatgcgaattcgtgcgaggatcgggcgccgacggccccagggcaagcctggtgaagaagctcttccaggggccgggtaaggacaaggcgccggtgccccggacgggagacgagggcaaggccgggaacccggagacggtcccgaccactcctggccccgcggcggaccccgcaatccccgagaccccagccccagccgcgcggtccgcggcgccctccagtgtcccggccgcgccccctgggccagagccgcgggtggtgaggcgtcgggggctgcagcgctcacagtcggacctcagctcccgctattccgctgccttggccgagtctgacaccttcttccagtactgcggcctggaccccgaggtggtggaggccctggggagggagaacttcaccgcggggtcggactgtgtgaccctcaaggtgcgcagcgtgagcgtcgccacctccggcagcggcttctcccggcacagcggcggcgacgacgaggggctgcaggaggaggagctgatagagcaggtgcccagcaccacttcggtcatcgagaggaacgcccgcatcatcaagtggctgtacacctgtaagaaggccaaggagacccccagccaggagcagagccggacccgaggtgtgtgcccagaaggctgggggcggggctggccgtgtgcggggctgtgaatcttggtgagtgtgaccgagctgggcgatggccagttacagctgcttagaattgagtgcgattttgagctacagtgtgaaagggacccaagagactgacgcagaggcttgtgagttgagcccccgctgctgaagagcagaaggtaccaatccaggcacctgctggtccaggcccttaggagtctgctgcgtctggctgcctggaaaggcaattctgcaaattaatatgtcccatttggcttattattgtgaaaacaggagaaatccaaaatgctgccagaaagcagttttacacccctagtattctttcctgagctgaaaacagcttgagagccctagttcctgagttcattgacctgtgctgtggg

SEQ ID NO: 3854 - DNA, 1060 bp, Artificial sequence
  DNA replication origin
caacaggatcccaaggcagaagaatttttcttagtacagaacaaaatgaaaagtctcccatgtctacttctatccacacagacccggcaaccatccgatttctcaattttttccccacccttcccgcctttctattccacaaaaccgccattgtcatcatggcccatccccagtgagccgctgggcacacctcccagacagggtcgtggccgggcagaggggctcctcacttcccagtaggggcggccgggcagaagcgcccctcacctcccggacggggcggctggccgggcggggggctgatcccccacctccctcctggacggggcggctggccgggcagaggggtcctcacctcccagtaggggcggccgggcagaggagcccctcacctcccggacggggcggctggccgggcggggggctgacccccccacctccctcccggacggggtggctgccgggcggagacgctcctcacttcccagacggggcggttgccaggcagaggtgctccccacctctcagacgatgggcggccgggcagagatgctcctcacttcctagatgggatggcggccgggcagagacgctcctcactttccagactgggcagccaggcagaggggctcctcacgtcccagacgatgggcggccaggcagagacgctcctcacttcccagacggggtggcggccgggcagaggctgcaatctcggcactttgggaggccaaggcaggcggctgggaggtggaggttgtagcgagccgagatcacgccactgcactccagcctgggcaccattgagcactgagtgaacgcgactccgtctgcaatcccggcacctcgggaggccaaggctggcggatcactcgcggttaggagctggagaccagcccggccaacacagcgaaaccccgtctccaccaaaaaaaaacgaaaaccagtcaggcgtggcgacgcgcgcctgcaatcacaggcactcggcaggctgaggcaggagaatcaggcagggaggttgcagtgagccgagatcgcagcagtacagtccagcttcggc

SEQ ID NO: 3855 - DNA, 981 bp, Artificial sequence
  DNA replication origin
gcccggccgccaccccgtctgggaagtgaggagcgtctctgcctggccgcccatcgtctgggacgtgaggagcccctctgcctggctgcccagtctggaaagtgaggagcgtctctgcccggccgccatcccatctaggaagtgaggagcatctctgcccggccgcccatcgtctgagaggtggggagcacctctgcctggcaaccgccccgtctgggaagtgaggagcgtctccgcccggcagccaccccgtccgggagggaggtgggggggtcagccccccgcccggccagccgccccgtccgggaggtgaggggctcctctgcccggccgcccctactgggaggtgaggacccctctgcccggccagccgccccgtccaggagggaggtgggggatcagccccccgcccggccagccgccccgtccgggaggtgaggggcgcttctgcccggccgcccctactgggaagtgaggagcccctctgcccggccacgaccctgtctgggaggtgtgcccagcggctcactggggatgggccatgatgacaatggcggttttgtggaatagaaaggcgggaagggtggggaaaaaattgagaaatcggatggttgccgggtctgtgtggatagaagtagacatgggagacttttcattttgttctgtactaagaaaaattcttctgccttgggatcctgttgatctatgaccttacccccaaccctgtgctctctgaaacatgtgctgtgtccactcagggttaaatggattaagggcggtgcaagatgtgctttgttaaacagatgcttgaaggcagcatgctcgttaagagtcatcaccactccctaatcttaagtacccagggacacaaacactgcggaaggccgcagggtcctctgcctaggaaaaccagagacctttgttcacttgtttatctgctgaccttccctccactattgtcctatgaccctgccaaatccc

SEQ ID NO: 3856 - DNA, 1441 bp, Artificial sequence
  DNA replication origin
ggagggagggaggaaggaagggagggagggaggaagggagggaggaagggagggaggaaggaagggagggagggaggaagggagggaggaagggagggaggaaaggagggagggagggagggagggagggaggaagggagggaggaagggaggaaggaagggaggaaggaagggagggagggagggagggagggaggaagggagggagggaggaaggaagggagggagggaggaagggagggagggagggagggaggaaggaagggagggagggaggaagggagggaggaagggagggaggaaaggagggagggagggagggagggagggaggaagggagggaggaagggaggaaggaagggagggaggaagggagggaggaagggagggagagagggagggaggaagaaatgaaggaaagttgtagaactaagtaacatccaaaattgtttccacaaaataaataatgcagttaaatatttcatcaaccacaaaaattaatgcagccattactactataaaggaagatcacaaatccagaacgcaacatttcaagggagagatgatgagacaccagaagacaatgaccatgaactgatagaagtcagaaaataaatagaaaagcagacttatctccaaaagggtagcaaacacagatgcagccccatgaagagccattgcaaggaaccccttagaaaacagaaaatgaaaacaaagcaaactaacaaaacttaaataaagggtctgttgtgagctgaatgtttgtcttcccccaaactcctaagttgaaatctactccccagtttgacggggttaggaggggtgttgaggaggtgacgaggtctggaggggagccccatggatgagattagagcccttataaaagaggccccagagatacctcacaccttacaccacgtgagggaacagcaggaaggcaccacctgcaacccagaacaggtgctcatcagaacacgaccatgctggcaccttgatcttggacctccagcctccacaactgtgagaaatgcgtatctattgtttacaagccacctagtctatggcactttgctgtagcagcttgaactaagagttaaaaagactgtttccaacagtaagccagattttatacttttagtaaccatgtccattaaagtacaggaggaaatagatatttttaaaagcaatgctgagctggcacaaaaaataggaatgcagagagcaaaaacaaagtgaaggcaggaatcctgtaaggtaatgcctaacccagattgggtgcagattgcagactggactctgaaggctgcactggatacaaaattcaggagaagaagtcaagggctgtgtaaggtgggaagatgaatcagagatccccaaataatctgagactccaaaggccatgcactctgtgtaagaataaaaagaaataaactctacacac

SEQ ID NO: 3857 - DNA, 1832 bp, Artificial sequence
  DNA replication origin
ccatgacttaatttttctttttttttccttgagaaagagtttcactcttgttgcctaggctggagtgcagtggcgtgatctgagctcactgcaacctccgcctcccgggttcaagtgattctcctgtctcagcctcctgagtagctgggattacaggcacgtcaccatgtccggctaattttttgtatttttagtagagatggggtttcgccatgttggccaggctagttttgaactcctgacctcaggtgatccacccacctcggcctcccaaagtgctggattacaggcgtgagccactgagcccagctgacttaatttttctctaaataaaagaagaaactacaatgagattcaactgaatgctcaaggcaggtcaacacagtgaaagcatttgttactcaaattaatcactgcaatgtggaagtccaaagttagaactgaaaaataatatgacccatcaaatgagaggcagcatgggtcaggggaggcagcatgggccaggggaggcagcagcatgggccaggggaggcagcatgggccaggggaggcagcatgggtcaggggaggcagcatgggccaggggaggcaacagcatgggccaggggaggcagcagcacgggccaggggaggcagcatgggccaggggaggcagcatgggtcaggggaggcagcatgggccaggggaggcaacagcatgggccaggggaggcagcagcacgggccaggggaggcagcatgggccaggggaggcagcatgggtcaggggaggcagcagcatgggccaggggaggcagcagcacgggccaggggaggcagcatgggccaggggaggcagcagcatgggccaggggaggcagcatgggtcaggggaggcagcagcatgggtcaggggaggcagcagcatgggtcaggggaggcagcatgggccaggggaggcagcatgggccaggggaggcagcatgggccaggggaggcagcagcacgggccaggggaggcagcagcatgggtcaggggaggcagcagcatgggtcaggggaggcagcatgggccaggggaggcagcagcacgggccaggggaggcagcagcatgggtcaggggaggcagcagcatgggtcaggggaggcagcatgggccaggggaggcagcatgggccaggggaggcagcatgggtcaggggaggcagcagcatgggccaggggaggcagcatgggccaggggaggcagcatgggtcaggggaggcagcagcatgggccaggggaggcagcagcatgggccaggggaggcagcatgggccaggggaggcagcagcacgggccaggggaggcagcagcatgggtcaggggaggcagcagcatgggccaggggaggcagcagcatgggccaggggaggcagcatgggccagggcacccctgggtgtgaagaaccaatgtccatcccagctccgcttctcgagagctgtggactttggggtcttttaaccagtctttgtgtctctgactgttctgtgtttaaaatttgcttactaggacctacacctcatggaactactgtgagaatcagatataggcgtcaagtgtacctgggaagttgaaacagtgctggcatggggctaagaatttgggctcaaaattaaaaatagttaggtgggaactccattactcccttttgcatgctgtgcgaccttgggcaaatcactgagctgctgaaagctgcaatttccttctctggaaaatgggtgtaataatagtggcacacattcaaggctgtttacggatgaattgaaatcagttcaataaaacatgcaaaggtcaagcagactcgtgct

SEQ ID NO: 3858 - DNA, 822 bp, Artificial sequence
  DNA replication origin
ggcctcgcggctccgcgggccgcccacctgggttggggcacagcgcgagtctcgcgcacgtggcgggctgtggtgcctgtcgttcgagttcgcatagaggggctgggcgggtcacgcggggaacctgccttgagccccgcggggtccacgccggaccagggcggccttgggcctgggcgctccctgagacccccacccccaacaccgtgcttggagccgccgcggggctctgggcttttcgatcttgaggacggggcggttccgaagtccctgagggcgaaggcctgagcgcggcccggcgggcgcgtggtttttgtcccgcgaaacgtacacggcgggtgttttgcgccgcctccttcgtcacctgccgcaggtacgccctcgctggggcctccttgtccgcggggcggggcagcgcgccttcctcttcctgggcagcctcgggacggggcgccgcggccgggcgggcagcagtgagtacccggggacccacctgtccggcagcaccctcccctctcaagagctgggcggtggtgggaggaggaggacgggaaaaccggcgatgcctctggggtttctaggtcgcgcgtctgttaaccgcaaaccgcccaaagttaagatagagcagcttccaggactttcttgaccacagcgattttgattgaagtttagccaccgtcttttccatttttagaaaagctattccgaagtttggaatgatgacgatggtcgtgttatttttaacttcctgatatttgaacggcgaggtgtcagcgaccatccttccgttccacagaagcgtctctgaagtttgggtcgaat

SEQ ID NO: 3859 - DNA, 1158 bp, Artificial sequence
  DNA replication origin
gatcggggcgcggagccttccgcccgcaccgcccgcgctcacgtgcgcctgggccagcaccttcccgccgcggtcctgcgactgccccgatcatggtgcaggcctttaattctcgcccactccgcctctctgattgcactcagaacacctttcccaaacagatcgcggacttggaagacgtccagctcttgcccagaaagcaccaatcgaatgggaaagtgcgcaactgattgataatacattttacaagaataaaataaaagaggcaaattgctgaactttcacagatgtgccgggcttcggccaaagagccaaactttcttaaagacgagtccgggaggcaagtgccctcctgcgggcgttccctgccggggcgcgagggacccgcgggccgagggtccagcgcagaggagcgcgcagatggcgcggtccttgccggggagggaccttcgctcgtcctctcgcagggggtctggggagggggtgcaggtcctgcccctcctcgggtggtcagctgtgcgcacctcgggggccgtggagagtcctcacccgcccatctcctgcctcctggccgccccgcctcggggaccagggcttggggacccgaacctggggactgggctcgggcggggcagacccctcgaggtccggagagcggatccctccaaaacggatggactctaattgacttattaaatgtcgaagcaatcaggcagctccctttttaatagcccaagatctacatttagacaaaaacagaaccgagttcctggtaaaggcgtttcttctcatcctgtcacaagtgacaggaacggagggaaacagactgggggaggggcggggggaggagaacagggggaagaggaggagacggggagtgggggaaggtggggcaggagaggaggagacgggagatggggaaggtggggagggaaggggcgcgggagacggggcgcgggcgagggggagacgcggtggagatgcgggtggggggaccgggcgggggcgggggcggagttgagggggagcgggagacggggggaggcgagagcgaggtgaggcggggggactgacgaagatccgcatgggggtactaacacttcagcggcttctaattaaagccccgctcggagcccttggggacccgcctgacgtcgg

SEQ ID NO: 3860 - DNA, 1201 bp, Artificial sequence
  DNA replication origin
tgccctgcagctaatcagcttcaccagacatggacctccaagcttagggatgcatgaatctgaaatccaagccatggttgtaatagtgataatatgaggaaaaactaagaaaccagattttcacattgctttcggaatggagcaacaagcagatgcttgtacaatctggtgtcagccaaaaaagagcctgtttcaataagcagaaataataaaatactgaattatccctctttttgaaaaagaactaaccagttacagtgcaatatcagaacacgtttattcacttgctctcaataaacgcgagtgtgaatgtgagtgaaggcggtgagcttcgctgctgagcccacgtggctgagtggcgagggaggccggcaaagatgtgccctcgtgtgtccacattttaggaacacaggagacaggcctcgctgcccacgttcccctgctagtagaagacatctgctgggcatgtgtgtgtgtgtgtgtgtggttgtgtgtgtgcgggtgtgtgtgcacgggtgtgcatgtgtgcgggtgtgtgtgcgggcacgtgtgcaggcgtgcgtgcaggcgtgtgtgcaggcgtgtgtgcatgggtgtgtgtgcgtgtcgtgtgtggccctgtgtgtgcgggcgtgtgtgtgggcgtgtgtgtgtgggcgtgtgtgggcacgtgagtgtgggcatgtgtgtgcgggcatgtgagtgggcgtgtgagtgtgtctgtgtgtgcgcacaggcgtgtgtgcggctgtgtgcgtgggcacgtgtgtgggcgtgtgtgtgggcatgtgtgtgggcgtatgtgtgtgggcgtgtgtgggcgtgtgtgtgtcgtgtgtgcacaggcatgtgtgcggccgtgtgtgtgtggacacgtgtgtgtgggtgtgtgcggaaacgtgtgggggcacgtgtgtgtgggcacgtgtgtgcctgggcacgtgtatgcgggtgtgtgtgtgtgggcgtgtgtgcggatgtgtgtgtgggtgtgtgtgggtgtgtgcgtgggtgtgtgcaggcgtgtgtgcaggcacgtgtgtgcgggtgtgtgggggtgtgtgcgcgggtgtgtgcaggcgtgtgtgcgggcacgtgtgtgtgtgggcgtgtgtgcaggcagaaagcaccaagatgtaaacagctggcgctcacttgtgcaccaccaaagctagaatgtttcatctcccctggtggctta

SEQ ID NO: 3861 - DNA, 1364 bp, Artificial sequence
  DNA replication origin
gtaactatatgatgagatgtcatggatgtgttaactaatttgattatagtaatcatctcacaaaatttacttatttcaaaacaccacattgtgtatatacaaatatatagagttttgtcaattacacctcaataaatctggaaaaaggtattggtaataaatgtgaaacccatattacataatggggattgtgtcagttgactgtgtggtttcaaagatgagaatctataaatcatgtgcggtaggttccaatatcagcctctatctgctcttcactaagaaactgatgaaaaatttccagattagttatgggattttatagaaatattttggatgggagagataaatctatacagatcaccatctcaagtgaaacataaaaataatatccaaattattaaaaagccaagataaaaaggaatgaacacagtggtaaagcacagtgcaggacagtggtgtggacagtgaggatgttggtgtggacagtggaggatggtgtggactgtgaggatggtggtgtggacaatgaggatggtggtgtggacagtgaagatggtggtgtggacagtgaagatggtggtgcagacagtggaggatggtgtggactgtgaggatggtggtgtggacagtgagaatggtggtgtggcagtgaggatgatggtgtggacagtgaggatggtggtgtggacagtgaggatggtggtgtagacagtgagaatggtggtgtggcagtgaggatgatggtgtggatggtgaggatggtggtgtggacagtgaggatagtgatgtggacggtcggtggggatactggtggggacagtgagaatggtggagtggagggtgaggatgatgatgtaaatggtgaggatgggggtgtggatggtggaggatggtagcatagacagtagaggatggtggtgtagacactggtggatggtggtgtggacagtgaggatggtggtgtggatggtgagaatgtagaggtgaacagtgagaattatggtgtagacactggtggatggtggtgtggatgacgaggatggtggtgtggatggtgagggtggtggtttggatggtggaagatggttgtgtggatggcaaagatggtggcagggatggtaaggatgatagtgtggacagtgtggatgggggaggatggtggagcagacggtgaggatggttgtgtttgtggtgatggtggtgtggacagtgtgaatgatgatgtagacactagtggattatgttatggatggtaagagttgtggtgcggattgttggatggtggtttagacagtggaggttggtggtgtggacactggaggatggtggtgtggatgaggatggtggtgtagacagtggaggat

SEQ ID NO: 3862 - DNA, 3278 bp, Artificial sequence
  DNA replication origin
cgggaacatgataagacttcagcaagacatgaagtatgtgaagaaatggcaaagacttttattttctactgagaaacttttaatttataattacatcaattaatttgcagcaatgtttttgaatattgtaactcagttatgagattgcctaatgcactacaatgtggctcatgcatcttcatcttttttggaatgacagaatcgcagcagtggggccctatttacagagctctgtgggccgcctccctgcagcctgttcttctgggagcagctgcccagccggggccaccgttcacagccctgcttgcatccagcgatccatgagactgatgctctctgaagaaaggagtgacgtctgttatatccagttcagaagagttgagaagcagctgtggcttccttatggtctctccttttctcttcctgctggtcacacaggcatgatctggggtaagcctgtagctcctagcatacgtgggacatgcatcctgactgtcaggacagcaagaaatatgcacctgtggtttcaagccactgtgattggggctgtggaccaggcacatgcaacctcccctcaccctggaagaccagtaagtgtgtctgtgtgagcgcacgtggaaccgcattcgttctggttctgctgtatgatgacaatgaccgtggcgctcaccctgcgtttgccaaccttcaccgtgcgtttgatgttcaaaagctccctgtggggcagatgccaccagcagtggtcctgaggcgactctccccgggggcaaagccactgacagggagtgaggaggagcccagacctgcagaccccacgccggttccctccgcagaccccacacccgttccctccgcagaccccacacccgttccctccgaagaccccacacccgttccctccgcagaccccacgcccgttccctccgcagaccccacgcccgttccctccgaagaccccacgcccgttccctccgcagaccccacgcccgttccctccgcagaccccacgcccgttccctccgcagaccccacgcccgttccctccgcagaccccacgcccgttccctccgaagaccccacgcccgttccctccgcagaccccacgcccgttccctccgcagaccgcacgcccgttccctccgcagaccccacgcccgttccctccgcagaccccacgcccgttccctccgcagaccccacgcccgttccctccgaagaccccacgcccgttccctccgcagaccccacgcccgttccctccgcagaccccacgcccgttccctccgcagaccccacgcccgttccctccgcagaccgcacgcccgttccctccgcagaccccacgcccgttccctccgcagaccccacgcccgttccctccgaagaccccacgcccgttccctccgaagaccccacgcccgttccctccgcagaccccacgcccgttccctccgcagaccccacgcccgttccctccgaagaccccacgcccgttccctccgcagaccccacacccgttccctccgcagaccccacacccgttccctctgcagaccccacactcattctctctgcagcaccacccaccctgccctcgcagttcccagagaacacgctggggctaggtgacctgggttcagtgcttgttaaacacttttaagcaatccttctaatacaatgtctttgacccagaaatggcctgaacagggaaacagaataatatccactgtctcagttctctcattatcccccagggttccaagctcaggaaaatggtgtagcaaacacacctgcagtcctcaggcctctcttgtgtgccgagggcaggctaggaacggggggagggcggctctggactgagcttggagtccctcagccaggaccctcatgctgttcacatgcccttgctctctgcggctctccctgctccgggcaccctcctcactgaggcaaaacatatgttttcatattttgctcctgctttaaaaaattcctctgacctcccccggatttgctgcagtttaaatccattgattcaccaaagattgggcaagtgtcgctgtgtccgagtattcctaggagccaggcctcaggatgcctgtgctcataccacttagtttctagagagggagagaggaagccggcaagaggacgcagagtgcggcaggcagagtccagcagagagggagggcgcatgtcaggtttggtggattgcaagtgtgaggtcacgtggttctacctgcctttcaagtcgtgcctcagcgaatgcatccccttcccttaggtgggacgcgatttgtgaggtctctgacctcctttccttcccatctcgagcgctttctccactttgcacacactgacctcatcacacccatcagctgtgcattccaatgctctcgcaattcaacttaaattatctttgcgatgaaaatccttttctgaggttcaggactcccatagttttcttatttaatgctgtcacgtggctttccagtccataatgtaatatttatttcagacaagaaactcctcaagggcagaaaccgtgggtgctggacagagtgtgagccctggaatcagatgaggccgaaccccgtattgtgactgctccctggggatctatgcacacatcacggaaacacatttggcctgggtttcctccctgttagattgggaaggttgttcagcatgaagtggttgtgaggactaagtgactttaaaggaacggtccatgaaaggtccttgtggaaaggcttctgtctccaacacagcagggcctgccacattcagaccattccaaatgtttttccccaacgggtgacatcagcatctgcaggttcacgggtaactccaggttggtgcagctaagtgtccacaagttcacactgaccaatttgtcaaagaaaagacaatgtgtgtgtgcgcatgtgtgtgtatgtgtctgtgtgtgtgcgtgggcacgtgtggatccgtgtgtgcacgtgtgtgtatgcgcatctgtgtgtgcatgtgtgtgtgcacacacatgcctgtgcaaattaaagaggctgctgcgtggtggttaccatgtagctcagtggccccccgggtgctgaggagctgcagctgagtgtgtacggtggctttgcagttatagtcgtcccctcttatccagtttccccttctgtgttcagttggaaaatattaaataaaaaattccagaaataaacaattcacgagttttaagttgtgtgctgttctgagtagcatgatgaaatctcgctccattctgcccgggt

SEQ ID NO: 3863 - DNA, 891 bp, Artificial sequence
  DNA replication origin
gagtcataaatgtacagatttgtccagtaagagcaggttctgaggaagagatttctaaaatagagcattttttgtccagttacaaacatgcctttttactttcacggatactgtcaaacggtcgtctgtccatgttggtgccaacagtgcgcatctcaaccagctcaagtaactgtcacttaaaaaaatattttccaatcctaggagagaaaagatggcatgatattattggttttatgtttagtttcttatattttatgagactgaacatcatctcgtgcttattgagcactctgcttttttgaattgtgaatttatgtattttcccttatttacctaatatcaccttccaagtattatcaggtattgtctcctcttttctcttcctgcgaggctgtgtagaggagaggccgcctgcccacaggctggagggtaggaggcagggaggggggagggtgggaggcaggcaggttggagggtgggagtcacagaggtgggaaagtgggaggcagggaggctggagggtgggaggcagggaggcaggaaggtgggaggctggagggtgggaggcagggaggggggagggtgggagacaggcaggctggagggtgggagtcacagaggtgggaaagtgggaggcagggaggcgggaaggtgggaggcaaggaggcgggaaggtgggaggcagggaggcaggatgatgggaggcagggaggctggagggtgggaggctggaggcagggaggcagggaggcaggagggtgggaggcaggaaggcttgaaggtgggaggctggaggcacggaggctaaggcgtgcagttacataggctgcatatgttttatcttggtttgttacttgctgttaatcttgtttattgttctttggccct

SEQ ID NO: 3864 - DNA, 1115 bp, Artificial sequence
  DNA replication origin
cctcagagaagccctatgagattcctttccttacaatcccgactttcccttttcaggtgacaggaggctcttctaggtcaagggttaagtaacttctgcaagtttacttggccagtgaagggcggggtgggagtcagccagaaccttccagaacgtgaaccccatgctgcaggtgccatgccgtgcgctcacccttcgctggggtttatgcatctgaaattatgacatgggaaacgtccacaccacgcatgtaacacgtgtgctttctgtgccctccaatctgataagaggtgggggagtttttcttgttttactgatttaatatggcaaaggcctttcactggaaatggaaggaaatgtccctcgccagtgcagccaggaagctgtgaggacaatgtgggggggggggggcgacaatgacctagtagaagggaacggacaggagaggagacgcagccatagacagtggggttgaagcggggacgacgcggccatggagggttggggttggggggcgatgacccaggagaacggaagggacaggagaggagacgcagccacggacagtgcgggggggcgacagatgacccaggagaagggaacgcacaggaggggagacgtcagcccaggcgccttgtgattgaatttgcatttttggggaagcctcacaggaagctggaggaatgtgagaccagactccgtcttcaggaggccaccgtggcattcgtggtatccgtgtgaagagcagactgaggggcgggacggggagaagctgtttccgccaggaggagggcgcttccggcgggagagggcgggtcctggaagatgagaggcggccccagccgattggaccaggaggctggagacccacgagacgaggctctgggtgactggagttaggcagaggaggcatcggatccgggttttgcacaagggggtggataaattgctgtttgtcgcgggtgtattggacctcagcaccctggtgtgtctgtacgccttgtatgctctaaccatcaagtctgggagaatggactccgccaagggcgttgaagctctcagatgtttcctcagagaacggtgctgggagccgactaacctcctgcaggaaacag

SEQ ID NO: 3865 - DNA, 809 bp, Artificial sequence
  DNA replication origin
ctgaacacccctcctgggactgaaccatgtgaaggccctgcatccgggaggagaggcagggtcctcctgggactgaaccatgtgaaggccctgcatccgggaggagaggcagggtcctcctgggactgaaccatgtgaaggccctgcatccgggaggagaggcagggtcctcctgggactgaaccatgtgaaggccctgcatccgggaggagaggcagggtcctcctgggactgaaccatgtgaaggccctgcatccgggaggagaggcagggtcctcctgggactgaaccatgtgaaggccctgcatccgggaggagaggcagggtcctcctgggactgaaccatgtgaaggccctgcatccgggaggagaggcagggtcctcctgggactgaaccatgtgaaggccctgcatccgggaggagaggcagggtcctcctgggactgaaccatgtgaaggccctgcatccgggaggagaggcagggtcctcctgggactgaaccatgtgaaggccctgcatccgggaggagaggcagggtccccagtgagccgcttatggctaaagagagggcagggaggagggagggcagagacagtgctgcagggacgctgtcgtggagggaaaggctgagcagggaggagcaaggcaggaggaggccgagtcaggggagggttcgggaaaccaggcggggtctaagcaaaggatttcagggagtgctcaacaacccctttcggtgagggcccaagatcagtgttcagggcttatgggccacaaggccacagtctcagctccttcctgctcagggtct

SEQ ID NO: 3866 - DNA, 1632 bp, Artificial sequence
  DNA replication origin
aattaccgcgagaggaagcaagcgcaagtttcgtgagaagggcagatctcacgagagaggatttggcgccctcctctgtggattctggccaggccgggttcggcggttgctgtgagagcgggcttcccaacaccatgccgtccgccttctctgtcagctctttccccgtcagcatcccagccgtgctcacggtaactcgcggcccgcgtaaccaccagttcgggggaggacggcggagaggcgtagggtaggccccacagagcacccggcctgtggccaagaaggccccggccgtgggcggggccttgtggcggagcgcgcgcgctgggcagggtcctgagacctgtgggagtggctcggggccggcgtcgggggcgcgcgctgtgggcggggtcctgggccctgtgggagggggccggggccgggcgtcggggcgcgagcgctaggcggggtcctgggccgttgggcggggaggggcggggccgggcggggccttgtggaggagcgtgcgcagtgagctggctccggcgctctgtggcccgggcttgggctgggctggcgtcctgcaccgtgcgggcgtggctgagttgtgtgggcggagcgcgaggggtagggctttgttcgtgtgggaggtgcacgccggccagtccagcgtcttgcgggcggggcttgggccatgtgggcggattctggcagtgcggcggggcgtgcgtggtggagcctgatcgtgtggggtggcacggaggaacgctgcccagtgtgggcggggcgtgcgccgtgccgggttcgtctgacagatcccaggggagcccacgccccacgtggccgccaaggggtgacatgggcactcgatggggtctgggcagaaagccgtgctcccctcacctccgtgcctctggtcttctggtgggtgcattgatgggagtagatgcgcttgtgtccttatgtcatggcgcggctctggagaagccgctgcggtccccagcagagagtagtgacacaggagttctggagggctgtgccgggctgcagcttggagggcagggcggggctgcagcttggagggcagggcggggctgcagcttggagggcagggcttgtcttctgcaggagggcgctcaaggaggggatggggagggttgaggactgctgggattggcatctgagcatcaggtggggactgagcagcagtggatctgagcctggctacttcaggtccctgagccagacactgtccccaggtacagcagggtcccggggagtccaggaggcggcggagtgcggcactgtctggagagttcagtgtattgcagagaggttggagaaaatcaagtcttgcacgtggcgatggctcaagattccctgaggtcttcagtgctgactaaggagtctgaaatgatgattcatgttttacctttggggctgagccaagtgcatctctttgagcaatcgtcttaatttccttgtcgtcaccaattatcataaccaattatcatcgtaaaggatggtaattcctttaattatacccaccttaaaaacatgattctgttccacaaacgaaaggagcacatcagagatgccttcagttctgtgtgcttgaactttgaattccatgaattatagttgcactga

SEQ ID NO: 3867 - DNA, 1502 bp, Artificial sequence
  DNA replication origin
tagggtggtcggggtgctaaagccactcccgttgccaactgcggctccaggtcatgccccacccctcactgtgatgggataggctggggcccttcatgatggacggaacatacgtttccggaccccaaaatcactcagcaaaggtaagtcaagctggaaactgcgtcaggcaaacctgcttcccattttatttctaaataaaatagctgcaaagatttaaaaaaaccctacatacctctcacaatttgcccactaggaaatcccttgcggaatgtccccctccccttgtggagttgtccggaccgaaccaatgttcctcttacacatatgggtcgatgcctcacgtctccctaacgtgtaaaactgagctgtgcccggccaccttgggcacacgtcctcaggacctcccgaggctgtcacgggcctgtccttaacttggcaaagtaacctttccaaattcgttgagacctgtcttcgatattttgggttcacaataagaatttgggggacggctcccaggtccttgagaaaagcagtcctgggcccagtgcggaggccgggaggattcacttccctaaggggcagaaagcatttacagccgggggtgctctggggttgatgtcctgagaataggaggtctggggggcccaggtcgggtgaccctgctggggtttggtggagttccggagccctggccacccaggctggggcccagggagcttgtcctgtgatggtgagagtatgtcagctatggtgtccttcacacaggggcccccacaggctgtggttaggtgttttctgagcgctctgggttttggctgtggactggaatcatggcacagggggagtcacggcacggggggagtcacggcacgggggggagtcacggcacggggggggggtcacggcacagggggaatcacggcacagggggagtcacggcacggggggagtcacggtacggggggagtcacggcacggggggagtcacggcacggggggagtcacggcacggggggagtcacggcacgggggggtcacggcacgggggagtcacggcacggggggagtcacggcacggggggaatcacggcacggggggagtcacggcacagggggagtcacggcccgggggggtcacggcccggggggagtcacggcacagggggagtcacggcacagggggggtcacggcacggggggagtcacggcacggggggagtcacggcacgggggggtcacggcacgggggagtcacggcacggggggagtcacggtacggggggagtcacggcacggggggaatcacggcacggggggagtcacggcacagggggagtcacggcccgggggggtcacggcacggggggagtcacggcacgggggggtcacggcacgggggagtcacggcacggggggagtcacggcacggggggaatcacggcacggggggagtcacggcacagggggagtcacggcccgggggggtcacggcccggggg

SEQ ID NO: 3868 - DNA, 938 bp, Artificial sequence
  DNA replication origin
gggagtcacggcacggggggagtcacggcacggggggagtcacggcacggggggagtcacggcacgggggggtcacggcacgggggagtcacggcacggggggagtcacggcacggggggggtcacggcacggggggagtcacggcacagggggagtcacggcccgggggggtcacggcccgggggggtcacggcccggggggagtcacggcacagggggagtcacggcacagggggggtcacggcacgggggggtcacggcacggggggagtcacggcacggggggggtcacggcacggggggagtcacggcacggggggggtcacggcacggggggggtcacggcacggggggagtcacggcacggggggagtcacggcacgggggagtcacggcgcggggaagtcacggcacagggggcaccaggagctgctctccagggactctctgctgcccttgctcagggaaggggcttgcggggacatggagggagggcgccaggcggggccacagccaactgggcatccgggaccttctggtctgcctcatgccttgaggccagtggtgggttcctcagaggctcccagagctcccacatgggtgatccttgggagcaaatctcggagcctcagccaccccctcacccgcttctcccacgccccctgaacccatattccttctacgaaaaccccatgactgttgtgatgttcacagtggctttgtttagccagaaaacccagagtgatgcagacagtacacagaggtagcgaaatcagtacatagattcatattatttgtgatttattgttccaacccctaaaataacctcaaagacaatggggcaggcagatcattgccaccccacacatgcccttctctggatggttggcagctgtgtttgtgtgggtttgtgcagaggagctgaggctgcggatgg

SEQ ID NO: 3869 - DNA, 976 bp, Artificial sequence
  DNA replication origin
acccacaggtctgatgatctctggccatcccaaaggttgggccactccctaccatatgcacctctgctgaagcaagttgagaactgactcgccgggagggagtcgctggccaacgtgaggccagccttgtgcacagagcgcgcatggaaatggtgcgggttcgccgtctcgggagttggatacgactgccatctttttataaatgagaattgcaggatcatcgaccattgtgtactcacacatttaaagatgtgtaagtcttaaataaccctttgggaatattaaggagctgtcacaggggttctcaattttggatgtgcataaaaacacttctgtagtgattttaaatgaaagtgcctggtctcaactaacacctgctgaaccagaattgccacggtttgggtttgagaatctgtttttttgtttttgcttttataagtttcagaagcaaaagtgagggtcgctggtttgcaggtgattgaagggtttggccacctgtgggccatgatgtcattgttgttggtggtggtaatggtgaggttggggctgtgatgtcgttgtcattggtggtagtgatggtgaggtcagggctgtgatgtcattgtcattggtggtgatggtgaggtcggggctgtgatgtcgttgtcattggtggtgatggtgaggtcggggatgttatgtcattgtcattggtggtggtgatggtgaggtcggggctgtagcatcgtcattggtggtggtgatggtgaggtcggggctgtgatgtcattgtcattggtggtggtgatggtgaggtcagggctgtagtgttgtcattggtggtggtgatggtgaggtcagggctgtgatgtcgttgttggtggtggtgatggtgaggtcagggctgtagtgttgtcattggtggtggtgatggtgaggtcggggctgtgatgtcgttgtcggtggtggtggtgatggtgaggtcactgtaggaaag

SEQ ID NO: 3870 - DNA, 1363 bp, Artificial sequence
  DNA replication origin
aagaattccgggccccccagggatcactgcttcctgctgagtcactgcccagccacacacctgccagccagaagggccctttcagaccgtcacaggcaggcccctgcctccacaccacctcaaataccatcacacgtggactgtaatcctgaaaacagcctctatgataccccctctcctttgtccttttccttaaaggctcagatctctcttttgttctccaggacgtttctcaaggtaccctgaaactttcctgccatccctctaatttggctcgaataaactcttcattgtttaagctgcctcagttatttcaggtccacctaagcttcccatcctcagtgctttccacagtgccaatggccagctttctagaacacaacctcacctcacttcccctcctcagaccccgtgcagcccactcctgcctctcgggtgcaccaggctgggggtcacacggtgcctgctgggtgggtgagccaggctgggggacaatgtgtctgctgggtggggctccattctaggggtcacagggtgcctgctgtggggaggcaggatgggggccagtgtgtctgctgggtgggggcaccagactgggggacagtgtgtctgctgggtggggcttcaagctgggggacagtgttcctgctcggggggcagcctgggggacagtgtgtctgctgggtgccaggctgggggtcacagggtgcctgctgggtgggggcaccaggctgggggacaatgtgtctgctgggtggggcaccaggctgggggacagcgtgcctgctgggtgggggcaccagactgtgggacagtgtgtctgctgggtggggcttcaagctggcagagagtgttcctgcttggggggcaggctgggggacggcgtgtctgctgggtggggcatcaggctgggggacagtgcctgctgggtggggttccattctgagggtcacagggtgcctgctggggggaaacaggatgggagccagtgtgtctgctgggtgggggcaccagactgggggagaggatgcctgctaggtgggggcgccaggcctgggggacagggtacctgctgggggggcactggcaccaggctgtgggcatgggagcccgtgttcacaccaggtacacgcctcacgctccaccagcagttggccctcttcacatgtgtttcttccttcaaaagacaattattaactaaagtgctggagataagaggtgagccagacaccccaagacccatcctttcatgcaagtgtggtgtggacaaaccccaacgaaactctcagagtgacaatgagcacaggcagcaggaacatccaaggctgcacacagtctcctcggacagaagcccttggaagcc

SEQ ID NO: 3871 - DNA, 1017 bp, Artificial sequence
  DNA replication origin
ctgagtaacaaaaagggaaatggaaaaccatgttttcatttctgccctgaggaataaggtggggggctgaggaataaggtgggggctgaggaataaggtgggggctgaggaataaggtgggggctgaggaataaggtgggggctgaggaataaggtgggggctgaggaataaggggggggctgaggaataaggggggggctgaggaataaggtgggggctgaggaataaggtgggggctgaggaatgggggggctgaggaataaggtgggggctgaggaatgggggggctgaggaataaggtggggggctgaggaataaggtgggggctgaggaataaggtgggggctgaggaataaggtgggggctgaggaataaggtgggggctgaggaataaggtggggggctgaggaataaggtgggggctccagtaactgatgatgggactctcagaacccccacgtgcccccttttagggaaatgttgtttctaatggaatctcaggactgttgaagtttcttgggtctcctgtaacaggtaaggaaacaagtccctaagggatgagcactccgcaggtgcttggggatgcttggcgacgcctggtggcactgtgcgtcagatgtggtcagtggtcccagacacatcaatgaacaatcgtgctcctgccccagagccgggggctggtgtggagggggcaggtgagcaggggaccttgagggccagaggaacggtccagtgccatggaggggagagggtggagggtgtgggtgggggtccaggggagagggtgggtgcaggctgcaaaggtgcagtgctgtgaaggagaggcttctggcagagacaggcgctggggaaggccggcattagggtgcagtgtggagacagctcctccgggagggaggacgcctttctaaaggggcagctcctggaacttcactttgtacaaatgttcagtcagttctgatgtcgaggttttggactgcgagaccttccaatgtttctcaacatttagatcccta

SEQ ID NO: 3872 - DNA, 1553 bp, Artificial sequence
  DNA replication origin
gaacataccaaactctctgcttcttattctaagactgaggctgttcccgccacacagagagagtccgtgctctctgcttcttattcttactctaagactgcggctgtccccgccacacagagagaggagtctgtgcgccatgggggttttgagagttcagtgagatgaaacctttagtcatggtgtcctggttgttgttggcttggccatcagaatgccagggcagagactgcagttgagggcaactgggagatgcttcagctgcagggcaagaagggagaggtcggatgcttcatcctcaaaccacaaccagaatcagccgtgactttccaaagcctgaccacaatgaggccatgtttagttgttaaacccttgaccacctgtcttgaaggcagtccggctgtccttgggcacctgggcctgtgaccctccctctctggaggaaggtgtttgtgtgtgcatgtgtgtctgttcgtgtgtgtgtgtaggggcaagagggtttggtgtgtgtgtgtgtgtgtgtgggcgtgcatgtgtgtgtagtgggcaagagagtttgggaggagtgtgcatgtgtatgtaggggtgagggggtttggggagagtttgggaggagtgtgtgagtgtgcgtgtgtgtgtgtaggggcgggagggtttggtgtctgtgtgcgtgtgtgtgggcatgcatgtgtgtgtagtgggcaagagagtttgggaggagtgtgcgtgtgtgtgtaggggtgagggagtttggggagagtttgagaggagtgtgcgagtgtgcgtgtgtgtaggggtggggggtttgaggagagtttgggaggagtgtgtgagtttgcgtgtgtgtgtgtaggggtgagggggtttggggagagtttgggaggagtgtgtgtgtgtaggggtgagggggttttgggaggagtgtgcttatgtgtgcgtgtgtgtgtgcatgcatgtgtgcatgtgggtgcgtgtgtgtaggcgcgatgggggtcgggagaagtgtgcatgtgtgtgtgcgtgcgtgtgtgtgtgtgtaggggcaggggtttgggaggaggcggggatgatatggggtggaggcgcagcactagcaataggtgctccatgcaagctgaactgagtgtccgaaccctgagctcctcctggactcctggccccgtgttacatgctgggtacactgtggtcaacagcatggatgctgcctggtgggatgaaggcagtgaatgagcagtggttaaatgagcttttaatcaggaattgacccgaacgggcctgtggctccagacctgggccctcatgaactgtaggaacgtgggagccatctgtgaaagcccctcactgcacaaacccacttggaaaccacagaagagatgctatgacctgggtaaaatgcagcaataatcctgggtgctttttgcatgggcggagtttcccaaattctaagccatatcccgtgtttagaagcccaggaaccaggaacagagaagcctgaaggtctccatcattatgtgggaacaatatcactcagatgaatcaccaacaactgaacc

SEQ ID NO: 3873 - DNA, 1197 bp, Artificial sequence
  DNA replication origin
ccctcaccacgccttcccctgtgagtaccggacccctcttcaggagtcaggaagcggatgcagggtggtgcagccccaggacatggagcctgggaacgccaggcccacggtcagccctgccaggtgccgtcggacgcacctcgagggttttccacgcattgaaacaggcaaggttagcatagggcagggtccccagtgctggaactgccagagcccagggaaacgagggtggggaggactggggggctcaggagggactggcgggctcaggagaagactgagaaggactggggggctctgaggtggactggggtgctcaggggaagactaggcggactgggggactgaaggggggaaccaggggtcacagaggaagactgtggaggactggagggctcgggtgaagactgaggaggactggggggctcgagggaagactgaggaggactgggggcttggaggggaactggggggctcgggggagtggactgggggtgggggagttcctggccaaagctgagggggacctgtttggaaaccggaaggatatgggggattagggaggcctaggggtacatggacgagctgaagaggaagaggcccccacaaggctgcagccggggaggcaccgacaccactgctggtacggagacgggcatggctgaacctgaaggagccccagactcaggccagctctcagatctgctggggcccagccggccagggtcaccttccaggacgcagagtgcgagcaggactgggggctctgcagagcccatggaggccccgggaccccatcctcctggttacagtcccggatggctttgtcctggctgacgtctgacccgagaccagaaatgaacagcagtgacacatctcatcccacagggaaagtaaattcaaaccattcagggccctcgttcagtgccctcaatgcggcagatgctgttggtagcacgaatctccacaccgaggtgggtcctcccacgacggattcctccaagcacaagagctggcctgggactaatgtggacagaggccagcgctcatgaattctcaaagatgccgcctttgtggcccctccccatagggactattcctccaacctgattgcttccacgtgcacatgaatacacacacgtgacaggaatccctacattcctgaattccctaaaccgatgctccctgagctggaac

SEQ ID NO: 3874 - DNA, 1161 bp, Artificial sequence
  DNA replication origin
cagtcgcagagctctgccctcactccacagccgtctcccacctctgaacattcgcagagctctgccctcgctcccaaccatctcctgcgtgttgtcctttcagggtgctgcacccacagacgcttaatcattcttcaagacacaggtccgatgttgaagttgtgtttcctaacttgcctacactgctctctcttcttggagcgctatcacctcctctgctaatatttcactccctggttcatattttatgcagttttcacaatactatcactttccagtagatcgcgagccctggggtgcagaggctgttgggtcatcctcatctccctagtgctgagcttggtttccgacttgctgtgggccctcaggaatgtctgtggaaataaactgacttgaattaattaaataaagcaattcagcttatgagaaggcagagtgttaagatgtggggtcacagcaaacgaagggcacggcagaggcacagcaactcccctggtgacccagtgaaggtgaggaccccaggaggaactgaaataccagacccagtgtaggcgaggaggccgggaggaaatgaaacaccagacccagtgcaggcgaggagcccgggaggaactgaaacaccagacgcagtgcaggcgaggaccccgggaggaaatgaaacaccagacccattgcaggcgaggaggccgggaggaaatgaaacaccagacccagtgcaggcgaggaggccgggaggaaatgaaacaccagacccagtgcaggcgaggaggccgggaggatctgaaacaccagacgcagtgcaggcgaggaggccgggaggaaatgaaagaccagacccagtgcaggcgaggaggccgggaggaaatgaaacaccagacccattgcaggcgaggaggccgggaggaaatgaaacaccagacccagtgcaggcgaggaggcagggaggaaatgaaacaccagacccagtgcaggcgaggaggccgggaggaaatgaaacaccagacccagtgcaggcgaggaggcagggaggaaatgaaacaccagacccagtgcaggcgaggaggccgggaggatctgaaacaccagacgcagtgcaggcgaggaggccgggaggaaatgaaagaccagacccagtgcaggcgaggaggctgggaggaaatg

SEQ ID NO: 3875 - DNA, 943 bp, Artificial sequence
  DNA replication origin
ctgacacccccgccagcagcagcagcccccgagccgagggcagcccaaaggacgaggaggaccaggggcaacggaggaggagggggccacagaggaggaggggaccacagaagaggaccagggggtcaaggaggaggaccgagaggccaggaggaggggaccctgaagaagaccagaggatcaaggaggaggaccaagtcaaggaggaggaggcaaccaacaggaacagggagaccaaggaggccaagggatcaaggaggagaaacaagggtccaaggaggaggactggggaccaggaggaggattggggaccaggaggaggactggggaccaggaggaggattggggtccaaggaggaggactggggaccaggaggaggattggggtccaaggaggaggactggggaccaggaggaggattggggtccaaggaggaggactggggaccaggaggaggattggggaccaggaggaggactggggaccaggaggaggattggggtccaaggaggaggactggggaccaggaggaggattggggtccaaggaggaggactggggtccaaggaggagaactggagtccagaggaggactgggggactaaggaggattcagggccaaggatgaagattgggggtgcaggaaaaggacaggggaccaaggaggaaaagcaaaggtggccaaggaggtggactgaggggccaaggagcaggaccagaaccagggcacaggagccccagggccaacaggacagagggggctgccacccattctccccgtcttccaagttccttggtggagaaaccccacccaagaggagctcttctcagaacctaccccaagcatggaaccgagtgtcacacgcagtggacggcaaggctgctcagattcttcctggcacagggcgggacccgctgtggcagagtgcccagggctcagcc

SEQ ID NO: 3876 - DNA, 1315 bp, Artificial sequence
  DNA replication origin
ctgtggggagggagggagggagagcacggcgccccgctgtggggagggagggagggagagcgcagcgccacgctgtggggagggagggagggagagcacggcgccccgctgtggggagggagggagggagagcgcagcgccacgctgtggggagggagggagagcgtcgcgctgtgctgtggggcgggagggagagggcggcgccacgctgtggggagggagggagggagagcacggcgccctgctgtggggagggagggagggagagcgcagcgccacgctgtggggagggagggagagcgtcgcgctgtgctgtggggcgggagggagagggcggcgccacgctgtggggagggagagagggagagcacggcgccccgctgtgctgtggggagggagggagagcgtcgcgctgtgctgtggggagggagggagggagagcgcggcgccccgctgtggggagggagggagggagagcgcggggccaccccgtggggagggaggagagggcggcgcagcgctgtgctgcggggaacgatgcatgccgcttcctccaggacctgtgagtgcagggttggacggggctttctgagcttgggagctggggccaggcctgtcctgcaagcagctggcctatttctgctagaagctgtgaattacaactgtaatgtatttattctaaggactaacatggcactattcataaaagactgtgttaatatttgcactgtgctttctgtaattatacctcatcaacttcatttttatctctattctggctgtatttcatattcctgattctcttctgtatgcctgaaaggagagttggtgtattagtcagggttctccagagggacagaattaataggatagacacatgcatgtaaaggggagcatattaagtagtagtaactcacacgttcacaagtgtgaacatagtccgtctgcaagctgaggagcaaggaagccagttcgagtcccaaagctggagtccgatgtgcgagggcaggaagcatccagtgcgggagaaagatgctaagccattctagcctctttatgtttttctgtctactttatattttggctgcactggccctgattagatggtgcccactgaaattaagggtgggtctgtttttcccagtccactgactcaaatgttagtctcctttggcaacaccctcacagacacacccaggatcagtactttgcatccttcagtccaatcaagttgacactcactattaaccatcacaagtggcaaaatataaatgcctctaaatgtgcacaggatctttctatatttaaacaatta

SEQ ID NO: 3877 - DNA, 1453 bp, Artificial sequence
  DNA replication origin
gtctgtctctgtctctgtctctctctgtctctgtctctgtctctctctgtctctgtctctgtctctctctgtctctctctgtctctgcctatctctgtctctctctgtctctctctgtctctgtttctctctgtctctgtctctgtctctctctgtctctctctgtctctctctgtctctctctgtctctctctgtctctctctgtctctgcctatctctgtctttgtctctctttttctccctctgcagcctctcagtcgaggatcttttcttttcacctctgaggattattcgttttttttcattttgactgtaagggattagcgccctgtctatgaaaagatgctgcaaagtctccgcttttggacattaagatcttttcttcgtatccaagcaagataaattcgtaacaagttgtctgctttaaacattaatttgatttttctttcctttgtgtgtggagatttcataggctatcagagtttgtgatgaaaatgaacaggaggggcttcttaagctggaggtgctggatcgctgtagaggaaagtggtgcagtgatggagggcgtctccctgtcctgcctgctgctggaggtgctggatcgctgtagaggaaagcggtgcagtgatggagggcgtctccctgtcctgcctgctgctggaggtgctggatcgctgtagaggaaagcggtgcagtgatggagggcgtctccctgtcctgcctgctggtggaggtgctggatcgctgtagaggaaagtggtgcagtgatggagtgcgtctccctgtcctgcctgctgctggaggtgctggatcgctgtagaggaaagtggtgcagtgatggagggcgtctccctgtcctgcctgctgctggaggtgctggatcgctgtagaggaaagcggtgcagtgatggagggcgtctccctgtcctgcctgctgctggaggtgctggatcgctgtagaggaaagcggtgcagtgatggagggcgtctccctgtcctgcctgctggtggaggtgctggatcgctgtagaggaaagtggtgcagtgatggagggcgtctccctgtcctgcctgctgctggaggtgctggatcgctgtagaggaaagtggtgcagtgatggagggcgtctccctgtcctgcctgctgctggaggtgctggatcgctgtagaggaaagcggtgcagtgatggagggcgtctccctgtcctgcctgctgctggaggtgctggatcgctgtagaggaaagtggtgcagtgatggagggcgtctccctgtcctgcctgctgctggaggtgctggatcgctgtagaggaaagtggtgcagtgatggagtgcgtctccctgtcctgcctgctgctggaggtgctggatcgctgtagaggaaggcggcgcagtgatggagggcgtctccctgtcctgccgtggaggtgctgaatcgctgtagaggaaag

SEQ ID NO: 3878 - DNA, 2092 bp, Artificial sequence
  DNA replication origin
gccacggcggctttgtccatggctgcagccaggctctgcaaaccctggagaaggaattttccttctaggtgtgggcggtgcatggaagactgaaaatccagaggctgggatcctctgagcttagctactcaccttccgtggccacttctgtcttgatatctgtattttgtgccttttggctatttttgatcttaatttagaaaatagatgtgcaggttctctgtagcaaacggcatctgtgtgagcaaagggagctcatctggctttcgtaggccgacgtgttgggaccatcaggaaatgccagcgctctacttatcgtatcagtcaaagccacgagacagggactgaagcaggacttggagagcgcccagctcactgacgtgggggcgggggtgggcgggggtgatcctggagggatgcacagtgcgggggaggcagcccttggagagcgcccagctcactgacgtgggggcggggggagttcccggagggacgcgctgtgcgggggaggcggcgttattgtgagtgatgcttggcgggaccttgcagatactgcctctggattcccctgtttggtagaattttggggattataattaaaaagcatccagcacagatgccactcagcccagcctgaagctgggccttctgaatgtgttgggtgcatttctgacttccaaagcatgcagtagcgtttctttgatcaacgatgttttcagctgaaagaatttaggtaagtttatgaataataaatgcaaaataaattccaaaaggaagaaattaacttcatctaagggctcacaagacaatggtggatatagtatttatattgtgctagtagtatggaatgaaaatgggcttttatatttggagaaactcggcggtgcacgtaaactactcccctacaagtgcaattcacttcgctgcggaagagaatcccacactcactccaggtgtctggaaaaagagccacgggaaggacattactgtagtcataccaaagccaataagtaaggtgggcacacgtttaaaacacatccatatgatcttaatatttattacggttttgataatgcaaaactgacagctccaggcaggctataaggctggatgtttatatgcaagccagattttcagagtcaggagattttcctatagaaacaatgccagaagtggtagcaaggtcacaaggctcggccgtgagcccatccacctcctcccgggcttgaggagacacggacgggggtgcagtggctgatgctgcccgcctccctccacagatgtgtggggtgcttgtgctgggtggggccagtgtccgcttccacaaatgttcaggcagggcaagggtcccctgtctgtgaactaaatcaccatttccagtgctgtctcctgaggtgcaatttgctttttactaaatgcagaggcttgagtgacagggaacataccttcaccttcatcacagccatggctggcagcaaagcaagtgccaggttaacaggtactctggggacgtgttctgctgtccgggacacgtgtcctgcaatgtacactgtgataatggatgcacacttgtgcacacacacaccacatacacacacaccacaccaaacacacacaccacacaacacaccacataaacacacaccacacaccatatacaccataaacaccaaatacacaagcacacacataccaccacacacacaccacaccacacacacacacacaacacaccacataaacacacaccacacaccacatacaccataaacaccaaatacacaagcacacacataccaccacacacacacaccacacaaacacacacaccacacaccatatacaccataaacaccaaatacacaagcacacacataccaccacacacacaccacacaccacaccacataaacacaaacacacacacaccacacaccacatacacacaccaccacagaccacagaacacacacagttacccagcctccaagacgggagagtgagtgttggttttatccactcatgaattcccagtttcaagacccttcagcatttatcacactcacccctaagacacttgaccccgcgacaa

SEQ ID NO: 3879 - DNA, 1276 bp, Artificial sequence
  DNA replication origin
gatgggtccttccagccttttgggccccccaccatctgctctcctctaagaggggagaggcagggacttgagctactgtgtttgtgacaatctctaaggaaaggttgacaggcatgaagatgttgaaggcacgcattcagctatccaggaaaaggacaatagcagaatgagagacaagtgaggaagagcctcccgagctatgcagccacagggccgagcacagcaggagcggggggacagtggaggtcttgtcaggcagtgtgggcagcccatggagcggagccgtggcaggactgaggactgaggactggggactgagacctgagacttgagacctgactggctccagcctccctcggccagggtgtgagtgtgtgtgtgtgtgtgtgtgtgtgccatgcactgtcagccgtgcgctgtgtgagccacactgtgtgtgtcagccatgtgctgtgtgtcacctgtgtactctgtgtgtgtgagccacatgctgtgtcagagcagtgcgctgtgagccgcgctgtgtgcgtgcacgtgtgtatgccatgcactgtgtgtgtcagagagctgtgcgctgtgtgccccgcactgtgtgtgtgcgtgtgtaagccgcatgctgtgtgagagctgtaggctgtgtgggtgtgagccgggcattgtgggtgtgtgtggagtgagagtcatgcactgtgtgtgtctggtgtgtgtcatgtgctgtgtgtgtgtggtgtgtgagccatggactgtgtgtgtgggggaatgtgtgagtgtgtgaaccatgcactgtgtgtgtgtggtgtgtgagccatgtgctctgtgtgtgtggtgggagccatgtgctgtgtgtgtgtgtgtgtgtgtggtgtgtgagccatgcattgtgtgtctgtatgtctgtgtctgtatgtctgtgtctgtggtgggtgagccgtgcattgtgtataagtgtgtgtgtggtatgtgaaccgtgcactgtgtgtgtgtgccagccctgcattgtgtgtgtgtgtgtgtgtgtgtggtgtatgagccatgcactctgtatgtgtgtgtgtatatatggtgttagcggtgcactgtgtctgtgtgtgagtgtgtgtggtgtgtgtgagccgtgtactgtgtgtgtgtgtgtgtgtgtgtatgcgagagagagaagagagagaaggagggaaagagagagagtgtaggcatcaagcacccatttcccacaagagtaacgtgtttggatgtcacagggtggctcagagacaggcccagaacccacagctgtatt

SEQ ID NO: 3880 - DNA, 1233 bp, Artificial sequence
  DNA replication origin
accctcagagttctttggaactacctgtggctgcagctgcccccttaccatgtgaacttcaggacgcttctctgtcaagcaaggctcttagaagaacgtggtcccgtgacagtcccgagagcggctcacagatggctccatctccctccttccgagcacaccgtgggttcacatttcactgtggtgtgaccacctggcatgctttagtgggagtggtgtgaccagagcacgccgggccccaccaaatctcccctctgcacgcagcggcagcatggaaacggtggctgccccatcagcctgggaccctgcatggtcaggatgagcacagccccttgacaaagcttgggatgggggcctgtctgttactgcattaaccagcctgcaccaattcagagtcttctcaactttcagttttggatatatgcaatcttgcgtgaacttatgcatggagcggagaatctaatgtacccatagctatggatctcccgagcacagatcatgccaaaggtaaaacccgtgttgtatgtgattctgaaactggaagtggaggggctaagagacaccaggcaagcatttttttcaccctggaatgcacatgtacagaccttgccaggtgttctccttagattcctatcacctgtgttgcacgctgtctcaagggaggaaatgtgttctccttagccaattgtggtaatgcagtagcccattctacatctttggtacccaaagaggagtagacagggcctcctctgctgtgacccagtgagaggaagattcctgctctcttttactgcagcctgtttgggactgaactgtgtccccagggttcctaagttaaagggctgacccccagcatttcagaatgtacctggagataaggttgtcaaagaggtaattaagttaaagtaaggccattaggtttggccctagttacatacaactggtgtctttaataagaagaggagattaggacacagacacacacagagggatgactgtgtgaagacgcaggggaaggtgaccagccagggagagaggcctcagaatgaaaacaacccggccaacatctgactcttggatgtttggtctccagaactgtgaagaaacaaatgtccgtggtttaaaccacccagtctgtggtactttgttatggcagtcccaggaaattcatacacggtcatttctttctttctagaaggctgcagcattggttttctattaaatcattctatt

SEQ ID NO: 3881 - DNA, 1228 bp, Artificial sequence
  DNA replication origin
gcctcctggtacacggcgtccgcgctccagtgcgcattgagggccttgagcgccgcggccaggcggttgtgctcgcgcagccacagcgtgtgcagtgccgtcagggaggggacctcgctggcgcggccgtctccggccaggaagcagggcccgcgggtctctccggggatgccgggctcgggcgcacaggccgcaggcgcgcgtggcggcacgaagggcaggtaggcgcggccggagtcccggaggcgcgcgtggacgcggagcagcccttcggcactggtccagttccgcagctgcctctctagggccggggagctgccatacacggtggacgcgtccaggaacgaggtcaacccgttcatctgctgccgcgggttggccgtggacaggttcccaaagagcgcgccttggtccccggtgccgcaggcggccgaagagcggtagaagggcagacaggcggtgcccgcggccggccgggcctcctccgggagctgcaggcaaaggggagttcaaggtcacccagggcccccgtgcaccctttgtaagactctggaagttcgaggccggcgacgaccccgcagcgccgcacgtttctctgcccctccagtcctctgtaggggtcagtccagccagtcccctcacctccccccccggcctgcttaccggtggtctcttgcctggaagaggctgcaggggttggtccagccagccccccacctcccccctggcctgctcaccggtggtctcttgcctggaagaggctgcaggggtcggtccagccagccccgcacctcccctcagcctgctcactggtggtctcttgcctggaagaggttgaacccagaggatggaccccacatcctaggagtccacatctccccaaagctcagacgctcttggcctgagccagtctcgctcctgctcagacctgctctagctgctcatggaatccccggtctggtttattttctgactttcggaagagctgacttcttcctttccagtgccatggacttggtttaggagcacaatgagtaaacagtctccgagttttgtgggcatcactgtttagtgtaaaggcagcttgaggggagtgaggagaccttgggtgggattccaactctggctgtggccagcttccatcttctcatctgtaacatggagatctaaaatattttttccagatttacaggtttcctgggaagagtcgagctctgtgggctgcaga

SEQ ID NO: 3882 - DNA, 772 bp, Artificial sequence
  DNA replication origin
ctggatggcacacccagactccccgaggatggctacctcctctctgcctccctcacacctgtgctgggaagggtttcctttctcattcttttcttgtctgtagaacacaaaagttatcaccaaagtgagcaactgattgtgagttcttgtcttatgacacacctaaagcagctagggttttctgggattgaagagcaagagcttcagttcctcctggtgggaagcagggcttatggatccagggtcctgtgggatctcaagccagcaagagcaactttatcagcccttcctacgtgcgagtcccccgagagatgccggatcccaggaaccagcacagagggcggccctgcagatccctcccaaacatgcccacagcagaagtcctgtggcccagggctgagggaggggatagctctcagctttcgacaaaagaaattagaggagccaagatcctcagagtgggggcggctgtggttgggccctgacaaattagagtgggtatggtgaggacagacgcagcagcagggacgtggtgtggacggatgcagcaggaggaaggtggtgtggacggatgcaggaggagggaggtggtgtggacggatgcagcaggagaaacatggtttggacggatgaaggaggagggaggtggtgtggacagatggaggagaaagctgtgactcccggctctgagatgacctttcctgtctcttgctgatgtgtgcattagcctggccctggctggctcgtgtgtgtgtgtgtgtgtgtgtgtgtg

SEQ ID NO: 3883 - DNA, 812 bp, Artificial sequence
  DNA replication origin
ataactggccttgaccctggcccttgtgcccttcgctgaggagctgagtttcagcaagaatcctattattccagtttagcagaagctcctcaatgcagttgagtcatgaagcgttttgcactgacccctctccgccctggctggacgtcccagctacctttgctgcatttgagccttgcacttggttctttctggagacctctctcccctatgacagtagctcaaaggaagtctgtctgtaacttgagtctggtaaataattatttttctataagagctggaagccagactattaacacaaattcccggccagctacggagtggctgtgtgaccaggagcgtctctcgccctctcttatcactagtatcctcttctataaaatgaagattaaagatagtgcttacctaagagccacaattttcaggggagtaaattcgtcaaaagtttgggcgtagctggcacctggcttggaggcagcggtgaggaagacgctgtccctgagctgagtgcagagctgggggactggacaaggccatccgaggcagatgttgagcacccaggccccatgccgggcggggacatccggaggtggaggtgggagaacaggcaggcagctgtgctgctggccctggtcagggtgcagtcgggtgcatttggaggggtcccaggaggaggagaggtgatggatgggtctgtaatgaatcctgcctgtttcataggttttttgtctggggtgtgatctaggctgggtatacacctgtgggccttgtctggcaatgcattctggctgccgtccccagcctcagtgtgc

SEQ ID NO: 3884 - DNA, 1123 bp, Artificial sequence
  DNA replication origin
aacatggcacatgtatacatatgtaacaaacctgcacgttgtgcacatgtaccctaaaacttaaagtataataataataaaactaaaaaaaaaaaaactgccaaaaagaaagccacaagaatttctccgcaacccctaagtaaacaaatggttcctttgcatggacacagaaaggagaacagcacacactggggcctgttgaggggtggaggatgaggggaggaacttagaggatgggtcaataggtgcagcaaaccaccatggcacacgtatacctatgtaacaaacctgcatgttcttcacatcatttatcactttttttttagaagaaataaaaacaaacaacaacaacaacaaaaggagtgggggtgtgcctgacatgggggttgggggctgtacctgacacaggaggggggttgtgcttgacacaggatggtggtgggggtgtgcctgacacggggtgggggggatgcgcctgacacaggaagaggggtgcacctgacatgggggtgggagggtgtgcgtgacacaggatggggcagtgtgcctgacacaggctggtggggtgtgcctgacacgggggtgggggtgtgtgcctgacacaagctggtggggtgtgcctgactcaggagagtgggatgtgcctgatataggatagtggggtgcgcctgacacaggagggggtgcgcctgacacaggaagggggtgtatgcctgacacaggagtgggggacgtgccagtcaagcggatgtagcttgagagccccagaaagagcctccccagcctctgaaggccccgggcagccgcgtcctggccatctcttttcagactcacttgcttgataactggccttgaccctggcccttgtgcccttcgctgaggagctgagtttcagcaagaatcctattattccagtttagcagaagctcctcaatgcagttgagtcatgaagcgttttgcactgacccctctccgccctggctggacgtcccagctacctttgctgcatttgagccttgcacttggttctttctggagacctctctcccctatgacagtagctcaaaggaagtctgtctgtaacttgagtctggtaaataattatttttctataagagctgga

SEQ ID NO: 3885 - DNA, 982 bp, Artificial sequence
  DNA replication origin
gagggggaaatgctgtgcagagagaggacacctgaaacaagagggtgtggtgtccctgaaacgagagggtatcctgtgcctgaaagaagagggggggtgtgcctgaaacaacagggtggggtgtccctgaaacaagagggtgtggtttcccagaaacaagagagtggggtgtgcctgaagcaagagggtgtgtgtgcctgaaacaagagggtgtcctgttcctgaaataagaggtgcggtgtccctgaaacaaaagggtagggtgtccctgaaagaagggggtggggtgtccctgaaacaagagggtgggctgtgcctgacagaagaaggggggtgtgcctgaaaccagagagtgtggtttgccctaaacaagagggtggggtgtgcctgaaagaagagggtggggtgtgcctgacacaggagggtatcctgtgcctgaaacaagaggatggggtatccccgaaagaagagggtggggtgtccctgaaacaagagggtatcctgtgcctgaaacaagaggttgtggtttcccagaaacaagagggtggggtgtccctcaaacaagagggtatcctgtgcctgaaacaggaggatgtggtgtccctgaaacaagagggtgtggtgtccctgaaacaagaggctgtgctgtccctgaaagaagagggtatcctgtgcccgatacaagagggtgtggtgtccctgaaagaagagggcgggtgtgcctgacacaggagtgggggtgtgcctctcctcagcagatgtaaaagaacagaaataacaaaccgtctctccgaccacagtgcaatcaaactagaactcaggattcagaaactcactcaaaaccgctcaactacatggaaactgaacaacctgctcctgaatgactactggatacataacaaaatgaaggcagaaataaagatgttctttgaaacgaacgagaacaaagacacaacataccacaatctctgggacacattca

SEQ ID NO: 3886 - DNA, 10433 bp, Artificial sequence
  DNA replication origin
tttgtgtaggttgcacacagtgaggggattagaggaggttgcgcacagtggggggatttgtgggggttgcacacagtgggggacttgaggaaggtgcacacagtggggggtatttggggaggttgcacacagtgaggggatttgaggacgttgcacacaataggggagattttgggaggttgcacacagtggggagatttgaggaggttgctcgcagtggggggatttgaggaggttgcacacagtgggggtgatttgaggaggttgcacacagtagggtgatttgaggaggttgcacacagtgtgagggatttggggaggttgcagagagtgggggtgatttggggaggttgcagagagtgggggtgatttggggaggttgcagagagtgggggtgatttggggaggttacagagagtgggggtgatttggggaggttgcagagagtgggggggatttggcgaggttgcaaagagtgggcgggatttggggagattgcacacagtgtcgtgattgggcgaggttgcacacattgaggggtgttttggggaggttgcacagagtgggggggatatggggcggttgcacagagtgtgggggtttggggagtttgcacagagtgggagggatttgaggaggttgcacacagtgggggcaattttgggaggttgcacagagtcgggaggatttggggaggctgcacacagtgggagggatttggggaggttgctcacagtgggagggatttggggaggttgaacacagtgggggcaattttgggaggttgcacagagtcgggaggatttggggaggctgcacacagtgggagggatttggggaggttgaacacagttgggggatttagggaagttgctgacattaggggggatttgagaagggtccacacagtggggggaatatgaggcggttgcacacagtgggggcgatttggggtggttgcagacagtgtggggatttggggaggttgctcacagtgggggggatttggggaggttgcacacagtggggggttttggggaggttgcacacagtggggggatttggggaggttgcacacagtggggggatttgaggaggttgcacatagtgggggtatttgggggggttgcacacagtgggaaagatagggtgaggttgcacagagtggagggatttgaggaggttgcacatactggggggatttgaggaggtcgcacatagtggggggatttggggaggtcgcacagagtgggggggatttggggaggttgcacacagtggggggatttgcggaggttgcacacagtgggggtatttggggaggttgcacgcagtgaagggatttcaggaggttgcacacagtcgggggatttgaggacgttgccccccatggggggatttgaggaggttgcacacagtgggggggatttgaggaggttgcacacagtgggggggatttgaggaggttgcacacagtagggggatttgagaaggttgcacacagtgtgggggatttggggaggttgcagagagtcggggagttggggaggttgcacagagtgtgggggatttggggaggttgcacacatcgtgggattttgtgacgttgcccacaatgggggggatttgggggggttgcacagagtgggggagatttggggaggttgcacagagtgagggggatttgaggatgttgcacacagttgatgggatttcgggaggttgcacacagtggtggggatttggagaggttgaatacagtttaggggatttagggaagttgcacacactggggatatttggggacgttgcacacacttggggggatttgaggaggtttctcacagtgtggggattttaggaggttgctcacactggcgggggatttgaggaggttgcacacagtggggggatttttggggggtgcacacagtgggggactagaggaggttgcacacagtgggagggatttggggaggttggacacagtggggggatttgaggaggttgcacatagtgggggagattttgcgaggttgcgcatagggagattttgggaggttgcaaacagtggggggatttgaggaggttgcacagagtgtgggagacttggggaggttgcagagagtgggggtgatttggggaggttgcacacagtgtcgtgattgggcgaggttgcacacagtgaggggtgttttcgggaggttgcacagagttggggggatatggggaggctgcaaggggggggtttggggagtttgcacagagtgggagggatttgaggaggttgcacacagtgggggcaattttgggaggttgcacagcgtcggggggatttggggaggctgcacacaatgggagggatttggggaggttgctcacagtggggggattagaggaggttgcacacagtggggggatttgaggagattgctcacagtggggggatttgaggaggttgcacgcagtggggggatttgaggaggttgcacacagtgggggtgataggaggttgcacacagtacggggatttgaggaggttgctcacattggggggatttgagaaggttgctctgagtggtgggggatttgaggaggttgcacacggtggggcatttggggagattgctcacagtggggggatttggggaggttgcaacaagtgggatttggggaggttgctcacagtggggggatatggggagattgcacacagtggggggatttgggaaggttgctcacagtgggggcatttggggatgttgcagacagtggggggatttggggacgttgcacatagtggggggatttggggaggttgcacacagtgggggaatttggggacgttgcacacagtggggggatttggggaggttgcacacagtggggggatttgaggaggttgcacagagtggggggatttagcacggttgcacacagtgggggggatttgaggaggttgcacagagtgggggggatttggagaggctgcacacagtggggggattcagggaggttgcacacagtggggggattcggggaggttgcacacagtggggggatttggagaggttaaacacagttggggggatttagggaagttgcacacactggggagatttggggaggttgcacagagttgggatttgaggaggttactcacagtggggggattttaggaggttactcacagtggggggattttaggaggatgcgcacactgggaggatttgtgggggttgcacacagtgggggacgtgaggaggttgcacacagtggagaggatttggggaggttgcacacagtgggggatttgaggaggttgcacacagtaggaggatttggggaggttgctcacagtggggggattggaggaggttgcacacagtggggggatttgaggaggctgcacacagtgtgggggatttggggaggttgcacagagtgggtgggatttggggaggttgcacaaggtaggggggatttggggaggttgcacacagtggtggatgtggtgaggttgcacacagtgggggggatttggggaggtttcacagactggggtagatttggggcggttgcacagagtggggcgatttggggagtttgcaaagagtgggagggatttgaggaggttgtacacagttggaatttggggaaattgcacagaaggggggatttgaggaggttgcacacagttgagagatttgaggaggttgcacacagtggggggatttgagcaggttgcacaccgggtgatttgaggaggttgcacacagtggcgggatttggggtggttgctcacaatggggggacttggggggttgcagacttgggaggatttgtggaggttgcacacagtgggggaatttgtgtttttgctcactgtgggggagatttggggggttgcctacattggggggatttggggaggtttcacacagtggggggattggaggaggttgcacacagtggggggatgtgggggtttgctcacagtgggtgagatttggttgggttgcacacagtgcggggatttgaggaatgttgcacacagtgggggatttgtgcttttgctcacagtgggggagatctgggggggttgcacacagtggggagatttgaggaggttgcacatagtgggaggatttgaggaggttcctcacattggggggatttgaggaggttgcacgcagtggggtatttgaggaggttgcacgcagtggggggatttgaggaggttgctcacattggggggatttgaggaggttgcacgcagtggggggatttgaggaggttgaacacagtgggggggatttgaggaggttgcacacagtatggggatttgaggaggttgcatacagtgtgtgggattttgggaggttgcacagagtgggggggatttggggaggttgcccagagtgggagaaatttggtgaggttgcacacagtggcgggattttgtgtggttgcccacaattgggtgggatttggggaggttgcacagattggggggggatttggggagtctgcagagagtaggggtgacttggagaggttgcacagagtggtggggatgtgaggaggttgcacacagttggtatttggggaagctgaacacagttggagggatttagggaagttgcacacactgggaggatttggggaggtcgcacacagatggggggatttgaggaggttgcacacagtggggtatttgaggaggttgctcacagtggcggaggatttgaggaggttgcacacagtgggggggatttggggtggttgcacacagtgcggggatttggggaggttgctcacggggggtattttgggaggttacacagtgaggggatttggggaggttacacagtgaggggatttggggaggttgctcacagtgggggttttggggaggttgcacacagtggggggatttgagtaggttgcatatagttgggggatttggggcggttgcacacagtgggagggataggggaggttgcacagagtggggggatttgaggaggttgcacacagtgggggtatttgcggaggttgcagaaagtggggggatttggggaggtggcacacagtgaggggatttgaggaggttgctcacagtggggggatttgaggaggttgcacacagtgggggggatttgaggaggttgcacacagtgtggggatttgagtaggttgcacagagtgtgggggatttgtggaggttgcacagagtggaggggatttggggaggttgcacacaccgggggattttgtgacattgcccacaaagcaggggatttggggaggttgcacagagtggggaggatttggggaggttgcatagattgggggggatttggggaggttgcatagattgggggggatttggggaggttgcacagagtggtggggatttgaggatgttgcacacattaggtgggatttggggaggttgcatacagtgggggggggatttggggaggatgaacacagtttgggggatttagggaagttgcacacactggggagatttggggaggttgcacagagttggggggatttgtggaggttgctcacagtggcgtgggatttgagaaggttgcacacagtgagaggatttgaggaggttgcgaacactgggaggatttgcgggggttgcacacagtggcggacttgaggttgcacacagtggaggggatttggggaggttgcacacagttgggggatttgaggtttcacacagcatgttgatttgggggggttgctcacattggggggcatttggggggttgcacacagtggggggaattgaggttgcacacactggggggatttgtggttttgctcacagtgggggagatgtggggtgtttgcacactgtggggggactggggtggttgctcacagtgggggggacttgggggtgttgcacacatcggggggatttgaggaggttgcacacagtggggggatttgaggaggttgcacacagtggggggatttggaggtttgcacatggagggatgggggaggttgcacagagtcggggggatttggggaggttgcgcacagtgggaggatttggggaggttgcgcacagtggggggatttggggaggttgcacacagtgggcggatttggggaggttgcacacagtgggggatttggggaggttgctcacagtggggagatttgggaaggttgtaaacagtcgggggatatgaggaggttgcgcacagtggggggatttgaggaggttgcacacagtattgggatttgaggagtttgcacacattgtgggggattttgggaggttgcacagagtggggggcatttgggtaggttgcacacggggaaatttggtgaggttgcacacagtggcgggatttagtgtggttgcccacagtggggtgagatttggggagtttgcagagtgggggtgatttggggagtttgcacagagtcggggggatttgggggaggttgcacatagtgggtgggattttggggcttgcacacattggggggatttgaggaggttgcacacagtggggggatttgtggttttggtcatagggagatttggggggtttgcacacagtggggggattttgggaggttacacacagtggggggatttgaggaggttgtacccagtgggggttttgggggtttgctcacagtgggggaaatttgggggtgttgcaaacagtggggggttttggggaggttgcacacagtggggggatttgaggaagttgcacacattggggggatttgtggttttgctcacagtgggggagatttggtggagttgcacatagtgaggggatttgaggaggcacacagtgggggggatttgaggaggttccacagagtaggggatttgaggaggttgcacccagtgtgagggatttggggaggttgcacacagtgaggggatttgagcaggttgcacagtggggggacttgggcggattgcacacagtgggggacttgaggaggttgcacacagtgagggtgatttggggaggttgcacacagtttggggatttgagcaggttgcacacagtagggggatttgggggggttgcacacagtgggagggatagggggaggttgcacagagttgggggatttggcgaggttgctcagagttgggtggatttggggaggttgcacacactggggggatttggggaggttgcacagagtcgggatttgaggaggttgcacacagcgggggagatttgaggaggttgtacagtgcgggcaatttgaggaggttacatcacagtggggggatttggggaggttgctcagaatgtggggatttggggaagtggcacacagttgggggatttgaggaggctgctcatagtggggcgatttggggaggttgctcacagtgagtagagttgtaaaggttgcacacactggggggaatgtggggagtttgcacacagtggggggatttggggaggttgcccacagtggggggatttgaggaggttgcaggcagtagggggatttgaggaggttgcacacagtgagcggatttgaggaggttacacacagtagggggattgggggggttgcacacagtgggggacctgaggttgcacacagtgggtgggatttggggaggctgcacacagtgggaggatttgaggaggttgcacacagtgggtgggatttggggggttgcacacagtggggggatttgggggggttgcacacaatgggagggaaagttggaggttgcacagagtgggggggatttggggaggttgaacagagtggagggatttggggaggttgcttacagtagggggatttggggtggttgcacacagtgtggggatttgaggaggttgctcactgtgaggagatttgaggaggttgcacacagtggggggatttgaggaggttgcacacagtggggtggatttgaggaggttgcacacaggatggggatttgaggaggttgcacacagtttgggggattttgggaggttgcacagagttgggggtatttggggaggttgcacggagtggggggaatttggtgaggttgcacacagtggcaggatttggtgttgttgcccacaatgggggggatttgggaaggttgcacagagtgggggggatttggtgagtttgcagagagtaggggggatttggggaagttgcacagagtggggggatttgggaaggttgcacacagtaggggggatttggggaggttgattacagttggggggatttaagcaagttgtacacactggggggatttggggagctcacacacagttggggggatttgaggagtttgctcacagtggggggatttggggaggttgcacacagtgaggggattagaagaggttgcacacagtggcggtatttgggggggttgcacacagtgggggacctgaggaggttgcacacagtgggggggatttggggaggctgcacacagtggggtgattcgaggaggttgaacacagtggggggtgatttgaggaggttgctcacagtagggggatttgaggagtttgcacacagtgtgggggatttggggaggttgcacagagtggtggggatttggggaggttgctcagagtgggggggatttggggaggttgcatagagtcggggggatttggggagtttgcatagagtgggagggaactgaggaggttgcacacagtgggggtaatttggggaggttgcacagagtgggagggatttggggtgtttgcacacaatgggaggtatttggggaggttgaacacagtggggggatttagggaagttgcacacagtggggggatttggggaggttgctcacagtggggggatttggggaggttgctcacagtggggggatttggggaggttttacacagtggggggatttggggaggttgctcaaagtggggggatttgggaggttgcaaacagttggggggatttgaggaggttgcacacagtgtgggggattttgggaggatgcacagggtggggcggatttggggaggttgcacagagtgcgcaggatttggggaggttgcacacagtgtcgggatttggtgaggttgcacacagttggggagatttggggaggttgcacagagttggggggatctggggagtttgcacagcgtgggagggatctgaggaggttgcacacagtggggggaatttggggaggttacacagagtggaggggatttgaggaagttgcacacagtggggggatttgaggaggtttcacacagtggtgggatttgaggaggttgcacccagtggggggatttggggttttgctcacagtgggggagatttggggggttgcacacagtggtgggatttgaggaggttgcacacagtggggggatttgaggaccttgcatacagtgggggtttggggaggttgcagacagtgggtggtgtttgggtgtagcctttgcgatgtgtcagacttgaacattcgaagccaggttgagatgataaggagggagtattctatggagagattgaggcttgaataaaagccaagaagtgggaatggctgggcatcacacggtggcagggcctgtgtgaggtagatggtctgggggcaggagagggagacagatcagagagactgtgagggcacggtggcgggccggtgtggggtagagagtctgtgagggcacggtggcaggcaggtgtggggaagagagactgcgagggcacggtggcaggcaggtgtggggtagagagactgtgagggcacggtggcgggccggtgtggggtagagagtctgtgagggcacggtggcaggcaggtgtggggtagagagactgtgagggcaaggtggcagggccggtgtggggtagagagactgtgagggcacggtggcgggcaggtgtggggtagagagactgtgagggcacggtggcgggccggtgtggggtagagagactgccagggcatggtagcagggccagtgtggggtagagactgtaagggcacggtggcagggccggtgtcgggtagagagactgccagggcacggtggcagggccggtgtggagtagacagcctggggtcaggagagggaggaaggcacatttcccacctatacttgctcagaagtgggtgaagaaagtggggccacagagggaggggctgggagctgcccagagaaagcagatgagcctggcagccaggcttgggttctgggctggaaactggacaatgcgtttagctgaacccacggggggactggggtgggaggctgtccttgctgtggttcatgtgtgaccaggctgggaacagctccccctgctcatttccagggcagacgtgggtctctaaggagcgcaggtccttccccaggtcctctggggcctgagtgcctcacagacgccgtact

SEQ ID NO: 3887 - DNA, 2703 bp, Artificial sequence
  DNA replication origin
atttgaggagaatgcacacagtggggcgatttggggacgttgcacacactgggggggatttgaggaggctactcagagtgggggaggaatttgaggaagttgcacgcagtgagagggatttcaggaggttgctcacagtggggggatttgaggaggtgtcacatagtggggggatttgggggggtgcacaaactggaagggatgggggaggtttcacagagtggcggggatttggggaggttgcacagagtgggggggatttcgggacgttgcacacagtgggcatttggggaggttgcacaaagttggggggatttcgggaggttgcacacagtggggggatttgaggaggttccaaacagttggggggatttggggaggttgcacacagtgggggcgatttcgggaggttgcacacagtggggggatttggggggcttgaacacattggggggaacggggaggttgcatagattgggggatttggggaggttgcacataatggggggatttgggaaggttgcacacagtggggggatttgggaaggttgcacacagtggggggatttgaggaggttgcacacagtggggggatttgaggaggttgcgcagagtgggggggatttggggagattgtgcagagtggggggatttgaggaggttgcacatagtgtgggggatttggggaggttgcacacgggatttgggggggttgcacacattcggggacttgaggttgcacaaagttggggggattcggggaggttgcacacagtttggggatttgagcaggttgcacacagtgggagggatggcggaggttgcacagagttggggggatttcgggaggttgcacagagtggggggatttggggaggttgcacacactgggtggatttcgggaggttgcacacactgggggcatgtggggaggttgcacagagtggggggatttgaggaggttgcacacagcgagggaggatttgaggaggttgtacactgcggggcaatttgaggaggtcttcgcagtggggggatttggggaggttgctcacaatgtggtgatttggggaagtggcacacggggatttggggaggttgcacccagtgggagggataggcggaggttgcacggagtggggctgatttggggaggttgcacagagtgggggggatttggggaggttgcacacagtagggggatttggggaggttgctcacagtggggagatttgaggaggttgcacacagtggggggatttgagtaggttgcatacagtgggggggatttgaggaggttgcacacagtacagggatttgaggaggttgcatacagtatgggggattttgggaggttgcacagagtggggtggatttggggaggttgcacagaatggggggaaattgatgaggttgcacaagtggcgggatttggtgtggttgcccacaatgggggggggggggatttggggaggttgcacagagtggggggatgtgaggaggttacacagagttaggtagatttggggaaggtgcacagagtgggggagatttggggaggttgcacacagtgggggggatttggggaggttgtacacacttgcggcgatttagggaaattgcacacactggggggatttgaggaggttgctcacagtggcggaggatttgaggagactgcacacattggggagggatttggggaggttgcacacagtgaacagattagaggaggttgtgcacagtggtgggatttgggggggttacacacagtgggggacttgaggttgcacacagtgggggggatttggggaggttacccacagtggggatatttgaggaggttgcacacagtgggggagatttgaggaggttgcacacactagagggaattgaggaggttgcacactgtgtgggggatttttggaagttgcacagagtggggggggtatttggggacattgcacagagtgggcgggatttgtggaggttgcacacagtggcgcgatttggtgcggttgcacagtgtgggcggatttggggaagttgcacagagtggtagggatttggggaggttgcacagagtgggagggatttggggaagttgcacactgcgtggggggtttggggagtttgcacagagtgggagggatttgagattgcactgggggtaattttgtgaggctgcacagggtgggggcggatttggggaggttgcacacagttggagggatttggggaggttgaacacagttggacgacttagggaagttgcacacagtgggaaaatttgatgaggttgcgcacagcgagggggatgtgaggaggttgctcatattggggggatttgagaaggttgctctgagtgatgggggatttgaggaggttgcacacagtgggggagattggggggttgcacacgggggatttgggaggttgctcgcattgggggggatttgggaggttgcaaacagttggggggatttggggaggttgcacagagtgggggcgttttggggaggttgcacagagtggtgggtattcggggaggttgaacacagtggtgggatttggggaggttgcacagattgggggggatttggggagattacacagagtgatggggatttggggaggttgcacagagtggtggggatttgaggaggttgcatacatttggttggatttatggaggttgcacag

SEQ ID NO: 3888 - DNA, 1854 bp, Artificial sequence
  DNA replication origin
gtgtagtggttgatttgccagtgtagtagctggtttactggtgtggtggttggtttaccagtgtagtagctggtttactggtatggtggttggtttactggtatagtggttggtttaccagtgaagtggttggtttatttgtgtagtggttgattgaccagtgtagtagctggtttactggtatggtggttggtttactggtatagtggttgctttaccagtgtagtggttggtttacttgtgtagtggttgatttgccagtgtagtagctggtttactggtgtggtggttggtttaccaatattgtggttggtttaccgatgtagtacttggtttagcagtatagtggctggtttactggtatagtggttggtttactggtatagtggtagatttaccagtgtagtagctggtttactggtgtgatggttggtttactggtgtaatgggtgatttaccagtgtagtggctggtatactggtgtagtggctggcttactggtgtagcggctggcatactggtgtagtggctggcttactggtgtagtggctggcttactggtatagtggctggcatactggtgtagtggctggcttactggtgtagtggctggcttactgatgtaatgagtggttggtttactggtgtagtggctggcttactggtgtagtagctggcttactgatgtaatgagtggttggtttactggtgtagtggctggcttactggtgtagtggctggcttactggtgtagtggctggcatactggtgtagtggctggcttactgatgtaatgagtggttggtttactggtgtagtagctggcttactgatgtaatgagtggttggtttactggtgtagtggctggcttactggtgtagtggctggcttactggtgtagtggctggcttactgatgtaatgagtggttggtttactggtgtagtagctggcttactgatgtaatgagtggttggtttactggtgtagtggctggcttactggtgtagtggctggcttactggtgtagtggctggcatactggtgtagtggctggcttactgatgtaatgagtggttggtttactggtgtagcggctggcttactggtgtagcggctggtttactggtgtagtggttggcatactggtgtagcggttggcttactggtgtagcggctggcatactggtgtagcggctggtttactggtatagcggctggcatactggtgtagcggctggcatactggtgtagcggctggcttactggtatagcggctggtttactggtgtagcggctggtttactggtgtagcgggtggcttactgttgtagcggctggcttattggtgtagcggctggtttactggtgtagcgggtggcttactgttgtagcggctggcttattggtgtagcggctggtttactggtgtggccgctggtatactggtgtagcagctggtttgctggtgtagtggctggtatgctggtgtagcggctggcatgctggtgtagcggctggcttactggtgtagcggctggtttactgatgtaatgagtggttggtttaccagtatagcagttggtttactggtgtagcagctggtttactggtgtagcggctggtttactggtatagcgactggtttactggtgtagcaggtggtttagtatagagggtgacttggtacaacgagggaccacggcctcccaggattgtgtcagggactcccctggtttactggtgtagcggctggtttaccggtgtagtggctggtttactggtgtagcaggtggtttagtgtagagggtgacttggtacaatgagggaccacggcctcccaggattgtgtca

SEQ ID NO: 3889 - DNA, 991 bp, Artificial sequence
  DNA replication origin
cgcaggggacgtgggttccagtgacggccgcgacgcaggggacgtgggttccagtgacggccgcgtcgcaggggcgtgggttccagtgacggccgcgacgcaggggcgtgggttccagcgttggaggcagccgtgacggccgcgatgcagggggcgtgggttccagtgacggccgcgacgcaggggacgtgggttccagtgacggccgcgacgcaggggacgtgggttccagtgacggccgcgtcgcaggggcgtgggttccagtgacggccgcgacgcaggggcgtgggttccagcgttggaggcagccgtgacggccgcgatgcagggggcgtgggttccagtgacggccgcgacgcaggggacgtgggttccagtgacggccgcgacgcaggggacgtgggttccagtgacggccgcgtcgcaggggcgtgggttccagtgacggccgcgacgcaggggcgtgggttccagcgttggaggcagccgtgatggccgcgatgcagggggcgtgggttccagcgttggaggcagccgtgatggccgcgatgcaggggcgtgggttccagcgttggaggcagccgtgatggccgcgatgcagggagtgaataatcagcgtgtgcgtccaggcagcaggttccaagcagaagctttcctcctgtgactttgaaaagtgacctccttgtcagtttcttactcactgaactataaactagaatacgagtatggactcaatgtaaatgcaaatcgatagaaataaaattgtggcttttaaatgtgacattttccatgaggagtaaagagttggaggcagccaggcacggtggctcacgcctataatcctagcacactgggaggccaagatgggcggatcacttgagctcaggagttcgagcccagcctggccaacacaatgaaacctcgtctctactaaaaatacaaaaattagctgggcatggtgtgcatgcctgtaattccagctactcgggag

SEQ ID NO: 3890 - DNA, 1006 bp, Artificial sequence
  DNA replication origin
gtgtgcgtccaggcagcaggttccaagcagaagctttcctcctgtgactttgaaaagtgacctccttgtcagtttcttactcactgaactataaactagaatacgagtatggactcaatgtaaatgcaaatcgatagaaataaaattgtggcttttaaatgtgacattttccatgaggagtaaagagttggaggcagccaggcacggtggctcacgcctataatcctagcacactgggaggccaagatgggcggatcacttgagctcaggagttcgagcccagcctggccaacacaatgaaacctcgtctctactaaaaatacaaaaattagctgggcatggtgtgcatgcctgtaattccagctactcgggagactgaggcaggagaattgcttgaaacccaggaggtggaggttgcagtgagccgagatcgcaccattgcactccagcctggaagataagagtgagacgccgtcaaataaaaaaaaaaaaaaaaagagttggaggaatcccgatatgcaggaaaaagatgtatctggaaagccctaataaagccctaataaaggagccgaggccacaaaccaacaggacatgaaatgcaggtggtgagaagacccaaaccagagctggcaccaaaggacaacggctttcccctcctgcaggcgtgtccaggcagtcaatgcagggcagggtggccagcactgtgacacccacggtcatgacgggatctgtgtggtggcctcgtggaaggggcaaggcagatgcctaggagagagcaaggggggaaataaggtcccaaagggagggttggtcaaaaaggaaagggctgcagagggtgctgtcctaaggcaagggtgacctgtgtgcagttccagaagagttttgctacccggtctgtgcaactgcctgactctggcgtgagatggggagagcacaggtggtggggcagctgctgggagcaggtcccaggcagaagctgaggacacgagagggcacaggagaggct

SEQ ID NO: 3891 - DNA, 824 bp, Artificial sequence
  DNA replication origin
gccaggggtggggatgctggcctggataggaatctgggtggggagggcagcctgctgggcagagatgaccacagggagggccggcctcgccctctgccaagttccacctccacattccttctccttgttttctactcccagtcctgaggtctcagctttccagggagaagtggcagccaggagaggccaggagccggggccgcagcgagggcacagccagatggactgaagcgcccagggagtaagggggtgggggaggagctgggtgtcatcccgggcaccttgatagcttggggggcctggtcttcctcttccggaacttgtccgtgaagctaatgagctgaggaatctccttgattgcagaccaggaggcagaaaggttctctaataaacacctgcgctgtgcccggcctccacatttgcagggggtggggctcttcacctccccgggacagccaggctcgtcctagggacaggtgaggctgagtcagtgcattatgcaggggacctggggccagaaagggatggccttcacccaaatctctgtgcagctgctgaggtccaagatgattacttcccgagaagtgctcttaactcacctaaggggtcaccaaggcaggaggactcaggcacgggtgagaatcagcctgtgtggatcagccctgtgttgaacctttgcatgtagctcggcggactctgcactgacgcatggagagttggcagctccctcttcatctgaagggctggggagacacagttgcacacctccccgtggttacctgcacctccaggtgtccagggatcttcccccagaccccaagccc

SEQ ID NO: 3892 - DNA, 2446 bp, Artificial sequence
  DNA replication origin
gacatgggtttgggcaccctggttcaattgtcttttatatagtttcggggctggttcaacttgaagctgcggccagaaggacagccccttattgcctgggcccctcccctgggaaggcgcttggcacttcctggccttctccggaccctgggcttttgagctgtctcctctgagccaggctgctgtctgttctcatgatgtctgtggtctgtgcccctcctgcaggactcttctgagatttgcagtttacatcagcatagacccagcagttacagtcacactgggtgtctaaatgggacccactgggcgcctgctcctgggccctgcatggtctgtctgctccaccacggacatgccgctgcccggggctggaggccaatgcatccgcacacacaggttgcaggcagaggctccgttcagccaaggaaggagcgagcagctctgcccaggtctgcgcaggcctggggccctggtgggggattcgtggtatgacccggctctgccacctaccgtcagaccctgcttcttcctccacacccccagcctccttgtcataaagggtccagccttggccttgtggcccctgatagtaacatctcatgtgatatgtgtattaatctactggagcagccatgacaaaacaccacaggctttggattgaaccacaggaatttacttcctctcagttctgaaggcgggaagtccaggactaggggccggcagagcggggtcctcctgggcctctctgtgggctgtgggctgcgggcagggcagggccctcccctgtgtcctcatgtggacccctctatgccctctgtgcgccctcctctcatgggccgtcgccaagtacagtcgagctccgaggggaccggaggccacagtgcagcccatggtgctgagcaaggctggagctggaggtgtcggggacatgggtgtggggacatgggtgtcggggacatgggtgtggggacatggatgtgggtaggggacacgggtgtggggacacgggtatgggggacatgggtgtcggggacatgggtgtggggacataggtgtgggtaggggacacgggtgtggggacacgggtgtggggacacgggtgtgggggacatgggtgtgggggacagggcaacagactgagtgtcttcaaggccctgcccagctctcacgtccaggagccaagtggagcccagggtggcttccggccggtggagacctgagtggggggaatgggtggtgttgtccatgccctggggtggcagcccctcttggagagctttggggagcactgttgacccagggttccaggctgaggatccggcgggggccatggaaggctttggaaggactgagtcgtccttttgagaggtggggccctgccctcacccagagctgcattcgcttgttcattgtgtgaaaatgaaagttcctgtgagggaaatccatgagcacagggcatagactggcagggacagagggacagagggacgggggacagagagacagagggacagagggatgggggagagagggacagagggacagagtggagatggacagagggacagggcggggacagagggacagggcagggatagacggacagagtgggaacagagggacagggcagggacacggacagagggacagggtggggacagagggacagggatgggacagagggacagggtggggacagagggacagggcggggacagggacagagggactgggggacagagggactgggtggggacagagggacaggatggggacagggacagggtgaggacagagggacagagcagggacagagggacagagcggggagagagggacagggacagagggacagggcaggaggagatagggacagtgttcggacagagggacagggtagggacagagggacagggcggggacagagggacagagggactgggggacagagggactgggtggggacagagggacaggatggggacagggacagggtgcggacagagggacagcagggagagagggacagggacagagggacagggcaggaggagagagggacagtgttcggacagagggacagggtagggacagagggacagggcggggacagagggacagagggactgggtggggacagagtggagacagagggacagggaagagagagagggatagggcaggaggacagagggacagggtggggacagggacagggcgggaggacagagggacaggctctccatggccactgacaagggcttctgcaggcagtgctgcctccacatctgtgtgggagcccagcccattaggataaaagctgcaccttcagggtgtagctccaggattccctggggacggggtgtccctgttccggtgtgtctccccacccggtctccccacctggtctccccacctggtctccccacctggtctcccccggtct

SEQ ID NO: 3893 - DNA, 1112 bp, Artificial sequence
  DNA replication origin
tgcttgtgtgtgtctgatctgtgtgctcgcatctgtggtgtgtgtgtttgcttgtgtgtgtctgatctgtgtgtgtgcatttgtgctgtttgcatgtgtgtgtgatctgtgtgtgcatctgtggtgtgtgtgtttgcgtgtgtctgatctgtgtgcatgcatctgtgctgtgtgtttgtgtttgtgcgtgtgtctgatctgtgtgtgtgcatctgtggtgtgtgcgtgtgtgtgatctgtgtgcgtgcatctgtggtgtgtgcgtgtctgtgtcatatctgtgtgtgtgcatctgtggtgtgtgtgactgtgtgtgatctgtgtgcgtgcatctgtggtgtgtgtgtttgcatgtgtgtgatctgtgtgcgcgcatctgtggtgtgtctgatctgtgtgtctgcttctctgttgtgtgtgtttgcatgtgtgtgtctcatctgtgtgctctcctctgtggtgtgtgtgtttgcatgtgtgtgtctgatttgtgtgtgttcatctgtggtgtgtgtttgcgtgtgtctgatctgtgtgcgtgcatctgtgttgtgtgtgtttgcgtgtgtgtgtctgatctgtgtgcgtgcgtctggtgtgtgtgtttgcgtgtgtgtgtctgatctgtgtgctcacgtctgtggtgtgtgtttttgcgtgtgtgcgtctgatctgtgtgcgtgcatctgtggtgtgtttgcttgtgtgtgtctgatctgtgtgctcgcatctatgttgtgtgtgtttgcgtgtgtgtgtcttatctgtgtgcttgcatctgtggtgtgtgtgtttgcatgtgtatgtgtgatctgtgtcctcgcatctgtggtgtgtgcgtgtgtgtgtctgatctgtgtgctcgcatctgtggtgtgtttgcgtgtgtctgatctgtgtgcgtgcatctgtggtgtgtgtgtttgcgtgtgtgtgtccgatctgtgtgctcgcatctgtggtgtgtgtgtttgcatgtgtatgtgtgaactgtgcgaatctgtggtgtgtttgtatgtttgtgtctgatctgtttgcatgtatctgtgctttctgtgtgtgcatgtccatggcccatgcatgtgcctatgcgtgcacgtgtttgtgctctg

SEQ ID NO: 3894 - DNA, 1174 bp, Artificial sequence
  DNA replication origin
tatgtctgatctgtgtgtgtgcatctgtggtgtgtgtgtttgcgtatgtctgatctgtgtgtgtgcatcagtggtgtgtgtgtttgcgtgtgtgtgtctgatctgtgtgtgtgcatctgtggtgtgtgtgtttccatgagtgtgtctgatctgtgcgtgtgcatctgtggtgtgtgtgtttgcatgagtgtgtctgatctgtgcgcgtgcatctgtggtgtgtgtgtttgcatgtgtctgatctgtgtgcttgcatctgtggtgtgtgtgcgtgtgtgtctgatctgtgtgcgtgcatctgtggtgtgtgtgcgtgtgtctgatctgtgtgcgtgcatctgtggtgtgtgtgtttgcgtgtgtgtgcctgatctgtgtgtgtgcatctgtggtgtgtgtgtttgtgtgtgtgtgtctgatctgtgtgagtgcatctgtggtgtgtgtgtttgcatgtgagtgtgtgtgcatctgtggtgtgtgtgtgtgtgtctgatctgtgtgtgtgcatctgtggtgtgtgtgtttgggtgtgtgtgatctgcgtgtgtgtgtgcatctgtggtgtgtgtgtttgcatgtgtgtgtctgatctgtgtgtgtgcatctgtggtgtgtgtgtctgatctgtgtgcatgtatctgtggtgtgtgtgtttgcgtgtgtgtctgatctgtgtgtgtgcatctgcagtgtgtgtgtttgcgtgtgtgtctgatctgtgcatctgtggtgtgtgtgtttgcatgagtgtgtctgatctgcgtgctggtatctgtggtgtgtgtgtttgcgtgtgtgtctgatctgtgtgtctgcatctgtggtgtgtgtgtttgcatgtgtgtgtctgatccgtgtgctcgcatctatggtgtgtctgcatgtctgtgtctgatctgtgtgcatctgtggtgtgtgtgtttgcgtgtgtatgtgtgatctgtgtgctcgcatctgtggtgtgtgtgtttgcttgtgtgtgtctgatctgtgtgctcgcatctgtggtgtgtgtgtttgcttgtgtgtgtctgatctgtgtgtgtgcatttgtgctgtttgcatgtgtgtgtgatctgtgtgtgcatctgtggtgtgtgtgtttgcgtgtgtctgatctgtgtgcatgcatctgtgctgtgtgtttgtgtttgtgcgtgtgtctgatctg

SEQ ID NO: 3895 - DNA, 1415 bp, Artificial sequence
  DNA replication origin
ggcccagctgctcgttggcgcggtggtccccggccaggaagcaggggatggggctctcgttctcgtcccgcatgcactccgtgggcggcccggtggcgaaggggagcagcggcttcccggaccgctgcacgatgccctgccgcagcaggccgcggtggctggccaggtcgcggatgctgcgggcctcatgctccgtgctcccgtacacgttggatgcgtctatgtaggaggtgagctggttgatctgctcccgcgggtacacggagttcatgagcagcgaagtcatgccgctgccgcacacagggctggagcgcacgaagaacatgcagcgggccccgctcctggcccgggagtcattgggggggatcatgacagagaagcagggggggtcgttgctgcacacgttgctgcagtgctgtccgtcggagaagcgtgcctggctcagggccaccaccgtggagtcgaggtcgtggtccaggaactggccccactgcatcagcatgtgggtgaactgctcgtcgggtgtgacggtctccgtcccgatcagggtggtggacaccaggcgcggcatgggaagggcgtgcccgttgtacagtcggtgggggttgatgccccgaggggtgttgaagccattctcgtacacggatttcagcaggcgctcgaaggcggtcagcgaggcgccccacatggggtgctgcaggttgttacaggtgccgtcgtgcgtccggtacttctggtggaagcacatgtccgagcagttgttcacgcgccggtgggcggtacagcccgacaggtttgcgatgaggttcaggtactgtggagacaccaggtcgttgtagtggtaacctgggacgtggagaaaagcaagacgcactcaattcccctggaggatgtgtgagggcccggtaccccttggcacctctgccgctgacatggggctatctacccccagctcatgaaacctgttgtgcgccatgcaacaagcgcttcctgctggaaacctgctcacctcctgtttggtaaaactgctcctcccctcctccagccccaaacacaggtattctctccacagccccagtttctgggccctgtctcccctccccacttagcagtctcatggtttcaaccagcagctctcctctgggagacccctaaccgatggagcccgacccacgttgaccagtccaggctgacactgttccaacctcactttaaacgccccgtgtaagagacagtcaccacacctccacacgagtgcacaccatcggtctccacaggctgccgagcagggcatttcctgacacctgtcactgcacatctcggtccactgaggcttcatgctgttccctcaacgtccaaaagagtgccacttcctttcacgctacctcaaaatgttcctagccgccgcgccctcc

SEQ ID NO: 3896 - DNA, 1052 bp, Artificial sequence
  DNA replication origin
tatagtgtgatgagtatgtgtggtatgctatggtgttggtatgtgtagtgtgtatctgtgtgtatagtgtcgtgtgtatctatatgtttgatgggctatgtgcgtgttatttataaggtgctgggtgtgttgtatttgtgtggtgtgtatgtgtgtctaatgtgatgtgtgtgtcgtgtgtatctgagtgtagtgtgatggatgtgtgatttttgtgtgtatctgcatatataatctgtgtgtgtgtggtgtgtgcgtcatgtcctatgtgtggcgtgtgtctgtgtttaatgtgctgtgtaggtggcatgtgtcaggagggggtaggtccctgtctgaagggggcatgtttcagtcaggagggggcaggtttcagtcaggagggggcaggtttccgtcaggagggggcagattcctgtcaggagaaggcaggttcctgccaggaggggcagatcccagtaaggaggggcaggtccctgtcaggaggggacaggtttctgtcaggaggggcaggttgctgtcaggaggggcagatgtgtgtgtgtggtgtctgtgtgtctgtgtataatgtgcagtgtgtggtgcatacctctggtgtgtttgtgcaatgtgatttgtgtgtgtggtgtatgtgtgtttgtgtgtacaatgtgatgtgtgtgtataatgtgatgtgtgtggtgtgtgtgtgtaatgtgatttgtgtgtgtataatgtactatatgtgtggtgtgtgtgtggtatgtatctgtgtgtggcgtgtgtgtgatgtgttatgtgtggcgtggtgtgtctctatataatgttctgtgtaggtggcgtatgtgtttctgtgtatataatgtgattgtgtgtggtatgtgtttctgtgtataatgtgacatgtgtgtataatgtgctgtgtgtgtggtgcatgtgtggtgtggatctgtgtgtggcgtgcatgtaatgtgctatgtatagtgtgtgtgtctgtgtataatgttctatgtaggtggtgtgtgtgcgcctgtgtgtataatgtgattgtgtgtgtgtggtgtgtggtgtgt

SEQ ID NO: 3897 - DNA, 3552 bp, Artificial sequence
  DNA replication origin
atatgcaaaatagccaatgagctcacctaatccacatgcctgtgatgtctgttagcggtgaaataaatcaggctggagatgtccatccatagtccggtgtgagcacatgttgtaagaagatggttcagaagggccctcgggttggcccagttatcaccaatagtcgccgccacttggtcgttcgttcagcaaatgccttcgtgggctggactctgtcctcagtgctgagccaggtgtgccaggcactcggctccatggagttagatcctggtggagagatgagtaagaagcagtgagatgagcagtcacgctcagatggtgaggagtccgtgaggaaccgcagggcaaggcatgggccggagggggaagcagaggtggtcagcactcgcctgcgtattgaattctgagcagagggagccgcggggagatggggggtggcaggggcagcctggtctgggagagtagagtgggggggtcctggggtcagaatgagcccgatgccggggggtggggagcacagggctggggcagtcctgggggtcctggtgctaactgggctgcagagctcgactgtccttgcagacataccgggacgccatgaggaagttcccagcagaggagcaccgtgagccagtctgctttcctaagatttggcttgggctgtggatgaagggtccagggcgaggtgtcggggaggatagtggggggtgctgggccaagtgggagaaggagtgcctgcacccgggcccacagctggggtctgcggggctggtccctgggctcgtggccagtagcagatctgagggggcctggcagtagttggcttgcactgtggggggactgctgggctctgtcagtgtcacccattgagacccagagacagctggggaggaaccggcttggggaagaagagatggaggagtcctgtttgagcatggaaaagggaaaagcctggagtgggtggtgagagccacgaagtgagctgcagggagaggtcaggacgatggtgtaaatttgaagacaacagcgtgaagtggaaccacacagggagatgctgtggaggaccagaacacccagtcactgtgctggagctgcagcctcagaggccgggcgggcaaggcagaatgagcaaaaagacactgagagtggacgcacgcagacactgtaacagagagagagagagagagagagagagagagagagagagagagagagagagagagagagagagagagcccacagctgaaatggagtgctcaggaggaagagacaaggagaaaggaaatcacagtgagggggcaagtcccagtgaggagggggcaagagggggcaggttcctgtcaggaagggactaggtctcagtcaggaggggcaggtttcggtcaggagggggcacgtccttgtcaggagagggcgggtcccaatctggagggtgcaagtgcctgtcaggtggggacaggttccagacaacagggggcaggttcctgtcaggaaaggactaggtctcagtcaggagggggcccgtccctgtcaggtgggggcaggttcttgtcaggagggggaaggtttcacacaggaggggctggtccctgtcaggagtgggcaggtcgctgtcaagagagggtagttccttgtcagtagggggcaggtccctgttaggagggagctgctttcagtcagcagccaggtttcaggcaggagggccaggtgtctgtcacgagagggcaggtcccagtcaggagggggacgtcctagtcaggaggtggcaggcttcagtcgggaggcagcaggtccctgtcaggagagggtaggtccctgacaggaggcggcaggtttcagttaggacagggcaggtccccttcaggagaagacaggtctcagtcaggagttggcaggtttcagtcaggttggggctggtttcagtcaggttggggctggtttctgtcaggaggggcaggtccctgtcaggagggggctggtttcagtcaggagggggctgttcccagtctgaaggtgacaggttccagtcaggggagagcaagtttcagtcaggagggggcaggtcccaggaggaggtggcaggttcccccccagtcagtaggaggcaggtccccccccagtcaggaggggtaagttgcagtttaaagagttcgggtccctgtcaggagggggcaggtcccagccaggaggggccaagtttcattcaggaggggcaaggtcagtccctgtcagcagggggtaggttttagtcaggagagggcagttctcagtcagagggagtagaacccagtcaggaggggacaggtctgaggcaggaggggacaggtttctgtcaggaggggacaggttccagtcaggagggggtaggtccctgtccggagagggcaggtttcagtcaggagggggcaagtccctgtcaagagggtacaggtttcggtccctgtccaaagggggcatgcttcagtcaggagaaggcaggttcctgtcaggaggggacagatcccagtactgagggggcaggtccctgtcaggaggggacaggtttcagtcaggtgggggcgggtttctgtcaggggggcaggtcccagtcgggatggggcagatttcagtcaggagtgtgcaggtgcctgtcatgaggggaccagttttattcaggaggggacaggtttcaggcaggaggggacaggtccctgtcaggaagtggcaggtttcagtcaggagggggcagctttctgtcaggagagggcaggtctctgtcaagagggggcaggtccccatagagggctgtgtcccagcagccaagtgaaagaagcttttttgtaagggtgtgttgggctgtgtcagcgtctgtcaaaagattgcgtatgttgaagaaaaatgaaatcaactttggatttattagggttcatgtcattgggtgagatggttagagctgttttcatcactaaaaataaaagttggttggaattagtttatagtatttggtaaagtatcaactagggacttactattaagcagaaaagaatgacaagagggaactagaaagagggcagtaactttaggggtagataaggtgtgtgattctgtgtgtgtgtgtttctttggtttggtgtgtttgtgtatgttgtgtgtttgtgtggtgtttggggtgtgtgtttgtgtgtgttgtgtggtgtgtctgtgtgtttatagtgtgatgagtatgtgtggtatgctatggtgttggtatgtgtagtgtgtatctgtgtgtatagtgtcgtgtgtatctatatgtttgatgggctatgtgcgtgttatttataaggtgctgggtgtgttgtatttgtgtggtgtgtatgtgtgtctaatgtgatgtgtgtgtcgtgtgtatctgagtgtagtgtgatggatgtgtgatttttgtgtgtatctgcatatataatctgtgtgtgtgtggtgtgtgcgtcatgtcctatgtgtggcgtgtgtctgtgtttaatgtgctgtgtaggtggcatgtgtcaggagggggtaggtccctgtctgaagggggcatgtttcagtcaggagggg

SEQ ID NO: 3898 - DNA, 1652 bp, Artificial sequence
  DNA replication origin
ttcttggaaaaccatctggaatgaacacccataggagcatcagcgaaaacgacagggcctcggctgattcacaggttctcgcacagctcagcagagctgccaagctgggcaacacaggtccctgggcccccctgagcaccgagggccctcccttcagggacgcaggtggggcagctccttccactgagggccgtttctgggagctgttgacagccagtgccctgcggagctgagggcggagtctgggtccggggtggggaagcagcgcaggcaggcggctgcacaggggtctgggcctctcttgctccccaggctagaaacctgagtggtgcagtacccccagccaccaggccggcgctcagttctaactgcccctgacatagctccagcaagaactgagctagaagaaacttaaaaaaaaaaactgtgtatttttgtcgtattacaaaaccatcacacagggagatcctttcaccttaccaaaataaacagccgtgtatgtgcatgcatgtgtgtgtgtgtgtgtgtgtgtgtgtgtgtctataaatggtgtgtttgtggatggtgtgtgcatgtgtgtgtggtgagtgtgtggtgtgtgcgtgtatgtgcgtgtgtgtggtttgtgtctgcatgtgtgtgtctataaatggtgtgtgtagatggcatgtgcgtgtgtggtgtgtgtgtggattgtatgtgcatgtgtgtgtggatggtttatgtctgtgtgtctataaatggtttgtgtgtaaatggtgtgtgtgtgtatgtgcgtgtgtgtggtttgtgtctgcatgtgtgtctataaatggtgggtggagatggtatgtgcgtgtgtggtgtgtgtgtgtatgtgcgtgtgtgtgtggatggtttatgtctgtgtgtctataaatggtttgtgtgtaaatggtgtgtgtgtgtatgtgcgtgtgtgtggtttgtgtctgcatgtgtgtgtgtctataaatggtgtgtgtgtaaatggtgtgtgtggatggtgtgtgcgtgtatgtgcgtgtgtgtgtgtgtggtttgtgtctgcacgtgtgtgtgtctataaatggtgtgtgtgtaaatggtgtgtgtggatggcacatgtgtgtggtctgtgtctgcatgtgtgtctataaatgctgtgtgtgtgtggatggtgtgtgcgtgtatgtgcgtgtgtgtggtttgtatctgcatgtgtgtgtctataaatggtgtgtgtaaatggtgtgtgtgtaaatggtgtgtgtgtggatggtgtgtgtgtgtatgtgcgtgtgtgtggtttgtgtctgcatgtgtgtgtctataaatggtgtgtgtgtaaatggtgtgtgtgtggatggtgtgtgtgtgtatgtgcgtgtgtgtggtttgtgtctacgtgtgtgtctgtaaatggtgtgtgtgtaaatggtatgtgtgtgtgtggatggtgtatgcgtgtatgtgcgtgtgtgtggtttgtgtctgcgcgtgtgtctataaatggtgtgtgtgtaaatgtgtgtgtgtggtgtgtggatgttgtgtgtgtagatggtgtgtgtgtggatggtgtgtgtgtagatggtgtgagtgtgtggatggtgtgtgcgtgtcgggccactcaccacagttcagctcttccggggtgatggttgccactgagc

SEQ ID NO: 3899 - DNA, 1996 bp, Artificial sequence
  DNA replication origin
caggaggtcccgacgacaaatgtccaaagtcttcagggcacagcttgttttttttgttttcttttggttttgttttgttttgagacagagtctcgctctgtcgcccaggctggagtgcactggcgtgatctcggttcactgcaacctccgtctcccaggttcaagcaattctcctgcctcagcctcccgagtagctgggactacaggcacccgccactacgcccagctaattttttgtatttttagagatgaggtttcaccgagttggccaagctggtctcgaactcctgacctcaggtgatccacgcacctcggcctctcaaagtgcttggttttatacattttagggaggcacgagacatcaatcaatatatgtaagatgaatttagttcagtctagaaaggcgggacaactccaggtgaagggggggacaactccaggtgaaggggggacagctccaggtgaagggggggcagctccaggtgaagggagggcagctccaggtgaaggggggcaactccaggtgaaggggggacaactccaggtgaaggggggacagctccaggtgaaggggggacagctccaggtgaaggagggacaactccaggtgaagcgggggacaactccaggtgaaagagggacaactccaggtgaaggggggggcaactcctggtgaagggggggcaactccaggtgaaggtagggggcaactccaggtgaaggtaggggacaactccaggtgaaggggggcaactccaggtgaagggagggcaactccaggtgaagggggggacagctccaggtgaagtgggggacagctccaggtgaaggagggacaactccaggtgaaggagggacaactccaggtgaagcgggggacaactcccggtgaaggagagacaactccaggtgaagggggggcaactccaggtgaaggggggacaactccaggtgaaggggggacagctccaggtgaagggggggcagctccaggtgaaggtgggggacaactccaggtgaagggggggcaactccaggtgaagggagggcaactccaggtgaagggagggcaactccaggtgaaggggggcaactccaggtgaagggggggacagctccaggtgaagcgggggacagctccaggtgaagggggggcaactccaggtgaaggggggggcaactccaggtgaaggggggcaactccaggtgaagggagggcaactccaggtgaaggggggcaactccaggtgaagggagggcaactccaggtgaaggggggacagctccaggtgaaggggggcaactccaggtgaagggggggcaactccaggtgaaggagggcaactccaggtgaaggtgggggacaactccaggtgaagggagggcaactccaggtgaaggtaggggacaactccaggtgaagggggggcaactccaggtgaaggtaggggacaactccaggtgaaggggggcaactccaggtgaagggagggcaactccaggtgaaggggggcaactccaggtgaagggagggcaactccaggtgaaggggggacagctccaggtgaaggggggcaactccaggtgaagggggggcaactccaggtgaaggagggcaactccaggtgaaggtgggggacaactccaggtgaagggagggcaactccaggtgaaggggggcaactccaggtgaagggggggacagctccaggtgaagcgggggacagctccaggtgaaggaaggacaactccaggtgaagcgggggacaactccaggtgaaagagggacaactccaggtgaagggggggcaactccaggtgaaggggggggcaactccaggtgaaggagggcaactccaggtgaaggtaggggacaactccaggtgaaggggggcaactccaggtgaaggggggggcaactccaggtgaaggagggcaactccaggtgaaggtgggggacaactccaggtgaaggggggcaactccaggtgaaggg

SEQ ID NO: 3900 - DNA, 2076 bp, Artificial sequence
  DNA replication origin
ccaaacagttgtcttccacagtctctctataggctgattataaaaagttgaacccagtaaaacaaggtttactgttatgattattttaagacatgatgcattacaaaaaagtgaaacatcaccttaagaagaaaatgatattgtcattaaatcccagagaagcctaatatttaaatattatgactgcatttttacatttgctgattaaactcagaaacctaaaatcgtaataaaaattataatgtagttcttcctttcaatttgtcagtactttgatttacttcccagtcttctttgtaaatagctttctgtcctatgcttttagtattatctcagttccttcttttctgagtctatattaattggagagaaaaaatggcttttttttaccctcgttgatcttgatcaatatatattcctcaacattttcattgacaagaattttaaaataatttactggatgattacttgagagttgtgttaacctgacatcttgtcttgggaagctgagatgggagccgctggttgagtgaagcagagctttggatgaggaggacctcctgggtcagcctcctgcctcctgagagagcagttacaagtccaggcccctatttatagggagctgagatctccacagacctgagtgaggatttggttcgtggctcccaaatgcagtgggagctggctgtttaggggcgtcatcaccaccagagagcctccaccagcacttgccttcccccagtggatcctgcaggtggccctccttttattcagcctagtggttcggcaggtgctggtggagagtgggtgctggtggagtgggtgctggtggagcgggtgctggtggagagtgggtgctggtggagagtgggtgctggtggagtgggtgctggtggagagtggatgctggtggagagtgggtgctggtggagtggatgctggtggagtgggtgctggtggagagtgggtgctggtggagcgggtgctggtggagcgggtgctggtggagagtgggtgctggtggagtgggtgctagtggagagtgggtgctggtggagagtgggtgcttgtggagcgggtgctggtagagtggatgctggtggagcgggtgctggtggagagtgggtgctggtggagcgggtgctggtggagcgggtgctggtggagagtgggtgctggtggagagtgggtgctggtggagcgggtgctggtagagtggatgctggtggagtgggtgctggtggagagtgggtgctggtggagcgggtgctggtggagcgggtgctggtggagagtgggtgctggtggagcgggtgctggtggagagtgggtgctggtggagagtgggtgctggtggagtgggtgctagtggagagtgggtgctggtggagagtgggtgcttgtggagcgggtgctggtagagtggatgctggtggagtgggtgctggtggagagtgggtgctggtggagtgggtgctggtggagcgggtgctggtggagagtgggtactggtggagcgggtgttcatagagtgggtgctggtggagtgggtgctggtggagagtgggtgctggtggagcaggtgctggtggagagtgggtgctggtggagtgggtgctggtggagtgggtgctggtggagagtgggtgctggtggagtgggtgctggtggagtgggtgctggtggagagtgggtgctggtggagtgggtgctggtggagtgggtgctggtggagagggtgctggtggagtgggtgctggtggagagtgggtgttcatagagtgggtgctggtagagcgggtgctggtggagagtgggtgttcatagagtgggtgctggtggagagtgggtgctggtggagagtgggtgctggtggagagggtgctagtggagagggtgctggtggagagtgggtgctggtggagtgggtgttcgtagagtgggtcctggtggagagtgggtgctagtggagagtgggtgctggtggaaagtggatgctggtggaacgggtgctcatctaacatgtgtcacctccaaaggcttcacacctcctaataccaccaccgtgtgctgctg

SEQ ID NO: 3901 - DNA, 1430 bp, Artificial sequence
  DNA replication origin
ccacacaaagcctgtgtgccttgagggtacatggaacctaagaggggacactggccttgcaggaggcatcgaactcctcgccggtccccgccgacctgcctgcttggctccctagcacccctgtgcctctaacagcggcctccagggcctctctggattctcaccacagtcctccagtttcagcccccacggccagctgttaatccctgaacattttcaagttcaagttctcaggagacagcactggctgggctaagcctgaccatcagtgactagcacatggaccactgtcctgggtcaggcgcccacccggttccaaccagctgcggtccaggaggaccaggtcatgtgacacacatcgtgaacactggattggtcagggttctccagagaaatggagaccacaggatgtgtgtacatgcgtgcattgtgtgtgtgtgtgtgtgtgtgtgtgtgtgtgtgtgtgtgaaagagagagagggagggagattcagagagagagggagggagggatgcagagagggagagagagagagggagggatgcagagagagggagatgcacagagagagggagggatgcagagagagagggaggggagggatgtagagagagagagagagagagggagggatgcagagagagagagagggagggagggatgcagagagagagggagggagggatgcagagagagagggagggagggatgcagagagagagggagggaagaatgcagagagagagagagggagggagggatgcagagagagagagatgcacagagagagggagggatgcagagagagggagggatgcagagagagagagagggagggagggatgcagagagagagagagagagggagggatgcagagagagagagagggagggagggatgcagagagagagagatgcacagagagagggagggatgcagagagagggagggatgcagagagagagggaggggagggatgcagagagagagatgcacagagagagggagggatgcagagagagaggtggggttgaaggtgagaagagaggcagaagggaggtgtattttaaggagctggctgagatggtggtggcttggcaagtccagagtctgcagggagtgcctcgctccacgctttctcacaccacctgctccagaccagagcctggggaggcagccgaccacctttgcctctcagatacagctctctctgcatctctttctctctctctgcatctctttctctctctctgcatctctttctctctgcatctctttctctctctctctgcatctctttctctctctctctctctcacacacacacacacacacacacacacacgtacacatatcctgtggtttccatttctctggagaaccctgaccaacccagtgttcgcaatgtgtgtcacatgacctggtcct

SEQ ID NO: 3902 - DNA, 1460 bp, Artificial sequence
  DNA replication origin
cgcttctaatccacgcgagcgtgttcgcagttgcgctatacgtttaaccggatgcgttgcgttggggttgacaccctgtcctgcgggccgtcccgcgtcacggtctccacagcaggaatccccatccctccgccccgcggctccaggtaccgagatgccgccagagttcgctgcaggcctcctgtgttctgaagcgagtcggattcaacattttcgggatctgtgaacgcgggctgcgtttcaggcgccgactctaatttagtcctgtagcgacttttctgcatgccaaaaatagttttcacgtttcttagctgagccagaggactttttggcaccagcaaagagtctgcaaaagttgtaaaaaaattgagtgaacaattcaggaagtgggcggccagtgcgcctacctccgaaacaaagtgctgggacagaccacggctcccaggggtcgccgagtttgcaggctgcttcctggaggccctggggcggggcgggggcccgagttcctctcctcctccgcagagagaccaaggctttctttccagagcccgtgaatggtcagcccaggccggacgactcgggggcatctcactcaacagcagtggacttttagaatggagccgggtgaggtttccctgggtctggataatgtaattcttgctgagccagtggaaaaatggcacctcaaagatttttcccatctggtcagtttcataaagcttgcggtatgttttgccccggaatattaattgcttgttgaaaataacatgttaaaataagtgtcgtaggacacacatggggtcctctgctccgctttgcatggtgtgctcgtccacaaacgcctcaccgaatttgaaaaaggagctgagagtagacgggtgacatcatcgtccactcgcacaacacttcctcatagggtacatttgcatccatttctatcttaaactttcaggggtttttgcagtcttcagtgatacttcgaaatgtcgctgttgagtcacgttgattctgtgaggcaggtagactggtagctgttaagttgatcgaatcccttatagaactaaacactttactggagaaatgaacatacccattttctggcggtggaaacagaagctctgggagagaagcgcagctcctgacgctattcctgtggccaagaggaggagcgtagcgctggtggccagaatggagtcctggctggatgcattgcagccgcgtgatttttagcaagtcccgtgtctcctgggagaacgtgagggtgtagctgtgcggacctaggcacagtggacaggtgtcatgagcgagcgctagtgagtgcagcctggggaggcagggactgagggaagagggagacctattctgcggggatatcctgttgaggggtctctgggggcatggtctggtaggctgttgcttgagatgacacagttctacatgatacatgctacacgtgaagc

SEQ ID NO: 3903 - DNA, 1204 bp, Artificial sequence
  DNA replication origin
cattgcactgaccaccccctgcccagactcccctgccaatgccacacacatgcaaacgaatgctatgccactcgggggtcttcagggacacataggatggggtccataggatggatccgtggatggggatggggagaagggagggaaggagggaagggattgggggaagaaggaggaaagaagagaagggagggagggagggagggggggaggggggggagggagggaggggggggagggagggagggaggggggagggagggagggagggagggagggaggggggagggagggagggagggagggaggggggagggagggagggagggagggggggagggagggggggagggagggagggagggaggggggaggagaagaatgaacgaaggagggaaagaaggagggagggatgaatggatgcaaggatgagtacatgtatgaataggtgagttgatgggtggatggatacattgattgatggatagattttttaaatcggctcaagtgattgtggggccagcaggtctgaaatcaggagctgaagctgcagccttgaggcaaaatttctccttttctgggaaacctcaggttttgctctcaatgcctccacctgcttagacagggctcactcacatcatcaaaggtcacctcctccacctaaggtcaactgatgatagagattaaccacaaccgcaataccttcagagcaatgtctagatgagtgtggccacgtggacatataaaagcaatcaccacaggtgacttgggagatgcctgttgaactggaaagaaaagccaccaattcgtgatgccctgaaatgctcctgtgggtggcagcaggtggggagtgtggatgtcaggtacaggccgccgtgtctgagcgagggtggactacacactagggagcctctgggccactgggtgacactctgagaagtgtcacttgaaggtggcaccagcgcacttggaaggcattgagtatctgcagtcacagggcccctcctcacgatggaatgtccatacccagcacttcccctggagttctgttgagatgctgaaatgacctcataatcattattatgatgtttctgatgatttctaaacttgagcaaacttaaagcagagaatgcagaggtcttttccagatgtttctagtctttgtcacccaccccagcgaatgtcagggcaaactcagaactgc

SEQ ID NO: 3904 - DNA, 1148 bp, Artificial sequence
  DNA replication origin
tgacctcgtgatccgcccgcctcggcctcccaaagtgctgggattacaggcgtgagccaccgagcccggccatgcctagctaattttttaactgttttgtagagatggggtctcactccgtcacccaggctggagggcaatggcacagtttcatagctcactgcagcctcagcctcctagtctcaagcaatccttctgcctcagccttctgagtagctgggagcacaggtgtgcacctccatgctcagttaatttgtttttaaattttatgtagaggcagggtcccattatgctgcccaggctggtctggaactcctgacctcaagcaatcctcccaccctggcctcccaaagtgctagaattacaggtgtgagccactgtgcccgcccaccctgggccttgaagaatgggtagagctgcagagggagcagcatgaaataggagcatgtcagcggtgctggcagatcagtcacccaaactcaagccctcctggaaggggaagcaggcccaggctgtggaaccgcggagagccggatttgaatctaggcaccgccatttaccagctgcgccaccttggaaggctggtcaactttctctgggtttccatttacgtcgtgtgccaaacacaggtcattagacacgcacaaggatcatcgaagagattgccaaataagctccctacgctctactcacaccagctgctcacacggggacagccgtgtgcaagatactaaagggggcgcttagaagaggagctcaaaggtggcctggcgtcaggggctggagggcctttgacagaggccgggactgaggctacagcatcatcggagcgctggccttggaaagagtgagtggttgcggattggacgggcttctggagtgagtggccgtggattggatgggatgctggaggcagggaggccagtcaggacgctcttttgataccaaattgtttctcctcttacctgtaaaaaaaaaaaaaaaaaagtcacctcccccacctccctctacccccaccccacacttactgactccgattttttaggagaggggcttgggaaatgcttttaacaaacatccacagaaagtcattcttacgattttttagtacatttgagaaatactgcagagacgatacagaggaagga

SEQ ID NO: 3905 - DNA, 1175 bp, Artificial sequence
  DNA replication origin
tttagctttcctcctgctgagagtttgcccctttgatttaagcagcaaataccaggtgccagatgaatgctgttccctcccactccccagcctctggttgcattgtatgttagggtcagaggacagccctccaccaagatctctgtcctgcccctttttccatgggggagggcttagagcttaggagccactgaggtgggaagcaggaccccgccccatgacgccccttcccaaatgccaggcacaaatttctgctgctagaccctcacccacacacctctgtctactctcttgccagcctcacctcaatttccacccttccctgtttcttttctccaaaagggagcctcttccccagggtccctggcacagagtggagagtatattgaaatgcatgctctggccttgacaagctgatggaaacttgggggcacaggctgatggaatattggggtgcaggctgatgggatcttggggtgcaggctgatggaatcttggggtacaggctgatggaattttgggatgcaggctgatggaattttgggatgcaggctgatgggatcttggggtgcaggctgatggaatcttggggtacaggctgatgaaatattggggccaggctgatggaattttgtgatgcaagctgatgggatcttggggtacaggctgatggaatattgggggcgggctgatagaattttggggcacaggctgatggaatattggagcgcaggctgatggaatattgggtgcaggctgatggaattttggggtgcaggctggtcgaatttgggggcacaggctgatggaatgttggagtgcaggctgatggaatcttgggggcaggttgatggaatcttggggttcaggctgatggactcttggcagattgatggaatcttggggtgcacattgatggaatcttggagtgcacgttgatggaatcttgggggggcaggctgatggagtattgggggcaggctgatggaatcttggggtacaggctgatgaatattggggtgcaagaatactgggtgcaggctgttggaatcttgggccacaggccacgtcagtgagtaaaatcacagcttacaggcccatgttactcggagaatttgcaatgctagaagctcccttctctggaaagctgtatgcctctcacttccctcccacct

SEQ ID NO: 3906 - DNA, 1216 bp, Artificial sequence
  DNA replication origin
ggcagagtcaggaccatggggtgttgtgagtggacaaaggatcaaggctccacagacacctctggccccgtcgcctgctgcccacagcttccataggtgtggatcatgatggccttacgaagatgagagagagagaggcagtcagagaggtgggggaggagagagaaggaggcaggcagagagagagagtgggagagagagagagaggcagagagagagagggaggagaggtgggaggagagaggcaggcagagagagaaggggagagagagagttgggaggagagagagaggcaaggagagagggagagggaaggggagagagagagaggcaggcagagagagagggagagggagggggagagagagaggcagagggagagggagggagagagagagacagagagagagggagagggagggagagagagaggcagagagagagggagagggagggagagagagaggcagagagggagggagagagagaggcagagagagagggagggggagagaggcagagagagagagggagggggagagagagaggcagagaaggggggagagagagagggagggggagagagagaggccgtcagagagggagggcagagagagatgggcagagaaagagagagggaaagggtgagagacagaggcaggcagagagtgagagggtggggaaaggcagggagagagaaacagaaagagagagagagggaggagagagagagagagagagagtaaagcaggcagctagagagggatgggggagagagggagaggggcagccagggagagagggttgggggagagagggagggaggaagggagagagagagaaagagagacggagggagagagacagagtcttgctcacagcaagcacagagtgcagcagtgccagggaagcagcttcagccccaggaagtcactgagtggagaaaagggtgtggggtgagggcgcctgtcagggagaccttgggcgaaggtgtggatgaaggggggccttgctggaaatgaaccgagggtcacccttgctgggaagtaaaccgagggtcgcacacaggactcaggctatgagcatctttcagaggccccattgtcttggctctcaccccggtgccccacagcgcccttgcctcctgcctatcccatgtctcgtccctggaggttgggttcagacgtctggcaggttttcctgcactactaatcac

SEQ ID NO: 3907 - DNA, 2234 bp, Artificial sequence
  DNA replication origin
cagctcatggtcctgctccaggatgactccccgacagctcctggtcctgctggaggatggctccccaacagctcgctgtcccaggcaggatgtggtgctccttatgcctgggtccacccagccagtgccatgcagggggaggtccagccccaaggtcagcacctacagtccacctgccttgggcaggtgatcatcacagtgaggctcacaacaccctagggtgttcagtcccatgcagaactcctcaccctcccattgaacctgctctccatgacatcaccatgacatcaccacaaccccaccgtgacatcaccacatcaccacgacgtcaccacatcaccacgacgtcaccatgacatcaccactataccaccacatcacgtcactatgacatcactacctcaccataacaacaccacatcaccacgacgtcaccacatcaccacgatgtcaccatgacatcactactataccacttcacgtcactatgacatcaccacctcaccataacaacaacacatcaccacgacgtcaccacatcacaacacaaccacttcaccatgacatcacatcaccataacattaccacggcatcaccacgatcatatcaccaggacagcaccacacatcaccacatcaccatgacaccactgtcccaccactacatcacatcgctatgacatcaccacctccccataacattacaactgcatcacacaacatcaccatgacatcaccatatcacatcactatgacatcaccacctcaccataacattactaccccatcaccttgacatcaccatgacatcaccacaccactatgacacaaccacattactatgccatcaccacttcaccatgacatcaccacatcaccatgacatcaccaggcatgtgtgtagtgtgtgtgcctgtctgcatgttttcttcatgtgtgcatgtgcctatgtgtgtggcatgtgtgtggtgtgtgtgcctgtctgtgtgttttctgtgtgtggtgtgtgtgtggcatgtgtgttgtgtgtgtgcctgtctgcgagtgttctgtgtgtggtgtgtgtgtggcatgtgtggtgtgtgtgcctggctgtgttttctccatgtgtgtgcctgtgcctgtgtgtgcaaggcacgtgtgtggtatgtgtggtatgtgtgtctgtgtgttttctctaggtgcggtgtgtgtgtggcacgtgtggtgtgtgtgcttgtctgtgtgttttctctgtgtgtggtgtgtgtgtagcatgtgtggtgtgtgtgcctgtctgtgtgttttctgtgtgtggtgtgtgtgtggcatgtgtggtgtgtgtgcctgtctgtgtgttttctcctcatgtgtgcctgtgcatgtgtgtgtgaggcatgtgtgtggtgtatgtggtgtgtgtgcctgtctgtgtgttttctctgtatgtggtgtgtgtgaggtatgtgtgtggtgtgtgtgcctgtctgtgtgttttctccgtgtgtgcatgtgcctgtgtgtgatgcatgtgtgaggtgtgtgcctgtctgcatgctttctctatgtgtatacctctgcctgtgtgtgcaaggcacgtgtgtggtgtgtgtgcctgtgtgttttctctggctgtggtgtgtttgtggcacgtgtgctgtgtgtgtctgtgtgttttctcctcatgtgtgcctgtgcctgtgtgtgtgaggcatgtgtgtggtgtgtggtgtgtgatgtgtgtgatgtgtgtggtgtgtagtgtgatgtgtgtggcgtgtgtggtgtgtgtgacgtgtgtggcgtgtgtggcgtgtgtggcatgtgtggcgcgtgatgtgtgtgttgtgtggtgtgtgtggtgtgtggagtgtggcgtgtgtggcgtgtgtggtgtgtggcgtgtgtggcgtgtatggcgtgtgtggcgtgtgtagcgtgtgtggtgtgtggagtgtgatgtgtgtggtgtgtagtgtgatgtgtgtgatgtgtgtggtgtgtgtggcgtgtgtggtgtgtggcgtgtgtggcatgtgtggcgcgtgatgtgtgtgttgtgtggtgtgtggtgtgtggagtgtggcgtgtgtggcgtgtgatgtgtgtgttgcgtggtgtgtgtggcgtgtgtggcgtgtgtggagtgtggcgtgtgtggcgtgtgtggcgtgtgtggcctgtgtttgtgtgacgcctgttttcttttctccatcggtgggaaaagcctggcaatccaattacttagaagcctt

SEQ ID NO: 3908 - DNA, 1758 bp, Artificial sequence
  DNA replication origin
aaagttcttagtagattaccactgtgattaaaacgtcccataaatgtcacagcattctcagtctaaagaccaagtgccttcccaaggcacagaaagacctgtgggatcctgtcactgtctcccctccttctcgcttccacctgctctccaatctctcaggcttcagcaaagccctgaggtctgttttctctgcctcttgtggccttgctgatgccaacagacttccccaactattgactgaagatgtcgctgaccccccagggtccaggctgaatcaggcgtcctctctccgctgggacaccaggcaccgtctggcaacagctgatgcacttgtctgagtcttagtccacctgggcacaagcagagaaaggaccatgggtttcatctctgcaataactggcacaatgtggcttcctaagcaacatacaaggagggcgtatgtctgggaggtacactgaggatgtctgtcgagggtgtatgtgcggggggtgcactgtgcatgtctgtggagggcgtatgtctgggggatgcattgtccatgtctgttgaggatgtatgcatggggtgtgcactgtgcatgtctgtcgagggtgtatgtccaggaggtgcactgtgcatgtctgtcgagggtgtatgtccaggaggtgcactgtgcatgtctgtcgagggtgtatgtccggggggtgcactgtgcatgtctgtcaaggatgtatgtccgggaggtgcactgtgcgtgtctgttgagggcgtatgtccaggaatgcactgtgcatgtctgtcgagggcgtatgtgcggggggtgcactgtgcatgtctctcgagggcgtatgtctgggttgtgcactgtgcatgtctgtcgaggatgtatgtatgggtgcgcactatgcatgtctgtcaagggtgtatgtccggggggtgtaccgtgcatgtctctggagggcgtatgtgtgggggatgcactgtgcatgtctgtcgagggtgtatttccggggggtgcactgtgcatgtctgtcgagggtgtatgtgcggggggtgcactgtgcatgtctgtcgagggcatatgtctgggggatgcactgtgcatgtctgtcgaggatgtatgtccaggaggtgcactgtgcatgtctgtcgagggtgtatgtccgggggtgcactgtgcatgtctctcgagggtgtatttccggggggtgcactgtgcatgtctgtcgagggtgtatgtccaggggtgcactgtgcatgtcatgtctgtcgaggttgtatgtctgggggtgcacggtgcgtgtctctcgagggtgttatgtccaggggtgcactgtgcatgtctgtagagggcggatgtccggggggtgcattgtgcatgtctgtcgagggcgtatgtccagggatgcactgtgcatgtctgtcgaggatgtatgtccaggaggtgcactgtgcatgtctgtcgagggcgtatgtccgggggtgcactgtgcatgtctctcgagggtgtatttccggggggtgcactgtgcatgtctgtcgagggtgtatgaccgggggtgcactgtgcatgtcatgtctgtcgaggttgtatgtctgggggtgcactgtgcatgtctttcgagggtgtatgtccgggggtgtactgtgcatgtcatgtctgtcgaggttgtatgtctgggggtgcactgtgcatgtctgtcgagggcgtatgtccagggggtacactgtgggtgtctgtggagggtgtatgtccgggaggtgcactatgggtgtctg

SEQ ID NO: 3909 - DNA, 1124 bp, Artificial sequence
  DNA replication origin
gtggctggaacggcggacagggtgcccagaggtggaggggaggtggtggctggaacggcggacagggtgcccagaggtggaggggaggtggtggttggaatggtggacagggtgcccagaggtggaggggacatggtggttggaatggtggacagggtgctcagaggtggaggggaggtggtggcaagagctgctctcacaggatgcagtcccaggggctctgagcccagaggacagggcacagccacgtgctcctctcaatccacacctgctcctgagctcagctcagcgatctcccaccccaggttctcctccagtctggtcattggtggcttttagcttgcagctcctgcctatctctgcccgcttctacttcaccaagtctccgagaagaggcctgaccaggcaggaatccctgtggaagactgaggaggggaagagcttgtgtggccaggccacagcctccagagcaggcggggaactccgggacgctctgctgctgctgttgtggtggtggtgttgtgttgtgtagtgttgtgttgttgtgttattgtttttctgttgtgcagttgtgttgttgtgattttgtgtggtggtgtggttctgtgattgtgttttgttctgtcattgtgtggttgtgttgtgatgttgtgatggtgtgtgataaggttgtgtcattgttgtgtggttgtgttgttgtgtgctctgccactggtggtggtggtggtgtagtgtggttgtgtggttgttctgctgtgtggttgtgttgtgatgtggtggtattgtgtggtgtggttgtgttgtgtggttgtgttgttgttgtgtggttgtgtcctctgtcactggtgggaatgtaatatggtggtggtgtgtggttgttgttctgctgtgtggttgtgttgtgatgttgtgttgcggtggtggtggtgtgtggtgtggttgtgtggttgcatggttgttgtgttgtcgtgtgctctctcactggtgggaatgtaatgtggtggcggtggtggtgtgtgctgttgttgtgttgtgatgttgtgttgttgtggtggtgtgtggttgttgttgtgttgctgtgtgctctgtcgctggcgttagtgtaatattagggcaagaagtta

SEQ ID NO: 3910 - DNA, 843 bp, Artificial sequence
  DNA replication origin
gggctgggctctcggctcacattccggtgaccagagctccaccttgcagcccaagggggctggagatacgagcccagctgtgtgcccaggaaggaggggagagcgtggatgctggcgagccccatggcctctgatcagtgtcctttctcacaaggttgtacaagagacacttagacaatgtgtggaagagttctgtcaactccacagcctgcgccatgcaggcgctgctaccgtgttcagccctggtcctttccatgtcaggcagaacggccgagtgctgtgtgggagccacacagagatctgggagcacacaaggtgcaggcagccgaggaggccaggttttctgaaggcagtgggtggaagggtggacagggtggccagaggtggaggggaggtggtggctagaacggcggacagggtgcccagaggtggaggggaggtggtggctagaacggcggacagggtgcccagaggtggaggggaggttgtggctggaatggcggacagggtgcccagaggtggaggggaggttgtggctggaacggcggacagggtgcccagaggtggaggggaggtggtggctggaacggcggacagggtgcccagaggtggaggggaggtggtggttggaatggtggacagggtgcccagaggtggaggggacatggtggttggaatggtggacagggtgctcagaggtggaggggaggtggtggcaagagctgctctcacaggatgcagtcccaggggctctgagcccagaggacagggcacagccacgtgctcctctcaatccacacctgctcctgagctcagctcagcgatctcccaccccaggttctc

SEQ ID NO: 3911 - DNA, 1415 bp, Artificial sequence
  DNA replication origin
agctgggggcctctgtctgtgtaagtgagctggcggcctctgtgtgagtgagcgagggcttctgtctgtgtgtgagctggcggccactgtgtgagtcagcgagggcctctgtctgtgtgagtgagctggcggcctgtgcacagcccgagtaactcggaggccttggaacctgtgagcctgagccaaggagctccccggtgggtgggcatgggcaggccagggcccagggctctgcaggtctcacgagaacttataggggtgcagccggtggaccaggcagcctgtgacccagagagcagacgacggccctagcagggccagaggcagccactcacactggacagcacggcagtggggactgagaggtggaagccaggaaatcctcttatggagagaaaggcagcctcaggtggacctgcccgggtgatggcttcagagaagtagagatgagagtgagtgtgcaggtgtgcggggtgcgtgcatatgtgtgtgtgtgcacgcgtggggggatgtgctcgtgtggggtgtgtgcacacgtgtggggtgtgtgtacagatgtgtgcaaagtgtatgtgtgctactaggtgtgtgtgactgtgtgctgtctgtgtgagtatatgagtgtgtcccccatgcgtgagtctgtgactgtgccccgtattttctgtgtgcatgtgtgtgtgtgagagcgagtcccacgtcctgtgtgtgtgctgtctgtatctgtgtgtatgtgagtgtgtcctgtgtcttctgtgtgagtgtgtgactatgtgtgagtacatgagtgcctcctgtgttctgtgtgtgagaatgtgtcccatgtcttcagtgtatgtgtgtgtgagagggggtcctcttcatgtgcgtggaaaaatgtcagtgtatagcctgtgtgtgtgagcatatgagagtgtgtcccatgccctctgggtgtgtctcagtatggagagtgtcccatgtcctctctgtgtgtgagtgtgagtgtcccatgtcctctctgcgtgtgtgtgtcccgtgtcctctctgcatgtgtgagtgtcccatgtcctctctgtttgtgtctgagagtgtcatgtctacgagtgtgagagggtgctgtgtcctctctgtgtgtgtgagagtgttttgtgtcctctcggtgtgtgagacggtcccatgtcctctctgtgtgtctgagggtgtactgtctgcgtgtgtgtgtgtcctgtgtcctctctgtgtgtgagagtcccatgtccttttctgtgtgtgtgggggggtgtcctgtctgcacgtgtgaatgtgagagggtcctgtgtcttctccgtgcgtgtgtgtgagtgtcccatgccctgtgtgtgtctgagtatggagagtgtatcccgtgtcctctctgtgtgtgagtgtgtgtgagtgtattccttgtctctgcg

SEQ ID NO: 3912 - DNA, 1453 bp, Artificial sequence
  DNA replication origin
tggcataaggtaaagccacgtcttacttggtggcagatgagggaaggagagccaagtgagaggagaaagccctcagaaaaccatcagaccccgtgagacttacccacttccatgagaacaggacggggaaaaccgctcccatgattcagttatctcccaccaggcccctcccacaacacatgggaattatggaactacaattcaagatgagatgtgggtggggacacagccaaaccatatcaatcaggacatgacagtggcagacctgggccggggttggagctctctagatgggaggcagtaatgccttagttacctttgtgagggagtgagagaggagggtgtgaggggggagtgaggagagggagtgagaggggagggtgtgagaggggagggagtgagacagaagggagtgagaggggagggagtgagaagggagtgagtgagaggggagggagtgagaggggagggagtgagaggggagggagtgagaagggagggagtgagaggggagggagtgagaggggagggtgtgagaggggagggagtgagaggggagggagtgtgaggggaggaagtgagaaaggagggtgtgagatgtgaatgtgtgtgggaggttagggtgtgggaggtgaaggtgtgagacatgaagatgtgtgagagattaatggtgtgagcttttgagaaccacgggtgtgagtgacgaatgtgtgtgacaggtgatagtgtgagagttgtgggtttgaccagtgagccattcccatctttctctgctcatgcccctcaggtgctatttggggtgtggtctcactcaggcagaccgcctggagcctgcagtcctggatgctggccttcaagagccactctttgctttatgtggccaggctttgcctagctgatggttcctgggacttgagcttagcaaggtggctgtggacagggacctgggccgtctccctggtctggggtcatccccgtgccagaagccagctcatggagattggggccaaacaggaacagtgtgagtagggaggagagagggtggtgtgaactcagggaagaggatgtaggagaggaggcagcagatgggaggcagaaggcaagaacagaaccagagaatgtgccggactaagctcccatgggtgaggcaccctggaggatcccacccagacagcaacagcccatgcatagagggtgggggagtgaggaaagcagcccatgcatagagggtggaggagtgaggacagcagcccatgcatggagggtgggggagtgaggacaagcctaccaagcagtggtcagggctgcctgctgcactccacggctcctccccatgctgcagcccccaggtgtcacccagcacagtggcctgatgagaccctcccacctttctagcagtacctaggccaggtggggctggaacatcgaatgggcaggacagccggatcccaca

SEQ ID NO: 3913 - DNA, 1893 bp, Artificial sequence
  DNA replication origin
tctgagcaccccaaaaccacatccagacttgatttgagttgaggaaggctgaaagcagggacagctatgaatattgagcctgggggcagggtacccgcctccagaaggtccttggctgtgaatcaaggacttgacctcagttttggagaagctgaggttgtaggcaggaaaacaagtaagaggctcaaggtctgacgtgatctggaacccagaggttggttaatataataggacattagcctagaacttggtaagaagctcagtggagaccctggcccgtgggccgaggctttatcggggcctggagcagccgttcttcacctttgctgcacatgaaaaacactggagatctttcaacagtcctggtgcccaagctctcctaagaccaaatcactaggggtgaggtccaggtttcagtatcttttagagttcactgggtgattccattatgcagccaagattgagaatcccttgcctactgaaggggaagctggagcaggtgccggcggtgtggccggggtgtggaggtgcaggtgtcggtagcatggccagggtgtggagacgcaggtgcgggcggcatagccggggtgtggagacataggtgccggcggtgtggctggggtgtggaggtgcaggtgctggtggtgtggccggggtgtggaggtgcaggtgccgatggcatggctggggtgtggagacataggtgctggaggtgtggctggggagtggaggtgcaggtgctggtggcgtggccggggtgtggaggtgcaggtgccggcagcatggccagggtgtggagacccaggtgcgggtggcatggccggggtgtggagacataggtgccagtgctgtggctggggtgtggaggtgcagatgctggtggtgtggccggggtgtggaggtgcaggtgctgatggcatggctggggtgtggagacataggtacgggcggtgtggctggggtgtggaggtgcaggtgctggtggcgtggccggggtgtggaggtgcaggtgccgatggcatggccggggtgtggagatgcaggtgctggtggtgtggccagggtgtggaggtgcaggtgtcggcagcatggccagggtgtggaggtgcaggtgtcggcagcatggccagggtgtggaggtgcaggtgtcggcagcatggccagggtgtggaggtgcaggtgtcggcagcatggccagggtgtggagatgcaggtgttggcggcatggccggggtgtggagacataggtgccagcggtgtggctggggtgtggaggtgcaggtgctggtggcgtggccggggtgtggaggtgcaggtgccggcagcacgaccagggtgtggagacacaggtgccggtggtgtggctggggtgtggaggtgcaggtgctggaggtgtggctggggtgtggagacgcaggtgccggcggtgtggctggggtgtggaggtgcaggtgccagtggcatggctggggtgtggagtgtggtgctgagctggggtgggaagagaggcatggaccagtcaccttgggatctgagactgccccactgcctgcttgcagaagaaacacctctgttttcccatgcttgcaggaaaaacctgagccccttcccaaacgaccttgcctttctgtgatttctgctctggcttctctgcaaaacctcccactctacttacctccccatgttcactgatgctgctcctgcgtgagactcttattgttcccatttacgttgtgctgtctcaggctcccgcactgcatccgtctctcacctgactccatcgtcagactgcagaggggaggcgagggcgttcctggctggatttcatggcttcaccttcggtactgaagaaaaggccaagttctgggattatgcatgccactgcttgactac

SEQ ID NO: 3914 - DNA, 1170 bp, Artificial sequence
  DNA replication origin
aagggggagagggtgagagtagcagcagcttccttgagtggctggatttctaggcaacactgaagcgtcactaaagtctgtgttctacatttaaatttaaaatgagaatggtcagcatggttgtgtgtctgtggatgtgtggatgtgagtgtgtaatgcttttgtttatccatggataaggagagcttgaatttttccgggtaaatgagtatcttggaagaagtatggaaaaagatttgccaaggtacacaagcagtgctgacattgataagccacgtcttctgatccattcacgatggaagtgaggctatggggttgtgggcagtagaagcctggtggggtgagtggattggaggttacaatggggccaaacatgagctatcttggaatttctagaacaagtgatctggaaatgatctggaaacatggacagctcaatgggtaggcttctaaaaccagactttggaggctacacactattggtaatgcaaaaatctaggagggtgtggctctgcagtgagaggctcattcaagtggggacaccattgggggtggttgaggggtgtcagcatggaggatggagttagcccagagacaggactggtgacgggagctgtcgtaagtgagccaggtgctaaaaagaagccagtggggtgcctctgagctggtgaatgacagcagaaagcagggtagcatgcagcaaagtatgatggaacctgcttccaaggtgggggtggggttgtgaaggagaaggaaagagcaatggctggggaagatcaggcaggggaggtgcccacaccacctctatcctagtggtgccttgggtgtgggagataaaagggcatggctggagagaggacttggtgatcgtaagtgagatccacacttcagtcggagggggaagtagatggaagacttagggagggtgtggggatgtgtgattgacagtccgtgcccatcagagagcagagagaaggggtgattgggactgggaaaatgtgttgaatgggaagagacgatgcatgtgagtgtggtcacggctttgggtgatgacaataagttaatagtgggaaggcttggtttttgaattgtaacaggtatgatagttttatttttggtctttaaggcatggggcaatcatgtctaacggcagcgcctgctatggtctga

SEQ ID NO: 3915 - DNA, 1737 bp, Artificial sequence
  DNA replication origin
ctgagcagatgtgtgtgagcagggccgatcggacctcccatccgagggtctccaggccctccaggtagtggcctttgccacagctcctcacctcaagatggcagggggagcaagctgggggggaatgtggggggctaagggccactaacattgcatagctagcagagcaaagcctcactatggtcaggtcagacggtctgtggagatgggaagcaggttgggagaggagccacgggcccagcacaggctggttctgctgccctgcagcggggtttatgaatcagtgccagtgcagacagtgtggacgcgatccctttcctagccccttccctcatttcaaaacaactgtttgcttttcctttaggtgcgtcattaaggacttatcttagatggaaacgccatgatatgcagaatgggaaataccaagtgtacaggatgagcccctctaccaggcttgtgggtggggcgtgcagtcaagtgcggtagccagggcagagcggaaggcagcaaaggcagacatgcaagggagctgatgttccagggagcggacacgaagcaagcaacacgaacccgtggtgtgatgtgatgcggaggtggggaaaaaagcaagaggagggatagaggtgatgggtgggggtcaggctgccagaaaaccatcttggaggaggtgatatttgatcagagagggaaataaaggtgtgggttgtgaggagattagggagaagagtgccctggaattcggagcagtgggtgcggtcagggcgaggtggggtgggactggcctgaagagcagacagccacgaggtgagtaagaaggggtgcggtgaacgcgggggtctgaggggtacagaccccggagtgcggccctgcaggtgcaggcagcagtgcaggtttcgtgcctaaaatggcaccttctaaagcagtacattagtgacgtaatctaagtacatttgagaaccacgcagcacacaggtcagatgtcaaggggcagaggggatgttgggaggggagctatggttgtaatccaggtggcaggagatggctgatgatttaagtggtagaggtgaagcagggaatgacatgtagatttcagagacctcactggtagacaggatgccacttgggagggaaagggaaaactaaagaatgactgggtttttgccaaaagtgtcaggagttgtggtgccatttgccgaggtgggaaagactggatgaaggtgaccttaggagaatggagagtagggctctgccttagaaacattaagtctggggcatctgtcagcccaaatgcagcgatgcccacttgggagctggatgcacagccctgggtcaggagcttgtcgaggtgagaggtgcaagcttggacgtccatagcatccaagtgatgctcagtgtgacagtcctggaaagtccacctgggaagtggggaaaggcagagatgaggatggagagcaagcttggaggtcagaacatgaggagccattggggaaggaacctgagaagcagtcagcagtgaggcgaggggaggccaggggcatggcgcccaagggaagagacatgtcaaggaagcagcattcaaatctatgaaacacatgtcagtgttcaaatgtattgaacattgctgccattcaaggaagctggagacggagaattctttttggattcggctagagggaactttttgttgcccttgataaaagcaaccataggggacggtgatcagggtgtgttgaggtg

SEQ ID NO: 3916 - DNA, 925 bp, Artificial sequence
  DNA replication origin
cacccggggccgtggccctccggcaggccatgtctccctcgtgccccagtgaccacgagcgcccactcgtctctgctgcggaatccctgccagcaggcaacgggtctatgggctgtggtttttttttttttttttttgagacagagtctggtttgatcgctgaggctggagtgcagtggcacaatcttggctcactgcaacctccgcctcctgggttcaagcgattctcctacctcagcctcccgagcagctgagactacaggcgcgagccaccacacccagctaatttttgtatttttagtacagacaaagttttactatattggctaggctgctctcgaactccttacctcgtgatccgcccaccttggcctcccaaagtgctgggattacaggcacgagccaccgtgcccggcctgggctgtttgttcaccattgagagaggctgctgagatcccaaataggccctgctgagaccacgcctggcagggacagagatgaacaggattaaacgcagcacaagaaaaaggcggaatgggcggaggagggagaggccggctgccagcacagaagccccagtcgatccgtgtgtggtgtatgagtcctgtgtgcagcctgtgtgtgtttatggatggtgtatgcgtgtgtgtgatgtgtatttatgggtggtcagcgtgtgtctgtggtgtggtctgtgtgtctggtgtgtagctccagtgtgtttgtgtgtgcttgtgtgcacatgtgtgttgttgtcatgcagtgcatgggtgttatgtgcgtgcttatgtgtggtgtgcatctggtgtgtgatgtgttgtgtgtagttatatatggtctgtgtgtctggtgtatgtgggtgcttctggacgcgtgtgcaagtgtgtgctgtgtatgctttgtgctgtgtgtgtcagcagtgtgt

SEQ ID NO: 3917 - DNA, 2106 bp, Artificial sequence
  DNA replication origin
ttagacatagttaaagtggtaaaatttatgccatgtgtattttaccacaatttaagaaaaaagggggcatctcgtgtaaggtttggaaataaatgcctgctaggcaatcgttttggaaaatgcctggaacataataggtgttcaacaaattgttgcctttgtaatttgtaatgactgtgaagcgcagccaccccgcagagcccgggggtgttaaggcaacaatcgtaaattgaaagtgcctgcgatgcctcatcatcggggaaagggtgctgggaaggaacctgttctgaggtataataggaggtgggttcctgggaaattactggctgggatgatgaaaccacagctgaagtttgagcagcagacacacagcctgtcatggggcagcatttctccattcgtatcctgagccaacaattgagaagcagagcatgcagactgtgaagaggctcctgaaaccagcctgtgagctggccagggaggaatcagccctgagggatggtgacagggaggctcagagagagtagagcccaggaaatatggacacaggctcagagagagcagagcccagggaagatggacacaggctcagagagagcagagcccagggaagatggacacagactcagagagcagagcccagggaagatggacacaggctcagagagagcagagctcagggaagatggacacaggctcagagagcagagcccagggaagatggatacagactcagagagagcagagcccagggaagatggacacagactcagagagagcagaacccagggacgatggacacagactcagagagcagaacccagggaagatggacacagactcagagagagcagagcccagggaatatagacacagtctcagagaacagagcccagggaagatggacacaggctcagagagagcagaactcagggaagatggacacaggctcagagagcagagcccagggaagatggatacagactcagagagagcagagcccagggaagatggacacagactcagagagcagagcccagggaagatggacacagactcagagaggagagcccagggaagatggacacagactcagagagcagagcccagggaagatggacacaggctcagagagagcagagcccagggaagatggacacagactcagagagcagagcccagggaagatggacacagactcagagagcagagcccagggaagatggacacagactcagagaggagagcccagggaagatggacacagactcagagaccagagcccagggaagatggacacaggctcagagagagcagagcccagggaagatggacacagactcagagagagcagagcccagggaagatggacacagactcagagagcagagcccggggaagatggacacagactcagagagcagagctcggggaagatggacacagactcggagaggagagcccagggaagatggacacagactcagagagcagagcccagggaagatggacacagactcagagagagcagagcccagggaagatggacacagactcagagagcagagcccagggaagatggacacagactcagagagcagagcccagggaagatggacacagactcagagagagcagagcccagggaagatggacacagactcagagagcagagcccagggaagatggacacagactcagagagcagagcccagggaagatggacacagactcagagagagcagagcccagggaagatggacacagactcagagagcagagcccagggaagatggacacagactcagagagcagagcccagggaagatggacacagactcagagagagcagagctcggggaagatggacacagactcagagagcagagcccagggaagatggacacagactcagagagcagagcccggggaagatggacacagactcagagagcagagcccggggaagatggacacattggcaagggcgtttgtagggcacagccctgaaaccatggaaagccatgctaatctcatcttagaaagaaagaccatgtgcagagataaaatagcacatatcaggctcccagctcacagacatcagat

SEQ ID NO: 3918 - DNA, 1563 bp, Artificial sequence
  DNA replication origin
cagcttgctttttagacaacatgggggcattcacgggatctgaaacctccatagcggggtacgagctgtcttagcagtcaagcacatggcctccttcacaccacgggctgagcgcagtgaccacagtcaggcggctacaggccaggagcccacaggtgttgctggtgactgaggcagtgaggagccctgtgagtctgctctccagccaccctgcctgctgctccctgagtgcttgggaagtgactgggccaccagcccttgttcccaaaccttggagaggagccggggatacaccttcaggctccctccaactccaaaagtccaggagcttgggacgtcttttcctaaagctgttacagcttcataaactcgacttccggcagcttaataggcttttggctttgtggttcttcactagcgaagtgtgtgtgtatggggaggggtgtggatgtgtgtatggggagggtgtggatgtgtgtatggggaggatgtggatgtgtgtgtagggatgggggtgtgtgtatggggagggtgtggatgtgtgtgtgtagggatgggggtgtgtgtatggggagggtgtgggtgtgtgtgtgtagggatgggggtgtggatgtgtgtgtgtagggatgggggtgtggatgtgtgtatggggaggggtgtggatgtgtgtgtgtagggatgggggtgtgtgtatggggagggtgtgggtgtgtgtgtgtagggatgggggtgtggatgtgtgtgtgtagggatgggggtgtggatgtgtgtatggggaggggtgtggatgtgtgtgtgtagggatgggggtgtgtgccagtggtagatggatgtgtaggaggcatgtgtggcctgtgtgtgtgtctgtggtgtgtacatgtgtatgtgtagtgtgtgtgtggtttgtggggtggtggtgtgtgtggggtggtgtgtgtatggtgtgtgtagatgtgtgtggtctgtgtggggtggtgtgtttatggtgtgtgtagatgagtgtggtgtgtgtggggtggtgtgtatggcatgtgtatatatgtgtggtgtgtgtgaggtgctgtgtgtatggtatgtgtatatatgtgtggtgtgtgtgacgtggtgtgtatagatacgtgtggtgtgtaaggtggtgtgtgtatacatgtgtgtggtttggggggtggtggtgtgtgtaggggcgatggggtgtgtatatatgtgtggtgtatggggggatgatggggtgtgtatggtgtgtgtatatatgtgtggtgtgtgtgtgtggtgtagtgtgtgtatggcgtgtgtctatatgtgtggtgtaggggagtggggtgtgcatgtggtgtgtatatgtgtttggtgtgtgtggggtggtggtgtgtgtggggtggggtgtgtatggcgtgtgtatgtatgtgtgttgtgtgtggagtggagtgtgtatggtgtatgtatatatgtgtggtgtgcgggggtggggtggtgtgtatggagtggtgtgtgggatggggtgtgtgtggcatgtgtatatatgttgggggggtggggtgtgtatatgtgtggggggggtgggat

SEQ ID NO: 3919 - DNA, 1222 bp, Artificial sequence
  DNA replication origin
tggagggaaggaattttctgaagttgggaagggacctggagggaaaagggcctggaatgagaggggaggtgtggaggggagggaggttctggaggtggggagggacctggagggaaagggggcctagacggggaggggtacctggaggaagcactgaccccaagggaggagcgcagggtctgctgtcatggccagggaacaccctgggtgaggtcaccttggggcagtagctcttgagtctgactgtgtgttgggccctgcagagctcccagtccccttgtccaggtgacagtcagtcctgagcccttgggggcgtcgtggcagcacccagcaaggtcatgggtaacgctgtcctggtgatgccatgtgcagccacacctgggaaccctgcttgggacagacgggtgcctcccaatcctcccacatgtggatctggaggaggcccaggaccccagggtcagccctccatattggctttaatgtcacctgcctatgtggtaagattgtaataaacccaatataccaccccatcacccttcccagagattggaagtttccaccattacaatatttttcccattcatccactccgcaaacatctgcttatcacggttctcctgtcatatggtgtagggagctcagagccctcgagaggaggagtcatatgccctgcagaggtggcactgagggaggagaagacagaggcgtgggcaggtgatgcctgcatccaggaccatcttgtagtggaggtgtccatccagcatgggggtgaaggacgctgggaggagagggatggagaaaagaacggcttctaggggagggggccagaccccaagcagccaaaagaagagacacacagcctgggctgcagagcagcctggacgaacccaccgggcagggctggcaggacaggcacaggtgaggaggggcggagggcacagagtgagccaggcagagcctgctggaggccggagagggccacatcctggcaagtggggcctcacctcatggacagcctggcatgggtggtgggactggtgtgggacttgcaggggtgagtctggatgctggagctcccgggagacctggccaggcaggtcacgaggccaaggaatccaatactcccacagcccagggacagtgtcctgcgctcctcatttcccttttagtcctcacctgattcctgctagagcagtgctcacccccatggggaaactgaggc

SEQ ID NO: 3920 - DNA, 835 bp, Artificial sequence
  DNA replication origin
tctgttggctgtgggatcactgctgagaggttctgggcaatgaagcacacagaaaataatgatgttctgcagccttccagccttcctagagtgctggttccacggcttctcccaggcctgggtctgtgtctcctgtgccttccgatcaggtcccaggtctcgccggcccagggttccgtgctcagcggggatgcttggcggagacagaaactggcctttgttggggcggccagcactcatctcccctccgggccggatctgagttctgcccggtttgagccctgattaatgagggccgttaattagagcgctgtattcccagtgtcatggacctggctgggagccaagaccggaaggcgcggattcattgtcagagcggatctgagaaactggggtgccctgaggggtggaggcagaagccaggctgaaaggatgccgtcaccctccttgccaccctgaccgctcgccatcggcctgcaggctcacgcttggtgttccctccagctctgcatggcccctgactacagccatttttccagcttctttcccatggtggtgggggcagtgagtcgaggtaggggtttctctgcatatagagggggcttaggagctgagggactaggaggaaggaggcgtagggatagtgtaaataggggaggggagtataggaggatgggggacataactggagggggacctggagagaaaggggacctggatggagagaggagaactgtaggggaggggtgttctggaggtggggaggtacctggagggaaaggggcctggatggggggagaggtgtggaggggagggaggttctggaggtggggag

SEQ ID NO: 3921 - DNA, 2140 bp, Artificial sequence
  DNA replication origin
tgtggtggagtatagcaggctctgaatcaatgtcgcaaaattagtgactgccctgtggtgggctgcacttattgagatttggcaacagctctagttcttgaccttctttgagttcttgtttactccaggctgagttcagcaaatctttgtgggatgttcatcatttgttcttcggtttgccaggcactgaagataaacagatgggtgtgggttttgatgcagcctctcctaagagagcacagtcctcaaagagagccctgtgtttcctaaggcgacaggtgagttaggcaggttctaccttggagatgggcacagatgtatgagagcttggcaggacaccaggccccctggtccattcaggaaaagcttcctggggccagggagggtgcagagtgtgaagcctgggagggtgcagggtgtgaagcctggaagggtataggtgtgacacctgggatggtgccaggtatgaagcctgggagagtgcagggggtaaagtctgggagggttcagggtataaagcctggggaggtgctgggtgtgaagcctgggagagtgcatgtgtgaaacatgggagggtgtcgggtgtgaggcctgggagtgtgcagagtgtgaaggtgggggagggtgcagggtgtgaagcctgggagggtgtagggcatgaatcccaggagggtgtagagtgtaaagcctgggagggcgcagggtgtgaatcttggggaggtgttgggtgtgaactctgaaggtgcagggtgtgaagcccaggagggtgtaggacatgaatcccgagagggtgtagagtgtgaagcctaggagcgtgcagtgtgtgaatcctgaggaggtggtgggtgtgaactctgggaaggtgcagggtgtgaatcctgggagggtgtagagtgtgaatcctgtgaggttgcagggagtgaaaccttggagtgtgtagcgcatgaatcctgggaggtcgtagagtgtgaagcctgtgagggtgctgtgtatgaactctgggagtgtgcagggtgtctagccttgagagtcggtgagtgtgatctctgggcagttgcagggtgtgaagcctgggaggtgtagagtgtgaatcctgtgagggtgcagggtgtgaagcctgggaggtgtagagtgtgaatcctgtgagggtgcagggtgtgaaacctgggagggtgtagggcatgaatcctgggagtagagtgtgaagccttggagggtacagggtgtgaactctgggaggtgcagggtgtgaagcctgggaggtgcagggtgtgaagcctgggaggtgcagggtgtgaagcctggggaggtgttgggagtgaactcagggaaggtgcagggtgtgaagcttgggagggttcagggtgtgaagcctgggagggtgcagggaatgaagcctgagagggtgtagattgtgaagcctgggaaggtgcagggtgtgaagcctgggagggtgtagagtgtgaatcctgtgagggtgcagggtgtgaactctgggatggtgtggggtgtgaattttgggaaggtgcagggtgtgaagtctgggagagtgcagggtgtgaagcctggagaggtgttgggtatgaactctgggaaggtgcagggtgtgaagcttgggagggtgcaggatgtgaactctgggagagtgcagggtgtaaaacctgggaggtacagggtgtgaagccacctgggaggtacagggtgtgaagcctggggaggtgttgggtgtgaactctgggaaggtgcagggtgtgaagcctggtagggtatagagtgtgaatcctgggaggatgcacagtgtgaagcttgggagggtgcagggtgtgaagcctgggagggtgcaaggtgtgaagcctgcgatggtgcagggtgtgaaggtaggggagggcgttgggtgtgaagcctgggagggtgcagtgtgtgaaggtaggcgagggttcagggtatgaaggctgggaggatgcagggtgtgaactctgggaggatgcagggtgtgaagcctggggaagtgctgggagtgaaggctgggagagtgcagggtgtgaagtcttggagggtgcagagtgtgacacctgagaaggtgcagtgtgtgaaagtatggaaggatgagccagtgtgggaagggagtcaggggtggtga

SEQ ID NO: 3922 - DNA, 1008 bp, Artificial sequence
  DNA replication origin
tgacttcctctgccctattgtttatgtaaaaatgcagattcactgggccagactaagttgtgtattcagtggaaaggtgatcaaggactcagaagaatgcaatcttgtgtctcttctctgcttatgacctagtgggacacttcgagttgtcccaccttacccaacggaaccagtggacatcgtacacatactaactgatgtgtcaaagctgcatcgtacacatactgactgatgtgtgaaagctgcacccgaccaccctgggcacgtgtcgtcgggaccccctgaggctgtgccacaggcacacccttaatcttggcaaaataagctttctacattgactgagacctgtctcagatattttgggttctaaagggacggtgttggctgcctaggagcaagcctgggagtagcacagcagatgagggtttatttcccacagctccaggaaacctgggagcccctgtctgggctggtgtggggtcccctgtctgtctggggtggtgtggtgtctcctgtctgtctggggtggtgtggaggcccctgtctgtctggggtggtgtggggtctcctgtctgtctggggtggtgtggggtctcctgtctgtctggggtggtgtggggtctcctgtctgtctggggtggtgtggagtcccctgtgtgtctggggtggtgtagcgtctcctgtctggggtggtgtggcgtctcctgtctggggtggtgtggagtcccctgtctgtctggggtggtgtggagtcccctgtctgtctggggtggtgtggggacccctgtctggggtggtgtggggacccctgtctgtctggagtcatgtggggtctcctgtctgtctggggtggtgtggggtctcctgtctgtctggggtggtgtgggggcccatctgtctggggtggtgtggggtcccctgcctgtctggggtggtgtggagtcccctgtctgtctggggtggtgtggagtcccctgcctctctggggtggtgtcgggccctctgcct

SEQ ID NO: 3923 - DNA, 1502 bp, Artificial sequence
  DNA replication origin
ggtgtggggtctcctgtctgtctggggtggtgtggagtcccctgtgtgtctggggtggtgtagcgtctcctgtctggggtggtgtggcgtctcctgtctggggtggtgtggagtcccctgtctgtctggggtggtgtggagtcccctgtctgtctggggtggtgtggggacccctgtctggggtggtgtggggacccctgtctgtctggagtcatgtggggtctcctgtctgtctggggtggtgtggggtctcctgtctgtctggggtggtgtgggggcccatctgtctggggtggtgtggggtcccctgcctgtctggggtggtgtggagtcccctgtctgtctggggtggtgtggagtcccctgcctctctggggtggtgtcgggccctctgcctgtttggggtggtgtggagtcccctgtctgtctggggtggtgtagggaccctgtctgtctggggtggtgtggggaccctgtctggggtggtgtggggtccctgtctgtctggggtggtgtcaggccgctgtctggggtggtgtgggggcccctgtctggggtggtgtgagggcccctgtctggggcggtgtggggtcccctgcctgtctggggtggtgtcgggcccctgtctggggtggtgtggggtcccctgtctggggtggtgtggagtcccctgcctgtctggggtggtgtcgggcccctgtctggggtggtgtgggggcccctgtctgtctggggtggtgtgggggcccctgtctgtctgcggtggtgtcaggcccctgtctggggtggtgtggggtcccctgtctggggtggtgtggagtcccctgtctgtctggggcggtgtgggggcccctgtctgtctggggtggtgtgggggcccctgtctgtctggggtggtgtgggggcccctgtctggggtggtgtggggtcccctgtctgtctggggtggtgtcaggccactgtctggggtggtgtgggggcccctgtctgtctagggtggtgtgggggcccctgtctgtctggggtggtgtgagggcccctgtctggggcggtgtggggtcccctgtctgtctggggtggtgtcgggcctctgtctggggtggtgtggggtcccctgtctgtctggggtggtgtgagggcccctgtctggggtggggtggggtccccctgacgcctcaatgtcccaggcttttccccttctcctctcccgatagattccatctccacggtcacctcatggctgcgagatggctgcctcacctccagcctcctgttttaattccagtccagaagaggaaagcagaagcttcaagaggaaaagatgacatcctgattctcttcctgggctgggaaatggtgcctgaaactcatgcgtgcacagagaacaaaatcagtgttttattaggaaaagaatgggaggaatcggtgcagggggagcaacgtgcagcatgtgccacggtcagctggccttaagccacacgtgtccctgggtgctttgccgt

SEQ ID NO: 3924 - DNA, 957 bp, Artificial sequence
  DNA replication origin
tggggagagggggtggagggaggtgtagggtgggtggctgtgggctggggagagggggtggaggaaggtgtagggtgggcggctgtgggctggggagagggggtggaggaaggtgtagggtgggcggctgtgggctggggagagggggtggaggaaggtgtaggggtgagtggctgtgggctggggagagggggtggagggaggtgtaggggtgagtggctgtgggctgggaagagggggtggagggaggtgtaggggtgagtggctgtgggccggggggagggggtggagggaggtgtaggggtgggaggctgtgggctgggaagagggggtggagggaggtgtagggtgggcggctgcgggctgggaagagggggtggaggaaggtgtaggggtgggtggctgcgggctggggagagggggtggaggaaggtgtaggggtggtggctgtgggctgggaagagggggtggagggaggtgtaggggtgggtggctgtgggctggggagagggggtggaggaaggtgtagggtgggcggctgtgggctgagtcttagggaccgttcagatggggacgagtgggtgtggggaatgggcacatattctggccaaaggggacagaggtgtactgtcaggaggagcaggaatgggggtgtccaggcagcagttgatataatactcacctcccattgggccttcagaagagaattcagtcacacaaaatacatctcatccagtattcctggaacaaatctgttgcagagagttagctcagctgtgttatcctgtatcttgtgttgtgcttttctcactcagaacgaggcttcgcacttgcccgggaagatgggtgcctgaagtcggggtgctttgcttctggtggaactctcaccacgcagtggtgatgcagcagatctaaaacgataggattcataattctgcactcaatcagacactgcct

SEQ ID NO: 3925 - DNA, 1514 bp, Artificial sequence
  DNA replication origin
tgccactcgacttgctcccagaggagtagaaccaaatgtgcatctcgtgaaggagagagaggagtaagttcctggacaggaagctgattctcaagtcacagcagatgtaaaccgctactcacaccaggacaaggtgctaatgtcgcggaactcccacctggggactgggaaagggaaaacgcttctttcatgctaacctagcacaggccccgaggttccgggctgtgatggggccatgcagacagacactagtctttccttcatgggcatttctgaacatgccctgaggaaacgaatctgcatggggatcactgtaggactcagactcgggcaggtcagttaggcaggcctggcttcctaagactccaggcttcaaagcctcgaacctgctcccgtgctgagctggttccccaaaggttcctgcctctcacattcctttcctcccttgtccccaaaactgtaaggtgacgacgggttcaggggatatacactcaaggtgacgacgggttcagggggtgcacactcaaggtgatgacgggttcaggggtacacgctcaaggtgacgggttcagggggtgcacactcaaggtgacgacggattcaggggtacacactcaaggtgatgacgggttcagggggtacacgctccaggtgatgacgggttcagaggtacatgctcaaggtgatgatgggttcagggggtgcacactcaaggtgaagacgggttcagggggtgcacgctcaaggtgatggtgggttcagggggtacacgctccaggtgatgacgggttcagaggtacatgctcaaggtgatgatgggttcagggggtacacgctcaaggtgacgatgggttcagggggtacacgctcaaggtgaagacaggttcagggggtacacgctccaggtgatgacaggttcaggggtacacactcaaggtgaggacgggttcagggggtacacgctccaggtgatgacgggttcagaggtacatgctcaaggtgatgatgggttcaggggtacacactcaaggtgatgacgggttcagggggtgcacactcaaggtgatgacgggttcagggggtacacgctccaggtgatgacgggttcagaggtacatgctcaaggtgatgatgggttcaggggtgcacactgaaagtgatgatgggttcagggggtgcacactcaaggtgatgacgggttcagggggtgcacactcaaggtgatgacaggttcagtgggtgcacgctcaaggtgatgacgggttcagaggtacatgctcaaggtgatgatgggttcagggggtgcacgctcaaggggatgacgggttcagggggtgcacgctcaaggtgatgatgggttcaggggtacacactgaagatgatgatgggttcagggggtgtacactcaaggtgatgacgggttcagggggtgcacgctcaaggtgatgacgggttcaggggtacatgctcaaggtgatgacgggttcaggggtgcacattcatcactcctcctg

SEQ ID NO: 3926 - DNA, 1323 bp, Artificial sequence
  DNA replication origin
ggctgagtatgggataggggcgtgccaaggccgagcacgggacaggggcgtgccaaggccgaacacgggacagggacgtgccaaggctgagtatgggacaggggcgtgccaaggccaagcatgggacagaggtgtgccaaggctgagcacgggacaggggcgtgacaaggccaggcacacaggtgtttatcacacacacaggtacctttgggataacaaaatggaagagtgcccctgtaggcactgcaaagcctcctcagctcattaacttagcaaatcatcgctgagcacctatgatgcctcgggctctctggcttcagaggatacagaatggataagacaaagtccctgaccacaaggatctcgtgtccagaaatagacatactccggggcggccaggcatgctgtggcagggtggggataaagtgtcaggagtcacatggaagaaggaggaaaaggagagcgggagagagaggggaagaaagagagacagggacagacagggagggagggaggagagacagagagaggaaaaaagagacagagatacagacaagggaggaagagagacattgacagagagagacagagagacggaggaagacagatgagagagggacagagatgaagagacagggaagaggagagacggggtagagggagagagagacaaacagaggaaggaagacagagaagctgttgagcctgggagaaggtttgagcaggcctggatgatgagtctgtgttttgcacacagggcgaagggatgtctgggccccgttcttgaggacagatctccctgcacgtagcccactgagcactgaccacaatcggtgcccggacagagcattcctctgaagcccataggcagagtcctgggagctgggaggaaaacagaaaaggcagcgagggtatggagcccagcctgggagctgggagcaatgagcagcgagaactaggcacaggaatgcccaggggaggggccacaatggccactttggcaccagagtcctcctccagctccacgaccactgaccctaaaggtgggtcatgtgaggcaaacatggtcacaggggcctgtgtttggagagggatttagggccattgtgaacaggaagccacaccacagccatgtctactcctgcgtctcagaggtctcagccagtctctcatgtgggtgaaatcccaagctcaaatcttacagactgtaggaccatgatcccctgttcaaagagccatactgaatttctcactggataaaagcctgaacggaagagctgaaactataaaatgcttacaaggaaacacacacgtaaactgtca

SEQ ID NO: 3927 - DNA, 1566 bp, Artificial sequence
  DNA replication origin
tgtcatagctgacattctgatcaaacagatgagcgacctttcctaacgacgcgtcagatcacctttgtctagattggctcttctttgcaaatcctttggaagtcctcctccacctggtgaaattctgctcattcttgaaagccagctccagtgtcatagccttggggcctttccctgtgtctcctccttcccttactgtgtcctggaatccagcccccgggctgcctgatggaggaaggagccccatttcctggtttacatgggcttccatgtcagtgctggaatactggagagcatccccgtgtcaggaacgctggaatagcgctgagcgtccctgtgttgggaacgctggaatagcggtgagcgttactgagaagtgagtgttcccgtgtcgggaacactggaatactagtgagtgttcccatgtcggcgcttgaatagtgagcgtccccatatcggtgccccttgtccgtgctggaatagtgaccgtcactgtgtcagtgacccgtgtccgtgctggaatagtgagcatccctgtgtcagtgctggaatagtgtgcattcccctgtcagtgccccttgtcggtgctggaatagtaaacgtccccgtgttggtgctggaagggtgaacgtccccgtgtcggtgctggaatagtgaacgtccccgtattagcgctggaatagtgagcatccctgtatcggtgctgcaatagtgagcgtcctcatgttggtgccccgtatcggtgctggaacagtgagcgtccccgtgtcggtgccccgtgtcggtgctggaatagtgagcgtccccgtgtcggtgctggaatagtgagcgtccccgtgtcggtgccccgtgtcggtgctggaatagtgagtgtccccgtgtcggtgctggaatagtgagcgaccccgtgtcggtgctggaatagtgagcgtccccatgtcggtgccccgtgtcggtgctggaatagtgagcgtccccatgtcggtgccccttgtcggtgctgcaatagtgagcgtccccgtgtcggtgctggtagagtgggcgtccccgtatcggtgccccttgtcagtgctggaatagtgagcatccccatgtcggtgccccttgtcggtgctggaatagtgagcgtccccgtgtcggtgctggaatagtgatcgtccccgtgtcggtgctgaaatagtgaacgtccccgtgtcggtgctggaatagtgatcgtccccgtgtcggtgctgaaatagtgaacgtccccgtgtcggtgctggaatagtgagtgtccccgtgtcggtgccccttgtcggtgctggaatagtgagcgtccccgtgtcggtgccccttgtcggtgctgaaatagcgagcgtccccacgtcggtgctggaatagtgagcatccccgtgtcggtgctggaatagtgagcgtccccatgtcggtgctggaattgtgaacatccccgtgttggtgccccttgtcggtgctgcaatagtgagcgtccccacgtcggtgctggaatagtgagcgtccccgtgtcggtgctggaatagtgagcgagtgggctcactccttctccca

SEQ ID NO: 3928 - DNA, 1608 bp, Artificial sequence
  DNA replication origin
catcacgcagcatcctcagggtgtcctggtgaagccctgccaacccacagcaagcatcacgcagcatcctcagggtgtcctggagctggagccggaagtccccctccccacacccggggcacatgctgcatactgcagggacacactgtgtgggctgcacctgccccataatgtgtgtggctcgttcagaagagctgtggctgcttcctctgggatgtgaaaagctgcggtgttgggggcagggtgtgagagcactggatgggctcctaggggtgtcaccaatgacatgaggacagcccttgttagtgggaactccagagggccagctttagttcaacaacaaggaccccagacaaaggtcttgggggacggagttgggaggagcaggccttcagcagggcgggtgagcctgctggtgttctccctgagacactgtgctaggccctgcaaaggcatctcctgtagccagggaggcagagactgaagacaccagaaatggggggtgggggatcagaggagggaaggaaggggtgagggacagaaggcagagaccaggtcaaagatttgtgggcccctgaggacctcagggctagagaaagtgggtgccaggcaggggacagtcaggctgggttggataggtgggtgggtagaagggtggatggacagattgggtgggtgagtggatagtggatgggtgggtacaggtgggtggatgggttgatggatgaatggatgtgtggatggattggtgaatgggtgggtagatgggtgagtgggtggatggcgggcgggtgggtggggggtaggtgatgaatagtggatgggtgagtggatgggtggatggacagttacgtggatggtgcatgggtggctggatgggtgggtgaatgaatagtgggtcagtggatgggtgggtagatggataggtaggtgagtgggtggatggatgcataggtgggtggatggatacctgggtgggtggatggtgagtggatgagggtgaggggtgggtgggtaggtggatgggtgtgtagatggatgggtggttggatggggtgagtgggtgggtggtggttggatgggggtggataggtgagtgggtggctggatgggtggatggatgatgggtgggtgagtaggtggatggataggtatgtaggtgggtgtgtggttggatggggtaagtgggtgggtggttggaaggggatggatgggtgggtgggcaagtggatgggacagtggttcgtatcttaaaacactagtaggcgtcattgggtctggtaatcttacccctaaaggctgaatgaggagatgccgagtttggaacatttctagaattgggtcctcactttcagtaaataacccaaagctcttagtctatctcaagataaagtgcttgatggagagacgaaaggataattgaaatactgccttgtatatttgtatgaaatatgtgaaaaatgaaagttcttaattcctttgagacattgaaagccataagctgggtcatttaaaagcaagatcccctaaatagagatggattaaaatggaacttccaaaggtattctgtgctaccagtgaattcaatgtgactattttgcaaataga

SEQ ID NO: 3929 - DNA, 1247 bp, Artificial sequence
  DNA replication origin
aggggtgcacaggtgggtgaggagtggggaggggaatgcaggtgggtggggctgtggggaggggcacgctggttggggggccgtggggaggggtgcataggtgggtgaggagtggggaggggaatgcaggtgggtggggctgtggggaggggcacgctggtggggaggccgtggggaggggtgcgcaggtggggagtcaggaggggcgtgcaggtgggggggccatggggagaggcatgctggttggggggccatggggaggggtgcacaggtggatgaggagtggggaggggaatgcaggtgggtggggccgtggggagaggcacgctggtggggaggccatggggaggggcacgctggtgggtggggagtggggaggggcgcactggtgggtggggggtggggagtggggaggggcacacaggtgggtgggaccgtggggaggggcgtgctggtggggggggcatggggaggggcaagctggtacggggggccttggggaggggtgtgctggtggggagtgggggtggacagagacaggtgtgttgcagaccctccagcatttctgcttccaggtaaaacctgcacgtgtgaggaatgtgtggcattgtaatgtcagtcctcccttcagttgctgtcacttgaaagaaaatgtgtttgtttaacaaacataaattgagtgcctactgtgtacccacacttctagatcctgctgttgctgcagccacagctgtgattagggcaagtctcagctcccctggagtgagtgctcctgtgggccatcaggtgacatggggacagatgccacaggggagtgtagaggaggggccagggagcgctgtgggagcgaggctctctgagaaggcgatgcgtgagccaaggcccagggttggggtggggtggcacctgggtgagtggatcaggtagggaggcagctgggctggcatgggaatgaggcaggaggcccagccatggggaactggaggtcctgcctttttgagacggaagccactgaacaggtgaggactgaagtttagagtttggatggtttactgcctttgattggcacacagccgccagtgtgtgtgcgttgtgtgtgtgcaatggtgaggccactgtgcacccggtggctggcttctcatgagtttaacacacactcaccacaccagtcagccctcacgtctttaccctggatccttttcgagaaaggatctggaaagtaaacattttagactttgagggccaca

SEQ ID NO: 3930 - DNA, 1509 bp, Artificial sequence
  DNA replication origin
gccccacattattatgtgaataacaatgttttctgttttaagggtgtcaggagtttcgctttttaaaaaaatgtctgttcctgcaatagtaactcttctttctcttgagagtaaaaaatgaaataaaataaatccacgctgcacaggtgctcggctcattctttcaggagctctgccctgtgaccccatctcctgggtctttgtccattttctctttcctgacccagggaaaatgcagatggacagacgtgtgctgtctacgccgccctagcatggaactcccgggagccatgctggctgctggtgggcacctggctcgcgccctgggctgagctggtgtgatgcattttcactgctgtagacgcaggctctgcccgccctgggcctcccctggtctctgcagcccatcctgtgctgtgtcctgcccaccttgtgagccgggcagggcctcctccccacgcgcacgcactggtggccttggaggtgccgtcctccctcacctcggagcttggggttgggctcccgcgtctcagttgtcggggacccctcacaggctcctacactcatcagtgcttatccttaggaatcctcaaacactgacctcgcagcctctgttcgtggttcctttgggtgtgcggggtctgttctctgtgtctggtgcgtgttcccactggagaagccacctgggccctggactctgggctccatctcccttaggcctccacctggccaggtgtccccgcaggggccacttctgcgctctgctgccccgatcacctcatctgtaatgatggggaaggatgggctgagctcacaggcccatcagctctggggtttgacgattctaggacaagtcttgcccgacctgcaaaaaggacacgttcctgctgcagcgcccccgccagtaggtgtaccgtgctgctaaggacgctctgcacccagagggccgcatcctggattttcctttcatagatgagagttcacagcgaagtggaggccatagggggagaggtgaaaaggtggggtcctgggcgaggggacaagtatgggggggtccacaggtgggggctgtagggaggggtgcacagctgggtggggctgttgggagaggcaagcaggtgagtggggagtggggaggggaacgcaggtcggggggccgtgggaagaggcacgctggttggggggccgtggggaggggtgcacaggtgggtgaggagtggggaggggaatgcaggtgggtggggctgtggggaggggcacgctggttggggggccgtggggaggggtgcataggtgggtgaggagtggggaggggaatgcaggtgggtggggctgtggggaggggcacgctggtggggaggccgtggggaggggtgcgcaggtggggagtcaggaggggcgtgcaggtgggggggccatggggagaggcatgctggttggggggccatggggaggggtgcacaggtggatgaggagtggggaggggaatgcaggtgggtggggccgtgg

SEQ ID NO: 3931 - DNA, 1159 bp, Artificial sequence
  DNA replication origin
ctgttcttaaggtgcccagatttcatattgttcaaacacacatgctttacgaacaatgtgtgcagttaatgcaatcatcacagggtcctgaggcaacatacatcctcagcttacgaagatgacgggattaagagattaaagtaaagacaggcataggaaattataagagcattgattggggaagtgataaatgtccatgaaatcttcacaatttatgttcttctgtcacggcttcagcaggtccctctgttcgcagtccctgacttcctgcaacaccttgtggtggtgagaagaggtcaagagaaggtggggacacaagagacccactggggggacagggtacccatgactccatatctgggcagaagcgaggaggttgtgtctgcatctgagcagctatggggggcgtgtccacatctggacagaggtaacagggctgtgtccacatctgggcagaggtgacatgggtgtgtctgcatctgggcacgcatggggaggggtgtgtccacatctgggcagaggtgacaggggtgtgtctgcatctgggcacgcatgggggggtgtccacatctgggcagaggtgacggggtgtgtctgcatctgggcagaggtgacatgggtgtgtctgcatctgggcaggcatggggggtgtgtctgcatctgggcacacatgggggggtgtccacatctgggcacgcattggggggtgtgtccacatctaggtagaggtgacgggtgtgtctgcatctgggcatgcatggggagagtatgtgtccacatctgggtacagacaagggggttagggctgaggtggcacctggggcctcactaagagctgggagaagaatagccatggtgatagtcagaggagctctctaggaatcgcttggacaggggcaccagcaggctgggtgttgccgaggagtggacctgtccgctccctcccagccccaagcggatggctgccgatgggctccttcttttgtttatggagagcctcctgtgtgcccccggcccagctcccctgtgcccaggtccctgcccagcctggcccaccactttcatccccacaaccaagtgactttcaggaagtcaaaggatgtctccttaggaaaagcgcggggcttttgttttacgatatccctggtaaactatccgc

SEQ ID NO: 3932 - DNA, 961 bp, Artificial sequence
  DNA replication origin
gctgggtgttgccgaggagtggacctgtccgctccctcccagccccaagcggatggctgccgatgggctccttcttttgtttatggagagcctcctgtgtgcccccggcccagctcccctgtgcccaggtccctgcccagcctggcccaccactttcatccccacaaccaagtgactttcaggaagtcaaaggatgtctccttaggaaaagcgcggggcttttgttttacgatatccctggtaaactatccgctctactgtcgtatgtgccaagggtgacttactgatcctctctccacagtaagctgaagggctatttctgctccgtgcaggaaatgttaattgcattcctgctgtgtggggacagttggcaggcatgcatcccacacacggaccaagcaggaaaacgccaggagcacacagaggaggaggtgggagcagccgccacgtgtggggcctcgggaagcctgtccagaactgaaaggtggacacaggggcggggcagggaggggggcaggggcagacaccagaacgcacaagcacgtgtgagcacggcaggattaagcttgagtcatgaacaccaggccaaggcatccgcggtgagtctggtaggctcaccaaggcagccgacacagcaccaggcagaacagtgggggcagggctggaaccaagcactgaacttggtgaggacagccagggtccaggccagctgtcagcaggacagagtgaccgaaccagaaaggctgggcaggtctgggctatgggcagggaggtggcagggcctgggcactccgcatggtgacggcagcatgtgcagcagctcggacgctggactcaaactagcgctagcaaagggaaattgaacctgaggagcctggggtgtctcgggaccaagaggtaggaaccacattgggctttggggctgccgagccccaggcacgtgctcccaccctgagctggg

SEQ ID NO: 3933 - DNA, 959 bp, Artificial sequence
  DNA replication origin
tgggagggagagaggaagagagggaggaagggagggagaaagggagaaacggagggagggagggaggcagggagggagggagggaggaagggagggaaggaggaagggagggaaggaggaagggagggaaggagggagggagggagggagggagggagggaaggagggagagagggagggagagagggaaggatgaagggagggagagagggagggagacagggagagaggggaaggagggagggagggagggagagagcgagggaggagagagcgagggagggagagagcgagggagggagagagggagggagagagggagggagagagggagggagagagggagggagagagggagggagagagggagggagctgccactgtcattcacttcactcccatccctcaaaagcttcttattatggattctagtaactttgcctttaaaggagattttcatcatccaagaaacaaggcgatttctaggacgactcttgatataccacttgggaaacggagcacaacaagaatgcgccgaggtttccattattttgacgttgcttccactagccagcagggagcattaatctacagtgaaggtgcataactcttgaacagctggagagcctctttatcatcaaagggcgatggaaaaccataaaattaccctgttgtggctaatcagccatcgaaccaatggtgatgatgatgcattgtggagacaccacatcccaacttcacagcaagccgacacaagagaacagtacttgcagaagataattacctccttcctgctcttacctgcagagttccaggaaacctcccctttatcagggctccgaagggcactggtgtaaacatgagctgggtaggtgcaaagtgctgggaagcattagaggatgtggtgggtccacagtcaattgctcattattcactatcaatatgtacactctacatat

SEQ ID NO: 3934 - DNA, 676 bp, Artificial sequence
  DNA replication origin
acaagcaaactcctgttttgaagctagaagtgctcagtccccaacgctcagtgtttaattggccctgagccttgatagaagcagaggccgtggccagtgctcgctcgctgcagctgggcaggcggtgggtgttgctgctcccgtccaccacagctgggacctggggggtgggggtgggggtgggggggtgggagggtgttggctctgtttcctggcccccattctgaccccagccctgactttgaggtttgctccagggtgtgcttggagcctgcttctcccctgccctgtcccaggttcttcctcttgggctgggtgtctccagtttgtgtggagacagaggcagtgagggccacaggctcgctgacctcgggggactgtccggcctgccctgagatggagtgagcagccatctttcacgaggacattttccatggtggtctgacgtgtccctgtgtatttaaccacttctccattgggggacattgactttcactatcttgcccttgtacaatgctgtattgaagatccatacctacacgtctgttcttctttcttggggagagttgctgggtcacgtggttctgacacccgctttcccttctcacagtgacctcaccacgatctaccccggggcctctgcactctgtcctctcgcagccaccttctcttcctc

SEQ ID NO: 3935 - DNA, 929 bp, Artificial sequence
  DNA replication origin
ggctgtgtctaccttggtgactctggaagcgttttcataagcacttgtcatatgtcatatgcagtgtgctccaggggagcaggggatctcacagtccagagtgccccgcagagcacccgagacagcggctggcagagcacaggcagcaatgccccagaggaacaagccagcccctgcgtccccacgtgctgagtccatcctcccagcagctccaagaggcggagctatcaatttcacatacagacaaggaaaccaaggcttggagagttgaagccaccgtccaagaacacaccagagtgccagccggcagagggggctgtggggagcacacagagtgccagccagcagagggggcggtggggagcacacagagtgccagccggcagagggggcggtggggagcacacagagtgccagccggcagagggggcggtggggagcacacagagtgccagccggcagaggcggcggtggggagcacacagagtgccagccggcagaggcggcggtggggagcacacagagtaccagccggcagagggggtggtggggagcacatcacacctagacccagctgcagcaccaagctcgttcaccacgctctagaaaactcattcaacatgttccacaaagctcgtccaccacactccagaaagttcgttcaccacgctccagaaagctcgttcaccacaatccagaaagctcgttcaccacactccagaaagctcattcaccacactccagaaagctcgttcaccacactccagaaagctcgttcaccacactccagaaagctcgttcactgcgctccagaaagctcgttcactacgctccagaaagcttgttcaccacaatccagaaagcgtgttcaccacgctccggaaagctcgttcacaatccagaaagcgcgttcaccacactccagaaag

SEQ ID NO: 3936 - DNA, 3066 bp, Artificial sequence
  DNA replication origin
gtggctgaaacactcacttcatgccactcagccttcttttatactccactgaaacatcagcctttcctcgcccccaccctctttattccgtagtcggattccatcgatgctgttttcacagtgtcccacacgcctctttcttttgtggtcaccagatacatgctgagctcctagcatgtgccacactgtcccaaatgctggagccacagacacaattaagcccacctaatccctgccacccaggagctcatggacaaaaggaagtgattctggtacagagagaaactgccaccacctgcctgccggatgggtgccgggagaagtagatggcttccaggctaggcaggagaacaagattagctcttaattggaaacccctaaggaaacaagtcagagactcggagagacttggtcctagacagctgaggttgaagaaaggtcagagccctggtttcacctgtgaggacaaagatgcccagagctggatgggcagtgtgtgggtgcagagaggacaggctggatggacagtgtgtgtgcagagagggaacaatctgtgtgtgtagagaggataggctggatggagggtgtgtgtgtgtagggaggatgggctggatggattctgtaggcagagagaggacgggctggatggagggtgtgtgtgtagacgggatgggctggatggaggtgtgtatgtgtgtagagaggatgggctggatggagggtgtatgtgtagagaggatgggctggatggagtgtgtgtgtgtatacagaggatggactggatggagggtgtgtgtgtagagaggatgggctggttggagggtgtgtgtggagaggatgggttggatggagggtgtgtgtgtggagagaggatgggctggatggagggtgtgtgtttgcagagggggtgagctggatggagggtgtgtgtgtgcagagagaggatgggctggatggagggtgtgtgtgtgtagagagagaacgggctggatggagggtgtgtgtgtgtagagaggatgggctggatggagggtgtctgtgtgtggtgaggatgggctggatggagggtgtctgtgtgtggtgaggatgggctggatggagggtgtctgtgtagagaggatgggctggatggagggtgtatgtgtgcagggagaggaggggctggatggagggtgtgtgtgtgcagagaggatgggctggatggagggtgtgtgtgtagagaggatgggctggatggagggtgtgtgtgcagagagaggagggctgcatggagggtgtgtgtgagtagagaggatgggctggatggagggtgtgtagagagaggatgggctggatggagggtgtgtgtgcagagagaggatgggctggatggagggtgtgtgtgtgcaaggagaggatgggctggatggagggtgtgtaaagagagaatgggctggatggagggtgtgtgcagagagaggatgggctggatggagggtgtgtgtgtgcagggagaggatgggctggatggagggcgtgtttgtagagaggatgggctggatggagggtgtgtgtgcagagagaggacgggctggatggagggtgtgtgtatgtagagaggatgggcttgatggagggtgtgcagagagaggagggctgcatggagggtgtgtgtgagtagagaggacgggctggatggagggtgtgtgtatgtagagaggatgggcttgatggagggtgtgcagagagaggagggctggatggagggtgtgtgtgtggagagaggatgggctggatggagggtgtgtgtggagagacgatgggctggatggagggtgtatgtgtgcagagaggatgggctggatggagggtgtgtagagagaggatgggctggatggagggtgtgtgtgtgcagagaggatgggctggatggagggtgtgtgtgtagagaggatagcctggatggagggtgtgtagagagaggatgggctggatggaaggtgtgtgtgtgtagagaggatgggctggatggagggtgtgtgtggagagaggacgggctggatggagggtgtgtgtggagagaggacgggctggatggagggtgtatgtgtggagagaggacgggctggatggagggtgtgtgtgtgtagagaggacaagctatatggagggtgtgtgtgtgtagaaaggacatgccggatggaggttgtgcatggagagaggatgggctggatggagggtgtatgtgtggaaagaggatgggctggatggaggtgtgtgtggagagagaatggcctggatggagggtgtatgtgtgcagagagtatgggctggatggagggtgtgtgtgtgtgtgtgtagagaggatgggctggatggagggtgtgtgtgtgtgtgtagagaggatgggctggatggcgggtgtgtgtgcagggagagaatgggctggatggagggcatgtgtatagagagaggttggctggatggagggtatgtggagagaggatgggctggatggagggtgtgtggagagaggatgggctggatggagggtgtgtatgtagagagaggatgggctggatggaaggcatgtgtatagagagaggatggctggatggagggtgtgtgtagagaggatgggctggatggagggtgtgtgtagagaggacgggctggatggagggtgtgtgtttggagagaggatgggctggatggagggtgtgtgtggagagaggatggcctggatggagggtgtatgtgtgcagaggatcggctggatggagggtgtgtgtagagaggatcggctggatggagggtgtgtgcagagaggatcggctggatggagggtgtgtgtgtgtagggaggatgggctggatggagggtgtgtgtttggagagaggatgggctggatggagggtgtgtgtgtgtggagaggatgggctgggtggagggtgtgtgtggagagaggatggcctggatagagggtgtatgtgtgcagagaagatcggctggatggagggtgtgtgcagagaggatcggctggatggagggtgtgtgtgtgtagggaggatgggctggatggagggt

SEQ ID NO: 3937 - DNA, 2578 bp, Artificial sequence
  DNA replication origin
gtacagttgactttgaacaacatgggtttggactgggggggtccacttacgcatggattttcttctgcctctgctgcccctgaggcagcaagaccaacacctcctcttcctcctcctcagtctgctcagtgtgaagacgacaggatgaagagctttatgatgatcccacttccacttaatgaatagtcaatatattttctcttccttatgatcttcctaaaaatgttttcttttctctagctacttaattataacaatatagtctgtaatacatttgtcatacaaaatatgttaatctactatttatgttagtacagcttctgggcaacagtgggctattagtagttaagtttttggggagccaaaagttacacacagatttttcagttgtgttggggtttggtgcccctaaactgtgtgttgtttatggcccaaccgtaatttcataaagaaaaccaaacttcttatgacaaaaagtaatatatgatatcaccaaaaacgagtgaccagggaataagttaaagaatcttagataatgaattctgcataaaacactaacctgggaaacagaaggggggaaaagagaacaaatccaaccaaatatccatagaaacccagaatgtgggaaaggtgtgtacagcgctgttcagaggagccaagggaaggggcggggcgggacccaggccaccgctagcatgacgaaatgatgacttcgggcctctgtccctcaggctgaatgcgtctgcgctgggtgcccatgcagctcaccccagtttcgtttttgtgtctgtcaataagttcagcacagtattgtttgtaaaaggcgtggctttacattgtagtgggctcagacccaagtgactgcctcggaactcagtagaaaggggggaagcagcgatttgaaattttcaggtcatagaattggcgtgatgatggtaatatgtaacaaggagtcatcttgtaggaaaatacagaataaataggaaagaaaggagaacagagcctatgaaccgcctgggaggaggtgagaatttatcagaaatggatatgacagacacttagaagactgtctggatatagacataaatgaaaggggtgagttgaaactgtcagatcactttcagcctggctgtgggagagattgtggcggtgtcgtcaatggtgagggcctttctggagggcgggcaggtccccctttgtctgtctttccccgtctcctgcacctgctcctccccagggttgtcaggtctgtgaaggtggccccagtccgttactcaatgggggcacaggacaggagtggagggctgaactggacggcagtggagggttgaactggatgggagtggagggttgaactggacaggagtggagggctgaactgacgggagtggagggttgaactggacgggattggagggctgaacaggacgggagtggaaggttgaactagatgggattggagggttgaactggacgggagtggagggctgaactgatgggactggagggctgaacgggatggaagtggagggctgaactggacgggagtggagggttgaactggacgggactggagggctgaactggacgggagtggagggctgaactgtacgggagtggaaggttgaactggacgggattggagggctgaacaggacgggagtggaaggttgaactggatgggattggagggttgaactggacgggagtggagggctgaactgatgggactggagggctgaactggacgggagtggagggctgaactggttgggagtggagggttgaactggacgggagtggagggttgaactggacgggagtggagggttgaactggacaggagtggagggttgaactggacgggagtggagggttgaactggacgggagtggagagttgaactggacgggattggagggctgaactggacgggactggagggttgaactggacgggattggagggttgaactggacgggaatggagggctgaactggatggcagtggagggctgaactggacgggactggagggctgaactggacgggagtggagggctgaattggacgggactggatggctgaactggacgggactggagggctgaactggacaggagtggagggctgaattggacgggactgaagggctgaattggacgggagtggagggttgaacaggacgggagtggagggctgaactggacgggactggagggctgaactggacgggagtggagggctgaattggacgggagtggaaggttgaactggacgggattggagggctgaacaggacgggagtggaaggttgaactggatgggattggagggttgaactggacgggagtggagggctgaactgatgggactggagggctgaactggacgggagtggagggctgaattggacgggactgaagggctgaattggacgggagtggagggttgaacaggacgggagtggagggctgaactgcaggtgtcaggatcacatagtcttggttgctggatgtggagcagaaccatgtcttctgatgaggttgcctgggtgattctgagaaacgctgggaacc

SEQ ID NO: 3938 - DNA, 2233 bp, Artificial sequence
  DNA replication origin
cagggggctgtgaggccaaggagcctggtggcctggctagcgtctgttctgcagccaactttgtggtttgttacttgaagttatctgtacagcaaccctttggggaaaaaagtagtaattacacagcttcattgtgaaaagtcaacgtgaagacagaaaaactgggtgaaagttgaaaagcaggaacttgaggaatgggtctcatagaacgtgtgagtgtggcctgtgagttgggagagaggcaggattctgtccaaatagtaatgaatttgcaacatcaggtataatggctgcctgtggattgcctcataggaagtttgtgtagaagtatgggacttaaatgtacctaatcaaggtctatttcaggcattaaataaataaataaatagataagtacttaagccaagctggtgtgccacagtggctttgcaaaaacatggtaaacagatggtgaggagattgttcctctgggcaggtgctgcagactccaagataaaagcatgagggtagaggggtcctgggtgtggtggagggggtgggagtggggatggtggtgatgatgataatggtggtggcgataacagtggtggaatgggggtagggactgggatggtgatggtgggagtgggtgtgggggtggtgatgatggtggtggtgatggtggtgggggtgtgtatggggatggtggtgaggatggtggtgggggtgtgtatggggatggtggtgaggatggtggtgggggtgtgtatggggatggtggtgatggtggtggtagggggtgtggatggggatggtggtgatggtggtggtaggggctgtggatggggatggtggtgatggtggtggtagggggtgtggatggggatggtggtgatggtggtggtagggggtgtggatggggatggtggtgatggtggtggtagggggtgtggatggggatggtggtgatggtggtggtagggggtgtgtatggggatggtggtgaggatggtggtagggggtgtgtatggggatggtggtgatggtggtagggggtgtgtatggggatggtggtgatggtggtggtagggggtgtggatggggatggtggtgatggtggtggtagggggtgtggatggggatggtggtgatggtggtggtagggggtgtggatgggggatggtggtgatggtggtggtaggggctgtggatggggatggtggtgatggtggtggtagggggtgtggatggggatggtggtgatggtggtggtagggggtgtggatggggatggtggtgatggtggtggtagggggtgtggatggggatggtggtgatggtggtggtaggggctgtggatggggatggtggtgatggtggtggtagggggtgtggatggggatggtggtgatggtggtggtagggggtgtggatggggatggtggtgatggtggtggtagggggtgtggatggggatggtggtgatggtggtggtagggggtgtgtatggggatggtggtgaggatggtggtagggggtgtgtatggggatggtggtgatggtggtggtagggggtgtgtatggggatggtggtgatggtggtggtagggggtgtggatggggatggtggtgatggtggtggtagggggtggtgatgatggtaggcatgggggcgatgctagtgatgatgatggtggtgtggacggaggtggtgaagacagtgatatggatggcggtggtgatgactgtggtggggtacaggtgttgggggcgggtggcgggtgatggtggggacatgtgagtaagtgcagcacgaggggatgcagtttgccggagagcagcagcagaagatgctgtgtggacaccgccagggcagggccttgccagggaggcctcagggtgaccagcactcttgttgctggtcctgagagtgagcggcaggtcaccaggcagagcccgtggggcacaactcaggcctaggtgagagcatccgcaggtgcatgcagcttgttggtccagtgcggctgaggcaggtcctggggagaggctagctggaggctgggggagagagctttctgcaggcagtcagaggggcatcggagcctagaaccagaggagtcccaggatcaggtgtgtccttcagaaggtcccagggggattgggaggggacacaagagagggacggcaacaggctggccggtgagtgagaccaccgagggccctgagcccagctcctgctcctcttctgcctgtc

SEQ ID NO: 3939 - DNA, 926 bp, Artificial sequence
  DNA replication origin
gggctctgattcaggggagcctggctggtgccctgagatcattagagcgtggtaggtgggctctgattcaggggagcccaggctggcaccccgagatcattagagtgtggtgggtgggctctgattcaggggagcccagctggtgccctgagatcattagagcgtggtgggtgggctctgattcaggggagcctggctggtgccctgagatcattagagtgtggtgggtgggctctgattcaggggagcccagctggtgccctgagatcattagagcgtggtgggtgggctctgattcaggggagcctggctggtgccctgagatcattagagcgtggtgggtgggctctgatccaggggagcccagctggcaccctgagatcattagagcgtggtgggtagagtctgatccaggggagcccaggctggcaccctgagatcattagagcgtggtgggtgggctctgattcaggggagcctggctggcaccgagatcattagagcttggtgggtgggctctgattcaggggaacccaggctggcaccctgagatcattagagcgtggtggatgggctctgattcaggggagcctggctggcaccctgagatcattagagtgtggtgggtgggctctgatccagggaacccaggctgacccctctagagcattaaacgtggtggaccccatgtgatgagcaggccataggggtggcaccccccaggtggaaatggtccttagagagggatctctcagtgtgaggcagactcatgtgcttcccgtctgaggtagtctgctgtgacaggtgtgagcacggatgtttggacctggaggtctgagttccagggaacggtgccaacacatgagcttcccacggctccccaggtgccatccctctgcctttgtgcctttctatggctctggccc

SEQ ID NO: 3940 - DNA, 1055 bp, Artificial sequence
  DNA replication origin
gagaggagcgggagcaggtaccacagagcatctgccctgcagcccaggaaggctgcccagcagggcacagtgaaggggcagggggagggcacagtgaaggggcagggggagggcacagtgaaggggcagggggagggcacagtgaaggggcagggggagggcagtgaaggggcagggggagggcacagtgaaggggcagggggagggcacagtgaaggggcagggggagggcagtgatggggcagggggagggcacagtgaaggggcagggggagggcacagtgaaggggcagggggagcgcagtgatggggcagggggagggcacagtgaaggggcagggggagggcacagtgaaggggcaggggagggcacagtgaaggggcagggggagggcatagtgaaggggcaggggagggcacagtgaaggggcagggggagggcacagtgaagaggcagggggagggcagtgaaggggcagggggagggcacagtgaaggggtagggggagggcacagtgaaggggtaggggtgtgcctaggaagtggcctgggggccctgcagtgcttctgctctcagcttccaaggacagaactgcccctgcggacacacaggaaagctcacagaatgcccctgatgtttcggggaaggaataaagaaacctacctgtggaagtcacggtgcgaatgcctgtgaggcgaagctgttacaagacagcccttaaggcaggctgggctggtggggcaggcttagctctctgttcatactgatattaacagaagcacccagtcactccctcacttaagaagcatctactaagcacctaagaggaggtatgtcctaagtcaggcaacaggagtacaaagatgaatttggcatgagggacagtcatacagaacaaatggctaccagtgcatcaagacagacacagatgctccatccatacccacagtaagttagaaatatcttgagatgaaagtaagtgggccaggcgtggtggctcacgcctgtaatcccagcactttgggaggctgaggggggcggatcatgaggtcag

SEQ ID NO: 3941 - DNA, 990 bp, Artificial sequence
  DNA replication origin
atgaggacaccagagcgtacacagtgcagttggagtctgtggttttcttcactagctggtgtgcggccactggaccaagtcagagaaccactgatcgacggtgaagatgagatcggtgccacgttcccctaaactgtccagactacagcaagtaatacaggatttctgtgttctggttgacagttcagaagtatttttagattggttacgataatttactaaaacgatctccaaatgccttctctagtctaaattcaatgcaataatcactttatataatacaaatggctctgtatattctctttgaattgcaaatgtgaaagagtgagagggaaagagattgtgccaagtctgaaccagttctatatatgcatctaggcagattctgtatccaggggcaactaataactgctcccttcctggttccctaggcctaaggctctggcctttcctgctagaaaggctggggccctcttccctcaggacatgacctacagtgaggacaggcaggagttaatcagggaaggggagggggcggagaccctagaagaggacagaatgtgtgcaaaacaaggcgagagcaggcatggggggcacagggagcagagggcagggtgcagggcccgaggggatgcagtaaggaccagcgggccggagggaggcggtggaggaggggccgagcaggtgtggatgaggagaggctggggaagcaggtgaggatggggtggcacaggaggtgaggcagaggagggtcgggtgtgctggcctttgcaggcttccaagagcacaggccacagcagtgtcgtgtcatcacatttgaaggcccctgtctccctgcactgatggggtgaacttaaggcgtccgtgtagatgtgagtaaagctatgaggatgttccagcagctgggcctggtgctggcaatctgtgcacatcctttggacgccccccaccccctactgcctgagttggtaggcagagctcacaggaacc

SEQ ID NO: 3942 - DNA, 2037 bp, Artificial sequence
  DNA replication origin
gagcccctgcactaggccccaggatgagaccaaaccaaaatgcagccactcatgccatatgccacttgatcaaactaaaactttaaagaaggaggtgcatctcaaacagaccagcttttcctgcgatcagaagattccagtcttcctgagtcagaataataaggaagtcgcttctgctttaacccttaggaaaaaagtaacctaatgtaacttgacgttaaccaatcagcttttctacctattgttctgtttctttgttgccgccctacaaaacccactgttgtgctattaccctatcgagctcttattctattttgtagaacggaggttgccctattcacaaatcaagaataaaagctaattagatctttaactaaatttgttgtaattttgtcttccaacagcactgatccagaatggatattaagaaagcatataggccgggtgcggtggttcgtgtctataatgccagcactttgggaggccgaagtgggtggatcacctgaggtcagcagttcaagatcagcctgaccaacatggagaaaccctgtctctactaaaaatacaaaattagcccggcatggtgctgtgcaccttgtaatcccagctactcgggaggctgacacatgagaatggcttgaactcgggaagatgaggttgcggtgagccgagatcatgccactgcactccagcctgggcaaaaagagcaaaaaaaaaaaagaaaggaagaatataaaaacacacaggacattaaaaccacagagtaaacatgatttaattttgatagccctgactcagagcagaactagacggtaggaaaaactatgtttgagcccatgtaataatctaaaagatgtctattaaaataaatcttattttattctttgaatacattaagaagctgacctgtaatctcactcttgttcttgttcttaaaaccgtcaaatgcacaatgaaactccccaagtgtattaatttgaaccctctggttgtttggattgtggataaacataataagtcaaaatttattctcctctcattaatggaaaactataaaccacttgattgctttgaagaagtaccctccagcaaggtaagtgttaaaccttatcctaggaaaagacaaatactatgtaaacattaacatgcatgccctgtttcgcactggtatgccaattgtcacttccctcttctgttatttaggatagaacaagatgatatccaaatagattatgctggaatattctataatcctttcccaagggaaaaagtgtggtgtccaggtaaccctgtgtatttcatttaaatcacatgaatgaagattagatccagtcacccctcagcctatccctgaggcctaccctggccctctcttttgcagtaaacctttgttactgcaaaaccatttgcaaataaacaaggtgagcggatctggactggtgctgtgcaagcaacgggacaccggtgcaaagcctagccccgccttgcaaagctagcgttacagaggcagggctgacaccgggcccagccgggacccaagccagctccaccgcccactggagacgcccccaccccaccaccgagcgctaccccccggggatccccgacagaccgcggcaggaccccgcctcgatctgctggcgcccggtccctcccccaggacactttcaagcggagtcccccttcctccgatagaagaaacccctgggcctttgaccgaggttagccaggcaggcagggcgtcggacaagcccaacgagcccacgaactcgcagcccgcctccggcgaatcttgcagccctgccggccgacccttcaggtcgctgccaatcccggagctgcgcgtgcgcagcgagtcccggctgcgaggcccctgactcgccaactctgctgctgagcatgcgcagcacaccccaggcaacagaaacggaccgccgacccccaccagccccgctgctgagcatgcgcagcccaccccaggcgccggaagccgaccgccaaccccgtaaacttcgctgctgagcatgcgcagcacac

SEQ ID NO: 3943 - DNA, 1623 bp, Artificial sequence
  DNA replication origin
gggtttcaccatgttgcctcggctggtcaagtgatctaccctctttgggctcccgaagtgctggaattacaggcgtgagccacagtgcctggcatctggctcctatttttaaaaggtcactctgggtgctgtgcatagaatggattgcactggggcaaaaatggaagcggtgtgaggagggggaatttcagtagtcaattccatcaggcaagaaaagactgcagaaagagttgggctggagagaagtgaatggatttgcggtgtgtttcgaaggtcaaagcaacatgacttgctgatagattggattggatcttgagggtgaggaaaagcaaaactgagagtacacctagatttttttattaagccactgggcagtcagtgctgccgttcactgagacgggaaaggttagggagaagcatgtttgggggtgtgtgtggggaatcagttgttttggccatgttaggtttgacacactgattagccatgtatgtgacaacaccaactggatactcaagcctgaggttctggaatgaggtccaggttggagatgtggctgcaggagccggcagcacagcatggaaagtcgcctggagtgagtggataggaacaggacgaggagagtctggaacgctccactaaccagtggttagaggagcaggagctaggaggggcctgggaaggagcagccaagatgccctcatgaaggaaaatgagaaaatgtttcaagaagggcgtgggcaactgtgacgaatgttgctggtaagaacagaagtgccatgattggatctggcaatatggcagtcattagcagttccccagtggtgagaagcgaagccttattgcagtggcttaaggagaaaatgcgaggtgcgagattgccattagattcttgcatgaaggtttgtcatgagtgctgcagaaaaatgggcaatggcgtctaaggtgtgttcttgaaggatgagtagtaactggtcaagtgaagaggtggagaggtaggctctctaaggaggatgtatttgcaaagccattagagcaagggaacagaaatgaaataagtgtgtatttttcttgcaatatttctggaagttcaagagtcaattgcatgcattggggttgtgctcttacagcagtctcatttaaatcctgtctgctttatcgttatttgttaaagagactgagggaatggctgagataatctgatctttttcaactcgttggtttgaaaagacatctaggatggtcaagcggctggactttattagctacattgaaaaattcagaatgggataggggaagcttgtttttattctaagactagcacattacagtgtatggggaagggagaaacgatgaaaagaggaaacaagaggaagtttaaaaagtacagggtagcactgcagaatgccgacactgcaaaagtctggcgagcggggaggtggaggacaatgtctcacctgggatccgagctgtgaagtctcaactgtgcccatatggactgcatgagcttaacaaaatccttattcttttttttttttttttgcatttgctttccatactctaaacacgtttaacgtcgtttgcctcacaagattgctctgaaggtgcagggagaccgcggcagc

SEQ ID NO: 3944 - DNA, 1604 bp, Artificial sequence
  DNA replication origin
catgtcacctaagttgtgaggtgaatagcaaaaagggttttgaggttaaaaaaaaaaatgtgagaaaacccggtcctagctccgtcctgggcagtgggaaggcttgcgatgaagacactgtttcaggtaacacaactgttggctcttagggcagaggcatctactgactccgaaaatgttccatagaacattcttcggtgaacaccaatgttgggggctgggaaggccaaggcagagaagcaaaaacccaagaagggcgaacgactcgagtcgctttaggagtcggagaggtggctccacgctccttggccgagtcaccaccagcaggccggcagcacgggctccacacaccctgactccggagcttggcgtcccgggacacagggagggcgcagggctcagaggcgcgcccccccccccacccagcctgcactcttcccccagtctgcagggcgcccccctaccaccccctcaaaagagaaaaatcacacagggtggggcagagagcgtggcacagggtgggagcgcagtgctgtgtgcgcggaaggggggttgctggtgtgtggtgtgtgtatggtgtgttgtgtgagggcagtggtgtgtgcatatggtatggtgtatgttgtgtgctgtgtgtgatgtgtgtctgtggtgtgtgtggtgtaatgcctgttgtatatggtatgtgtatagtatgttgtgtgttgaatgtgtgtggtatgtgtatgttgtgtggtgtgtgtgatgtgtctgtggtgtgtgtgatgtgtgtgtatactgtggtgtgtgtttggtgtgtgtaatgcctggtgtacgtggtatgtgtatagtatgttgtgtgttgaatgtgtgtggtgtgtgtatggtggagtgtgtatggtatggtgtgttgtgtgtgttgtgtggtaagtgtggtgtatggcgtgtgtggtgtgacatgggtgtggtgtactgtgtctgtggtgtgtagtgtgttgtgtggggtgtgtggtatagtgtgatgtatatgtgtagtatggtgtgtgtatgtggtatctgtagtgtagggtgtgatgtgtggtgtgtgtggtgtatgtatggtatgttgtgtggtgtgtttatggtatggtgtatgtgtggtgtgtgtgatgtgtgtatggtgtgtggtgtgtgttgtatgtggtgtgtgtggtatgtgttgtgtgtgttgtctatggtgtgtgtggtgtgtgtgctgtggtgtatgtgctgtgtgtggtgtgtggtgtgtatggtgtgttgtgtttgtgttgtctatggtgtgtggtctgttgtgtgtagtatgtgtgctgtgtgtgttgtgtggtgtgtgatgggtttggtgtgtgttgtgtatggtgtgttatgtgtgtgttgtctgtggtgtgtgttgtgtgtggtgtggtgtgtggtgtgtgttgtgtgtggtgtgctgtgtggtatgtgttgtgtggtgtgtatggtgtgtggtgtgtggcgaattgtgtgttgtgtatggtgtgtgttgtctggtgtgtggtgaattgtgtggtgtgtgtggtgtgtgtggcgtgttgtatatggtgtgttgtgtgtgtgtgtgtgtgtgcgcgcgcccttgcgtctgc

SEQ ID NO: 3945 - DNA, 937 bp, Artificial sequence
  DNA replication origin
ctatgttggccgggttggattcaaacccgggctcaagcgatactcgtatgtcagcctcccgagtagctggaactataggcacacaccactgcgcccagcaacaccactgatgttatatacacaattttgggccatgtttttcctggagaaagagccccttgagatgctgtggaggggattgagatgctgtggagggggtggaggtggtgtggaggggagggggtggtggtggtgtggaggggagggggtggtggtggtgtggaggggagggggtggaggtggtgtggagggggtggaggtggtgtggagggggtggagatggcgtggagggggtggagatggcgtggagggggtcattccctcgtttccctcgttgtagggccacatagagagggtgtttttaagtctgatttaatgatactaaataatttactgaatgtcttcattctctagcatttcgtgttatgttcattgtttccagctcacgagtggactcttgtctttcagggcatgaaaatcaacatggacaagaatcggaggcgaaagccagcaagcgactccgtgagccactggatggagatggacatgaaagcgcagagccgtatgcaaagcacatgaagccgagcgtggagccggcgcctccagttagcagagacacgttttcctacatgggtacatcttccttgggttttcagattttaataccacagtcaggaaaatgttatgtgtaaaaggtgtttcccacttgatggggggagtttgagctggtgtttatcatcttcattcttatgtgtaaagattatttagaaatcactaaggccattatttataatcaagtagtgcagaattaaacttttggatgttcttaggaaaacccttacatgtaaatgaacaactgtaatcttttgaaatactagtattccctgtgcatgcagta

SEQ ID NO: 3946 - DNA, 899 bp, Artificial sequence
  DNA replication origin
ccatctaggaagtgaggagcgcctcttccccgccatccagcccatctaggaagtgaggagcgtctctgcccagccgcccatcgtctgagatgtggggagcacctctgccccgccgccccatctgggatgtgaggagcgcctctgcccggccgcgaccccgtctgggaggtgaggagcgtctctgcccggccgccccgtctgagaagtgaggagaccctctgcctggcaaccgccccgtctgagaagtgaggagcccctccgtccggcagccacccagtctgggaagtgaggagcgtctccgcccggccagccgccccgtcagggagggaggtggggggtcagccccccgcccggccagccgccccttctgggaggtgaggggcgcctctgcccggccgcccctactgggaagtgaggagcccctctggccggccaccaccccgtctgggaggtgtacccaacagctcattgagaacgggccatgatgacaatggcggttttgtggaatagaaaggggggaaatgtggggaaaagattgagaaatcggatggttgccatgtctgtgtagaaagaagtagacatgggagacttttcattttgttctgtactaagaaaaattcttctgccttgggatcctgttgatctgtgaccttacccccaaccctgtgctccctgaaacatgtgctgtgtccactcagggttaaatggattaagggcggtgcaagatgtgctttgttaaacagatgcttgaaggcagcaggctcgttaagggtcatcaccactccctaatctcaagtacccagggacacaaacactggggaaggccgcagggccctctgcctaggaaaaccagagacccttgttcacttgtttgtctgctgaccttccctccactattg

SEQ ID NO: 3947 - DNA, 1300 bp, Artificial sequence
  DNA replication origin
ccttaacgagcctgctgccttcaagcatctgtttaacaaagcacatcttgcaccgcccttaatccatttaaccctgagtggacacagcacatgtttcagggagcacagggttgggggtaaggtcacagatcaacaggatcccaaggcagaagaatttttcttagtacagaacaaaatgaaaagtctcccatgtctacttctttctacacagacatggcaaccatccgatttctcaatcttttccccacatttcccccctttctattccacaaaaccgccattgtcatcatggcccgttctcaatgagctgttgggtacacctcccagacggggtggtggccggccagaggggctcctcacttcccagtaggggcggccgggcagaggcgcccctcacctcccagaaggggcggctggccgggcggggggctgaccccccacctccctccctgacggggcggctggccgggcggagacgctcctcacttcccagactgggtggctgccggacggaggggctcctcacttctcagacggggcggttgccaggcagagggtctcctcacttctcagacggggcggccgggcagagacgctcctcacctcccagacggggtcgcggccgggcagaggcgctcctcacatcccagatggggcggcggggcagaggtgctccccacatctcagacgatgggcggctgggcagagacgctcctcacttcctagatgggctggatggcggggaagaggcgctcctcacttcctagatgggatggtggccgggcagagatgctcctcactttccagactgggcagccaggcagaggggctcctcacatcgcagacgatgggcggccaagcagagacgctcctcacttcccagacggggtggtggccgggcagaggctgcaatctcggctctttgggaggccaaggcaggcggctgggaggtggttgtagcgagccgagatcacgccactgcactccagcctgggcaccattgagcactgagtgaacgagactccgtctgcaatcccggcacctcgggaggccgaggctggcggatcactcgcggctaggagctggagaccagcccggccaacagagcgaaaccccgtctccaccaaaaaaatacaaaaaccagtcaggcgtggcggtgcgtgcctgcaatcgcaggcgctcggcaggctgaggcaggagaatcaggcaggggggttgcagtgagccgagatggcagcagtacagtccagcttcggctaggcatcagagggagaccatggaaagagagggagagggagac

SEQ ID NO: 3948 - DNA, 1325 bp, Artificial sequence
  DNA replication origin
ccacctccctcccggactgggcggctggccgggcggggggctgacccccccacctccctcccggacggggcggctggctgggcagaggggtcctcacttcccagtaggggcggcggggcagaggcgcccctcacctcccggacggggcggccggccgggcggggggctgacccccccacctccctcccggacggggcggctggccgggcagggggctgaccccccctcccccctcccggacggggcggctggccgggcagaggggctcctcacttcccagtaggggcggccgggcagaggcgcccctcacctcccggactgggcggctggccgggcggggggctgacccccccacctccctcctggacggggcgactggccaggcagaggggctcctcacttcccagtaggggcggccgggcagaggagcccctcacctcccggatggggcggctggccgggcggggggctgaccccccccacctccctcccggacggggtggctgccgggcggagacgctcctcacttcccagacggggtggctgccggacggaggggctcctcacttctcagacggggcggttgccaggcagagggtttcctcacttctcagacggggcggccgggcagagacgctcctcacctcccagatagggttgcggccagcagaggcgctcctcacatcccagacagggcggcggggcagaggtgctccccacatctcagacgatgggcggccgggcagagacgctcctcacttcctagatgggaaggcggcggggaagaggcgctcctcgcttcctagatgggatggcggccgggcagagacgctcctcactttccagactgggcagccaggcagagaggctcctcatatcccagacgatgggtggccaagcagagacgctcctcacttcccagacggggtggcggctgggcagaggctgcaatctcggcactttggggggccaaggcaggcggctgggaggtggaggctgtagcgagccgagatcacgccactgcactccagcctgggcaccactgagcactgagtgaacgagactccgtccgcaatcccggcaccccgggaggccgaggctggcggatcactcgcggctaggagctggagaccagcccggccaacacagcaaaaccccgtctccaccaaaaaaaaaaacgaaaaccagtgaggcgtggcggcgtgcgcctgcaatcgcaggcactcagcaggctgaggcaggagaatcaggcagggaggctgcagtgagccgagatggcagcagcaccgtccagccttggctcggcatcagagggagaccgtgga

SEQ ID NO: 3949 - DNA, 1189 bp, Artificial sequence
  DNA replication origin
ggtatcctgaatccttctaaaccgctccttgcccctggtgctcgcctctcgcttgcggactcgcggggcacgtgctggacggacacctgatctgctccctggtcgggctcgctgcctgcacagggttagtgctttgtaagtcactgtcccagagcaaggagcaggggctgggtccccggtcactgtgtgcccactcctggtgccaccactgcatccccacagagccccaagctggcatcgcctccccaacctcacggaccaggaggccgaggcttgggaggacaggtgacccgtcacgcaggacggctgacccacagcaccctcagacctgccctacttcccagcctgcaaaggttgagaagggaccctacccatgtgggaaatgacagcacatccaggggacccaggacgtggacagctgggaaggaccctcccaacagcacctgggaaaggcggcgcccagaaaggaccctggagcccaccccacggcccccaccagtgcaggctactgacctggcagggcgcagggaagacaaccgtagggactcggaggcacccaccacattgggcagggacgtgacctccacagccaaaagtccagctctccacagccaccgtttccaacctaaagctgaaggttccactcacaaacccacacacgctaccacaaagtcagggccaaagccactttcaccaaaacttctgagagagccgtaggcatccaacagtttaagttgcttccaacataattaaacattttctaaagcaggtacatttatcacaattaaaagcacaaaggccactgggcttgtctgggctgcaggacagtccacttggtttccaacagcagggctaacacagccggaaaaaagcccccagccagagctgcacagcctggcagggtggccccgagctgtccggaccctgtgccccgggagagggctgaccttttcattttgtacaacacgggctgagcagggtttgtctttcgtggtgactgttttgatcatgggtttgaatctacttttctctaatgtttcaataaaaagagccgcagacgctccacaggagaagctgaaggcccaagcggaccgcggatgaggagggggcggaccggattcaggttgcaaaaggtcaatgtgcccctccccctcctcaggacccacgtgactcccctcccctcctcagc

SEQ ID NO: 3950 - DNA, 859 bp, Artificial sequence
  DNA replication origin
tgtggtatctgaggagtgtctctgcccgaccgccaccccgtctgggaggtgaggagcgtctctgcccggccgccccgcctcagaggtgaggagcccctccgccgggcagccgccccgtctgagaagtgaggagcccctccacccagcagccgccccgtctgggaagtgaggagcatctccacccggcagcccccccgtccgggagggaggtggggggcagcccccgcccggccagccgccgcgtccgggagggaggtggggggcagcccctgcccggccagccgccgcgtccgggagggaggtggggggcagcccctgcctggccagccgccccatctgggaggtggggggagcctctgcccggccaccgccctgtccgcgaggtggggggcgcctctgcccagccgcccccttctgggaagtgaggagcccctctgcccggccgccaccccgtctgggaggtgtaccccacagctcattgagaatgggccatgatgacgatggcggttttgtcaaatagaaaagggggaaatgtggggaaaggatagagaaatcagattcttgctgtgtctgtgtagaaagaagtagacatgggagactccattttgttctgtactaagaaaaattcttctgccttgggatgctgttaatctttgaccttacccccaaccccctgctctctgaaacatgtgctgtgtccactcagggttaaatggattaagggcggtgcaagatgtgctttgttaaacagatgcttgaaggcagcatgctcgttaagagtcatcaccactccctaatctcaagtacccagggacacaaacactgcggatggccgcagggtcctctgcctaggaaaacc

SEQ ID NO: 3951 - DNA, 1144 bp, Artificial sequence
  DNA replication origin
tccccacatttcccccttttctatttgacaaaaccgccatcgtcatcatggcccattctcaatgagctgtggggtacacctcccagacggggtggcggccgggcagaggggctcctcacttcccagaagggggcggctgggcagaggcgccccccacctcgcggacagggcggtggccgggcagaggctccccccacctcccagatggggcggctggccaggcaggggctgccccccacctccctcccggacgcggcggctggccgggcaggggctgccccccacctccctcccggacgcggcggctggccgggcgggggctgccccccacctccctcccggacgggggggctgccgggtggagatgctcctcacttcccagacggggcggctgctgggtggaggggctcctcacttctcagacggggcggctgcccggcggaggggctcctcacctctgaggcggggcggccgggcagagacgctcctcacctcccagacggggtggcggtcgggcagagacactcctcagataccacacggggtcgtggctgggcagaggcgctcctcacatcccagacagggcggcggggcagaggcgctccccacatctcagacgatgggcggccgggcagagacgctcctcacttcccagacaggatggcggccgggaagaggcgctcctcacttcccagactgggcagccgggcagaggggctcctcacatccgagactatgggcggccaggcagagacactcctcacttcccagacggggtggcggccgggcagaggctgcaatctcggcactttgggaggccaaggcaggcggctgggaggtggaggttgtagcaagccgagatcacgccactgcactccagcctgggcaacattgagcactgagtgaacgagactccgtctgcaatccgggcacctcgggaggccgaggctggcagatcactcccggttaggagctggagaccagcccggccaacacagcgaaaccccgtctccaccaaaaaaatacgaaaaccagtcaggcatggcggcgcacgcctgcaatcccaggcactctgcaggctgaggcaggagaaccaggcagggaggttgcagtgagccgagatggcagcagtacagtccagctt

SEQ ID NO: 3952 - DNA, 857 bp, Artificial sequence
  DNA replication origin
cacaacctgggatgaatctcctccctgagacctaggacaccctgggcgctctgcctgtgtggtaggcggtgcccgggccccagggggcgcagatgggctgggaaccaggacctcagccgccaccaccctccacaccctccctggagtctcactttccagtgggacacagccctgccaactcccctggcccactggctcttctgcccgtgggcttgctagctgggtgctagtggatagctttctagctcgttgcagcgggggcacagtggcagttccctgatgaccggtcacgaacatctgtggcttccatggcattatgctgtggagactcacctggagaaaaacagtgacctctgcgggaacttgggggccaagacttcctggtttctagggtcctgggaaccactgcagtcctgggcaaactgggggctgcaactcaacttcgcctgggcatgatgacgctggtcacgatgctgtgcatgacgacactgggcacgatgatggggggcatgatgacggggggcatgacgatggggtggatctgggcatgatgatgctgggcaagatgatggcatggtgatgctgggcacaacgctgggcacgacgatgggcacaacgatgagcatgatggggtggatctgggcacaatgacactgggcatgatgatggagggcacgatgagcacgacgatggggtggatctgggcataataacggtagatcggggcatgatgatgctgggcatgacactgggcatgatgacggtctgcatctgggcatgatggctctgggcacaacgatgctgggcatgaagatgggacacgatgatggggtggatctgggcataatgactctggg

SEQ ID NO: 3953 - DNA, 742 bp, Artificial sequence
  DNA replication origin
acactctgtcctgcagtgacgccacctgcctccttagaaccaaggacttccctgccaggaactcctagtcttgttttgcgaagcagatgtaacgttcccccaattcagaatagacagaaaccagaggatggaacacagacttcagtgagctttgctaaaatgaaaccacacatgcccctgcagagagtggtttacattgcaataaaatgcagccttgattcacaaagcacgttcacatgcattctcttatctggctatgaaaatgacatggcccggcatggcagagccaggacaacagccacactctgctgctctgaggcccaggctgctctcctgatgctggcagctgggggccacatccagcctgggggacgatgcagggacgagggaggcagagggagatcctaatggcacctaggctggagctggacagccaggacggaggcgactctgcttcgcacaccaggcgctgtgtgttgccagctgtgcagggcgctggctgcagggatcagagctcagggtttgccggtaagtcgggacagcggcccagcaactgcagtgcgtgcgagggaagggaatagaaaaggggcaacggggacaccacttcctcgtccgtcctcagagcccaggaaagcatcggagagggtgtggtgcatctccgtgctgcaggagatgtggagggttggcgaagagggcggcgagatcagacttgtgttcaggaagcatctggcaacacttgctg

SEQ ID NO: 3954 - DNA, 988 bp, Artificial sequence
  DNA replication origin
gtgtccactgtgggatctacatggtgggtgggtgtccaccgtgggatgtgacgggggtgggtgtccaccgtgggatgtgacgggggtgggtgtccaccgtgggatgtgacgggggtgggtgtccgctgtgggatgtgacgggggtgggtgtccgctgtgggatgcgacgggggtgggtgtccactgtgggatctacatggtgggtgggtgtccaccgtgggatgtgacgggggtgggtgtccaccgtgggatgtgacgggggtgggtgtccaccgtgggatgtgacgggggtgggtgtccactgtgggatgtgacgggggtgggtgtccactgtgggatgtgacaggggtgggtgtccactgtgggatctacatggtgtagatctacattgttttcaaaagtgcaatttttaatacattttattaaaaatccttggaccctttatgccatacctggttctccattaggaccagggggtcctatgtcaccggaatctcctttctcacctgaaaataaaaaacaaggtccaagtcaccaggcagagatggacatgttctatgtgttaaaaacatcaagactgaaaatgtgatttgtctcgcggatttatcccaggccctcttgttgctacaaagtaccggagccccattctgcaggtaattcctgcttccggcactatttatgtgatacgaaccatatacatgtcatggggtgacagggattatcgagtgatcattctttaaatcagttctggaaaatccaggatatctgatagaacactctgcagacatcgcctcatgaatccctggtgccatgagtgagtggccactcctcccaacagcagcacccgacctctctcatgacagcaggaaaatccagacggagcatgatgggagcgccacgcaggcctgagagctcatctaatccaagagtcggtgcactccttcctgccctggctcaaggtccttcccatccctgctcgtagcagcct

SEQ ID NO: 3955 - DNA, 1022 bp, Artificial sequence
  DNA replication origin
aggaggagacctattgtgtagactgcagaatctgatctgcaaagtaggagggaaacggtttggttaaggagagagccgggatttattaggtgctgcattgaggcatgaccggagagctggcacgcgtgtatttctcagagccctctgaagcgtgggctgagatggatgagcgcagacacacagcctggggctgcccggcggtggcggcggatccgtggctccatactgccatctagtgggaaaagaggacgaggacggcggcgcccacacaggcgcggggaggtttgcagagccacggagggcgctcaggccgccgatgcttgcgggaattctttttgggtgggtgggtgggtggggggggtgtgtgtgtgtgtgtgtgtgtgtgtgtgtgtgtgtgtgtgtgtgtgtgtgtgtgtgtgtgtgtgtgtgtgtgtgtgtgtgtgtgtgtgtgtgtgtgtgtgtgtgtgtgtgtgtgtgtgtgttaggaagggagacgagttaaaggcgtagaaaggacaaagagcaggcgggagcaggaggcagaggccgaggtgtcagactcttcagaaagcacccggcctcgctccgcgtgagttctcatcctcagtggcacccacgttgtgtccctgcggtgacagcagccacgtagacctgacgaccgaaagagcagtcaggagaaagaaaggtcactttggccgttgatggcaaagacgaactctggatggaggctgggccaaccccatgcggagctccatcggccggggaggcgggaaacatgcccggcgtttcttcaggggcaggacgagatccctgacagatgtcgcgtggctctcaatcgtccttattcgcgggcagctattcatccggatgctcctcccttaggcctgaaactgctctcgcgctctgcccacgccgtagaaggcaactcaaggtcactgcatggaaaccgtgcccttcgcttcccctgtgggcccatcagggtctgtggccggtgagggctgaggtcaccagacgcaacccgg

SEQ ID NO: 3956 - DNA, 774 bp, Artificial sequence
  DNA replication origin
tctggctctggttagatgggaggtcctctggctctggttagatcggaagtcctctggctctggttagatcggaagtcctctggctctggttagataggaggtcctctggctctggttagatcggaggtcctctggctgtagttagacctgtggtcctctggctctagtgtgtaatgagggtcacctggagaactcattaaacataatgtgcagaggcgctggggtgcaggctgtgctcagaagcagtgtgtctggtacagaaagggaagaccctgtgcctgcccccaggaagctacactctagcagggagacagatgtaagtccagaccagccctgtgactggcacaatgccagggtgctgggggagcacatggactccagccatgggtagcctgggggaattggggtgggaggggtggggatgggccagctgagtgctgctggaggcagcttgctggagagcagctggcgggcagggatgaggtgcagggtggttctggcagaggtgtctgcgaggagagcaagggagcccacatgctccaggtggctcagtgtttcaagaacacgctgcgcgtttgtgagaagagttgggagcacgagtctggagaggtaggagaggccccatgtgccctgtgaagccttctgctgaggagccacagagagatctggagcaagggggatcctgatatgtccacctacctgccatttgaaccctggaacaggtcaacctcagcacatcaggtcttccctctgctctgccactcaaacagccag

SEQ ID NO: 3957 - DNA, 1439 bp, Artificial sequence
  DNA replication origin
cgcctgcagcgcgtccagccccagcacccggtgcccacgcgtgggcgtgaagaggcggcgcacgccgaacgggacgtccacctgctccgtgagctgctccagcagcgcctcgaaggtggccgcgcggcgccgcgacagcacgaacttcttgcccacgtagaacgggtccccgttgcggtacaccacgatggtcttggcgggcgtggtgtccaccggcgcggagggcccgcgggttcccatagccgcgccccgctcctcgctcgccggggccgagaggctgcggcagcgcgggcagcgacgcctgcagagccgcgcccaggcccgggcaccgccgacgggaggtccgctccagccgctggcgcaggacggggacgggacggggacgggacgggggctggacggggacgggacggggctgccaggcgggcggaggctgcgtgttgacgcgaccctgggcgattgtgaccgcctggccgccagggcgaggggctcggggccggggcaggagacggggcgacggggaacccgggcaggtgagcaggcggcacggggcagggacaggtgattgggtaatggggagcccaagcaggtgaggcgcggcacagggcggagacaggtgagggggcaacggggagcccgggcaggtgaggggcgtggcggcagagctcaggaaaagaggaggaggaggcggctagcatgattgtgctgagcgccccgggacgcccaccgtgcctcctccccctacactcgccgccttcctctgtagaagcggtagagaggagggttagggagggaccaggaccatcttgacaatcaacattggatgggtgctgggatctgcttcacattttttgagcctctgtttctttgatcttaggttgaatttgaccggttcagccccagtgtcttccaggactcctggcccagagtggggaatttgagcttttccaccagaggaggaggtgtgcagagccactgggaggccgtgaggaaccgcgctatagccgctggtgtgcggtgtcaggcgcgtgccattcagaacgcatcctcattggggaatgattcaaagggagagggggtctttggaagaatcgttcctactctgggtaaagataggccagtccccttgagtgattctagacagtcagtaggctacatgttacggctggaagtccacaccgaaggtacagatattgatattatgagtattaatatcttataatgttcaaaaaaagtagttccgtagagaccaccagtcacagccatagccagtatgtaagctactaaatgcctcatagcaacattaaatacagagatcaatttgtgagacgaccactttattaaatcaccaggtgttcaaaacatttgaaaagaagactatgactgggaaattactgctgtgtgtccgacaccggggctttgtgtgtgttaagggtttg

SEQ ID NO: 3958 - DNA, 1036 bp, Artificial sequence
  DNA replication origin
cgcccccagggtcccttcctatggggcagggcgggccctggccggcagcgattcaggaccgccccagagacggccaggagggcgtgggggaggggcgtggggcagaaacaggggtgtggaggagggcgtgggggaggggtgtggagaggggcgtggggggcgtgggggaggggtgtggagaggggcgtgggggaggggtgtggagaggggcatgggggaggggtgtggagaggggcgtggggggcgtggggaggagtgtaggggagggggaggggggaggggcgtgggggaggggcatggggcagaaacgggtgtggaggagggcatgggggaggggtgtggagaggggcgtggggggcgtgggggaggggtgtggagaggggcgtgggggaggggtgtggagaggggcatgggggaggggtgtggagaggggcgtggggggcgtggggaggagtgtaggggagggggaggggggaggggcgtgggggggaggggcgtggggggcagggcctgggaatggggcgggttgggcagttcccatttgaaatcgctcagggtgacccctctcactctgtgtccatcacttggtcctgcgtgcattttcaagcttgcctttaattaaactattgccctcccacggtttgtgtctgtaatcccattattgcagcctgtgtctgctttctgtgatctcagctgcttttctctcctgattctctgtttccttgtaggtttacttattttttgactgtgaactactccttttgtatagctttgtgtggggacattcttcagggctgagataaaagtgagattccccagagagaatttccattttcttctttcaaatgctctccgttcaaaaatgctctgaattaaatcagcagcttgagttttgtttgttgttttttgaaaaagtagtaggatttagtatgagggctggtgtatggttccaaattcttagtggcatttgcaaagatgtgaatttaccattcagttgtttctgaagaaaagtcgtaagtcacaggcatcacagttg

SEQ ID NO: 3959 - DNA, 884 bp, Artificial sequence
  DNA replication origin
tgggcaagtgggtaggcagcagacccctggcagaggtgaggttcaagagctgagtcccagggcagagctgggaagtgagggagggacacgtttgccccacctgaactccttgttggcagtggactcagatgctgagctgctggaacctcttctgtgctaagttgggtctgggttgggaagggagagggggctgcagcttggaggggagggtgtggattagcagcgttaggtgtggaaggaggccctattgacaggttcaggcccccgaccttctgggggatggggtgcaggtagggcccgcaccatggtgtctatgctgggagtttcctgggtgggtgtgaagtaggcagtaggaaggacaccaaatgaatttggcttagtgccggcgggggcgatgatcgattctgatgtcagcttaggggtggcttcccagcgctgggccttggaagggcagtgtacatgtgccctggaggtggagaggctgtgggggctcgagcagagaccctcgttgtgcagcagaggccccgggaagcacatggactggctggggaccagggtggctgaaggagcataacatggagggtgtaggggcagagagtgaggaggctgccaggtggatcccagaggaagacgagcagagagggaggaggctgcccggtggatcccagaggaagacgagcagagagggaggaggctgcccggtggatcccagaggaagacgagcagagagggaggaggctgcccggtggatcccagaggaagacgagcagagagggaggaggctgccaggtggatcctggagggagaccgccagagtgacgaggatggccaggtggatcccggagggagatgagcagagagtgaggaggctgccaggtggatcc

SEQ ID NO: 3960 - DNA, 969 bp, Artificial sequence
  DNA replication origin
agggcagggcttgcggtgagtcactgggctggtcagggcgggcttctctgagaaggcgacatttgagaacacatctgaatggcacagagaagtaaaacacatcatgatctgggtggagatcgtccccatcagagggaccctcaggcacacagcctttgtggtgggaagccaccggtggcagggaagtgcctggtgagggagggcaggagctgctgagcccgggagtgaaggctgcttgcagacctcgctgagaggtttgggtagtgagtgtggtgggaatccattggcggattctgagcatggagtgtcaccacctgactccggggtgggataggagacttgtttggaggctcctacaggtgatctgggggagaccacagtggctggggcaaaggcaggcaggttttggctgcattactgtatgcagtgggacttgctgatcaacctcatgtaggaatgagtgagcgagagatgggggtgggggtggggagtgtgtggtgggggaggtgatgcgggaggggagaggagggagaaagagaggaagactcccagccttctgatcagagcagctgggtgactgtcggtaccattcctgacaagggggaagtgggaggaggaacaggttttgggggagttaagaattaatttttggacgcgtccagttggtgaggcatgttggacatcagagtgggatgcgccaggctggatatgtgagtgtgaagtcaaggaagagatcaggctggagaaacagacacacaatctgagtgttgtggatggtattgacggttgaggtgctgggtgggatggagttggtgttggaggaggcacctgaagactgagttctgggctcagcttcctgataaatagcccatcaaccttggactatggttatttgtggacttgtcatctctcctctagtatattttaagctccttaaagtttgggaccctgtctgataaatctctgctt

SEQ ID NO: 3961 - DNA, 1377 bp, Artificial sequence
  DNA replication origin
tgtatttggccaaatggaagtcattcatagcctaacaacagatgtttcctgtagaaagatgagcatgagcctgataggagctgatccaaagaatggaagtagtgggaatggagacgccaggcacaggggacactcggagggaactaggctgtaggggagcacacactggggcagtggctataggtgcacatggtcaaggctaggttctttctgggggtggggggcccatggtgaaggctgggttctttttgaggagttgtggctattacagcacgtctgttctcatctaaaggggaagaaactgaggaagaaatcagcctttggctccccctttctgtcacacctacatacctagtctagcaacaattttgctagaccagggtttctcaagcgcaacaccattgaaattttgggctggatgattctttgagtatcaagagaggcgataactgctgggtggaccttcctcagccggccagccgtgtggagtccgtgcgtggtgggagggttggtcctatgcaggaacaggacagcccctccagagtagcacaggagagggcagaggatgcggacacatatcccgggaggtgaggaagtgtggggtagggcctgtggacgtcttttctgagtgctcttattttcatacacagaggcagggccatgaactatgagtgtggagtggggaggtggagctttaaagaaaaaggaaacaagaaatagttacttggaagagtgagctactgaaagaactggagaaataacctggggttatgtcgtggcactaaggagcccttgaaggtggtgatcgcgagtggaaggcatgtccggggcaggcagtggctccagagttggtaaaggaggatgtggacaagtcaggggtgggagggtgaaatggtggcagggctggtggcatagaggtgctgatgaggtaggagaattggagcggggcattagagggagagggctgtaaagacgggaggttggaatgaggtgggtcagaattcctggtaatcgcagggtctagggtatggtctgtggtaaggagcaggatcatcagatatgatgaggccaaggcactgagaaaccacaattagaagttttgtattgagtaactgttgtggtccccaaggatcatgacagagagagagagagagagagagagagagagaccaaacaccaaaggctgacatgggctaagagtaggaggtgtggcctgaagctcagtagacaactactcagaagaaagggggatggatggtacaatctgatgacaggaacttcaaagaggctgaagggttttagggaggaggatggggtaaagatctggagacagtggtgggtgcaagaacggcccctacccacttccgtggctggtgg

SEQ ID NO: 3962 - DNA, 1022 bp, Artificial sequence
  DNA replication origin
gttaaagttgatgatggagactcagacaggatgcagctttgttctagtgaagcgagcgtggactgtctcctgcattcccatgacagccagcatggatgctttcccatttacacttctatgtctgtgtctagaaatattttgatgaatataaaacaaactgtatgcacatgaagttgtcagctgccttcctggtgaggggagaaagacatgggacgggaggggaggaagacatgggaggggaggggagggaagggaagggaaggggaggggaggggaggggaggggaggggaggggaggggagggaagggaagggaagggaagggaagggaagggcgaagggaagggaaggggaggggaggggaggggagggaagggaagggaagggaagggaagggaagggcgaagggaagggaaggtcagggcgaagggaagggaagagaaggggagggaaggggaggggaggggagggaagggaagggaaaggatagggaagggaggggaagggcaggaagggaggggaagggcaggaagggaggggaagggtgaagggaaggggttctctgctgctgtttctccaaatccacctctatcccttctctgccctgagtaaaaagccctctccctccagggcccaagtacgctcttgttgatggtaagtttagaccttttcaaaaggcaggaggtaaagtatttgtggacaacctgattttgtccctgcggcaggagccagcggtcacagaggagctaggcaacctccttgaaggagacaggaacagaacacacacagatgaacacaagcgaggatgccaataaattatcccaccacacctggattccctgagcacagacctgttcatttaatttcagaaataggaagaaagatcatttataggacagggagtaaccctggcatcaaagtccagcctgagtccgcctagaaagtaaacagtcctatcaccaatattcataaggggaatgtgctgctttttaaaattatccataaggtgaatgtgctgctttt

SEQ ID NO: 3963 - DNA, 1201 bp, Artificial sequence
  DNA replication origin
agtcatgaactgggctggatttttatatttgatgaaaaaaagcctaaacgctatctgatttggggtaaggaaaaggagcattaaccttgactatgcctttagctccagccacctttttaagagtaaattgctgggcaggagcgggagggctagtcacggaacgaaactgtaagccggaccaggtgtgaggaggggaggtgataaaaagattatagggtggaggagcagaggctgaggaagaattgggacctagctcggcctggcgaggagcagcctggggaggaggggagaggtcagatgggtctgtagaaaaggaagattagaaagactcagcgacgcttggggttggtactgaggggacaggcgggagggaaagaaggaagatttgggacgagttgcactgggcacagagactaggaagggactgatgtgtaaaagaatgcctggacgtcaggcacctcagaccctttgcctattttacgacaataattatttagatcttgcaggatggaaaaattcaaagtgccattttctggctattcggaactactgtcgagtttgtattggggtcaagcggcatttcagaagaaaataaggcatttaggttttaggtcagttgtgagttgaaaaggttttaagtttttgagaacacaggccaagggagtagaaggaggaatggagggtggaaggttgcccatagtgaaggaaggaagcctagagaaaagacagagtagagaaatggagggaaggggtttgggggttcttaccttccagaaaagtgggaaaaggggttggggcgcagagataagaggtcggggtgtggaaataagggatggggtgcagaaataaggggtcagggcatggaaataaggagttggggcatggaaataaggggtcagggcacggaaataagggattggggtgcagagataagaggtcagggtgcggaaataagggattggggtgcagagatataagaggttgggacatggaaataagggattggggtgcagagataagaggtcagggtgtggaaataagggattggggtgcagagatataagaggttggggcatggaaataagggattggggtgcagagatacgaggttggggtacttgcccctcctctagaaaagtgggacttgctgttaagagtgaaggagaaggggttgaggggtactttcccctcccccagaaaa

SEQ ID NO: 3964 - DNA, 1367 bp, Artificial sequence
  DNA replication origin
gctgcccctcctcctgctgagggccctggctgatccccgggctcctggagatgcctcaccatggaaagaacaggacacatttgttgattagtgtattgaaatgtactttctagtttctgaatcaagacagtgtttcgttccttaaaatgactctaaccttttgaattatctgacaataattagaaaattcttgagcctgtcagagttttcattcatggacaaggtaagaacttcctctgtgaaatcaatatctgagggataataggagcccgagggaaaatggctctggctgccctgtgtgctgagcgttctcatcatgcaccgtaaccagcagttggcctgtgtgtcctgtgcagagccctgtgagcttccaaagacagcagctctgctgttaccactgtgcgttcccagcccggctcaatgcgtggcaaatacaggttactgaatacatattttacgttagttggatgaaaaatttagcataaggctaaaattctccagtattcaagttagtgcatatgtgtagtgggtggtattgtgtgtgtgtgtgtgtggcatacatgtgggggtgttgctgtgttgtgtggtgagcggtgtgtggtgagtgtggtgtgtggtctctgtagcgagtatgatgtgagattatgtgtggtatgtagtgtgtgtatggcatgtacgatgtggtgtgtgtgtggtatgaatggtggtgtggtgtgtggtgtgatgtgggtggtgtgtgtggtccctgtggtgagtgtgatgtgagatatgtgtggtatttagtgtgtttgtggagtgtgtgtggtgtggtatggtatggtatgtgtgatctgtgtggtatggtgtgtgtatggtgtggtgtggtgtgtggtgagtagtgtgtgtgatgtgtgtgtgtaatgtgggtggtgcatgtggtatagtggtgtggtgtctgtggtgtgtgtgtgtgcatgctgtggtgtggattgtggtgtggtgtgcggtgtatgtggtatgtgtggtgtggtgtggatggtagtgttgtgtgtagcatgtacagtgtggtgtgtgtggtctctggtgagtgcgatgtgaggtaagtgtggtatgtaatgtgtgtgtttgtggtgtgtgtgtggtatggtgtagtgtctgtgtggtatggtatgtgtgtagtgtggtgtgtgtgtggtgcggtatgtggtgagtggtgtgtgtgtgtgtgtgatgtgggtgatttatgtggtatggtgatgtggtgtgtgtggtatggtggtgtgtgtgtgtgtctctgtgtgtctcatgtatgtgtataagcatcacgttattttaccccaaggacccactcttggcaggattgtggagcctcccttcttcccttcctc

SEQ ID NO: 3965 - DNA, 1415 bp, Artificial sequence
  DNA replication origin
aatctcagggaagcaggtgcaggatgtggagcccacagtgaaccgcggagcggctgcctgcctatgtcttcctgtggctctcttccctctccctcttcccaggccccttctcctctccctctcgctcccgcctcctccctcccagcgctccctcaagggcggcagggccacccaacacctcccacacccacaccctatgccctaacaggcaccagtggccctggtgctgctgtgtcccatacaccttcgcaggagaacgaatcccttggcctaagccagagaccaactctcaggtgctcctctgtggctgagggatgggatcgtgaagtgtgggtgtgactgccaggacccaccctgtaaggaggcgaccttattctcaagaaaggaggtgctgcggtcttgccaggctctgcatgtgggccggactcctccctcggacctccagtggtctctctgggaatgaattccagaccgtggtagtttagaaagtgcagggagaagattttaggaattggatgactaagtaggaatcgtaaattaaatcttgcataagacagaagactgcaggtggtaactgagtggagctgggattggagatggagccagcagacagagaaatctgagatgccaaggtcaaaataaactttgaaatataagagggctcagggaagtggccgcaatcctgtgatgggcagggcaggcgggtgtgggcggggctggcaggtgcgggtggggcaggtgaatgtgggtggggcacgtgagtgtgcgcaggtgtggagaggcaggcatgtgtgggtggggcaggtgggtggggcgaggcaggtggatgtgggcgggtgtgaacgtggcaagtgggtggggcgaggcaggtgggtggggtgaggcaggtggatgtgggcgggcgtgaacctggcaggtgggtggggcgaggcaggtgggtggggcgaggcaggtggatgtgggcgggcgtgaacctggcaggtgggtgtgggtggtctgtggttttggagctcaggctgcaggctgagtggggcccatgctgaaaaagaaaaccaagctgggcttgtgggggcaactgatagtaactttcccctaagacaaaacacaggggaagaaatccactgtacatctatctataaagccagaataacttcttaactcccagaaaacacggggctcggtgggcatcgggagaagcagccacagcactgccacccgtgagggctcagcaggaggacctggcgtttgcaactcggcatcttaccttggaatcccggaggtcttaccgcatagcctccagggtcccacagacttcttagtttctgctgtttagtaagggtttataaaaatgtctaggttagcattgcttggaactattctgaaaaagaaaatttaaaaagaaaaaaatggaattc

SEQ ID NO: 3966 - DNA, 1783 bp, Artificial sequence
  DNA replication origin
aaaaacaattatgtctggtacagtttcatttaaactataacatgagttcatgtattcagacatatgacagaccagtactggtccatggcctgttaggaactgggccacacagcacggggtgattggttggggtggggagggtgcaagcaggctttactgtccggggtggggaaggtgcaagcaagctttactgtccgagctccgcctgctttcagatcagcagcagcattagatcctcacaggagcgcgaaccctattgcgaaccgtgcatgcggagaatcgaggttgcgtgctccttatgagaatttactgatgcctgatgatttgaggtggaacagttccatcccaaaagaatccccctcacttcttgtccttggaaaaattatgttccacgaaactggtccctggtgtcaaaaaggttagggaccaccgtgttatagattgcatgtgatggagtcatgggtccgtgatgtggcatgtgttatgatgtgtgtgattcagtgtgcaggtgttatgtgtgtgaagcactgtgcatgatatagtgtgtgcgatgtagtgtgtgttacagtgtgtgttataatacatgtgaggcagcgtgtgtgatgtaatgtttgtgtggtgcagcgtgtgtcatatgtgtgatcaagtgtgtgtgtgttagtgtccgtgtgatgcagtgtgtatctgctgaagaatgtgtgatgcactgtgtgttagagtgtgttacatagtatgtgtgatgtcgtgtgtgtaatgcaatgtgtttgtgcagtactatgtgtgatggagtgagtgtgctatagtgtgtgtgatatagtgagtgtgtgtgatacagtgagtatgtgttatggcgtgtgatggagtgtgtgttatagtgtgtgtgatgcagtgagtgtgtgctatagtgtgtgtgatacagtgagtgtgtgtgatacagtgagtatgtgttatggcgtgtggagtgagtgtgtgttatagtgcgtgtgatggagtgagtgtgtgttatagtgtgtgtgatacagtgagtatgtgttattgtgtgtgtgatgtagtgagtgtgttatagtggttatagtgtgtgatgcagtgagtgttatagtgtgcgatggagtgtgttatactgtgtgatgcagtgagtgtgtcctatagtgtgtgtgatgcagtgagtgtgtgctgtagtgtgtgtgatgccgggagtgtgtgttgtagtgtgtgtgtgatgcagggagtgtgtgctgcagtgtatgttcagtgagtgtgtgttatagcgtgtgtgatgcagtgagtgtgtgctgtagtgtgtgtgatgccgggagtgtgtgttatagtgtgtgtcatggagtgagtgtgttatagtgtgtgtgatgcagtgagtgtgtgctgtagtgtgtgttacagtgtgtgtgatgcagtgagtgtgtgctatagtgtgtgatgcagtgagtgtgtgttatagtgcgtgtaatgcagtgtgtgctacagtgtgtgtgatggagtgagtgtgtgctatagtgtgtgtgatggagtgagtgtgtgctatagtgtgtgtgctgtagtgtgtgttgtaatgtgtgtgatgcagtgagtgtgtgctgtagtgtgtgcgatggagtcagtgtctgctatagagtgtgtgatgcactgtctgtgacagaagaggaagagaggtctccatcccacacatctacccagccacaggtgctcagattctatgatgccctctgagatgctgccaccgttgctctcagagggtggatcctcactcgtacatcagccagcacat

SEQ ID NO: 3967 - DNA, 1286 bp, Artificial sequence
  DNA replication origin
cttgccatgccctgggctgaggtttgaaaatgtgagacccagtccctgctctcactgagcttgtagtctaatggtctcatccccacatattttcatcttcctgatttgtgtgtgtgcatgtatgcacacaacttctttggttgtaatttaatcacatgcaaattctaggctgtgttgccttcacaatcccgtcttgtttctgcttgaaaacgtgccacagatgcattttctggcataaaggaattttccacactggtcttcccaagctcttctgcaaatatcatcatatttgtaagtggttgtttcggagtcttcctcattgtcccttgactgatttcacctcctcttccccacctccttgggctggactctagactagactggggcttggctgctacgtgccttgatggtggtttcttccctgaggtcctcagatgcagagcttcaccagatcccctccaggaggagccgagagtccaatgtcctgagtcttcacttgttctgaaatattgattgaacaaataaaaatgtaaaatgctcttcccttggaacaaaatgtttctcctttagacctccctctgaacaaagaacaacagtggccctccctagaacaatagtggccagagaccacacaatccctttccattgggaaatgcagagagccaatgagtgtagttgatagagaaggtggagatgttgaagagggtaaagaagatggagctggtggaggtggtaagatggtaaagaggtggaaagggtgcaggtggtaaagacggtgaagagggtggagagagtggaggtggtggagacagtggagatggtggagagggtggagaatgtggaggtgtggaggtggtagagatgatgagatggtcgagaaagtggaggtggtggagatggtagaggtgttaaatgatggagaggttggggagggtggaggcggtgacggtggtagagatggtggtaacggtagagaaggtggagatgatggaagtggtgaagatggtgaagaagatggagagggtgaagatggtggagctagtgtagatagaagatatggtagagatggatggtatcaatggtggagagattgtaaagggtgaagagcatgaaggtggaggaggtaggtagaggtggtagatatggttgagatggtataggtggtgaagatggtgaaaagagtggagaggatgaaggtgcaagaggtggtgaaggtggccgaggtggtggaaagagcggagagagtgaaggtgggggagatcaggagctggggaagagagtgaaga

SEQ ID NO: 3968 - DNA, 806 bp, Artificial sequence
  DNA replication origin
ctctttcgcagagtttgttccagattctagagtatgtgttcacacagatttttttctttctttctagagttggctgggaaccatgggagcgtgtggcgggtgtgatgagtgcttcaggcggtattctccctttcgtcacactaagtctgtgctgaaataaaaaatgcaggcaaatcagaaacaaatttcccaggaaggatacgggagggaggtgggcagccaggcaggcagaaagcgcacgcatcgggctcaggctggctttgtcagtgcatcctccacggggggttgtgcattttgtttctggaactctcctgctccacaaagcacacaccatttgctagagaacataattcttctgaactggggtgcccagaatgcctgaagcaaacccttcagacaaagtgtaatgtgtgtgtgtgaatgtgtgcctgtgtgtgaatgtggggatgtgtgtgtgtgtgcatgtgtgtgtgaatgtctgcgtgtgtgtgtggtgcatgtggtatgtgtgtacaatgtagggtttgtctctgtgtgtttgtgtgtggcatgtatgaagtctctatggtgtatgtagtgtgtgagttgtacatggtgcgtgtgtggtgaagtatatgtaatgtgttgggggtgttgtgagaggagttttaagtgtgaggtgtgtgggatatgtgtgttgtgggggatgtttggtgtgtgtggagcatgtgtagtgtgtgtgcactgtgtgtctacgtgagatgtgagatgtgcagtgtgtgcgggatattttgcatgcagtggtgtgtgtgtggtatgggtgtgtg

SEQ ID NO: 3969 - DNA, 1185 bp, Artificial sequence
  DNA replication origin
tatagcgtaaagatagcaaatcaatatggaatttgccaaagattttcaaatgcattctctttccgaggcccaaatggtaggtgccctcacactttgcaagcaaataatgaagctgagctgaaatatttcaatccttttctctagagtgtggatttgtcctgcagttgtggggaggtgggtgtaggttcaccttgtgctccaccccaccctccctccggtggtgttcccaatagctgaaaaacgtgtgagctgtaagagaaaaacaagacctagtgctcgccgtgcgggagtgaagatgagttttcacacactgccttggattttatacatctccagactttaagtcacccagtatgaatgactgtaaattcttttggttcctatggccctggaaagaataaattgccagcattatcaagatttaagttggtctgaatattccaagtattcgatgcagtgtttttctttaggatgagtcggggaagtgggggacgggggcgggaatggcttatcgcaatggcggtaattttttcaaatcatgatctgtgtaaaacacggtattattttatgatattagaatcctcagagaagatccaatacttaagaaatgtagtattaattgcaggagggcacctgaaaggaagcagattcggataattttcccagtcctacacggctgatttctctggtgaagggatccgggcagtgtcttaggaactgctcaaagttcccagatacccagtgctggggggtgtggagaaggcgagggtggcgacagaccatacctatgaagcggtgattttctttaattgcccccagaatatccgtagaggtagtagggactcaataaagaaacacaaaggagacgaacacggcacgatcgccggggtccgcggctgctctgcgaggcccagcgcgccccaggtcgcggctccccggccgccagcgcacctttccatctccagggaaaatatttagacgggaaactcgagtgcaccttattttctctttggtttatgagtgacccagaaggcttctagctcacaatcgcacgatttcaggacgaggctgccggagaagcgctggcgaccgaggatgggggaaggacaaagaggaagaggaggcctgggaaggagaaaggagcggcggaggggcggggagaggacggggcggggagaggagggg

SEQ ID NO: 3970 - DNA, 898 bp, Artificial sequence
  DNA replication origin
caaagcagcccggagggcggggtggaggggcggggcctccgagttaataaaggaagatgggcggagccggcccccagccattggctagctgggggagtgatgtcacccatatgacaccctgataactagttgagagagagacctcaactttttgcagaaggagcgcgcgcgcctgggagagctcggggtccggcgcttgcggtaggagccacgagccggagagaggggtcccgggctgcctcgaccgccgtcgccaccgcctctcctgtcgcgaccgcagctcccaccgcgccggcggccgtcgtcgccgaagccaccacagccgctgtgtgcagcctggaagggggggcgggggggagggggggagccgcgaaagcggggtgccgaggactttgcaacttgcccaggaaggtggaggggtgggagggggagggggacctccgcacgagacccagcggcccgggttggagcgtccagccctgcagcggatcatggtgcagcaggcggagagcttggaagcggagagcaacctgccccgggaggcgctggacacggaggagggcgaattcatggcttgcagcccggtggccctggacgagagcgacccagactggtgcaagacggcgtcgggccacatcaagcggccgatgaacgcgttcatggtatggtccaagatcgaacgcaggaagatcatggagcagtctccggacatgcacaacgccgagatctccaagaggctgggcaagcgctggaaaatgctgaaggacagcgagaagatcccgttcatccgggaggcggagcggctgcggctcaagcacatggccgactaccccgactacaagtaccggccccggaaaaagcccaaaatggacccctcggccaagcccagcgccagcca

SEQ ID NO: 3971 - DNA, 944 bp, Artificial sequence
  DNA replication origin
gacgacgacgacgacgacgacgacgagctgcagctgcagatcaaacaggagccggacgaggaggacgaggaaccaccgcaccagcagctcctgcagccgccggggcagcagccgtcgcagctgctgagacgctacaacgtcgccaaagtgcccgccagccctacgctgagcagctcggcggagtcccccgagggagcgagcctctacgacgaggtgcgggccggcgcgacctcgggcgccgggggcggcagccgcctctactacagcttcaagaacatcaccaagcagcacccgccgccgctcgcgcagcccgcgctgtcgcccgcgtcctcgcgctcggtgtccacctcctcgtccagcagcagcggcagcagcagcggcagcagcggcgaggacgccgacgacctgatgttcgacctgagcttgaatttctctcaaagcgcgcacagcgccagcgagcagcagctggggggcggcgcggcggccgggaacctgtccctgtcgctggtggataaggatttggattcgttcagcgagggcagcctgggctcccacttcgagttccccgactactgcacgccggagctgagcgagatgatcgcgggggactggctggaggcgaacttctccgacctggtgttcacatattgaaaggcgcccgctgctcgctctttctctcggagggtgcagagctgggttccttgggaggaagttgtagtggtgatgatgatgatgataatgatgatgatgatggtggtgttgatggtggcggtggtagggtggaggggagagaagaagatgctgatgatattgataagatgtcgtgacgcaaagaaattggaaaacatgatgaaaattttggtggagttaaagtgaaatgagtagtttttaaacatttttcctgtcctttttttgtcccccctcccttcctttatcgtgtctca

SEQ ID NO: 3972 - DNA, 1588 bp, Artificial sequence
  DNA replication origin
cagcagaaaagaggcggcggatgctcggaaggggggcgggagcccggggcgcgcgtgcccggccgcgatcgcctgctcgggcctgccgcgagggctcggggacacaggccggtcaggaaaaatggtggggagcgagggggtgtggacaggcaaacggggttcagcgagcggggagcgccagcgggatgggtcgcgcccgcgccgccgccggagcccccaggaggctcccggagaacaatcaagatgcggatccaccttcgttgcggcggccccggggagctgattccggggcagcccctgagccggcgcgcggggagggcgtggtgagggcccggggtgcgcgggtgcggcagccgcctgctccccgggtttgctttcttcctctcaccccgcagccccgaggcttccctccccggcccgcgggcccgggaagccagcgctggtgtctccgcgcgcctcaagggcccgcggcggggcgcgcccaggagcacgcggtggcgaggcaagaagagccaggcacggggacccggagcgtcagggctctgccttgcgcgtcccggactaccgcccgggtgccctctgccaccccctgctccccacgccctcaccagtggttcggccctcccaggcaccccggagaccgcgactcggatcgcacagaggccatgccatgttcctcggggtgccctcggccggcctgccgcgtcttcccccgactcccgcctccctcccgctcgtagcctgggtcccgccgcgccccgcgccccctgcggccccgcaccgtcctccttccctccgacagctccacggccccgggggacagaaggaaacagacaccgaccacttctctcctttcctcttccccttcccccttcaccgctagaggtcaaacactgcggcggcgttctccgccaacaaccacctctgagcacacgcgaagatgcagcgttaaaaataaagaacagaaaaaattcaaatctggaaacggctgtccccaccctttgagaggcggggatagaagtgccccgagcgctcgctgccaaaggcggctgtcaccgcgaggctcagcggggacgcggcccgccgcagagaacacacaagccccagcgagcaggaccccgaccaagggagctggcaacccaggcccctccatccgcccctccccggccagctcccgagcctccgcgcagcccgcccgccaggatgggtggggagaagaggcagggagtggaggaggaggtgagaaaggaaatggggagctggagatggaaagggagggcagagagaaagaacacccttcccctgtctttcacaactagcggaagaggaaaaagaaatcagcctgctaattgaacacttttcagcctaaccccctaaatgtagaattctctcctgccacctcccctcatccgcgcacacaacagcctcaccaccgaatgctctgcgacaacaggacctccagtttgacttccatagagactattggcgatgcgagtttctatcagttccagctgatttattaaaattgtcaagatacagacttccagcacaaaaaaaaaaaaaaaaaaacaggcaatgatgtcgacag

SEQ ID NO: 3973 - DNA, 2469 bp, Artificial sequence
  DNA replication origin
tggcatcttcaaaatgaaggggccctcagatactatttactcccattttttcccaacagttaaaaattttggttttccaactcatagaatattgcaagcaatagacattgaacaccaggaagggtgagagggcaggagaggggtgaggggtgagaaattacttattgggcacaatgtacattatttgggagacggttacaataaaagtccgggcttcacaactacacagtatttctatgtaacaaaactgaactggtaccccttaaatttatacaaaataaataagaaatggaaggccaatgtaagcatgctttctcgaaaaaagaaagaatatcaaagtaatatatttagagtggtgaattgagaacctggagaaagagccagaaaaaaataaaagaaaaaaaaattattaacaaggtggctataaaaagcaaacaaaaagctaaaaagtctgggatcatttagtttaaagataaacatctctactcaaatgacccctgagtgcatcactgtgttagataatgttacaaagatcagtgtttataatattgacactaacttctcagaagatgcttgcatcgtgttcattacggcttatttacggaggcagggaagtatgaaatcttgcttaagtattctacccgacattttaaatggaaccaaaatgtttaggaagaatcacttttggcaaaaccctctcacttgagagtattctctaaatgaacgtatttttggtccaagagctagcagaagataacacagggaagaagttttgctttgtgggaactaaagaggtggaatagaatactccagtgaagtcaccccgtgtgactgagatactacaattcagtccgagtctgcataatccagaagatggagcagaggcagatgagatggctacaaaactggcgggaatgaggagtgccagcccagccccaagaaggaaggctggggtggcagagccaaggaggccgggatggaggatccagggaggctggggaggaggagctgagaaggggtggaggagctagggaggccagggtggaagagttgagacctaggtggaggagctggggaggctggggtggaggagctgggaggctggggtggaggagctgggaggctggggtggagaagctgggggtaccaggttggaagaacaggggaggcagggatgtagaagctgcaaggaccagggtggaggagctaggggagtaggggtggaggagccggtgagaaaggggtggaggagtaggggatgccagggtggaggagttgaggagaatggggtggaggagcaggggaagcaggggtggaggagctggggtggccgaggtggaggagcaggggaggccagggtggaggagccgagaaggggtggagctggggaggccggggtgaaggagttggggggacttggatggaggagcaagggaggcaggggtggaggacctgagaaggggtggagtttgggagtctggggaggaggagctggggaggtcagggtggaagagttgagacctagctggaggagctggggtgaaggagctgggaggctggggtggaggagctgggagaccagggtagaggagttgaggaggccggggtggaggaattggggaggctggagtggaggagcaggggagaaaggggtggaggaaaaggggaagaaggggtggaggaggaggggaggcaggggtggagctggggggaccggggtggaggagctgggaggccagggtggaggagttgaggaggctggggtagaggagcagggaggctggggtagaggagcagggaggctggggtagaggagcagggaggctggggtagaggagcagggagactggggtagaggaacaggtaggctggggtggaggagctgggaggccagggtggaggagttgaggaggctggggtagaggagcagggaggctggggtagaggagcagggaggctggggtagaggagcagggaggctggggtagaggagcagggaggctggggtggaggagcagggaggctggggtggaggagcagggagactggggtggagaagctgggaggctggggtggaggagctgggaggctggggtagaggagcagggagactggggtggaggagcagggaggctggggtggagaagctgggaggctggggtggaggagcagggaggctggggtggaggagctgggaggctggggtggaggagcagggagactggggtggaggagcagggaggctggggtggaggagcagggtcagtctttcctgggggtggcggctggggcagccacacagggtaggacacactgggtggaagtggtggcggaaggatgaattcaacgtgagtaaaacatggaatgtggttgcgttcagagtaagggaagaactggtgtccgtgagtctgacggcgagctgggcaggtgtgacctggaagggcgggcaggtggggcacggcgccccgg

SEQ ID NO: 3974 - DNA, 994 bp, Artificial sequence
  DNA replication origin
attgagggaggagcctgctgccacacccttcctctttcagatatgtttgttgatttacttgtttgtttttcatcagcattcccccaattcatctttatgtttttttgttttgtttttgttttttggttttttggtttttgtttttctttcctcctaaaccagccagttcctactgttcagggcagtctttctgaaatggcaaatccctcgtgtgctgctgtttctacagacctttctttgacagggaggggacacagatggcccaatttaccagtgaggctctgaggaaagcccaggcttgagatgggctttgaatggtgggtgctggtaagaggggcagctttctaaaccaaagacgtgccttgtggaacagagagagaaagtcacagaagagcaacgaagggcagaggaagacgggtgcaagcagggaaggaggggaggaaggaaggaggagggaggggaggatggagagaggagggaagggagaaataaaggaggagggagggaaggacggagggatgagggaggggagaagggagagaggagagaaggagaaaagaaaagaagagggagaggaggggaggaaagaaggaggttgcagaggagggagctgaggcaggggaatagtgcttagctaggaggaaaggagcctgggaggaagagattgggggaagaagaagtggtaagggagaaatttctgtttcccacctccatctgcacacatgcagagaggtaataataagagagtgtcgcagagacagcgtttcactgcgctgagcacaccttgagtctgccatggcttcattaagggagtgaagaggcttggtgactgggggactccaggtcaccggcgatggagggcctggtagggctggatttttccattcttctacacctgtcatttgtgtgaccttccaggagaaacagttagccagggctgaattagggccaagaaattatgatattatgttaagcagctgagagactcatcagg

SEQ ID NO: 3975 - DNA, 1068 bp, Artificial sequence
  DNA replication origin
ccaggagtttgagaccagcctggaatccctgaaactctctctctacaaaaagtacaaaaagtagccagtgggtggagcatgtctgctgtcccagctactcaagtgactaaggcaggaggatcttgagcctaggagttcaaggctgcaatgagctacgattgctccactgtactccaacctgggtgacagggtgagaccttgtctgaaggaaaggaaggaaagggaagggaaggggaaggggaaggggaaggggaaggggaagggaagggaagaaggggaagggaaagggaaggggaagggaaggggaaggggaagggaagggaaggggaagggaaggggaaggggaagggaaggggaagggaaggggaaggggaagggaaggggaggggaaggggaaggggaagggaaggggaaggggaaggggaagggaagggaaaggaaaggaagggaaaggaaagggagagagagaagaaggaaggaagggaggaagggagggagggaggggggaaggaagggaagggatttctcctgtcagtggcaaaaaggtaggcaatgaacttcccaatataacacagtgagatacgataccagaatttaaggtctctcagtctaccttctgttcttgttactaaactcttgatgtcagccgggcgcagtgctcatgcctgtaatcccagcactttggtaggccgaggcgggtggatcacttgaggtgaggagttcgagactagcctggcaaacatagtgaaatcccatctctactaaaaaaatacaaaaattacccaggtatggtggtgtgtgcctgtagtcccagatacttggaggctcaggcaggagaattgcttgaacccaggaggcagaggttgcagtgagcctagatagcgccactgcacgccagtctgagtgacagagtgagactctgtctaaaataaataaactcactcactcttgttgtctgagactcctctacaagtatataccaggtaaaagcctcctttgccttctttctgttgcctgttgctgttactgttgtttctccaaggtgaatttcagagaatgaagtattag

SEQ ID NO: 3976 - DNA, 1212 bp, Artificial sequence
  DNA replication origin
ctgccctccactcaccaatccatgcacactgttcaggaactcacctctgtcccaactctacgttccaggttctgtacagcctctcctgctcatgctgcacagcgttccgggaaagctggatgcatcgagcatgtttaatttcgctgatacatccatctctttggtcccttcatcacgatttcttttgtaagcccctctgatctgtcaacagatttatgtggtattgagggtcccctatctgaaagttctagatgtggcactcccacagtgcaaaggaaaggctgtacagaaaactcaacttctcttcttggtgatgaagtgacagctctgtgtgtgtgagctgagagtaggggggagggatttgtgtgtgtggtgtgtatgtggtgtgtgtttgtggtatgtgtgggtgtgggtgtgtgggatgtgtgtctgtggggtgtgaaggggtatgtttgtgtgcatgtgtgtggtgtgtgtggtatatatggaggtatggtgcatgtgtgtttgtgtgtgtgtggtgtgtgtgtgcatgtgggcgtgtgctctgtgtgtggtgtgtgatatgtgtggaggtgcatggtgtgtatgtgtgtatctgtgtgtattatgtgtttgtggaggtgcatagtgttggtgtgcttgtgtgtgtgttgtgtgtggtgtgtgtggagttgcatggtgtgtgttcacatgtatgtgtgggtgtgatggctgtgcggtttatgaagtgtgggggtgtatggtgtatgtgtgcatgtatgtgtggtgtgtgcagtgtgtggtggtgtatagcgtgagtacacatgtatgtgcgggtgtgatgtgtgtggtgtgtgatatgtgaggaggtgcatggtgtgtgtgtagtgtgagtgtgcttaggtatgcatgtgtgtgtacatgcatgtgtgtgattgtgtggtatgcacacatgtgtgacgggtatgtgcatgtgtgtggtgtgcatgtgtgtggtttgcatgtgtgtggtgtgtgaagggtgaggaggtgtatagtgtgagtgtacatgtatgtgtgtgtggatgtgatgtgtgtgtggtgtgtgatatgtgaggaggtggtgtgcatgcatgtgtgatgtgtatgcacatctgtgtggtgtgcatgtatgtgtgtgtgcatgcgtggtgtgtgtgcgtgtgcatgcacatactctatggctgcattgtctcctaacgatcacccagc

SEQ ID NO: 3977 - DNA, 1292 bp, Artificial sequence
  DNA replication origin
cgacgcagacgcccccgacccccgcctggcggcgctgctggggcccccggagcgcagctactcgctgtgcgtgcccgtgaccccggacgccggctgcggggcccgggtccgggcggcgcggctgcaccagcgcctgctgcaccagctgcgccgcggccccttccagcggtgccagctgctcaggctgctctgctactgcccgggcggccaggccggcggcgcacagcaaggcttcctgctgcgcgaccccctggatgaccctgacacccggcaagcgctgctcgagctgctgggcgcctgtcaggaggcaccacgcccgcacttgggcgagttcgaggccgacccgcgcggccagctgtggcagcgcctctgggaggtgcaagacggcaggcggctgcaggtgggctgcgcacaggtcgtgcccgtcccggagcccccgctgcacccggtggtgccagacttgcccagttccgtggtcttcccggaccgggaagccgcccgggccgttttggaggaggtaagagttctgtccgcttccagctcccagcgtggcatctgaacccttcagaccagagaactggaccaagaggctggtctgtagagccggttcttgcctgggtggtttgtttatttccgttcacaaatcaggtagggaaggtgtcctgtatgccaggcaactcttttaagattcttgtttgcaaggatcttccaacctgacgtggaacatagacctacaccaagccacgcgatgcttgctgtaaaagcatcccaacagcagtacagagggagtaaaggggctgccgggagtgagggaaaataatgtcagctgggaagtaattttatttgctgatgatcaccattcaaggatcttggggtgaaaaagaaaatgcatgagtttagggggtttaagaaatttagacttaaatagtgtttacctaccgactggccatgaaccttgtgcaggttactcaactactctaagttttgccctttgacatgtacaattcccatcttgcgatgttgtcctgattaaggaaacatctgactcacagcaggtacccacagaaagagactgaaaattctttctgatcgcaggctaggcagatgtcctcctgtgacacagatgagccctgaggatgcccccatggatcttgggaatattttccaagcttacgggacagcgttgtggagcagttaagagcgcaaggtcaaccacgtgtatttaaatttaaactctggcatttattagctgtgtcactttgagcaagtttcttcaactctctgcctcagtt

SEQ ID NO: 3978 - DNA, 1072 bp, Artificial sequence
  DNA replication origin
cgggggtcgggggcgtctgcgtcgccgggggcgtcggcgcctagggcgaagtgagccagggtgcagtcgggaagctccaggacgaagcggcgcggcggagccatggccccagcgcagaccccgcgccgcccgagcagcggccccgacagtggcccgcgcaggagccggcgggcgaaggccatgggcgcctcagcgacgccgccctcggccccgcctcggaaacgaaacctggcgggagccaggcgccggcgggaaacgaaacccggagggagccaggcgccagcgggaaacgaaagcgaagcgttgcggggaaacgaaagccggaggcccaggcggggcaggagccctggggctggggcgcccttccggcctctcctcctcgccgcgagatgtgcgcgataaacggccggcgctcgggagcagacgcttggccccggggccccaggtgcgcggctccgcgggcctgcgcggtccccaggcgccggctcccggggctgacaccgaatgaggccccgcgccgtcggccccaaggtagctccgtgtgcgttctgcgggtggctggcggccccgaccctggtttgagttcctcctctgcggcttatgccgggtgcatggaggggggcgggggtgcacgcgcgagggacagagaagtcccttcccggtgtaacgggctcttcaacgcccacttgcaggcgcactactgcccttggatgactgaccaggccctgcagaccatgggctccctccccgacctcaactcctagctctgaccacgcgtccccgcccctctaatcctgcagagctgctttcctgcgggaacagggcgcagttctggctcttccctctcctgtatcttatctcacctgtgcactcactcacctgtgcacacactcacctttgcacacactcacctgtgcacaagcttttccctcttcttggaattgccctctcccttttgctgactctccaactgggaagtgtcgcccagattggcacctcgaaatcgcctttcttccaccaaattgaagtttcctgcactaaggtgaagtgtgtcaggatagcaccctctgcc

SEQ ID NO: 3979 - DNA, 1237 bp, Artificial sequence
  DNA replication origin
gtccccgcccgggacgctgccccccgcccgctgccaccgggcgccggggcaggacccagcggggcaggcgcggccgcaagccccgagccccaaggccggccgcgcagcgccgcgtcccgccctccccgctccgcggccggcccgggcgatgcggacacaaaggggacgcgcgtcactctacctgggcctgctcgtccgcggtgcgcggctctgacgcctccgcccggtactggctgcggggtgccgggtgcccgcagtttgccgcccgcgcctccccgcgcccgcgcagcccgcacggcccgcactgcaatgccagccctgccgcctcccgcctgccgagagcccgcgcggggagaagcggctgcgcgggcggggcgcgagcgcgcacagaggccgggcacgcgggaggctcggccccggccccgcccccgcgccgagccgcacagcgccccctgccgcccgcctgcgccggcccgaggcccggagccgccccgcaggccccaggacaggctccggcacgaggaggggctgcggagaccgcccgtgcacgctaacatgaaaatgctattcctgctttagtggcctccagaagacactcccctgattcctacaccgagggaacacacagcagcaagctaggaaagaaggggtgacccagcccaacgctgtaaaccagggcgcgaaccggcgttgagctgtgcagctgcgccctgggctccagtcctgctctgccgcagaccccaccggagccagcacctgcctccccgaccctcgctggggcggctgtgagatgagcccagagccttcctgagccaaccctcgcaaggaaagtctgtctgttcaccccactatccttgtcttgaaggatgaagaaaagagggccccccgggaggtcccaaaaggtggaatggacatctgggatccaagcacagcaatttctttatttttcttaaggtatccagcttgttggaatctaagatctgcgaaggtattaatagaattcctgcatcttctgccactccccatagaagcttgaagttacacaaatgttaaattatacgtcagatgtgcatatatgaacaaaacctacgagtgtgcatgaaataacaccttcttaaatatatagattcttttttctgcaatattaaatggaaaccccactagaacatcgtttttccttaatagcataccctccacactgtgtggtctaaattcaagctctaccacctactagcca

SEQ ID NO: 3980 - DNA, 955 bp, Artificial sequence
  DNA replication origin
ggcgtcagagccgcgcaccgcggacgagcaggcccaggtagagtgacgcgcgtcccctttgtgtccgcatcgcccgggccggccgcggagcggggagggcgggacgcggcgctgcgcggccggccttggggctcggggcttgcggccgcgcctgccccgctgggtcctgccccggcgcccggtggcagcgggcggggggcagcgtcccgggcggggactcgcgggctccgttcagaggacgcccgccctgccctgcccgtgtccctgacctcgtccctgctctgctcctgccctgccctgcctctcgcaggcggcgcccgcgccccagggcagtgggcgcttagggacctggcgtccccctgcctgccctgcgcggtcgcgggtctgcgctgcggcgcgggacagggcgccccgggccagggtcccgcgggcgagctggcggcgggggctttcaaggttcgcggccccgcccgcagaccctggggctggagcctcggccccaagaggaggtctgggaaaggacgacgcgtccggggcatcgccaccggcggggaaggtcggaactggccaagaggatgccccgcacatcccctgcgcgcggggtccgcggctgctactgcccctggtccccaccgcgagccctttcccggggaatgagccgccgcccgagccccggagttccctgcgggtcttacccaccccagcctccggccgccgaccccaagccccctgcactgtgcttggctcccagctgtttggtcgcttatgccatcctggaggcttcctggtcctggggtgaaggggtgacttctttaccctaatggtcttcgtaggcaggtctcaggatgtccactccaaagttcgtggtcttttttctagagaataataatttttaaaatccattgaactggccgggcgcggtggctcacgcctgtaatcccagcactttgggagg

SEQ ID NO: 3981 - DNA, 1588 bp, Artificial sequence
  DNA replication origin
cccggggaatgagccgccgcccgagccccggagttccctgcgggtcttacccaccccagcctccggccgccgaccccaagccccctgcactgtgcttggctcccagctgtttggtcgcttatgccatcctggaggcttcctggtcctggggtgaaggggtgacttctttaccctaatggtcttcgtaggcaggtctcaggatgtccactccaaagttcgtggtcttttttctagagaataataatttttaaaatccattgaactggccgggcgcggtggctcacgcctgtaatcccagcactttgggaggctgaggcgggcggatcacgaggtcaggagatcgagaccacggtgaaaccccctctctactaaaaatacaaaaaattagccgggcgcagtggcgggcgcctgtagtcccagctactcgggaggctgaggcaggagaatggcgtgaacccggaaggcggagcttgcagtgagcggagatcgcgccacagcactcccgcctgggcgacagaacgagactccgtctcaaaaaaaaaaaaaaaaaaaaaaaaaaatccattgaacaaacatcctgcgctgcctcctgcaggatcaaggctggggtaacagaggagtgaggtaaggccccagggaactatccccagtggatccctgctgccctgcggtgagagggggtctagctcctgcactaagagcctgggaagaaaacacttcccgtaatggggcctgggagatggaaggaggacatgccccagtgaatggggctggggttgagagttgagcctggcagataagatggatttgtaaatgaaatgccaggtagaaagtaagttggtgtagacgcctgtggagctgtgggagcccccaggagggaagggagggagtcagggtgtccctgcaaagggagtcccctttgcaagggagggggtgtctgagtcaaagcttgcaggtggggcaggtcagaggtggcaggaagggcctctgtccagagagagctgctccagcgcaggaagggggagggacaaggtgtgtgacaccgtgaactttcccaggggattcacccagtggctccaaaggagacaacagccttttttattgtattctcttctccggtactgagattagggaaccttgttttttgcacttttctaatgccttttacatttttgtttttatttttaaagcgtgcaaaggaaatgtgactagaggggtcagaagaggataaatcatgaaatctttgaattctaggccaagactttgggtttgactctgtgtcagtgggagccattgatggttttggaggaggagggtgatctgagccctgctttagagtgatttccgcggtgttgcgtggaagggaaggcatggtgtggtgtgccttactgtggcttccgagtcagacccccactggctgtgggcttccacctgcatcaggcatcaaaggctgtggatggattgaggacctcatgagaaaatgggtgcaaataacccaattttaatgggatggaaattttccagacccagtgcaatttgatttttgcagtttgtgtttttaaagagctcccgattctaatgtcagcaa

SEQ ID NO: 3982 - DNA, 998 bp, Artificial sequence
  DNA replication origin
aggggggaggagggaaaggggagggggaaaggggaggggggaggggggaggagggaaaggggagggggaaaggggagggggaaaggggaggggggaggggggaggagggaaaggggagggggaaaggggaggggggaggggggaggagggaaaggggagggggaaaggggaggggggagggggaaaggggaggggaggagggaaaggggagggggaaggggaggggaggggaggggaggagggggggaagggaggaaggggaggggggagggggaggagtgaaaggggaggggaggggaggggagggggggaagggaggaaggggagggggagggggaggagggaaaggggagggggaaaggggaggggaggggagggaaagacatatataaatgcctaagcctgggtcctacttactatagttttcctgctccaaaatatatacagagatatatttctacagacatagatatagatgtttgtgatggttaatattagttgtcatcttgattggattgaaggatgcctagatagctggtaaagtattgtttctgggtgtgtctgtgaggttgttgccagaggagatggacatttgagttggtggactgggagaggaagacccacccttaatgtggatgccaatcagctgccagctcagctagaacaaaccaggtggaggcaggtgggataagctggcttgctgagtcttctttcatctttctcccaggctggatgcttcctccctctccacctgcccttggacatcagactccaggttctttggcctttggactcttgaactttggactcttttgatggggcctcttgagcctttggccacagtctgaaggctgcattgtcagcttccctgcatttgaggcttttggacttggactgagccactactggcttctttcttccccgcttgcagatggcctaccatgggatttcgccttgtgatcatgtgagccaattatcctaataactccctttcatat

SEQ ID NO: 3983 - DNA, 1116 bp, Artificial sequence
  DNA replication origin
cgaagactaaacatatgaaatacatcaagcattgggaggtattctattctaatgatgctgccgctgctttaaaagaaattaatctttgagaattgtccatagacaatgatgacaaagtgtaagaaattattgagagtagatttcgtttgggaaaagtaaaaccattcaaatggataagttcaacgtgaatagaaatctataaaatactaaatggttggagaataaatatgggctatcttccccatttattgattcaaccaggtttgagcaaagcactggacgatgtcagtggaaagagggcccacccacccaaggtgacagagcactgttcagggaggaggtggcatttgagctgcacattgaagggtgagttccgcagacggagacggggtgttgatgcacctcaacatgagtattgccgttcaaaatttttgcttgaagagctcagcatttgttcttgtggtgctgccattatccccatatgaaatgatcttcaaaggtcagataagccactcaggatgatccttctcatgtttgtggtcactgtttatgtaactctgcagattcccattcaaatgagatctcagtgcagggcccaatacaattgaataaatttgtactaaatatggtaacaaatcaaactaactacaaacacacacacattgagagagagagagataaagggagagtgagaaggaagtatttccctgggttgtgattttgcagccaccaaaggtccattcatttgctgttaatattcgcctggcacttaatttggtttgtctagatcctcctgatatgggctgtaacatgtcagggaatattggcccaaatctcaccccatactacctttgcccagattaacaggctgacctggactaaattaaattgctgtggcataccccacaggagggctggctatcaggcagactgaggtaagtaaccatgtggtgcccagtatatactactgttaccaggtcagagcacatgaagggtggtcccaggccaagcagcagctgaacaaaacatgacctccctggttggaaagcacatttacaaaggtaagtgtacatcagacagtaaatacatcagttataccatagacattagagattt

SEQ ID NO: 3984 - DNA, 1507 bp, Artificial sequence
  DNA replication origin
gagatggacttggcgcccgaaaggttggtttcttctacctgcactgtccttttctccaggcgcagccgggcaaggacctgcccggcctggtggtgtcaagagtgggactaagcccttgttcttcctgccacagaggcacaggcagaagattccgtgtctggggcgatgtcccctcagacttccacgtggctagagaaggagaaagggtggtggcccacatatctaggggctccactgtatggctcccaggggacctgagggcacagggatgcttgggactggatttggccctttgagggtattgcatggggaggatttccacaccaagcccacctttatttatacacaaaataaacaaatgtacttaaattggatgatttctgaagagcatcttgtacatgataaaatcctttgaatactcataaagtgctaatgggtcatcagcaaccccagtcacctgatctgcagggaaggtctcctcgcaggctgcagcatctgccctggaggctctgcatggagtctcctctgggctgcacggaggtcctcccagcatacacattcacccctctgttgtgtgtttctgcttatgtatgtggtgtttgtgtgtatgtggtgtgtgttgtggtgtatattgttgtatgtggtgtgcatgggtgtggtgtggtttgtgtatctgtgtgcagtgtgggtgtgtggtgtgttcatctatgtgctgcgtgtagtgtgggtgtggtgtaatgtgtgctgtggtatgtctgtgatgtctatgtttttatattgtggtatgtgatgtatgtgtatgttgtgtgtgttgtactgtatgctgtttgtggtgtgtgagatgtgtgtgatgtggtatttttgtggtgtgtatggtgtgtgtttctgtgtcatatgtatggtgtatgtgtgtgttgtgtggtgcacgtgtctgtgtggtgtgtatggtgtgtgtgtgtgtgtgtggtgtgatgtggggtgtgtgtggtgcatgtgtctctggtgtatatggtgtgtgtggtgtgtatggtgtgtgtatgtgtggtatggtgtggagtgtgtgtggtacatatgtctgtgtggtgtgtatgctgtgtgtgtgtggtgtgttgggggtgtgtgtgtgttgtggtacggggtgtgtgtggtgcgtgtgtctccgtgaggtgtgtctctgtgaggtgtgtgtggtgtgtgcctgtgtgtgtgtggtgtggtgtggtgtgtgtgtggtgtgtgtgtctctgtgtgatgtgtgtggtgtgtgtgtggtgtgatatgttgtggtgtggtgtgtgtgtgttgtgcatgtctctatgtgatgtgtgtggtgtgtgtgtggtgtgatatgttgtggtgtggtgtgtgtgtgttgtgcatgtctctatgtgatgtgtgtgtgtgtggtgtggtttgtttggtgtgcatgtctgtgggtgcggcgggagtcgtgctcttgggtgaggtgtcttaaccccttacactgttgtgaatggccctgcgacca

SEQ ID NO: 3985 - DNA, 1273 bp, Artificial sequence
  DNA replication origin
cggcctggcgaggagcagcctggggaggaagggagaggtcagatgggtctgtagaaaaggaagattagaaagactcagcgacgcttggggttggtactgaggggacaggcgggagggaaagaaggaagatttgggacaagttgcactgggcacagggactaggaagggactgagtgtgtaaaagaatgcctggagtcaggcacctcagaccatttgcctattttatgacaagaattatttagattttgcaggttggaaaaattcaaagtgccattttctggctatttggaactactgtcgagtttgtattggggtcaagcggcattgcagaagaaaataaggcatttaggttttaggtcaggtgtgagttgaagaggtttttaatttttgagaacacaggctaagggagaagaaggaggaatggaaggtggaaacttacccatagtgaaggaggcaagcccagagaaaagagtagagacacagagaaggggttgtgggggggtgcggttcttgccctccagaaaagcagagaaggggttggggcatggaaataagggattggggcacagacataagaggtcagggtgcagaaataagggattggggcacagagataagaggttggggtgtggaaataagggattggggcacagagataagaggttgggatgtggtaataagcgattagggggttcttgccccctaggaaagcgggacttgctactaagggtgaaggagaaggggctgaggggtacttgcccctgccccagaaaagcaggacttgccactaagggtgaaggagaaggggttgaggggtacttgcccctgccccagaaaagcaggacttgccactaagggtgaaggagaaggggttgaggggtacttgcccctcccccagaaaagcaggacttgccactaagggtgaaggagaaggggttgaggggtacttgcccctgccccagaaaagcaggacttgccactaagggtgaaggagaaggggttgaggggtacttgcccctcccccagaaaagcaggacttgccactaagggtgaaggagaaggggttgaggggtacttgcccctcccccagaaaagcaggacttgccactaagggtgaaggagaagcggttgaggggtacttgcccctgccccagaaaagcaggacttgccactaagggtgaaggagaaggggttgaggggtacttgcccctctcccagaaaagcagagaaggggtagagacaaggagagaaggggttggggtacttgcccttc

SEQ ID NO: 3986 - DNA, 1009 bp, Artificial sequence
  DNA replication origin
aaaccaagtctggtggcacgtatgaggaggagctcaggacacgagcaggacctgggtagcagggttagcttgtccttggtggggagaacaggtactgacttgctcatgggcatgacaaccagtgaaacagcagtcgctgtcatttatttaacgtggactatgtcctccgcatttacttacctgccaaaggggatgaccttgccaattcgccttttataggtgagaagacagaagctaagaggttcagtagcagcccaagaatacatacctttggatggggtgggatggggtgagatggggtgggatgggatgggatgggatggggtgggatagggtgggaagggctggtatggggcaggatgggatgggatgggatgccctggggtaggatgggatgggaaatctgggatagggagggatggggtgatgggatggggtagggtgggatggggtaggatgggatgggatggggtggggtgggatgggatgggatgggattggatgggatgggattggatgggatgggatgggatgggatggggtaaggtgagatgtgatgggatggggtgggatgaggcaatgggatggggtgaggtgggatggggtggggtggggtggggtggtgtgggctgggatggaatgggatggggtgggatgtggtaggatggggtaggatggagtgaggtgaggggatgggatggcatgggatgggatgggatgggatggggtggagcagactgtactggagggagttctaggggacagggatggatagtgcaaaagcacaagggtaaggaatgcacaagctggctcaggttgcccagatctcagagccatgaccagagcaacagatgaaaacgaggtcaggggtcagctggcgcccacgcagtgggagccttgatgctccctagcttgcatgcacccatcactgcttcttcatacagatatctacaagagtgaggtacaggaacagttgtctcttctttcttgagaatgcagcacaagttct

SEQ ID NO: 3987 - DNA, 939 bp, Artificial sequence
  DNA replication origin
atgggatggcatgggatgggatgggatgggatggggtggagcagactgtactggagggagttctaggggacagggatggatagtgcaaaagcacaagggtaaggaatgcacaagctggctcaggttgcccagatctcagagccatgaccagagcaacagatgaaaacgaggtcaggggtcagctggcgcccacgcagtgggagccttgatgctccctagcttgcatgcacccatcactgcttcttcatacagatatctacaagagtgaggtacaggaacagttgtctcttctttcttgagaatgcagcacaagttctgtttttgtcttcaagtattgcaaacagcaagacaagatcaccagtttcctcagtctgagccaacgtggaggtggctcggaggtcacttgatgccaccatcagcaaagcctgaacagggtccctgaggcccagggactcaatggagcctcagagctgagagtcagatcagagctgggattggggcagcctgggtctaaatggagcacctgctgctcagggcagcctgtcagacagggagccattggcctttccaaagggccaagaaatgggaaacccaatctaggccttcaaaggtaggggaaaaagtcacatctgggcaaaccaatcacaaaagcccctctgtgcaatgggcagaatgtccttcagaaagctgtcctcctgggtcactgacaggagatcctctgctgccttcaggggtgacaggagctcaggtcaaacacaacttcggatcacaccttcttccaaatcaaccccatgctctgcagacatcactcacaacacaggcctaaggccactctccacacacagcacacacaccagcaggccggctgctgggaggagacacaagccgtgtggacactgtgggaaggaaggtgttgaggaagtttaagaacaggcctcc

SEQ ID NO: 3988 - DNA, 1313 bp, Artificial sequence
  DNA replication origin
cgccccagcccgtttaccccgcccgggagcggcctccacgcccgccgggcgcgtccgggctgcgccccgacaggagtccggtggagccacctccaaccccctaggcggccgggcaggtgcaggtgcggggctgccctccgcccagcccagggctgttgacgcaggtgacccgggtctaagaatcccatcggtccacagccagcattctagggccctggggactggggttcttggaaacctcgtcagctgagagaactcagtttcccctctggagaggtttcagacagcgcggccccagaccggggaagctagcgactaggcgtccccccagcctcacagtggacgaggctgcagtcggggcctgacggggcctgaccagcgcgccccctgacgctggcccttccaggtgctctcggtgggcaccactgcccgcggtccgcgtgattcttgcccaagtctgtggagggccacaaagcacctcttgtcatacaatttttaagcgcctctattctcccttggcttagtgggcaacttgcccattgcccatctccaaattaggtccccaaaatgagccgtgaaatagcggatgatggatgttgcagccttgggtaagagcgctcagctgggtttgtgaacagcgtggttgaagcttctgcagaggggccgtgaactctggccagagtccgcgctttggaagagcccgcagggaatctcagggatctgctaccttacaaagaaaaccggccttatccagcctcctctgcagcacccccggcccctctcccgcttggtgaggctgcaggcctgggtggggtggggtggcggtgggagcattgctgatgctctctgtacgggcagggagaagcctggctttgggttaatgctgcagacaggcctgcgtgcgggagcctttgaagggcttgccgggttggaagcgggagggtggtttagtttccgaaagcagactgctttcattttcttggttgccttctttatcaagatacttcattctttgacgtttcctgcccagaaccctttgaagaaagtctttttttgctgagtgtgcactgtgctctaataaggcccgttgtgagagtcccttctgttgcctggccctgtgctaaacggtgaataggggaggctgggatgcgtccctgcctgctgtcccctcccagcgagatccggagaaccaggggaaccagtgttaggggcaggacagtgccagtgtcgaatggcctctgagatggcagcgtcccctccgtgtgccatcgcactgtcggagagagcctgtcctagtttcaaagaacttggga

SEQ ID NO: 3989 - DNA, 825 bp, Artificial sequence
  DNA replication origin
ttactgaaattgctgctgcatgaaattctctgggctaggtcagaagtggcagctggggagtgtgcccatgtgtgtaaaatgtctcagcttaaagaaacaggaaattcaggaccaactcgaactctgcggcccacgccttgtttcctagaaaggaaggggtccataacacgggaggctggggccccggggtgaggacagggatgacacaggaggctggggtcccccagtggggccagggatgatatggggggctggggccctgcagcgaggacggggatgacacgggaggctggggtgtcccactggggttggggatgagacaggaggctggatccctagtggggttggggatgacacaggaggctgggatcccccagtgtggttggggatgacatgggaggctgggaccccccaagtggggtcggggctttggcccagagaggaatgggcttctggcctctgtccttgcctgggtccagggcagtctcctgacccactgggtctcttttcctctctgctctaatagaatgccgccaagagctcgtgcctgctggcctgggagggtctggttagaggaggatgaagctctgcttggagaagctctggatgctgggtgctgcctggtctggactttgtcctgagcaatcttggggaaatggtccgagtgaagtgcagggcaactcctggagggaagacaggtgacagcgagataagaaggggcagcggtagcctcggggtctggatctgggaggttcctgggactgggcagtggggcagccattttcttcatagtcaagtaaaccgaagccttgagaagccgagtgc

SEQ ID NO: 3990 - DNA, 1741 bp, Artificial sequence
  DNA replication origin
atgaagagtctcctgggagaggcaagcattagttaattagccacacaaataagtgaacagttaccagccctgtgaattgctgtgaagacagggcccagggtgttcagagggggaacagcacagcaccgtctggcggggaggggacatggaggaaggaggagggcttcctcggggaagccatgagtagctgaactcggaaccactgggttgaaggggtggggtggaggtgaggataagatgaagattgttccaggcagagacaatgacatcccctaaaccctgggagggaggatgtggcccatatgaggactgcagacagccagggggatggtgggagaggaatccggagagagaggccacggccaggcacacaggccctgagaagctgcgccggggtcctggtgtgcaccccaggagttttcggcacacgggtgacctgaccatatctcagatttttgggaagatcgccctggaaggatgtggaagacagaggggagggcaagtgtgggggcggagggcccagcccaagggccacggccctggcacccagagagatggctcttgcttggatgggtgttggaggagggcaccaggatgaagacagaagacaaaaagggaaggctgtgcaggccttgacggggaggtgcgacttggggtggggcagacctgggggcaacagagagaaaggtgggaagatgagtggcggacagtggtgttatcaccacgggcctgggaatgggtggtgagcacagtttcgggcacggtgaacctggggacctctgagccatcatgtatgtgagggggcggtgtggaatagacctctggccgtgctgtccaggggtcagagatgaggtcagggctggaggtaccactgggagaggctggtgcagatagcagtagaggccgctggagtcgggggccagcctagagagggggttcagcaggagaagacacagctccccctatgacttgaggcaccttagttttaacagccaggtagaggactctggcccagtcaaagagacagagaacggacagagggaaggcagaaggaatggacccatcacagacactggggacacggttgtttcgaaagttgcttgggcagcagggcttaaggctggtgggacgtagagtacgaggatgacagaaatgtctcttggatttagaaaatggggttgttggtgacattggcaagagtcgccttggagaagtggggcagaggctgcttggcagcgtggggtgagtgggtggaggagaggaagtgggggaggcctggaaacccttagaagacgcctgtgagggaagagaggtgaaggagtagctggggaggctgcggggtggagggaagacttcgtcatttaatttcgggagggagaggtttcagcattctcctgacagatgtgttgtccctccattccatcccttaaaaagaagagcttgtgactgcaggtcattactgcacaatagacatccttgtgaaaggacagatgctattatcatcttcgctttacatacgaggcccaaagtggttatgcaacttgcccaaagccacacagctgctaactagagccgggatgaatcagacacagttaacctgagcctaactcaagggtccgggtcttaactctttgactcttttgctctgctgcctttcagttgagcctgggtcattatcacgtgtctgtgcccctgatggacgccagcctgtatgggaagggtggtcatgttaccgcgtatc

SEQ ID NO: 3991 - DNA, 1186 bp, Artificial sequence
  DNA replication origin
agtgagccgagatcacgccgctgcactccagcctggcaacaaagcaagactgtctcaaaaaaaaaaaaaaaaaaaaactaaagtggtataaatcctctctctctctctctgtatatatatgtgtttgtatgtatacataatatatatctcacatgcaaatatcatatacatatgtgtatatatagagagagagagggaggaggggaggggaggaaaagggagagggaaggggaggggaggaaaagggagaggggaggggaggaaaagggagaggggaggggagaggagaggggagggcaggggaggggaagggagaggggaggggaggaaaggggagaggggagggaaggaaaggggagaggggaggggaggaaaggggagaggggaggggaggaaaggggagaggggaggggaggaaaggggagaggggaggggaggaaaggggagaggggaggggaggaaaggggagaggagaggggaggggaggacaggggaagaaaggggagaggacaggagaggagagatattacatactatcacaggtcttgtgatatatagtgatctatccccggtcttgaactatcttcacacccctttttggctttctggaaggatttgggggcagttgttatgtgtctgctttttcaagttatagggtgattctgtattgttgaaatctagcaccttgataaaataacagtgactgttcttgcaatgaatcttgctgtttgggagggctctgtcgtataaatggaagctggctcttataaatatttggttaattggctgtactatctcaaataaatgctttgctctcggtgtttctggtggttaacagtttgggaagcagtttttatatgcattagccagtggctgaaatgtaatcagcgctaaataaaagttgattgaattgaattgagttatccaatttgattttcacatggcctatgaagggttaggtttttgtcagagggaaaagttgccttttaaaaataaaactcggccagacgcggtggctcacgcctgtaatcccagcactttgggaggcagaggcaggtaaatcacctgaggacaggagttcgagaccagcctggccaacatggcaaaatcctgtgtctactaaaaatacaaaaattagttgggcatggtggcatgcgcctgtaatttcagctactcagtaggctaa

SEQ ID NO: 3992 - DNA, 1659 bp, Artificial sequence
  DNA replication origin
agcagggctgaggccatcagcttgagctcatttccctggggcttgggggttcgtgtggccccagtctgtgtctcccagatcagctgctcctcttccctggtccatgagcattagtgggttctggtctgcccagtgggcaccttcttccacatgaagcagtggaagcagaagcagtgaacactccggaagggtccactgtgtgccaggctcagggacacaaaactagatcacgggtgaagttccacaagtgtgggcatgtggcgtgcccattgagtgccagccgtgtgccggtagctgagaactcagcagcgcaaggtagatgcaggccgccgttcttgtgtagtgagacccacaacagcagctccgaagcgggtgtccagagagagggggtcctgactctgactcggggagtcagaggagaccaccctggaagaagtggcgtctaagctgagacctgagagttaggacttagtcatttaagggttgggggtagggaggggtgggcaggggtagaagagggtttccaacagaatagcatgtgtgaggccctgagcaagacaatttgggaccagagtcacatttgtgtgactggagagtgcagggcaagggagggagtggtgagccatgcatctgggaagggagagattgtgcaggaaggggagaaatcttgtggtccgtggggcctggtcgggaggggagcgtggctcttgggatgctgcgtttgaggtctctgtggggtgactgggcgcggtcatctagcaggcggtactcagcctggaggtcaggctgtaggtgaatggatgctaagtgaagtcacggaggaggctcgtgcccaggaagaggccaagtgcaaagagaagactgccagggctgccctgggatccacaggtgcagggggcccgggaggcagaactgcagagaggactgagcgagggctgcccaagggcaagctcagcccaggaggaagagagagagtgctcccaggaggaggaggagaaggttgagaacgaggcactgagttcaccaggcaggtcagggggaaaagaatgagcgaatggagaggtctcttggatttaaggaaggaggtgggtgggggctgcactggaggggaggaaggaggagcctgagggctctgtgtgtgtgtgtgtgtgtgtgtgtgtgtgtgtgtctgtctgtctaacgggagggacatgagcatgttttaaagttgacgcaagtagctgggagagaaggaagagaccagaggggaactgggttcatcaatgtgacaaggactgtgcctgaaggtgaggggttggccttggggagggagaggggcgagacaggggaggagctgggctgtggcgcagggctggggttcaaggatcggggctgacagggctggagttcccctctgctggcttctgttttctctgaggtaaagtcagatgctgagagctggcaggaggcggtggctctgagctttgaggagtgtgaagaaggttgcagtggtcaccttagagctggctggggaggcagaaccactcactggaggtgctgggcctccctgggggctgcaaggggatgggggtcttttggggctgtttttctctccttggaggcaatgcaggggaaggtaggggcagggcaaggctctggtcccagctgcacctctggccc

SEQ ID NO: 3993 - DNA, 881 bp, Artificial sequence
  DNA replication origin
gttccaaagaggaaggccctctcacccctggagcacggtttccaggcccccagcccacaaggacagcccctctgtgtccagccctagatcccactcacacctgccttgaagcgctggctgtggacatgcttaaatctactcacatgtgcctcagacctgggttgggggtgggcaggaatttccaaaatctttttagacggattcagattctttttagctatccaatcctttcttcaaatgaaatggggctcatgaagaaccccagtagacagagcgggacatgaagcgggttggagggaacgctaggaccctcactggagcacccacactcacccccgacaaaccccccaggagaccacggcccccaagagcaggggtggctgcgctcctcacagcctgtggctcacagctcacagcggagctgcaggcccagctgagacgaggcggcagagagtggagtggatgagcggggtgtgcgagagtgtgtctgtgacagtgagtgtgtgtgtgtatgagaatgtgtgtgagagtatgtgtgaggagtctgagagtgtgtgtctgagagtatgactgtgtgtgtggagtgtgagagtatgtgagtgtgtgtgggagtgtgtgtgggagtctgtgtgtgggagtctgtgagtgatagtgtatgactgtgtgtgagggtgagcatgtgtgtctgtgtgatagcaatagtgtgtttgtatgtgtatgattgtgtgtcagtacatgtgtgagtgatgtgtgtgtgtgtgtgagtgtatgtgagagagtgtgtgagtgtgtgtgtgagagagggagagagagagggagagagagaggggaaagggctatcaatgtaatttgcctctacagctaaacacacaggccgtaat

SEQ ID NO: 3994 - DNA, 1399 bp, Artificial sequence
  DNA replication origin
cgctttccggggccgtgactccactggggcctcgtaggcgctccgggcacacggacagatcccggggaaggggccaagggcagagcagggcgcatgtcagagccccggccaccgtctcggcagctgccctctcggaggccatggccgtggccctgctgtcggctccaggctgaggccaggacgtcgccgtgcccgggggtgcggagcctggcatggatcgcagtttgggaacaggcacatggcccacggggctcctctgggttcctccccaggcgggcgggcgggccgcgggcagcccccaggagtcacccgtggcctgggctggcctgggggtcgtggtgactcggtagcctcgccccagcggtgcggtccgggaacaggagcccgcgtggcttctcggcgcctccgccccagtcgcactttgtagtagccccacctgaggctcccatgccctggcaccgaggggcagccgccccaccctgctgacttcccgcgccgtgctcacagggcctcggacagagggcggagcctcggtgcttgtcggaggggctgggggtcagagggcacagcgatggggcagaaagccaggtcggggctgagcagtgaagctgaagaaggagcgcgatgggaaacttgaggagtcaggatgcgattctagacctacagctgctccttctgctccttctcgtgggacgagatgggggcagcagccggggtgactttccctgccctcctcactcggcttgaggaggaatgacgcggccaccagggagcgtggggcggagggggccccctggtgttcacggggcccagggcaccgggccagtgaggtccctggtgtgtcccatcgtcccctgcccgcctctggggctggtttttctgccatggctaaggtcctgcaagcggcctgcgggttctcagctctcaaacccaagctcctgccccaccctcctccaagagctggttcttggagtgcagccttggagtgcggcccgccctgggaggacgcttccaggaaggaacctgcccaggccttggcaatggggccaggccctttgggcagagatttctgggctccgaggtgcctagggcatggtgtagaagttggggcacgggcttcctgtgggccgaccctgcagatcctgcctggctttgctaggactacccactttacaaagcaccacaaaccgccaggcttgagcaacaggaagcccttgcctcatagttctggaggctgcaggtctggcaggattggcttttcagagcacctctgtccttggcttggaggtggccatcttctccctgtgtctcttcacattgtcttccttttatgtgtctgtgtcctactttcctttttctgtaaggccaccagtcatattaggtagggcccaccctaatg

SEQ ID NO: 3995 - DNA, 921 bp, Artificial sequence
  DNA replication origin
ggcattgatcagctgggcgcgcgcgctgagtgacggcgcggttgccatggcagccgcctgagcggcgccgcgaggacaaggctgcagggcggcgtgaatgggcggcgtcacgcgcctggcgccagagagtctgctccggggctccggctccggccccgccgcggcctggcccgcgcgccgccgccgccgccaccgccgccgccaattcatcacctgtcagggatcactcgcggggtcacgggcggaatggacacagctgtgagaacaaaacccgggaaagaaaggcgaacgctccccattgcgccagatgtgcagggaggaccttgagacgcgccccccgcccccgcaggctcctcccgccccccggcgcatcacgcgggggtggcaaaggcggcctggccagcgcggagctcccggcccggagctgcttctgattaccgcgaggggcccggacgcgagagccgccgcggggcctgccctagaggcggagtgagtgagtcctggagccaggctgggggaccttacgggccggtctgtcgctgccacggggtgggggcgtcccggtggggagtcgaggggaaccgcaccaacacccaccagcggaagccctgcacaccttcccaccgcccgcggatctagccctccctctagctggggccgtttgaactttggaggcctcaaatgcaaacccacccaagccaccaattgacagattttgacttgcctttaaacccacttggaaaatgctccgacacgattttcccccacgaaagcaatttttaaggtgatttcatattgggcgtgctgaaacagacacactagtaacttaggcctcgtttaaatcattaacttatacagcttcgtaatcccctttaaatgatctttaaatgaatgtaaaactgggtagcgtgccaatagaat

SEQ ID NO: 3996 - DNA, 1173 bp, Artificial sequence
  DNA replication origin
gccagcggtgcccggcaggggctcgaaagggcccgggccgccccacagtcccgcccgcactgcttccgtccggggacgctccccagggccgtccgagcggactacgcgcgggtccccgtggctggggggcgagcgtgcggccggcgtctgcgcctctcccggaggcgaggcgggggtcgggttgggaccagagcgcgcttccctccccgccgcgcagaggtcggccggggccgcggctggcgacaggtggcggggacctgggggccaggtccgcgggtagcctgcgacggggaagacgcccctacggccctcagggcttcctccgggtatgatgatcaaccacacgaccgccccgcgctggccccggcagagcccagtccccggcgcgggtccgcagggcgatccgggcggccgcggctccacggcccccgccctcctccagcgccagcgcccgcggggagcgatcgggggtcagggcggggagacgcgcggactcctcggtggcgccgcccgaacacctgttccgccccaggtgagctgctgccccgcccggatcccttcctcccccggttcgcgtccacctgggacccgccttccagagcctcccagcccacctcgcgccccgggactgaaaacgcagaccagtcttgagcacgtggccacccgcggtctttggctgggaaaggcttctgcccgctgcctcttccttccagtccagggcggcagtcaaggctgagggcgatcgaaaagtccgggaaaatgcgcccggcccagccccgtctccggaggcccggaggtgggtggggtgtggcgggggggctacaggtgtggacgcaggcgaagccaaggaggcctcaggagcccggggccaggtgacagcttagttccctgtgcaaacagtaaccctcgggtgtttctgccttcccttaaacctgaaatcatgttctgaattctgtacagcctcttttcttctcctgattaactttcatttactccagagaagcgtcttaacgcccactcagacaggtagtgcttccacactcccagactcaactcattcttggctttaaactcagccctgaggcacagaaccaagctttctcttaaggactcgaggcacttctgtgctcaaagcctccccagtccctgtcaactcagccctctgccttacca

SEQ ID NO: 3997 - DNA, 918 bp, Artificial sequence
  DNA replication origin
atacccggaggaagccctgagggccgtaggggcgtcttccccgtcgcaggctacccgcggacctggcccccaggtccccgccacctgtcgccagccgcggccccggccgacctctgcgcggcggggagggaagcgcgctctggtcccaacccgacccccgcctcgcctccgggagaggcgcagacgccggccgcacgctcgccccccagccacggggacccgcgcgtagtccgctcggacggccctggggagcgtccccggacggaagcagtgcgggcgggactgtggggcggcccgggccctttcgagcccctgccgggcaccgctggcgacgttggccccgggacccctggagccgcagccgaggcgcagcagcccctctcggaggcgacttcccgcggcgccagccgcgctgcccgactccggccgtggagcccgggcgccacctgctggccgacacgaggacggcggctctcgcgcggggcctggtgggcctggggcccgggcactgggaacccgaggagcaatccgtggggtggaggaggtcccgggagaaaacgccagggagtgcggcctttccaaatgagtgctgctccagcatgtgtacagccgtttccacgtgtggatctcatgtaatctttgctactgcatagcatagacaggatccccttttgcaaattagtagttgctgccaacctctatgctaggtgctgtcccagagatttttaaaaagatcagacaggatcctagtctcaaagagactatgcttggattgtggggataaatgaattgtgaagtcacatgaaagccagaatgctttcccttctctttcctggatgttttgttaaattttgttttaatttttctgaactgcttaataactattaaccaagaacgccagtgttagttaaagcagtg

SEQ ID NO: 3998 - DNA, 1198 bp, Artificial sequence
  DNA replication origin
ggtattcggatagtcccggttgggagctctgaggcctttaaacagatcactgggatgaaagtggctacagtcaggtgatgggctgattaactgaccatttaatcagggggaagatgacttccaacttccggttttggtggttagggttggagccaggtctctgaaactagtgacgcaggagcaagggtgggtgggaggggtatgggtgagtccagtggggacagaactctgcaaccccaacaattcatgggaggtggaatctgagaaggagctgccagaagaatgggatagaagcccaggagaagaaatatttccaggagggggccgggcgcggtggctcacgcctgtaatcccagcactttgggaggctgaggcgggcggatcatgaggtcaggagatcgagaccatcctggctaacacgatgaaaccccgtctctactaaatatacaaaaaattaaccgaccgcggtggcgggcgcctgtagtcccagctactcgggaggctgaggcaggagaatggcgtgaatccgggaggtagagcttgcagtgagttgagatcgcaccactgcactccagcctgggcaacagaacgagactctgtctccaaaaaaaaaaaaaagaaatatttccaggagggagtgctaaactgtgctaccaagagagggagggaagaggatgagggaggacagaaggaggactaggggaagtggtgggaggattggagaggcttgggtggctggaggaagacgggaggacagagggggggatgggaggaagaggggtgtggggagagttgggggaggatgtgggggcagagggtggaggaagcagtgagaggataagaggaggatggaggggattgagggaaacagctggaggctgaggaaagatggggttggggggtggtgggaagggtagtggatgctgggggaggcagccttctatttccataggacaaatttgatactcttctaatcccttcagtggccttctatttccctagaacaaattcccaaatggtacttaacactcaaggcccttcagaggctgacccctgctccatctactgccccctcccatgctgccaccccagccccaaggctggcaaatattgacagttcctggaactttgggccaccctccttctcatctctattcttttccaaagtgttgttccccgacctggacattcttcctag

SEQ ID NO: 3999 - DNA, 1070 bp, Artificial sequence
  DNA replication origin
tcgtcgcccggcacagcgcgagcgggcgagcggcgcgggcggccggagcgccgaggcccggccatggccaccaccagcaccacgggctccaccctgctgcagcccctcagcaacgccgtgcagctgcccatcgaccaggtaccccgaggcgccctggcgccgggcgtcgcgccctcgccgcccctccccgccgcggtgccacccgaccgggggcccgggaggagggtgggggctggggccgggcgcccggtgcccccctacccgccgctccctggaagggagggggcaacaagccggttattgtcccagagccccctccctcctgggtgcgcccccagcccgccatccccgggccgagcgggaggtgggccgggcgttgttgccggcgacagcccccggggagggtggtcgtatgggcgtgcgggtgtgcatgcggtccctgcccttcgcggcagcggcgctcggatccggtggtcgggtcccggagcagcccccggtgcgcatggaccgggttgtggaaagggtgcggaaggctgcgctttggggagcctggcgtggtgctgcctgccccgcgcgcgcctctgagcgacccccggagaggctgatgcatgggtctgggtgtgctgggtgccttagagacggcgtcgatgggtgctaggggcccggagaggcttaagcgctactgcactttggggacagtttgcgttggattgtggcttaagagagacagaggcaacagtttgtgggaaggcagacaggttatgaagaaaagtcggagttaatcccaggattcttgctgacaaagtggcaaccttgtagattgatgcagccactttacctccttgcccagccctcagaaaagctcttgacagtgtctagggaagggtggtatttaaatgaggccaatcgagtttgatggtttaaagggcctaacgattactgagaaataaacagcattgtgatgggaaaagcagcgccatttttactgagaaaagaaagtttggaagtattttgttgtgacagtgagatttagggaagttgttaatgaggcgggggctggggggcggggg

SEQ ID NO: 4000 - DNA, 1111 bp, Artificial sequence
  DNA replication origin
ccggccgcccgcgccgctcgcccgctcgcgctgtgccgggcgacgacgaggatggggatgcagcggcgcgcccgcccctgggccgcccgcggtcggagctctgcgcggggaaggccggggaggggccgggggcggtgcccggctcgcacctccccctccgccgccacctcctcccgcgcccgccgcccccgaccgccctgcacaggcgcggcccgtcctgccgtcgcccccgtcgtccccgccccggcgccccagccgcatcccccgcccccgacttccagcagcttccagcggccccctccccacctcgcgcgctctcgctccagacagctgcgcgacccaatcgcggcgcgacgccctgacgcccgcagccaatcagagagcgccggccgcgccacgcccctcccccgtgccgaggacccgggcgagggcgccgaggcgcggcccgggccgtcgccggagaacggctggccagcgtcgtggggcgcgctcctcgggtgagagcatggaagagcgtctttgcccctcactcctcggtttctcctccctggaatgtcgcggccccccacccctctctgggagagacggcagacaacaaaggggcccggggtggcggccggagggacgatgtgagggacgccgccgagccagcgccaggggaagttggggacgaaggtgggggctgggaggacgacaaaccaaaacagcgacctggctgagaagcccctttgtctgggagagtgccgggtgaaagcccaaagctgagagcagccccggggtctgacgctttcgtcaccctgcagccgcacccgggcctttgggtggtgagagctgggcctgggttcgacgcccgcgggcgcagggagaccggctcccctttgctgtgtgaaagtttagttctttgtagccagccgccctcgttgaaggccccaccttcttcctgagaaagtttctaagcatcccttcaccccttgagcgcaggcacccccagactgttgaagtccgccaggtttacataccctggcgggtcacgtgtatatataatccccccaacttcgtaaaagtaagccatttgagttcctttaaaatgcaaacgtcaacttctgttcag

SEQ ID NO: 4001 - DNA, 2178 bp, Artificial sequence
  DNA replication origin
aagtgctgagaattacagagcatgggttccggtgcaggcttcattcttcctccttctttacttctctcctactttctttcaagtttaaagttttaacgatttctaaagtcaacaaaggacaaacacgctcagagctggaaggaacctcatagtcattcatccttttatctggcaaacactggctgagctaggtcttgtggggccccagtctagaaaggctaggtccagtccgaatctattgagggaaatggacatcgagacagaaggagagtaaggggatagagattcctccagggattagggctggggccctggggcttcactcaccccaaccaaccaggggggccaagaagtgtgccctgaggaggtggggcccgggccaggctggaggctgagcctcggggtctgggtgttgggtggagtgagctagcacaggaaaactcctccatcccccagggacacagccccaggccaggcagggagatgagaaagggccagtggggcgggtgagcttaggagcagtcactggagctcttccctctagggaggcggggcgggaagatgatgcagggaggatgggaaggatgcagggaggatgggaaggatgcagggaggatgggaaggatgcagggaggatgggaaggatgcagggaggatgggaaagatgcagggaggatgggaagatgatgcagggaggatgggaaggccatgtgggcctctcatcttgcacagaagctcacggttctcctgggtagggggaggggagtggcgtggcttacgcctgggctgtaggaagaacattctggctacagaggggagggtaagtttgaggaaaatatggagaaatggacatgatttgaaccataatagctacagatgttaaggcccaaactagggtaacagtaagaatgaagagaataattgtttaggaagtaaaatcagcaggacttggggatagattcagtaatgtggaggggggtagaaagcaagagtgaatcccacacgggataggatgctgggggggccttctgagtaaggaaatgggagaaagttgcaaatttgggggaaagatgattatttctatttttgacattcaagtttcagggtgactgcaggccacgaggtggtgacctccaaaagggagctggatcttagaggggacgtctcatcctgagatgcatcctgggagccatcagcaaatgtgtggaggttcagtcagttgacgtttgaattatcccaggagagtgaggaggggaaggagagagggccaaagacagacccttccctaaggagggggcaaatgaaagaagtgggagacttagaagacagtctaagatgtgggaggaaagcaagagagaccacggaacctcgtgcaatcgcccgttacccagagagctgcacgcagccgtgacaggaggaaagaggactgcaagcaggactgtttcagggagtggggcgtggcggggtggagcacagttcagattgcaggcaactgagtcacaaataagagaagctggaggtgtagaccagagcgtagacttttaagaggttcgaacaaaaagcggaggaaagatgatggggtgatgactctggagggttaaggttggtcaagagctgagccacctgaagagcagggcctggagctggaggggaaggccggtgagacaggatccggggagaggctcagtcagggctgactcaggcggctgggagctgagcccgggtgggctggctgttgacacattgcaggctcggaggggtggggggtactcgatgactcagcgttctcagctgatccggagggagagcggcagagatgagggtgcgtgtgtggagggtgagatggctccaggcatgagtgggagaagctgagccaggaaaaagaccaggcagtggcgtgggcactgccactcacctccctgggctgcagtcctcacagctgcgtgatgggtagagaggcagagaagggagatggtagtgtggttggtgcaaacctctgtcctcaaactcttatgagcaaggaataacaatcacacagataaaagtgcagcacctactcttctaccaggacttattctcaatattttgcataatacccacttaagctacacaggctggtgctagtagtataccactttgtggatgagaaaatggcacagggagattcagaagcttgcc

SEQ ID NO: 4002 - DNA, 971 bp, Artificial sequence
  DNA replication origin
tccaggaaaatagatgcatgaaacggttttaatccatactttggagaactgcgcagcaatgagaattaaatgagttgtgcaaagagcaaaaggaatgtgtcttaaactaaacagtgtttagagaaaatggtcaaaaaaatgtaatatataaaacaacaccatttataggcattaaaacacacacaaaaacttggcaacacgtatttcacaagacccagatgaaagatacatgttaacacaggtagcattattgcctttgggaagaagggaaatgggagtggtcggcagaaatgaaagagataacattgattattaaaaagatggggtcttgcatggggcactgacggcgttgaggaatatgaggaactcagcctcatgcacctgaagtataaagaaaaacatgaaaaagcatggcgtgtttgggagccttttgtgccagttgcccaaacgcagggtgggtaggaaggtgtacggtgaggctgcaggggaaggcgggggtcagatcctgcaggctgtgggtggcaggtcaccaggggccactgacattcttacattgttgaatgatgccatcagatgtggaggatggatgggagccaggagaccagttacagatccaggtcaggggttggctagctttctctggcaagggccagagagccaatatttggcctaagacagtggcctgtgggtcttggtgcagagtattgggtctgggtggtggcaattggaaaaggagagatggggccaggtatgaatgccgccgggggatggaattggccagacttgggggatggggagggggtggtgattcccaggttttggggaactaggatggtgagtggttcaaccaggtgtcaaccaggacaggaaatccagggggagaaggtgggtttgagggtgagggttcatttctagacttgttgaatatgaacacttgtggggcgtctgagagacgttcagtgatgagcatc

SEQ ID NO: 4003 - DNA, 1074 bp, Artificial sequence
  DNA replication origin
tacccgccacccagccgcgggccccgacgcctcccgcggagaggggcgggtccgggccgggggcggcggccggccgggcgtggggcggggcggcgggaggaccgggccgccaatcggcgcgctcgccgctgccgcgccgccgggaagcggatcccgcaggaaggaaggcggcgcgcgccccggcccgccgagccgttcctggccgccgcgcgccgcattgtctcggcgttccgggccccgcgcgccgcgcccatgccccgcccccagccggcccgaggccccgactccgacccgctgcccgcgagggtgcgtgtggaggtgcgccccgccggagtccggccttgtgcgcgccaaccgccccccgcccacggcgcggagcacctctgggctccccacttgaacggcgggccgcgccggcccatgaggaaagcggggtgcggagctcgccccctgccggaggatgcgctccgccggcgggcaccctgcggggaccacagccggacgccagaagtgacctgaccgtgaatgtgcgctttgcgtgcagtcattgcatcgtcgcaggcctaggagacagatgaagagatgggtgcttattttatataggggacacagtgtgcccaagagcacaagataaacggccgggtggggattcaaacccatgttccctgactcaagtgtgagtgcttcagagcggtgaggggcccctactaaaagtcccagtcgcgtttcctaggctgcccaatgataggtattctcggttatagttttagggtactaggccaggacccaccctgggaaggctgctgaacgccctgaagtggtattcccgcaggcagaggagggaaccgagggggtgcaggaggaggaggagggggagaacgtgctacagcagccagccaacctcacacaaaaccgggccagtaaagggttcgaactggtaccgatttttatttacagctcttaaggaaattctcggttatactgaaaaatccagaagctctgaagataccagtcaaataaaatcacaccctataactctacaccagacttgtggcatggtttctgtagctgcca

SEQ ID NO: 4004 - DNA, 944 bp, Artificial sequence
  DNA replication origin
tggccaccttgggcctctttaagacctcccctctctcggcctcgtggccctcgcggggttccgcggcctggtcttttccccgcagcgcggccaactttgtccagagtcggggtccgcggcgagcgggggatcccgctgcccgccgccgcccgccgccgcccggggtctttggtacccggtgcggaccttatcaacttgttcttgaagtggaccggcgggggcagctccgcgctccgagctccccgccgcagcccccgagcgccgcagggcccccaccctcgggtccgcgggtccggggcatcccgggctgcccgggaaggcgtgcccgcctcagccagggcggcctggctgcgctccacccgtgcccggagaaggaactgcgggcaaggtgtgtgagagtcggcgcttctgggtccaagaagcctccaggagccgctccccggttacctgggtctcacctgcttgaacccggaatgccgcccttccccctcaacctggaaaaggcctggttttagtaaagtgctctcaaggtgcaaagtcatcacgcctagctgctaagcagtacgctctccaggtcctggggagaggaacacgtaggaacgaagaagcttggttgaaaattaaagccgtggggaaaggggcagagtctgtgagtccaggggccaccgttggctgtggtttgaggcacatcctcacctgcagtcctccttttccttacccatcaaacgggattagtaatgcatcctttccaggatcagagactgtgtgaagtgcttagcactctgctcggctcagaataggtttacaagtcacacgtgtggcaatagtgaatctgtgattaaatgtctctgggccaggatgtcaggttacagttttaaaattgggtattgcaggtgttttagcagaagacgcctgggctagcaggagtgtgtgtgtgggtgggg

SEQ ID NO: 4005 - DNA, 2934 bp, Artificial sequence
  DNA replication origin
ctgggcacctgctgggtgctatccatgcgctggtgctgtatggggcggtgacctctggcaactcctgcctgggcaggggacacagatgcttttattagaagacatgtgccgggacagccactggcagcctgcggagccctgagggtacagcattggaagcagggagcagtgactccccgccctgagccctgggtccctgcttccctggatccctgagggtggaggggcactgcagtatggcacttgtccatctgcacacaagcctgcttgcaaggtttagaaatcagtttcttcacaattgtcaaatgtgtgtaggacatgctgtttctgtttgaaagtattaatgaacctaaaacagggtttgtttttgtttttgtcattgtgtgttttcttaattgctggctattaaagggacaactgccacgatgtaggtgacctcaaacttagaaaaaaattgtttgccaaatctacaaggtactgtgtggaatggctctagtggggatgtagatagggggtggaagggctgtagggggtgtagatatgcggtggaggggctgtagggggggtgtagatacaggtgggagggctgtagggggatgtacataggtgggagggctgcagttgtgggggtgtagatacagggtggagaggctgtagtcttgggagtatagatattggtggagaggctggagtagtggagtatagatattggtggaggggttgtagtattgaggtatagatattggtggagggggtgtaatagtggggtatagatattggtggaggggctggactagtggggtataggtattggtggagggggttgtaatagtggggtatagatattggtggaggggctggagtagtgaggtatagatattggtggaggggctggacgagtggggtgtagatattggtggaggaggttgtaatagtggggtatagatattggtggacaggctggagtagtggggtgtagatgttagtggagaggctggagtagtgaggtatagatattggcggagggggttgtaatagtggggtatagatattggtggacaagctggagtagtggggtaaagatattggtggaggggctagtgtagtgaggtatagatattggtggaggggccgtaatagtggggtatagatactggtgaggggctgtaatagtggggtacagatattggtggagggggttgtaatagtggggtatagatattggtggaggggctggagtagtgaggtatagatattggagggtctggagtagtgaggtatagatattggttgacaggctgcagtagtggggtatacatattggtggaggggctgtaatagtggggtatagatgttggtgtagaggctgtagtagtggggtatagatgttggtggaggggctgtagtagtggggtatagatattggaggggctggagcagtgaggtatagatattggtggaggggctgtaatagtggggtatagatattggtggagaggctgtagtagtggggtatagatattggtgtagaggctgtagtagtggggtatagatattggtggagaggctgtagtagtggggtatagatattggtggaggggctgtaatagtggggtacagatattggtggaggggctgtagtagtgaggtatagatattggagggtctggagtagtgaggtatagatattggtggacaggctggagtagtggggtatacatattggtggaggggctgtaatagtggggtatagatattggtggagaggctgtagtagtggggtatagatattggtggagaggctgtagtagtggggtatagatattggtggaggggctgtagtagtgaggtatagatattggaggggctggagtagtgacgtatagatattggtggaggggctgtaatagtggggtatagatattggtgtagaggctgtagtagtggggtatagatattggttgacaggctggagtagtggggtatagatattggtggaggggctgtaatagtggggtacagatattggtggaggggctgtagtagtggggtatagatattggtgtagaggctgtagtagtggggtggtagatatgggatggaggggctgtgggagagtatcgatatgaggtagagaggctgtagggggtggggttatgggggtaggggctgtgaggggtgtatatattggtggaggggctggcgtagtgggggtgtagacatggggtggaggggctctaggggtgtagagagggagtggaagcgctgcaggagggtgtatataccacgtggagagttgtagtactgggggtggagatatggcctggtggggctgtaggggatagagataccgggtgggagggctgtagtagtgggggttgtgagtgaaggaggtcggggagccacatccgcagcagggatgcagaagagcagccgtgtcggcttgggtgcctgcgaggggcctcagggacgtttcccagactttcttaaaggcagaagagcggctgctgcaggtggaggcatagggaccacaggtgttcactgttctaagaagggttgataacggaagaggaaagcaggtgggaagggttcctagggtgagaggggcttgagcctgtttctgggccccagggaaggagctggaagctcaaggttgatgagaaggaaaatggggggctgtgagctgtggagatcctgtgcccctttgtcctcgggttgatgagcccagccaggagtcaagcctctgctcctggctcgctgagggaattgtcagcgaattgatagaaattcagcatgtgcttgtttgcattcctccttctttgggaactttcagccgtttggtaatcattgcttaaaatctgaagcctggcaccccatatcagtgcccatatactccaggttccagcttagaaggcatgtgggcagggtttgtac

SEQ ID NO: 4006 - DNA, 1582 bp, Artificial sequence
  DNA replication origin
acaaaaggagattcttattcagcttccttgtgaatctaaagtaaggacagcaaggacattagagagaacatttgataatgattcacctccacctaaaacctggccggtgcatgtactgtgccttattcagtcatacattctttgtaacaatttcatcttacaaatgaatagagggctaatgaaaagtctaggtctgtatatatttcacagtaacaatcttatattgttatgctagaaagtttgtaaagagacaatcattgcagtgaagaaaaaatatttcaaaacattcaatgacagaattacgtcgaaagcctagaataaaaggaaacccccacttctgactctcaatcacggctccacccataagctggactgtactggggttggtgctctgggccccaggccccagtctccacagcaagctccaagcaggggaaacaaaggcagagtcttctgtctgctgcaaaggcacacgagcgaatgctgggtgcgaatgagaaaagacgtgtgtgtgttggggacggagagtgtgtgtcaatgagtgtgtacgactgagtgagggtgttgtgggtgtgtaaaggtgtgactgtgcttgagtataagagtgaatgcacatgagggtgtatgtgagtgaatgtgggtatgagtgatcgtgtaggtgtgtgagggagcatgttaagggactaagggtgtgattgtgtgagtgtgtgaatgcgattgtgtatgggtgtgtgagggtgtgattgtgtacggatgtgagtgtgagtgtggatgtgagtgtgaatgtgattgtgtatgggtgtgtgtgggcgtgtgagggtttcaggatgtgattatggatgtgagtgattgtgtaagtgtgtaaatgtgtgtatgggtgtgtgtgggtgtgattgtggatgtgagtgcgtgaatgtgattgtgtacgggtgtgtgggtgtgtgagagtgtgattgtggatgtgagagattgtgtggatttgagtgtggggtgtgattgtgggggtgtaagtgggtgtgtaagggtgtaagtgactgagtataaggtgaatgcacatgtgtgtgtgagaatgtgagtatgtgtaggtgtgtgagggagcatgtgtgtgtttgagggtgtgtgtgtggatgtgagttgggggtgaatgtgaatgattgtgtgagggtgtgtgtgagtgaagatatgattgtgtgagtggatgtggggggctgtgattgtgagggtgtgagggtgtggatatgagtgtgtgtgatgcacggggtgtgtatgagtgtggttgtgtgattgtgtgagtgtggatgtgagtgggtgtgattgcgtggggtgtgtgttgagtgtggtgagagtgtggatgtgagtgggtgtgattgggatgtgtgttgtgtggttgtgattgcgtggggtatgagtgtggttgagtgtgtgtgtggatgtgattttgtgtggttgtgtggagtgtggatgtgagtgattgggaatgattgcatgttgtgtgagtgtggttgtgagagtgtatgagagtggacatgagagggtgtgacggggggtgtgtgggagggtgtgagagtgagggtgtgattgt

SEQ ID NO: 4007 - DNA, 1704 bp, Artificial sequence
  DNA replication origin
agacagtgtccaaactcctcgcactcgacaaagaagttcccctaaatcctgtgagttcccagctgaactgtctgctctgagctcagttgcggagctgtgccacttgcgtctactgtgtggtgggctcagcctggggctttctgtccacgccccattcaagccggttcatccaccgccctcactgtctgcagctgccgcttagtgggtgctcacaagatcacctgcaccagactgtgtgtgtgtgacctccctgtcacagatgatcccactaatgcttaaagataaaagcaacctgccccaagccaccagcccctgagtggccaagtctgaattcttaggtggccggcactcatcttgctcccacaccctgctggacgcctgggcggccacagcttgtttcaggaccagactcaggcctggggctctgcgctctaggtcagctctctccagacacccgattccactaatccagcaatggggggtgatgacctagaaactcaagacctcaaaatgaaggagtgtcatttcaggccctcatgagtgctgtggaaactgcaccctaacaggggaggaagccaccctggggaataatcaggcctgctcagaagggggtgtccatggaggaagcagctcctgaggatgctaaggggcggaggcaccaggaactacatctggactgctcaggctgagaaaacctcacctgcaagcccgtctctccagccaggtgggcagggacgtggctcagcccccaggaacctcccaggcccacccttgactcacccaccactcctggtcctcctccccgtccacgatgatcacatccccctcggagaaggtgagctcatcggggttgtcagccacacagttatagagcgctttcacccgcttaggcttcaacttggtctgggtcaggagagggaacaacggttagtgtggctgcaggcctcagctctcagggcagagagctcaagcaccctgccttccccggtctcaggagtcccgtacctaggcctgagaagcctgcagatgccaaggtggggcaggtcagtgcagctcaggagccagggagagaaaagggaagagctccccaccaagcagagagaaggggccaagggctgggaaacgaagcggccggggcagggtactctgagtgggcccattgtggagctgcggcaggagggccaaacccaccagctgcccagatccaagcagtcaggtaccaagaagagccccgccctgccccagccaggggaagaggggaagacttgcttcccctgagcccttgtgaaaccacctgcacccccctggctagagcagagaggcaggaaagggggctcgtcacttactgcctgcgacttcctaggcatgggtgcagggggctgcaggaccatagcattggacagaggacccagagcttccgttgcagagagatccactgtagggcaaaaatgaagcagcttaagacatcccatcaatcacagccatgagatgtaaacaatgtacaagccacagggtgtgtctgaaagcaggtttccccaggtgttccgatctgttgaggggaaagggaaccttctgacttggatgcagaccttggagagcttgtgtggcagcgagtgtcccccagtgagcctgccatgtcagcaggaggggacaggtgaggggccccaggactgagctgctcaggagcaggggtctcagaggccg

SEQ ID NO: 4008 - DNA, 1531 bp, Artificial sequence
  DNA replication origin
ggcttcccaccacttggggtcttggaaccgggggtaggacgtcaggactgcgcctgcgcatagtcttggaggcgcggcccggcggacgtgggcaggagggctggaaaagccggcgctggagcgggaacgggagtagctgcctgggcgccaaaggccgcggcactcccacgcggaccccgaagtccgcaacccggggatgggcccgcggctgcgaggtgagcgcccagccctcgtcccgcttggggccgagctcgcggaggcctgacgggaacacggtcccgagagcggcgcggacggccaggaaggatgggtggggccgcggggcgggcggaggagggatgcctgggctcgggcttggttccgggcggggccgcgctcccggggcgcgggtggaggagcttggaaccacgcagatcgggcgtgggcttgcggactgcagcttcccgagccgctgtcgccccggaggggcggcaaggcgggcggccgcgggccgtttccttgcctcttcctctgccccgcttcggccgcctcccgcctctcagggtcggggttgtctgtccccttcgctgtcacatcctccgcacccagcgcttggaaggtgctccatcacggtgacagacaggtgccaagcaggctggcgtctgggaggaacttcggagccggctctccctaggccccgagcttggccgcatccgtccttactctggtgaccctgggcaggtcactgactcttcgggcgctttggcatcctcgtttgaaaggggctgttatcctgcagccttgctggtcggtgagggtgagggtgagagggatctgtgcacctagcaccgtgcatggcacgtggtaggcgtttggtacatgggaatcgctgttggggtgtcacctccccagaaagttctcggcttcagtaagcgcgtcccctgccaggcgccctggcaatgcagaggagtcaccgagctccgcctttgaccagcgtgcagctgggagagtgagatcagagaccacagcagatcgtggcgctgtgatcagggggtacactcaagctgtgggtcccttaccccagccttgagatcccaggaaggcctgcagcctgaaacgggccttgaaaggtaagaagtagccaagtgcctgacaggtgaaggacgtcccgggcggtgcaaagcaggggcgcgtggagcatcgcgctgagaaccaggagcagctttgccttgctgagatcaatgaactgtgcccgggttgtggaggatggaagtggaaaggtgattaggagctgggtcctggaggacctggcgtgtcgtgctgaagaacgttgactttggtctctgactttggagaaccagtgaaagattttcagcaggctagtggcattagattcatgtttgaaagaaatcattttaatcgttttggctgcagtgtgggggtagatttaaagtgttagggaatccagtaggacaaggtcccttatccacgaaatatccttgggtttgtgaattccttaaattcatgccaaactttgtatggatgtgcattt

SEQ ID NO: 4009 - DNA, 1183 bp, Artificial sequence
  DNA replication origin
ccgctccagcgccggcttttccagccctcctgcccacgtccgccgggccgcgcctccaagactatgcgcaggcgcagtcctgacgtcctacccccggttccaagaccccaagtggtgggaagcctcgcgagcggcgtcccccgaccggaagtcgaggggaggagtctagtgccgcgggctccggagtgacggaagttgtgctcttggtgaatggggttcttccttttttatttaccggtggctgtgcttccaatttaggaagaccccggcgacctgttcctcacccccgcttcgccctcacactttcgggatgtctgcgattcctgctgaggagagcgaccagctgctgatccgacccctgtaagggaccagcgagagagggaatgaagccacgggctgtgaggggcgcgaggggtaaccggagactggcctcctccgtcgcccgcgctcccacctaccccggcagcctgcctttggtccgcgcttgcgggccaggcttctcaggctcgaggggttggaggaccgttgatcggaaggggcctgctatagagtgaacgggattttgctttttcatcagtttcaggggagggtatgttggagtcggaaaaaaaaaagttttacggggccaccgctcgctttcgtacacgctaagaagcgttttcacttagcacaagcacggatctctgcgcgtcagggcaagctgtgagggagccggtgaagcttatgaccgacaggatgagaggaggacctgaatgaggctacagccgtgcagggaagaattaagtctgtttcttaacaccagggcttcacatgtgccagaagttagaaaatattagggacttgccgtgagtttcgatcttctcagctcaggccctagtagaataaggaaggtgtaaagctggagaagagaaagtgcagaggtgttagggacaaaaactcagccctcgactgtccataaggagagtggcctttcagtggacacgatcctcatcagtcgggaatgctgctgaaggggagatgcaaatgtagagaacttgaattcctacagatgagcatttcgaacccacaacatgtttattgttagatactagttggcacaacatgaatatacgctttccaaaaggtagaaagtatctcctttacacaatcattcagtaaggcttcattgagcacctgcttggga

SEQ ID NO: 4010 - DNA, 1693 bp, Artificial sequence
  DNA replication origin
tctccacgggcgtggccaggcctccggcccagccgtctcgggcgccgaagaggacggcgaggagcctcggcctgctcggcagcgaccccgcagggaggccggggcgggaggccgagcgtcggggcggccgtacctgggtgatggagtccccgaagagcaacaagcgaggccagagcagggcactcccgcagcccgcggcctcgcacagcgccatggagcagccgggcggggcggggcggggccgccagccacgagaggcgcctgcgcagtggccgcccgtgggttgcgggagccgggctcgtgggcacccacgcagtcactttggtgacgcgcgaaggtcgttgccccttggagtccgtttgcaagaagctcggcctccgcgcttgctcacccacagcaaggctgcccccagggagtccggagcccgcgtcccgctgcgtggttcccggaagaaaagcggttgggggcccttctaagcccaccccgcgctccgcgggcgcaggtgcgttcggcaaagggcaggagtgtgacctcaggacgcgcggcgggaagcacagctggctctcggtggggcggagggctgctccaggcccccctggaagaggtcgtgggatgcgcgcgcggcctcctgcgcccagcgtcactctggagggcctgtaacacccacgaggacgcaggcactgcggaaaccctggcagtacctcgtggttctgcgaatgacaagggaaagcagctgcaccttcagtgcgcgcgcagccggccgcttttctttttcccgccgtggggtggatgcgcagatgcagaaccccgcggacacggagcactgactaacttccaagggattcacctgttaaaacgtggttgtaatgcaacgttcttacctcaactgtgcaatgaagttcggcagccgagctaaaaacgaacgggtgggaaggatgccttgaaatcacggagctgtagatgagtaacagaagggccaggggcgccggcgcagaggccgaccccgctccctggggcggggcgatgggcgtagagcatgactttctttaggttgctcgtcccaagctcgcttggatcacctgggggagctttacaactaagatccaacctagggccctcattccagccggactaactcacctcctggtggcaggacttgggcacaggtgcacttgtgatgcaccccacgtgattcccacgggtagcccagattgagagcccctgctagagcaagcaaaggtgcctggacttcatctttatcacaaggacttcattaaggccttcaagcagcagaggcttgaggccaggtctgttccaggaatcagctataggggaggagatggaggtggttgcaggaattcagaggggagagtagacttggactcgaacagcagcagtggagatgaagacagaaaagattcaagtgcaacttagaatccttattattaactcaaattggttaccccagaggagagggtaaccagcagcggttgctatcggcagatcttgatggtttcaatgggagctgcacatacatgcctggaagaagaatccaaaattctaaaataatgggcagttgatctagtagttagttctagaataatggacaaattaattagcaatttagcagtattcaggctgttgaaataaaggccatttgacattaaaagtaaacaggctcccccagagaaac

SEQ ID NO: 4011 - DNA, 1706 bp, Artificial sequence
  DNA replication origin
ctccatggcgctgtgcgaggccgcgggctgcgggagtgccctgctctggcctcgcttgttgctcttcggggactccatcacccaggtacggccgccccgacgctcggcctcccgccccggcctccctgcggggtcgctgccgagcaggccgaggctcctcgccgtcctcttcggcgcccgagacggctgggccggaggcctggccacgcccgtggagacaccggaggagtggcgggtcccccagtggctgcgccttccgggcccgcggcgtcccggaggtcacgacggcgtccgcgagagcccgggctccaggcacagacgcgaggggacccggccgcgctgcccgccccgcgccgcctcccacccgggtcgagatgcgcggtcttcccctcagcgccctcctgggcagcggcctttcccctccgggtccgggttagcggccgcgggcgaccgcgcgctgtgtcccaggaggccccgcggccagctccgggcagaggcgccaggagctctctcgccccattccctgcgggcacaggtggggccgttaggggttgaccttggaagtaaaacgccttcaggaattaggtagaaaaggaccatccgttcatccaagatcatctcacctcccatgaagggaacggtcttctaaatgcaggttcttacttcggggagggagtagaaattccattcctgtgtgtgtcctcttctcagacaggacttgcttcaccaggcttttgtgtatacgccagtaactggtaacattatgtttaggcatatggggcagtcagagctgccgaattccatgggaatgtgtatgaaaaagtgttcaccctcagctcggtaaccagcaaagcagtgaggcggtgtggccttcatttcctcactgacctttgactttatttcctgaacttagatttctgtttagcttttttttttttttctttttttctttttttgagacggagtctcgctctgtcgcccagactggagtgcagtagcgcgatctcggctcactgcaagctccgcctcccggattcaagcgtttctcctgcctcagcctcccgagtagctgggattatagacgtgcgccaccacaccgggctaatttttgtaattttagtagagacggggtttcgccatgttgaccaggctggtctcgaactcgagacctcatgtgatccgcccgccttggcctcccaaagtgctgggaatacaggctgtttagcttttgatagagaaaaatccccctctgctaaagtgctgccaggtgtacttacctgtaatccccaaaatgacctcctggagtgaagcaatcaaagccaagaagggagcgccgagaaaacagaagttgccaatcagaactgccctcgctgagatgcccggttacagtcattagtagtaataatgggcttttcttcctccagttttccttccagcagggtggatggggagcatcgctggctgacaggctggtcaggtgagaatggtttccgatacttgagttcttatggatggaaaatgtcttagggatccgtcttatggatgaaggatagttctgaacagaacattcctcctttattaattttgcttgcctcccctaatcagtatataggagaaggaacagaaaacatttactcttcactcagtctgaccaattagatattttagggttgagcactgatggctgggtagactcagacaaatca

SEQ ID NO: 4012 - DNA, 1171 bp, Artificial sequence
  DNA replication origin
ggcagagagcctgcggcatcgggccagtcgcgcctcctcgtccgccctgggcaggtcgctgggccccaggccgctttctacagctcctttaataaaatggacagcaggggtcctaaccagacgtgggcatcaagacaaaggaggcggccagacgcgcttgagggcctgctcgctagctcccgcccccccattccgcggtcacccggggacagaggccaggccggactgggtggagttgggactcatacgtctgcgtccaggaaggcgccgggcgagccccagctagacgtgacgggcggggccgaacacggcagcggaccagaggcccgcggcgcaccggcgtggggcggggcaagcggagcctcccgggatgccgcgcggcagccggcttccggctgtgggtggtgcgggggacagcggcggccggaagctggctgagccggcctttggtaacgccacctgcacttctgggggcgtcgagcctggcggtagaatcttcccagtaggcggcgcgggagggaaaagaggattgaggggctaggccgggcggatcccgtcctcccccgatgtgagcagttttccgaaaccccgtcaggcgaaggctgcccagagaggtggagtcggtagcggggccgggaacatgaggcagtctctcctattcctgaccagcgtggttcctttcgtgctggcgccgcgacctccggatgacccgggcttcggcccccaccagagactcggtaaagacccaggggagttggcttaggccggcgcctggagcgctcgtttgagggaagagcaggggagctgggtctatcaggtgtttgggggcggggtattggcgatggtggcgcgtccctaagttttcagtgtagaagggggtgtggctctcggagtttggggaaagaataaaggagatgggcctgtctctgagtgggaaagggctactggacgggctccatgtagtgactgagcgcctgagaggggtttgctccctagctttgtgttcggggagggtgttgggaaagcggtaaggagtagggtggctggatcttgtttggagagggagatgtggtcagggttcttgccttagtagggaacaaatctagtgttgtgtgttcctaccagagccagaaaggaagggcccaaagctccagaattcttcctggtcctc

SEQ ID NO: 4013 - DNA, 1197 bp, Artificial sequence
  DNA replication origin
gcgcctgggtcggcccgcgggcttcctccggccgcgctcggattgagggccgggcggaggtgccgcccttgagagcagccggttgtcgatgccgctcccctcagggacggctccgggcgggaaggtgcggggccaacggtcgcttccatcttgggccggccgggcgggggtggcgggagcggccgcggctcgggctccctgcgcgcggggcctccgcgccgcccccgcctcctccagccgcgggccgcggcctccccgggtgcccagcgggggagggggcgggggagagggaaattcaagcggccgcgtgtgcgggagacaaaagcgggcggcgggccgcattgtctgacggcgctccctctctgctttttgttctcgcctcgccgccccgcccctccgcagctctcgaggctcctcccgctgcgggtcggcgctcgccctcgctctcctcgccctccgccccggccccggccccgcgcccgccatggagaagactgagctgatccagaaggccaagctggccgagcaggccgagcgctacgacgacatggccacctgcatgaaggcagtgaccgagcagggcgccgagctgtccaacgaggagcgcaacctgctctccgtggcctacaagaacgtggtcgggggccgcaggtccgcctggagggtcatctctagcatcgagcagaagaccgacacctccgacaagaagttgcagctgattaaggactatcgggagaaagtggagtccgagctgagatccatctgcaccacggtgctggtgagtcctcggcgcggggagcaggggaggccttttgtgagatgcttttcattgagagtttcgcgggcacggaaacaaacgtgagccggggcttgccggactgtctgctggggtggagggttttaggtgagccctgacttccctactgtgtccctccggttgttgagactcaagaagccgcttttccaaggataagtccttttttttcgccccagatgctgggtagctaccaaacgatggaacttggaaacatccaagtaggtctctgcgagactgaaaggcgtttttaagtttcttgtgcggggagactgcgtcctgagatctgtgagccctttaaatgtattcagtcggttcacaagcttcaggcagttgaaagaaggcgcaggcacctttttgttacagacaatgtagtagggatt

SEQ ID NO: 4014 - DNA, 960 bp, Artificial sequence
  DNA replication origin
gtaagttagaaatggtttcaaaatgtatcatgagcagtgctgctggacgcattcttggacgtgtctcttggtgaacatgcaagggtgttcctaccgagtgcagatgtgggagtggaacagctggggcgtaggcacgcacaggttccacttgggaggtgcctgggcaaggctgccctgaaaggctggggtttgggtggaggcagtgagggggcagccagggagaggtctggacatccgcgtgctcgaggaagggcaaggttgccagtgtgcctgcaggaaatgaaggggagggggttcaagaggtgaggggttaaggtgactcaaggtgactctaggcttttggcctgagcttagtgcaggaaggaccttgtcagggtgagctcagtggtgcagctctagacgtggtgagtttgaaatgcctgttagacgcccaggtcgggctcttgaggacactgttggaaacatgagcctggcgttcagggaaggggctgggctggggtctctgagtgcagataaaaaaaaaataacagcacatgtacatgcaaatgggaagaatccactcggtgggggaaatgcaggatgcagtggggaggggagggactgggggctggtacgaatctgtgtcttgggaaggagcatggacagcccctctggaggaaggagagcgtcaggtgcagatgcgggcgagcgtgaagacatgcgagggggccaaggccaagtcacctaggggagctgaagggcattagggacatgcagggctgctgggcaactcaagggttcagtggttgggaagtcagctggaatttgagttcagtggtggttgctgtcgctggtaatggcaaggttaggttttgataatgggaatggagacgacagtggggttcattcattcaacaaatacagatgaagcatcttctattcatcacacctctgctagaccctgggttctaagtggggaac

SEQ ID NO: 4015 - DNA, 1171 bp, Artificial sequence
  DNA replication origin
ttcaagggtttccccccaatttgatctaggatttgtgtgcattctggcatctagactctcatgtttgtctttagaaataaatggtttcagctgggcacagtggctcacacctgtaatcccggcactttgagaagctgaggagggaggatcacctgagctcaggagttcgagatcaccctggtcaacatggtgaaaaaccccgtctctactaaaaatacaaaaatttgccgggcatggtggtgtgtgctgtagtcccagctacctgggaggctgaggcaggagaattgcttgaacctgggaggctattgcagtgagccgagatcgcaccgctgcactccagcctgggagacagagtgagactctgaaaaaaaagaagggaaggaaaggaaagggaaggggaggggaggggaggggaggggaggggaggggagggaagggaagggaagggaagggaagggaagggaagggaagggaagggaagggaagggaagggaagggaagggaagggaagggaagggaagggaaggtttctaaatcaggttggaagggtctgaggtaaaagccactaatcctaagattcacgagcaagagtgtatgcccgggggtggatgctggctggacgagcttctcctgaacagatatccaggtggctgcgcagcctgatctctgtgctcttctccagccagggcatggccttggagggccctgggagccccagggcagtaggaggagacttatctggagtttcaaggacactcacataaggaagactctcagagccaagtacctaacagaaggctgcctccatgaaaacaaagagggggtcagaataggttaccgtccaggcaaaacagaagaagatcttgggagccagggttgtaagtggaggattggagaggaaggggatcaaagaaggagccgctcagaagcaacgtgtcaggagtatcagagagtggccctgtacctacctgtatcaagagtgcgcactgctggccgtgagtgattccgtggcacgcagtgcatgggaggtccagccttgtttaaacggccgtggtcagaccagaaccgagattgtcatgcaagctggttccattagcagatccaaggtgccacagaactggaatggcggtaggattagccaatcctcagctggaaccaaaataggggacgg

SEQ ID NO: 4016 - DNA, 1397 bp, Artificial sequence
  DNA replication origin
tcctcatggaataggtgcttggtcagtagtagctgtgtgttcacaagtttctgggctgaacaactgtgtgcgccactgtatgtgcacagagatagtactaatgcaaatgtcccaaggagcttctcgagtggacatcactggactcctgcaccccatccccaaggggagcttctgcaggaggggaataagcagaaagcaggagaaggcattccaaagtgcctggtggggactgggggagtggaagtggggggcactaggaggagtggggagtaccagaggaagtggggggcactagggggagtgggaggtactagggggagtcaggggtactagagggaatgggggtactaggaggagtggggggcactgggggagtgggaggtactgggggagtagggggcactagaaggagtgggggttactaggacgagtgggggtactagagggagtagggggtactagggggagtgggggatagtgggggagccaggggtactagaggaagtgaggggttactgggggagtgaggagtactagagggagtagggcactagggggagtagggggtactagaggaagtggggggtactagggtgagtagggcactagggggagttgtgggacatttggacagaggccaaatgcacaaaacctattccagaaagagccaatacactggctcagctgaagaagagcctggggatggaagagcaaggagagacagtcccggaagtgcaggcaaggctgagaacgggccggcctcgaatgatgaagcgttaggattccgtcttacagggcagcaacaccaaaggtttctgagcagggcagcctcggcagtgtggctcaggggaagagctgctcaccatctgcattcatctgctcaggctgccataatacaacaccacaggctgggagcttaggcaacagaaatctatttccaaaccagtcctattggattaggtaactgaggtcacacttataaccgccattaacattagttacctccataaaggccctatctccaaatacagtcagtcctgggtaggatcttcaatgcgtgcatttgggagacaatttggtccacagcaccatcactctttgggatgagctctagaggtggatgtgggaaacagacaccgaataggaagctgctgtcttagcccaggtgcagaaagaaggagggggcttctgaaggcagaaggcagcagtagacacagaaaggaaggtgagcataagagctgctgagagggaggaatctcctcacacagttcaacacagtaactgctatgtgacccagcaattccactcccaagtatctacccaaaagaatgaaaattagggacccacacaggtacttgtacactcacgttcatagcagcattattgaccatagcaaa

SEQ ID NO: 4017 - DNA, 1045 bp, Artificial sequence
  DNA replication origin
tgccacatatgtgtctgagcagcgagttccagggaccttctcagtgatgccgatggcctctccaggcaaatagcgcaggcctggccggtatccagaaggaactccaggctgcctctccttcccggacgcacaccctcccctggggaaagaccccagacagagcccgcggggcctacaaatagcagagtccctggctctgagcacaggcaacggagaggggacgggaaacgggactcgggcgccaagtcactcccctgcctcgccctggcggaagggcaggcgtcacacctctaggaggaaggcagatgtgagagggctgagcccttccgggggctcagaggatcaaaggcactgacatcctaagagaattggaaaccagaaacagggccgggcgcggtagcgcacgcctgtaatcccagcactttgggaggccgaggcgggcggatcacgacagagcgagactccgtatcaaaaaaaaaaaaaagaaaaaacaaaatagaaaccggaaacaggatgagctgggtctgcagaagcggcgtgtgggacccattccccgcaagggctttgtggataggaacccagcacagacttccctcttatcaacaggaccgaggcatgagaacacgagggtcagcctgggctccctgaccgcagtctcctcagaagggagtctggacagcgagtcttgcctctgctgctcctctggggcctcctgatgcctggcagggagaggagccaccgtgtgagggtttctgaaattaaactgttctcagagtcgcagctgtcaggaagggacagcaagagccagctgacaggagcctgaatctttccaacgcaatccatctaggatgggaaaagaaagaccaatttccagccttgccagactcctagggatgggctgagcatgcagactctgtcactcaccagccgctgaccttggccaagcacctcattgtctctgagtcttggtttccttattcataaaacgataaaagtcctgatctcacaaggctgatgtgggagccagaaatagcgatgctgtgtg

SEQ ID NO: 4018 - DNA, 1153 bp, Artificial sequence
  DNA replication origin
atgacaacttgaaatataattggcatcgagaatttttgagactctctacagaggctgaacaaccaaaaaaacataaaaatttaactcctcctcagcttcactttggcacaatgccagaaggacctctattaagttgtgcacatttgtgcagccccccaccccccaacttcaaatacaaatgcccatcagggagctaaaaccttctgcattcgttggttggaggagtccccactagggtatgagtgttgagggtgtaggggcaggaaccacatgtgagtcgttgttgtatttgccacactatgtgacaggtgggtggatggatagatgggtggatgggtgggtgggtgggtgggtgggtgggtggatgggtgaatagatgggtggatgggtgggtggatgggtggatggatgggtggatggatgggtggatgggtgggtgaatggatgggtgggtgggtgggtagatggatggatggatgggtgggtggatggatgggtgggtgggtgggtggatggatgagtggatggatggtaggatggatggatgggtgggtggatggatgggtgggtggatgggtagatggatggatggatggatggatgggtgggtgggtgggtggatggatgagtggatgaatggatggatgggtgggtgggttgatggagagacaggagtgaaaaatacacaacagagggagaggaaaatcacagtctatccttgcttgtttccagcaaagaagaacgtagctcctgactggctgccacatatgtgtctgagcagcgagttccagggaccttctcagtgatgccgatggcctctccaggcaaatagcgcaggcctggccggtatccagaaggaactccaggctgcctctccttcccggacgcacaccctcccctggggaaagaccccagacagagcccgcggggcctacaaatagcagagtccctggctctgagcacaggcaacggagaggggacgggaaacgggactcgggcgccaagtcactcccctgcctcgccctggcggaagggcaggcgtcacacctctaggaggaaggcagatgtgagagggctgagcccttccgggggctcagaggatcaaaggcactgacatcctaagagaattggaaaccagaaacagggccgggcg

SEQ ID NO: 4019 - DNA, 1059 bp, Artificial sequence
  DNA replication origin
gaatgtgaaagaacagaggggaggttatctgccttgggccttcccttctcgtcctagtcatttgttgagcatttacatgcattgcccccatttaattctcgtagagcgtgggaagtagttttctattcctacttaacagaagaggaaatgttacaggaggtatttcaagacttactccaggtaaagctgtttgcaaatgacagagctagagcttggtggtcccaaagcctgtgtcatgctgttctcactgcctctgtgcccagcctatgtagggcagggagaagaacaccagggtggcattaggcaactcatgggtgtctggagaatcaaacaaggcaatatatacctgatgaaaggagcctcagaaattcaaagcaagtgattgctttcatctaggatggtccaagaagtctttcttgagctggatcataacagattcagacatggagaggtggagagaaagctgtggggctgatcgtggggggtaggggcagcaaggggatgggtaaggacagatcagaggaggtggaggggatcagtaagagagggggctggtggcctgggatggatgaacgcgagcttgattgccaagttgagcagtttatacttatttcagtaggatattggggagccaccaaagtttcttcagaggggaagctgtacaataaagcttcactttaagaaatgaattgggagttagggggtggcaggcctggagactgggaaactggttaggaagttattgcaactgcttgggtgagaaatgctgaggacctgaaataaggtgatggaggggagacaggaaggtcagcaggagctggacgcctgattgcatggcagggcacgggtggctgggaggacccagcggggcatgtggacaagagagaagtcacgggaggctgagaggaccagctatatggcttttagcattggagtggccacggggagttttagctaattcatcctgcaggttcccataggttctgcaagggaagcccaactggcctgtgatagatacctgtctggagcccaagctctccaagctgtctcctggtttcc

SEQ ID NO: 4020 - DNA, 1051 bp, Artificial sequence
  DNA replication origin
gacctgagtgtctttccggcggcgggtgggggggaggggggtggggcgtgctgcatcgcttactttgcctgtgtcttaggggagcctacccattgccctccagcaccggcgaacaaagacccccacggtggccaggcctgtgcggggtgtaaacagtgtcccagggtgtcttggtgtcctcactactacatcctccacgttccagaggagaaactgaggcccgaggacacccagaatttcccagggtcacaccaaggggaaacaggtgacgttgaagtggacacagggtgatgagaggggtgcagaaaaggagataccctggcatgccaagcctggggctggttgtccacatccaggaaggtccctgcaaggttgtggcaccttttcatggcaagcagacgcagcaccatgaatacccacagccactcctaagggccccttcatgcggtggctgtgcccagcactgggcacgcaggaaccaaggcccagagagttctgggtgggtggggagagctagagccttccttctgggctccagggcttttcagtagcaccactggctttctagaaggttgctgtgtgattggaaacttgtgctttgagatacgattatctgtgtggggaggaggttgtactggagtcagcagtgaggggtggcagcactaggccagaaatggatgtggggtcctcttgcgtggagctgccactcccccagccactctgtccttacaaccaaaaccccaaaagggggctgagccggcccttgtgagtgagagtagaggagaaggaaggggctgtggggggagagaagcacatggagctggcccacgtggagagagggaccctgggtggcagggtggcgttgggggagatttgccatcagagtgaccttagtgactgtgccacctcgaccctgacctgggcaatgcctgtgagggcactggggcccaaggtcccagaggagcaggggaactaagatgtggctctcacagaacctcaaatgtatctccagacatccacatatctgcacctgacacacatttctggaaca

SEQ ID NO: 4021 - DNA, 923 bp, Artificial sequence
  DNA replication origin
aagctgtcaggttggggagggagcgctaacagtagtgcctacctgccctgtgggtactggcatctgtgtgcacagaaagctcatgggccagcacaaggaggctccatctagagacccaggcatgtggcacagacggtgcatgcccttacggaggtctgagctctgtgctcggaaaccatgaactctgcttggggagctgaggtagggagggttgaagggagatggcatagagcaagagtcctaaaggaagaagagagagaaggacatttctgatagagcatacaacacaggcaaaggcctcagggtgtgagaggccatggcttgcctgagatcgagggcgcaaggcagggcgggggatgggaaaagtgttggggccacactctgatagctcaaccagaacacactgtctcttgcctctaggcaacaggagccttgggaggatgctgcatattgtgggggtggggggggtggggggtgggtttagacccgatttgggaaaataactggcagaggggcaatgtgtgttggaggggagagagctttgcagctcctgggagaacacgaggagcgccagagctgggcagtgactgtcgaaggagggcggagtccagaggtgcttggtggtagaaagtcagcgaagtgaggatgagatttggaggtgacagggagggaggggctggagatttatgacttggcgcaattaggtggacggggctgtcactgagtcagggaaggcagaggaagaacaggtttggggtggaggcatggaggaggggtggtgaggatatatgctagttgtaaatgatctagttttcttctgagcagcttttgggctccttagattccaaactgacatcaccaggggttgagtcttggtgaggcagcacggtaggctggccaagcccacagacttcagccaacag

SEQ ID NO: 4022 - DNA, 1650 bp, Artificial sequence
  DNA replication origin
cccggccatccccttcgcgacgagccccggccgtacagccgcctccttcttcgctcactcaggcctccgcgccccgtgcccacattgcccgctgttccggccccagcgccccgcgctgcccctgcgctcgcccggcgggggcgcctctgccggtcgccgcgctccccggtcgcgcgtctcacctctcggttctcgcaggctgtcacgcccgagtcccgtggcttcccccgagagccgtctccggaatgtcccttctcctggcccaccgcggccgcgcgcttttaggatttcttgccctcgcagctcccgcggtcccctcggcggcagtccctggggctccgcgatgtctgtgccccgcagcctcccgggcgccacttccccgcgcggccgccccacgctgcccgtgcagtcgcgcgccccgggccggccccgggcaccactccaccgcgacggcccccacttgtccttcccgagctgccgtctttcccagggtccgctcactgagtccccacatgcccagcgtcggacctgaccctcggacaggcgcggccccagacgccggggacagggcagtcaacagaacagacacaactcctcgccttcctagttggggtaacgggcaatacaaaaacaagtaaatggtgtggctggttggaaggtaaagcaggcaggccctggggaggcggggaggagcgaggctttcaggcttgaaggagatgaggggccacgaaggtgggactgtacctgaggcagggaccctggtgtgttttgtgacccttgaggagacccgggtggctggtggggcacagggaggcgggagctgcggtcagagatagtgggcgcaggggagcggattgagcagggccttgccggcttccgtaaggactgtggctttccctctgggctaggtggggacgccttggaggggcttggagcagggtagtgacagggtctcacattttaaaatagttctctgctgctgcgtggtggggaccaggtaggaggccattgccatgatgcaggccgagggcaatagagtgaggtggtgggaagtggccgaattctggatatgctttgaaggtgggaccagcaggattgtctgaaaattggatatggggtgtgagagaaagagagaatcaaggatgactacagcgtttccagctgggcaactggaggaatgatttgccatcccctgggatacagaagacctggggcatagaagatttgggggagaacgagagtctgttttggacgtgctaagctcaagatgtatgggagataaaaatccatgaatcaggtgggctcctgggtacgaggctggagtgcaagggagaagtctgggctgaagctcacatctgggcgccgcccacgtctagaggccatttaaagccatgagaaggcaggaaggaaagaggatgggacccatgctggatccaggagcctccgacacagaaaggctgggaggaagagccagtggaggagacagaagacggggacaccgaggtcggaagcaatggaagcgtggaagccaagggaaggaggtgaagtgaggagcagcatgaggtcacagggccctcctgcagccagcagtccctcctctgtgccctggtccaaggccttcagggaccggaatcggcagcctcacttgag

SEQ ID NO: 4023 - DNA, 6825 bp, Artificial sequence
  DNA replication origin
aggtggctggcggccaggccagggctggcctatgggtgtctggcccggctggccaccggccacctttctcccactggccttggccacagccccacagctggcgcgacgctgcgacctttcccctacttccagctctggcctccagatcattccaggcccctgaagtttacatgagtcacatgtcgctggcagactcccaccccgttccctcttcttgctctgggtttaacgggccacactggagagcaggcatggggccttgtgcccctgagcagggccaggtgtgggaccagagccttcgtcgtgcccaaggcctgcaggcctcagaaaccccagccccacaccatgccggtgctcccagctttccctgaatgtcattcgtcatgagggctgaggttcaaggacccacttactctggtggccacttactctagaggcctgagtacgccaggctgtgaagctctgccaagtacctgggaatctatatccatgcggggcaccatctcaaactgcatgagtcaggtgggcaggcgtgcatatgggcgagtcaggtgggcaggcgtgcgtatgggcgggtcaggtggacaggcatgtgtatgggcaggtcaggtggccaggcgtgcgtatgggcgagtgaggtgggcaggcaagtgaggtgggcaggcgtgcatgtgggcgagtcaggtgggcaggcgtgggtgtgggcgagtctggacaggcgtgcatacgggcgggtcaggtgggcaggcgtttgtatgggcgggtcaggtgggcagacgtgtgtatggtcggtttaggtggacaggcttgagtatgggtgtgcgtatggacgagtcaggtggacaggcgtgcgtatgggagagtcaggtggacaggcgtgcgtatgggcgagtcaggtggacaggcgtgcgtatgggcaagtcaggtggacaggattgcgtatgggagagtcaggtggacaggcgtgcgtatgggtgtgcgtatggacgagtcagctgggcaggcgtgcgtacaggcgggtcaggtgggcaggcgtttgtatgggcgggtcaggtgggcaggcgttcttatggtcgggtcaggtgggcaggcgtgcatatggtcgggtcaggtggacaggcatgtgtatgggtgtgcgtatggacgagtcaggtggacaggcgtgcgtatgggagagtcaggtggacaggcgtgcgtatgggagagtcaggtggacaggcgtgcgtatgagcgagtcaggtggacaggcatgcatatgggagagtcaggtggacaggcctgcgtatgagcaagtcaggtggacaggcgtgcctatgggtgtgcgtatgggtgagtcaggtgggcaggcgtgcatatgggtgggtcaggtgggcaggcgtgcgtacgggcgggccaggtgggcaggcatttgtatgggccggtcaggtgggcaggcgttcttatggtcgggtcaggtgggcaggtgtgtgtatgagcgagtcaggtgggcagacatgcatacgggcgggtcaggtggacaggcgtgtgtacgggcgggtcaggtggacagtattggcgtgcgtacgggcgggtcagatggacaggatcgcgtacgggcgggtcaggtggacagtattggcgtgcatacgggcaggtcagatggacaggatcgcgtacaggcgggtcaggtggacaggcatgcgtacaggcgggtcaggtggacaggcgtgcgtacaggcgggtcaggtggacaggcgtgcgtacaggcgggtcaggtgggcaggcatgtgtgtgggagagtcaggtggacaggattgagtacgggccggtcaggtggacaggattgcgtacgggcgggtcaggtgagcaggcgtgcgtactggcgggtcaggtggacaggattgcgtacgggcgggtcaggtggacaggattgcgtacgggcgggtcaggtgggcaggcgtgcctatggtcgggtcaggtgggcaggcatgcgtatgggtgagtcaggtggacaggattgcttatgggcgggtcaggtggacaggcgtgcgtatgggcgagtcaggtgggcaggcgtgcgtacgagcgggtcaggtggacaggcatgcgtatgggcgggtcaggtgggcaggcgtgcgtacgagcgagtcaggtggacaggcgtgcgtatgggcgggtcaggtgggcaggcgtgcgtatgagcgggtcaggtgggcaggcgtgcgtatgggcgggtcaggtgggcaggcgtgcatatgggtgggtcaggtggacaggtgtgcgtatgagtgtgcgtatgggcgagtcaggtgggcagacgtgcatatgagtgtgcatatgggtgattcaggtggacacgcgtgggtatgggtggctcacgtggacaggcgtgcgtgtcagcgtgtcacgtggacaggcgtgtgtgtgggcgggtcaggtgggcaggcgtgtgtatgggcgggtcaggtgggcaggcgtgcatatgggcgggtcaggtgggcaggcatgcctatgggtgtgcgtatgggcgagtcaggtgggcaggcgtgcctatgggtgagtcaggtgggcaggcgtgtgtatgggtgtgcatatgggcgagtcaggtggacaggcatgcgtatgggcgggtcaggtggacaggcatgtgtatgggcgggtcaggtggacagacgtgcgtatgggtgagtcaggtgggcagacgtgcgtatgggtgagtcaggtggacaggattgcgtatgggcggatcaggtggacaggcgtgcgtatgggcgagtcaggtggacaggattgcgtatggtcgggtcaggtgggcaggcgtgtgtatgggcaggtcaggtggacaggactgaatatgggggggtcaggtgggcaggcgtgcgtatggtcgggtcatgtgggcaggcgtgcttatgggcaggtcaggtgggcaggtgtgcatgtgggagagtcaggtggacaggattgaatatgggcgggtcaggtgcgcagacatgcgtatggccgggtcacgtgggcaggcgtgcgtttgggcgggtcaggtgggcaggggtgcatatgggcgggtcaggtggacaggcgcacgtatgggtgagtaagatggacaggcatgtgtgtgggagagtcaggtgaacaggattgcttatgggctagtcaggtggacaggtgtgcgtatgggtgtgcctatgggagagtcaggtggacaggattgcgtatagccggatcaggtgggcaggcatgcgtatgagcgagtcaggtgggcagacatgcgtatgggcgggtcaggtggacaggcgtgtgtataggcaggtcaggtggacaggcgtgcatatgggtatgtgtatgggcgggtcaggtgggcaggcgtgcatacgggcgggtcaggtggacaggcgtgcatacgggcgggtcaggtgggcaggcgtttgtatgggcgggtcaggtgggcaggagttcttatggtcgggtcaggtgggcaggcgtgcatatggtcggtttaggtggacaggcgtgtgtatgggtgtgcgtatggacgagtcaggtgggcaggcatcctacaggcgggtcaggtgggcaggcgtttgtatgggtgggtcaggtgggcaggtgttcttatggtcgggtcaggtgggcagacgtgcatatggtcgggtcaggtggacaggcatgtgtatgggtgtgcgtatggacgagtcaggtggacaggcgtgcgtatgggagagtcaggtggacaggcatgtgtatgggcgagtcaggtggacacgcgtgcgtatgggcaagtcaggtgggcaggcatgcgtatgggagagtcaggtggacagccctgcgtatgagcgagtcaggtggacaggattgcgtatgggcaagtcaggtggacaggcgtgcgtatgagtgagtcaggtggacaggattgcgtatgggagagtcaggtggacagccctgcgtatgagcgagtcaggtggacaggattgcttatgggcaagtcaggtggacaggcgtgcgtatgagcgagtcaggtggacaggattgcgtatgggagagtcaggtggacaggcgtgcatatgagcgagtcaggtggacaggcatgcgtatgggagagtcaggtggacaggcatgcatatgagcgagtcaggtggacaggcgtgcgtatgggtgtgcatatgggtgagtcaggtgggcaggcgtgcatacgggcgggtcaggtgggcaggcgtttgtgtgggccggtcaggtgggcaggtgttcttatggtcgggtcaggtggacaggcatgtgtatgggtgtgcgtatggacgagtcaggtgggcaggcgtgcgtatgggagagttaggtggacaggtgtgcgtatgggtgagtcaggtggacaggcgtgcatatgggtgtgcgtacgggcgagtcaggtgggcaggcgtgcatatgggtgtgtgtatgggtgagtcaggtgggcaggcatgcgtatgagcgagtcaggcgggcaggcgtgcgtatgggtgagtcaggtgggcaggagtgcatatgggtgtgcgtatgggtgagtcaggtgggcaggcatgcgtatgagcgagtcaggtgggcaggcgtgcgtatgggtgagtcaggtgggcaggagtgcatatgggtgtgcgtatgggcgagtcaggtgggcaggcgtgcgtgtgggcgagtcaggtgggcaggcatgcatacgggcgggtcaggtgggcaggctttcttatggtcgggtcaggtgggcaggcatgcgtacgggcaggtcaggtgggcaggcgtgcatacgggcaggtcaggtgtgcaggtgtttgtatgggcgggtcaggtgggcaggcgttcgtatggtcaggtcaggtgggcaggtgttcctatggtcaggtcaggtggacaggcgtgcgtatgggtgtgcatatgggcgagtcaggtggacaggcgtgcgtatgggtgtgtgtatgggtgagtcaggtggacaggattgcgtatggatgagtcaggtggacaggcgtgtgtatgggtgtgtgtatgggtgagtcaggtgggcaggcgtgcgtatgggcgagttaggtggacaggcatgtgtatggacgagtcagatgggcaggtgtgcgtatgggtgtgcgtatgggcgagtcaggtggacaggattgcgtatgatcgggtcaggtgggcaggcatgtgtatgggcaggtcaggtggacaggattgaatatgggggggtcaggtgggcaggcgtgcgtatggtcgggtcatgtgggcaggcgtgcttatgggcgggtctggtggacaggattgcgtacgggcgggtcaggtgggcaggcgtgcgtatgggcgagtcaggtggacaggattgcttatgggcgggtcaggtggacaggcgtgcgtatgggcgggtcaggtgggcaggcgtgcgtacgagtgagtcaggtggacaggcgtgcgtatgggcgggtcaggtgggcaggcgtgcgtatgggcgggtcaggtgggcaggcgtgcatatgggtgggtcaggtggacaggattgggtatgggtgagtcaggtggacaggcgtgcgtatgagcgggtcaggtgagcaggcatgcgtatgggcgggtcaggtgggcaggcgtgcatatgggtgggtcaggtggacaggtgtgcgtatgagtgtgcgtatgggcgagtcaggtgggcagacgtgcatatgggtgtgcatatgggtgattcaggtggacaggcgtgcgtatgggcggctcacgtggacaggcgtgcgtgtcagcgtgtcacgtggacaggcgtgtgtgtgggcgggtcaggtgggcaggcgtgtgtatgggcgggtcaggtgggcaggcgtgcgtatgggcgggtcaggtgggcaggcatgcctatgggtgtgcgtatgggcgagacaggtgggcaggcgtgcctatgggtgagtcaggtgggcaggcgtgtgtatgggtgtgcatatgggcgagtcaggtggacaggcatgcgtatgggtgggtcaggtggacagacgtgcgtatgggtgagtcaggtgggcagacgtgcgtatgggtgggtcaggtgggcaggcgtgcgtatgggtgagtcaggtggacaggtgtgcgtatgggtgagtcaggtggacaggcgtgcgtatggctgtgcgtttgggcgagtcaggtgggcagacgtgcgtatgggcagtcaggtggacaggcgtgtgtatgggtgagtcaggtggaccactgtgtgtacgggcgagtcaggtggaccggcgtgcatatgggcaggtcaggtgggtaggcgtgtgtatggatgtgcatatgggcgggtcaggtggacaggtgtgtatatgggtgtacatgtgtgcacaggtgctactttactctgtgttcaacacgtgttcgtggacgtgctccaggcccaaggcgaaggaataggatgtagcaggggcagggtctccgccccatactcagagtccttgggctccgggaagacacaaccgataagtggttacggggatgcctgggagctacgggcacacacagaccctcctgggcccagcataagggccagggaagacttcctggagtccaagtggaagctgcagggtgagtaggaggagggagggtgggtgtcaatgttctaggagtcaggggcgcacagagtccagagcaggcactccaagcatgggatggctactctggggatcgctcgagccgcttgagcatagagcttatggagatgaggtgggaggagtgaaaccaactttaaattcccacagctctgctgggactgctgggtccggccataagacggtgacagatagcagacttacctttcccccataaacaactagaaaactagacaaattatatgaagcaact

SEQ ID NO: 4024 - DNA, 1105 bp, Artificial sequence
  DNA replication origin
ggctccgggaagacacaaccgataagtggttacggggatgcctgggagctacgggcacacacagaccctcctgggcccagcataagggccagggaagacttcctggagtccaagtggaagctgcagggtgagtaggaggagggagggtgggtgtcaatgttctaggagtcaggggcgcacagagtccagagcaggcactccaagcatgggatggctactctggggatcgctcgagccgcttgagcatagagcttatggagatgaggtgggaggagtgaaaccaactttaaattcccacagctctgctgggactgctgggtccggccataagacggtgacagatagcagacttacctttcccccataaacaactagaaaactagacaaattatatgaagcaactgtttttaagcataggtgccatggcagggctgtgaccctagagaaggacacacatgagggagttccagcttcaccctggctctctgcccggaggtgtttggggcattttctgaacacagcacagggaagtagagctcagagagtggtgatggcatgggccggagcaggcagagactggagttcaggaccaccgaggggactggaacttgtggggttccagagaggagcgggttgagcagggaaggagcttcagacgtttgcagaggagctctcttgagtctttgagtgaatactaaactgcacgtgcacaggatgagacggcaaagtctggcagaggagagctgctgggagctgggagcagaagggggtgccagaggatgcacgggcacagagaccttggagttctgggcagccagagtgaagagaccacaccgaatatgccagacattcagccaagacctcagaaaaaccacccttttttaaaaaagttagatttattcaggtatcatttacatacagtgaaattctccatttttaggtgtacaactctatgacacatgcatacagtcatgtaatcaccaccacaatcaagatagaaaacatttctactgcccaatgttctctgtgccctttggtcatcctttcctccctccactccagcccctggtaaccactgccctgatctctgtccttttgaaaagca

SEQ ID NO: 4025 - DNA, 1695 bp, Artificial sequence
  DNA replication origin
agtgctgggattacaggcgtgagccaccgcgcccggccctgagttcagtttttttaaggacacaattagaggtgctcacgggatgttcaagcagggaggctggtggataccttcgattcgctcgttcacctacgtggacttattaaacagccaggctccctggccttgggagagtccttctggtggggagacagatgataaataactgaagtaatggaaaaggggcagttcaagaaaagtgttgtggaggaagaaaacaagaaagcccgccagaaggggactggaggtcggccccgagggtgtgtccgctagagggggcctctccaggtggactgcgggtgagagtaaagggggcatgtgggggaaaagcattctagggaacagcaagtgcgaggacctggagacggcagaggggctggtgggacaggcgcccaagaggaggcccaggctgtccctccggggcgtggggagaggcatggggctgggtccctgcaggagctcacaagccacagtggggagcagaagcgttacgctgagtacagtgggagccactgaaagggttaaagacccctgggggtgctgagtgggaagaggctctgggagctggagtggacgcagggagaccagttataaggcgaatgcaggagtccaggcaaaagagaatattccagtgtgtatcttaagacttaactttttacacacagaacaccctgcgcccctctcagagcctccggggtcttcatgcgagcagtttatcacggttctttcgtcttaaaccctcttactatttcagcaaacaccctctcctcagcctggtcaacccctctgcccaacccgagtgggccccgaaggaacaagtggggaccagagtcctgctcatgtgagtggtggggcccagcccgttcccctaagaccagaattctctcgctcagagcaaagccccggggtgccgggattctctctctgctcccgctccctggatggagcttttaaaaaaggaggattcctcactgcggcctctgccccttgcactgagcgccaacccgcatcacagctcagcaaaggcgcgcgcagtgaacagacggaggaggggtggctcctcgctgagctgaaggctgcggcgacgaaaataaacagcatggttcctgctctccacgaacctggcgctgcagacgtgggcaaaccacaccaagagacgcgagcaaccgaaatatagggagaaaaaaaaaggtgccctggacagcgggctagatgtctcctgcaggctcgaggacttcccggagggggcggcgttttctcggggcctgggaagaatgggcgggtttcagcgggcgccttctgggtgactgcccgtttcggcttcccctgaccccgtaacagagcggaagaggcccagagacgccagaggaggggcgtcagcgggacactcaggccaataagctctgactcccgctgtctgcaaaaatgaccggatgcaggaatgtcacctagaaccggccagctttccgacctctccggtcaaggacgcattcctaagagacgaagggagaatgacagaagttaaaaacaaccaaacaaaagccaggttgaggcctctaggtgggtctccgctaccgatggattcagccggtggggctgcaggaggttcctataagcgtggtcccctctccccgcaccgagtccggccccggccct

SEQ ID NO: 4026 - DNA, 1677 bp, Artificial sequence
  DNA replication origin
ggtggggctgccgcggcgggactactcgtctgagcgaggggcgaggcgggggaagtggtgcggcactcgcgcgcctgtaaatgcgggaggtggggcgtgcagggcttcgctgcggccgcgccggtaggggcctgggcgggctccggagccgggcggggcggcggccgcgacgggcgcgcccgggtcggcgggggcgaggagggggcgtgttccccgcgcagctttgtcttgcgcttcctgggcggccccgccccgctggccccgcggctatttccagccatgacgtcaccccggtcctgtgagccggacggccgttgggcgggggagcggctggcgggaacgcggcacgcggccttgggggcggggcaagagctgctggcgggaacgcggcacggttttgggggcggggcacgcggccgtcgggcgggttaagagcggctagcggtagtgccgctcgggcctgggggcgggcaaggtctaggggccggggcaacgacgggaggcgggagcgccgcactgccttggaggcggggcaacgcttggaggcgggaacgcggcacgcgagcgttgggggccctaagcgtcgcgacctgggggcttcggggaggtagccgtggacgtgggcagagcgcgggcctcgtggtgtgcgggcactgtgggccgggcgagccccttcccgcccgtgtggtgagtcggcctcggcgcccggttctgtgacatcacagggggtttagtggcgcagcctgcgggacagaggccggggatttgaggtggcctcgtcttgtttgatctcggggaacctcggcagacggaaagctttgatgctttggtgcatggcagatagagaggaaacgtgtatcttcgtacatttaaagtttcctttccttttttttttttttgatagggagtctcgctctatcgcccaggccggagtgcagtgggcgcgcgatctcggcccactgtaacctccctgggagggaggggtattactcttctcagagtaatatcaccctctcgcccccggcttagttttcttttggaagagatcagctcattccagcctcttccctcctcccctccagattaaagagacggtgagggtctggtgcggtggctcacgtctgtaatcccagcactctgggagaccgaggtgggcggatcacctgaggccgggctttcgagaccagcttgaccaacatggggaaaaccgctctctactaaaaatacaaaaatcagctgagcatggtggtgggcgcctgtaatcccagctactggggaggctgaggcaggagagtcgcttgaacctgggaggcagaagttgtggtgagccgagatggtgccactgcactccagcctgggcaacagagcaagactctgtctcaaaaaaacaaggccgggcgcctgtaatcccagcacttggggaggtcaaggcgggtggatcgcctgaggtcaggagttggagaccagcctggccaacatggtgaaaccccgtctctactaaaaatacgaaattttctgggcgtggtggcggacgcctcccagctactctggaggctgaggcaggagaatcgcttgaacccgggaggtcagttcaaggccagcttgaccaacatagcaaaactctctttctactaaaaatacaaaaattacccaagtgtggtggcgggcactgcagtg

SEQ ID NO: 4027 - DNA, 1621 bp, Artificial sequence
  DNA replication origin
ccccgtctccgggtctgtgtccaggcgtgggggcgatcgcgctgggagcggccgaggaaggacacccctaggcggagcgcgccgggctcccggctcccctcgggcccgcggccccgcctggccttcccgggccgccctggagcggggcgccggcggtggtggcacggcagccagacggtggctcagaagcgccctgccgcgcccaccggtccagatccttgccttgctgggcaggcaattctcatgttactgatatttttaggatgctgcggaatctcttttgcgcttcctattctctctccctgaatactcgtaataacagtcctgctgttctaaaaaaacaataaaacaagcactctggtttggcaaccgtcttcgctccagcagagctgaatgaacaagatctttaacatccgctcccgggctcggggaggatgccaagggcctcgtcctcctccctgaggcccgggaggctttgcttagcagccgctgggagccgaggaagatgccttcctgggtggctaccgcaccaaggaatcctgaaaaggccccagggagggtgggggagagggacagccccaggcgacagtgcacagagctctctccctctggccctggttccctgctcctctcccttacggtctttaaagaggaaaagcgagctgcagtgagtagggctgaattatataacaagattcctttaataccacatcagcctgcagttatataacactgcctggacaaatagctgagaaatttgggaggaattcacacatagcaaggaggcagttaattttagtgttcattttcaagtgctttggaaactcggaggtgaaaatgagaggcaaatagcaagagtgaatgttgtgccctctgatttgctgatattattcatcatggtgactgctcgctctttaagtcattttccagctatcctttgagcaccggtcccgctgtgggtgctagggatgaggccacacagcatagcccttgccttaaagaagtctgcagctcgatgggggaaagtagaaagcagggcgatgagagatccgtatcaaaaggccacaggagaaagcggctaatcccaagggaggcaggtaggcattcccgaagggatgaatttggaagttgtcctgaatctggaagggtctgtggacgtgatccaggcagcaagttctgtgcagagagaacctcatgcctaatgtcactggtggctggggcagctggtgcccagggcatgggtcagagaggtcttaggagagtatgccaggctgcagtgcgccatgccaagggtattccatgttagcgagtttgggttactatgaaagttctgggtatctgaaaggtaaggattgtgacagtttgtgttttaggaacgtcacaccgacaactgtagggaggatgaactggacagagtcagactagggataacatgaccacctgtgtgagtgggtgggggagtctgcaatgatccaggtggccgagtcctgaaccaaggcagtggcggtgagaggcttgcagaggagatggtttcaggaattgttgaggaggtcagccagctgcagttgcccttctgggtgtgaactgtgtgtatcttttttctttctttcttttttttttt

SEQ ID NO: 4028 - DNA, 991 bp, Artificial sequence
  DNA replication origin
gcggccggggcgggctgcagggggaggcgcggggcgaggtccgggaagcgaccgcggccaggggctagggttcccgggcgggggtcgcggccggaggacgggggtgcgagccggagcctggggaggggcgggcgaggcagggctgcataggcgtcccgagggggcgcacaccggccctagggaggggcgggcccgagaccccggcgaggagcaccgggtgcgggcgcggcctcccctcccgggtctccccctacagtccccccactcccgcccacgggtcccctcgctccccgccgtcgggtcagccctgtcccggccttctggaattgctgaaccctgcggggggcccggctgagtttgttcatttatggaaacgctccccagacgacgctcgccgggcccgtgggaggccgcgggagcttggggggacttcccaaagcctgagccccctagcgatgcgcggggtgggcgggggaaagaccctgagggctgcgcgcgctgcgttcgcgaggtccggccgtcagtgcgccccgacctttcagtgtccgccaggcctgagacgccccgggagggaaggggcgatcctccgggcaccaacagccccctccggccttctccttccctctgttgccccagcggagactggatgtgtgaaggttgagcctcatcaaaacctccaaatagtcactacttttgggaaagaaaaactttgaaaatgaaggagaaaggcaaagcaacccccacctcgccctccccccgccacaggaaagaagcaaaaggaaatacctaggtggtggtcataagtctagcttttggtctcggattttttttttttttcccttaaccgcttttctttttaagtgaactaaccacaacccagactagaaaacactccaaagctgccgaattcaaacccagcgagccttcctgttggttggttctgtgttttacttaaatgtgattacttccttcccttgcccacctcctgcaa

SEQ ID NO: 4029 - DNA, 993 bp, Artificial sequence
  DNA replication origin
ttaaatctcccgcgccgcgcgctcccggcccttcccattggctttggtgccccggcccttcccattggctgtgccatgcctccgacccttcccattggctgcgccttgcccctacccaggctggccgcggggccgcgcgcgattttcaagcgcagcgcgggagcctccgccggcgccttccggagacccccggggacacccccgtggacgccccccgggacctcccggttccccccccggcccgtccgctggctgggtcgggggcgccgccgcccaggcccccacaggtcccgcgggaccagggccgcagcccctgagggtctcggcggccttggcgcgcgcgggccccggttcgcccgggaaccgtttaggattgcgtgaggagcagcgattggagcccgcgggcgcgagaggatccccgggccgcggccccgcctcccgaaagcacctcctcccagccgggccgccgccgggcagggggcttagccaacgaggttggtgcaaaggcctggaaaacgctcctgggtgcgggggaggcgttgctgcgaccctttcgatccgtgtccctgcggtgggggtgcaagggccccgaggcctgacattttggcggggtggtcggcgaggaccctacagcctaaaagttagggccgctgagccccgtggctcgttttgctgggacaagcgaccaggcttcttacagattcggtgtccccgtgagtaaaatgggactcgtaaccgcgtggactgttaatgcggtgaggagagcgttcgttgagatgactcatgtaaaatgtgcagtcctttgtaaaccttcaaactacgggacatggcgagaaggcccttggtgcagttttccacagaaatcctgtctcctgtcagacccctgacccctattgtcacccttgccttaagaattgcaaactgtggctgggcgcggtggctcacgcctgtaatcccagcactttgggaggccaaggcaggaggattgtttga

SEQ ID NO: 4030 - DNA, 1101 bp, Artificial sequence
  DNA replication origin
cgtgcaccctgtcccagccgtcctgtcctggctgctcgctctgcttcgctgcgcctccactatgctctccctccgtgtcccgctcgcgcccatcacggacccgcagcagctgcagctctcgccgctgaaggggctcagcttggtcgacaaggagaacacggtgagcccgcggggagggcgctgcgggcaggggagggaggcagggaaagcgaagccgctcctcactcacacgcgtctccccgcagccgccggccctgagcgggacccgcgtcctggccagcaagaccgcgaggaggatcttccaggagcccacggagccggtgagtggcgggcgtggggcagaggggccagggacggccttgggcgtcttggcgccaaagccgcattgtttcctcagctgttcacactcccgccccggctcctttcccgcctaggcggcccctccccagggctgcctcccgcgcccctcggcccatttcccggttcgggcgtgcgctcctctgctgcgacccacggagtgcgacgggacagccacgttttcacatcgggccccgtgaaattgccgccaatggaaaggacttggtccagaaaaacgttagtttcatatggttcgcccggtacttaaatgttttattttctcccccaacagaaaactaaagcagctgcccccggcgtggaggatgagccgctgctgagagaaaacccccgccgctttgtcatcttccccatcgagtaccatgatatctggcagatgtataagaaggcagaggcttccttttggaccgccgaggaggtaatcggaggaccccagaagacccctgcaggggtgaccgtcacgcctcagacataaatgcacttggaggttcccgttggcaaggggggctaactgtggggcatagtaagtggtgccagcatacttaaagtttgagtgctcagtgtgagtcctgtaggctttactctcttccttttatgctaaaattgtgacttccgaacctcaggtggacctctccaaggacattcagcactgggaatccctgaaacccgaggagagatattttatatcccatgttctggctttctttgcagcaagcgatggcatag

SEQ ID NO: 4031 - DNA, 1467 bp, Artificial sequence
  DNA replication origin
ccaggccaatgagcccaccagcagcctgccccttgctggggtggaagcctgaaagcagaccacagtggctgctttctttggtctgggggagctcaggccaggggctggttagagtccccagcacagccccatcctccatcccacagtgggcagcagtgtgaaactgggcaggggacttcaactctcctagtctagttttttcattcatgtcaagggaacaccactactgacctcacagggtgagggttaagtcagatgatgtgcttaaaagtcttacatgaggcatggtgacactagatgggccagggcttcctgaaggcagggtcaactctgattcatcttgacatctccagttcctggcccagagcctggcacatagtgggcacttgagaagtgtctgttcccttccctcgagagggtcttcaagtggtgaatggagatgatggtgatagtgataatggtggtgatggtggtagtgatggtgatgatggtggtgatggtactgatgatggtggagatgatggtgatgatggtggtgatggtggtgatggtggtattggtggtgatggtggtggtgatggttatgatggtggtggtgatggtactgatgatggtggagatgatagtgatggtgatgatgatggtgatggtggtgatggtggtattggtggtgatggtggtggtgatggttatgatggtggtggtggtggtactgatgatggtggagatgatagtgatggtgatgatggtggtgatggtggtggtggtggtgatggtggtggtggtggtggaggtgatggtggggttggtggtgatgagtgtgatgatgtgatggtggtggtgatgatggtggtgaggatggtgttggtggtgatgagtgtgatgatgtggtgatggtgatggtggtggtgatggtggtgatgggggggttggtggtgatgagtgtgatgatgatgatgtgatgatggtggtgatggtgatggtggtggcgatggtggggttggtggtgataagtgtgataataatgacggtggtaatgatggtgttgatggtggtggtgaggatggtggtggtgatgatggtgatgatcatggtgatggtggtgatgttggcgatgatggtggtaatgatggtggcaatggtggtggtgatggtggggttggtggtgatgagtgtgatgataatggtggtgatgatggtgatggcagagatggttacaatgctgagagtgatgatcttggcggtgatggtggtgatgttggcgatgatggtggtaatgatggtggcaatggtggtggtgatggtggggttggtggtgatgagtgtgatgataatggtggtgatgatggtgatggcagagatggttacaatgctgagagtgatgatggtgatggtgacgatggtgatataagtccccatgcgcacttcctcttctctagctctgtctctcacctgctcttgcctgag

SEQ ID NO: 4032 - DNA, 1481 bp, Artificial sequence
  DNA replication origin
agctcacatcctagtgtggaggggaacagagattgaacaagcacgtaataatgagtgagctgtgttgtgggagagaaggtgggcagtgcaacaacagcccaggtttatttctttaaaaaaacaacaaaagtctgggtgcggtggctcacgcctgcaatcccagcactttgagaggctgaggcaggtggatcacgaggtcaggagatcgagaccatcctggccaacatggtgaaatcccatctctactaaaaatgcaaaaacaaacaaacaaaaaaacacaaaaaacaaattagctgggtgtggcggcttctgcttgtagtcccagctacttgggaggctgaggcaggagaatcacttgaacctgggaggcggaggttgcagtgagccgagatcacgccactgcactccagcctggtgacagagtgagactctgtctaaaaaaaaaaaaagcaacaacaaaaaagaaaaaaagtggtggcagttggtgctgtgaaagtgcgacaggatgaagattgtgagtgtgtgtgtgtgtgagagagtgggtgaaagtgaaagtgtgagagtgtgtgtgattgtgtgggtgtgagtgaaccagtgggtgtgtacgtgtgtgtatgagagtgggaatgggtgcaaatgtctgtgactgtgtgtgagtgaatgagtgcatgtgggtgtgagtgaatgggtgtgtgactgaatgtgtgtgcgagtgtgtgtacgagtaagtggatgtatgagtatgtatgtgtgtgagtgagcaggttgttgagccgttatacattttgagtctggtgagtgtgtgcatgagtgtatgtggtgtgagtgggtgtgagtgtatgtggtgagtgtgagtgggagtgagtgtgcatgagtatatgtggtgtcagtggatgtgagggtgcatgagtgtatgtggtgaatgagtgggtgtgttcatgagtgtatgtgggtgagtgagcgggtgtgtgtgcatgagtgtgtggtgagtgtgagtgggtgtgagtgttaatgagtatgtgggtgagtgcatgtgtatgtggtgagtgtgagtgggtgtgagtgagtgtgcatgagtgggtgtgtgagtgtatgtggtgagtgtgagtgggtatgagtgtgcatgagtgtatgtgggtgtgagtggatgtgagtgtgcatgagtgtatatgggtgaacgtgagtgggtgtgagtgtgcatgagtgtatgtggtgggtgtgagtgggtgtgagtgtgcatgaatgcatgtggtgagagtggagtgagtgcatgagtgtatgtggtgagtgtgaatgggagtgagtgcacatgagtatatgtggtgtcagtggatgtgagggtgcatgagtgtacatggtgagtgtgagtgggtgtgagtgagtgtgcatgagtgtatgtgggtgagtgtgcatgagtgtgggtcggagaaggctgcagtactacatacaggcctcaaggagaagctggggtttcagtggga

SEQ ID NO: 4033 - DNA, 705 bp, Artificial sequence
  DNA replication origin
gtggctgcagagggaagagaagggagtgtccctgaaggagtgtgtcgccagccacactgaatgccctaggagctcagggaagataatgacgaagaagagaccatttgacttgatgacaggaagtcactggtaaccttgtccagaacagtctcagaggatggtgggaagagcctggttgaacgggtggaggagaaagccagggtgaggatgttgggcagtaactaaagatgatgcttttagaaagttcttctgggaaaaggggtggggggcttaaggggtgcagcccaagagggggcttttgtttcccgtggtggagacagcaccgcacctgtgtgcaccaagggaatgatgcccgagcgagaacaggacagagggacctaagaagtaggtgcactgagacctagaacacaggtgggagcctggccttggcagggagtggggacgtggcctccgtggtgacaggaggggagcagtgagctgggcccagatgcctggggctagtagcctcagagacgcagccataggagcatggcagggttgcctcttgctccttaattacggggcagaatcatccgctggcgatgtgcaggagggacggcagtggtaggtttggagaggaggaggtgtgacattatttgtgacatatttgagtggggaaaagaacacatttgagaaggacaacaccgagtgcccattgatattgag

SEQ ID NO: 4034 - DNA, 1231 bp, Artificial sequence
  DNA replication origin
tcgcccagacctctttcctgcatcctgtcacctgagggatgaacacttcttacgtccctgaccctcgccgctccagtgccctctgccaagactggtgctgccctccacccacccctgggccaggcccgggttcgccttccctctgcctgcccctgctttcttcccttccaaacagggacagagtcgctcaggcccccgccaccctgtgcctccccttctgctttcatgcctggccccaagccctcctgtcaggacagaggggctttcaggcattcagcaagcacttaacacctgctgtatgcagggcactgtccctactccggaagctcacgccagccgagggggcggtgggtggtcagatcagctcacacctggtcagttgaccacaataccaggggtgctattggcgcctaggagtgagtctcgggccacctgcctgacagagagtcgttaaagtcaggtcctgagaaggggctgaagctgggcaggaggagagtggggccagagcatttcgggcagagcaggtgatgtgtgtggacacccgaacctgagtgggggccctgcaggactggaggggtgacgtgggctctgctttcttagagagtggtgggaggggatgaggcagggagcggggatgaggcagggagccgggatgaggcagggcattccattcctcggagccttggggggctttggaggcttggagcagggaagtactgggatccactcgtgatctaagggctgaatttgacacacaggggacccacagagaagctccacgcaggccgagggaaggccgctgcagtggctgtggaggcacagatgaggagagcatgttccttcgagggatgtttaggaggctgggccgtggggacttggtggtggaccagatggaggacgggggagaagcaggccacaggtgactcccagctgcaggttcaaggcctcagggggccagtgacgccagttcccaagacggggaacgccgggagcaatgggcccgggaaggaagagaattgatgaatttgggacacgttcagcctgggacacctgaggacaagtaggtggagatgctacgctggcaggcagaagtggggtccaggcagaggcagagggaggaggtggctcgcctgctagaggtcactgaagtgagccatggccagtggatggcacctggcagacctgcgtgggaaggaatgctcccctgctgaaccctaatctctggagcgag

SEQ ID NO: 4035 - DNA, 1200 bp, Artificial sequence
  DNA replication origin
accctaatctctggagcgagggaggaacttcgtcctgtggcaggcctgcccggcagtgttgctgcattccgggcagcggcagcatcgggcgagggtatggggtgggaagagcggactctggtctcagccctgaggaactctgcatctgaggaacaggtggaggggaagccggcagagggggctgagcaagaaaccctgagacatggggaggacaaggctctgtccagtaccgtagaagccgcaggaggagagcttcaggccagggcaagcagccgagtcagagcagggcggaggagtgcccactggactcaagtaagaggagggtggaggagtgccccctggactggggccagaggagggtggaggagtgccccctggactggggtcagaggagggaggaggagtgccccctggactggggtcggaggagggaggaggagtgcccgctggactggggccggaggagggaggaggagtgccccctggactggggttgggggagggaggaggagtgctcgatggactggggtcagaggagggcggaggagtgcccgctggactcagggacacgaggccatcgggggctttgggggaagcagctctgatcatatgatggaggccacaccagagtgcaccaggagcaaacaaaccctgaggcttttcccatgacaaactgtcctaaaaaggaaaggataggcccatcaatgaaaaggagcgtggaatcctgggaagagctgactgttctgtgttttcagatgtgggtggtggagcacgtggtcggttatgattggggttggctgtgacactatttcgttaggagagaagtttagaggccagcagtttgtggtgggaatggcagcgcctctgtcatcagacacccacgctgcctcttcctttctgctcactgtcctggccacttccgcctgtgtctcactggccagatcccagacacatggccccaccccgctgcttgggcttctgtggccgaggaggaagaggagaagggaattggtgggtgactggcagcttctgccacattccgcttaaatattaatgagaaatgccaaagtcacagagaaaggaagatggtttttggtttcaggttcctgagaaggcaggggtagggggagaggcagctgtccaaagcccaggcgaggagaccaggctttgggagaaggacagaaacggcttccatggctc

SEQ ID NO: 4036 - DNA, 1974 bp, Artificial sequence
  DNA replication origin
acctgtgaatgtgaccttatttggaaattgggtctgcacagatgatcaagttaagatgaggtcattagggtgtgccctaatccaataatgactgtgtccttatgaaaagggaaaagagacaggtatatagagaagatgtgaattcacagggagcgcacatggccatccataagccaaggaatgcatgaggttaccagaagctaagagacagacatgaaacaaactgccccccacatctctccaaaggggccagccctgccaacactttgatcttggacttccagcctccagagctacaaaacaacacatttctgttgtttaagttgcccagttggaggtgcttgttacattagccccaggaaattatacaacatcttacctgaatttgctttcttctttgctctagttaaattcaaaactacatattgaataacgacggtgtgctctctctccatgaagcttcggggtgggtagacagtcctcctcttgaaggaacaggagggacgcaagggaagggaccaacttgtatctcatctgagagagatacactcctggaataagaggtctgcggttaagtgtgtttctctagaagttcagaaacagaggaagcatctgcgggctaagctgctgagggctaggtgagagctaactgacctaagttttgaaggatggatgggtgacaggttggagggggaagatggaaaagtcacatgggagaggaacagcatgggccaagtgtggaggaaccagtgagtgggctgggtttcagaaacaggccttggtctgcttttgagccctccctgaacttttccaccccaaccccacctcctgcctgtgtctgccatgcacctcccttcctgtgagtctgtggacagactttgcccctttgccctgtgtgtgcttgggagaaatctgctcagtttctgtggcagggatgtttctacgtgttcatcaaaccggctttgtttacttccgaaacactcatgaagaccacagctgccagagccccttgcatcctggtgggactgtgcgactacttctggcccatggatgtgggtggaagtgacgtgtgcttccccaggcctggctcctggaccccaccgacggcttctcacctgtaaccccaccagccttctacctggatacttcacggggagctagagtggccttggctaagaaggaggcatggcacccgcgggtaccgggccgccttcatcagtcggtgcactctggtccaccgcccacatgccttcatgtaatcttcactgtagggcccacagggaggggaacttcctcgaggtctagctttgcctttccgccttcagagccaagtaagaatgaggggtctgggctcggcccaccttccctgcaaggccctgtgcccgctcccctcaaagctggtcttgcatgttgctctggcggcctctgtagcaggagttcactctgttttccgtggaggaggagtggaaggagggattcaagctctcccctagagacgctagaaagacagttttgtctcagcctcatacgatcgcccagctccacatttctggctgtttctgtggttacctttcttcggggatgtttggggcgggaggtgggtgtgtgtgtatatttgctcttctgaagccgtttttccggagctcctggtgggggtgggggtgctctgtccctggttcctctcgaggcaggtgcaggggatggaggatgcccccctccccgagagccaggaggcgccgaccctgggcaggaggtgccagaccggcgcctctcccgcgtggagctcgaagaccacagatgcctggaagggaggagcaccttccgtggttaggtggggaaaccgaggcagaggcggcccaatggactcgcctaaacggcctggggagtcactgcaggtaaccagagctggagccaggcttcccactccaggcccggggctctcccccgaacaggcgtgggaaggggtgcgagctg

SEQ ID NO: 4037 - DNA, 854 bp, Artificial sequence
  DNA replication origin
cagcgaggtgcaggggctgcgagggccgagccgggcgctgagggtccggcagggggcgtggagggggcggggcccggagggggcggggccgtaggaaacttgagcgcccgcctctggccgcgcgccccgccccggcccccgcctccgggtcccgcctccaggtcccgccttcgcgtcccttccttcccggagctggcaggcgggccgcggcggcggcgggcagcggacgggcggactgacgggcgcctccaccttgctccctccctggctgccggcttccttttgtctttctgggcggcgatgagcgcagggccggcgcagcagctgcgggcgcacggaggcccgcgctgctagtcactcctcccggcctcggcgcgcttgtcccgggcagcggcccgggcccgctgcagccgccgccggcgccgaacttgggctcgggaagccggcggaccgcgtcctgcgccggagcaggtagggaaggggcgggctgcggtctgctggctgctgaagtgtgccccgggcgtgtgcacccggcgtgtgcaccggcgagcgctgcgatccggctctttgcgtgtgtgttgtgcgcgcgtgtgtgtgtccgggagtgcccgcgtttctctgcgcggtggagttgtgggtgactgcggacggtggtgtgtctttcgaatggcgtgtactcgtgggcatccatgtgtgccttaggtgtgcacattttggactgcgtttgtggaattgtgtgtcggggcgcagttgctggtggggagcggtgcctggcgggtgtcgtgtgtgagcagctgtgcgcagagcggggtggcggggtgggtgtgggtggtccagccccacgcccagagccc

SEQ ID NO: 4038 - DNA, 779 bp, Artificial sequence
  DNA replication origin
gtgcccgcgtttctctgcgcggtggagttgtgggtgactgcggacggtggtgtgtctttcgaatggcgtgtactcgtgggcatccatgtgtgccttaggtgtgcacattttggactgcgtttgtggaattgtgtgtcggggcgcagttgctggtggggagcggtgcctggcgggtgtcgtgtgtgagcagctgtgcgcagagcggggtggcggggtgggtgtgggtggtccagccccacgcccagagccccctgtccctgctggtcggcgcagtgcgtagcttaggagcctcgaggacagctgggacccgacgggcaagggcgggcctcgcgggcaggctgggcagccctcagggaacaggtccgtgcggcccacgtgggtcgcctgtgagcttctgccaagggtgggggcccacgcggaggcgatccgctcgttcctcccagggccatggggcgacgaggagagccctggcctccccgcgacccgcactgcgacctgggccagacgcgccaccttccccggtcgcggtttgcttctctttaaaatgaggacagctcctcccttgggggctgtggtgacaggtgaaatgagaacgcactgaagacagctcttggtccaaagccccgcacacagtaggtactgtgttaattggattagcgtctcctgtttaaaatcctttttttttcccctttatcgtgggtggggccttacattttccccgggcgtgttttgtgcctctccctggccctaacttaaccgcgaagcactgagattcgaga

SEQ ID NO: 4039 - DNA, 931 bp, Artificial sequence
  DNA replication origin
cacagggagcactccttgtcacccattgtcatttatgagccctgtgtcacttgttgcttcagagggagcgctccttgtcacccgttgtcaggtgtactcactttgcttctcccttcctgcttttggggacgatcacaggacagtggcttcagaggggaagtacctcgacctggctgaggtcatgcccagagcctgactgctctctccacccacccatgatcccgtcagcttcttccccctccttctccatctgatctgagcatttaccatttccttccatttaagcttcatttgagttgcatcatgatgttctccttttttcaaagttccatctgcccacaggtttccattttctctagaaccctcctccttcctctctagcccctggcccgcccctctgcggttctcaggaagcccctcggtgccccctgccccttatctagaacagcttctgcctagggtgggcaaggcagggtgggaggtggggggtagccgtgcagggaaggggtgaagcgggcccctgtactccctagctgggctgcaggcttggaggaaaataagagtcagacgcttgttaaaacagtgaggacagctttattcgaggaaaatgcagtcggggttgaccttatcagcaggggagagatcagcccaactcctaatacagcaaggaagggacagagctgggaagtggagtgggctgggtgagtggaaagtagctgcgagaagacatcacaggtagggggattcttgccaaaggcagggggggactttgatgtcaaaggtggggatgaggactgattggatctcaagggtggtcagatgtgaagggcgtgagaggctcactaaactgactaagcaggattcttgctgagactgggccaggcaggctgaagacaggaggcagaaagagggctcagaggagcctgagtga

SEQ ID NO: 4040 - DNA, 1030 bp, Artificial sequence
  DNA replication origin
cccagagtgctgggattacaggcgtgaacaatggtgtccagcctaaaatctatctttaaaacacacacacacacacacacacacacacacacacacacacacacactgctatcttaaaagcatagggaccttgcagtgagaatttctggtgggaagatgtatgactttgtcaggtcttgaattctagcagtgagtttacattccataattggcctacaaaattctatatttgggaaacagtagaaatttaactctgagcaagatacaccctatttccaatcacacgtgatgcatctcgggggcattcatttgtcaaacattatttgttgagcacctgctgtgtccaggctctggacgcatagacgtgaaacggacgatttcctgaccttgtggcgctcacagtcaggggggtgggttggtgggtgggtggaaggaggggagaggtgcagcacccccattgtgcaggagcgaggggagccccgctggcacgccgcactgtgctgaggctgggtgttctagggtgaacaagccacttcgtctagtgggtgcttgtaaagcgggatcgttgctatgagagagagaaccttgcgttgggagaaagtaattagggagtgtgcggtagatgcggaagagaaacgggccgtcaggtgaagtgactgtcaggattccatcctggctcggccccttggaagacacatgatcttgcaggtaattagctcctgtaagcctccatttttccccgtctgtcaaatggggatgatgattgtgcctgcctcccagggctgctgtgtggattacgttggataatgagtacaaatgcatagacagcctttagcaaggagcctggttgtatagagctgtcggcctcaacactgttaatacacatatgtaccagaggctgcaggttcacggaggaggagtcaccaatccatgcccggggagcaggcagagaagagggaggcgggcccgtcccgagttcacgccacgtgaaaggtgcttggaacgcttgtgccagagctggcagtgaggg

SEQ ID NO: 4041 - DNA, 2000 bp, Artificial sequence
  DNA replication origin
cagatgctccggagatgctgacggctaggattcccccgccaggcacctggcggtcctgcagaagggccaggacaatgtccccagccctccaccaattccagggcagatgagaatgccaagttgtgcctgcccacaatgtgtgtatgtgtgtgcgtgtgtgtatgtgtgcatgtgggtgtgtacgtgtgtgcaggcacgtgtctgcccacaatgcttgtcagacaggatctgccctccgtggctgagggctggaggggacgaccacaggaagtgatactgccaagtcatcccaagtcaccctaaatataaccctcaatgtacaacacaggaggattgtcccttccccgctgccctgcctcatgaccagcgtctgcctaggagggcacttccagaaaggccgctcagatggctctctgagatgcccgcctgggatccacggcctggccagcactagaggggaggcaagcctggggtcctgctcttccggccccaaatctccatggccctgttcatctaacttcttccagaagaattgttggctacacaaatcactatgagcaacaatgatctcttaagcctgggaggaggcatccttatttaagggacacagagggctgccgtatggtgggggtctggctgtgccgagatgctgctcgcacctgtcttcctcagcggtcggggttgccagcgtcctgcccctcaggtgtgacccactccgacctggctgagccgcctgctcgccccctccttgccacgggtgcacgtctgccacaggccctttgcaccagctgctccttagctagaagcacgcccgtccctgacctcctgcaggcctttggtcaggtctcatctcaggaaggccttccccaagcactctatccaaaaccgacactcattctttatcccctttccagcttgatcctttctctcatttctgttttgttgagttcactgtctgtctccccttgagtggagctcaaggtccttggggccaggtttactctggtctgttctccatcagaagcccagagcctggaagcttgtctgacacagggtacgtgctccatgaacccacctcaagggaaggaacgcatgagtgtctggggacgtggagagggaggctggtaggggaggctgggactcgagccttagtatgcaggtgctgcttctccactgcccggggagcggcctgctgtacatgaccaagggccaggggcagagagaagcggaaggcccttccagtgcccatcacctgacccacaacatccacggccaatggtgtgaatgtgctggaaagtgccttctgatcccagagtccctcaactcgtggtggtggtggtggcggtggcggtggcggtggtggtggcggtggcggtagtggtggcggtgatggtggcggtggcagtggcggtggtggcggcggtggtggtgatggtgatggtggcggtgatggtggtgatgatggtgatggtggtggtggtggtgatggtgatggtggtggtggtggtgatggtggtggtggtggtggtggtggtgatggtggtggtggtggtggtggtggtgatgatggtagtggtggtgatggtggtggtggtggtggtggtggtgatggtggtggtggtggtggtggtggtgatggtggtggtggtggtgatggtggtggtggtggtgatggtggtggtggtggtggtgatggtggtggtggtggtggtggtggtggtggtgcagtgatattatttgctgtgcgtgcactgaaatgccccaggggtctggggatgggaatggacacctcggaccacctcctctaccctcttctgatctcttcgcctgctccagcttcttgacacgggtatcagcctcagcacgacctgccgggccaggcgcctcccctgtgcacccgtgctgacagtggcctcgggccaggacatttgtatgcaggtgacatccaggtaacacggacccagatgttcccccactctctagctccagtaaggctggtg

SEQ ID NO: 4042 - DNA, 1522 bp, Artificial sequence
  DNA replication origin
gctggtggatgggaccatggagccaccggagccattttccagagtttctgttgagtccacccacataagccttgcttatgcaggtacatgattagatcttctatctgtctataggataagggacacttgtatgcaactcccaaggaactttaacaacttggagtgcccgtgcaggatggcaaagggtctgggatcccctggggcaaggagaaggcaggacaagagagaagcttgcagaaggaggtggttggaggaagaggaagcaggcccagggccagtactgcaaattaccagggaaggacaggtggagacactttctttctttttttttttttttttgagacagagtctctgtcacccaggctacagtgcagtggcaccgtctcggctcactgcaacctccgacttctgggtttacgccattctcctgcctcagcctcctgagtagctgggactacaggcgcccaccaccatgcccggctaattttttatatttttagtagagacggggtttcaccgtgttagccagaatggtctcgatttcctgacctcatgatccacccgctttggcctcccaaagtgctgtgattacaggcgtgagccaccgcacccagccgagacactttctaacaacccgccctgaaagatcctgatcccggacaaaggaagagactgaggaggcctcctgctgggtgggtggcatggacgacagttttgggttcacttctgggttctttcctcctctgataggctgggcttcttggcacagggacaccatctttggggttcaattccctgccttcccagagagcactggactcctggacaaatcatactggcttctgtgagctccttgtagggcagggtccactaggatccccatatctacctcctccatatctgagcagaggtggttataatggttaattttatgtgtcaacatgactgggccagggggtacccagacatttgggcaaaccgattattttgggtgtgcctgtgagggtgcttttggatgaatttgacattggaactggtgaccaatgggggaaccaggtggggtaaagcagatccccctccccaatgtgggggtcctcatccactcagctgaaggcctgaataggacaaaagcctgagaatttgttctttgcctcacagtcttgagctgggacattggcctcctcctcccttaagattcagactggaactacaccattagctctcctgggtccccagcttgctgacctctgtctacaggggacagggctgcttgtctccttgggacctctcagcctccataatcacgtataagccaattccttatgataaatacatctatctaaccatccattcgcctacccattcatccatccatccatccatccatccatccatccatccacccacccgcccacccatccatgcatccaccctcccatccaaccaatcacccacccatccatacatacatacatccacccacctgcccacccatccacccatccatccagccacccaccca

SEQ ID NO: 4043 - DNA, 1167 bp, Artificial sequence
  DNA replication origin
ggtcagtttcctttaagctgggcacgccctctccttggcttggggctcccttactgtggcctgggaagaggtctcagaggagaaggggtgatgctggagacacggtggcgaaggagcactgcggcctgggccccggggggcagctgtttatccagcaaacacctccccagggccagcgcggggcatggcacagcagggcactgccggggcgcaggagctgcgggggcgggtacagcctgcctggggcaggaggctggggagggtgggagggagctcgggaggaggggtgactgaggccagcgggggcgggcggggcggcagcccctggagggcccctggaaggcctcagctcctccggctcttcccagcgggctgtgtgactgtaccatggggccccgacctgaaggggccacctgcctcctgcagttcacgggaaggcagaccctggcccgccctggagccacctgcccacggcctcttccagctgcagccaggccctccgggctcgagcgggctcatccactaggtgtgtgtgtgtgcgtctgtgtgttgtcttgggtgtgtgtgtggctggggcatgtggtcttagtgtgtgctgtggatgtgtgtggtgtgtttgggtgtgtgggaatggtgtggggatggtgtgactttgtgtgtgatgtcgaggtgtgtggtgtgtttgcatgtgtggtggtgtgtgggcatggtgtgaccgtgtgtgcgatgtgtatgtgtgtggtatgtttgcgtgtgtggtggtgtgtggggcatggtgtgactttgtgtgatgtggatgtgtgtggtgtatttgcgtgtgtagtggtgtgtgagggatggtgtgactgtgtgtgtgctgtggatgtgtgtggtatgtttgcgtgtgtggtggtgtgtggggcatggtgtaactatgtgtacatgtgtgtgttgtggatgcatgtgtgtctgtgtgtgtcatggtgtgtggggcatggtgtaactgtgtatgctgtggatgtgtgtggtggtgtgtgctgtgtgtgagtggcattgcgtgtgctgtgaatgtgtgtggtggtgtgtactgtactgtgtgtgtgtgtgtgtgtgtgtgtgtggcattgcgtgtgctgtggtggacccgagtccacaggtgggtggcttctggagtgccacatgaggctg

SEQ ID NO: 4044 - DNA, 888 bp, Artificial sequence
  DNA replication origin
acctcgaatgagccgcctggcactggacaagcgctgtgtcttcatctgtaaaccatgtggtcagggaaccaggggcagagggaggggctgcagggccttgaggggaatggcaagggtcctcaggggcaggacctgacctccaggttcctggggacctccgaaggtgggggccccagggttagggtcaggcaccctggcagggatggcagagcatgggagccatgtgtgcgggtgtcttgtggggtgtgtgtgaggctggggcatgtggtcttagtgtgcgctgtggatgtgtgtggtgtgtttgcatgtgtggtagtgtgtgggggatggggagggcggcacaggcagcctcaggtgggctctgcctctggctcagggacaggtgccaggcaccagccccacaggaggggtggcggggggagatctgccctccgcccactcagcctatcatggggggtggtcaggggaggccgggtggggtcaccagtcgctggtgggcacaggggaggattgggaacacctcagaggggattggggccacttcggggacgggcagggggacaggcaggaccaaggctgcagggccccaccagctgtacacagggctggttctacaacatggggcaggggtgcaggggctgggctgggggcttcacctggggggcctcaggaagtgttttgggggtcaggggagtggtctggtcggggactgggctgcctggtgccccttcctcaaagcccccgggaccctggagtggctgagtcgggagctctggatcgaggccacgctccagtctcacagccctgtggctgtcaagggccccctgcgatagtggagctatcagtgtttgcccagtggtcgagtgatttgactgccttttcctggcc

SEQ ID NO: 4045 - DNA, 834 bp, Artificial sequence
  DNA replication origin
ttccccatggggctggcctgcggcgcctgggcgctctgaggtgagggactccccggccgcggaggaagggagggagcgagggcgggagccggggcgggctgcgggccccgggccccgggcacgtgtgcggcgcgcctcgccggcctgcggagacacgtggtcgccgagcgggccacgaccttgaggcgccgcttcctcccggcccggggttctcccgcggctggataagggtgatccgggcgcctcgttctgcccccgtcttcacagctcggggctggaggggcctaggggagacccacccggagaccctgcggccccgcgccggcctctttcccaacccttcggcggccgcgcgctggccggggagccgttggggaggccctggcggccgcgcagcaggtgcaggggcgcagagcccgggctcgccttggtacagacgagcgggccccggccttggcgccttcagtttccttccagtttttattttcgctgtgtctacagagcagatgacaccaatttggaaacccgcgagagtgggtagagctaagatagtcttgctgtagtagctgtgatattagatgctcggccatgacttagaggtgtttatttaaggactgtgaatgactcggtgatttcggaaaagcttggcttagatgaacggacatacacaggggagacagccctaaggtttgcagaaaaggctgattgtgctgtttgcgaagtcgaaataattggtgaaagtgtagaaggcagaacctctcaggaatgtctggggaggacaaagaatgtgttggctgactttgtttaaacataaaattgggcagactttaattg

SEQ ID NO: 4046 - DNA, 1101 bp, Artificial sequence
  DNA replication origin
cacaggcccagtggagggaaggaggctggctgccggggcaggtgcctgaggagtccagcacaggtgtccacttccaccacgtggtgggggtgggaggaggcggatcagggcaggtgcactggggggagccgagggaactcacctgtgactagaggagccaaatccttccctgtggcaagaagacacagaagccagaatcagaggccctgcccctgtcctaggtctgcccagtcctcttcctgcagagccaggaggagccccggggccatcggggtggagggcaggcctggggtcttgtggaggctcttgtctacagcttgtaggccagctgtgcccatggagggtcccagtcttcttcccaccacctcctgggggtgtcaaagcccctaatgttacagctggggctccctgcctggtaggtaccagccgccagcagctgttccttcgacagcagggtctcagctgttttgttggggggcaagccccaccgccaaccctcccaggcaacccttcaagtggggcaaaaatatagcctgtgcctgtcctaacttccaattccccacccagactccagcgagagagtcggagacagcctgaagtcccgagggcctcaagtcccacctccccactggcccggatgcagcccttgctggccatgcccaacctacagcctccggtcctggaagaccaggggaccgcacagaagtgggagggtgagcaggaaagtggatgggggccaggcctgtcctgtgcaactcagccctcgccctgcagcatcttctacctggtaaaagaggggcgttggagattcccaccttcagacctcgggcaggggaggagggaccgggaggcacccgcaggagaagggagccaaggtggggaggtgctccctggcgtctctgtgtgtttgtcacagacacaacagaagagctgggaggaaggaaggaggcgttgacttgttggggctggggctctgccaggtctgtggggactcggagacagaaacgttgctgccctggagggagggaagagtctccactcagaggtttggagtctccactcagggctgtgactaatgaggtgctcaccatacaggcctgg

SEQ ID NO: 4047 - DNA, 827 bp, Artificial sequence
  DNA replication origin
ttgagaggcagacattcagggcttaaaggaggagggggagagatgccatggaggccgggccaggctgctggagctgaggcctgccgaggaactggaccttacgccacggactgtggctggaggagcaaaatccttgcctgtggcaagaagacacagaagccaggcttgaaaggtggttctgcacattcaagattcttctgtaggctgcgaggggctgaaccgaggacaggcatgaaatggagaagcctgaactagggcagagagaaaggaggccgaatccgggagagattggtgggacgacaggactcagaggcccgtcaggtgttgggggtggaggggggcgtggcggcggggtggcctgaaggtcctggagtgcaagcacaagtccctaaagggggcttgaaaaggcggtgcctgcggacccctcccagtgtagctgcaggtgagatgtggggcattcgctgaatgaccatacatggattcacgggtcaagagcttgggcagggtatggagaggtctggaaagagccatacttggtgtcactgtgtccaggtggcatttgataccctgagagtgcctgggtttatctctggggacatcaataattaagggggcagtggaggcaaggggctgacatgggctgctgagtgagttaggcagagtggggcgagatctgagcaaggtccgctggatggcttggtgccactgccactgagggagaaggctgggtagcaggaaggggaggaaaggctggtggaggaggggtcagagctggggagaagcttctgcatgatcgtgtccacaggcccagtggagggaaggaggct

SEQ ID NO: 4048 - DNA, 1136 bp, Artificial sequence
  DNA replication origin
gggcactggtgtgtgtggccaggcttccacattcaggtctaagaggcaggcccagctagagatccagccaaagacaggccgagttatggtaccgacccagagggtgggacggccaccaagacctccgaagcctcaccttcagagtggggcaagtgcaccctcttggaccctggccctctgatgctcacgctgagagtgaaatactgcgagcatgactttctgaagggatcataattagggaggacatcccctgatcccagtgccactccccacacctcgttctggcactgaaagaggaaaagctgatgggcatcctcacccagaggcctggcctgggcctgcgtgccctctctgccctgacctcggctggactcccctggcctgatccacatccgagagggaccttctgtgaagggcgccttctctcccaggcattctgtgtgtgtgtgtgtcattgtgtgtgtgaagtatgtgtatgtggtgtctgtgtggtatgtatgtggtatatgtgtgtgtggtgtctgtgtgtgtgtgatatgtattgtgtatgtgtgtgtggtatgtggtatgtgtggtgtgtggtatgtggtatgtgtatttggtatctgtatggtatatgtgtgtgtactgtgtgtgtagtgtgtggcgtgtgtgtggtgtggtgtgtatgtggtgcctgtgtgtgtatggtgtgtgtggtgtgtatgtgtgtggtatgtatgtgggtctgtgtggtgtatgtgtgtgtgatgtggtgtgtgtgtggtgtgtgtgtagtatatgtgtgtggtgtgtgtgtagtgtgtctgtggtgtgtgtggtgtatgtgtgtgtcgtgtgtgtgtggtgtatgcgtgtgtggtgtgtgtgtagtatatgtgtgtggtgtgtgtgtagtgtgtctggtgtgtgtggtgtatgtgtgtgtcgtgtgtgtgtggtgtgtgtgtgtggtgtgtgtgtagtatatgtgtgtggtgtgtgtgtagtgtgtctgtgttgtgtgttgtgtatgtgtatgtcgtgtgtgtggtgtgtgtgtagtatgtgtgtggtgtatgtgtgtgtcctgtgtgtggtgtgtggtgtatatgtgtgtggtgtgtgtgtgcacgtgtggtgtgtgttctgtcagg

SEQ ID NO: 4049 - DNA, 1191 bp, Artificial sequence
  DNA replication origin
agagaaaggccctggtggtgggtggtggcgagttcactccaacgggggcagccccacagtgaaaacatcaagtgagcagatggtgccaggagtgagatggggctgagcagactgggggtgctgaagaggctggggggctgaggaggctggggggctgaggaggctggcagggactaaggaggctgagcaggctgaagggtgctgaggaggctggggggctgaggaggcttggggtgctgaggaggctggagggctgaggaggctgtgggagctgaggagactgggggtgctgagtgggctgggggtgctgaggaggctgtgggagctgaggagactgggggtgctgaggaggctggcggggactgaggaggctggagggctgaggaggctgagcaggctgggggagctgagcagggtgggagggctgagcagagtgggggagctgagcagggtgggggagctgagcagggtgggggagctgagcagggtgggggagctgagcagggtgggggagctgagcagggtcggggccccactgcctggaagggaccagccaggagaagctggtggcagtagagagtctccatgtggtgtctggggatgagggctccaggtggacagaaggacgccctgaggctggacctgtcagttggaggagagcgggagaggtaggcggaggtaactggcaccccagatagggccttgagggaaaggacactcggcagggtgtagggctggggctgcaggcctgtgtgggatcatgaggctgagacttagaaggcaactgctggaatggggaggggccccaggcttcgtgggaggccggatgtgtcttcaagggggtccccctttgactaaaaccccctctaccagctccgctggccgccccctgactgctccccaccccccactccactcccatggccgcttgctcagagccgcccctcccccacacccagtcacagccttgcgaatcttcaatgcccactggtgaccccctcatccccaggggacagaccacaaccctcagtcatgcccagacagctgcccctcaggtttctctgacctaccctcaagccccacaactcctgacatcccctctcagaggggcccagcccccaacagtggggccttctttatctctccagcctgaccccagggttcctccggcctcccctgtccccctgcacc

SEQ ID NO: 4050 - DNA, 898 bp, Artificial sequence
  DNA replication origin
ctgcacttggcacgaggactcaccagcatgggaagcacaagggcctgccaggtggccctcacagacatccttgcaggatctgacccttccactgtgcctctgccctcgccccgaggccagcacctgcggctgcctctgctcctctgcccaggctgcccagggcgtggggccctccttctgctccccttgtagctgctgccctccactcggagggcaagtcagagtctcctgggtgcgcctgccccagccctcccatcggtccctgcacatggatccccgaccccagcccactgccctctgctgcccctgccagcctctgtggctctctggtccttcctccctgacagagcctgcccactgtcaccttcttattcctcagtccccacagaccaccggctgtccatgctggctcgctcatcttccatccacaccgccttcactcagcaggtgatggcgagccccataggcacccatgagacatccgggatgcagacagagaaaggccctggtggtgggtggtggcgagttcactccaacgggggcagccccacagtgaaaacatcaagtgagcagatggtgccaggagtgagatggggctgagcagactgggggtgctgaagaggctggggggctgaggaggctggggggctgaggaggctggcagggactaaggaggctgagcaggctgaagggtgctgaggaggctggggggctgaggaggcttggggtgctgaggaggctggagggctgaggaggctgtgggagctgaggagactgggggtgctgagtgggctgggggtgctgaggaggctgtgggagctgaggagactgggggtgctgaggaggctggcggggactgaggaggctggagggctgaggaggctgagcaggctggggg

SEQ ID NO: 4051 - DNA, 1060 bp, Artificial sequence
  DNA replication origin
cagggcgcacctccccgctgaggccacatcgcttcttcctcccttccttggtgacatcaccaactcctctcttccatcacagctccctctgccctcctttataaggacagctgtgattccactcagggtccatccatataatcccaggtcatcttccaatctcaggaccctcaactgtgtcacctctgcagatccctcggctgccggcctctcggctcctgagaccgtggcccaacatggcacatggggactcagggaaagggcctttcaggagctctctagggtggtgtggggggccagacggaggtggggggactgaggggctgctccccaggaagtcgtccccaactgagccctgttggggagcctgtggccgaggtaaatttgtcctgagccccaggcagcctggtctccagccacgtggtcaagccagggcctggggttctggaaactccaatgggaccctttgggctgtggcaggagggttgtctcagggaaacagggcgatggggctggaggcaaaatccatttttgtagggctttaagtggcaaattgaggagttgaaactgaggggtttggaaaccaatggggatttttaaatgaagacattttaggagggtacatcaggcagggggcctcagaagggactggaaggggaatgccagaggcagggagaccttaagggctgctgcgatgtaggcgagagttgccaagggctgagggcagccatggtggaggagcagcagctggagggtgtggcggcctggcaggagacacagtgatggggggcctgggtgggggggcatgtgcaaggtgtgagtgcaggcccagcagaggcctggcaggagacacagacggggtggctccgggtggggtgcaaggtgtgagtgcaggtgcagcactcactttgcctctggacctcagatgccgggaccttggtctgttcaataatggggcaggaccgggtgatcaccaaggtccctgaaagttcggagttgttgcttttgcccctgtattagcccattcttgcattgctacaaagtaatacctgagactggg

SEQ ID NO: 4052 - DNA, 1680 bp, Artificial sequence
  DNA replication origin
ccacatctaggtaacacttccaatgagagaagtgcttcctttttctgtcctattgggctttatgtcactgacgtcgcagacccttcctgggtcccagtcatgccccaccaggtccaggcagtgctcggtggcagaagcctgggcagagtgcggagggcagatgggaccggctcccgccgcacttccagcgtcttccggcctctgtggcctggctccaggctctgccttgaaggagcagggcgctcttggttgctggcctgcactggccccatgctggaattcacttgatgttctcaatactcctgagagacacggaaggcagggacactatcccagcacacatgggcgaacccaaggctcagagagctgcagggccctgccaaggtcacacagctgggaagaaccgaaagccctgcccgcccaggcgtggtcactcggcatctgctggcgtgggaacctgaaatgggtttccgcccaggccttcacactgggatcacccaggaagcaggttctctgacactaaatcaggatctcgggggatcctgtgtattggggcgtttcagtgggtcctgtgtattggggtgtttcgggggatcctgtgtattggggtgttttgggggatcctgtgtattggggcgtttcagtgggtcctgtgtattggggtgtttcgggggatcctgtgtattggggtgttttgggggatcctgtgtattggggtgtttcgggggatcctgtgtattggggtgtttcgggggatcctgtgtattggggtgtttcggggggttctgtgtattggggtgtttggtgggtcctgtgtattggggtgctcgggcgggtcctgtgtattggggtgctcgggcgggtcctgtgtattggggtgttttgaggggtcctgtgtattggggtgtttcggcgggtcctgtgtattggggtgtttcggcgggtcctgtgtattggggtgtttcggcgggtcctgtgtattggggtgtttgggcgggtcctgtgtattggggtgttttggggggtcctgtgtattggggtgttttggggggtcctgtgtattggggtgtttgggtagatcctgtgtattggggtgtttcagcagatcctgtgtattggggtgttttttagtctccccaggtgagttgaatatgcagccaggatgggaatgctgacaccacagggaggagaaagggggctgagtaaggttttccccagaatccccatgaacaagatgatttcagaacaaacagtgctggtggaggatgcagggatgcgtctgctgaaacccggcctcgcctgggacattgtcagcttggaaaccgctgagtgaaacgaagcttacatgtgtgtggtcaaggctgttgacaaagacaaaagaacaaaatatttacacaggaaacaacaaccaaaaaaaaaagaagaagaaagcaaacgtcgtgtcatggaactgctgagtgcgtttttgctcgaacatcccctggggagatttactgatttctggaacgcctctcctttgggcatcctgtgaccgcctttcaggaggaatctggatgtacatttcctctggtctgtgtgtgtccttcacacacactcaatgaatgtcaagcccagtggcggggaggggtcacggtgtccctgttgtctgcccagaccagcctggccaatatggtgaaaccc

SEQ ID NO: 4053 - DNA, 958 bp, Artificial sequence
  DNA replication origin
acagtggtgcccggggaggccaggcagggatggggccccaccatccggccgccctctgggggctgggaaaggggttcagttgctgcaggtttctggcccagtgcccctggagatcaagccccagtcccttagctgccccactagtcctgccttgcagcctcactgtccccatctctcagggtgcctgcccgtcaccactgtacacactgtcactcgaggcccagcaccactctctgcacactttgtgggctataaagacctacttattttccgtttgtcagcatcgctctgtgacttgatttagaagggtcctaggatcctaggatgggatccccttctcagccgacccccacattctccccacctggcacagagcaggcactcagttcagggctgggttgctgcatttaattattcctgggtagaagtctcgagcaggttgaagttcaagccgaaaaagaaccatgtacattacaggaatgccaaattgcccgggagggtgacagcgcctctggaggggtgcattcaatcaaaaggtgcggggacacacggccctggagggcctccagcactgagatcctgagcgcctttgtgagtggggcacacaggctgggtggccttcatcagatgtgccgtctcagaacccgggcacggtccagtgtctcacagatgccagctgcctccagacgtccgtgtctcctttacccccaccacagtgcactatttgctgcttgaaaatgcttgtgatgcctgcgtgcctcttctccccttcttccagctggtaccccaaaagtgagcacgtgcccctggagaaagcgccgccttcacgcctccctgaactcactcagtgctggacaaggagatgtgagcagaagcagtgtgtgccacttctaggagttcatgtcctcaagggcggagcatcccttccagtccccacggctggaatttcaacgtaatg

SEQ ID NO: 4054 - DNA, 867 bp, Artificial sequence
  DNA replication origin
cctcccggataccctggccaactgcctcccctccttccaggctttgctcacttctcaccttctcggagaggcctcttctgagccagccgatttcttgcattctcagccctgccctcccagctctcctgcctgcccagtggctcgtgtggcctgcattgtgtctactggatgcatcgtctgtctcccccgtgaaacataaactcaagtaaacggctctttttgctgagtcaactgcagagtgctcgataagtagtgcttgcaggaactgtgacttctggctcaggttgatagacgggcgaatgaggagtagcagcaagtgttcgggtgggtgggatggggtggatgagttttgctttgagcatgtggaactcaaggtgccagcggccacccagatgaaaggcccagaggctatctgggaggcagctctgggacactgaagagaggtgacactatggaaggaagagtgacaggcttaaagaagacatcctggagcatgttaacacctgcgtgggtgaggatgaggagtcggcagagaccaaggaggccgaggacaagagggaaatggaggccgtgtcgaagctcccagggaggctagcaaggctggagatcaggagatgagcttcctctcccacgagcttgagtggtgagtggaggggactggaggtgggtcccagcaaggaaaggggtgatgtgcagagggaaatggggacagagaagggagcgccaggagaaatcagagcagttctgcagaaccctggaaggcagacctagcaagggcaggaggaagctagggaaagggcggggagggaggttttgattctccaaatctcaactcacaatgagatcatctgaaatgggagagaaggc

SEQ ID NO: 4055 - DNA, 1046 bp, Artificial sequence
  DNA replication origin
gggtcaatctaatgagtctgaagataaaagaaaatgaggagatagctgatggggagctggggaggattctgtgtccaaacaggaggtggtaatgaccttgaaccacaggtgctgcatcccctgagctaagaagaaagaggcaaccttgggagagggtgatattgtgatataacaaaaaatgtagccaggcacagcggctcacgccggtcatcccagcactttaggaggctgaggtgaaagcatcatttgaggccaggagttcgagaccagcttaggcaacatagtgagacccccatctctacaaaaaataaaaaaaataggcaggcaaggtgcctgtaaccccaggtactcagaaggctgaggtgggagaatcccttgagtcctgtgctccagcctgggtgacagaggaagaccctgtctcaaaaaaaaaaaaaaaatgctgagctaggctggggttctgctgaaacaaggtgaggcacagagaaggaaaggtgctgatgagagggaggttcaggcagcctggggttcaggcttggctggaagagaaacaggaccaggaggaggtgatggggtggcagggagcagaggcggtgtgtgagttaaggggaaggtgtggtgggaggcaggcatgggggatggaggtggggtacttgtattcaagatttcaggggcggagcagtttcaggtgatgacaaggtacagggtgtggcacaggagtgggcacctgaagggagagaaaagggaaggccttggagtggaggaagtgaaggtgcacagaggcggccatccggtgtcctccacggggcactgaagccacccttcttgggctggagcgaaatactgctctaaagctagatgcctgagtattcaccgcgcaatggggagtgggcaggtgttaacattcattcattcatcgttcatttgttcattcggggaaatagttactgtttattagctttaccatgtggtgagccaggcagatgcagatgcttccctagtggatctgaccatctcctgcgaacccatcgttgcagacacacatgact

SEQ ID NO: 4056 - DNA, 1592 bp, Artificial sequence
  DNA replication origin
cgcggtagggggctgcgggcgacgggcggcgggtgcggggccggagcgctctgccggctcccgggaggcagcggcttcgctgccccgcgccccgccccgccttttatcccgggctctggaggcggccccggccccgcaggatatttgcatacgggccgtccgcctcccgcctcgctccagccaggggcccgagagccggggagcaggtgcaggcgccgggcaggaaggcgcggaggagacgcgcagggtctccagtcccctacgcgcgagggccggggccctgggggcttctgcggcgcgtcccacggggtctcctgccgcacgactgcgctgccgcgtccgggacgcgtggacggctgagccgggtgggagtcgggaaaaggctctgagctcgggaccaccccgccctcccgctgcggccgccgcagccccgcttgcccacccactctcgcctcacagagacatgcgcggatctcaggggaatcacctactcccaggtgtctccaggccagtgcaagagacagggcccacctgtggggagccgcgcaacaggtgcgcaggtgctcgggacgcacctgcgtagacagcgaagcttttcctgtccgtgtgggcgcgggtgtgcgcccggttgcccaggaaactcccacctcaccctctccaccttccgaattgccctgtggatggggggtgggggggcggttacaactcaccgtacgacgatcagagatgagttcatgatcggtgctgtctggaaccaggagggggaaaccctggaaattaacgtgtgaaggttaaaaacaagacaaaaccaaaggaaaactcggagaattcattttctctggaccgaaggagaaggctttaaagcatccttccatgtgggcgatgttttcagtggtttctgggaaagatgaagatctcaagagtgtccttcgagggggcattggagacggtgttcttgcttccttaaacgtggactccccctcctgtgtaaactagccttatctatcaacccattcttgtgaatgcatcagggtctttggcagaaggatttgacatcatctgagacttaagctgtaatcacatagggtgggatgggaagccccagagacgggacagaaaggtggctttaagatcacagtggggtcgtactgccagcctaggttagacttggaagtcccagcacctgcagcaggcatcgttattgggacactaatgtgcattagtcagtccttgcaacatcttcctgagggaggatacctgaaaccaagggatggggaaactccggtatgtttgaggacattaagtggctattccagggaaggagtggcccagttagacattaaagcggggtggtctccaatcttggacgttatccaggcacgacattttatccagccagggaaaacatcttagagctgggggcagatctcatctgcaaacaagggtggagatgcccacagaagttacgtgaattgcccagtgtcacacagctggttatgtcagagctacagttggaactcgggcctgtggctgagtcttatgtcctttctactgctcccaacaagcctgcaggactagataatcagggtgag

SEQ ID NO: 4057 - DNA, 850 bp, Artificial sequence
  DNA replication origin
gcaggagaccccgtgggacgcgccgcagaagcccccagggccccggccctcgcgcgtaggggactggagaccctgcgcgtctcctccgcgccttcctgcccggcgcctgcacctgctccccggctctcgggcccctggctggagcgaggcgggaggcggacggcccgtatgcaaatatcctgcggggccggggccgcctccagagcccgggataaaaggcggggcggggcgcggggcagcgaagccgctgcctcccgggagccggcagagcgctccggccccgcacccgccgcccgtcgcccgcagccccctaccgcgcggcccgcgccccgccggctcccggtaaggacgcaccgcggagcggggacccgaggcaggggcggggtggggacacaggcacggggtccggctgcgcaccagcctgcgctttcccattggaaacgtgggcagcgtgcacctccgcgcgcttccccgcggccgggctggtagcatctccgcaggtgctgcggcgggccagttcgtccccaggccatgggcagtcaaggcggaaaggagctgcgttgggtctgcgcggggttaggagagaacaaaatgccctcggattggagcgggaccgggagtccgaaaggaagaggttccaccaggggtctctggctcctcagagcttatcctgctttcccccagccgtccggagacgccgcggggaggcaagcggaaagggggaacctggccgagggggaaaggtgcgggtgtggacacctgtgaaggagcagcacgaatcgaatcggccgtagaggctgcagacgcggccgcgaaaccaccggccacgccgggcaagggacccagcact

SEQ ID NO: 4058 - DNA, 1464 bp, Artificial sequence
  DNA replication origin
ctccgcaggtgctgcggcgggccagttcgtccccaggccatgggcagtcaaggcggaaaggagctgcgttgggtctgcgcggggttaggagagaacaaaatgccctcggattggagcgggaccgggagtccgaaaggaagaggttccaccaggggtctctggctcctcagagcttatcctgctttcccccagccgtccggagacgccgcggggaggcaagcggaaagggggaacctggccgagggggaaaggtgcgggtgtggacacctgtgaaggagcagcacgaatcgaatcggccgtagaggctgcagacgcggccgcgaaaccaccggccacgccgggcaagggacccagcactgctgagcgggcacctcgcctagtggaaaaaagactttagtagttcccctcaccccctactacttttttttttcttatttaaaaaaatcctctgaagtctatttttaaagctaataccaatcacaaggttggccagtttgacctgcggtttgacctggtagcctgttgtgaaaatcccttcctcatcccacgccttcctccaccccatcctgcatcccagaagatgcagtgtggaaggaagacaaatattcccccagaaggtgtccgcctccagcttactgtcctcccgttttatgatgcctgataggggttgttcactgaggtggagagaaagaaaggaacctctccctcctcctctgctcctgaaaaccagccagaaccactgcagggaccaaggagctttggagtttcgggaacacctgagggctgcccaggtggagataagagctttgcttttgcaaatggatgtccttggagctcatcctagaaaggatgaattggagggtagggagtggtgaggcggggatatctgacacatctctccttctgtttctgtttgtgtatgtttgtcctggttctgggcagtcactgggtaagagaagactggaagcatgtcggagttttggttaatttctgcccctggcgataaggaaaatttgcaagctctggagaggatgaatactgtaacctccaagtccaacctgtcttataataccaaattcgctattcctgacttcaaggtaaaattcttggggaggagtgaaaaagggatggattggtcagggggagacaggagagggagacaggttgctacctcaggaagccaaggagaaagtatcaaggcaaagcaggggctctgaggacaagctgaggtttgaggatggacggggaggtgatgggctaggtgggatatcatgccatagtcccaaataaattgtgatacctatgtagatgcagccacaggaaggaatgaacagggggacaaggttgtgggtagcagtgtctaatgcttcaaaaagtgggaagcacgttaaatgcacactcaggttctcttgggtgttcctctggctcctcctggtttgtctgcaacatctcagaagacccacc

SEQ ID NO: 4059 - DNA, 919 bp, Artificial sequence
  DNA replication origin
atatatatacatacatatatatatatatttttttttttattaggcaaaggccgggcatggtggctcgcgcctgtaatcccaacatttgggaggccaaggtgggcggatcatctgaggttaggaggagctcaagaccatcctgaccaacatggtgaaaccccgcctctactaaaaatataaaaaaattagccgggcgtggtggcgggcacctgtcatcccagctactagggaggctgagacaggagaatctcttgaacctgagaggtggaggtttcagtgagccaggaacatgccattgcactctagcctgggcgacaagagtgaaactccatctcaaataaaaaaaaaaaaggcaaaataagctttgttgttgttggtgtggttttggttttctctctggactgccttgaggggtgcggcttccaggctgaggacggaggcagcccgagagcgccttccaggagccactcgggccctgcgggcttcacgagggtggggacaggagccagccagagggtccacaagggcatgcaggtagggcagctggggagaacccaggtgacacttgccccaagtgtagcaggaacggagggagcagacagcaggggacacagggctgaggggagggtgtacttgactcggaattgagcgtgttgccaacagccacagtctcagaaaggagacgggtggaggatggagagaaggcaggagctggggtgccccgatagctcccccagaccctgcccatcctcaggacagtcccagccggggcatcactgccacgcacctgagcacggactccacaaacactctcagggccttgatgtggatccaggcaatgaaggcttcactgaagttcaccttgagccagcgcagcagggggccctgcaaagacagaagagccaggtgacccctgctg

SEQ ID NO: 4060 - DNA, 1050 bp, Artificial sequence
  DNA replication origin
ccagaacaagacaccatgccgggtgcagtggctcacacctgtaatcccagcactttggggggccaaggcaggctggatcacctgaggtcaggagttcaagaccagcctggccaacgtggtgaaaccccgtcgctactaaaattacaaaaattagctgggcgtggtggtgcacgcctgtaatcccagctactaggggaggctgaggcaggagaattgcttgaacctgggaggtggaggtcgcagtgagctgagattgtgccactgcactccagcctaggcgacagcaagagtccatctcaaaaaaaaaaaaaaggaccccaggagcggctggcccatcggtctcaacctctttcttgggcagatgcgcatcctggaaggcatggacaggcttcactgtgttaggccgttaggcctgagagcaaccgacttctgagccgggcagggttgatctggggccatgtatattagagatggctagaacactcccaggagctgggtacaccctccaacccaatgctgccatccgtgtcggtacaggcttttgagatgggcgtgcacaggtgcgcatgggtacaggtgtgggtgcggtgcatgtgcagggcagaagaaccaggaaccaaggtcagatctgtatctgggcagaccacacactgacagccacatggaaggggaattggaggccaagaacagagaggaggcttatggcaacagccaggccggtggggccagacccgtgaaagagagagtgcaaaggcggagtggaccgggcctgtcaggggtgtctaaactgaccctgaagtttggggtctgataaggggaaggatgaggaggccactggcagaaacagggaagcagaggaaggggtgcgggaggggagatgagacagatacccaggtaaagcctacggcaggcagatggcaggacctggaaaccagggaacatgggcaggaaaacgagggaaagtaggggacatcagccagggggacggcagggagggatgaggagctcctcagtgcaggcggggaaggggtccggaaggtcacacagagg

SEQ ID NO: 4061 - DNA, 1769 bp, Artificial sequence
  DNA replication origin
ccattggatatgtgagtgagcgatgtccgcccggaccaatgagccgcagccacggcttggcgagcgccttccggcccgcccccgcgcggccgcccctcggaccaccggactggcctggggcgggacgtgggcgcgggggcgcggcgtgcggcacgctgcagggctgaagcggcggcggcggtggggactgcacgtagcccggcgctcggcatggctctcctggtgctcggtaggtgcgggccagcggagggaggcgggcgagctggggtcggcctgaaaggtttcgaatctctaggccgttccccggcgggccgcggccgcaggcggccggaagtgggcctggcgggcgggaggcgcgggcctcggcgtccggaggagctgctaggttgccccggcggaggtgcgggtgcgcgggagactcgggcgcccgtggggaggggcttccgcagccgcggggggcgggagcctcgtgcgctggagccgggcgcggggtccagggccgggcgggagagccgcggagcccagccccggccggatcccggggagggggtctgtattcccggagagtcgcaggggagcttgttccgggctcttctcgaactcgtgcgtggggacggaggttggcgggcgtcctgcactgctgcttgtttctgccacctgctttatgcagctcctacttttaaaaactgaaatgttaagccgggcgcggtggctcacacctgtaatcccagcactttggaaggccgaagcgggtggatcatctgaggtcaggagttcgagaccagcctgaccaacatggcgaaaccccgtctctactaaaaatacaaaattagtcgggcgtggtgtcgcgcgccagtgatcccagctactcagaaggctgaggcaggagaatctcctgaacccccaggaggcggaggttgcagtgagccgagatcgcgccactccagcctgggcaacaagagtgaaactctgtctcagaaacgaaaaactgaaatgttaaatctcagtcctgaaataaggacccatagttcccttagaaagggacagtgccttccaaaagctgggcttaagacgcaggggcgcttcgcatgtgatcggactccttaaaaacgaaatggaacgcggcgtcttaggaattctgtaaatgtctgcttcttagtgggcgaggccgagggtcctgtccttgccgggctcgccttggtcacagccttggctctgacagtccttaacctcggctctggcctcagaccaccttccccctatttactggctctgtgacttggagcaagttacttaaccactctgtgccagtgccttttcaacggtgttcaccattttagggactgataatagtactcccttagggttgtcctgaggattaatgagttagtacatgtctttctgttttttgagacacggtcttgctctgtctcctaggctggagtgcagggtttccatcatagttcactgcagcctggaactcctggtctcaagggatccaggcacatgccaccacacctggctaatttttaaattttttgtagagtcagggtctcattgtattgctcaggttggtctcaaactcctggcctcgagtgatcctccttcctcaacctcccaaaatcctgggattacaagtgtcagtcacctggcccagctagtacatgttttaaagagatgtaaatatttgccatattactgtggagagagtagatgaggggaaaagagtttagtctgtttagtttcctgtgagtgaattcagactagac

SEQ ID NO: 4062 - DNA, 901 bp, Artificial sequence
  DNA replication origin
gggagggaggtgggggggtcagcccccagcccggccagccgccccgtccgggagggaggtgggggggtcagccccccgcccggccagacgccccgtccgggagggaggtgggggggtcagccccccgcccggccagccgccccgtccgggagggaggtgggggggtcagccccccgcccggccagccgccccgtccgggagggaggtgggggggtcagccccccgcccggccagccgccccgtccgggagggaggtgggggggtcagcccccagcccggccagccgccccgaccgggagggaggtgggggggttagccccccgcccggccagcccccccatccgggagggaggttggggggtcagccccccgcccggccagccgccccgtccgggaggtgaggggcgcctctgcccggccgcccctactgggaagtgaggagcccctctgcccggccaccaccccgtctgggaggtgtacccaacagctcattgagaacgggccaggatgacaatggcggctttgtggaatagaaaggggggaaaggtggggaaaagattgagaaatcggatggttgccgtgtctgtgtagaaagaagtagacatgggagacttttcattttgttctgtactaagaaaacttcttctgccttgggatcctgttgatctgtgaccttacccccaaccctgtgctctctgaaacatgtgctgtgtccactcagggttaaatggattaagggcggtgcaagatgtgctttgttaaacagatgcttgaaagcagcatgctcgttaagagtcatcaccactccctaatctcaagtacccagggacacaaacactgcggaaggccgcagggtcctctgcctaggaaaaccagagacctttgttcacttgtttatctg

SEQ ID NO: 4063 - DNA, 1207 bp, Artificial sequence
  DNA replication origin
accccccaacctccctcccggatgggggggctggccgggcggggggctaacccccccacctccctcccggtcggggcggctggccgggctgggggctgacccccccacctccctcccggacggggcggctggccgggcggggggctgacccccccacctccctcccggacggggcggctggccgggcggggggctgacccccccacctccctcccggacggggcggctggccgggcggggggctgacccccccacctccctcccggacggggcgtctggccgggcggggggctgacccccccacctccctcccggacggggcggctggccgggctgggggctgacccccccacctccctcccggacggggcggctggccgggcggggggctgacccccccacctccctcccggacggctggctgccgggcgcagacgctcctcacttcccagatggggcggctgccgggcggaggggctcctcacttctcagacggggcggccgggcagaggtgctcctcacatcccagacggggcggcggggcagaggcgctccccacatctcagacgatgggcgaccgggcagagacgctcctcacttcctagatgggatggcggccgggaagaggtgctcctcacttcctaggtgggatggcggccaggcggagacgctcctcactttccagactgggcggcctggcagaggcgctcctcacatcccagacgatgggcagccgggctgagatgctccttacttcccagacgtgatggcggccgggcagaggggctcctcacttcccagactgggcggccgggcagaggggctcctcacaacccagacgatgggcggccaggcagagacgctcctcacttcccagacggggtggcggccgggcagaggctgcaatctcggcactttgggaggccaaggcaggcggctgggaggtgcaggttgtagcgagccgagatcacgccactgcactccagcctgggcaccattgagcactgagtgaaggagactccgtctgcaatcccggcacctcgggaggccgaggctggcggatcacttgcggttaggggctggagaccggcccggccaacacagcgaatccccgtctccaccaaaaccagtcaggcgtggcggcgtgagcctgcaatcgcaggcactgggcaggctgagtcaggagaatcaggcagggaggttgcag

SEQ ID NO: 4064 - DNA, 1473 bp, Artificial sequence
  DNA replication origin
gggcgcgccgcgggggaggcatgcacccggcggcggggctcggggctggcatccgggcgcccgggcgagcccgcgggggctttggcggccgccggcctcgcccggggcactcaccccggctggctggcggcgcgctccgccgcttcagctcggcctcctgcgggagcggggtctcctcgtgggcggctggcaccgtcctccgccccggggcgcgcaggcagcggcggcaggtcccggagctggcggacccacgccgtccgcgaggtgctcgaggtgtgcagagagcgaacttgggctggctttgcccgagccttttctaaacacaataggaattccagcctgacgtcaggagcttttcaaactgtaccctcttctggtgaaattctgcaaggcacgcgcggcagctgcaggggacggattaacccttgggcagacgggcacagctgccgcgcccgccgccaccaccgcgcaccgccggcccctcctcgggcgcagcgggtcaccgaggggttgcgacctggcttgaagcggcaggcattctctctcactgctgtttggagaggattagtggggagagaatgctgccgcctgttgctgggcaggaaaatgtgctccaggaagccccttagaaggtgactcctatgtctgggtccctcctccggccttagacccgcgccggcttttcctggtgggaggaaaatcctgcctgatccttgaagcgtttcctgccccatccccccgacccagcaatgccctgctgtgttggtggcactgtctcaccttccccgcaacgctgtacaaggaggacatctagtccagcctcctgtagaagggaagggacttgcccaaggtcacgcggcggaatgagagcagagctcagcttgaccgcctcctgatcccgagctttccggctgtcccagctgaccgacgcctgctgttcagcagatttcaattctgccttgaagtccctgccgtctggcacctcctatctctctgcagtcccacaccaaggccactagcttccagacccctagggtccagtggctcctgcttccccgttcctcactccttgaccaaggcctgtctcttcctgaccagtgtcccacaccctcctctcttccagcctttgcagccacagctgtccttctgtcctcactcacctgaaccactacagcagcttcctaacagtgtctctctcctccggttcaccactatcatcaatactgcaaattactgatatcatctatggcctcgagatcgtgttaaaaatattctggagggaagaatgaataggcagagcagaggatttttagggcagtgaaacgtaccataatggcggatatgtgtcgttatgcaatggtcaaaatccatagaatgttcaccaccaggagcgaatgttaatgcaaactcggtgctgggcgatgatgacgtgtccatgtggggtggtccaccatgacaagtgtcccaccctgt

SEQ ID NO: 4065 - DNA, 1742 bp, Artificial sequence
  DNA replication origin
agggagatacagaagcgggcgtgggctctcgtgccagccaggccgcggcctccactcgtcccacacggccctgcggctcctgcacacccctccctcccgggctcctggacagcaggcaacatagaggagtcttacccagccttggcagaggtgccgggagggccttcagagtctgtccaggggagggttggggggacacaggacagcccttctgtgctgtcgatgacatgcctgccacatctacccatctgtccaccgcctggtccatctctgcctgaggggccctcctgtcacttgcaactctggagccgggtcctgtggtgcttctcctcggtcaggagggggatgaaggtgtcgctgtgggagagcttcagccggctgctgcagctcggcgcctccttccccgcaggctctggagggaggttgtccaggtcactgcgggagcccccggtcttgccctcgcccccgctgctggagttgagttccatcagctccagctcgtgcttggccgcggtctccaggacgcgctgcttgttgtagtacctgacaaagttgttgatgatggggtggatgggcagggcgatggcgatgacaccacacaagaagctgatggccgcgttgagcttgcccagcgtggtcttggggtagatgtcgccgtagccgacggtggtcatggtgatgatggcccaccagaaggactgggggatgctcttaaacagggtctctggatggctctgctccatggtgtagcccagggcagagaagacgaagatacccactgccaggtacatgagcagcagccccagttccttgaagctgcgcttgagggcataggtgagggtctgcaggcccgaggagtggcgggccagcttgaagatgcgcgcgatgcgcatgatccgcagcgcctgcacggcctgctgcacgttggtcagctccatcatgcgggcacccaggtgcgtgagcgtgaggctcacgtagaaggggaggatggccagcacgtccacaatgttcatgaaggacagcgcgaagtgcagcttgttgggtgacgagaagaggcgcagcaggtactccagggtgaaccagccaatgcacgccgtctccacgttctccagcgtcgggtgctccacgcggttgccctcggcgtccagcacctgcagctcggggatggtgcccatgcacatgaccacggacgagacgaggatgagcaggaaggagagcacggccaccacccgcgccgggcacgacgactcgggcttctccaggaacttccagacgcacttctggcagcggcgccagcggccctcggctgcgtccacgcccaggtcgtccaggatgagctgcacgcggcgcgcgatctcctccagctcctcgcgcttctcgctcaggtggctcttgcaacagtcgtccaggaacttgaggtccaccttccagaagtccatctcgttcttgaagcagatggggcagatgcccttcttcatgtggacctccccgaaatagtacacctcgatgacacacttgaaggcgtccgggtccctgtcaaagtagaactcgcgcttgccggggtcgtagtcgtcgcacagggagaagatggtgtcgtagcccccagccaagcagttgatgagctccgccagccgggtctcagggtactgactgaggaggtccccgtacagcacctgccgcacgccccccacgttgacgactatctctatgtcgtcgctggcagcggagctctggctgcccgg

SEQ ID NO: 4066 - DNA, 1754 bp, Artificial sequence
  DNA replication origin
gagctgaccaacgtgcagcaggccgtgcaggcgctgcggatcatgcgcatcgcgcgcatcttcaagctggcccgccactcctcgggcctgcagaccctcacctatgccctcaagcgcagcttcaaggaactggggctgctgctcatgtacctggcagtgggtatcttcgtcttctctgccctgggctacaccatggagcagagccatccagagaccctgtttaagagcatcccccagtccttctggtgggccatcatcaccatgaccaccgtcggctacggcgacatctaccccaagaccacgctgggcaagctcaacgcggccatcagcttcttgtgtggtgtcatcgccatcgccctgcccatccaccccatcatcaacaactttgtcaggtactacaacaagcagcgcgtcctggagaccgcggccaagcacgagctggagctgatggaactcaactccagcagcgggggcgagggcaagaccgggggctcccgcagtgacctggacaacctccctccagagcctgcggggaaggaggcgccgagctgcagcagccggctgaagctctcccacagcgacaccttcatccccctcctgaccgaggagaagcaccacaggacccggctccagagttgcaagtgacaggagggcccctcaggcagagatggaccaggcggtggacagatgggtagatgtggcaggcatgtcatcgacagcacagaagggctgtcctgtgtccccccaaccctcccctggacagactctgaaggccctcccggcacctctgccaaggctgggtaagactcctctatgttgcctgctgtccaggagcccgggagggaggggtgtgcaggagccgcagggccgtgtgggacgagtggaggccgcggcctggctggcacgagagcccacgcccgcttctgtatctccctcaataaagcctcctgctctgtgcaccctccgtgttgtaggttctgtcacaggctggctgtcacccccaagagtagctcaggcacacttcagtgccaggccaggaggtaggtgtgcagccgggtggtgggggagttatttttagtgggaactaattaaagaagggctcatagtcaggttcggcgccaaggagccttaccacattcctggaggctctgcaggccgtgcttccctgctgcttccttctggggtaaagcttgctccccctgcaggcccaggatgggggagagttcacagtgcacgcccagcagcctgcagcatttagttatcacgtgcaccgggcccttttcacaacctctttctattccttccattgaccctactagctaggtatctccattttacagatgaggaaactgaggcccaaggtcacacagagaagggaacaatcccaggtctgatgatcccaaagcccatgtgttctctctgacaccaggtggtcttgggacagaggcatctgcttgggctcatgatgagacagtctttggaccaggagaggggctgatcttccttggtgtgggggtgcctgtcctccagcccatctttctagccctgatacctttgagatagctgctgaatggataaacccgagtgtggatgcccctacccgtgtcctggtgtctcactgaatctcctctgagagccccgagggaacagatcaaacagatctgggttcgaagcccaggcagtgaagaggaaccctgagatgcctttgagcttaaacatttttctctaaggcctctcctccaccactcccttac

SEQ ID NO: 4067 - DNA, 1025 bp, Artificial sequence
  DNA replication origin
cgctcgacagaagggagcttgaaaagcccttcttaaaaagtccatttggaagggagcgctacagagattaggaacagcacatcttgtattcatgtttcaataactcatcatacccaaatgagcacctattgtatactgggccctgctctaggcgctgggattaggaacagtgaataaaatagacaaaagtcccgagctcaaggagtttcactccagtgggaggcaacacgagacaaggtgagttcagtcgcagcgtgttgcctaggccgttggactgccatcgggcaagtcatgtacccggaggagggaggatgtgacacagttggtaggggcagttagagtcgagcagctgcggaaggcctcactgcagaggtgacactggagtaaagagctaatgggagtgagggagcccgactggggaggtctttgctggtgcaggggaagcggggtggagggggagggatgggagaggggagtgcagagggagaggtgggggaggggttgggacattccaggcaaagggaacagcaagtgtgaaggctctgaggcaggaaggcatggcaattttgaggaacagtgaggtggccagtacaggtcacacagggcagggaggccacagggaggactttggctgttactttgagtgacatgggagccactgtaagtttggggcaggagaaggacacgatctaatgtgttctgaaaaggcctctctagctgcagtgttgagaacccaccttagggggctgggtggaagcacgggcctgcctggacggcatgcagtggctcagcccgggatggccagagtctgcacagacatatgaagggacagatgacaggacttgagatggattggatgtggggtgtccacctggggaaaaagagatacggagtggctggaaccatgaatgactgtctaagcccgctagcttcaggagctgggagagaagttgttggaaaggaaaaagttctcctttttagtcaaacatcaccacatcgggaggcacgcacgcatggactttctg

SEQ ID NO: 4068 - DNA, 1291 bp, Artificial sequence
  DNA replication origin
ccctggcagacgactgagttagaaagcagaattgtggcccggtgcggtggctcacacctgtaatcccagcactttgggagtccaaggtgggtagatcacctgaggtcaggagcttgagaccatcctggccaacatggtgaaaccccgtccctattaaaaatacaaaaattagttgggtgtggtagcaggcacctgtaatcccagctacttgggaggctgaggcaggagaatcgctcaaatccggaaggcagaggttgcagtgagctgagatcgcgccactgcactccagcctgacgacagagtgagtctccgtctcaaaaagaaagaaagaaagaaagaaagaaagaaagaaagaaagaaagaaagaaagaaagaaagaaagaaagaaagaaagaaagaaagaaaagaaagaaagaaagcagaattgctccctgtgtccctgctcgcaggcagggcatcctcactgggtgtgagatttgcagtggaaagcaggctggagttgtgcatgagaagagaacctgggagctgcagacagagagcacagtgaggctggtgctgccaaggggccaggctgggaagggcagggggattggtggaggcagacatgaaagccggaggacattccagaccaagggaacaatgaacaaggagaaaccatgcatgagctggggacagctgggagaccagctgactagaacagagacactactggaggccaggtggctgagaagtgggggctggattcctggggtcttaggattggatctgcctgcagaggcaagcctttgagcacctctccagataggcaggcattcaaggaggtgtccccagctcacttccctccctgacctctgaagcatccttcctgcagatgaggcctacgagaacgtgattaacgccctcctcctcatcatgatcactggggtgattaggacttgttgtgcacctactatgtgctaagcactgtgctcagggcttcgcgtgcagccctgctctcacactcagagactcagctccaccacgcctctctggcagccagttggggtcactgaggcagaaacagggccaggccggcccctgccaagttcctgtaggctgagccatgtggggtcagcgcatggtaagatccacccgtgaaccctactctgcggacatatctgtaatgggaaaggggaagcctgcggcagactccctgggcggccagggcagaggggaacgggaggagagccctgcatcgccacgacggaacagggactctgctcggcagccacatgtcattttccgccctccc

SEQ ID NO: 4069 - DNA, 1223 bp, Artificial sequence
  DNA replication origin
gactagacagagcagggctccaggaagacaagttagatggagcagggctcctggaagacaggctagatagcgcggggttcctggaagacaggctagatggcgctcagctcctggcagacaggatagatggcgcacggctcctggcagacaggatagatggcgcacggctcccggaagacgggatagagggagaagggcttctggaccacttgaggtcaagggtcctttgaatcctacagagtctctccccacccccaaaatgcacacctgcagggaacataccaccagtatcaagggtttcacagacaccctaaaggacatccttgaaattcttcagtgttcctagggctcctgatataaacagttgaaggcaagacatccagaagccatgtcatgggaggaaagttgaaagagatgaggcctcatcttggagaaaagttgcctccttagggtgctgagagacatcctcaattacttggagagctatcatgagtgaggggtgttgttctcagtggttctaagggtcagagttgaggccactcagtgaggctcatggtggtgtgtctgttcctaagaaaagtatttccaaagggagagcactggcatgacatgaagtgatgaaaacggtgcagcaaaagtacagtgaggaaggaaggaaggaaggtgaggaaggaaagaaggaagtacggtgaggaaggaaggaagtatggcaaggaaggaaggaaggaaggtgaggaaggaaagaaggaagtacggtgaggaaggaagtatggtgaggaaggaaggaaggtgaggaaggaaagaaggaagtatggtgaggaaggaaggaaggaaggtgagaaaggaaggacggcgaggaaggaaggacagtgaggaaggaaggacggcaaggaaggatggatggatggcaaggaaggaaggaaggaagtacggcaaggatgctgcaggagggagcgctgctgctaggggaatgctggtcccgacttctagctcccttccaactccctagaatgcaaggatcaacagcgaaggatcatgtgtggggatattctctccctcctttccttcctttcttccttccttccctccctccctccttccttcccttcctcctttcttccttccttccctcctttccttcctccccttcttccttctttccttccctttttccttccttcctttcttccttcctctccttcttccttccttcccttcgccct

SEQ ID NO: 4070 - DNA, 1000 bp, Artificial sequence
  DNA replication origin
aggagcatgttctgctgctcttccaggcccgactccagctcatttccttgagagaccctttcacctattccaacctgcatttgcctgtgtcgtcctttgcagcagcagccttgtggctgtgcctcttctgtgccctccgagttctaggctgagggtgaggattggatgagttgatccacgcaaggctcctggcacagtgcctggcatatggttaaatagacttgaagttataattaccaggtatgtgaccctgtcctcaatatgagtgccacagtgggctggagagtggcagccctgctgggcaggatcgtagggtctcagtgacaggccttcctcgtatccctgacagggagagaggctcactgaatagtaagttggctgtgtcttttctgtctgagcctctctgggaagcttccaaggggataaaggcttgagctggaacttggaggagtttgcaggtggctggattggggtgggggtggggaggagggtgccagcatgccaggtgggggaacagcatgggcgaaggtatggagatgggggagggatctggacagggtgcctgtggctggagcacagggcatgtgtgggcgggaagcaggtgaagagaggaagagctctgggggacttctggaggggacccaccgtaggagcaggccaatggctggcagggctaagtggtgcaggtgcccctgatggatttgatcgaggtgggcacacatgctcatgtcagaggcatgtaaaccagagcaactccatcttgcgtaggagctgggtaaaatgaggctgagacctaccgggctgcattcctggacagttaaggcattctaagtcatgggacaagacgacacaggtcataacgaccttgctgatgaaacaggttgcagtaaagaagctggtcaaaacccacaaaaaccaagacagccatgagagtgacctccggtcgtcctcgctgctacactcccaccagggccatgacagtttacaaatgccacagcaa

SEQ ID NO: 4071 - DNA, 829 bp, Artificial sequence
  DNA replication origin
cccctcccgccagctctgaggctggcctcacctggggatcaggacaccgggttccagtccctgctctgccagtgacttgctctgtgcccttgagcgagggctcagggcacacccacattttgtggtctaactttatctgagactttccaggggagcacaagaatccctgcgtttgggaggttgctggagttgtcttttattgggttttcctcaccccaaaaggcgtagcaagtttagggccttcagctgggcgaggcagaacgttccagcccaggcagccacagggtggccccaccagcccgggagcaagcacacctgcgatgcacagagcgaggcgaggctccgccctgcgagccagccccgcccacttcctgtaggcccccgccccttcccgggtcggcggacgagggagggtcgcgagctccgccccgttccgccggcgcagggctcaggggccccggagcttgggagcgcgagggaaggagctgaaggggcgggtccgtgggaggcgaaggcaggggaaatgtgtgtctgcattttttaatttgcaggggatattttccgtcccctttgtcccgtaagcctctgctttttggatgaaaacgttggctttaccaccctctctctccttcccgcacgcgcacaccttgaaggcatcctaccaggcggtgaccgcagaggaagcacccagagccacagttcttgccttgtcagctgctcccaccacgtccccagaaagctccgggttcgtcagaacagcaacattaaaggaaggcccaatttatctatggaaaaatccgctccggccttcctcttgtagccccaaccg

SEQ ID NO: 4072 - DNA, 1284 bp, Artificial sequence
  DNA replication origin
agctccatggacgcccgctgctctcatcacttctgcctcctgcactctctgcttccggttctctgagttttgtgctgttccggtaggtgctggcagattcacagttccttccacgcagcttctctgtgggtccattcagctggcgcgctgcttcctatctttgtaagggaagagctaagtgcagacaaagccctgacgaatagaggcctgcgcagagtgcccggggtgcagggcagcagggcagccagtgaaccactgagctcgcactgtagccagtcctgtgtgcccctgctggattctgcttctatgagggaggcagcaaggagttgggacttcacaggtgaaaggacttgccaggtagaaaaactggggtgaccacaaaagcttggatgcaagagagagcctggtattttgggagatgtgggggaggagacaaggacgggggtggcagggcacatgggggcaggccccggggtattttccacggtatcctgcacccagtggggagataccgatgggctgtgagccccaagggagctgcagggaacagaaccatcaggacaggggcaaaaaacaggtgaggtcaccattgccatggcgtggtgtgggtgagcagtggcaacgaagcccctactgggctcgggcggagggctggcgtggagaagacagggctgagagccaggccagaaagagctgccagcttcgtcttcccacacttgcatgaggacggagctgagggatgggaccttttggaaaaacattagtctaaaatcagagctgcaggcctgggactctgtctctcctctgttcctccccttggagctgggatgacacagggtggcatctagtgacttaaattttcctggtaaagatgagcacagcaggagtgcggcggggtgggcctctgtgagctaggaccctgggtcaggcttttctgagtgctgttttcgtggaggtgtctgtgctccctgcactgcgacgacaggttcctgccatgcccaaggagcagcggttctggcttccctgaacccccagaaggcatcccgtgagtgtctttagagaggacggtgtgtcctggggggtccttgctgtgtgtcctgggaggctttgtcaggctgaccgcaggctgtggccctgagcagctgggaacagccatgcagtttgctcagatacctccagccctggccacaggctccagacacagggaccagggcaaaaaaggccagcaagggcatctgtgacaaaccatcacaactgattgagttcctgatgtatgtagaggct

SEQ ID NO: 4073 - DNA, 786 bp, Artificial sequence
  DNA replication origin
ggggcggggcgggcccgggcgggaggggcggggcgggcccgggggcggggtgcgtccaggggaggggcggagcgaggcgggtccggggcctggcggcgcgcggaggggcgggccctggccgggtggtcccgggcggatcccgggaaggcggaaggcttcggcagagctgcgccgccgaggctgagcggtcccttctcgctgcggccgcccaggtgcccgcgcccgtggcgctatggaggcggcgctgctggggctgtgtaactggagcacgctgggcgtgtgcgccgcgctgaagctgccgcagatctccgctgtgctagcggcgcgcagcgcgcggggcctcagccttccgagtttacttctggagctggcagggtaaggcccggggcggccggggctgcctcctgccccctcgcagctgctgccggctgggagcccaggagagcctcggctcgaagtagggcggggatgatccccgcgcgccggcgtcgcagctgggcggccgagggtgaactagggagcctaggggctcggggtgctcttcccacggccacccgccacccgcgtacattgtttctcaccaagccccgcgtggcacgaattgattgcgcacgcccattttacagatgagaaaacagacccagcggaggcagcccttggtgcgctagtgacaaaacctgctggccctgagcaaggccatttgcacctcgaggctgtcatattcattgtccctaaactcaccacgcaccgtcaacctcgttctcgggcctcggtttcctcacctgt

SEQ ID NO: 4074 - DNA, 1339 bp, Artificial sequence
  DNA replication origin
tcacctgtgaaataaggggttgaactaagaatgtatgaatctcttctcttctcccggtgattggtggggaatctttcctggttatttaatgagattccttgggagagggtcttaagacaattgcatttcttgtagaaagaagtttccttagtcatctgtaaggaagttggagagtctctgcagttgggaaggggtgacggaaaggtcgttaaatccttgattctgaggcagcttctaaggctttcctattcaaagtattcatcatgccagagcgccaaacttttggggtatcatttttgagccccaacaataggaaaacacatacctcaacctagtggtctcgccccttccccctggccaggccaggccttcccctttgccccccgccatcacccagtggggtctgaagcctggtcctccacacaagccttcctggtgggcggggtggggggtgcggcatacaggatgggaagaagccaaggggtgcgggggagaaagaggagacctcaggtgtgggagggtgaggggtcccactcaggctttggaccccgcgccggccctatggagcccggccctgggcacagtcatccaatagggggctttgaggggaaatttttgggaaaggcttgcagtgggagggactgtgacctcttccaggcttgtgagtgactctaccctgcggggtggggaggggggggtcccaggctggatggcagggttgagaggcacccaggggaggtgggcagcatgcgtttcaggttggtgccaccaccaggctgggagcagagaggctggagcgatgaggttgtggcaaaggacacaggctggaagtggctgtggtgactgttcaggtgggagaggggacaagggcatgaaagccaggagtgggatttggcctcggccccttgctaggtccctgagctggggaagctgaagctggacccatgaaggaaaagaagccaggctgtctgtagagtctatagattccctcctgccgccagcccctaggcctgcatttccaccacttttgcagcattgcttgaaaaatgcaaaccctcagagatacgcaggtgagggctcctattagatctgccagctgtcacctctcccagctcaccttagtgaaagctagacctctggcagtggaaggatcttcctgggcatgggagctcaagggttgggtggggcagcagcttgctgccatccctgctggcctgtctaagggtcttgcagttgatcacgtgcaggtaaagggggctctgtcggggctggtgcaccagctctgcagcctccaagccagggccagggccaggcacacagacttctgtaaaatgggctt

SEQ ID NO: 4075 - DNA, 930 bp, Artificial sequence
  DNA replication origin
gggaagtgaggagcgtctctgcccggtcgcccatcgtctgagatgtggggagcgcctctgccccgtcgccccgtctgggatgtgaggagcccctctgcccggctgcccagtctgggaagtgaggagcacctcttcccggccaccatcccgtctaggaagtgaggagtgtctctgcccggtcgcccatcgtctgagatgtggggagcgcctctgccccgccgcccagtctgagaagtgaggagcccctctgcccggcagccgcccctctgagaagtgaggagcccctacgcccggcagccagcccgtctgggaagtgaggagcgtctccgcccggcagccgccctgtccaggagggaggtggggggtcagcccccgcccggccagccgccccgtccgggaggtggggggtgcctctgcccggccgccccttctgggaagtgaggacccctctgcccggccgccaccccgtctgggaggtgtacccaacagctcattgagaacgggccatgatgacaatggtggttttgtcaaatagaaaagggggaaaggggaaaagatagagaaatcagattgttgctgtgtctgtgtagaaagaagtagacatgggagactccattttgttctgtactaagaaaaattcttctgccttgggatgctgttgatctataaccttacccccaacccagtgctctctgaaacatgtgctgtgtccactcagggttaaatggattaagggcggtgcaagatgtgctttgttaaacagatgcttgaaggcagcaggctcgttaagaatcatcaccactccctaatctcaagtacccagggacacaaacactgcggaaggccgcagggtcctctgcctaggaaaaccagagacctttgttcacttgtttatctgctgaccttccctccactattgtcctgtgaccc

SEQ ID NO: 4076 - DNA, 1116 bp, Artificial sequence
  DNA replication origin
taaccctgagtggacacagcacatgtttcagagagcactgggttgggggtaaggttatagatcaacagcatcccaaggcagaagaatttttcttagtacagaacaaaatggagtctcccatgtctacttctttctacacagacacagcaacaatctgatttctctatcttttcccctttcccccttttctatttgacaaaaccaccattgtcatcatggcccgttctcaatgagctgttgggtacacctcccagacggggtggcggccgggcagaggggtcctcacttcccagaaggggcggccgggcagaggcaccccccacctcccggacggggcggctggccgggcgggggctgaccccccacctccctcctggacagggcggctgccgggcggagacgctcctcacttcccagacgggctggctgccgggcgtaggggctcctcacttctcagaggggcggctgccgggcagaggggctcctcacttctcagactgggcggcggggcagaggcgctccccacatctcagacgatgggcgaccgggcagagacactcctcacttcctagacgggatggtggccgggaagaggtgctcctcacttcccagactgggcagccgggcagaggggctcctcacatcccagacggggcgacggggcagaggcgctccccacatctcagacgatgggcgaccgggcagagacgctcctcacttcccagactgggcagccgggcagaggggctcctcacatcccagacgatgggcggccaggcagagacgctcctcacttcccagacggggtgtcggccgggcagaggctgcaatctcggcactttgggaggccaaggcaggcggctgggaggtgcaggttgtagcgagccgagatcacgtcactgcactccagcctgggcaacattgagcactgagtgaacgagactccatctgcaatcccggcacctcgggaggccgaggctggcagatcactcgcggttaggggctggagaccagcccggccaacacagcgaaaccctgtctccaccaaaaaaatacgaaaaccagtcaggcgtggcggcgcacgcctgcaatcccaggcactcggcaggctgaggc

SEQ ID NO: 4077 - DNA, 1146 bp, Artificial sequence
  DNA replication origin
cggccggcggcgaccatggcagcgggccggcggcggccgtagtggcccaggcctgggcttcagcctcccggggccccagagggcggggcggtccgggccgcggcggtggcggcgccacttccctgctcccgcccgaggactcctgcgggcactcgctgaggaccagcggaccggcggcgcgaatctgactgaggggcggggacgccgtctgttccccgccgctcccggcagggccgggccgggctgggccgggctgggccgggcgggcccctgggagcagcccccaggcgggggaccgccttggagacccgaagccggagctagaggcaggcggtgggcccgggtggagtcccggccggagctggtggttcgggggcggtgctaggccccgaggctgcgggacctgagcgcgaggagcctgagtgcgggtccagcggtggcggcatgagccggcccccgccgacggggaaaatgcccggcgcccccgagaccgcgccgggggacggggcaggcgcgagccgccagaggaagctggaggcgctgatccgagaccctcgctcccccatcaacgtggagagcttgctggtaggtggccggggcctgggagcttgctcgttgcagctcacacctcagatcccctctccgcccagccctccgtgcccgtccgcccgtggggagggggaggtcttgccccaccccgccctgcttccggcagccggggccggagaccaaacgattctgtcaccgagttccaagagtagtgacccgcctttgattcctccctctacctcctgctggagccagtgtcatccccggctgctcctttcttgcagcactgggaggaaaacacccctcttctccttccgcctgcccactctggggaggtgggtggaggactggccatgcttcatacaccaggttagctgatttgaaagtgtcatgctacgtggggacttggtgcgagcgagggagaaagaaacctgatgctgtccctgttgcgagtactcactggggtacatgacaaagagccgccctcactctctccttttagtctgaaatcttggaacacacagctaaagttttgctgttttcacttgcgtttgagcattccatacttgctatttagtgcattttaattgctgtaaa

SEQ ID NO: 4078 - DNA, 1087 bp, Artificial sequence
  DNA replication origin
cgcgcgccgccgctacccacaagcccctccgcccgcagccgccggcgcgcgtccccgccggccctgcgcgcgctccgccccgccccgccccgcgcaccgcgcttcctccctttctttcccttcctgcgtctgtcccgctccgctttctcctctgcgccccttcctcgcccgccctcgcctcctccccctggcgaggttctctgaggcgaatagccgggcgcgcggtcacggccgagctcctgctgggggaggggagacgcacccaggccgggtccttccgcgcgccccctgcccctcccgccggaccccgcggactaccccgcggccccgaggcggaaccccagacgccgggcccagcgcaccgtgcgctgggggggagcccggccgcgccccccgccgcggcccccgctgactcagcgcgcagctatgcgggcctcgcctcacccgcgcccaaataatagcgaccgagctcggcgcccgcgaggggccgcagggccgggggtttcgaggcgagcctgagagggggccctgggtgtctgggattccgaattagcggaggcgggtggaatcctagtcctggggcaggagggcctgggatcctgaaagcgtttctgcccggcttagacactaaccacttcaagagaacgggagagcaccggaaaaaggctttccagccgcaggccttcgcggggtcttctccttttggggggcggaagaggggtggttatcgggaccgttccgccgcattcctgccctctcggcggccggtgccatcgcttagatccgcccagggcgcaatccgaaaattatgtgccaagagctataaaaccgttcatagagcccctttgacccagtaaacccatttaaggaagtacatttccaaggaaatgatccaaagggcgaagaagggggagaacttgcagaaagatgttaacagcagggctattcacaatgttcgtgatgaccaaaacctgggaatgggcccagttgtccaacaattgagtaacccaaacaggcgccttcacattaacagcaagaatcctggcaggtatgcagactgtgtcaaacatgaaattttggcaagtac

SEQ ID NO: 4079 - DNA, 1529 bp, Artificial sequence
  DNA replication origin
ttcccgcatgcgcagtacaccgcccccctctgcgcatgcccgccgctgccggagcgctcccacgcaccgatcctctcccggcggctgccgcccgggaaacccggaccgcggaatccacggagaggctggcaaaggaaaaggaagaggtggagccgaattccagaggaagggaacaggggtgagagaaaagaggcaaccgggaaaacccagcggtcgcctggaattctcgacggtgataactgaaagttctgaggtgataactgaaagttctgagccgcagagatgttcatttattccttttttttattttaattttttttttggtcgcccaggctggagtgcagtggcgtggtcagggctcactgcagccttgaattcccgggctcaagcgatcctccacctcagcctcccaagtagctgggactacatgcgcgcgccactgtgcctggctaatttttaattttaattttagtagagacagggtctcagtatattgccccggctggtcctgaactctggggctcaagccgtcctcccaccttggcctctcaagtgctgggattataggcgtgagctaccacacccagccttcatttattcgtgagctctgttagcgcatcttacaggcaggtcagtgttgatgcttagtaaatgtgagcaaccacaccattgtggaatcgttttacctctgcctgcccgcctgcctgcctgcctgccttccttccttccttccttccttccttccttcctccttcctgtttgacgaatgagttatcgttgacctatagtgtcagatattggggtgggcacaggcgatacttattcgtttgaatatgccacgggttcaacctccaatttcagtggggacagataagtaaacagagcatgttaatttagctggagccagaaggtgtgttttcaagtcctggctgcctctacgtataaactagaagaccttattaagccagttacttaatctgtctgtgcctcagtttccttatttggaaaatgcaaataatgacaatacttacctgataaggttgttgtgaggattaaatggattaatggatacaggttgctgtgattagaacagaggccagcacatgtttgaaataaaaaggcaacacaccgtggtatgtacagagttggagggaaacaactggttagactgggggtttctacacagcctgaggtgggcgaggtgaggcagggaaaaatccccgaagaagctggttccccactagactgtgaggtcagaggccttctctaatctttttttttttttttctgtcacccaggctggagggcagtgtcacggtcataattcactgtagcgtcaaactcctggcctcaagtgatctcccagctaagactcccaagtagctgagagtacaggtgcatgccaccatgcctggctaatttttttttatgttttattttattttattttttgaactccttaccttaagcaatcctcctgcctcagcctcccaaggtgctggagttataggcgtgagacacccatgcct

SEQ ID NO: 4080 - DNA, 952 bp, Artificial sequence
  DNA replication origin
ggcccccggatccccacgctcggccgccgggactgagcccgaccgagcgcggtgaccgggggcacccgccgccctctccccaccgccgccgaccgctcaggacgcggagattgagggacccggtccccaacagctgaggtcggcgagcggtccatgagggcccagcctgaggtcaagagaggaaaaggaagattctggaacgatggacccctgcgggtggaacccggccagcttttcctggtgacagccaggtcggaaaaaatgagtgaaggaaggaagaaatgaacgaacctcaaatgagtccctcagtcctcactggcggctgctgctgaggtggcccctagcaaagaagctgagacaagaaacaaagagaactagagatttctttttttttctttctctctctctctctttttaataaaaagacaggcccctgtgttttcaggaggcagccagaagcagaactggagtcaggaaaccgtccctgggccccctgccactcacccccaggacccacagtggggccttgggcctaacagccactgtctttgaaaacaccctgaaaagtcacagttcacgaatctgggcggttaaacaaaagaagccgggagtgaggttatagcccccagcacctgccagcacacaggtcctcagtaaaagtgcatcgtgagtgaacccctgcagctcgccatactctgattggcagcaccctcattttccttttctcatcatgaaatagctcaaacacccgcatttgacttttctcattgtgaaattttcaaacacacgctaaactaggagagtaatgtaaagagcccatgtgctcaagaacaagccaatcctaacatcgggccacacttgcttcaaatgtttaagacatgaatattgcaatacagttaaagcccctggaagccttcctcatgtcaccccgagtactcttccaaagcatccc

SEQ ID NO: 4081 - DNA, 812 bp, Artificial sequence
  DNA replication origin
cccggatctccggaaccgcggccagcgcggaggactcgacccctgacactggccgccccctgtggtccacttctccgggtcttcgggacggccgcggaggagggccgggcggtgggcttggctgccccaggacctccgccggggaagggtcgggggagggcgcggggccggaacccctagcggcggccggcgatgggtggaggtgacagggacagaggggagccccctgcgccctcccacccgggttcgcgccccgggcctggaaccccagtcttaccctgtcccgcccgccctcctccccaacaaagacgcgctcccccactcccgtgcccggctccccgcgacccaaggagggtcaccgtgcggggctgccccgccagctgaccctgccctggcggctgccgggtcccttcccgcgcccacctgcgtgggttcagaaagatggacggaacctcgcacctgagcgcccagccccggctccgcgcgccgtctgcgctcagcggtgtcgccgtcctccctcctcttacgggggctgccctccctgcagcagccctgtcccacccccgggcccaagcaccccgacattcccgcggggtcacactggacatcccctccggtgacagggcacttagcggggaagaagatctggacagaggttgggagacccctcggaggagcgaggtcattttgtcacttgggaacgcaggcgcccagacgggacacggcaaggctgtgaggcagcaggagtggagcccaggcttccggacaactccaccccaggggcccccggatccccacgctcggccgccggg

SEQ ID NO: 4082 - DNA, 1103 bp, Artificial sequence
  DNA replication origin
tccacccatcgccggccgccgctaggggttccggccccgcgccctcccccgacccttccccggcggaggtcctggggcagccaagcccaccgcccggccctcctccgcggccgtcccgaagacccggagaagtggaccacagggggcggccagtgtcaggggtcgagtcctccgcgctggccgcggttccggagatccgggctttgccgagcgccccgcgccgtggccggggccggggccaggtccgggtgcggggcctggcgctgcggccgcgagctcagcctgtaggctgggctagcctccgtcggcggcgggcgctcaggagcggggccgcggcggccggaggacaaagggcccgaggtaggagcggtccctccgggcggcagcgggcggagcgggggcgcggggctgtgcggggctgctcggggcgggcactcggcgcccggcggggaaggtgcgccccgccggacgcgggcacttcctggccctggtcccgggaaggaggtggaaggtgtccgggatcggccctggcagcgtgtagggacctgggtgctgccgctgccgtgcgcttgtgcgtgcgtgtgcgcgcgggtataggtgtgggcgcgcgtgtgtgtggggtgtgcgtgcgtgtgcgtgtatgggtgtgcgtgtgtgcacgtgtgtgcgtgtgtgagtgcgcgtgtgcgtgcgtgcatgtgtacgcgtgtatcggtgtgcgcgcgcgtgtgtgtgtgtgagagagagagagcacccgaggctcctggcgcttggcacatggtgagccctcggtaggtgggagccgtgaacagtgacggtgataatcgtattgcaagggtgtgtgtgtgtgtgtatctgcctctgtgtttagggagactgtctggagcccagagtggcagccacatgtccccagcacttgggacccgggagaaaattttggggtatctttcctgagtggctctgggacggtggtttaggggcccctgcacttgaagaggatgcttcaggggaggtggggacttcctaactggatcccagtttgggtcctgggaacaaaggctgcttccccgaagtacaagaaggggtgtgtgtgtgtgtgtgtg

SEQ ID NO: 4083 - DNA, 1428 bp, Artificial sequence
  DNA replication origin
attttgctggacaaatttcaccaggaaaatcaaggccatatttcttcctcactcgctgcctcttctgtcactaaagcagcatccctggatgtcagtgggacaccggtgtgcacaagtgagtggtgaaaaggaatctcccagggtggagagggtacaaagtagtgatgaggggcagggtcagtgggcgcaggtgtgcacagtgagaggggccatggcgcaagtgtgcacagtgagggggcaggggcacagatgtgtatagtgaggggggacggggcacaggtgtgtacagtgagaggtggcagggacgcaggtgtgcacagtgaggggggtgggggcacaggtatgcacagtgagggggtggggcacaggtgtgcacagtgagggggtgggggcacaggtgtgcacagtgagggggtgggggcacaggtgtgcacagtgagaaggggtgggggcaccagtgtgtacagtgacgggggtggggcactggtgtgtacagtaagagggggcggggctgcaggtgtatacagtgagagtaggtgggggcacaggtgtgtacagtgagggggtggggcacaggtgtgtacagtgagagagggtagggcactggtttgtacagtgagagggggtgggggcgcaggtgtacacagtgaggggggtggggcactggtgtgtaaagtgacagggggcaggattgcaggtgtgtacagtgaaagggggcagggtcactggtgtgtacagtgagaggggtgggggcaccggtgtgtacagtgagagtggtgggggcaccagtgtgtacagtgagagggggcgggggcgcaggtgtgcaccgtgagagtgggcaggggcacagatatgctcagtgacatggggcagtgggcatagctgtgtgcagtgagaggcgccaatgggcacaggtgtgcaccgtgagagagggcagtgggcacaggtgtgctaagtgggtgctgaggggacagagggctcatgtgtgctcggtgggcgatgagagggcactggcgagggcctcggtctggcctgggaggcagcatccaaggactcagattggaggtagcaatgtcagaggcacatccacaagacaggacatcttttagtgtcacagtagacctgatacctaatttaaaattcagtctttaattatgacaatctcatttaatcttgaattgcacatccatcactgtctctgaggtgatagatttttctatgccaatttcctgcctctgagtctgttgctgatgttttttattcatacagagttcctaaatgactgtcgtgttagttttcttttctggagagtttgcagtcctcttccagagtccagtctcagcatcacctcccctgggataggctccttgtcccctctaagcagaagagaccactgcctccactgtgctccccaagtgcttggttctt

SEQ ID NO: 4084 - DNA, 1256 bp, Artificial sequence
  DNA replication origin
gggtctgaattgggacaccagctccatctccactgacccccagagtcagggattgccccttttccgggagttgggggcctctcctcattgttcttgcaaagtaacaagacctttaaataaaggcccccacttacagcatcattgagatcttacgattgtgtgaggtttgttgtttaatcagggagaacagacacctttaccagggtctccaccaaagggccagatgtggctttaaaacgaacttttcttttgtgtccttcagtgtcatttttaaactcttaggtattttatctttattattgaaacataatcttaattttctattatgtttgattgtatattggttatgcataagaaagctagtcatgtcttacagtctttcatgtgagtgaaatcactgcattgttttcatttattcactaaatatttagtgagcagccaatccccatgctcaggagtacccagcccagcagctggggcagatgttagacacatggctagttaaggaccatcgggagaagcaccacaaaggtgaagtgtgtgtcgcggggagacctgagtctgtgggagtccccagggaagtgatgttaaaggagacctggaggaagagagtgagccacgtgcccaggcaggggcaagggcaggggtaagggcatgggcatgggcaggggcaagggcaggggcaggggcaggggcacgggcatgggcaggggcagaggcagggacagaggcaggggcagggacagaggcagggacatgggcagaggcaggggcagaggcaaggacagaggcaggggcatggacagagccagggacataggtagaggcaggggcagggacagaggcagggtcatgggcagggacagaggcaggggcagggacagaggcaggggcatgggcagaggtagggacagaggcaggggcagggacagaggcaggggcatgggcagaggtagggacagaggcaggggcagggacagaggcaggggcaggggcagaggcaggggcagggacaggatgccttcagtgggtgaaggtgcagaagggtaggagcgaggaggtcggtatggaggaaggggaggagggtggcggagaggagctgaggaagtaggcaggccttcccagctatgggaaagttccagacttttctctaggactcacgggagggaagcagtgagagtctgatttacgtagatgtaaacgtgttggtgatggagcaagagcctgtggctgggatgctgactgtgggtgggaag

SEQ ID NO: 4085 - DNA, 1314 bp, Artificial sequence
  DNA replication origin
tgaaggcgcgggccgggcgcgcggggcgcctgcgccaccacgtgctcagcctggcgctcgcgggcctgctgctgctgctggtcggcgtgccggtggagctctacagcttcgtgtggttccactacccctgggtcttcggcgacctgggctgccgcggctactacttcgtgcacgagctgtgcgcctacgccacggtgctgagcgtggcaggcctgagcgccgagcgctgcctagccgtgtgccagcccctgcgtgcccgcagcctgctgacgccacgccggacccggtggctggtggcgctctcgtgggccgcctcgctcggcctcgccctgcccatggccgtcatcatggggcagaagcacgaactcgagacggcggacggggagccggagcccgcctcgcgagtgtgcacggtgctggtgagccgcaccgcgctccaagtctttatccaggtaagggcgtggagagcgggagtcgggggagggggggtgggggggcggtgctgggaggagggaaccccctctccccggggaacagacattttcgactctaatgctcgccaccacccagcaagttgggtcttgttgctctgtcccattttactagaaggagggaggcgtggccaaagtgaagcattgagagaagtcccgatttcaattcaaaattaactccaaagtcagtgttcccactcttgcgagagtggtgctcagacatttgggcgtaaagttgcctgcagagcctgtgaaaatccggagtccatgacccacccaggttcctgcctcagtagcccgaagtctgtgttccaacgagctccccagacggctctggagagggcctccctggaggtagggtggggacggggaaggcactcccggcctctcttccagaggcctgatcaggcttctaacctcatttcctgttaccgtctccctggcagccttgcctcctccaggccacttgtccccccacacctcttgctcccgctttccccgaaccccacaccatgcccagcctctggcttttaagtcaaaagctcattcttctgcttttggttccaacccttcttattccccaaagtgcagctctgatctcacctcctccccaactccagggactctcccgtcttctgaattctctcagcatgtgatgtatttgcagcacttcacaatgcattttctgaaagtgatgctcacctttcgaagtgtctgtctccatttccgcatcgttctacaagccagtgtcctctggtcgcttgctctagtcacattagaccatgatctcatgtatccagcacattggggaagtgggaaaggc

SEQ ID NO: 4086 - DNA, 1117 bp, Artificial sequence
  DNA replication origin
ggcgtcagcaggctgcgggcacgcaggggctggcacacggctaggcagcgctcggcgctcaggcctgccacgctcagcaccgtggcgtaggcgcacagctcgtgcacgaagtagtagccgcggcagcccaggtcgccgaagacccaggggtagtggaaccacacgaagctgtagagctccaccggcacgccgaccagcagcagcagcaggcccgcgagcgccaggctgagcacgtggtggcgcaggcgccccgcgcgcccggcccgcgccttcagcaccacgtgcgcggacagcgcattgcccgccgcgcccagcgcccagatgagtgcgtagagcgcggtgaacagcaccttggcccagaggcgagtgtccacgcccagccgggcgtccaggctcagccccgggttggagctgggccgcgggggccgcgggctgctggtttccatcccgctcccgcggccggcgctccctccctctcactgcccggagtctgggcgagctgcctggttagtgagcacctcctcttctctgggaacctctagaactgggaggacacgcccccgaaagggtgtccctgagccaacgtgggaccgcgagtgccagcccgttagcgtcggtcacacgtctgggttcagttcaacccagggaagcgcgtgctggtggaaagggggttgggttccttcaggggctgatagtcccgagttgggccgaactccaccactttcgaactttgtgaacttgggcaagttttttaacctctctgaatctggttttgcaactttattatcgacactgcagaatttctgggaagatgaaatgagcgaacgtgtgtgtggaagtttctacctgcagcataaatagacatggtgctttcgtcttgcgccttggcccttgtgttgatttgtgtgtgtgtgcagctcgggagagatcttgggaaagactttcccagcacttcagcattttgttattgttcttgctaaagggctgtttcaatgccatcctaagagccccaggaagctcctttgtcactgagaatacatcctcatggtgccacactttcccagtcctttgagagtgtcattctcatggagctaggggatgaagtgagaagtgtttt

SEQ ID NO: 4087 - DNA, 1274 bp, Artificial sequence
  DNA replication origin
cggcgcgtcaggaaagccaggcccgagggatgctcgcgaggccctcccggcctccggggcctgtttccccgcctccctcccccgaaccacttcccgtagagggccccggggacgtagcccggccgtcggtcctcgggccccggggccgagcccccgcctcgccacgcgtcctcagcgccccggcgccgcgccccgccccgcctaacccgaggctgcggcccctgctccacagcgggaggctggaggcggcggctactcaccgagcggcgccgcgcgtggccgcctttgtattgcaaacacccagcccgccgccggctgtcagcgcagctcgccttcgggggcggggcaggggcgggggcagagggcaggggcggggcaagcggggcggtgcgagggggactcgggacgcgctggtggcccggctgctttcagggcctgctggccggccctgcccgctcacccctggccgcctatcttagcgttcctgggggtggggccccttaggccgcctttctgattttcctttccagagccaaactcgtgtgtttcttcaacactctgacttgacctatgccgatgactgggggagtgaggacggaggggtgcagagaaaaggcagccaggtaaaagtccaggtaaaccacccagggcctggccgcgatcacgtcggtcctatgggtcccgcttatcaccagtggcgggatctgagcccgtccttgactttactgaccctcgcccttcgtttcttccaccttaaaggcgcaatcgcgttgacctatcgccatctcttcttagcttctccacgccgggccacccctgtccttcatcctgatggtgacagcctccactcccgcctctgccaagcggtggtccaggtgcggaacggtggctctgaacaggagggacaggcagctccctgcgcctctccagccgggaggcaggcagcggataaacaatgagccacataacgtctggtggtgaaatgatttccatcaatgggagggtgtcatatttgaactgaaactctaaatgacaagaaacacctatgactacaaagatggggaggaggcagggctttctggagagcagaaatggcaggtgcaaaggtcctggggccggtgctgtgggctggagggaaggcaggggccaaatattcaggtcttgtaggccaaggcaaggagtttaggtattatttaaatgttattccaaaccaattctttttgagacagggtcccactctgtcacccaagctacagtgcagtggcacaatctcg

SEQ ID NO: 4088 - DNA, 865 bp, Artificial sequence
  DNA replication origin
tctctgcccggccgcccatcgtctgagatgtggggagcgcctctgccccgccgccccgtctgggatgtgaggagcgcctctgcccggccgcgaccccgtctgggaggtgaggagcgtctctgcccggccgccccgtctgagaagtgaggagcccctccgcccggcagccaccccgtctgagaagtgaggagcccctccgcccggcagccgccccgtctgggaagtgaggagcgtctccgcccggcagccaccccgtccgggagggaggtggggggcagcccccgcccggccagccgccccgtccgggagggaggtggggggtcagcccccgcccggccagccgccccgtccgggagggaggtggggggcgcctctgcccagccgccccttctgggaagtgaggagcccctctgcccggccgccaccccgtctgggaggtgtacccaacagctcattgagaacgggccatgatgacaatggcggttttgtcgaatagaaaagggggaaatgtggggaaaagatagagaaatcagatggttgctgtgtctgtgtagaaagaagtagacataggagactccattttgttctgtactaagaaaaattcttctgccttgggatgctgttgatctatgaccttacccccaacccggtgctccatgaaacatgtgctgtgtccactcagggttaaatggattaagggcggtgcaagatgtgctttgttaaacagatgcttgaaggcagcaggctcgttaagagtcatcaccactccctaatctcaagtacccagggacacaaacactgcggaaggccccagggtcctctgcctaggaaaaccagagacctttgttcacttgtttatctgctg

SEQ ID NO: 4089 - DNA, 1400 bp, Artificial sequence
  DNA replication origin
ccattgtcatcatggcccgttctcaatgagctgttgggtacacctcccagacggggtggcggccgggcagaggggctcctcacttcccagaaggggcggctgggcagaggcgccccccacctccctcccggacggggcggctggccgggcgggggctgaccccccacctccctcccggacggggcggctggccgggcgggggctgccccccacctccctcccggacggggtggctgccgggcggagacgctcctcacttcccagacggggcggctgccgggcggaggggctcctcacttctcagacggggtggctgccgggcggaggggctcctcacttctcagacggggcggccgggcagagacgctcctcacctcccagacggggtcgcggccgggcagaggcgctcctcacatcccagacggggcggcggggcagaggcgctccccacatctcagacgatgggcggccgggcagagatgctcctcacttcctagacgggatggcggccgggaagaggcactcctcacttcccagactgggggcagccgggcagaggggctcctcacatcccagacgatgggcggccaggcagagatgctcctcacttcccagatggggtggcagccgggcagaggctgcaatctcggcactttgggaggccaaggcaggcggctgggaggtggaggttgtagcgagccgagatcacgtcactgcactccagcctgggcaacattgagcactgagtgaacgagactccatctgcaatcccggcacctcaggaggccgaggctggcagatcactcccgattaggagctggagaccagcccggccaacacagtgaaaccccgtctccaccaaaaaatacgaaaaccagtcaggcgtggcggcgcacgcctgcaatcgcaggcactcggcaggttgaggcaggagaatcaggcagggaggttgcagtgagccgagatggcggcagtgcagtccagcttcggctcggcatcagagggagaccgtggaaagagggacagggagacggtggggagagggagaccatggggagggggagggggaggtttctgttaatgctgcccttatgtctctcgctttctttttcttgtgagtaaaaaaataccaacagtagttcgtagatgtgctggcctggggttggggcctcactgctggggaggtggtctcatcattcggtgacaaacatagctcacgtgcaagggtgatgaaggcaaagagatgggggggacatgagaaggagcttcacagaaccgaaagagaggtcacttcaaaatccaaagacctgggttccagtttggtgaaatggggcgtgtcaatccagagagcccctcttcaccagccctgtgatcttcattgcactttggctgtcttctgg

SEQ ID NO: 4090 - DNA, 1186 bp, Artificial sequence
  DNA replication origin
tgcatgcctgtagtcccagctactcaggaggctgaggcaggagaatcgcttgaacccgggaggcggaggtagcagtgagctgagatcgtgccactgcactccagcctggtgacacagcgagactccgtctcaaaaaaaaagaaaaaaaaagaaatttttaattttgtttgattttcagatgcatccctgtattccagacaagctgatatttctagattctttttgtcttaaaactttctcatttcttagttttaaagaacatgttattgagcaattttcgaaacaaatccattggccattataaaatattcatggtagaacaatatgttggataggaagtgggtagtttattcactcattcagcaaatattcactaaatgtctgctacatgccaagcactgtttttggcacgggggttgtagcaaagaatgggacaaagtccctgtcctcatggagtttatggatgaatgagagatacagtcgaatgaaggactataacgtcatattagtgatcagtgctaggaggagagggaaggcagagcaagggccagtgcctgggtgaggagtgagggggtgtgtgtttcatcgcatgggggaggtcaagggaagggccttctggagaggtgagatccagcagagacctagatgaggtgagggtacaagcagtccctgcagactgggggaaaggtgctctaggcaggaggaacggcatgggcaagtgccagcgcagatgagcgtggcgagttggaggaaggatgggaacacctgtgtggtttgccaggagtgaggagttggacagtcattgcagatggggttggggttggagagaaaggtgggggccaggtcttgttggtcttataggccacagtgaagggtttggacgacgtctgtgagaggttgcagcctcaggagggctctgagtgtgagtgggctacgctttacattttcttagagcaccacgtggagtcgggatagcagcagggaggtcattcaagattgtcgcagcaacggaggccaggaggccatgcggtgtggacgtggtgggagcactgggtggtgccgagggtggagcagaggggacctgctgattgtgtggcgtgggggctgggggtaggtagacaccaacggggcccctgagggtttgacgtcacacctgggttaggagagtgccacttgctacttgcag

SEQ ID NO: 4091 - DNA, 1138 bp, Artificial sequence
  DNA replication origin
aactcagagtatataggaccccaaggacaaagaattccatatgcgtcagattcccaagacagaggggagtgaagaaggatgaaaagaaaccctggagaggcaaacagaagttatcagacacagccatcatgtgggagaaccagatatgggcatgagacccacagggagagtgggagaggaggagggaaagaatcagggtggaggggagggaagaggaggggaaggaagggaagaggtggggaagagtaggggcacagggggcggaggggaagggcaggggcggagggggcggaggggaagggtgggggcggaggggaagggtgggggcggaggggaagggtgggggcggaggtgaggggatgggggggcgaggggacaggggggcagggtgctggaggcggggcaggacaccggagtggggaggaggggagcggacggtggggggagagaggggagcggacggtggggggaggggggtatggggtcgtagggacggggacagagggacagggatggagggaaagagaaagagtaacagtcaaagagagttgaactaggaaagaataaggttgcataaagagtactggctccccaccattgaatttcaagtcaaggttagaagatgaccgagttaggaatgctctagaggaaatccaatgttagattggtttaaatgacttataaagttgcttctaacttgatatcccaacatcttataaaaaaggagattaaaaaggtttgttgttgttgttaaacaattgagatttcctccaatctcaatctcctcccatattaaatatctgcattcagcttgcctgagagatcatagaaaatgcttactaagtatggcaccagagttaaatttccgattaggccgaattttgtagtcacttgagattttttaagaaacctgtcctgtttattgtgacaacagaatgaccttgacaaggaaaggaaatattttctaatccaaacaacttcagaagaccacgttctttatcacctcaagaagcatcacatttgctcctgaaatttgattcataatttccccacggtctctctcaaatggagtcacacattacaaatgagagagcatctaagaactaactacaaactttgttaacttttatgcttttgc

SEQ ID NO: 4092 - DNA, 1154 bp, Artificial sequence
  DNA replication origin
actgggctggatttttatatttgatgaaaaagagcctaaacgcttctgatttgggataaagaaaaaggagcattaaccttgactatgcctttagctccagccacctttttaagagtaaattgctgggcaggtgggggagggctagtcacagaacgaaactgtaagttggaccaggtgtgaggaggagaggtgataaaaagattatagggtggaggagcagaggctgaggaagaattgggacctagcttggcctggcaaggagggtagaagtcagatgggtctgtagaaaaggaagattagaaagactcagcgatgcttggggttgtgactgaggggacaggaaggagggaaagaaggaagatttgggacgggttgcactgggcacagagactaggaagggactgatgtgtaaaagaatgcctggacgtcaggcatctcagaccgtttgcctattttacaacaagaattatttagatcttgcaggatggaaaaattcaaagtgccattttctggctatttggaactactgttgagtttgtattggggtcaagcggcattgcagaagaaaataaggcatttaggttttaggtcaggtgtgagttgaagaggttttaagtttttgagaacacaggccaagggagtagaaggaggaatggagggtggaaggttcccatagtgaagaaagcaagcctagagaaaagagagagtagagaaatggagggaaggggttcaggggttcttaccttccagaaaagttggaaaaggggttggggtgcagagataagaggttggggcatggaaataagggatggggcacagaaataagggattggggtgcagagatacgaggttggggcacggaaataagggattgaggtgcagagatataagaggttggggcgtggaaataagggattggggcacagagatatgaggttggggtacttgcgcctctagaaaagtggaacttgccactaagagtgaaggagaaggggttgaggggtacttgccccctctcccaaaaaagcgggacttgccgctaagggtgaaggagaaggggttgaggggtacttgcccctcccccagaaaagcagagaaggggtagagacaaggagagaagggcttggggtacttgccctgtccccggaaaagca

SEQ ID NO: 4093 - DNA, 1936 bp, Artificial sequence
  DNA replication origin
ttcctggaacacggaacgcgggcgggctgtgttctcagtcacaatcagctcggatgagctggggggcgcgggcgcaagcgggcatcggcacctggcagaaagcgccgcgccccccgcgggtgcgcacacctccgctccccggggcggcgcgcggtcgggtgtgcggggtacggggcggggcggagcggagcagagcaaagcgcacaggaggcccgcctctgctcccctcccccgccggcgaagattgacacagctcgagcacccgccccaaccaatgagcgcgtcctggggcgggccctgggaccggctgctccggctacttagagtcgtcggcgcggcggtgggaaagcagagccgagccgggactgtccagtgggagcaggcgccccggccagcgcagacctggaggcgcacgggcgccgcaccgcacgattcggctcggggtagagcggagccgcagccccacgcgcagcccaggacccactcgccaccgccgcttcctcagcacccatggggaccaggagactttaaaggagtttggggtttcgggagcagggaaatcacgggtagggagaagcggctttctttgccttggaaacggtttttcttcatccgattgtttggatcctgtgctgggtaggagggagaggggtctttgggctaaaagtgaacctctctacacacacacgctcccacccacacccacacacatacactgcactggctttctccatccttcccctgcctctttgttaggttattttagacagagcagcctcgccctggcgcagtcccattggccctgatggggacaaggcaagagaagtaaggggcagagtgcacctgcctgtgagggcaggtgtgcccgggtgcttgggcgtacgtgcaacggcgagcgtgcaagcgtggagctgaaattgtgtacgaatgtgtggggtctaagtgtgccagtgtgtcgtcgcgaaggtttgtcattgtgggtgtatgtgacatacaccagtataccaggctgccagtgtctggactcccaagtgtccaaaatgttgctggtgtcaagtgaatgcctgagaatgtgtctgattgtcattgtgcgagccgctgtaaggggaggaaggcaacctagtgcaaaactgggaggtgggctggagagggtggggacagaaatgggagcttgctcccagctcactggccttaggctcccttctccctttcagcccacccctcggtccttcctgggtgtccgtctcccacactgccacagccagcactctcctccccaccgggaccccgcaagctctccagccagcctgggtgttttcttctgggagttggaccgagttcccggaaggggtcggaggctgtgtggtggcgtctgctctcgcctgacctgtggcggcttctccgcccctcgtacccctggggaggcacggaggactcggctggaaagggtgactccggtgagggcacgtaagctagccggcaggtcccaggggcactgcacgtcttggggagggacaccgaaaggggcagcccggactctgacggtgtctctgcctctctgtgcctccgcagatccccgctcctggccctcgcctcgccacctcattgatgggcaaccaactggaccgcatcacccacctcaactacagcgagttgcccacaggggacccgtcggggattgaaaaggacgaactgcgggtcggggttgcctacttcttctcggatgatgaggaagacctggacgaacgcgggcagcccgacaagtttggcgtgaaggcccccccgggttgcaccccctgcccggagagccccagccgccaccaccaccacctgctgcaccagctggtcctcaacgagactcagttttccgcctttcggggccaggaatgcatcttttccaaagtgagcggtggccctcagggcgccgacctaagcg

SEQ ID NO: 4094 - DNA, 985 bp, Artificial sequence
  DNA replication origin
atatcacttccctgaagtttgttggttcagctgtaaaaagtaacttatgatgcctactttgcttaattattgtcagcaagtaatcagatatatagccgccccgtccgggaggtgaggggcgcctctgcccggccgcccctactgggaagtgaggagcccctctgcccggccagccgccccgtccgggagggaggtgggggggtcagccccccgcccggccagccgccccgtccgggagggaggtgggggggtcagccccccgcccggccagccgccccgtccaggagggaggtggggggggtcagccccccgcccggccagccgccccgtccgggagggaggtggggggatcagccccccgcctggccagccgccccgtccgggaggtgaggggcgcctctgcccggccgcccctactgggaagtgaggagccctctgcccggccagccgccccatccgggaggtgaggggcgcttctgcccggccgcccctactgggaagtgaggagcccctctgcccggccacgaccccgtctgggaggtgtgcccagcggctcattggggatgggccatgatgacaatggcggttttgtggaatagaaaggcgggaagggtggggaaaaaattgagaaatcggatggttgccgggtctgtgtggatagaagtagacatgggagacttttcattttgttctgtactaagaaaaattcttctgccttgggatcctgttgatctgtgaccttatccccaaccctgtgccctctgaaacatgtgctgtgtccactcagggttaaatggattaagggcggtgcaagatgtgctttgttaaacagatgcttgaaggcagcatgctcgttaagagtcatcaccactccctaatcttaagtacccagggacacaaacactgcggaaggccgcagggtcctctgcctaggaaaaccagagacctttgttcacttgtttatctgctgaccttccctccactg

SEQ ID NO: 4095 - DNA, 836 bp, Artificial sequence
  DNA replication origin
ataattttttctaaaaaatcaattccctgtctttagactgctaaaataaaaaatcaaacttcacgggagggaggtgggggggtcagccccccgcccagccagtcgccccgtccgggagggaggtgggggggttcagccccccgcccggccagccgccccgtccgggagggaggtgggggggttcagccccccgcccggccagccgccccgtccgggagggaggtgggggggttcagccccccgcccggccagccgccccgtccgggagggaggtgggggggtcagccccccgaccggccagccaccccgtccgggagggaggtgggggggttcagccccccgcccggccagccgccccgtccaggaggtgaggggcgcctctgcccggccgcccctactgggaagtgaggagcccctctgcctggccaccaccccgtctgggaggtgtacccaacagctcattgagaacgggccatgatgacaatggcagttttgtggaatagaaaggggggaaaagtggggaaaagattgagaaatcggatggttgccgtgtctgtgtagaaagaagtagacatgggagacttttcattttgttctgtactaagaaaaattcttctgccttgggatcctgttgatctgtgaccttacccccaaccctgtgctctctgaaacatgtgctgtgtccactcagggttaaatggattaagggcggtgcaagatgtgctttgttaaacagatgcttgaaggcagcatgctcgttaagagtcatcaccactccctaatctcaagtacccagggacacaaacactgcggaaggccgcagggtcctcggccta

SEQ ID NO: 4096 - DNA, 1670 bp, Artificial sequence
  DNA replication origin
ccatttctgttttatggaaactgagttataagagaggctcaatgacttggccgatctcatgtagattaatgaacaaggagtgtatcaggaccgggacacaagtcgttcccaagacaagcaatagtccctgtccttcctactcataaaagggttaacctagcatttccttgccgtgaaacaaaagcggccgcggatagagaagcttgtcctgtgagggattccgtagagacactcctccgctgcctgagtcctcggcgaacatggcggcccccgagtcagggccggctttgagtccaggcactgcagagggtgaggaggagacgattctctatgacttgttggtcaacaccgagtggccaccggagactgaagtacaggtgaaccaggcccatctacagcagcagccagcttggcgcgggcgcttcgtgggtagagccacgtagcaggagccacgtaggggagtggagacgggtgggtgggggactagggccggttggcttgtgcggtcgccttggcaacggcaccttgggctagcgggggtctagggcggggtggggtggtggtccctgagattcttcctgggctcagaattcggttgttgggggctggaacttcgtgctctggggagcgtacgatcccactttggttctcagtttcgctctctgtattgggaggagaggggattgttagtgtcgctctctgtattaggaggggaaggcacagcgctggactcgagggtcctttctcctatctggaccctcagtggtcccttctcgcggtctggctagggctagtctgggccgacgctcaactgcgatgggagaattttccaggaccttacagtctgcagcatctgccaggctggtgcagagcgcagaatctgagcctttacccatactgggggctggatcgcgccaggtcttgtgtgtttcaataaaagagcatttaataagggtgtgcgtgtccgttcgtctgtctcggtgtcacaggtgctgtgctaggtgctaaggatacagagatgaatatgttttcgtggagcttctcgtctagaggggagacagtcccgtaaacgtttttcataacctagcgttttatgcgctatagttagcgatgtgagcaaaatgccacggaagtgcagagtaaagagctgctgactgggattgggatctccgctacagaagggttatagaggttgataatttatggactggatcttgggattatcagttgtttggtagtgaaggcctcccgggtctgtgatgaagagtaggaaccatggatccatgtttattttattttattttttattattattattttttggatccatgtttatttaacagatatttattgagtgcttaacacgtgccagttactgttttagacccagaggaagcagccagatcgaaaagaacctttattaaagattatgtagtccagcccatgtgagttatcttacattttttctgagtgtttctttgctggagaaacgactcatttttcagcccaaagtttgtatttttttcctctgtagcctccttcccactgcagtttgtgcttatcatgaataatttattttgtagacgggtagagatctgcatatattactgtttaatttcaagtacttagtttgtcttaatgtgaatattttttgggttatgcagctagga

SEQ ID NO: 4097 - DNA, 1476 bp, Artificial sequence
  DNA replication origin
acctcattttgattttggctttgatacatgttattctcatttcttattattgatcatgatgagtctaaatatagttcgtctggtgagctgaaatctacagtagtgtgaatgagcctaaatatgttgattctaacaagcctgtcaaatgcttgtactattgtatatgtcatatgctctaataggcatttttgatttaaataattattttgaaacacatacttttgatgcagctatattttaactttatttaagaatttactttctattaatagcatttgactttctggtgttctaggaattcactatgcatgataccattggatgttacctggatatagataagggacatgtcaagttctccaaaaatggtaagctctatatggatcttagtagtgaaaagatacatgatattcaataattgtggtttttaaaaatccccccaccctgtttttcaaatccccgtccctccctccctgcctttacttgaactaatatttattgagcattgactatgtgtaaggtaccctggtaagtactggaggcacagaagaaaatggaatagacatttggggcttacacactagtggtgaaagacagacatataataccatgttaggtggtagtaagtgctgtgaaggagggtataaagcaggggaaggaagtggagagtcatagcggtttgggggtttgtgcttttgtgtagggcagtcaaaaggcttgataagggacatttaggtagagatccaaatgagttgggtggtaggccatgcagatttctgcaaagggaatagtaaatgtggatgccctgagatggaagcgtgcttgaggtgtctgagtcacagcgaggaagccactagatctggagtgctctggggataaaggacggtggtagaatgttagatgagtgaggtggtgaggccaggccatggagagccatatgggccatgatctaaactttggtttttattttgagtgaaatggaaagccatgagggttttgagcagaggggtggcatcatctgtctttagtttaacagtaccattctggctgctttgttgaagacacattggagggtggggtgagattgcctagggattgagggtagttaaagagaagaagagatctgaggcctgggttcctgtggttaggggtcagcaaattgaggagaatccagcagaggggaatgaggaggaaggccaggaggagaaccaagaaagcatgggtcctacagtcctggtgaaggaagtgtttgaaggatcagggagcaatcactgttcagtgctgcggatgggtctagtctagcaagatgaagaatgtgcattaactgctgcatttgacaagtggaaagcattagagagctgttttggtggagcaaaggggtgagggtggggagcctcctaataaggagccagttcaatagagaatgagatgaaagaaagtggatacagtgtaaatggaaatcggagtttcactaca

SEQ ID NO: 4098 - DNA, 942 bp, Artificial sequence
  DNA replication origin
ggaaggtgggggggtcagctccccgcccggccagccgccccgtccgggaggtgaggggcgcctctgcccagccgcccctactgggaagtgaggagcccctctgcccggccagccgccccgtccgggagggaggtgggggggtcagccccccgcccggccagccaccccgtccgggagggaggtgggggggtcagccccccgcccggccagtcgccccgtccgggagggaggtgggggggtcagccccccgcccggccagccgccccgtccgggaggtggggggtgcctctgcccggccacccctactgggaagtgaggagcccctctgcccggccagccgccccgtccgggagggaggtcggggggtcagccccccgcccggccagccgccccgtccgggagggaggtgggggggtcagccccctgcccggccagccgccccgtccgggaggtggggggagcctctgcccggccgtccctactgggaggtgaggagcccctctgcccggccaccaccccgtctgggaggtgtgcccggcagctcattgagaacgggccatgatgacaatggcggttttgtggagtagaaagtggggagaggtggggaaaagagtgggaaatcggatggttgccgtgtttgtgtagtaggaggtagacatgggagacttttcattttgttctgtactaagaaaaattcttctgccttgggatcctgttgatctgtgaccttacccccaaccctgtgctctctgaaacatgtgctgtgtccactcagggttaaatggattaagggcggtgcaagatgtgctttgttaaacagatgcttgaaggcagcatgctcgttaagagtcatcaccactccctaatctcaagtacccagggacacaaacactgcggaaggccgcagggtcctctgcctaggaaaaccagagacctttgttc

SEQ ID NO: 4099 - DNA, 1223 bp, Artificial sequence
  DNA replication origin
gctggccgggcagaggggctcctcacttcccagtaggggcggctgggcagaggcgcccctcacctcccggacggggcggctggccgggcggggagctgacccccccaccttcctcccggacgaggcggctggccgggcggggggctgaccccaccacctccctcccggacagggcggctggccgggcagaggggctcctcacttcccagtaggggcggctgggtagaggctcccctctcctcccggagggggcggctggctggcggggcctgacccccccacctccctcccggacggggcggctggccgggcggggggctgaccccccccacctccctcctggacggggcggctggcctggcggtgggtgacccccacctccttcctggacggggtggctgccgggcggtgacgctcctcacttctcagacggggcggccgggcagagacgctcctcacctcccagacggggtcgcggccgggtagaggcgctcctcacatcccagacggggcggcggggcagaggcgccccccacatctcagacgatgggcagctgggcagagacgctcctcacttcctagatgggatggcggccgggaagaggcgctcctcacttcctagatgggatggtggccgggaagaggtgctcctcacttcctagatgggatggcggccgggcagagacgctcctcactttccagactgggcagccaggcagaggggctcctcacgtcccagatgatgggcggccaggcagagacgctcctcacttcccagacggggtggcggccgggcagaggctgcaatctcggcactttgggaggccaaggcaggcggctgggaggtggaggttgtagcgagccgagatcacgccactgcactccagcctgggcaacattgagcactgagtgagggagactccgtctgcaatcccggcacctcgggaggccgaggctggcggatcactcgcggttaggagctggagaccagcccggccaacacagcgaaaccccgtctccaccaaaaaaatacgaaaaccagtcaggcgtggtggcgcgtgcctgcaatcgcaggcactcggcaagctgaggcaggagaatcaggctgggaggttgcagtgagccgagatggcagcagtacagtccagcttcggctcggtatcagagggagaccgtggaaagagagggagagggagaccgtggggagagggagagggggaggg

SEQ ID NO: 4100 - DNA, 1153 bp, Artificial sequence
  DNA replication origin
tgggatgtgaggagtgcttctgcccggccgcgaccccgtctgggaggtgaggagcgtctctgcccggccgcccagtctgagaagtgaggagaccctctgcctggcaaccgccccatatgagaagtgaggagcccctccgcccggcagccaccccgtccgggagggaggtgggggtcagccccccgcccggccagccgccccgtccaggagggaggtgggggggtcagccccccgcccggccagccgccccgtccaggaggtgaggggcgcctctgcccggccgcccctactgggaagtgaggagcccctctgcccggccaccaccccgtctgggaggtgtacccaacagctcattgagaacgggccatgatgacaatggcggttttgtggaatagaaaggggggaaaggtggggaaaagattgagaaatcggatggtcgccgtgtctgtgtagaaagaagtagacatgggagacttttcattttgttctgtactaagaaaaattcttctgccttggaaaaaaaaaaaaaaaagtgtcctgaggaagctgcaggtgattcttattgcatggaggtgatatggagggccactggaaacccaccaagagaagataacgtgtgagctgaactttaagcaatgaggcagcatttgcccatgaaataaagaacagtagaaggtattccaggcagaggaaacagtatgagtaaaggcttggatgcctggacatgcatgaaatgcttagatgagagcaaaggaaaggaggaggtgggagtgaggtgtgtgtaagtcaggagtggttaggttatgctgcagtaacaaacatcccccatctcagttgcttataacatcaagaactagacaggatgcatgcccatcatggtcagcagtgactcccatgttgtctttgctctaggaccccgtctgatgaaacggctgctatctactctgtccattcaatatggactatatgaggctactgaaatatttaatggatacatatggccagtggctaccacgttggacaggaggaatattatagaatatttccagcattgcagaaagctctactggccagactggctttttaaaataaaatgttattggaacatagtcacgctctttcatttgcctgttatccaggattactttcacat

SEQ ID NO: 4101 - DNA, 1256 bp, Artificial sequence
  DNA replication origin
agttcagctcacacgttatcttctcttggtgggtttccagtggccctccatatcacctccatgcaataagaatcacctgcagcttcctcaggacacttttttttttttttttccaaggcagaagaatttttcttagtacagaacaaaatgaaaagtctcccatgtctacttctttctacacagacacggcgaccatccgatttctcaatcttttccccacctttcccccctttctattccacaaaaccgccattgtcatcatggcccgttctcaatgagctgttgggtacacctcccagacggggtggtggccgggcagaggggctcctcacttcccagtaggggcggccgggcagaggcgcccctcacctcctggacggggcggctggccgggcggggggctgacccccccacctccctcctggacggggcggctggccgggcggggggctgacccccacctccctcccggacggggtggctgccgggcggaggggctcctcacttctcatatggggcggttgccaggcagagggtctcctcacttctcagactgggcggccgggcagagacgctcctcacctcccagacggggtcgcggccgggcagaagcactcctcacatcccagacggggcggcggggcagaggcgctccccacatctcagacgatgggcagccgggcagagacgctcctcacttcccagacgggatggcggccgggaagaggcgctcctcacttcctagatgggatggcggccgggcagagactctcctcactttccagactgggcagccaggcagaggggctcctcacatcccagacgatgggcggccaggcagagacgctcctcacttcccagaccgggtggcggccgggcagaggctgcaatctcggcactttgggaggccaaggcaggcggctgggaggtggaggttgtagcgagccgagatcacgccactgcactccagcctgggcaccattgagcattgagtgaaggagactccgtctgcaatcccagaacctcgggaggccgaggctggcggatcactcatggttaggagctggagaccagcccggccaacacagcgaaaccccgtctccaccaaaaaaatatgaaaaccagtcaggcgtggcggtgcacgcctgcaatcgcaggcactcggcaggctgaggcaggagaatcaggcagggaggttgcagtgagccgagatggtagcagtacagtccagcttcagctcggcatcagagggagac

SEQ ID NO: 4102 - DNA, 1475 bp, Artificial sequence
  DNA replication origin
cccggctggggcggcaatacccgcccccgaggcgaccgcagggcccgccgccggggcactggccggggctgcgggcacgggcgctggctcgcgcttgttcacgggaaaggggaagaccacggcgggatccacgcactcggcggccgggtgggcgagctcggcgggcagggcggccccggcgcggccggctcccgcagccccgccgtgcccgcgacccgcagggctggcggcgccggctcccggggactgggcggtggaaccggcggttggcggcccgcggccgtgctgcagcttctcgctcacggcgcgctccagcttctcgcgggcggagaagccgctccacatgcagtcctggaggatgaccgggttgggggtgaggccacccagtccccccaggccgaacgcgtcctcctcggccgggctgccccacagctcgttctcaagcagcatctccgtgacccagctcgggggctcggagctgtgctccgcgaagccacggctgggcgacagcgggggcgtgggcagcagctcaaacttcttccagatgtcctcccccgggggggtcgagtcggggccgccgaagtagaagtcatcttcgtccgggtagaagcagggctgtagcgagtcaaactcgaggtctgggttcttgcagatcatgcccggcatggtggacgtggagcagctcggcatcggctcgcctcccggccggcgactgagggcttctttccgccccgttcgttttaataccgggggtgcttccttcccgtggggggcgcggaaggcgggggccggcgccgacctccaacactgcaaccgacagacacaccggagagggtgggcaaacggggcagaccgaggggataggcaatgggcgccccctctaaccaggttccccaatcttccctccaagccccccactctgcccactgctcccgaaggtggaggaagttgtgcctctcgctccctccctcccgccctccttttgtgtacaagctgtctacgacagggggtgggagggggcatgcagatgcagggggtggtggcgaggctccgcaactttggaaactgccatttcattcacacaaggcactgcctgggggagggggctgttcctggctgcagaattctagctctcacgagcacgcagacaaccgcactcgcagcggtgtggggccggctgctcaggggaagccccaggctctccgacccagctaccgggaatggtatttggagtaccttctaccccctttgtaaaaatgcaacctcaggagtgcaaatgatagcaggggatttagaaaactttgcaaataaaaaaaagcctttctctagacagagaccaacaacagacacccatatccacaaatccttcccctccccaaatttgagcaaacgcccctcggcattcacccgctgcagggatactcctgccaatagcttaattggaagctctctaagcccacccctgctcttccaaa

SEQ ID NO: 4103 - DNA, 1200 bp, Artificial sequence
  DNA replication origin
gaggaggacgcgttcggcctggggggactgggtggcctcacccccaacccggtcatcctccaggactgcatgtggagcggcttctccgcccgcgagaagctggagcgcgccgtgagcgagaagctgcagcacggccgcgggccgccaaccgccggttccaccgcccagtccccgggagccggcgccgccagccctgcgggtcgcgggcacggcggggctgcgggagccggccgcgccggggccgccctgcccgccgagctcgcccacccggccgccgagtgcgtggatcccgccgtggtcttcccctttcccgtgaacaagcgcgagccagcgcccgtgcccgcagccccggccagtgccccggcggcgggccctgcggtcgcctcgggggcgggtattgccgccccagccggggccccgggggtcgcccctccgcgcccaggcggccgccagaccagcggcggcgaccacaaggccctcagtacctccggagaggacaccctgagcgattcaggtaaagaccgaactcgggtccggctgcctccctggggcactggaccccgggtcgcgtcccctttgttagtgctcgtatgtcttggcctggggagcattttggaggcagtgctaggggcagagaggtcctgtttcccccaagtctctcctcggggtaaagagaaggggctgagagaatgccgttgcaaaaggggtgctctccaattctcgccttcactaaagttccttccaccctctcctggggagccctcctctaggccatcacgggccctcacccggtcccccacctctcttttgcagcgcagtctgaggaataaaattggagaaagttggtggctaaaccgggtgggggtttagggggttgctgggtgcactgcctggacagaaacctgttagcgcaggggtgaaagggactctctggcccaggtcaggggagggaaagacatcccgagaagattcaagggctgtgcaaagccctgtttaaggcgcaggaacttataggagggttgcacagatggctagagccgattttctattctttttctttttctttttttttttttttcaaatgtcggtacctttcccttcccccatcctcggtgggtggtgggctatttgctcctggtgcgtggccagcaggcggcgatatgcgaggccagcaggcgggcccgggatctgaaaggctgg

SEQ ID NO: 4104 - DNA, 1906 bp, Artificial sequence
  DNA replication origin
gacagtcccggccggctgctgccctggcctgccagtctctgggcgagcgcaggcactgggggttaagaggcccccatgaggccctttctgaagtgaacgttcccttcctggaatgccttgccagagcctctggaacgttccagccccagcgcccggtctgccctacctgacagctctgtccgtgggggcctcggtcctgcgccgactgcggagccatgaatgtccaaagcactcacagacgcgaataaatgatgcgtatgggggtgacctcagagatagcttagacccacaaaacctcagagcaaaccccaggctgcgcaaggacaggtctctgtcagaccgagtcctgtctggcactgggctgccctattgggcccctttcaagactgggcctggcctcagcccaagctcggggactgtgatccctatcccgctcctcaccctctccttgcttttccagatcgctcccctcctcactttatctcggcctctccttccccccgtgtctttctcctagtgcttctccagacaggcctggactctgtgagtgtgagcctgtgtttctgtgtgtgtctctgtgtgtgtctctgtgtgtgtgtgtctctgagtatgtgtctatgtgcatgtgtctgtgtgtctctgtgtatgtctatgtgtgtgctatgtatatgtgcctgtgtgtgtatgtatgtgtctttctgtgtgtgtctgtatatgtgtacagtgtgcctgtgtgtgtctctgtatgtgtgcctgcgtgtctgtgtgtgtttctctgtgtgtctctgcatgtgtcttcgtgtgtgtctgtgtgtctgcatgtctttgtgtgtgtgtgtgtctgtgtggctccgtgtgtgtcggtgtgcctgtgtgtctgtgtgtgcctgtgtgtgtctgtgtgcctgtgtctgtgtatttctctgtgtatctctgtatgtgtgtctccgtgtgtgtatgtgtgcttgtgtgtgtctgtatgcgtgtctccatgtgtgtctgtgtgtgtgagtgtgtgggtctgtgtgtggtctgtgtgtgtctctgagtatgtgtctctgcatgtgtctgtgtgtctctgtgtatgtctatgtgtgtgcctgtgtatatgtgcctttgtgtgtacgtgtgtgtctgtgtgtgtgtctgtgtatgtgtgtctgtatatgcgtgcatagcgtgcctgtgtgtttgtgtgtgtgcatctgtgtgtgtgtttctctgtatgtctccatgtgtgtgcctgtgtgcctctgtgtgtgtctctgtgtgtctatgtatgtgtgtctccatgtgtgtctgtgtgtgtctgtatgtgtgtctctgtgtatatgtatgtgtgtctatgtatctgtgtgtctgtggatgtgtgtgtgcgtgcattacctttgggaagttaaggatatttcttctctgaactttgccatcagcactcagcccagggctgagccgtgattgacaggttactagaagctggtctgaaaacctgggagcaaagggccagatggccccggcctgcagccgcatctctcccttcctcccccgcagaggtgaacttgctgtctgtctgctgtgctttcctgaaagcccccggccctgaactgaaaacatctgcccagcgtttccctcatgtcctgatccctcaccactgtttccgtaggaattcctgccgaatgcaaactgagttctgtgtaaactcacccctgttccccattgactcaatgatcatctattacatacctgtcagggccagccctgggaatcatggcacagtttgggagggcctagccttgccaaggcccctttgtctgtactgcagctgtttcctggtcagattctgccctgtgcctgcactgagcctgggcatttcccttcagcctctaagatgtacatccctccaggccct

SEQ ID NO: 4105 - DNA, 774 bp, Artificial sequence
  DNA replication origin
ctcgtgatccgcccgcctcggcctcccaaagtgctgggattacaggcgtgagccaccgcgcccggcccagatttttcacttttaacgaatgatgggttcaggatatgctacccccaaatatgacaccttggtatttgagaaaacagcagaagcaggaaagtgtctctgtctgaccttctgccattgtgacttgaaacaagttagaagagaattctctcactttcttctaaagtaggtccagacggtaacatattccaaggtgtggtgtcctgaagcagctcagtgttgctggagcatgaagtgtgaggaaggggaggaggccacaaggtgtggctgaagctccaggccgggaaggtcatggaggtccttcacacagcggctgggaggttgggctttgtttcagaggcaatgtggagcctctgaaagatattgggggtaggggggcggggggcctgaggcgaggagtagcctattgtagggaatgaactgtcatggaagacccggaagtagggtggccagcctggagggtgttgcggagagtgcaggtaagaggtgagaaaggcttgaatggcgcagtgatggaaggagaggagaggttgacaagcctcctagaaataagcagaaagtgaaacggcaggagtcagctctggtttggaggtagggattggaggcaatttgcaggggcctcttttggctgctccacctcacgcaaagtacacaggggcacaggagccaccatgagttcattgttgggcgtgtggaggtggatggcgg

SEQ ID NO: 4106 - DNA, 1376 bp, Artificial sequence
  DNA replication origin
ctaagactggcttctgccctcaatgggctcacagtctgacagaagagacagtcacatgacttagtagtccagaggctgccattgccagaggccaggaccgtaccggcacagagtagggtccttacctgacttggagggcccaggggtgcttcctggaaagaggcagcatgtggaatgccttggggaatggtgcaggtcttggccagcagagcagaactggggaagattttgggcaggggaacagcacagaaaaggcaggaaggggagatgcaccagtgtcatggaagatgctgttcactgctcagtgttggtcctccctagagcagggttaaatccagtctcaactgcccacaggctttatcgagagaagaaacagctaccctccctaccatgatcagagcaggcttttgtggggagctagagtttagattacaaggaggacgtcgatcataggaaagatgtgcatcacaggttggatgtggatcacaaggaggatgtggatcatggggagcatgtgaatcatggggtaaatgtgggtcacagggaggatgtagatcacggggaggatgtggatcatggggaagatgtggatcatagggaagatgtggatcatggggtggatgtggatcacagggaggatatggatcatggggagaatgtggatcatcggattgatgtggaccatgggatggacatggggaatagggtggatgtggatcacggggtggacttggatcacagggaggatgtggatcatagggaggatgtggatcatggggaagatgtaaatcattgggtggatgtggatcacgaggtggatatggatcacggggagaatgtggatcatggggaggatgtggatcttggggtggacatggatcacggggtggatgtggatcacggattggacatggggcacagggaggaggtggagcatggagaggatgtggatcatggaatagatgtggatcactggtgattgtggatcatggggaggatgtggatcatggggaggatgttgagcaaaacatggatgtaggtcacagggacaacatggaccacaggatgggcaaggatcatggagaggagatggatcacagggaggatgtggatcatggggctgtgaggaccacagggtgcgtgagggtctcagggtaggcatggattttgggaagaatgtgcagcacagggaggaagtgggtctcagcaagggcctgagagcccctcctggtgacggacaatgggccctgagggcctctgctggtggtgaactatgaggtggctccaggaaactgacttttgctaacatgggtttcaggacctcgttcaggaagtctaatgataaaacaaatcattcgatgcacctaaggatcaga

SEQ ID NO: 4107 - DNA, 903 bp, Artificial sequence
  DNA replication origin
ggtgtgtgtggtgtgtgtggtatgtgtgtgtggtgtgtgtgtgtctctgtgctgtgtgtgtatctctatgctgtgtgtgtaatgcacgtgtgtctttaagtgatgtgaagtgtgtgtctctatggtgtgtgtgtgtgtgtctctgtggtgtgtgtgtatctctatgctgtgtgtgtgtctctatagtgtgtgaggtgtgtgtgtgtctctatggtgtgtgtgtatctctatgctgtgtgggggcggggggcggggggcatatgctccgctatgatgactgctgagctggcttctccggagcgtggggacacagctgacacagcaggacacagagagaagcctggggaggcggccacaccagccgttcttgcttactcaggctgagccatggagcagctgctcatgtgttttccagtgagcagagtgttcccagcccttgcttcccagaacccagagaggggcaagggcactcacagtcagggggtcctgtagtccctctgaggggtccacatccgacaggcaggggctggtccaggaggcctgaagacgtgccctggaaggcagaggagtgcaaagggcctgggaggcagtggaagggaggtggcattctggcagaactggagctgggaggcacctgaggcagaggcgcctgtgaggcacggggcagtgagtgtgagtgtgtgtgtgtgtatatgcatgtgtgctgtgtgtacctgtgtgcagtgtctgtgcatatgtgtgtacacccagatgcatttacccacaggctccacataatttcaattctttctcctcccacttcaagttcaccaagcagcgtaatgcttcaccttctggcagggcagggaccactcagcttctttcctgcttctgcccccaaccctccccaagaagatgacatcc

SEQ ID NO: 4108 - DNA, 1102 bp, Artificial sequence
  DNA replication origin
ctgggtcagtaatcatgcaaagggtgaaagccagaggaacctgggttagcaagtgacacgaagggactttccaggatccccccaccgcgaggcctggcacgaaggagggctcacagtccggctcccagagccctgcaagtcgggcgcgctcagcccacctgctccctgcattggtggtggcgggcggcccgcactccccgcgccccaggcccgcccgctcccgcccggctcggcgctccctcggctgagcagctaggctctgcattgcaggggtcccaccgggccgcagggtagcctcgcccccgccgctccttcctttgtccctgccccgccgctgcggcgtctgcggcttctgcggccgcctgggagcgggcatgggtgggcggggcccgtggcggcgctgcccggtgcaccagcaccatctaggggcgctacgacagcaggaagggcgctccgctggcatccgtgggtcgccgcctggccctgggcaaattttcccaaactccggcctcggtttcccgggttaccgtggaggcgacaagcgggtccactcctatcaggtgtcctcactggtacagtcgtaatcccttaatgaaggggattgatcgtctccacagccgctaataggcaaggagggaaactgaggctctgaggggttaagtaacttgtcccaggggatatagttctggggacagaaccaagaatcaaaaccaggtgcatttgagctcctaatctgtgcgtggaaccccttggctgtgcggcgtggaagagggcagtttctcctgatatgccacatgcagtgggacagcttgtcctgctccttgtcctctgctagctactttctgtatgatcaagtcatgtgaccgctttgaaactcagctgtgtcactcactttaccttagggatcatcccaaggccttccttcttcccggctctcagggaggcaggtctcaaccatgaaaaggtttcagaggatgggagccacagtgagaatcaagagggaagggcctctgaagacagagctagctccataaacctgtccaattatcacccttacaagcgcagagctccagaacccccaggcagaggcaaatttccctta

SEQ ID NO: 4109 - DNA, 1306 bp, Artificial sequence
  DNA replication origin
gaaacagaaaggtctggttcgggcttcctctgggaaggcaaggccaagtggccaaggctgagaaggggcaggggcgaccgtgctggggcgggtccgcaccagctcctgggagcagagagcagagccgggcaaagagatggggttgtccaggctagggtgaggacgcggccggtgacagcgcgggtggggatcccccggggccggggcggggcggctgccgcgagccgggctgggggcggggcggggcggggagggacggggaggggcggggcggggctccgaggccgtctcgcaggctgcggcggccgcgggagaggcgtactcggcggcggcggagcgggcggcagagcagggcggcggcgactcggtgagcgcggcgcggctgggggcgcggcaggggcgcgggcgggggtctgcgggcgcggggctcggcctgcacggggcaccgcggggcaccgcgaggcggggcgggcgcctccctgccatccttctcctcccggacgcccctgcagcctttgggagggagggagagcggaggacaccgtccgggagcccttctctagcgatcgccggacagaggtccggctttgtgccccgttgccctctttctgagagggctgcctcctgattgtgttcctttcccagaccaccctccctcgtccctcactcacttaccccccaccccaggtatcataagctccattcttgcaggggacccctaacactccccttcccaccacccgaggccccggggtcctgggtactctctacagccccaaagggagggatggccccctccccagcccctgcacacctggacccttctgttgccacctgccacagacgttcttagccagccagaaagctgctgtgcctaggacccagcacaccttgccgtcaccctctctcctcccccagaacccagaaccccagtttggcaaaaggcacttttccaatactgagctttgggaacaatttgacccacttcccaaaatgctggtcccaggccagccatgctttttggtggagacacctgtcttgtctgccaggagacattctctgtcaaaatgggccagcccgtccctgggtcctcctccaagctgctcctactcgctagccagtgtccccagagaccagggccaagatctttgtcatttaaggcctccaaagctatttccccacgcatccccagaattcccccagccactgttttgggggtgccaggtccagaactgatggagcaatctttctgtgtccagggcctgatgtcctctcccacacccttgtttacccgcctgctccccag

SEQ ID NO: 4110 - DNA, 870 bp, Artificial sequence
  DNA replication origin
tgaatttttgccaaaaaacagaccaagagcctctgtgggcagttcaggagagcctttcagagtgcaaaggaagcttgggcaacaagtcctcccaggggaaacaccctggatctcagaaaggagaggggcctgaacaccttctcctgatgcttcccgcctcctctgatcccagcccacacagggccccaacccatgcagcttcgggcacgtaccttggcacactatggggatttaacacatgtttcatgatgttctggctgatggactgggaaaggaagcacccgaagccggggtccccaggagctctccctcccctcaacaggagctctgactcacaacctgtttggcactgctgagtcctctccggtttcctgaatctccctctctctaatgcaaaaagcctccatggcagatgttttagaacaatgatcacgtcaatgacgctgtaacccactactttctttttgcatcatagaattttttaagtgtttttgcagacttactctttaaggttaattacatgttttggattgagcctttgggaagactttacagtggtcctatcggataactgcgggccccaaggctggagatctgttaatagggtgggcagaaagggactgggagcgagactgggttcagaatctcaagtaatttggagtgtgcctagggattgggatgatttggctgggcattaatttgaaggtgaatatgcgtctagagattgcggggatttctttttcttggagggcaaccgtgggtgtggaggaatttggtgtgcagaaacagaaaggtctggttcgggcttcctctgggaaggcaaggccaagtggccaaggctgagaaggggcaggggcgaccgtgctgggg

SEQ ID NO: 4111 - DNA, 969 bp, Artificial sequence
  DNA replication origin
tgctacttattttctctgtaagtagaagataaggttatctgcagggaaggagtgggaagtggtgggtgggaactttgagaattgtcaggaaggttttaaatagctactatgggtaagaaagttgactccagaaacagaaagattgctcgacagcttcaagttgagaccatgaatgttctcaggcagcaatccgcatagtggtatgaatttctccagaggtcctagtgaatctcagagacagttgcatcaatgcagagttcaggctgaggaaaatgcaacaaaaaaattagcaagagaaaaacttaaggacatgacagagatgcttgaatggatggaccctaaagcccaggttgaaaaaggaagaaagaaggaaagaaggagggagggaggtggggagggaagacgggacggagggagggagggagggaaaagggaaggaaagaaaaaaagaaggaaggaaggaaggaagaaagggagggagggaggggaggggcagggcaggagggagggaaggatggcagaatgggtttcataagggtagcagggtcaaggcacagttttgctgcacccaacgatgaggggtgaaggaagaaatgagatgtgtgaaatgcagaaggctatgggctaagagttgtgtgttcgaattgagaacttgaaggacagaagctccaattgatggcaatatccaagtgagactaactgtgaccctgaggggcaaggaggatgctgtcttagttggtttccctagaagcacagcctgagaccaggactcctaggaaagtgattattgagggagtgctctcagggtagtgaatcaagcaggatggggctttgcctggacccaaacttcagttccggagcccaaattgtgctatgaaatgggcacagttggctctgaggcagggacaagccttttgcagccccacgtcagccctctgtcagtcactgccacaagctggccctgtgtgg

SEQ ID NO: 4112 - DNA, 1423 bp, Artificial sequence
  DNA replication origin
ccttgcaaccctccgcctcccctcccctcagcagtctgcccctgttggaggagcgctgaccagcactgcttgcttactaaagaggagaaaattgagatccagaggggcttgttaatcagtcttaatctaagaataaactaggaacaggattgtttttccaatcactgacttcactgactgtgaaatggctttttttgttccttagtgatacactgagcagattaaacaacctttcaggtcgttttggttgttaaaagtccagtttggtttaaaataaaattttatgttgacagtgatctcccagcggtccacaactgtcacttgccccgtcacttgctggtctgtggctaaagaaacctagcatgggggacaggggtggtgtgtggccaaggggacctggagaggaggacaggtgtggtctgtggccgagaagacttggagtgaaacacaggtatggtctgtgtctgaggaaacctagagtagggcatgggtgtggtctgtgcctgaggaaacctggagtgggggacaggtgtggtctgcgactgatgggacctggattggggtacaggtgtggtctgtggctgaggggacctggattgggggacaggtgtggtctgtgactgatgggacctggagtgggggacaggtgtggtctgtggctgaggggacctgcagtgggggacaggtgtggtctgtgactgatgggacctggagtgggggacaggtgtggtctgtggctgaggggacctggagtgggggacaggtgtggtctgtgactgatgggacctggagtggaggacaggtatggtctgtggctgaggggacgtggagtgggggacaggtgtggtctgtggctgaggggacgtggagtgggggacaggtgtggtctgtggctgaggggacctggagtgggggacaggtgtggtctgtggctgaggggacctggagtgggggacaggtgtggtctgtggctgaggggacgtggagtgggggacaggtgtggtctgtagctgaggggacctggagtgggggacagatgtggtctaggcctccccttgctgcacattgctgtggaggggacttgttcttccccagccccctgccctttccttctttagggtgaagacctccaggatattgaggcaggaagaagggacagagaggaacaagccttttatggtatgtgggggtgggtatgtgttatttgggggctgcttctttgttttaactgtatcagctactgctgtggtcttctgttagcactcgcgccttctctagtttccacaaatggccctcaatgtcattgcatggcaggtgtatgctgggcttgcttttgttggtgacatgaggggaacaagctcatgctgggactcacctcggagacctgacagcgccttctccctgccttccactgagcttggag

SEQ ID NO: 4113 - DNA, 1451 bp, Artificial sequence
  DNA replication origin
gtctgtccgtcggtcccgccccgctagagcgaggctcccgggagctgcgggcggggcggggccggacgggacggggcggggcccgccgctcggccgccgccccattggtcgcagctccgccagcccctcgcttcgggcccgcagccgggcgccccgggccgagggcgcgggcggctgaggactgcggggctccgaccgccagacaggcggacagacccatagacctagatgctgccctgccggccgcgcgcccccgcccaggcccaagtgcagagtcaccccggagcggcaggcgctgtccgggtgggaccaggagcgcgccccgcgcctcccacctgcgcgccctcctgggccggaagcgccgtggccctgcgggaaaaagatgacctcccccgcggccccggcggctggggcaaccgcctttctaaagtcgcggcccaagcgacactttgctaatttgcctggatttcctcaggaaatcgcgaggcccaaacttgttttaaaacaaagtgcgaaggagagtacatatagctccagttcctgccaatgtttgccatcggtcccgctgcctgaagactcaggcacagtgcagaacaagatgctttgtcttattcctccactcaccgagtcagaagaggtgcttggacatttgcaccaagcagatgcgcctcatatgtagaagaggaaccagtcgggtcccctttcggaaggacgaatggaagaggaagtcaggggacgatgccttcagccgacgttgaggaacaaaccaggacctcggcgaggacagcgtgtggtccagaaggcatcgctggcctcgctgcactgagcgagagcgctcagttaacagccaggaggagaaatgggacgcttcgggacccacccccgcgctccccctcccgcccccaaactgcagatttttaagttgtgcagacgtggaacaattcctcggagccagctgctccaagctaaggcgcccagtgttccctgggttcctacccgcagcatacgccctgccagctgcccccaagccagcacccgctgaccactcacctcaggcaagcacctaggaagacgatgcagattcaagctccagaccttgagccaagcgctggggagggaatgggggcaaagagatggtggaaaacactttcctgaacttactgaataccctatgttatgtgtgggttttctaattgttctttgcttaatgaaaaacccacgttggaaatcagaaaaaggcagtaatcctcaccgtatcttgtgggcttcaaagaggaggttttccccttaaagggagttttggtccagaggagaggctaacagcaggcaggaagggcagaggaaaagataaagcctagggtggtcttccccctgaggcctggagcccaccaagctccaacagtttcatttggcttctgggaagcaaagtacagatgcatgtgtctgcagag

SEQ ID NO: 4114 - DNA, 1009 bp, Artificial sequence
  DNA replication origin
ctggcggagctgcgaccaatggggcggcggccgagcggcgggccccgccccgtcccgtccggccccgccccgcccgcagctcccgggagcctcgctctagcggggcgggaccgacggacagaccggccgacgcgggccaccccgctctcctcgccgccgcggcggcaggcgcggggccgcgccgcgaggcctgatccctgcagcgcgggcaggcggcgtcgcagagcggagctagctggatgcgtccggactcctgcaggtacctggctggcgtccccacctccctgcgcgctccggagacttctccgggcgaccctgcaactttaccgcgccttcccccaccttttgctgccccagtctcctgtggtccaggtcgcgggtgcacgaccccgagggtctacggccgcagagcactttccgtccttctgggcgtctggcccgcggcgcccgcatcctctggtccccagagcccgccgtcgctggagccctaaggctccgcctgttgcgtgaactgcgggctgttgaagcggtggctgggttgatttgaaagcctcggggaaggtatttaggatcagctttcggggagtggggtgggctatggtcagggggaggaccacctggaggcgggagaatcgatgagccgaagaaaggcggcacctcgcgtaggggcatccccggggcgtttccttggccgggaagccgttccttcccttcctcgagaggaggcgctttcctggcgcttgtaaatgcttcccgggccgtctgctccgccttctttgtcattcctcccctcccctttgccctgcagctgtgctaggcgccccgcgacagttgcagggaagagcgaacccagggcccttgctctcgtgcagcgctgcgccctgggtggggacggcgtgaggcttgcagcgcaggtgtggagtcacttgcggactctgcgtttggatcagtggcagtggtggggaagggtcaccccggggtcaggaactcctcttttttttttcgcgcc

SEQ ID NO: 4115 - DNA, 1010 bp, Artificial sequence
  DNA replication origin
ggaggggccggtgggccctcgggcctgacgatggcagtggccactgcggcggcagtactggccgctctgggcggggcgctgtggctggcggcccgccggttcgtggggcccagggtccagcggctgcgcagaggcggggaccccggcctcatgcacgggaagactgtgctgatcaccggggcgaacagcggcctgggccgcgccacggccgccgagctactgcgcctgggagcgcgggtgatcatgggctgccgggaccgcgcgcgcgccgaggaggcggcgggtcagctccgccgcgagctccgccaggccgcggagtgcggcccagagcctggcgtcagcggggtgggcgagctcatagtccgggagctggacctcgcctcgctgcgctcggtgcgcgccttctgccaggaaatgctccaggtgtgggcctcggggggccgggctggtggggagggcctgggcacggtgtgggaggggactgcgggctggggctgagccgcgagggaccgccctggggttcagggtgtcaccttgggaaccgctgaggctgagaggagtccaaaaagccactttgaggcggccgggaagctgcagggttgagagggaaagagaaactaactgggagggctgccttctgtcctctaaggatgtcgaaaaagaaatgggcccaagagaaaaataaataaaccagtttctgaacgtttcatttcgttacgtgaggaccgccccgaagtagatccatggcctctgaattgtttttcctgtgtcagaagtgaatttgcaccaagctgtgtcttcagaacccctgagcactgggggaagttgctagctaaggacctcatatcagtcctttaaaaaaagttctccttcccccggcctctgccccttttctgctggggtaaggagctcgctgccaccagtaaactcagcaccatccttaacgggactgtggcctgatttccaagtagaatacattttggaacccagtggtcatgctccatacagag

SEQ ID NO: 4116 - DNA, 1349 bp, Artificial sequence
  DNA replication origin
aagacacagcatggaaagtcctcaccagaagccaaggaaatgctgctaacatgcttcttttacttcccagcctgaagaatgtgggctaaataagtctcttttttttttaaataaattatccagcctctggtattctgttatagcaacaccaaatagacacgacattaagttaatataatggaagtaatctgcagttggttaattattcagtaaaccaaatcaacaaatattgtttgtagcccactgtggtgtgtgtgttgagtgtgtgtgtgtgttagtgaggaggtgggtgctgaggggaaagatgagctgagtgtgtgtgtgtgtgtgtgtgtgtatgagagtgtgtgcgtgtgttggtgagggggtgggtgctgaggggaagagtgaggtgagtgtgtgattatatatatgtgtgtgtgtgtgtgttggtgtgggggtgggtgctgagtgagaacggtgaggtaagtgtgtgagtgtgtgtgtgttggtgagaagggtgggtgctgagtgaggggaaggatgaggtgtgcgtgtgagcgtgtgtgagtgtgtgtgtgttgggggtgggagctgaggggaaggttgaggtgtgcgtgtgagcgtgtgtgtgtgtgtgagcgtgtgtgtgtgttggtgggggtgggtgctgagtgaggggaaggttgaggtgtgcgtgtgagcatgtgtgagtgtgtgtgtgttggtgaggggggtgggtgctgagtgaggggaaggatgaggtgtgtatgtgtgtgtgtttgtgtgggaggtgggtgctgagtgaggggaaagttgaggtgtgtgagtgtgtgtgtgtgttggtgtggggggtgggtgctgagtgaggggaaggatatgtgtgagtgtgtgtgtgtgttagtgtgggggtgggtgctgagaggaaggttgaggtgtgcgtgtgagcgtgtgtgagtgtgtatgtgtgttggttggggggtgggtgctgagtgaggggaaggatgaggtgtgcgtgtgtgtgtgagagagtgtgtgtgtgtttgtgtggggggtgggtgctgagtgaggggacagtttaggtgtgtgagtgtgtgtctgtgtgttgctgtggggggtgggtgctgagtgaggagaagggtgaggtgagcacagatcagaataaggcccagagtgttggtgaatacaatagtatgaggcaaccttagtgatctccactgtcgtgcgactgctaacaaagagatctcatggccaaggccaccttacattctccagacgagagcgactaatgtgtttacacaggtcctcacacctttgactcccttctcttactctgcccagagcaatgtaaagtaatccctctaccttgg

SEQ ID NO: 4117 - DNA, 1156 bp, Artificial sequence
  DNA replication origin
tctagttttcccacagttagaagccaggccgccggggctcttctccttggggcaaggcggggctccccccagctccagcgccctgaccgcgggaccgcgcaggcggtggcgcccgcggcctttcccaagcgcaggatggcctctccagcttcagcgcccggagcgcggcggccgcggatgacaactggactataagcttccctgctgcaggcaccaaaaatcccagcctcaagccgggccctgctggctgagaaagcggcaggggatgcagaagttaaaacgctctgggctttcaccaccccatccccacctcctccgggaacgctcctgagtcctgtgcgggctagaacttcgaggcccgggaacccaactgggcactggaggctggccctgccggcgcggaccagccctggcctccacgctcagagccacgctgccccctgctggccagccctggaggggcggcccaggacttggcacctcaaggggtcttgcccgcaacctcgcgaaaccaccaagcatctatgtgtttggtcccaaaatcttgactggccccaggacccactgtggatgaggggcagggcgctgctgagtctggtctggtctgagggatcttcattagttgggcactatcccaatccttcttccaagcagttcacaaggtcgcgcgcggcccaggattatgcccccattcctgagaactggggcctctgagtgcgtggaagtggggctagccagtaggtttgcgggtggtgtagacggtctgcgcccaagcggcgcacgcaggttgtggtgtggtttgtgcctgaccatagcttgtactagggtcaactgcagaatcttccttggtttctttatgaagccccaggaggctgcgggccatggttgctccaaaacaaccagagtgcatgggtgaacacacacacacacagggtgcccttcctagtcccttggctctttctgggatgctatccttggggttgtctatggctgctcttccctagcccctgacatccctccacctcccagaacacatcattccacctccctgaagatcgagcctctgcagttcccggggcctcaggaagctacaaatgcggtgaaatggggaggtttgccagccacgttaatcctttttgggtcaccccacctccag

SEQ ID NO: 4118 - DNA, 793 bp, Artificial sequence
  DNA replication origin
ctcgaaacgtgcggtgccagcccgctctcatctgctagggaccgtttcctccagtgcgccaggcgtgccgctctggacctaaaaaggcagcaggggtcgcgcgggactgaagaggaggggacgcaggttgggagaggccgggtccaagcgagagcagctgccaaagtctgctgcccgggtcagcaaaaactttgtctttcattgcgcaggcgcagggcagggttggggggcaggggagggaggggaggaatcctgaggcaaggggcgggggtgggggtggtggaggagggagggtggtggattaaaataagtaggcggctcggtgctaagggatgagtgagtcggagctcggcctctccccggcacgttctcagctgctcctggttcagacccagcgagggagccgcgagcgaggctcaccgtccccggcgtgcaggatccggggctgctgagcgctcgctcccgcgtgtccggcgcttggagtccccgcggcaggagaggagtcgggacactagagctccaggggcgcctgtgggctccagggcctccggcttccccagtccccttcagctaaagccccagagacgtgctcagccccaggacctctgcggaacaaggtaattgcagtcctgggcgcctgggctcagcaaagcgaatgcgggcaggactcccaggttccttgtcactgctcggcgggtgcctcctctctctcaatgcccctgaaggaagctcttgccaaacgaatgctgtaggacttttgtgaaagtgagagcagggtggttgggggtgctgc

SEQ ID NO: 4119 - DNA, 861 bp, Artificial sequence
  DNA replication origin
aaggaaggaagaggggaaggggaaggggaggggaggggaggggaggggaagggaagggaagggaagggaagggaagggaagggaagggaagggaagggaagggaagggagaggagaggagagataaggagaggagaggaggaggaagaggaaaggggagagaggggagaggagggaaggggaggggttgaggaaaggaggggagggggaggggaagggaggggaggaaatgggaggggagaggtggggaggaaagaggagggaaaaggagaggaagagagggtaaagaagcaaagagagagaaagaaggaagggaggggagaggagagaggagaggggaggagaggaggagagggaaggggagagaagggaagggaggggaggggagggaaaagcaggaagggcggggaggggaggtaaaagaaggaagggagcagaagggaggggagggaaaggaaggagggagagagggagagagagggagggagagacagggagggagagagagggagggagggtaggattccagctagctgcacacagttgctaagtcctcagtcagctgggccacttatcccattctgacttgggccccggtgctggtacctgtacttagcccttgatccaaaaccccctggttatttctgtcccttccaagcctttacccggttgtcctctctgcccctctctaatgctctctctaggaagaagaggcctgggtctgagtgccatcccttagagaaccttcactagagatctcagctgtgacttctgcagggaagcattttctgatcccagccaatgctagttaaaggctagtttgctgtgctcctaaaacccctaagataatgcatatggcatt

SEQ ID NO: 4120 - DNA, 881 bp, Artificial sequence
  DNA replication origin
ttgatccaaaaccccctggttatttctgtcccttccaagcctttacccggttgtcctctctgcccctctctaatgctctctctaggaagaagaggcctgggtctgagtgccatcccttagagaaccttcactagagatctcagctgtgacttctgcagggaagcattttctgatcccagccaatgctagttaaaggctagtttgctgtgctcctaaaacccctaagataatgcatatggcattgttttaaattatctgtctaccagccctctgccctactagaatttaagtaccttgagggtagaaactgtgtcttcaccaccttattcctaatgcctggcatgggataggaactcaaactgtatttgctaaataaatgtatgaaggcagagaagaacattttaagtgacaccaaggtcttgccactagagctcaaatcatatcctcgttaagttgcactccttccagaggcctctggagaagctcaggaagatctcatgcaaaagagtgacaggaacagatttaccacgggtccaaaagatgtcctggcctgtgtagaggagagagagaactgggcagcatcggtgtctcctgcttggcagggataagttggcagttagcaggcacctcatgagagagaggggcaagtagaggaagacagcagggagaggaagggagagacagcagtcaggtaagcccaggaggtagagagaagccacaaatccaaaactttccagcagccaaatccttcaggaccccttatctccaagccctacttatcctccacatgaatttccctgaagcacaaacaaatcctcgtcaagaatacttgtggccctagcacagtggctctcgcctgtgatctcagcacattggtaggc

SEQ ID NO: 4121 - DNA, 1703 bp, Artificial sequence
  DNA replication origin
ccacccagttgcagccggctcggggcttagggcaggggcgggaggtgaccaccgcgccgctggccgcctcgcccagacattccgtttctgccgctggaatgcgcggacaaggctccttgttggccttgggcggggttcgccgggccggcctggcgctcgaggccccggggcggggcggggcccgaggccgcgggacctttaaatccgagcctcgcgtgggctcctggcccccgacggacaccaccaggcccacggagcccaccatgccgcgcccggcccccgcgcgccgcctcccgggactcctcctgctgctctggccgctgctgctgctgccctccgccgcccccgaccccgtggcccgcccgggcttccggaggctggagacccgaggtcccgggggcagccctggacgccgcccctctcctgcggctcccgacggcgcgcccgcttccgggaccagcgagcctggccgcgcccgcggtgcaggtacaggcgggcggcgggagggacgcgtgagcatcgaacgaggagaagcccagggcatccaccaagcgcgcttcatcccggcctcaggccgaccgtggtgcgggggaaagaggcccctcccggatgaatcctgtgggggaaactgaggtccagagaaggggagggagatgcccaatatcactcatgtgtccaggctagagatgtgggtctcctgaagctctcactcccctgtgattcggccaggagcacagggcagctggggagcgcaggggctgctgcccagcggctgctgctaagctccgtcccagtcctgacctctccattcagtgagcaaacccttcctgagactctgctgttagttctcttggaatctctccatctccatccaatatcagggcgtgatctttcctcccctcccacagtcctcaggctgcctcagactggaaggtaagggatgcgggtgtgagaccaggaggagatccgaggagccgtaggataccccaggatcaagacactctgggtctttggcgaacaattctatttctctttttggtcagcaattgattcctgaagcagagcaaagctcatagtgcagcgaagcgggcaggtcgtctgacacagcccctgacagcacatgaagggaaactgaggcatatcaagttgaagggactctgtgaatcagtatcagaggccacaataaaattcagggctccgaaatcccaagcaaggtctctttccactgccccagcctaccaacctcttaatatggtttacataagattgtatcttcatttccaaaaagcgcagcttcagtcttgctaaaaagagtctgtgccaggccatttctgggtatgcagtctcatttggccagccacgctgcatgcctcaggctgatttcaattgtctatccccttctgcatctttctggataagctgagaaggagctcaagggactctttcctgactcaaatactcagtccccgtatttgaagtggcagatttgaaatggcaaaagcattgctgctaaggcaggaggtaccggggtccacagggctagattcagctggtggctggttgctccaggccgggaattgagggaaagcctttcttctggaagttaatcttactctagtcctgacctgcctccctctgggatgggactggaagaggaaggagagattcagcaccaggtggccatgtccccctaagctttactg

SEQ ID NO: 4122 - DNA, 810 bp, Artificial sequence
  DNA replication origin
aggcggagactcgctgaggcgagttgcacttctaattgggcgtgaggtcttgtcaatccccaagttcttccaatcagaagtccggtccatccagccttccgctccccattggcctgtgtggaggaagaggggtgggtaagccgaagtcgctgcgctcagtgcgcaggcgcgaagaagctggcaggggcacgagccgggggcgggtttgaagacgcgtcgttgggttttggaggccgtgaaacagccgtttgagtttggctgcgggtggagaacgtttgtcaggggcccggccaagaaggaggcccgcctgttacgatggtgtccatgagtttcaagcggaaccgcagtgaccggttctacagcacccggtgctgcggctgttgccatgtccgcaccgggacgatcatcctggggacctggtacatggtaaggcgggcaggcgtggcgcgtatgtccggggggcctggggagcggggcctggtgcggagggggtgagactggaaacggggtgttgggtggggcggggacttggaggggcgctgctttttaaggcgcgccaactctggatgaagtccaaggactttgggaaagtaaccttgttcaggaatcggagtcgggggagcggggggcggtggtaagcatggggagattgttctttggcaagaatttgaggagagaagcgggcttgggagagcagaggctttgcaggcgaagggacgagggtggtaggatttggtgggaattcctctgttttggttcttgttgtatttctacgatctgaaaggcagcatctcccttcctcctatccag

SEQ ID NO: 4123 - DNA, 1900 bp, Artificial sequence
  DNA replication origin
ctgctccctcacgatgtccttggcaggcagggtcagcccccaggagatggggagagtttaagtgggttctacggtagagcacagagacacagcggcctggggcgggggaggggagctgagtacacaggtgggtgcagttatgaccacatcctcctgcttggcctctcagctcagagacagggagcattgcttgaagtcttgggctgaagatccccatcccctgcaaagagctgagttagcaagtggaaggggtcagtcacgctttgctgcagctaacaatgtgtgtgtgtgtgtgttttgtgagtgtgtatatatatatgtggtgcatatgtgtggtgtgtgtgtgttgtatgtgcatgtggtgtgtgtatatggtgtgggtatgtggggtgtagtatatgtgtgtatgtggtgtggtgtgtgtgtgtatgcttgtgtggtgtgtgtggtgtgaacgtggatacacgtgtgtatgtgtatgctgtgtatgtgtatggtgtgtgtgttatgagtgtgttgtgtgtggtgagtgtgggtgtgtgtagtgtctgtgttgtatgtggtgtgttgtgagtgtgtgttgtgaatccatcttgtaagggaggtatgagtgtgttgtgtgttgtgagtgtggtatgagtgtggtgtgtgtgttgtgtgttgtgagtgtggtatgagtgtgttgtgtgttgtgagtgtggtatgaatgtggtgcgtgtattgagtgtggtgtgtgtggtgtgggtatggtttgagtgtgctgtgtgttttgtgtgagtgtggtatgaatgtgcagtgtgtgtgatgtgtgtttgagtttgtgtgtggtgcgagtgtggtgactgtggtatatatatgtggtgtgtcgtgtgagtgtgtattgtgtgttgtgtgtattgtgtgtgatgagtgtgtgatgtgagtgtgttgtgtgtggtgtgtatgtgatgtgagtgtgtgagtatagtatgtgtgtggtgtcagtatatgttgagtatagaatgagtgtgtgttgtgtgttgtgagtgtggtatggtgtgagttgtgtgtactgagtgtgatatgagtgtgttgtgtgttgtgtggcatgtctgtggtgtgggtgtgtgttgtttcatgtgtcgtgtgttgtgagtgtggtgtgtgtggtgagtgtggtatgtgtatggtgtcagtgtgtgttgtgagtatagtatgagtatgtgttgtttgtggtaagtgtggtgtgtgttgtgtggtgtgtgttgtgttgtgagtctggtgtgtttatggtgcaagtgtgtggtgagtgtgctgtgtgcgtgatgtcaatgttgtgagtatggtatgagtgtgtgttgtgaatgtggtgtgtgtgtggtgggagtgtgtggtgagtgtgatgtgtgtgtggtgagtgtggtatgtggtatgtgtgtggggtgagtgtggtatgtggtatgtgtgtggtgtgagtgtggtatgtgtggtgagtgtggtgagtgtggtgtgtgtgttgtgagtgtggtgtgtgtggtgtgtatgtgtggtgtgtgtggtgagtgtggtgtgtgtgttgtgagtgtgtgtggtgtgagtgtgtggtgagcatggtgtgtgtgttgagtgtggtgtgttgtgagtgtgatgtgtgtggtgtgagtgtgctgtgtgtggtgtgtatgtgtggtgtgtggtgtgtgtggtgtatatgtggttgtgtgtggtgtgaatgtggtgtatgtggggtgtgtggtgagtgtggtgtggtgtgtctgtggtgtgtgtgctgtgagtgtggtgtgtgtggtgcaaatgtgtggtgagtgtggtgtgtctgtggtgtgtgtgctgtgcgtgtggtgtgtgtggtgcgaatgtgtggtgagtgtggtgtgtctgtggtgtgtgtgctgtgagt

SEQ ID NO: 4124 - DNA, 1806 bp, Artificial sequence
  DNA replication origin
accgagagggctgctgaggatggagcctccagtcagctcccagcagcagagggctctggggagcaggtgagtggcctctgcattccttgggaaattgagtgggttggtcctaatgcctggcacttggcaggccctacacctgtgccctgcgggcatctcgtattcctcaccaggaagacagggcacaggggcccgccttcccctacccccagggcctcgcccagagcaggacagactaactatgagatcagagcagaagcacccttaaagatcacccaagagagggctccccaaactcacaatccaaacttgcagcccctgctgcaagagtgaacgttataccaagtccaattttttattttatagcttcgtgggaattttacgctttacactaaaataagtctgcttatttccatacaaaaatgtgtgctttgtatcactttttgtgatatccatgccatggtccagccagggtccggagttgatgtggcaagaaggcctggctttcgggccctgtgcgatcctggtttgggtgcatctgagtgggtggtggcaaagatcagggaggcaggagctgcttctgggtcttgtagtggagctggttgctgctgctggcggtgacctggccaacccaatctgcccctgccctcccacaggacttcacctttgaaacctcgggggagaatacggctgtagtggccgtggagcctgaccgccggaaccagtccccagtggatcagggggccacgggggcctcacagggcctcctggacaggaaagaggtgctgggaggtgagttttctttcaggggggtagtttggggtgaattgctgctgtggggtcagggtggggctgaccacagccaaggccactgctttggggagggtctgcagcagagcccaaggagccgctgagctgagctggccccgtctacctgccctaggggtcattgccggaggcctcgtggggctcatctttgctgtgtgcctggtgggtttcatgctgtaccgcatgaagaagaaggacgaaggcagctactccttggaggagccgaaacaagccaacggcggggcctaccagaagcccaccaaacaggaggaattctatgcctgacgcgggagccatgcgccccctccgccctgccactcactaggcccccacttgcctcttccttgaagaactgcaggccctggcctcccctgccaccaggccacctccccagcattccagcccctctggtcgctcctgcccacggagtcgtggggtgtgctgggagctccactctgcttctctgacttctgcctggagacttagggcaccaggggtttctcgcataggacctttccaccacagccagcacctggcatcgcaccattctgactcggtttctccaaactgaagcagcctctccccaggtccagctctggaggggagggggatccgactgctttggacctaaatggcctcatgtggctggaagatcctgcgggtggggcttggggctcacacacctgtagcacttactggtaggaccaagcatcttgggggggtggccgctgagtggcaggggacaggagtccactttgtttcgtggggaggtctaatctagatatcgacttgtttttgcacatgtttcctctagttctttgttcatagcccagtagaccttgttacttctgaggtaagttaagtaagttgattcggtatccccccatcttgcttccctaatctatggtcgggagacagcatcagggttaagaagactttttttttttttttttaaactaggagaaccaaatctggaag

SEQ ID NO: 4125 - DNA, 1090 bp, Artificial sequence
  DNA replication origin
gtcttcctggtgaggaatacgagatgcccgcagggcacaggtgtagggcctgccaagtgccaggcattaggaccaacccactcaatttcccaaggaatgcagaggccactcacctgctccccagagccctctgctgctgggagctgactggaggctccatcctcagcagccctctcggtggcagaaggacctccatcctctgtgtggggagtgtgaaggtcagcttggctgggtcctgcaggggttgaggtctcatggtggccaggctgcatgtccctgtgggggtgggaggtggcgggctcctgggccgtggtggctgtggtcgttgaggccagatgagtggtcgggagctgtgtggtctccctgggtcggggggtggcctcctgctcccgggcggtgaggccaggctccacttctggcaggactacagcctctccctccttgggcccctctccagccggcagggtggaggtggaggcagctgtagcctccaggccggtgggttctggagacgtgggaatagccgtcaggagctgcgtgtccttccaagtggagggggtctgctgtgacaaggtgatatcttgcaaagcacctgcaggaccagaagcagagtgtgttggggaggtggggggtggggaggaccagaagcagagtgtgttgggtgggtcgggggaggctccagagcacctgggctggccaagctcaggctatgagggaggctagtacctggacaaggcagctgaggctaagctccttggaaaatggacaaggagagctgtcccttcccattgtgtgtgtccaggtgcagcctggtctctggagccacgagacaggtgcctaggccacctgggaaagcttttctgtgaccacaggggtggggtgggcatcccttaggggcataactactgtggttatcctacttatcccagggcacacacttctctggccccaccctccctgaaaaaaaggcccccacttccaacaacagacacttccaacaacagatatcctaccttgcagctctcaggcctccgctaggtcacttccccagggatgacctcagcctccttccttagctctctcacccctc

SEQ ID NO: 4126 - DNA, 1265 bp, Artificial sequence
  DNA replication origin
taagaggcctttgggtgggatgcagcatccaccttcagcggggctgacgctccactaaagagggacgtggccgacaaagagcagcctgagggtccccagaaagtggctctcccgccccggccaccggccgctagcccgccttccccaatgggggcgctttgttctcggcccctgtaaccctttcctgggaacagccccgtaacgccggccttgacgggggctgggacctgggccgcagccaggtgtcagcgcgggccgcccggtgcccgagtctgccgcccgagttcgcctccccagcccccgcgcccggtgctggcgtcccggggtccctcctgcgggccggctcggccatccccagggatgcagaggggaggtgcggagccaggggcgcttccccttccggaagtggcggtgtctcgccactacatctggacagttcgacttccccagctctggcaaagggaggcacgtgggcagggaaggggcgggggcggggtgggcactcgggttctccactgctaatgtggcatctggacaagtctcagcagcgctgaccctccgtaagcgttgcctcgtgtagtagctgccagttattgagcgctttggttttttttttctttacagagtctgtctcatgggagatgaggtagggacagtcgtttctgagaccgatgtgtaaagcgccctccctgcttcccaggtgactcgtgcttccagacattttccggtccaggagaggtccctgtgcctattgaactgtgaatgggctggactgtgaggggtatctgggagcacggggagggccatgatttccgagctgggtctcatgcactcctggctttcaggtccaagaagctgctctctagggtggtggtttctgtggaactgagactgtgcttggagtcttcgctccgagtttggagaagagaatggagctgggtgccttacctccctggaccgctgggcatcacctcactgccccattctcgcacatgatggggcctcagcaggggcggctgaagttgggtcctccacctatttccggctggatttaggagggctgctggttcccttgcctgcctggggtaaagcagacattccagagccctgggatcccaccgcacccgttaatgctggggaggcaggtggagtttgggcttccccgtgaactgcctttcctggagttttctgtgggctggggcagatgctgcagtgtgaggcattatttcttgcccagaaacttggacatagggcccaggaggcag

SEQ ID NO: 4127 - DNA, 716 bp, Artificial sequence
  DNA replication origin
cactttgtggagtgcaggaagaacgcgagcgtacgggagaatctgggccggcggggcgcagcgagccgcatcgcagctggaggacagccggggtgtgtctgtgtgtgtttgcccgtcggttgaaggccccatcgcccccgggtccccgccctgccccagaaagcgttccccaagagagctaggagtcctgcgcacctggagcgcgctccgcgtccacgcccagagggcgctgcacactcgcgcccgaggactgcctgccccccttcagcccctctcccgggctgcgcctccgcactccgggcccgggcagaagggggtgcgcctcggccccaccacccagggagcagccgagctgaaaggccgggaaccgcggcttgcggggaccacagctcccgaaagcgacgttcggccaccggaggagcgggagccaagcaggcaagaaccttaggagcgggccgggggtggggcgttccgaaggggccgggaggggtggctggggggcggggtcctggggggtgtggactggggctggccgggagacctggcggagctgggggtggggggccagtttttgcaacggctaaggaagggcctgtgggtttattataaggcggagctcggcgggagaggtgcgggccgaatccgagccgagcggagaggaatccggcagtagagagcggactccagccggcggaccctgcagccctcgcctggga

SEQ ID NO: 4128 - DNA, 1793 bp, Artificial sequence
  DNA replication origin
gccggcttcgcgggttccgctgctcgatgctctcttgggcgcctgcccagcgcgccgctgtcccaggcgagggctgcagggtccgccggctggagtccgctctctactgccggattcctctccgctcggctcggattcggcccgcacctctcccgccgagctccgccttataataaacccacaggcccttccttagccgttgcaaaaactggccccccacccccagctccgccaggtctcccggccagccccagtccacaccccccaggaccccgccccccagccacccctcccggccccttcggaacgccccacccccggcccgctcctaaggttcttgcctgcttggctcccgctcctccggtggccgaacgtcgctttcgggagctgtggtccccgcaagccgcggttcccggcctttcagctcggctgctccctgggtggtggggccgaggcgcacccccttctgcccgggcccggagtgcggaggcgcagcccgggagaggggctgaaggggggcaggcagtcctcgggcgcgagtgtgcagcgccctctgggcgtggacgcggagcgcgctccaggtgcgcaggactcctagctctcttggggaacgctttctggggcagggcggggacccgggggcgatggggccttcaaccgacgggcaaacacacacagacacaccccggctgtcctccagctgcgatgcggctcgctgcgccccgccggcccagattctcccgtacgctcgcgttcttcctgcactccacaaagtgctggagacttggggccttagtttaaacagctgcacccgcacggaagggctgcaagaaaaagggggacgggggcggagttcgcagcgtttttctgtggaagacaacgccctctctcttcatctgagctaaaaggaaaaataagtaacttctttgttccccggtgacctcgggcacgcggatctgaggagcaccgtgcagttgctgctccttcgagatcccctgcgaggccctgggcctcagttcaaaaagctgtggaaggcctgcgggtgtaggggaaacggccgagagagcaaaggggaagaaccggacgggccctgcccacatctggcaggcaggagagatggtgccaaacgaccttcgcacctgggccctgagaccaaagatggcgtcgtcctcccctgtcttccctaggcggaaggcaagaacttgggtcggcctgagctggggaccaagaaaatatcgggaagtgtccagtgttcctctttaaaagaattaaaccttcctgggccacgcagggactgaccgtgggaccctggactctcctccaccttccaccgtggagcaggctctggagccgagcagcctcctgcgtccccatctcatccccccactcctcctcacagcactaaaagatgatggcctgcttgtacccctgctcctgagcacctgtttgacctcaaagagctctcgcttttggggtgtccgtctccccaagtctgtctagggggcaggaagaccttcatcagggttcttgggggccgatgtgggctcgctgagtgcctgagtgatggatggtctcacagcacggcaccacggaggtccagccgagctcgaggagtccctgtggattaaaaatgcccttttcgaaggttctacctctaccagagggtggctccacagatcccttcaacccagtatggtggaaaaataggaattttggaatcttacctttctctactgctcacaacagaggaaactggggtcagggaggatttgatggagtcttttcatttttta

SEQ ID NO: 4129 - DNA, 1083 bp, Artificial sequence
  DNA replication origin
cctcggtacttcggtggttcggaggaggagggggaggagaaggaggaggtggggtggggggggagggtggtaggtggagaaagaagacattgccgccaccgaaggcggaggagggggaggaccgccaagagcgacgccgccgtgtgcccaacggtcggtgtccccggctgaggcagcgcggccgcagcagccctgtaagtcagtccgcgttcgctctttctccggtcctttggcgccgtcgaggatggctccccaggctttgtgcggcggcctcggcgggagccgatcgccagcgggagggcggatagggcctgctgagtgcccgggccggtgcggcctggggcccgctcgcacaatgcagggggaggggtgccggaagggggtgtgcgcgtgcgggggagggggcgccgcgccggccgctttcccgcttccttccctctgcggggccgccgcctcgggggcgtggggcgccgacccggttctccctccgattcggcgcgctggaggttagagaccgagctgtcggccctagggttcggaaagaggggagaggccgggtggccccagagaagcatgcggattgcaagtgggtgaagaggaaggagtgggtttatgaaaacaagtgtgggcattttcaaaggcccgagtgtgtccgggaaaagcttgccgtggacagatgtgggtatgaagcagtgacttggattcgccttgtttaggttataggaacggatttcgatattcagaaaaatatgtaaattaaaaccaaagacaagattagcggcttctactatttgagcagtagttttgtatctgaattgggtcaggttttggggaaaatgtttaaagtttcatgcccaaacacgtgtaaaagttagtgttgtttctgaaaacacagccagagaaaacctacttaacttagctttttattctaacatacgtaaacttttgaagagaggaatgtattgccagcatattaggtgcaataagacatcatgttaggacttagtactttgagatttttacttgttgagaaaacggggcagatgttttggtgaaggaaaacatgagaaaaatgcttgtaaa

SEQ ID NO: 4130 - DNA, 1317 bp, Artificial sequence
  DNA replication origin
tggacggcaagcaggtggagctggcgctgtgggacacggcgggccaggaggactacgaccgcctgcggccgctctcctacccggacaccgacgtcattctcatgtgcttctcggtggacagcccggactcgctggagaacatccccgagaagtgggtccccgaggtgaagcacttctgtcccaatgtgcccatcatcctggtggccaacaaaaaagacctgcgcagcgacgagcatgtccgcacagagctggcccgcatgaagcaggaacccgtgcgcacggatgacggccgcgccatggccgtgcgcatccaagcctacgactacctcgagtgctctgccaagaccaaggaaggcgtgcgcgaggtcttcgagacggccacgcgcgccgcgctgcagaagcgctacggctcccagaacggctgcatcaactgctgcaaggtgctatgagggccgcgcccgtcgcgcctgcccctgccggcacggctccccctcctggaccagtcccccgcgagcccggagaaggggagacccgtgtcccacaaggaccccaccggcctgcctggcatctgtctgctgacgcctctggcttgcgccaggacttggcgtgggcaccgggcgcccccatcccagtgtctgtgtgcgtccagctgtgttgcacaggcctgggctccccactgagtgccaagggtcccctgagcatgcttttctgaagagccgggcctcagagtgtgtggctgtgtgtctgttcgactcccctcgccccattttcaccccacccccgcctctgatccccgggggcgagattggcgcgggagtgtggccgcgccccatcagatgttcgcccttcaccagcgggagcttgatatcccttgtctgtaacatagaccccgggtactgcgggaggggagggctgctggggaggatggggggatgttatataaatatagatataattttattttcggagctaagatggtgttatttaagggtggtgatgggtgagcgctctggcccaggctgggccagactcccgcccaagcatgaacaggacttgaccatctttccaacccctggggaagacatttgcaactgacttggggaggacacagcttcagcacagcctctcctgcgggccagcccgctgcgaaccctccaccagctaccggagggaggagggaggatgcgctgtggggttgtttttgccataagcgaactttgtgcctgtcctagaagtgaaaattgttcagtccaagaaactgatgttatttgatttatttaaaggctaaaatttgtttttttattctttgcacaattg

SEQ ID NO: 4131 - DNA, 874 bp, Artificial sequence
  DNA replication origin
caaaaaaaattggccgggcacggcggcttgtgcctgtagtccctgctactcgagaggctaaggcaggagaattgcttgaactcaggaggcggaggttgcagtgagccgagatggcgccactgcactccagcctgggcgacagaaagagactctttctcaaaaaaaaaaaaaagaaaaaaaaagaaccactcctcaagcagccaactgggggcagatagtaggaatcagagcagagtggccagccagaggccagggatgggacctacacattcctaagtaagcaatttcgctttaggggagaaggcgtggtgtggagggagggtgggagaaacagatgcatgagggaaactcctgtcccaagccagaaggggcagttgcagcccacatcccagcaggacagggaggagtggacaaggctgggtcgggctggtgctgcagagagccagtggcgttgatgtggccccaccctagggcaggaagacaataccaggcagggcagggcaaggcagcggtgggtgaccctggctgaagtccagagacccctgcttccttttgggagacggctttcacagcacgccttggcatctggtggggcaaacaatggaggcttctggcagccgcagagagcaaggcatggtgagaggcatggacagctccccaccacccgtgaagctgaattggacgggatacagggctggggtgaggtgaggaccccctgagagtgcaaaatgtcggagccagtagctgccacagagggcagtggacgtggagctgggggcaggggtgtggggactgatggcagcagccgttgattctacagcagtccctgaactatgcacttcacttgcattcattcagcaaacatttacggagg

SEQ ID NO: 4132 - DNA, 1336 bp, Artificial sequence
  DNA replication origin
agggagggcctggccataccaaacaattgactaaacctgacgatgctgatggaggaagcgtgtggaccctgggggaaaggccagcatctgccaaggccctgaagcaggaacatggtgtgctggggggacagtggggggacagggctggaggtcaggggtggtggggtagacagcgggaggttggaggtcatggataaggccagatcctgaagggccttgaagcacagagtaatgacttgggattttccttaaggaggtgatatcgtgggttgaattcttgcccccaaaaaagccatgttcgcatcctaacccctggaacgtgtgaatgcgactttatttggaaaaggaatctgtggatgaaattaaattaaggatctcaagatgagatcatcctgtgttatccaggtgggccttaaatccaatcacaggtgtttctgtaagagacacacagtggagaagagaaggccacgtgaaggctgaggcagggatgggcgtggtgctgccaccagcgggggaacgccaggaactggaagaggcaaagaaggaccctctgagggcgcagggtcctgctgacacctcaacttcagacttctggcctccagggctgtgagaggagacttttcaagccatccagtttgtggtcatttgctatgactgccctgggaaactgatcctgatgggaagcccttggaagctcttgagcggaggagggacatgctctcctgggcttactcctagctgcataggagagtctgagccgggcagggacagagctgtcggggagtcactacggtgatgcaggtgagtgaaggctagaactgtgatggatgggggaggtcagaagagagggacaggcccgaaaggggaagtaggaatgggcggggcggggcgggggaggtggatggccagacagggaatcccttgaggaaatccaggggttgtggcggattttgtgatgcaacctctgcctcccgcgttcaagcaattctagtgcctcagcctcccaaaaagctgggattacagacatgcatcaccatacccagctaatttttgcagccctctgggggttgcagcagcagggcacgtatgtgagagaggggctcaggagaatagtgtgaccaagggaggtgtcctcctggaaaccttcaccccagcctagaagcacaggataggaaccaacttcctccagggccagctttctggcctggatgctggggctgttctgtccttggaccatccatgggacgtgatgttgaaccgtccccctaggacccactagctgctgtcagattttacagcctcccccatgcaaccacctggggtgttcgctgctcag

SEQ ID NO: 4133 - DNA, 1224 bp, Artificial sequence
  DNA replication origin
caggaaggaaattgtgccagtcacagagcccatcagcagcagagacatggcaagaagcccacgtccctcttctgaaatggaggctgtggtggttttcatcagggaagttttaggggactcttcacagttagtgttgcaggccctggggcagcccttgtacattccttcaatgccggccctggaggaccatatcccaggcttgagtgcatcaaaaggacccactcttccatccccgtggcggctccagggaccagcaggggcagcagggcaggcctgaccttcatacacagttccctgcacacactcggctaactgtgaccagggtgagagcgggcgcagtgggggaaggttgtgggaggaagggtcaagggcctctggtgactcatgatgtgggctcagggagtgttggctgagccaacatgtctggctcgaaaaagaggatcaccagaggctgaagtgcgggggcctcatgagaaccgaggtacaccaggagctcagaggtggggccagcatgttctgggggtgtctacaaaggcttccggcagctcagagttcagcctgagcaaactcttgctcattcattcactcattcattcagccaaggtcaactagtgtcaagcgttgttctagccgctgggacacagcagtgaacaaaactgacaaaacaagcctgtggcctaggggaggggagacaatgaacaacataaatgaggagaaggccggcacgtgtgatggtgatgagtggtaaggaagagagaaggcaggtgaggaagagggagtgttccgggaaggttgcaagtttagacaatgtggccagggagggcctggccataccaaacaattgactaaacctgacgatgctgatggaggaagcgtgtggaccctgggggaaaggccagcatctgccaaggccctgaagcaggaacatggtgtgctggggggacagtggggggacagggctggaggtcaggggtggtggggtagacagcgggaggttggaggtcatggataaggccagatcctgaagggccttgaagcacagagtaatgacttgggattttccttaaggaggtgatatcgtgggttgaattcttgcccccaaaaaagccatgttcgcatcctaacccctggaacgtgtgaatgcgactttatttggaaaaggaatctgtggatgaaattaaattaaggatctcaagatgagatcatcctgtgttatccaggtgg

SEQ ID NO: 4134 - DNA, 1420 bp, Artificial sequence
  DNA replication origin
ccggcagcggcgaagccctggggcgcactcgcgcgggccgcagagcagtttgctccgcggctgggacaggttgcggaggccaagtctcaggggaacgcgcaggagaggggggttatcggctctgctccgccggcagcctggacatccccctagatcggaaactttcagctgatcgaaggcctgggccaaacgaactgccgaagaagggcaggcgggtccttttcctttaaaattgcattttctgcagaactcaaaatctagactgggtcggcacgtcgtgatcaccttgagcgggtgatcagcttcaaagcgaggtcgcccgccgaatccaaagccgcctaggtcccgacgcctgcctggctgcgctgcgctgggacccacagagaggcccggcccaggctccccagttcccctgctccactgcttcgtcccaaacgaactcctcagccattgccctctcggccaccgcggagacgcggcgcctgctcaccttggggcattgagccgcataacactcgagaatgtttgcgggtgggagagagaggcctagtgaggttcagtcctcgcagaccccaaggccgatctatgccaaggagaaaggcctgacattaccgggaagggcggacccctggaccagggtcagcgctgccggcgctgagggacttctcctagcaggagcctggggaatctgggatgatcgagctgggatagtccaccctgcttctaggactgggattggagagtcggtgacaaacaccgccgcccccactccgccagccccccggtctctccctgacgcggatgctgggtcctactgtgttacttggcttcctttccccctgcagccatgcgcccgcagtgtttgggtgttttacaaatcaactcggctaagatttgtgcaaacacgcggggagtcctgggtgacagcaagtcgcttgccttgtcttggcttcagtttacccggctgtgtagagcagagagcggaagggtcctagcacattcttggcacagccagtgacaaacgtttgttgattacatgacacccctgccacgttggggcttaggaatgagggatgcacccttgctgtcattgtgggagcaggccacttagcctcttggagaccgaatttcctaatctataaaatgagcggattctcacctcatcctgtgtgtggctggcataacaggctggcacagaggaggtgatgtagtcttgcccccaaccaccagtgtgttcccagtgccaggggtgatcatggcagagagagaagcagcttctacgcacctggaaggctttggaggacacacatggggtgggctaatgctgctggagccactgtccactcgctgtatgtgctccaactgagacttcacttctcccacctgtgcttcttggtctgtatggtgagggcacagtcat

SEQ ID NO: 4135 - DNA, 903 bp, Artificial sequence
  DNA replication origin
caaaggattgcagcgggcggccagagcaggggagggggccggtaggggaggaagggagggcgaggagctgaaagggcaggcctgtaagagacctttggacgcggaccgcccgtcgtaaaagcaaggtttgggcgcggaagttgcgcttcagcgggagccaagctctagaaagagctcgaaatgaggacggcagccccgggtgatgggggatctcgcgcgggagtgcgctaagagtttggctgtgcgtccaactggcgaccttccacccgccttctgggcgagggcagcggctaacgaaaaccagctaccggctgtgtgcgtgagcggccaggagccgggagagcggacggcgcagagccccgggatggcgcctccgagcttcttaccccgccgcggtgatggcgcgggtcccgaggtggatggaggggacgcccggcagcggcgaagccctggggcgcactcgcgcgggccgcagagcagtttgctccgcggctgggacaggttgcggaggccaagtctcaggggaacgcgcaggagaggggggttatcggctctgctccgccggcagcctggacatccccctagatcggaaactttcagctgatcgaaggcctgggccaaacgaactgccgaagaagggcaggcgggtccttttcctttaaaattgcattttctgcagaactcaaaatctagactgggtcggcacgtcgtgatcaccttgagcgggtgatcagcttcaaagcgaggtcgcccgccgaatccaaagccgcctaggtcccgacgcctgcctggctgcgctgcgctgggacccacagagaggcccggcccaggctccccagttcccctgctccactgcttcgtcccaaacgaactcctcagccattgccctctcggccaccgcgg

SEQ ID NO: 4136 - DNA, 835 bp, Artificial sequence
  DNA replication origin
accccacccccgcccaacgcccggagcagcgccccctgctgaaagctccggcggccgctatgcgccccccaccccggcctagagtggagaccagggccggagccgcctcctcccaccgcagcgctacgcccccaccctcgccaagcgactgccactggccccagcctcccgacacgcctccccgcggcagtgcgacaccccctccatccgcccaagaccaacgcgccctccgtggttccaggctcggggcaccgcgcgcacccgcccagcttcctccccactcccccgcagagaaacacccgccccctccctgccctggttcccaatgccgggaacggggcggcagagttggggccgcggaagggctcgccctccagaccgcttcgcgccgcggccgggtggccgcgcagagagaggccacaggatgctcccggcggcctcaaagtcgcgttccggatcgcgggtcggcggttccccactcagccacagaccccaaaggattgcagcgggcggccagagcaggggagggggccggtaggggaggaagggagggcgaggagctgaaagggcaggcctgtaagagacctttggacgcggaccgcccgtcgtaaaagcaaggtttgggcgcggaagttgcgcttcagcgggagccaagctctagaaagagctcgaaatgaggacggcagccccgggtgatgggggatctcgcgcgggagtgcgctaagagtttggctgtgcgtccaactggcgaccttccacccgccttctgggcgagggcagcggctaacgaaaaccagctaccggctgtgtgcgtgagcggccaggagccgggaga

SEQ ID NO: 4137 - DNA, 1413 bp, Artificial sequence
  DNA replication origin
ggcgccgcggctgtcccggccgccgcggttccccgggcccgcgccgcgcgccgcgccgcgggctccggcttcaggaacggctcggtggtgccgcaccacttcatgatgtcgctttaccggagcctggccgggagggctccggccggggcagccgctgtctccgcctcgggccatggtcgcgcggacacgatcaccggcttcacagaccaggcgacccaaggtacttacgcctcttctgtgcccgcccatcccgtcaggtcctgggctgagaccagccccggagccgtgccgcagctccgttacatttggagccgcggccccatgcggcccaccctcaggtgatagaaagaaacttcgccgaggccaacactctccagcccgctgcacctggactgtggcgagagtcgcggcagctcccggggcccagtcccagagggctgactggtccctctcccaggtctccctggccttgcaggccggctggtcccctcgaggaggcaggcggaggccaagattcgcttcttggggaatggtctggagtggcctcggagccctcagagaagaaaggagggcaagagctgtgttcccgggagtcacggcgagagggactgcacggtggtgagggtgatggctccttccttgcagcaatttctgcagctcccagtctcctgcgggccacacaaattgggggaagcccagggaaaactagggcagaggcaggtatcagactaaagtaaatggccctggagaggctggtggcataaccaggtatgaggagtgccctgctcagcaggttggtctgggtggtggtggtttgtgtgtgtgtgacatgtgcagctatgggtgcctgtgtctggtgctgggcccctgggagagccagaggtcaaggatcctggtggtgtggggaggagaggcctgctggggaccctgcaggaatgcaggcctctcttagactaagcaccccaccttgttctgccctgggccttccaaaggtaagatgtaggtgaggctgtggtgtggctgctgtatgtcatctggattttattaatctccattgaaatcattaaagcagacagatagagaaaatttacctaatttcaggcggaaatgcaagtaatttcggccttaattctatccagccagagacccagcatggagggcaggagggaaagaaaggcgaatagggctgggaagtgagcgggtggggctgaggcagccctgcttgggagccactgacagtcagcatacctcaggtcctagcctgggaaggcaggcagaggccttgcaagtgaccaggtcatccatccctgccagcacatgcccagtgcctagcacagactgccttatttttggtacctggaaatcttggtacccaatccccaaatggccctgtggttcggttagaactatcaa

SEQ ID NO: 4138 - DNA, 1615 bp, Artificial sequence
  DNA replication origin
ctagttctaccatggtctcagacaggagataaatcctttctggggagctcagcttggctggctgagcctgagaggcctcctctccctcctccctcttgggggaaacagagtggcagggctggtgagcagggagaggcagaggatctgcagggaatctcagagaaagtgctcctcgtgcagccccagtgtgcctctccggcctccctctccaccctgagtctcaacttggaacagggctgcttgaggtccccagaagccattgatagggatagaaccgggacctcaggcatgagggcctgaccttcgtggctggtgagcaaatccccagtggtggggggattctgcatagtctctccgagtttaggggcaaaacgaaaccatatgacccccttcaaagggagctccttatctgctgcgtggtggaattttaaactttttttttttctgagcccaaaaaggaaaaagaaaaaagagtgtccacactggaaataaaacccctaagcccgagataagtcactacagagggaagaatgagcccgcgaagggacagacaggcggctcctggaagcgagacctcgtttgggacgctgccctcactgcagcaaggtcattccgggatgccccgcacccctccgggaggttccttgtgttcctttactgcctttccccctccttcggaggccgcgagagcaccgggaggaggtgcatttggggttgcgatcgcgagcagcagcgcccattgttgcaagacctgagaccttgggcgagcctggcccctacctgggcctcagttccccttcggcagagcgaagttggactagaaggtctctgcggccgtgcagacgaattctcccggacgaatcgccgagccccagcctgcatgggagaccgtggccagcagggatgtccaggctgggttgggggaacagaggtagcagaagagttttcaggagaccagaattttccgttttcgcacagccaggactttcggctctcttgggggatcagcagggcaataacgataagtctccttaaggcccaggacctcaggagggggtgcacgacttcttttcaacccagccccggactctgatctcggattctggcccgcggctctgggtcaggccgcggaactatagcagcctgcagtcctggtcttgggtgtaggggtgcgctcctggtcccgcggctcagggatatgcagtgaccatgggttgttggcctgatgggacttttggcttgctaaaccaaagctcggttcggatatcccgggcgaagacgtccgctgctctgggccaggctggcagcgttcaggctggggcagagacgcggagtcgggcgctggctccaacaggcctggctcccacatcgaagacagctgggccatttgctgttaggaggccccgcgctgacagtgtgcaggatttgctcttacacagctctttctctctgtccctgccggtcccccgcagacgaatcggcagccgaaacaggccagagcttcctgttcgacgtgtccagccttaacgacgcagacgaggtggtgggtgccgagctgcgcgtgctgcgccggggatctccagagtcgggcccaggcagctggacttctccgccg

SEQ ID NO: 4139 - DNA, 1298 bp, Artificial sequence
  DNA replication origin
gcagctggacttctccgccgttgctgctgctgtccacgtgcccgggcgccgcccgagcgccacgcctgctgtactcgcgggcagctgagcccctagtcggtcagcgctgggaggcgttcgacgtggcggacgccatgaggcgccaccgtcgtgaaccgcgccccccccgcgcgttctgcctcttgctgcgcgcagtggcaggcccggtgccgagcccgttggcactgcggcggctgggcttcggctggccgggcggagggggctctgcggcagaggagcgcgcggtgctagtcgtctcctcccgcacgcagaggaaagagagcttattccgggagatccgcgcccaggcccgcgcgctcggggccgctctggcctcagagccgctgcccgacccaggaaccggcaccgcgtcgccaagggcagtcattggcggccgcagacggaggaggacggcgttggccgggacgcggacagcgcagggcagcggcgggggcgcgggccggggccacgggcgcaggggccggagccgctgcagccgcaagccgttgcacgtggacttcaaggagctcggctgggacgactggatcatcgcgccgctggactacgaggcgtaccactgcgagggcctttgcgacttccctttgcgttcgcacctcgagcccaccaaccatgccatcattcagacgctgctcaactccatggcaccagacgcggcgccggcctcctgctgtgtgccagcgcgcctcagccccatcagcatcctctacatcgacgccgccaacaacgttgtctacaagcaatacgaggacatggtggtggaggcctgcggctgcaggtagcgcgagggccggggagggggcagccacgcggccgaggatccccagctgatgagcagcagcgggccaccctgtcaccgagcgtgggtgcatgtccgatgtgacccagcaccctctcagaggagggagagcacacgttcacactcacacacactcgtgcagtcacgcacacatttaccggggacagcatgtgaaagccttgggaagagatgacctgccggtaccgaatgtcaaagccctgtgtattttgcaaacagataaccatggcgcccactgcccccatttagggagaggaaggtgtttgtgctgatgttgcagttagaggcacgaaaatcaggtagcaacaacgggttaggaaattcgaagttccagaatgggagaaccaaaggggtactcgagcatgctttatctcacccccttttgtttctggcccgatgtggggcatcgcttccctggggggct

SEQ ID NO: 4140 - DNA, 1169 bp, Artificial sequence
  DNA replication origin
tgtagaaaagcaaacaggtcaggcccgggaggcgccctttggaccttttgcaatcctggcgctcttgcagcctgggcttcctataaatggggtgcgggcgccggccgcgcattcccaccgggacctgcggggctgagtgcccttctcggttgctgccgctgaggagcccgcccagccagccagggccgcgaggccgaggccaggccgcagcccaggagccgccccaccgcagctggcgatggacccgccgaggcccgcgctgctggcgctgctggcgctgcctgcgctgctgctgctgctgctggcgggcgccagggccggtgagtgcgcggccgctctgcgggcgcagagggagcgggagggagccggcggcacgaggttggccggggcagcctgggcctaggccagagggagggcagccacagggtccagggcgagtggggggattggaccagctggcggcccctgcaggctcaggatggggggcgcgggatggaggggctgaggagggggtctccggagcctgcctccctcctgaaaggtgaaacctgtgccggtggtccccctgtcgggccctagcacccgctgggaagacgtgggaagctcacagatttctttctcctgtcttacagaagaggaaatgctggaaaatgtcagcctggtctgtccaagtaaggcatctgcgcatggggcgtggaagggcgcccagccccgtgcactctcctacacccgggtccctgagggcctcccactctacagggctgagatggcatcgtggtgtgccttgctctgaccccaggaagcaagttccctgagcctctgcccacacccaagggatgccaactctcttctacctggccttctgttctgtcccaaaagttcagcctgggggcgggggagggaagggattgtctctccgctggcctgtgcacactttgaagaaacatcactgtcctgtttatcagtgactagtcattgattcgaagcatgtgagggtgaggaaatactgactttaacctttgtgaagaaatcgaacctccacccccttcctatttacctgacccctgggggttaaaggaactggcctccaagcgcgaccctgtgtgctggagccgcggggcggacttctgatggggcagcaccgccatctagtggccgtctgtcatcac

SEQ ID NO: 4141 - DNA, 1726 bp, Artificial sequence
  DNA replication origin
caggaagccagggacagcgccaggcgggacgctttgcgcagctgcaggcctcccccgccgcattcggccttcaagcccgcacatgctccctggggcccctgcgggattacgagggggtgggaacagggcccgagtctcccgccatcttgggccctagcggtatttttccagctctgggaagagcggcctgacccgcagcagagattcttggtaaaccccagctccgtttatgtatggttagcctgctctaggtactattggtttccatggtacttccccacttttctcctccgacctacaggggctttggcctcccaggggcgggctgcgatctgaagtctgttgtgggatcttcagctgcttctgttctccctacctctaatggcggcggcggctcagattcagccctcccacccgggagcagcagcccttcctcgaaaaatgcagttatcagagatgggagcacccagcacatggggtcaatgatggctgatcctaatgccaggctgtgtgtgagtgtgagagagaccctaatgccagggtgtgtatgacacagtgatcctaatgccagggtgtgtgagtgtgagagaaaccctaatgtcagggtgtgtgtgtgtgacagagtgatcctaatgccagggtgtgtgtgtgtgtgtgtgtgacagagtgatcctaatgccagggtgtgtgtgtgtgagagaaaccctaatgtcaggttgtgtgtgtgtgacagagtgatcctaatgccagggtgtgtgtgtgtgagagaaaccctaatgtcagggtgtgtgtgtgtgacagagtgatcctaatgccagggtgtgtgtatgtgtgacagagtgatcctaatgccagggtgcgtgtgtgtgtgtgtgacagagtgatcctaatgccagggtgtgtgtgcgtgtgtgtgtgtgtgacagggtgatcctaatgccagggtatgtgtgtgtgtgacagagtgatcctaatgccagggtgtgtgtgtgtgtgtgtgtgtgacagagtgatcctaatgccagagtgtgtgtgtatgtgagaaaccctaatgtcagggtgtgtgagtgtgagagagaccctgtcaggttgtgtgtgagagagaccctaatgccagggtgtgtgagcatgactgagagatcctaatattgtgtgtgagtgtgagagaaatcctaatgtcagggtgtgtgtgtgagagagaccctaatgtcagggtgtgtgagtgtgagagagaccctaatgtcagggtgtgtgagtgtgagaccctaatgccagggtgtgtgttagagaaatcctaatgtcagggtgtgtgtgtgagagagaaatcctaatgtcagggtgtgtgtgaatgtgagagaaatcttaattttaggatgtgtgtgtgagggagagatcccaatgccaggttgtgtgtgagagaaatcctagttctagcgtctgtgtgtgagagagagcgatcctaatgccagggtatgtgtgagaaagagattgtaatgccatggtgtgtgtttgaattagattctaagctagggtgtgtgtgagtgtgcgagatataatgctagggttgtgttaggaagagatccgaatgccagggtgtgtgtgtgtgtgtgtgtgagtgtgagagatcctaatgccaagttgtgtgtgagttgttgcgtgtgtgtgtgtgcgtgagagagagagtgagttagtgtagaccaaaagacataaagagagttagggtgtg

SEQ ID NO: 4142 - DNA, 1078 bp, Artificial sequence
  DNA replication origin
caggattcttagtatcaaacaacagaaattaacttggctagattaagaagaaaaatatgaatttattaaaataccgagagatcacagaatctctaggagtgcagaagccccaggctcggtgctatggatgcatgaaccatgttgaaaattgcacctcagactgtgcagtctagaggaggtagtgttgcctttgctggacacagcaatcagggctttcaccactgaaaccacagtgctgggccctggaaatacccctagagtttgacatcaccgcctccgcacacaccagaatgggttctgggctgtgcttctttctccatgcttctagcctcagattcagaatctgacttgggtttatctgactggagaaacttaggtcactttaggcaacatgcaccttgcaacagaggctgggatcatgaatatctggtggttgttctcttgccaaaaatcttgtgaggtgaagaacttgtgaaaaatggagtggcatccaaagctgttaggtggccgaagagaaagagaaataattgtcacaataggatagatgattctagttggcaggaggtaaagttggagacatggtgggggcagatcatgcagagctgaaaggttcagattcttaaccataaacatttgggagccacctatgggttttgggcaggggagtgacttgattagatttgcattttagagtgatgaccctgaaggcagagtgaggaggctgggtgcgaaggcctggggctggaggcaggatgactggctgttggggaagagggaacagaaggagatggttctagtatgagctgatgagggcctgaagtaggcagcggcaatggaggtggaggggatggggcagtaggagggtggtcatggggaggaagccatgggacttgtgaaggagaagctggcaggaatgtccccaaggtttctggcctgggtggatggggagggtgatgatggctgtcattgagagaggcagtgaggaaaggggtctagtagagagtgagactgaagatgcaggtgacagaatgcctggaagggaatgttcttagcggagaggggatctgaaagcagaggg

SEQ ID NO: 4143 - DNA, 1257 bp, Artificial sequence
  DNA replication origin
cttttctccccctcccccccactcctgctccccttttcggcacctctgtcaccctctcttaaggtcacgccagttttcctggctgtcgtcctcatgaagggtggcttcctccctgaagtgctccgctctgtcccctcccttgagtcccgggcttcacacacacaaactctgttggatgttttttccaggaaatgcagttattctgacactagtgggccatttccccggcgtcctcattccatttctgacagtgctcctgctaccctcagtagattattattatttattatttatcagccacgacactgtactctgcttcctacaaaatattaaagaagacacaatccgtgcgctgagtttacagccaaggagagcagaggcctggatcagacatcacagggggggagctgagaagaaaatatttaccggctcagtcctccttggccctggtagatggaggcaaggactggcaaagccctccccaggccagctcctcccagctgggcccccacagccagctccccacactacctacagcaccccaactccaatttctagcaaggcctcaggcctcaggcctttacccgggggagcggagggagggtggaggatgaggattgggccctcaggcctttacattcagacaggggtggaggaggagggcaggtacagatatttcctctgaaactcaaaaccaggtaaaggggatgtaggggaggagggagaggtcggggaataaaaaccagattaggagagcggtcggggtggagaagactgtgcccagagtgaaatattctagcataatggaaaagccctcattgggggtcccacacgcctctggccaaatctcttctattagggttagaagttagggtctgtgtagacagcatgtgtagaccgagaggtggtgggactgagaagtcagtgtagacagtgtgagagagagcgagctgtggtgggggtgagtagtcggtatagacatcaaaggctggtcaggctgttaaacagagaaggcttcctggattcctaagggtcagtatgaacagaaaagtcgcgcgccccaggagaggcagggctgactcagaaggctggtggacactttgcagggctctccctggtccttcagaggtgtggacaattcctgctcctttccaaggctggagtgtcataaagagggcggaagctgaaagacgattggactttttccttctcaaacttttccgccagtttcctcaggtgttgagagcagacggggag

SEQ ID NO: 4144 - DNA, 845 bp, Artificial sequence
  DNA replication origin
gagccgcgcgccggaggtaagagccgggccgggctggagcgcctcggatgcggcgccggagggagacccaggtcctggccgccgcgtggggccgggccgggccgggcgtgggagcggggccggaacccggaaccctgggctcggcttcggcggcggcggcggcgacaggagcctcccgcgtctggactcgcaggctgcaggagcccttgcgcctgcgctgctccagggggaaaaaaagggggggaaaaaacttcctgcccccgggtgtgtatgcaccggggctgcctggggccactgtcacggtgttcggaggtgctggaggcttgtgtgacccctggccggagcagcccccctgctgggcccggcggcgcgcgcccctctccaggccacgttcccctgagcggcccagggccccggccgggcaggagacctggaggcgacggagggctggcccccaggggcggccgcgcgcactgtcctttggggaggtgcgcgcctctgtgcagcgagaagccaggttggggttttctgcccctcgcgtcctctgatctcgcatttggggactgggtctctttactcaatcccaagtaactttcgaggtagatgagctcgaaaaccgtcgggagggaacccgcacagaccttattgtgacccaccccaccccgacacacacacgcacacttcccttgacaccttgtgggtgccagcgtgttgtggggggacgcggaaaggagagctcacggggacggcgaagcggccaggaggtggtgtcgttggggaggggttgttgatgtgtgggacagggtggacctggagatgtgtagtgtgggagtgtgaacgcgcgc

SEQ ID NO: 4145 - DNA, 1144 bp, Artificial sequence
  DNA replication origin
aatgtaaccggcagatgacgtttcttccatctcccttgcaggcacagggccatgggtgaccacggtggccgccgggaaccagcccaccctgattgcacactcctatggagtggcccagcctcccaccttcagcccggctgtgaacgtccaggccccggtcattggggtgaccccctcactgcctccccacgtggggccccagctcccgctgatgccaggccactactcgctccctcagccgccctctcagccactgagcagcgtggtggtcaacatgcctgcccaggccctgtatgccagccctcagcccctggccgtgtccacactgcccggtgtggggcaggtggcccgcccaggacccaccgctgtgggcaacggccacatggcagggcccctgctgcctccaccgccgccagcccagccgtccgccactctccccagtggtgcccctgccaccaatgggccccccacaaccgactcggcccacgggctgcagatgctgcggaccattggcgtggggaagtatgagttcaccgacccggggcaccccagaggtaagtcctgctgccacgtgcctccccacgggcctgcgtctgcacctccctgcgcggtcactgcaacaccaccgggacagggggtgcttcatgccagctccttcactggcctccccaacccagaggctgcagtggagcctccacctgcccaagacaactggcctgagatgggggagggagggggaaggtgtggagggcgggacaaacaaagtgggaaaatgcgccggggtaagaagaggaaggaagggagagcctgcaaagcccagagcccgtccccctccagcccaagccctggccattctcacctccaacccccaaggccaggccaagctgcaaaagggtgagagtcatccactcctctcagggcaccgcagaacagtccctttgggggccttctccacattccatccatgaggacattcagagcatgtactgtgtccttcccagggaaggcactctctgtcgtgccatcggatgagagcactgcccaaggcaatttagttaggcccaagagacattcctagaccatcttgaggcacttgaatgtttcatttcaaggatccaggggtggctttgtgagaccttgggaa

SEQ ID NO: 4146 - DNA, 884 bp, Artificial sequence
  DNA replication origin
gatagatagttggggccagaggcaagagacaagttcagcaccttggagagctctgagtgccctggggtcagggcagaatgccaggggagctctataggggttcgagggtgccctggagcagctgaccatgtccaccgctgaatgaggctggggccctgacatcctccttcagaggcagactcagaccccaagttctgggaacctcagatggcttgtgtctgtttggcccctttgtttattcattaaactgctgtttcctgtgtgccaggtactggcggggggaggggcgggtgttggggtcacatggaaatcggcacgtgtgcagagctggggagctcacagtttaaagggagacacactcacagagcgtttgtgtacttggaatgccctgtgagaggagtctgaccggggcaagtgctgggcagaggtggcaccgaggaggggatggctggttcttcctgacggagtcaagggaagactcaaaaggtgagcaggagcgccccagctggctgcaggggtgagatgtgaacacaggctgaggtgtgagagggccatgttagggactgaaggtcactggtgtggctggcatgtgctgtgtgcacacatggttgtgagtgtgtgtgcatgcatgtgtatctacgtgtgtgtttgagcatgtggtgggtacaagggtgtgggtgtgaacatatggtgtgtgcaaacatggagggcgtgtgtatgcacccctgtgtgctaatgtatgtgtatgtgagtgtgagagcatgttgtgtgggtgtgtgcatgcacccctgtgtatgtgcctgtgtaggggtgtgtgtgtgtgagagagaggatgtggcatgggtgtgtgtatgcacccctgtgtatgtgtctgtgtaggggtg

SEQ ID NO: 4147 - DNA, 843 bp, Artificial sequence
  DNA replication origin
aatattccgagcgggagaggaagaacatgtcatggggtgcgggcagggccgagagaccttgggagaaggccagggcttgggagacttgggtgagaaacagggtcaaggccagtggtgtgaagagctctggagtggccagagccagaggtggagaggactttgtgtggggaattaaacatccaggggagtcaaggcaggacctggaagagctctgtggggactggaagcctgaaggtgggctgggggagggccaggtgagggccaaggcagatgggagcagacagagggggaggcatttaggggcagggtggccctaccgtccttttatgaggtagttggccccaccaggggttagaacttgttaccagggagtggggtgtcctgaggtgccttggtcctcagggccagaagagagactcgagtctggccccagaaactgaactgaatccaatgtctggggtgggggtgagggtgggtgggtctcactcctcctcctgtgctcatagccctccatgtcttcatgtggaagaactgtgttttgtctacagtgttatttattcagaggtgctgctgcttttccactggaggtaggctcttggaagatggggtggttcttggctggagggattgaagaagccaggatagatagttggggccagaggcaagagacaagttcagcaccttggagagctctgagtgccctggggtcagggcagaatgccaggggagctctataggggttcgagggtgccctggagcagctgaccatgtccaccgctgaatgaggctggggccctgacatcctccttcagaggcagactcagaccccaagttctgggaacc

SEQ ID NO: 4148 - DNA, 857 bp, Artificial sequence
  DNA replication origin
tggagcccttgaggtcgctctgcagaacagggttctctccaagctttgggtcccagctgcccggatcataagatctacccaaacaaaaaccaagaacagatcattttcatggacagttcatgccttgtgggctcagagtaggagtcaaggggtacagtctcttgtttaggaaggaacggaggaggacagggggcagagtgtcaggaccccatcccagcccaaggaacctggccagagggtgggcattgcagaggtgggggtgggtcctgggctgagcagggaaggccatgggcaaattccatggctgcagctggagtaagtgcctggtttggttgacactagcagcacgtagtccctcctgcctccagcaaaaaggttgctacttggctccttcccctgcttggaggatggaggccgaggggtgatgggaatattccgagcgggagaggaagaacatgtcatggggtgcgggcagggccgagagaccttgggagaaggccagggcttgggagacttgggtgagaaacagggtcaaggccagtggtgtgaagagctctggagtggccagagccagaggtggagaggactttgtgtggggaattaaacatccaggggagtcaaggcaggacctggaagagctctgtggggactggaagcctgaaggtgggctgggggagggccaggtgagggccaaggcagatgggagcagacagagggggaggcatttaggggcagggtggccctaccgtccttttatgaggtagttggccccaccaggggttagaacttgttaccagggagtggggtgtcctgaggtgccttggtcctcagggccagaagagagactcgagtctggc

SEQ ID NO: 4149 - DNA, 840 bp, Artificial sequence
  DNA replication origin
cttccaccacattctgtagtccaaagcaaatcacaaagccagccaagattcaaagggtagggaaatcatctccacctcttgacgggggaagctacaaagaatatttgccatccatcacaccagatatatatatatgtatgccaggccctgtgctgagtgtcgaagataaaaatatgaataaaacatagtctagtgcaggaggcagacatgtaaataaataattacaactcctagtatcgataaagaagtgagcacaagttgttctgccagcctccggaggagggcagagggcagagggtgtgggaggaagaggggaaggaggcaaagaggcccaggacaaaataacactttccctggtggtgaaggataaatactgcttggccagatggaggaaggggagggaagatccaggcggaggggacggagacttggagtggggacgtgtgtggggtgcaaggaggcttcgctggggagcaaagggtcccctgggagtggaggaggagcggagggaacggggagacctcccagagggctgtgctgccccttcagccccgaaggatttgtgtggccagtggctgtgaggatgcagtgtggaggtggcctggagggggacaggctggaaacagggagacatcctcagaggctgttgcagtgactcaagtgaaagatgagggcagctcactcagggtgctggagggcctagggcaggagaggctggatcctgagaattctaggaggtaaaaagatgggacttggtgtgatgagggaggggaggagtctggggaaggcctgcggattgcgggcagtggaccgtcttccacgggaagaggagctccatgc

SEQ ID NO: 4150 - DNA, 1030 bp, Artificial sequence
  DNA replication origin
gccctttttggtgaggacacactgggctctgctgaagaccaaggaagacggtgggaggggctcctggagaacacgccacatgcatgttcagggatcggggttgggggccctgccctctgggagccatggcaaggccgaatcactgaccccgccaaccccaagtcacactgagtctggagtcacagcagagcatctccaggggtgcggaagggggctctggctgggacttcaggaaggatctacgtggggtgagctcagacccggagcaaggggggtgggagctacagacagagaccaacaggctcagagcaccagtgggagggcgcgggagggtgcgggagggtgtgggagggtgcaggagcacgagggggcaggtgcaggtggacaaaagggccatgggcaacagggaacacaatgaggcggtgggcggggccagatcgcaacagtcttgcctgggagctccagcttcatcctggggcaccagggagccacaggggattctggacaggaagtggcaaggttagacttgggtttcagacaaatccacacagaggcaggatggggagtggcttgggaggccaatgggaggcaagatagcgccgtgcagagagttgagcctcgaagccagacctgagggtgaacctgcactgggcctcctatcagctctgtgaccttgggaaaggggacccacatcctcagagcctcagggtccacacttgttgaaggttccatgagacagcatgtggcgggcacacagggagcgctcagcgggtgggagtgtgcagtgctgctgatggtgacggtctttccgagggagaggtgagaaggccggaattacacagcaacagcaggacagagaaacaggagcgtgtggaccccgtggggctcagtgcaggaaggaagtggggagggggaggcatggagaccactaacaggtttttggaggggatggtggtgggacatcaggaagggagggaacaagaagatcagttgtggggtggggcctgtgggacacctgggggatggggta

SEQ ID NO: 4151 - DNA, 990 bp, Artificial sequence
  DNA replication origin
tactttcgtttcatcccatgagtaacgagaccaccataggccaggcatgacgctcatcactgggggtgcagagaccactgtgacccagtttcagacctcaaggggtacacagtttaatgggaggggatctgctatgaaaaattcacgaggggcaagaggagtgtctagtgagggtttgtagtgggtgcaggagtaagaggttttgcagagggaatggcatctggatggggtatacaaaatgggcagacttctgccaggcacaaggtggatgggagggtggacattcgaagcccgtgtagaggcgtcagagagtgaaagagaatggtgtgtctggagaattgtctggggtttattcttacgagatgtaacaggattttgttgaggaggcgtttagggagacagggagaagtgagaggagagaggctggggaggccagctcatgctcatgctcaacaaggactgcacagtttcccctgtggagtcgacgaggcaactgaggaggggtttgagtggatggatgagatgttcagtgtgcttttagagagaccgctcaggctggagggtggaaaatggatttggagggagcaagacagaggcaaggaaaccacttaggaggtgctgcagtaatcctggcgagaggaggaaggtctcgatggggagagggaagtcgatccacttaaaggggaggaaggaggcaggaatgagcgcgtgtagcgaaatggctatgggagaagtgggaggaagctaagcttcagttctggggaccaggcatcgctgaaataaggaacaggaagaggtgtaggctttcggcttggtgaattagacggatctgcaggacattctgctggagaggcccagaaggccactgagcagaggggtctggagctcaggaaagggtttcagcctgagacacagatctgggagtcatagggacttgtggctgtcactgttattagctgccccatctaacttcctacctctgaaaagaaa

SEQ ID NO: 4152 - DNA, 1165 bp, Artificial sequence
  DNA replication origin
acagttcacagtgatggcagcggcaggccatctggagtggccaccatcatcatgcctgctgtattggggaggtgtagccggggctgcacattccacggagcttttggaaactggggacaagtgggaatcccaccccttttgagtcggtgggatgggagctccctgggtgcagctgcagccgcccaagttgtggctgtggacctgggcctccctgtgctcttgcgggggcctgggtgcagacaggggtccagccctcccaggtgcagctacagctgcccaagtcatggctgtggagcctggcattcctgcactctggggggcctgggaaggcttcccctgtccctgcaggatcagaggtgtctgcttccactgcctggcctctccccactcctgcgcctgctccgatcttggagcaagattggggccaagcctgggtgttgttgcagcctggctggttgtgcgcactcttggggttagtgctacatgccaaccccctgctgccacagccccctccagactttgggtgccgatgagcttgggtgggaagctgagggtgtggctgagggcagcttggcactggcctgcaggtgccccttggcacgaacagcttgggcaccatgaatggcagcaggaggcagacaaagctcctgggcagaagggggtgggtccgtggtgagacccaccttcaggctagggagggcctgaaggttggccaggctgccagtcccacagactggagtgggaacttgtggtgctttttctgggcctgcccatggccaccccatggaccaattggtgtgcacttccttcccccgagtcccataaaagccccggctcagccagagctaagtggacatcaggaggaccaacttcagagaggagctaccccctccagggccacctctctgctgagagctgcagatgtcaggatgaccagctgcagagaggagctacccactccaggacctcctctctgctgagagctgaacaacactcaacatgacgacctgcctgtagagaggagctgcccactccaggatctcctctgagctattctgtcactcaataaagctcttcttcgccttgctcaccctccacttgtctgcatatcttgttcttcctggactcaggacaagaactcgggacctgtcagatggcagggctg

SEQ ID NO: 4153 - DNA, 1097 bp, Artificial sequence
  DNA replication origin
gctcggctcccgctgaggagggcgaagccggcggagtgtctgtgctgccggtctgcagcaccgcccccgcttcccgcacgccgcctgctcacgccgacttcccttcctctgcccggctctctcttgtgctcgtctgcgctccgcacgctccgggccggctcgtctctcattgcccggctcggctccgctggccctgactgaccggccggcgggccggccttgctcggctctcccgggcgcggcgtggactccgtccccctggctggaccatggtgaacacccggaagagctctctccgccttctcgggtccaagtctcctggtcccgggcctgggcctggggccggagcagagcctggggcgaccggaggcagcagccatttcatctcctctcggacccgctcctccaagacccgcgccgccagctgccccgccgccaaagccgggggaagcggtggcgccggcgtcactctggatgaggccagggtaagagcgcggcgtcccgagtccggaggctcggaagtgccggccctgctgccggggctttgtctggccgggttgggggtaggaagcctacagtggagaccgctcgggcggctggagacagggtctgcgggcgcggtggagggtggcacccagagaagggccgcgacgctggcccctttgcttttcaagctggcccggctcttttgtgtgaagaacagcccttgagtccaggggagagggctttgggggtccctttcggcgtcattcgaacgatctgctgtccgtgtccttgtcctgccccagaggggaattctagcggggaagcaagagcgaagggccagagcccctgggtggaagggttggagaagtgaaagttttctgcggtgtcaaacccttcttgaaagtgtgtcagttcctgccgctgtctaactccagcttactctcagtttgggggtggttcaagttggtgaggaagtgaacagagagctccagttggcagccaggcagggatgctgaaaaaagtttgtagctgctctgacaccaactttaaaaacaaaatcaacgctatcgcctctccaggcaggagagatcaaacatgatattatagctggg

SEQ ID NO: 4154 - DNA, 1532 bp, Artificial sequence
  DNA replication origin
ggagtccacgccgcgcccgggagagccgagcaaggccggcccgccggccggtcagtcagggccagcggagccgagccgggcaatgagagacgagccggcccggagcgtgcggagcgcagacgagcacaagagagagccgggcagaggaagggaagtcggcgtgagcaggcggcgtgcgggaagcgggggcggtgctgcagaccggcagcacagacactccgccggcttcgccctcctcagcgggagccgagcggagccgccatttctacccctttctctcccgttctcgctctcgagctccgtgcgtcaaggctccagcgccgcagggccaacgagaccgcttccggccgcagccacggcggggcgctgcgaagccggccagcccttcccggctgctcgctcctctccctgccgcctccagctgccccgcccccggcgcggcgtcagcgctcggcggccggggagcgacgctctaggctgtcagctcggtggtttccagctctccccgaccgcagggctggggcgaccagaaaagccagactaatcaggacgagttcgggcgtggaattgggcctgaagccctcatgcccagccaggcctgaatgccccagaccccaccgtcacccccgtggcctggatggagcaggggacggccggcgaaggcgcggggtggaaggggagcggcgacgaaggcgcgaggagctgactgggaatccccaagctacccgaggcaagacactgaacttgagtcgcacttttcatgcctgtagaaatgagaatgacagctgtgataaaaaaaaaattcatctgggcggtatctggaacttggtaagcttaagaagagaaggggggggggaaacaccatgctagaactctgcgtttttaaacaaagcgaggcagggtcgttttctatccccttagccagatctaaggcggagccaaagaatgagtaccctgtaagagccgcctctatcgccgccccctgcccccggcccgctgaagaattaagaatacaaaaagctgaacccacagataaagcatttgcaatttaacttccaaagaaaaaaaaattaagccacacaattcatatgaaaagctctgctgtaggccgggtgcggtggctcaagcctgtaatcccagtactttgggaggccggggtgggtggatcacctgaggtcaagagttctagatcagccttaccaacatggtgaaaccctgtctccactaaaaatacaaaaaatcgatgggtgttgtggtgggcacctgtaatcccagctgctcgggaagctgaggcatgagaaccacttgaacccagaagatggaggttgcagtgagccgaaatcacgccactgcactccagcctggatgacagagccagaccctgtctcagaaaaaaaaaaaagaagaaagagagagagaaaggaagaaagaaaggaaagaaagaaagaaaaagaaagaaagaaaagctctgctgtaaagtaggaattaggttcatttcaaaaattcacagtacaggccgggcttacgcctgt

SEQ ID NO: 4155 - DNA, 1157 bp, Artificial sequence
  DNA replication origin
gtatggtactagcataaagataagatacataatcaatggaatagaattgagagtacagaaataaatttatacatccatggtcaattgatttttgacaagggaagaatcctctcttcattaaatggtgctgggaccaaaaaatcggaagagctctcacagaatggtcaaagaaaagtctctttgcctaatgggatcaatttaactccttattgtgcttcaacagacacggtctcatgagcagtgagatttgaactcaccacaggctcccaaaatcactgaacaggagatgagggaggtggtggtggggggaacggcatgggcctgtaggtgaggatcaatctcaatctgagtccccgcactaaagacttacaaataaatcccgatttaggcaaaccgagactttattcggaaaggattattgcaacaggggggaaaaggactattgcaataagggtggagaactattgcaataggaagaaggactgttgcaattgggagaatgctggactataaaataaaaaacaaatctggatatacgtaaggagagagttcagtggaagagatccaagaaaagggaaagaaactattgcaactgagagtggggattgggggaggctacagcaaccgggagaactctccaaccatgagatctgcagcgatctcctgggtcaggcagaaaagggctttccttttacagagatgagtgaacagggctagaaagacccgggtgtggggaagtggggagaagactggaggtggcagcgatgagactatacagagactgtttccctggggtccgtctattttcaggcggtggatgaggagggctgctcgctggctgcggctgaggctcggtcaccgtgtagagaggcccagggagagctgcttcactcaagtcctgtcaagtcaaggcagccgggatttgtccacatcgtgagtacaggcaggtcagctaactatttgcgaggcgaagaactggaatttagagggtctgggcctgaccttgtcacagctaacgacgggggcatccttgagtcctgacaaagtcacatgcggaagggcggttgcgtgtagtaagtccttttaggaacacaaaggggccgggcgcggtggctcacgcctgtaatcccagcacattgggagaccaaggcgggcgg

SEQ ID NO: 4156 - DNA, 1523 bp, Artificial sequence
  DNA replication origin
gcctgcccagagctcggggaccccgggaggacctgcggtggcacggacaagacccctaagccgggaatcaggacagcaatgaccacgcatccccaagttacttccttggctagggctaggcttcccgtcctagtctctttccggcgccggcacctaccagcctccccgctcccagccgtgtaaccccgcgagggcagcccctgagctggcaggtttgggccgagcccctccgggctgcccccagctggaaaaggggctgcgaggcgacgccctggagctccccgaggacgcagccccttcccggtccccgccgccccgctcacctctcgccctcgcttggcgctccccgggccgggctctggggcgtgcggctccggctgcggggaccccttggcggctggtgcagggggcgccgccattgccaccgcagcgccgcccgcggccgttgccctcggggttatcgcccttgggaggggcggttctgggctaggggcgcggcgcgagtggctgctggcaacgcgggggaaacgcagaaaccgcgaagggcaccccaaagggaaacagcgaagaaccaaaatccgcggggggaaaggcccggcaggccctcaggaccgttctccttggggtggatccccgggggcgtgagcgcccgcagacggcggccctgcgcgctaagggctccgccagaccgctggggtgaccgcgggcaagcagcagctcccctgcaaaatgaagcaagaggcccgctcgttcaggctggaccatggctgaacaggcattccgccggctacacatgatgcccaacgcctgaaatatacattgtcgagtctcctatacagaccacggggatggccagtaactaagttctggccagcgaataaaagcaggtggcacaggccaacattccagaaaagtccttaaaagggaaggggggtgacagcaggtagctagtcagcctcgaaaagggcaggagagggccacgcttccaaccaggtacgtcaggcaaccatcaggcgacagtcaggcggttgttatgctccctctaaaatgatcattgatccagcggggccagggaaaggcagtctcccaatagatagagaaaacctgaaactggtgatcagcttctcggtaagatctcaggagctgggcaagtgggcttacacaaattgcggagtttaactgacatgtgaccctcgaaggacaccggactggtaagggaagaacgcctccagtgagcatgggtacaactccagtatacacagtgtgcacactcccctcccaagtgctggcagaccactgcccatgcaggcaggcctcccaagggaagaatcaggggagaagggatgcaagaccccagaagtatgccaatgcataagaccccaggtcaaaaggtcaaactgtgcgcttctttttcaggtcacccgcttggccctcttccaagtgtactttccttccttccatttctgctgtagagctttttaataaacttttattcctgctctaaaacttgcctcagtctctcc

SEQ ID NO: 4157 - DNA, 1342 bp, Artificial sequence
  DNA replication origin
tgcccgcggtcaccccagcggtctggcggagcccttagcgcgcagggccgccgtctgcgggcgctcacgcccccggggatccaccccaaggagaacggtcctgagggcctgccgggcctttccccccgcggattttggttcttcgctgtttccctttggggtgcccttcgcggtttctgcgtttcccccgcgttgccagcagccactcgcgccgcgcccctagcccagaaccgcccctcccaagggcgataaccccgagggcaacggccgcgggcggcgctgcggtggcaatggcggcgccccctgcaccagccgccaaggggtccccgcagccggagccgcacgccccagagcccggcccggggagcgccaagcgagggcgagaggtgagcggggcggcggggaccgggaaggggctgcgtcctcggggagctccagggcgtcgcctcgcagccccttttccagctgggggcagcccggaggggctcggcccaaacctgccagctcaggggctgccctcgcggggttacacggctgggagcggggaggctggtaggtgccggcgccggaaagagactaggacgggaagcctagccctagccaaggaagtaacttggggatgcgtggtcattgctgtcctgattcccggcttaggggtcttgtccgtgccaccgcaggtcctcccggggtccccgagctctgggcaggcagggctttctgaagcgcctggggaggctgcgtccttcccgacctcaggcagctgctgtggcctcggcctccctcccagaccctggcctcgcccaggcaccaggctccccttggaggcagcctcagggaaggtcctggccatgggctccgacaagaagggaggagggcaggtgggagcggcggggtcttcggggccccttgtcccttgcccgatgccgccgggccgtgctggccagtggggctgtgctggacggagcaaggggcctggggcttcctgggcctcactgaacgcgcctgctccctgctcgtgcccagggcattctgtggcctcccctgaccacctcagcccccagcctgttcagggcttcctacgaggcacctgggagcacaggattgcatcccacaagaaagtgaggtgagatgaaggggctctccggggactctcacttcccagggaaacttagaaattcagggtgagattaacagcaagagggaaacactcgcattgctgatgaagttccggcgtggaatcctcttacgactctccgaggggtggcagccccggtcactccaaggagaccgaggtgccctgccctgggtcacgcagctagagatagcagggctgcgcccctcg

SEQ ID NO: 4158 - DNA, 1407 bp, Artificial sequence
  DNA replication origin
cttgcccgatgccgccgggccgtgctggccagtggggctgtgctggacggagcaaggggcctggggcttcctgggcctcactgaacgcgcctgctccctgctcgtgcccagggcattctgtggcctcccctgaccacctcagcccccagcctgttcagggcttcctacgaggcacctgggagcacaggattgcatcccacaagaaagtgaggtgagatgaaggggctctccggggactctcacttcccagggaaacttagaaattcagggtgagattaacagcaagagggaaacactcgcattgctgatgaagttccggcgtggaatcctcttacgactctccgaggggtggcagccccggtcactccaaggagaccgaggtgccctgccctgggtcacgcagctagagatagcagggctgcgcccctcgcccggagccgcccctcccaaggggcttctccttgtacagctcactgtacagctgtaccgggcttttatgactttcggtaaaactgtcatcctcaagacggcaagatgggatcatatccctggcttcacttggaagttctttctaaagttctaaaaacttgctaggcctgttttgggggatacaagagtccccattagggggagagggggactgtcacgttgaattctgcctgttcttaaagttttctggaagctgaaatgatgttcacacaaatgtcagaaaagaatcatcctgcccccagtgtggttttcccctgtgggtaggaagagtgtgcaaagtgtgataaacccttatctggggagaccttcccttcacaagagcctgctggggtgtcctgcaagatgtggaaatgggtgaagccatgtcatctccactccctccagcccccagcaaacgatgagaaaagagcccagcttcttccaaagaaacagcactttacacagggtcttcatggccatttattgcttcaacggatatatactaagcacctactgtataccaagctttgttctaggtactggaaacaccatgataaataaaaggtggagttcatgctctcagagagcttacattcctgtagggagaggcaggaactaaatgaaaatatagcaggcggtaagtacaactgagagaggtgagaggttagggaatgcctcttggaggaggtgacatttaagctggtgacatcaaaccagaatgacaaggagtcaccttccaggcagaggaatgggaagggcaaaggccctgaggcagcaacagacttgatgattttgaggaataggaaggagcccggcgtggctgaaggagagctatttgaggtgaggtgggtagggggccgactgggtggactccttagccatgatcaggacttggagttttattcaaactgcaatggtattgactgaataccatggatc

SEQ ID NO: 4159 - DNA, 1245 bp, Artificial sequence
  DNA replication origin
gccgcctacattcccctaggtgagcgcggaagaggatggcggaggatggtctcctagacccccaagaatcccgtccggcgtctccgcctgccttccccatccagccccccgacccttcagcaccctccacgccacctccgaatcagacccccgccctccgggctccgccccgggacccctcccctcccctggctccggagggagcccggtaccgtctccgggggagatggtctcgatctccacgcccatagcggtcccacaggccccgcctctggggggtccctgctgctgcccgaccccggctcggctccggccccagccccgccgtcgctccggctcgcctcctcgccgccactgcagagccggaggaggtgcggctggagtcgggacctgcgcggggaggggccactggcaagggggcggcggggcggagccgcgcggaaaggtggggtcggccggggcggggcccgggggaagggaccccgcccggctgttagcgagcctggccccgcctgacgacattaacccactgaccagggagcgtggtaagcacaaccacatcctccatccatccattcattcgcgcatccgtccaatagacatttatttagcatctaatctgtagtaagctctgggaagtcaacccagtcctacagacttgtggggggtggggggcagaaggggcaaaggccggcgattaaaccatcattttatttttatttttattttagacagaggatcttgctctgtcgcccaggctggagtccagtggcgcgatcatagctcacagcaacctcgaactcttaggctcaagcgatccttcttcctcagcctccacccaagtagctgggactagaggcgcgagcaaccacgcccagctaatcttttattttttatttttattttttgtagaaacggggtctcgctgtgttgctatctaatgaaaccatcactttaattagatgcgctcagtgccgtgcagttcagagcgttgcggaagcacagaagaggttcctaccctcgctaggcgtcctggatctgtaggagcagagctgggggagggagggaggacaccagtaattgctgactctcccccatacccctaaacccctgttctccatctcgtgtagttctgctcgacgcacatttattgggtactcaattttcaaggcaaagaaatgcgccctggggataccaatagaattaagacaggttggctgtcttccaggtactaagtctgagagg

SEQ ID NO: 4160 - DNA, 1186 bp, Artificial sequence
  DNA replication origin
tgccccttctgccccccaccccccacaagtctgtaggactgggttgacttcccagagcttactacagattagatgctaaataaatgtctattggacggatgcgcgaatgaatggatggatggaggatgtggttgtgcttaccacgctccctggtcagtgggttaatgtcgtcaggcggggccaggctcgctaacagccgggcggggtcccttcccccgggccccgccccggccgaccccacctttccgcgcggctccgccccgccgcccccttgccagtggcccctccccgcgcaggtcccgactccagccgcacctcctccggctctgcagtggcggcgaggaggcgagccggagcgacggcggggctggggccggagccgagccggggtcgggcagcagcagggaccccccagaggcggggcctgtgggaccgctatgggcgtggagatcgagaccatctcccccggagacggtaccgggctccctccggagccaggggaggggaggggtcccggggcggagcccggagggcgggggtctgattcggaggtggcgtggagggtgctgaagggtcggggggctggatggggaaggcaggcggagacgccggacgggattcttgggggtctaggagaccatcctccgccatcctcttccgcgctcacctaggggaatgtaggcggcagctcggaggcgggggtctgcggcccggaggcgggggtctgcggcccgccaccgccccgggcttctcctgtcgcggctgcagtcgttcggttatccgctgctgctgataccccagcctgggtttcggcttcgctttccctgccctactcggcgagctctggaaagcaggacctgctctcggatacccgctgctcggggacctcctcctagcgcgtcccccgccgggcctcccctcggtcgcttccctgcgggccgggctgtgagcggctgtggggacagacccaggctggggaagggggaagcgctcccttgcccgcttccggatctcgctttatcctgccgccgctttcagactccctggccaccctgtccactcccatggcctccacattgaagcttctaagcccagccctgcgacctacggccgaacctctccctggacgtcccagggtgctccctggtcagcaagtccaaaacagaactctcgcttcccaccttct

SEQ ID NO: 4161 - DNA, 1408 bp, Artificial sequence
  DNA replication origin
caaaaggggtggggacagaaatgtggctcaaggagcatatctctgaggatggggccggatagtgtcttcgctgacaggataggaattctggagttctccgctctggggacggaggaggagcaagaatgctccgatccacgccgctaagaaagtcaaacccgaagttctcccaccctccgcagaacacccgatactcacgttcgccctcttggccgcttgcatcgccatcttggcgggctgatgaagttaccgtagcagatactgaaattcctccggagctcgctcggcttcgggggttacaccgcgttagatgcaggacatcaacatccaggacccgccggaagctgttacagcggaatagcgccgtcttacgctgagacgcgctgacgtagcagcccccttcgaatagactccggggtaaaaccgagcctgagcgagactcgaggccggaagatggaaaggcgagagtccaagacacttccgggctctgtaccgtaaagggcggggcgtagcctccaaaaggcgagatgttccggtcggggaggccctgagcagaggaacccgggtggagagggcggggcctgaggagggcggagagctggggcgggtctcaggtgagtaactggggagcggaggaggcggggcttgagcagggttatgacaggtagggcgggacccaggtgagtagcgggagggggcggggcctgaggagggtgcggagagctggggtggggcccaagtgagtatccgggagggagccgggcctgagcaaggcggtgagctggggcgggacccaagtgagtaatggaaggggcggggcctgaggagggtggtggcggtggggcggggcccagatgtgtagcgggaggtggtggggcctgaggagggtggcgagaggtggggtggggcccaggtgagtagcgggcgaaggcggggcctgaggaggactgagctggggcgggacccaggtgagtagcggaagggatcggggcctgaggagggtggtggaggtgcggcggggcccagaagtgtagcaggaggtggttggggctgaggaaagtggtggaggtggggcggggctcagatgtgtagcgggaggtggtggggcctgaggagggcggcgagaggtggggtggggcccaggtgagtagcgggcagggctggggcctgctgtggtgcccactggttgcggggcgcgcgggcaggtgccggaggtggtgggcctgggcctctagctgtgcgcaaggcggaatatgtggggttctggcggcttgtgtcacggctgacgctgtaactatacccagaatctccgtccctggaggggccctcaggttgagcgtcagctgatcgggcctcagtaatccccgctgcgacgcccgtccggactcccacctcaaccccgccgcgg

SEQ ID NO: 4162 - DNA, 1049 bp, Artificial sequence
  DNA replication origin
gtgtagcaggaggtggttggggctgaggaaagtggtggaggtggggcggggctcagatgtgtagcgggaggtggtggggcctgaggagggcggcgagaggtggggtggggcccaggtgagtagcgggcagggctggggcctgctgtggtgcccactggttgcggggcgcgcgggcaggtgccggaggtggtgggcctgggcctctagctgtgcgcaaggcggaatatgtggggttctggcggcttgtgtcacggctgacgctgtaactatacccagaatctccgtccctggaggggccctcaggttgagcgtcagctgatcgggcctcagtaatccccgctgcgacgcccgtccggactcccacctcaaccccgccgcggcggccccagtccgcgtgccacccttccagttcactctttatttcctcatatcagctttaaacggctctggaggaagcaccgggtttcttggcctgtctattgtgaatcttctccaggtttgctctggaaaggcctggggtggccgcgtcctgtcctgccccatcctccttcactggggcagttccaggacgatcttgcctatgttcttgttggcctccatgtacttatgggcctcctggatttcggtcactgggtagattctgtccagaaccggcagcagacgttgggggccctccgtggagaagtgaggcagaatttgctccgtgaaagcattcaccagcatttgcttgtactaagacaagggaaaggagatcatcagcctggggagagagcctcaccctgccctcctcatcctcctcagccttcttgctctctctgaagccacgtatctgaaaaagcacacagggacacttaacccctcacttcctagcatgtgtgtgaaatacccttgaaggagtcatgtgccatctcagaatatgtccgataggtatattgttaattttgaggtgaaagcattggagaaattgtagtttcagaaaaggctagctgacctgtctcttcttgcatgtagcaagtcataaagattcctctgagaggggtaccctcccc

SEQ ID NO: 4163 - DNA, 1171 bp, Artificial sequence
  DNA replication origin
tgcgcgagtcttcgagctctgagcggctcgaagtcctccccgaggcacgggtgcgacggggatgtcgtaggcgtccgcacccgctctcgctcatcgcgcccactcccggcccttcctcccacccactaggccgggcgcctgcggcctccacgccagccccgggccgggggcctcccgcgcaggcgcgtcgtgcgcggggaccgcccggcctggcggggaggtcgccggccgcgacaggcacctctctgccctcccaaggccagcaggcccgcggccgtcctgctacacactcgggcccggcccgacgaccccggagccgtccgactgcggctggaagggagcccgcccgcgtctgcggaacgcgcgaatgttggcgcccaccgtctcccggacgcagcgccgcgcgagcactccgccccctgcgccgcgggttccacagcgagtccgcgcgggcggtgccggggcggcggaggacggcttcaggcccaaaggggattgggcggcggctctaggtggcgggtcttggtttgcggaaggggctggagtcgctgcttctcggtgaccggcgcgtggcccggccaatcctgccgccgccacccacccgcaaccgcgtccgttgacggtcgggtccttggtcgccgggtccttgcgggcaccacagagcggggtggcgtccgctccctcgagtcctcggtgccagggaattcaccgctcaccaccccctgccccgccttgggtcctgctcggggaccaaaccactggaaggcagtggcgggaaacgggcgcctgtgccggaggtcctgatgaggggggtccaaggcttggggacttgtgcgggaaatgtgggtttaagtgccttcaaggtgtttttagtccattgggatgttgatcagcgttcatagctggcgctgatgcaggtcaccgggaagggaatgtgtgggtttatggccacgcataatctcttttagtcgtgtttaacttagcagggtagctctccatcctggctgggttttgttttttgtttttattttttattttacagagtttttctcagtgtgtaatgtttgtttttaaatcgcagataatcctgatgtaaaccattgacatagccagaaaatcaccaggctgtgattttccaaactcagcttcataacctattctgtgtgagctg

SEQ ID NO: 4164 - DNA, 1258 bp, Artificial sequence
  DNA replication origin
tcagcctcttaggagtgtattcgagaagtcatggccttcctccccactcccagttagaaatcagcacgtgaatggcctgtcttctgagtatccttcaatcttgccatcttcctttctgactgtctctccatttccccactcctacccttaaaggacaggggtgctactttttttactcattcatgaaaatttactaaccttttcttttgtgtgtttagctccttttactgccatgttttggtatcctcccatgtgcttgcttgcttgcttcctcaaaattttaacaagcgccaactctgagccaggcagtgtttgaggggctggagacacagtgggaaacaaaacagagacggctccgatttcctggagcttacattttgatggggaaatagacagtagtcaaccaaataaacacataacatcacgtgagttagtaataaggaaaacaaagcaggtagagggggtggggtgggagagtgggggacgaatgaagaggactgttttaggtggagaagtcagaggaggcttctcctctgagatgacgtttgtgcagcaggctgaggaacccagggagtgaggcgtggagagatctggggaaagagtgttgcgcagatggatgggcccaggcaaaagcctgagatgggagtgaggctggtgtgttcaggaaacagcaagaaaaagtggggaggctgaagatagtgagtgctgagagagggcgggaggtgaggctggagcagaggcaggagccaggcaggttggggttacaggccgggaaagggagttagaataaaattcaaagtgtgaggggaagctgtgcggaggtctggagtaggggggaaatcatatctaatcagcattgtacaaagaacatggctgccgcataagcaactgctgatgctggagccgaggcagggccgtcaaggcagttgagggttccaggccaggtgagagcgagggctccaggctccagcgtgggtggagaggagctggcagagctcccttgttagcgtggaagtgggtgaaagcgagaaatcagtgcggaggggcctgggtggattgtggttctagtcactgacctagggaggtctagggggaaagcaggtttgcagggagagaagtgcagaagtgaggaataaccgtgtttggggctgattccattgcaatcattataataccggaggaggatttgtagggtgtgattttagagcaaatgaactcttcccctcactgtccatttaaacctgttctgttggggttg

SEQ ID NO: 4165 - DNA, 2086 bp, Artificial sequence
  DNA replication origin
ctgatgggaagcaaaactcaggcagaaaaaccggattgacatctttggccaattaagagatcatatgcgttatgaaatgatcaatcattgatttttcaacagcaagcttttaaagtaccattaaaataacactaaattagcaaaagctgttttaaacataccttttaggagtatataacaaaatgggggaaacctgaataaaaaaacacataaagagctgcaactatagcagccaggaagctggtgggaggcccaggcaggagggcaggctgcatgggggggcccggcgggaaggaaggtggagatgcagggggccggcggggaggaaggtggagatgcagctggctcagagcacaggccccctgtggggtggaggccacaggctggcctggcacagctggagatgcagcagggaggttggggcctggcattcatgtggaggctggagaagaatgtgggagctctggtctgaaggccacggtggggcagggtggggtggggggtgctttacaaagaccattgcggctccactgagcaggtgagtgatctgtgccatgaacacagaggacatcaccggtgcaacaaatctggagccccactggcataagtcacatgctggccccgatgtgggagggagttgccttgagggagcttatggccattaagtgagaaaagcagggactgagagggcgcaagcagaggcaacagaggatgagcgcccggaggatgatcgcagcctcaggacagcggggggtccaggtagaagtcacactggttagggcaagagggtgtcatggaggaggctgtgtttgacgtgggccttgaaggatgggaagaatttaaggtgagggcagagcacttgagctggagggggagctcacatgggaaggccaggcagggcaacaatgggctgctcaactaggcagctggatgggccgggcacaggaaagagctagggatggggctgggtggcaggtagtagtggggatgggccctgagtgtggggtaagaaatgtgtcgttaatttgggaggcaatagggaagatacttcagcaggaagaggtataagagcagctctggaaaaaagaatactccagaaatgaagaggatgggtggcagagaggaaagagagccttgtgctgcagcctgggtgggagatcgggggcctgtgatacggggacaggaaagggcgatgggaaagtggcgagggaggaggactgcagtgcagctgaccaggtgtgaggtgccagggaggggcctgggtggccagggaccacactactgtccacagagggtcccaggaggagctgctgctggaaggaggctggtggtcccttgggaaaagccgatgtgtgatgtgggagcagcggggcaggtggttctctggagggtgctgttcagaggcgcgggcttgggagagtgtggctagcctgaccctgaagctgggggtcggtggggtccccgagggagagcgctacagaggtcggggagaggcctgggcaagggtggaagaagaactgggaaggcggccatggggtccagagggaaggcagcgcctcagtgactgccatcagtgcagggagctggggcagggaaagtgagctgagccactaactaggccactggtgtcactggtggggacaggacgtggactgaagtctggtgaagtgagaagggggaggaggcaggggcagaaggatggggagagggcagacttagggtctaggccccctggctgcaaagggagagggtggatggcaggccctagaggagggtgaggaggagcagtggctgctcaggagctgaagggagacagaccacaggtgtggcatgtaatggagcaccacagcccaagcagaggtgaggtgagtcatggagagaaaggagtggagaaggtgcagtggagtgggggggatagaggtggtgcagagagggaggtcccggagctggcactgccagcccgtgtctgtgtgggcaggagccccagggaggtttgcagtagtagcttcaagaggggagggctctctggtctgatcccgcagcaggtctggtctttcagacccgtccctatatcatcagcctgact

SEQ ID NO: 4166 - DNA, 1059 bp, Artificial sequence
  DNA replication origin
gacaggctacgcaacaggttcgcgggcggcggcctgacgaccaagccagctgcagtggcggcgacggcggcagagcagggtctccccgcgcctgcccgcgcccaggctgccggtgctgagggacgcggagtcgcgctgtgacgagcgggaggcgcggcgagggcgccaggtgggtgaagccgctagcggggctgcagcaaggcgcggggcaggtgcgggcgccgcgcccgctgcccggaggctctgcgggtcgggctgaggcggctgtgcgctccgcacgatggggacgggtcctcgggagtacgggcggcccccgagctaggcccctggcgggctcggccgtgcggggcggaaacctccggccccgggttccttcctctgctgccgggccgggacagacgccgagggggcctgggctgggctgccccttccttgcggccgagcccgggtccctggccgcggcctcgtctggcaggtggcggacgccggcgagggtcgggggtggcgtggccccctcgctttcggggtgtgagcagaagagagctctgggggcacccgcacgcctcctcggggacccattttattttcgcggagttggttttccttcctggcaagggttggtgccgaatgtcaggtgagccgcatcccggtgcgtcaaagtagcccgagtcacgagaggacagtgggcggatgcttggcgtctaccgctcgcgttcctccggagttggaaatgttaaatttaccttcagcgttattgacttccagaatatacaggaagcaccgagagatgtaatctctcaggccagataaagtttatttgtgtatttatttatttatttttaaagacgtctgcatatgcatagtgagtgggtaaaccgaggctgaaactgcagatggctttgtattctatagaaagatgctccgtttggatttattaattatgcgccttgtcgctctagaattaccaatggcaagtgtgctttatttgaaacttgtgttaatactgaaataggaatattttttgatggagccaacccctttacgataggaattaaggtt

SEQ ID NO: 4167 - DNA, 1272 bp, Artificial sequence
  DNA replication origin
ggccaacatggtgaaaccagtgtctactaaaaatacaaaaattagccgggcgtggtggcaagtgcctgtaatcccaggtacttggaaggctgaggcaggagaattgcttgaacctgggaggcggaggttgcagtgagcacagatctcacagttgcgccactgcactccagcctgggcaacggagtgagagtctgtctcaggaaaaaaaaaaaaaaaaaaaaaaaaaaaaaaagaaatcttgggtcttatatccaaaaatcttgagtcttacatttggttacttttttttttttgagacagagtttcgctcttgtcgcccaggctggagtacagtggtgcaatctctgctcactgcaacctccgcctcccaggttcaagcgattctcctgcctcagccttccgagtagctgggactacaggcgcccgccaccacgcccagctaatttttgtattgttagaagaggcggggtttcaccatgttggccaggctggtctccaactcctgacctcagatgatccacctgcctcggcctcccaaagtgccggggttacaagcgtgagccactgtgccaggccgacatttggttacgttcattaggaaacactaactcctccctcaccccaatcaaaagaaagcctttccccttgaagaagcttcttgtcaagggcaaacctttggggttttgggatacggtggcggcttgagttgaagtctggtcttttgtgaggagaccaggaaccgggaggggagaaaagagacaaattctgagtaggagcttcgcctgtcccttggcgaggggtggggaggaaagtttagcttcgtcgtgctatgctctatggggacagagtcttcctactgctcggcggagtgtgactagcgtagagggtgctcctcgtgggcgctccgcgtgtgttatggaggagggcgaggaatggtgaatggatgaccgagggtatggttaagtcctccaggtccctgagaagggttcaagaggcctgtaacagacccatgggcaagggtgggatcaacctccttcccaccttccaccccccaattcccagagaattcgttcccccagatcagtggagaaaacttcggcgagtgagaaggttccagggagaaccccgtggtgggtgcaacagggatgtggcaggcactgcttgggactttccaaaaccccggcgtctgccgtggcaggaaaagcaccacccaagctcagcatgttacctcggggaggaggagccaggtgggtctgtgcaactccaggaagg

SEQ ID NO: 4168 - DNA, 1026 bp, Artificial sequence
  DNA replication origin
ccggcgccgcggctctccggccccctcctccggagcaggggtccccccgcagggggatgcagagggaacctgacgcaggctccgctcgagggagcagcagcgaacaggcggcggaggccctcaaggccgcgaggcagccgtcggaggacagagctcagcaaatcgcgtcagactcccgctcgcccggcctgaagaacaggcatttcagccgctctccgcggccgccatgttctcctcctcggccgccaccgccgccgccgccaccgccccccgctcgcggcaccgcccccttcgcgccccgccccgccccgcccgttcccggccgcccgcctgcccgcccgccgcacttcccctgccggctccggccgcccgggccgccgcgacccggtgcccgcgagctccgacagtgcgcccgggacagcgcgcccccagcccgccgggcctgccgggcccgccgagcgaggaaccgccccgcgccctctgccggcccgccccagccggcgtcctaacgaagtgtgggaaaggaggcccgaactcttccccgcccgtctcaactcctccccgcccctctcctgccctcccctcggggcgttcctcccactgctgccgggaagcggcctcgaacaccagggcgctcgcagctaggccgccgggcctgccgcctcccgctgttctttatctttctgggaaggtgtcggagcggcgagaggccctgcggacggggcggagtcggctccgggcctgtccctccactcgggcgttctgttactttgagcgagacatatcccgcgggcctcgttttttattctgtaaaattgggaggtggttgcctagatgatttcacaggctattagacaagagaaaaggaagatcgtctgcccccttcgttttacagatgaaaagatctgcctgacccgttctggctctgcaattccatgaattatctaaaatgtctgtcattcacagatctttcccctcaaggggcccacacctttcttcttatctcccttttcttttttttttttt

SEQ ID NO: 4169 - DNA, 748 bp, Artificial sequence
  DNA replication origin
ctagggggcggggagcagctggcgcccctccgccccctgctctcctttctcccgctccatcctcctcccacttccccgagttcccctcgcggcccggcgcggctggagggggcggaggtcgcagctgtcacgggcaccagctgggggctgctccccgccgggggaaatcgctgcagcagcgacttctctccgcctcttttccagttgccctagttagcgcggagagggcgagcatccgcggagggggtgcgagctgcgcggccgcctgcccggcgtggggagcgggcgccccgggccgccgccgagagggggagccggaagtcggcgcgggcgcccctcggccccgacgacgccgtgaccttggccggcccgctcacctctcggaatctcgcctgccgggaccgcgaaatgggggcgaccgcggcgtccctctccgtcggcgcagccctcgacggcgcttgggtttgaccccggcgcgcttgctcgccccttctcccgagaaggggtttcggaggtagacatgggatggatactggacatgttcctgtcgcggcccgggtttggtccccttcctgggattcagccgaaagggccgaggaagggaagcaaacatgttgacgaggcgattgggaggtggggttggttagtgggcagtgacagaattcgggccgctctctagtcccttgtaaaagacctgaaaaaatcggacacccagggtctccagtccttactacccagctgtggtggc

SEQ ID NO: 4170 - DNA, 984 bp, Artificial sequence
  DNA replication origin
ccgagagggggagccggaagtcggcgcgggcgcccctcggccccgacgacgccgtgaccttggccggcccgctcacctctcggaatctcgcctgccgggaccgcgaaatgggggcgaccgcggcgtccctctccgtcggcgcagccctcgacggcgcttgggtttgaccccggcgcgcttgctcgccccttctcccgagaaggggtttcggaggtagacatgggatggatactggacatgttcctgtcgcggcccgggtttggtccccttcctgggattcagccgaaagggccgaggaagggaagcaaacatgttgacgaggcgattgggaggtggggttggttagtgggcagtgacagaattcgggccgctctctagtcccttgtaaaagacctgaaaaaatcggacacccagggtctccagtccttactacccagctgtggtggctgcttttttattttatttaaaagcagttacccccatgggtagacactgcccagtctgacgacgttagagggagacggaggggttgacaatacagcctgtgtgtgtgtgacaaggacaggccacggtgttgtgtccggagagtttcatggggaggaaaactttaagctggaggatctgttagcctctcatgcttggccctcctcgtttcttgtagaggtgttgaacaggcaggtgtccttgtgcagaaggtgacattttttcttcggagacggtgagtttttaatgtcgagtgtgatgttggtgagtaaagggttcttgagtgaattgcagtcccagcaccctctgtggatgccaagaggaatctctgtggcgatgatttgtgagggctggtgcttacatttcagtgattaagaaatcaagtgtctgcttaaaacattactgccgtgaagcgtagattatatgatacagttgagggatggatctcaagggttaaatttgtttgaggtttgtctcctcttctggaattggttggaggct

SEQ ID NO: 4171 - DNA, 747 bp, Artificial sequence
  DNA replication origin
gacgaggtgaggccagggcaggaacagttttcagggctgctcgtctctggccagctactcctgcctatcctggctccaagtgacctggcgagccacctgtcagatttatgttcctaaacactgctttacctttgtcattctgattaaaaaaaaaaaaaactctgcttggtacctcagtgccttacaggagaaagttttaatccctttagtctggcttctaagggccttcaccatcggggccaacccaccttccagccggccctccacttcctctctacccaggttcttgtttacccagactctgccgtactcatacgtgctgcagcgccacggcccaacaaggcccaccacggcccagccgtggcccaccacagcctgccacagcctggtggcccagccagagggagtgctctgctgatggtgaatgaatggatgggcaagtgcctggaccgtcctaacagaggagtgtctgcctgtcagatttgacagaaagaataactccatcactgcccagttttacagggagtgccactcacttccagaggcttctgagctcagtagaaaagtgcctcttacccggggaaagatggcagccagggagcagatggtcaggatgaggagcagaatctcccccaccatgaaggtcacatagtttgtcattagcctgtgacagagagaagacaattgggagaggccagaggggacagtgagatggggtgaggggctaggagaggaagggacggggat

SEQ ID NO: 4172 - DNA, 1241 bp, Artificial sequence
  DNA replication origin
gcgggcttccccgggctcggcccgcgctcccgccggggagggccccgcgcgcgcccctagcagccgccgccgccgcgggtgcaggggaggggtccggagagccgcgctcgccgccgcccgcgcctgccggcccccgcacggcccctgcccctgagcctcagccccagggcgggcgcgctgggccggcgcccacggatctcccagccctcgtcgccgcctcctccttccccctgcggccgggcgcccgcggatgctgaggggcagccctgcgcctctcccggtcggatcccgggcctgacggcgggagatcgcgctccggccgggccccgaggcgctgccggggcggcgcggctctgcggggagcagccctcgggcgcgccgagctctcccgccccagcccgcgcggggaccgtcccggagcacgcggtggccgagttcccgcacaggtaaacgcaggggcagggccaggcttccgggggggaagacagcgccccgagcgtgggaagggggccggatcggagcccgagcctccaagggtttggtggaaaaaggaagtaaacagaaggaaggctcaggaatcccccacgatggtcctgatttctttccggcacattttatttacagcttctaaggactgggcctggagggaatttaggtgaggaagtcggggactgagaaagaagagatgacagagagaaaccggttaccagggatggaaaggcggctaggcccttccacaagccagggacaggaaattgagtgtctggcgtggacaggactaagtgtgcctgcggtgggcggtggtgtgagccgggggtggcagggaaggccctgggttgggaggctcttgcagcagagatccttttatgagggttagggcgggtcatggggaaaccgcaaggtaggagggaagaggtgcttctactcagcaatgcccttttcagttctagctgatcagtgctacctgtgctctggaaacccgctctgcgttcctgctggaggtggcctcccctccgccccagacaagaagaggccctcagccctcccccggtctcagagagccctgagaggaggcccagtccagagctcttcctccgttcccagtccacttctctagggccagtagcagacaccagccagtatgccgaggaaccagggcttctccgagcccgaatactcggccgagtactcagccgagtactccgtcagcctgccctccgaccctgaccgcggggtgggcc

SEQ ID NO: 4173 - DNA, 1134 bp, Artificial sequence
  DNA replication origin
gccacgcgcgctccaggccccgggaggcgggaggcgggaggcgggaggcgggcggggcggcccctccctcgccccagtctccgccctctcggcggcgcgttccggagtggggcggcgagggaggcgccgggcggcggtcccaggacccgcgcgggcgagaggtggaggggcccgggcggcccccgatccggcgcgggcggcgggctggggcgatggctgcgtggaagcgcgggcgcgggcgcgggcgtgggcggtgggcggtgggcggcagggctggggcgaatccaccccttccagcgaggaggcccggtctaggaggatggaagcccgggacgcgcccgcccgcaggtgaggcgcgctcggggcaccccgccgccccctcctccgccgcggcttccttccgggccggcagaggccagggctcaggtttggggaccgctccgccgcggggcacgtggggcctaagtatccccgcccaccccgggagcccagactccggagcgccgggcctgagctttccgcagaggggctcggcagcggagccctgtcctgctcccaggaggcgggtggcggtggcccggtgggcactacacacgtggaactggaagagttcctgagaccctgcttcgaagagatttcccgtgcacattctacccgtttgagatgtgtttgagttcacaaactgtcccttaaagatgcgaatgctcctttgaatagttaaacctatcagtctcttacaccatagtataaattattttccttgcatttgacagaacaccgtgctaagatcaactacaggctttgggaatttaaataaaggaagaggaaagagatagaatgttttgggacaaaagggacaaaagcatgtgtgggaaggtaagtgctgaggacagccagcagcaatagggggtcatctcccctggggagagctgaaggaatgaacagaggggagagaaacttggctatccagaccctggatggagctgccaccccatgcccctgagagttatccgcgggcaccccttccagaacctcaggcatcaccttgcatccctcggggaatggatccattagagaatcgatcctgccactgctgtttctaccgttccctcacactctgtctgaaaaggcgcc

SEQ ID NO: 4174 - DNA, 1258 bp, Artificial sequence
  DNA replication origin
gcctgtgtctctgtggtgcagtgacagcactaacccttagtcaggatccttgtcaggaagtaggggattcatgggaccaacatggtgggcagatctcaacaaatcaactggagttaccattatctcacagcagacagctgagcagccgtgagcacttctgccccagcatggcctgcacagctggctggctgcctgcccccagtcccctccatggctgcatctggggccccgcgactccagcgcagtcttcctctaacagtatcgacagcactggcccatctgaccctgtgtcctcccttctttgtctctgtccctggtctctcccttctgccccgtgttggagcctccctgactctcacagggtcactccttgggcactgtggatgggtgtaagagcgtgtgtgtagggctgtgaatgtgaggaggggtgtgaggaatgtgtgtgggtgtgagagtggggagtgtgtgtgtgtgagaacgttccttcacatttgtgtgtatgagtggatatgtgagtgtgcatgtctgagaatgtacgttcatgttggcatgtgtgtgagaattgtaccttcatgtttgtgtgtgagcgcgtgtgtgagaacatatgttcgtgtttgtgtgtgggggtgtaaatgtgcatgtgaaaatgtgcgtttgcatttgtgtgtgaatgggtatgtgagtgcgagtgtgtgagaatgttgcttcatgtttgtgtgtgtgtgggtgtgtgtgattgtgtgcgtgtgagaatgtaccttcgtgtttgtgtgtgcgagtgggtatgtgagcatgattgtgtgagaatgtacttcacgtttgtgtgtgtgggtgggtgtgattgtgtatgtgtgagagaatgtaccttcatgtttgtgtgagtgtaagtgggtgtgtgtgtgtgagaacgtaccttcatgttcctgtgtgttggtgtgtgtgattgtgtgtgagaacgtacttcacgtttgtgtgggtgtgtgtgattgtgtgagaacgtaccttcatgttactgtgtgtgtgtgattgtgtgtatgagaatgtaccttcacgtttgtgtgagtgggtgtgtgagtgtgattgtgtgtgagaatatacctccacgtttgtgtgtgaatgagtgtgtgattgtgagaacgtaccttcgtgcgtgagtgggtatgtgtggttgtgtgtatgtactttcacatttgtgagtgtgaatgggtgtgtgtgattgggtgtaagaatgtaccttcatgtttgtgtgtgtgagtgg

SEQ ID NO: 4175 - DNA, 1158 bp, Artificial sequence
  DNA replication origin
accgcaacagccccgccgggcaccaggtcagcggcctggccccgcgccagggccgtgcagggggacaatggtccgcgccggggaagtttgcggagtcgcccccgcgggcccgggcccgggcgcggagccctccttaccgtacatctcggcggggcgcgcgcctctcgagaggccggcgtcgctgcggcgttcccagccagccctcggcggcgcccgcctttcattcacagtcggggcggggactggcggcggccgacaggggcccgggcggggagggagcagacgcgggggccggccgcgggcaggacggagccgggcgccgccagcccattcagcgccgggctgcagcggccgcctccgctcgggttgctgggcactgctgcgcgcagggggcgggggctatgctaatactaatgctcctccctcccggctcggccaacccgaggcctctgcgagcccctcgccccgccccgcccctgcgccccgcccccgagaaacccacagccggagatgcgccttttccgaggctgtcgccctaagggccgcagcgtgcacctgcggagctacccaccccaactccctgctcctgtcggagcgctcggaagctctccctaacctggggtcctcgaggtcagccggggcgctgagagctgcaggtgcacccctcctccagttctgtccaggctgcgtgggctaagccggggggcgcaaggatgggaattggggaatgacttccaccctctcctggctaggtaccttagctgagcgccgttctctgatgaagccctccagccctcagctgcgccctaccagctactctctggctaggtgcccagccactctctggctaggtgcttgctaccaccaaacagcgtccttcccgggtcagggacgcaggaaacgcaccccactcccaacccccaagggctgcaggaagtccgcttgcttttcctctccctgatttatatgtgtaattcgcaagctttgccgccaggatcctctccagctgagccccagcgccgacttgaattccagctctgcacctgccgtgaccctatgaggaacaggcacagagaggcagcggctcatgcctacgcccacacctgaagatctctcctaagctagctcaggacttccctgggcttctcatccagcctt

SEQ ID NO: 4176 - DNA, 1536 bp, Artificial sequence
  DNA replication origin
gtattagcatagcccccgccccctgcgcgcagcagtgcccagcaacccgagcggaggcggccgctgcagcccggcgctgaatgggctggcggcgcccggctccgtcctgcccgcggccggcccccgcgtctgctccctccccgcccgggcccctgtcggccgccgccagtccccgccccgactgtgaatgaaaggcgggcgccgccgagggctggctgggaacgccgcagcgacgccggcctctcgagaggcgcgcgccccgccgagatgtacggtaaggagggctccgcgcccgggcccgggcccgcgggggcgactccgcaaacttccccggcgcggaccattgtccccctgcacggccctggcgcggggccaggccgctgacctggtgcccggcggggctgttgcggtcgctctgtgcgcgcgcgtctgcgctgcgaggacaaagatgcctcgggccggggaccctggggtcctctccaggcccggcgcgtgccggtgctgggcggtggtccttcggggggcggaggctcaggggaaagcgggtctcccggagccgagcagaccgggagtgctggaggaggtggtcgtgtggcagcatttgcggaattaacaaaagcggtttgtgcctgggagttttctgtgggaagccggtccagggctgagggagacgcccgcggccggtcgtctgcgcggctcggagaaggcgggaggcggcgccggcggcgcagaggcccggggagcagccagtggccgagtctcgtctcgcccgcctgaatggactcggcctctgcctgcccctgccgccccgcgggatccaggttcaccaacttccagattttccctccgcagtgatgaagggaggagacgctgctgagagggtgcagcacagccctgacctctccccgcctccaccgccatcccctcaactgccgtgcaacagttagccagaccctcacgatgcacggctctgcttgatcatttgctaggactccctctggttttgcaggcagtgtgggtgaagaagagagagcgcgttgggtcccacattgcagctctgatgaatggagcactggagacctagaccagtctaggaatggactgcattcctgagcctgcagcccaccaagggctgtgcgtgtgtgtgtgatcccggtagacataagtccatgaaaacccaggtctctggcagctcttctagtgccagcaaaataattggagctgtgctcacctcccacccccactgcaaggtaggggctcaggctgcacttgaggggtcagtgtttggagaagagtgcgttcccaatttaacccatcactgaggctgctcggctgctcagctgcctcgctccgcgaacagactgtgagtcacaaagtttgttagaggcagaggaagctgagagcctggtggaaaggctcagcaattggtgggcccccctactgagagagagagagagactgactcaactttttcatcggtctccttccctgcccagttgctcagaaatacgtttgcatttctgatccagggtgaga

SEQ ID NO: 4177 - DNA, 1868 bp, Artificial sequence
  DNA replication origin
ctgcagttggcactgacacctcgtgccctttactggatccttcccttctccctccaacaaagagccaaatcccagtggaggcctcagctgacagttttccagggcccttttacttcaaaattggtcaaaagaccattttaaaatagggtcttcctttcatttcttcaggtctttccggcaagagccacgggaggccacatggcttagtccagtgctgcctaaagtggggcccctgggctggtgcccattcaagataggtctgatattggtttacactgagataaggatgggatggaaagtcagtgtttagtaaacaatttgtcaatgctgtagcagccaagggtgtgatctgtaggcttgcattttgcatgagttttttatttaatttttctagaaattatttgttttaattgtattttataaaagtattggtctgtgatgtactggaaataaaatcagccggcccttctccacagctagcttaagcagcactggtttcggcaactgggggcttcggaggagtcacaggggacttctggctttctattttagcacccgtctagcttctagagaggcctttgtcctgggatccggctggcccaggggagccaccatacctgaattgagtacatgatgattttaaagcaacggatggcaaacaccttgggttcccaaagagaatggttatccagatggctgtgagggagaaaacgtgggggaacaactatgaaactcccggcagtgttagggagaagagattagcttggaggcagagggacaccttctcagagcccctcgcacagttcccgggtgaggaagtgaagcctgaagggccttggggtagtcccagtccagtgctggagagaggccaaggacagcgctctgcagttgtggatgtgtgtggtgaagctgggcacctttgcttagcgttgggtgccttcctactggcagcagttggccaccctgtggcagcttttgctgtcacagtgcagggaacacaggcacagggaagggatcgactcggctgcggcaccacaactgtaatatccccttccccccagccagccaggagatgccagggacctgaaacacatccaggctgaaggctggggccaaggcagtgggtgggggcactcacatgagaacaggcttgatggcgtttttgatgttgccaaaggcagcccggcccagcagctcccgaagacacctctcagccagctccgcggggctctctttctccttctcaggtgcttggaggggtgagggagaccggctggggagacagaggcacatgggtagagggtggcatgcaggctggggtcaggctctgtacaatcccggctttccgtgtttcatccacacaagacaagcaggaatttgacatgggttgcactaggcaataggggaggcgtcacagctgtcagaaattaaatgggggtaaagaagcccccactgggggaagtgggggaagaccggagaagaaaagataaagttctttttctggaaatccttaaagatttccagatgtaccactgtgggaaggatgctctgagccccatgggccaggtgaggtgtagaacatgtgtgtcttgatgcacctaagacttcagaaggaaaaggagatgggagatgaagataggaaagggaggcaaaaaacaaaacagaagtggaagaaaggagaggaaagagagggagggaaaaggaaaggcacagtggttggctcaggcaagagtcaatgatactcaagtcacagggagtgggcccacatctggacagaacaggagccggaggactcccagcccagagaccacagcagcttgtcagtgagatgctattccagaaacagccaccagatggcatacgaaccc

SEQ ID NO: 4178 - DNA, 678 bp, Artificial sequence
  DNA replication origin
gacggggcggtcagcctcggcaccaagatcatcaaggagcacgaggagcgcatgttccaggaggccgtcatcaagaccgtgggtgcggcgcggggccgggccggggcggggcggggccgaggcgcggagtggggaggggaggggagggacgggacggggcccaggggctcaagactgaggcgcagggcggggtggggccaaggggaggaaagagggaccctggaaaggggcggggcaccgggggcggcccggggatgggggttggagagggagggaccgcactggggcgaagggcatccaaccgggcccctgtaggattgtccagcacccacatgctattcacggacctcggagagaatgaagtcgggaaatgaaaggactggctgggcagggcctgagcgacagcgcaagcagtcagatgagtgtctcagatctgaagtctcaggcgaaccttctttagtcccagtcaccatcagacctgcctgatgcttccaggttagggcttccaggagggagagatggggactaagagaaaagaatgaggaagggggccagccgcggagaaaatgtgtgtgctcctgggagcggagattagataaagcctctttcacagcctgcctgccctagccatgtgagcttcccttcagcctggagtaggcaggttaggaatgcagaacc

SEQ ID NO: 4179 - DNA, 737 bp, Artificial sequence
  DNA replication origin
cggacccaggaagccgaccaagagatgactggctccccccacgttgggaggtggttattggtggggcagcctgagaaactgtgggatccaagagccccattaaaggctgctgagggatttgggagtaaaaagagagcagagggcagagccaagaaaattaagagggataaaggagggggtcagaaaatgcagctgggggagaggaggactccaggctgggggagattggtggctcaccccgtcctgcctgtgtccaccgcctggtgcagggatggccgcgggaccttgctcatgatgaagaggatcacctcggagcgctggtaggtgggcagcgtgctggcaaaggagcctgcaggaggtggcggagagggtgcccagtgaggcacaggctccagggcccctcctggttcagcctttcagctgcagagagcgagggctgcctctctccggagtcaatccaggaccagagaaagggattcaggatagcccgggtgtgattcggcctctccaggaaagggaggcatcaggtggttttggaggtctcttccaggctccgttttttcacttgttcctgaggctgtggttaaggtcttgactccttggctagggggtggggatggtgaatgctgggccctgggaccagggcggagcggggggtcggggggagcccgagttctcgttgggtgcttctttcactggctgccctagggtaaatcctcctcccacgaactaagaga

SEQ ID NO: 4180 - DNA, 824 bp, Artificial sequence
  DNA replication origin
ggtacatgcctgtaatcccagctactcgggaggctgagacaggcgaatcgcttgaacctgggaggtggaggttgcagtgagccgagattgcgccactgcactccagcctgggtgaaagagtgactctgtctccaaaaaaaaaaataaataaataacatttccgtatcatagggtaggcaaccgatatgctgatgagattgaggaagattagatctgggaggaaggtttcctaaaaggcagaaaagaaggctggaattgtgtgacttgagttcacctctctacttcaagtctttccatttttcacggcaaggcagctggttggctctctccagcccttgaccttctgtcactgttccgggttttgacaaacatggtccccttgagtgtcaggtggccttgctaattcctggagaggtcaaggtgactttttgttttttgtttccccaggctgagaagaaagccaaggtcattgcaggaatgaatgctgtggaagaaaaccaggggcccggggagtctcagaaggtggaggaggccagccctcctgctgtgcagcagcccactgaccccgcatcccccactgtggctaccacgcctgagcccgtggggtccgatgctggggacaagaatgccaccaaagcaggcgatgacgagccagagtacgaggtgagcggcttcttcaccagccgtggccagctctttccgggggccttccactgccagctcctcccgtcctgctctcctctctccatctcccacgggccgctcgctctctccacctgaccccgggcctcttcgtctccccgattttgctctgtcttgcctca

SEQ ID NO: 4181 - DNA, 2209 bp, Artificial sequence
  DNA replication origin
atgggaagcgctgcagtcgcagggggaggtggaggcgggacaactgcctgaggagatgggactggaccggaggcagtagtcaccggagttcccggtggctttcccagtctggacggactccaggcccaggggcttccgtgagccagcagggagtggggaatagtgtggtgtctcttgaatgccgcctggtttctccgcccccctgggggtgagcagcccgcagcccaaatgcgagagcctcgagttcacccctgtttctcttattgtttgcctggggaggaaggcaggagtgcagagggaaaggggtgctttccctacgccccagacaggcctagtctagtgaggcccctcccccacccagctccggctgccccttcccctttcgtcaggccccctgctgctcacccacccccccccccgcttcttccttcccccaccccactgccccagtcctgatggaggccccttcctcctccgccagcccttaccgggccgggtgcgtgttctgcaccaagtgggctggggatgctgaacagctcgcagcgcggcatctgacaagctgggggaagttgtgggggaagaagaatgttcaggaactcgctgtgaaggggctgagagacaaaggggccgtgggggagtgctgagggtggtgtcaggcacgactcctagacctggggagccagaggaggagcccagcccacctgctgctgccgctgccaggaactgatagcgggtcctttccccttcccgcccactgctacctgcacacctcgtactggctcaggggcctcgccacgcctggaaacggggtctttggatcatccgaggcatcaccctaggtcagccacccatgcctgaagcttgagaaggcgtggtgggcgaggagcagcggcgtggtgtgggctcctctgcgagggtagctgacgcagctgaggatcccagcaagggaggcaccctcccccatagcggggtccacacttcagtgcaccttctcgtaggggaggaggcgatggctaattgatagtaggaaggggagggcagagttctggccaggtgagagtggggctagggagcgatgagcaattactccacattcttccacccccgcagtccgatccgtgagctcattccgccatccatgagctcattttcccagctgtttgggggttgggggcaaaggatgcattatcctgttttagaatttgttgagtcagaggaagaactaggacttaacatcttcagtgtttttcggaatcgccataagaaacagattggtctgtggcttggaggcaaagacttgaagactcagtgaaattaaatgaatctgtaagacaatacattggaccactgagcttcaaacaaaggttcttaacctgggacccttggatctggggggtccattgacaggctttgggagagtcctgggaatcattggtccatatatacaccagatttttaaacaggtcagaaaagctttccagaaatccttccgttcaggtgcctttttatgttggagcaactcctagaaaggactgctccaaagtcagctgctggttgtgaggctccgacaggaatgtagaggctgcaacttcagattagagctcttcttcatactccaggttgcttgctcatcctctttacccttgaggatgggtttgcattcgcagctctaggcccatgggggagctcttttgaaaggcatgtagaaaatggggttttctcccctctaaatctggtatggtggaaatgggtgcaaagccttgaagtcagagggccgtgtttcctagattcagtaaaaggctaatggttctcagagctaagtatcaaggatttcattctcctttgtagggatcctggagcgggttgtgagaaggaatgggcgcgtggatcgtagcctgaaagacgagtgtgatacggtgaaaggatggaggctgtgcaatgggagaataactggggtttggcttattaatttgttggtgggatggcagagagcacgcctggtctatagtgcctgctcagtaaataactgaatgaatacatgtatttatggatctgaagggtgcacatagaaggggtcgaatctggtaacaatacacactgggtgtgatccataagaactccagcatggcgtctgagcatgggaacagacaggctcttggggagcttcctatggtgtttgagcatgtgctggggggagatgggctcttta

SEQ ID NO: 4182 - DNA, 925 bp, Artificial sequence
  DNA replication origin
cagccctccgggtttgaaaagagtgaagtatgcctccccggcccgcagcagccgcggcgtcccggcctggcccgagttctggagatgctgacttagtgctggcccgccgccttcctgcccacgagccccaaggccccactcctcgagggctccagtggcacctggcgccctcgggggacaggaagagcagccggccgggagcccgggcagtggtaactgcaggctggggcacgcggagctggtggcccaggagttgggttggaggcagcttcagctgagctggcagatgggtgcctggcacttccctggtgacctgcgtttctggctgggggaccacgcggtcctcagggccctgccagcttgcggcctcttaagagggacagcttcctctcctgcgagttcctggaagcctccaggcaggccgccagaaagaagtggtggggggcgggagagcacggtgcgaccctgacagggggccggcctgtgacaccagggtagcccaaggccgcatgggcttgggggcggtggcgctcagacctctgacctttggaatgggaagcgctgcagtcgcagggggaggtggaggcgggacaactgcctgaggagatgggactggaccggaggcagtagtcaccggagttcccggtggctttcccagtctggacggactccaggcccaggggcttccgtgagccagcagggagtggggaatagtgtggtgtctcttgaatgccgcctggtttctccgcccccctgggggtgagcagcccgcagcccaaatgcgagagcctcgagttcacccctgtttctcttattgtttgcctggggaggaaggcaggagtgcagagggaaaggggtgctttccctacgccccagacaggcctagtctagtgaggcccctcccccacccagctccggctgcccc

SEQ ID NO: 4183 - DNA, 1642 bp, Artificial sequence
  DNA replication origin
agtcgcgctcaggtgtgagccgcggccctgaagctctggaagtagctgcccgtcttgggggaggggaagggggcgatggggctgggggcggagggggccactgggaggggaggggggcggcgggggggagggagggaacattttctttgtctaggactccaggtcacgtgggccccgctggagggcctggttggctgcgagcggcccggggagggggccggcgctccgacgctggcgctgggccagcccctcttctccggtccgaggggcgcggggccggggggcgaggccgttccccgcccgttcccagggcccgcccaggccgggctgcagggagcgccccgccttcgggaagaccgcctggcccctcccccagctctggaagagattagcgcggggccggggggccgggaggggagggaaggggctgctcccgagccgcctgcccggagggagccgggggtccgggcgaaagcaagccggagctttcggacggcctgggagagccgggagaaagttgtgaaaagtgagtttctctgaagcacaaccaaaaaaaaaaaaagaaaaagcttacagataggaggcccaggaagctgtaggaaaactcagcacacagacggagagtgacagcaggcgcgcgcaggcattgggagcgctccagatcggggattgtttggggggtctcccgcctccacactacaggtgaatagagaagcgggggggcctcaaaaagcgcggcgtgaggaggtcaggcttcgagtcccagggcccctgcgtcactctgggccttccctggatttctcattttcctgtttgcaaggttggtcgcggcgagggcgctccttcagaaagttcagcaattccttcattcccaggctcaaacatctgcagatcgagaagacctgactcctctcctggggcctccaggtgcggcctccaggtgcagcctccgccatttcaagcttcctcctcctgaacaaaggcacctacccccaaggcagacgcagtccccacccacagccctccattacgttggctgtaggatcagataaagaaatagaccctgttggctctgccctcgaggggttgaagattccactagacttggagaaatatgaaaggatcactgtaaaacaaacatatgtaaaggtaactatgccacaaataccaagtagaaaaaaatgggcggcatggatgacaaaagaggtcagaggtcagttccaggtgagccgactgggcctggaggctggatcggacttggaatgaggtgagatgggtaggatgagcaagagctgccgggctggggagggaggagaccctcgcccacctccaccctcccagtacacgacagggcaaggtaatggcaagccttcaggtgcgtccttgggtatattctgtagcagggaagaataaccgcaggttttctgacaagatgaatgagtattttggaaaaatcagcctagttgccgttggcaagatgaattagaaggaagaactgaggaaatggaggaaaatgcaccccacagcagagggctatttgggcagcggcacttgttagaagatctggacttggccgagcgcggtggctcacgcctataatcccagcactttggaaggctgaggcaggcggatcatgaggtca

SEQ ID NO: 4184 - DNA, 884 bp, Artificial sequence
  DNA replication origin
ttactgtatacctggctgtgtactagaccctgggcgtatacggttcctgctctcatggagttgacattctgatgggggagacaggcagaacataaagaaacaaggggctgaaatagaagatagcagaggcctgctttagttggggtggtcaagacaggcttcttggaggaggtggcatttcagttaaggtctgaaggaaccgaagagctggctctgtgaggagtggggtcagggagagtgttctaggcagaggaaacagcaccagcaaggccttgacttgtttggcaaactgtatgccagggtgaaatggcaaaggagaaagggccagatgcagccagagaggcaggcggggctccacacatcagttggagacctgcagagtctgcccaaaagctggcttacttctgacaatactgggcagccatagaaggtttctgtgcacaggaaggatgtgatgtggatttgagaggcagcagtggagacagagaagagctttggggtgtattttggagctagaatagctagggcttgctgatggaccggcagggaggggaactggtggactcaaggaggactcacaggggtctggcctgaacacctggtgatggttgtgccatttgctcagatgggaagacccaggggaggatgagtttgggacaggtgggaattgagggctccgtgtgagatgccaggtgcctggagtctgggctgtagggaagtacgggcgacagaggtgggatttgagagcagaaccctggcatttaaatccatgggaacttaagggctcagcaaggggagaaggaggagagacgaagtctcagaacatgtccatgaaaaccccgacatttctgggccacatggagaggaggagtggcaggcagtag

SEQ ID NO: 4185 - DNA, 1639 bp, Artificial sequence
  DNA replication origin
gagcaggcgccccctgctgggagcccggggcctcaccgggcagagcaacgaggtctgggaggagggggaagccctggcctgggaacggggaggccccggacaggctggagggggcccccgcgaaaaaagtggggagctggctgtggtgggagagaggacggaaaggaaacagggaggcagagccagacaagatgggtgagacagcccttaaaaggccggtcacgaacaaagcgctggcgagtgcgcgcccgcccacgcgcacaggtgcccgcgacaagacgccccgtccccgcccacgcggcccccgcgggctgagcccggcgccaggcccgcacccacggtggccctcctgcctccctccccctggtgctcccgggcctagctagcgggagtcgctgtcaccagggacagaaccacggaggacagcgctgtcctgggcgcccggggtcagcccaaaaccagtccaggacccccctgtcacgagggaagggagtggcctcccgggctgaggacccgcggcgtgaacactgtggctggcttccgcttcacagccaggagatgaagtcggggctgttttttccgtttcaggctctttgtctccccccaccccaagctaccatgagccagccttagtgaccttcctgcagtgggcccaggcccgatacgctgtcggttcccgacaaagaagctcaggggcccaggtggaaggagggctcacttccccacctccagcaagaagctatgggaggcagaatcagccagccccgcagcctccggggcgctgggcctggaaggggtgcctggaaagggtggtgaggacctggtggggagtgcagggggatgcctgggaggagcgcagctcccctcatgctgggggcttggagaagcacagggagagggcaaggtctcaatagggaaattgagacttccctgccaggacctggaatcagggcccagtagaggaaatgaatccttagggaaggagaaccacactaacatgtattgagcacctacagtatgccaggccccacagtaggcacttaatgctcaccataacctaatgattttagaacatttatctaccttgattcagtgggaaaacaggccaggagaggttacagaggtcacactggaatccaaactcaagtcttctagattaaaggctgagctcaggggcctgagcatggggcagggagtggagggacggagaatgagattagtaatagaatcataatatttggacctgcaggcggaccttggaaatcgcatccagcatccttattttccagatgaggaaactgagtctcgtagagaggaagttgcttcaccggggtcttgttccagttggcccggtacccaccgccccccagtacatgcccttatgcccagaaggcctctgcaaacactcccttgcagggccagggaggccgctcaggctggccctctggcccaggccttcctgcaccccctcctccttccgcaccccctctgccttcctgctcctcctttggggaaggaggtctcttgactgggagcagcagaatgggggtatttttagtccccttctgtgtacctgagacagagttgacaggccagaaacccagctctgaatttcctcgtgttccctcttgcctgggcc

SEQ ID NO: 4186 - DNA, 1865 bp, Artificial sequence
  DNA replication origin
caggtgtttcttaaaacacccattcagggtgtgctaggatccataccagggactggggaaactattatgaacaaaaacctgcttcttgccctcaaggacctcacagtcagctggagagacagacattaatgagaaatccacccttaaaaagatgagattacacatggagataagcgctctaagggaagtgaaacatgtccaggggaactgcaacgaagaacctgagttggcctgggctgtccagcgcgagctgaagggcgaagggagtccactgggtgaggggtagagggagagagtgagaacagggaagaaggctcccaggtgggagggagcagggcacccagggaactgatagatgtcacaaggctagagtgcagagagcaaaggagaagggtgtggaaagtgctggggcagacaggccaggccttcaaaggtggctgccggggtggggggtgggggggcggggaggcggggggtggggaggcggggagtgggcagtgtgtgtgatgtaatcagctttgcaatttgaaaagctcatgtcatctggatcctgggatggaatggaggagctgggaagcaggatgacatcggaggggctgatgagcaggatggcagcagagatgaagggaggggacaaatgccaggaacatgagaggtgagggagagatgctgtcaaggatgattcctgggtctgggactttcagacaggtggatcttccttagaatcttagtgctgagtgtggtgggcaaaaactctttaagtctccttgacctccaaaatttggccttgaggctgggcacagtggctcatgctggtaatcctagcactttgggaggcccaggcgggcagatgacttgaggtcaggagttcgagaccagccgggccaacacagtgaaaccttgtctctactaaaaatacaaaaaaaaattagtcgagcttggtggtgcatgcctgtagtcgcagctactccggagtctgagacaggagaatcacttaaacccgggaggtggaggttgcagtaagccaagattgtgccactgcactccagcctgggcaatagagtgagactccatctcaaaaaaatacaaaaaaaaaaaacaaactttggccttggtacactcctgtgtggtcccagctatccaggaagtatagattctggcagggatcagagctggtaggatccctgaaggccactgcactgcctggaagctgaaattggtgagatgttacctcgcggggtgggcagtggcctaggctctgccaatatgcaacggacagtggcttaatcagggtgtggaggctcggtcacggttccagcagtcagctgacatagaacacatgctcagctggttgattcagatgaggaaggagactaaggccccggagaggatgtggctcggccgtggtctcctttcagttccccttattccaggtctcttttcaggggatgctctcctggaacccctttcattagctcctgtacagcaaaaacagactttttaaggcagcgtttcttgtagcctgagcatgtgctgaaagtacagccaggagaaagaatcaggaagacgggagatgatgagatgagtgatagggacaggagccaacacccgacaggcctgtgcttgtcttgggtctgttcctgcccccgccagcattaatgccataatgatgatgattcaggtggcagtggcgatgtggctttcccttattgagtattgactgtattgggcattctctctcctcgctactcacagtggtccatagaccagcagtgttggcagcacccaggaatttagaaatgcagaattccaggctccactgaagacctgctggatcagaatctgcattttaaagagggcctcat

SEQ ID NO: 4187 - DNA, 923 bp, Artificial sequence
  DNA replication origin
atcacctgggaaggcaaagctcaggccccattccagacctgctgagccagaactcgggggatgggacccagccgggcacctttaaccatccctccaggggatactgttgcgcacagatgttgagaactattggtgtagataacttctgcccactgctagcctggagcgcagggtcacggcccttttcttccatgtgaatcccccggacctggaatagcacagagtgggtgcttgggaaatattttacggatagaacggaaagaaaaatgagagtagccaagaccctcccacaggagaataatcccggagcccaggatcagggaggcggagtgcagagctgtgggtgctgggctgaggcagccatgctgtggctgggagtgtacagagtggcctgtgtgtgtccccctggcacctgccgcctgccctacccgccatccatatggtgggcagagcagggctgcttggggagatggggaggaggcaggccgagctctggggctgtggtcagggcgagtcagctggtaaatgttgccgcagcagagggagggggctggcctcatggagggtgggtggggaggcaagcagtggggaggctgagagcttagaggggagtatggagcagagggtggggggcagagggagcaggacaggggaccaagaacagtccaagggccacctcagatccccaaatatgaatcagaggggagtccacagccccaggccaggcccctgttctcagttctgtcccctttcctctggcctcagaaacacaatggctaagatgcattgaacgccgactgccgggtgctatgtgcatgcattatcttattccattctttttttgtttgagacggagtcttgctctgttgcccaggctggagtgcagtggcgtgatcttgtttcactgcaagctctgcctcccg

SEQ ID NO: 4188 - DNA, 1132 bp, Artificial sequence
  DNA replication origin
ggggaagggtgtgggtgggcccagatccagcctgcctcccgctctcccttgcctgccaatcccctcctgggccctggcacactcaaggcaggggcttggcggccgcctcctccgggggtggggagcaggggagctcttgtgtgtctctgagtgagggggctgagacagcaacacccccaccccagctgtggcctgagctgcaggctttgttatttctctggcttgaggcctacacctggagcagagggaagaaaagcccctaaactcagccgtgtgggttcagaggacccctcaagcccaccaactctgcaggcaaatgaggctggttcatggggtgggggagagagcagcctcactcctgcctcagtgtggccgtggcctgtggccttggccgtggccgtggcctctccctcctaggccagagccaaccaggcctgcagcctgagctcagacctcagctttctctgggcccaggcaccggtcctgaagtgaggtgacattcatttcactacatcctgtgactgcactcacttcctccacgtggcgggaggtgtgggggtgggggtgaggacagattagaaggaaaacgtagctgggctaggggcctctgggggaggctgggatttcccaggggctggttggggtgggagggaggatgcgggaagctttcaaaggagagagaggctgtgaatgaagagaagggaggaggcggaggcagctggaggtcccagaagtggcacccattggccgcagcgacacggaggggagactgctgccactccaaggctctcagaggctgctggggtaggaggtggccctgaagggagcctgcctcggtttctctgctctctggggtgctggtgaggccagaaggaggagcaacaccccaggcctcacaggccaggtgtggccctgggctgagggcctgacccagggagggtggggtgctccgccccactgatcctcttctctcccccacaggtggagccatcgaagcccccacccacaggctgacagaggcaccgttcaccagagggctcaacaccgggatctatgtttaagttttaactctcgcctccaaagaccacgataattccttccccaaagcccagcagccccccagccccgcgca

SEQ ID NO: 4189 - DNA, 1167 bp, Artificial sequence
  DNA replication origin
tgtagtacatggcccgcccagacacatactggaggattttaggtgatggacacgattttgagggactgctactgacagggctggtccattgagcaacacgaaagggttgacccaggtcagctgcattttctgtgaggacagtttctgcagctcagatgtcagagtcttgggtggaggaaggggaggaggaagagaatcttcctttcctttcctgtctggggtgtctgcccttggggccaatgccctgtgaagttctgcttttccctccagcttccttcctctccagagcttctctgaacctcgccacacccgtggcggcacagatgccctctgggtgtccctaagcctagggcagcatcaagacaaccctcccgccccgcttcctttgtgcctgggtctcccccgactccatttggggtgccctgtccttgtcagccccttgtgtgtccactgtgcctgtggggccgcaacagcttccttggccggtcagagctattaatagaaggggtcctgctctcccatttcattggtggggaaactgagggccggggaagcctccgtcaggagtagatcccacccctgcggactttgggctcaacgttctttccaatcagactctgcccctcttagcttctgaccctttcgaaggtttttgttttagtgtggctggagatgtctgtggtaacaaatggggagtgaggcttgacagggaatcactggctgctaagggctggcagccgagtgcttctgggttggaccagttctcttttgggatcttcagagttgcttctgtggtgtgtgttgggggacgtgaacccaacccctcagaactttagtgtcagagagatctgggttcatgcctctgatgggtcctggccttgttgatcttaccgtcacctgtaaactgggcacggcacagcagctgcccagatgcagagcacgagccaggccctgagtggcatgtggccgatggagctgctctccgctgccgtccaccctctcgggacccgggcagcaaaccttccttaagcccagcactgcgctgtgcctaggggtatggggaatggacgcagtgcacctgggctgcctcagggctcagctgtggggcaggtccgcttcaagcctttctgggttgacctgatggagctcttcctgtcctggccctaa

SEQ ID NO: 4190 - DNA, 1170 bp, Artificial sequence
  DNA replication origin
ccttctcttgttcagcctaatcttgtgattttatgtcttaaaaaatcttttggccaggtgtggtggctcatgcttggaatcccaacactttgggaggctgaggtgggaggatcctttgaagccatgtgttcaagaccagcctgggcaacatagggagaccctgtttctacaaaaaaaaaaaaaaaaagccaggtgtggtggtacatggctgtagtcccacctactcaggaggatgaggtgggaggatcacttgcacttgagcccaggagtttgaggctgcattgagctatgatactaccactgcatccagcctgggtgacagagcaagaacctgctctaaacaaacaaacaaaaaatgtttctattgcattgagtttagaaggtagtgagccttggtatgcatattcaaagctttcagttctttttccacaacagttttatagttgacgcagtggagatggtgatcatatcagctgtgatacgaagatgttttcatggtgggattccttgaaattttttaagtggctgttaacaaacattattcatggtcactgtggactctaaaaggaggaaataaaagctgcttttcatggtggtagggttcttggcaagggttttttggtggcagtggtggtggctgtgcagcccttggcccaggtgggaagaacgctttggtatcggaagcagccagggctgtgcggtggaaggaccgatgtggtggacacccgctgctgtgttgggactgtgggcccaggagagcccactccccatggctgggctgcctgaaggaagaatgaagcgtctacgggtaggtgggcaatgctatgtcaaggtctgggaccttggccaccaactggggccccctagggttgtgtagtacatggcccgcccagacacatactggaggattttaggtgatggacacgattttgagggactgctactgacagggctggtccattgagcaacacgaaagggttgacccaggtcagctgcattttctgtgaggacagtttctgcagctcagatgtcagagtcttgggtggaggaaggggaggaggaagagaatcttcctttcctttcctgtctggggtgtctgcccttggggccaatgccctgtgaagttctgcttttccctccagcttccttcctctccagagcttctctgaa

SEQ ID NO: 4191 - DNA, 882 bp, Artificial sequence
  DNA replication origin
catctctgagctcttcgttctcaggcaggctcacccacatggcgggaagacagcagctggcagcccctgactcacatcgaccatgttagcatccttccatcgcatcgataaaaaggttccagggaggcctctgattggctctgcctggtcacgtgctcaccacttgcctggggtgagggttgaggtcagcacaggcacaacgaaaaccttttgacaagcgtttcccaccgggaaggaggggaaggcatctaggtagagcagaacaaccagagtccactagaggaaaaggagaatgcaagcagagggagggagaaggacctgctacagaaatggtcagatatttttcagccattcagacagagaacttgagacggagaagaaggggcccttagggtgagaatattgggatcgtgtttggtggagtgaggatttaggtttgtgggccgtgacagttttggttttggaagaggataattatgtgcaagcccttgttgaggagagactgtggggtggcaggggggccagcagtcctcaatctgaagatggagaggaggcttgggtggtcatctcgggggtgctgatgaggctggggttggtgaggaagtgggggcggcagtggggacagtgtggtgcaggggagcagtcctgaggcttcaggagatggtggagatgtagctctttggtctgagaaggggctgagtgagcgggggttggggttacggatgcaggcagcactgacttgcgctgcccatgggctggacgcagcgggaatgatgtgtttggaggattaaacatttcgtgagggtggggggtggagagggaggtaccagtgttgtagctggtgatggaactctgtgtgggtgtgaggagctgatgatggtt

SEQ ID NO: 4192 - DNA, 1082 bp, Artificial sequence
  DNA replication origin
ctttggagagttgggttgtagggagttcctgctgggtttctggggcaaaatggtccccctctgcctccaggttctaccgaggccctgcttgggctgtgacaggtggctctgtcaaggtgggagtctgtgtgtgcacatgtgctggctccaggcgagggaccaggctggcctgtgcagcagctctggcacctgcctgcctccctggtgggtccccctcctctgtgcagctcctccccagataagcagctgcggattcaggccgaccaaacttccctcgttaccccacccaggcaccagtgccttccataggagactgaccctaagaaaggtgaattccttctagactcaaggagtggactggtccacagggctgccctctgagtccttcctggagaagcctaggaaaggacgccagcagccatctgtcagggtgtctgcggacaggattcctctgtggggtgggggttggactagagccggaaggtccattccagctttgacattctatggctctgattctagtggtggaatttcaggcctagcaatggggacagggtggtctgtttttcggcacatggcagtaataggggaaggcttccaaggagaaggagatatgagagagatcagggcgcccagcgagttgggccttgggaaggagaggcagtgtgaggagggtccctgcaagagacgggttggtcacgtccgactctgcagagggtgtaaaaagtacagcctcctttaagcctcggcacgtgtgtatcctgtaggtttgtgtataaatccctgtgtgtggataatttctgaggtttccttttcaagtccaattcacagtaagctcctcagtcccttatggatgttttactatcgctttcacacccacctctgccagtggttctcaaaaagctaggaagacaggacaaacggtaaaatccttgtccagggtcaccggcaggaagaagtggagccaggcctgcactcgggggaagatgccccatgctatacctcttacctgggctgctgcatgtgtctgtccccgctctcagtttgtgatctccaggaaacaggggccttgcctccctggg

SEQ ID NO: 4193 - DNA, 1162 bp, Artificial sequence
  DNA replication origin
cctcgagcttcggagccgcaggcggcggctgtccgtgtcccgccctcaccccagttcccctcccccaggccgccctgccttccctccccttcggcgcggaccgggctggcgcgggtccagggcccgcccctggcctcccccagcccctcatcgctggggcccgcggccctggggctgccaaactgcttttcgctttcctgaagcctcccttcttgggggcaccctctcccaccccagcgcccctctgccatttctccccctctcctcatcccctccgtcctggcaccctctctccgctgcacggccagttgaggaggtgttggcgccctgggcggggagcagtgccctctggttcccaggggctgcctcccccggctcctgaggggagccccctgcggctgcaccttgacccaacatggcgtctggcacccagcagggcagctctggcctgcggcaggcgggagggtgggcagggccgagccccagggccgcgcagctaccccccctccaaaccagcggggacagaagccttggggagaagcgctgtccgccctgtgacccaacttgcccctcactgccgtgcccagagactgccatcagcatccctgagggcctgctcagtcttcatgtttcaccctaggctgccagcggctgaacccgcctcctgggcgggcggctacgaagggatcctgggatcaggtgctgctccagtgtcgcctcctccctcgcgggcagatgtgacagctgcagccaggggagctattcgccttgctattgcctgggtgttaggactggcctgtgggatttggggggccaggcatcccggggaccctctttggttggctagcaggggccatctccaggtagttttctgagctgcctgcctttggagagttgggttgtagggagttcctgctgggtttctggggcaaaatggtccccctctgcctccaggttctaccgaggccctgcttgggctgtgacaggtggctctgtcaaggtgggagtctgtgtgtgcacatgtgctggctccaggcgagggaccaggctggcctgtgcagcagctctggcacctgcctgcctccctggtgggtccccctcctctgtgcagctcctccccagataagcagctgcggattcaggccgaccaaacttccctcgt

SEQ ID NO: 4194 - DNA, 1285 bp, Artificial sequence
  DNA replication origin
gcgagactgtgtctcaataaaagaaaaaaaaaaaagatgtgatgtggggtgatttcagagccggatgaacctggctttgaatcctgactctgccacttcccaactgtatggctttgactaagactgagcctcagtttcttcatctgtagcgtgaggagagtacaagccatatcacagggctagtgaagactagagaaaataccatgtctggtgcctggcacatagtagacactcagtaaacagtcgctgctgtttggggccgtgttatatgtaagcccttgatgaaggcagaggtatctcagtcatccttctataaacggtcttctcctttgccaagctgggtgcgccatttagagtgttcacggatgcccctcctgatgtagaaagcgaacagcccaggagggtcacatgttaattccaccaaggtttactgagaatctcctagcaccaagtgctgggctacagggatgacagacgcggcccctgtcctcacagagcactgggagtctctgggccggtggggaccatggacagcagggcctatcatcagtagggcggggtggccacttgagtgagggtgacactgaaaacggccagaactatggcctagaagctggtctcagatatcgaggctcagggtgggggttggggagacggagggacctggaagcattggagaacctcccgaaggaaaaccttcccgtctgtatgaaaggtcagctcccggtcccagagaacttggcaactcggttctgtgacgctaaaagggtggcgttgggggggcgggtgctgggctgcatggggagaagggaaaagtaggatccgcttcactgtgaagtgagtcccaccaccaactccagcaatccctgcccacaagtaggatggcgggtccctgggaagggagcacgccatgtcctgtgccagtcagggagctcagggcactgtgatatagctgaagtgctgagtagaattcggggtgcagagctgcgggtggctggtggggtgctggggcgcgcaaggaggctggaggcgggggtgggggggtgcccagccccaagtcctacagcggctgctggaggagtgagatgagcacatagtgagtggctgtgctggtggaattagacagaggtgccccaagtcaggaacctagagccctgagcgctccatggggaaggagaacagcccccacggtgaaggggtgagggcggtgtgtaggcacacacagaatcttccagctggaagagaccttcaatgtcatttcattcaacctcccacctcatgaaat

SEQ ID NO: 4195 - DNA, 1460 bp, Artificial sequence
  DNA replication origin
ggcttgcctgggactccatccgtgtgcggccaggagttgatcccaccgtctctgcacagacctcctcaaagccaagggcaggggtctgcagaggtgggtgagggatgctggggagccagctgtggggcttctcgcttcattacagtcactgccctttataaatatttatagcagttcttctgctaaaaataacatcctggagcccagggaggaggaaaaaataaatgaaaatcaccgggaacgggacttgatcacgtgtgcccgagcccaatcgacccctaaggcgagaggctgcgagcagcgcccccggcggcgcgccccctggcggccacggagtccgcggcgcagagaccctcccgccctctccgaggaggctcagcccggctgcggcgcgcggctgggtctccgcccctccctcccgggctgcaggcggcggcatcacacggggcgggcggaagcctaaccagtgtgagactatttttagcaccgtggccagggtgtgaatgtctacagagccgagcaaggcctgacgctttctttgcacgctggaagaaacctgttggtttttaaaggtcaaagataaggaaacttgtgcccccacgttcaggagcaccccacgtgctggccagacgccaggaagtgtttcatcaggtcacaaacacacaagagcttggtgctttttcttttctcttttcaacctccaggtgaattcctgatgcggagatgagaccatgccctgaggggagtgatgaaggtgctagtacatgcagggctgtgcagggggaggcccactagctgtgccacgcagcccctccccgcttcccaccggctctggctcccctctccctggcgggtggagtgacgtctggcagcctgcaagcctggtccaggtgtgcggtggaaagatggagaggaatgtgcctctgggggaagaccttgccttcgccatgtcggcgccagcttgctcctcgtcctctgtgcctgcgcaagacacactcaccgttagtcacgggcactgttgagggttcaggacaaaagctgctaacatctactgtgaacaggaggccctgcagggaggggctgctaggatgctgggcgcctttcaagcgttgggctgaagggtggtacctagggtcctctgccatcattcctaagggtcaggaagtgtttccgtggaagaaagaattgggttcacaatgcaaggtttgaatggggtgatttcttggggagaattgtggcccaggagaagggcagggaggactgaggtgtgccgatgaatactaagaggaaagggaggaagcctcagcccccggccagcagagcgcaggcctgggcatccatgaatccgcggcacccaagttttatactcttagtttaactctcggctgttggtgtttctcatcacccctgatgtgggtcagagagcgcaggattaggaggcagaagacccggctccaatt

SEQ ID NO: 4196 - DNA, 1491 bp, Artificial sequence
  DNA replication origin
tctccttagaaaggagatgctatttgttatttattaggtcttcatattaatggcatctgtgtcccatctagaacagccactgccacgatgctggctgcactgggggaggcgtggctggggctgcatgctccatagagctggtgggagccaggaacaggcagaagctccaccctattctcagttgacagggtgggagcttcgccttccctgggcgcagctgcagccggtcaagccatggctgcagaccaggcatctctgcactgtcaggggcctgggaaggctgcccttgcccctgcaggcttggaggtgtctgctcccgctgcctggcatctccctgctcccgctgcctggcgtctccctgctcccaacacctgctccagtgtcagagcgaggctgaggccgagctcgggcactgttgcagcctggccaggtgtgcacacgctcggggcagcactgacatgccagccccctgccacctcagcacccccggactttgggcactgatgagcatgggaggaaggccacgggcctgagggcagcttggcactggcctgcaggtgccccttggcacgaacacctgggtgccatgaacagcagtaggaggcagacaggcccctgggtggaagggcgtgggtccccggtgaagccccaccttcaagacagggagggcctgaagcctgggggtcgggctgctagtcccatggactggagtgggaacttgtggtgctttttccaagcctacccatggccacccatgaacctgtcagcatgcgcttcctcccctttaagacccacaaaagccctaaactcagccaaactcgaacaaatgattaccagctgtggagaggagctacccaccccagagtctcctgtctgctaagagctgaagagatgatgggacaaccagctgcagagaggagctaccctgccagggtcttctctctgctgagagctgaagagacatcaggacgatcagctgcagagagaagctacccactccagagtctcctctatgctgagagctgaacacttgtcaggacaccctggctgtggagaggagctacccattgcgagtctcctccgaactgttctattgctcaataaagttcctctttgccttgcttaccctccacttttccacatacctcagtcttcctgggtacgggacaggaactcgggacccaaaaaatggcaagtctaaaagagctataacgtaaacagggctgaaatatgccccttgcttgccatgttgtgggcaacaagaagaagaaagaaggagaaaagagctgtacccctctggggagcccagatgtaggagctccccaggccggggctgtaataccctccttggggctctgtggttcctggcatctccaagcttctgggtgccaccgtgtttgctggtgccagctgtggaagcagcttgcagtatgcctggtccagtgcaacctcacagagagccagggcccgtgctggtgcctggagctgcct

SEQ ID NO: 4197 - DNA, 1312 bp, Artificial sequence
  DNA replication origin
gctcctcacttcccagtaggggcagccgggcagaggcgcccctcacctccccgacggggcgactggccgggcggggggctgacccccccacctccctcccggacggggcgggtggccgggcgggggggctgacccccccacctccctcccggacggggcggctggccgggcggggggctgacccccccacctccctcccggacggggcggctggccgggcggggggctgacccccccacctccctcccggacggggcggctggccgggcggggggctgacccccccacctccctcccggacagggcggctggccgggcagaggggcccctcacttcccagtaggggcggccgggcagaggcgcccttcacctcccggatggggcggctggccgggcagggggctgactcgcccacctccctcccggacggggcggctggctgacccccccacctccctcctggctgccgggcgtagacgctcctaacttcccagacggggtggctgccgggcggaggggctcctcacttctctgacggggcggctgccgggtggaggggctcctcacttctcagacggggcggttgccaggcggagggtctcctcacttctcagacggtgcggccgggcagagacgctcctcacctcccagacggggtcgcggccgggtagaggcgctcctcacatcccagacggggtggcggggcagaggcgctccccacatctcagacgatgagcggccgggcagagacgctcctcacttcctcacttcctagatgggatggcggtcgggaagaggcgctcctcacttcctagatgggatagcggccgggcagagacgctcctcattttccagactgggcagccaggcagaggggctcctcacatcccagacgatgggcggctaggcagagacgctcctcacttcccagacggggtggcggccgggcagaggctgcaatcttggcactttggggggccaaggcaggcggctgggaggtggaggttgtagcgagccgagatcacgccactgcactccagcctgggcaccattgagcgctgagtgaaccagactccgtctgcaatcccggcacctcgagaggccgaggctggcggatcactcgcggttaggagctggagaccagcccggccaacacagcgaaaccccgtctccaccaaaaaaatacgaaaaccagtcaggcgtggcggcgcgcgcctgcaatggcaggcgctgggcaggctgaggcaggagaatcaggcagggaggttgcagtgagccgagatggcagcagtacagtccagcttcggctcgg

SEQ ID NO: 4198 - DNA, 945 bp, Artificial sequence
  DNA replication origin
caggagggaggtgggggggtcagccagccgccccgtccgggagggaggtgggcgagtcagccccctgcccggccagccgccccatccgggaggtgaagggcgcctctgcccggccgcccctactgggaagtgaggggcccctctgcccggccagccgccctgtccgggagggaggtgggggggtcagccccccgcccggccagccgccccgtccgggagggaggtgggggggtcagccccccgcccggccagccgccccgtccgggagggaggtgggggggtcagccccccgcccggccagccgccccgtccgggagggaggtgggggggtcagcccccccgcccggccacccgccccgtccgggagggaggtgggggggtcagccccccgcccggccagtcgccccgtcggggaggtgaggggcgcctctgcccggctgcccctactgggaagtgaggagcccctctgcccggccaccaccccgtctgggaggtgtgcccagcagctcattgagaacgggccaggatgacaatggcggttttgtggaatagaaaggggggaaaggtggggaaaagattgagaggttggatggttgccgtgtctgtgtagaaagaggtagacatgggagacttctcattttgttctgtactatgaaaaattattctgccttgggatcctgttgattggtgaccttacccccaaccctgtgctctctgaaacatgtgctgtgtccactcagggttaaatggattaagggcggtgcaagatgtgctttgttaaacagatgcttgaaggcagcatgctcgttaaaagtcatcaccactccctaatctcaagtaccccgggacacaaacactgcggaaggccgcagggtcctctgcctaggaaaaccagagacctttgttcacttgtttatctgctgaccttccctccactattgtcct

SEQ ID NO: 4199 - DNA, 1505 bp, Artificial sequence
  DNA replication origin
cggcgcgagccgggcgctgcgaacgttcgccgcgggggtggctccggggcctgagtaggcgctgccgctgcctcagccgagggggctgggccggagcgtgcggaggagtgaggccgcaggagaccttcccgacgacccctgctccggcggggaagtgagcaaggtgggggtctgcggccgccgccggggctgtggggagacgagctgggctggagcctcgcgcccgcgaggtgcgggacggcagctcgcgctgcgccgggactggggacccgggagcctgcgggtgcggcgctgcaggagtcggggagggcgcggggagccggggccgctgcaccgcgcgcggctgcgaggtgggacggcgcggctagccccggagggacaggcagaggggatgcggcggatcccgggccgggaggggtatcggggtccggaacgcgccggggcacgggcgcgagcgggggcccggcgccgggctgatgctgcccgagcccggctcgcctggaggcggctctgcgttaggtgctgaaggggcgagtgaggcaggtcctggcagagggcaggtgaggcgggcaggccctggcagagggaagggtatttatttcagatcaccccaaatcactgtttcccgaggcgcctaatagcgaacctgtccaggaggtcaccctggacaggaaagaagtgtcccgagacgaggatgccggtgacgaatacttgcccttaaattcctgtgccaggccttgggattaggaagaccttccagctaccgtaggtagagacccgtagtcagcactggggccacgaaatagtatggaacaccgtcatgttattgaggtgctgacagtgtggctgtgaagatatgcacatgaaatacaaaggagcgtcgaattttatgtcgcatgccctatttactttcggtctcttttgtcttttcccagtattgggaaattggagccataaattgcgtggttttggggataaagcagaaaggtcaaaagaagcctatgggagaaatttgggagagttttgaaggctcctacgggtaacatttaaagggggctcttagatggggaaaaaagacgtttggaaagaaaggaagtttccttccttcccatctagaaataagctccatgactattgactgctaaatcttcagaatgttgcctggctcacagcggttgagccataagtgtctattgcatgaatgaatggacaagcaaggtttggccacatttgccatggagcagtgtcagtcactctagtgttagggaaggttgctggatttctcctgttccacaagttctctctctctgcctctttttttttttttttttttttttttttttttgctatgcgaggcaaccccggttctgaggtctgggcacgttaaagcaatggctaaggcggcgaggtcttggtttctgtggccatgctaccactttcccatgtgtctttcatgttggccttcaagagcttgctccttggcctgttgcttgagatcatcccat

SEQ ID NO: 4200 - DNA, 1891 bp, Artificial sequence
  DNA replication origin
cgagctgccgtcccgcacctcgcgggcgcgaggctccagcccagctcgtctccccacagccccggcggcggccgcagacccccaccttgctcacttccccgccggagcaggggtcgtcgggaaggtctcctgcggcctcactcctccgcacgctccggcccagccccctcggctgaggcagcggcagcgcctactcaggccccggagccacccccgcggcgaacgttcgcagcgcccggctcgcgccgcttctccgcccggcacgcgcagcgcccgcccccggcgcgagggcgcgagggcggagggcggagggcggatgggcgggcgcgcgcccagcgcgagcgcgcggccgggggcgtggcttccgcgcgcggggagggggcgggagcggccgagcaacccccctccaccccgcccccgcggccgcgccccgcccaccggtcgccggcgggttccgggcaggcgggaagctggctccatccaggcttctcccgctcgctggcgtcgggccgggtgtctttccatccgcaggtatccgtcggcggggtgcccggcccgacgtgactacccgacaaagaatgcaaagagccaccccgtgaatcattctccgcgcctgggtcacaagcctgtgcccgagtgacccccgtgaactccgcaagctagcccagccgcggcgtgcgccccgcgctgcaccaggtgcctgtgggcgcacgatcacggtcacggcgcctgggctcgaggcgccccaaacttagcggggaaaacagccatgtacacaaccaagtccgatgacccgtgcagagccaagccacggtgcgatgctggcacagaagctagagacgacttctgcttggacgccgcagagggctagaggcggcatttatggtcaacctcgaaggaagaaaaagaagtcctaggaggaaaaagggaggacattagggctgggaaaacagtttgggcaaaggagccggggcagccaggtttaccatctcagcaccagcttttttgtgttttactgttatccatcttttatagaattctttccaaactgtgaaatacaggagatggtgccaaattagaatatagcaaggactttttgaatggttcaaatggtcattctcaacgttacttaagactcaaaacagcaacgtcctttgggggctattggtcaatgatgaaggctgtaagctccagagctaagcgaccccaggcctgcatgctgggagtatggttttcactgctttttggcaccttacggtaaggcagatcgtgccacctcctgctgctgcctgcctgcctgcctgcctgcctttagaacaccctcttcctcctcctctcctctttttatttttaaactcctatggtgaaggaaatgctgataaccaactttgttaaatgggaacaaataggttcctcaaaagatgagcattttctggcctgccgcggaggctcacgcctgtaatcccagcactttgggaggctgaggcagacggatcacttgaggtcaggggttcgagaccagcctggccaacatggcgaaactctgtctctactaaaaatacaaaaattagccgggcgtggtggtgtacgccgtaatcccagctacttgggaggctgaggcaggagaatcgcctgaacctaggaggcagaggttgcagtgagtcgagatcgcaccactgtactccaagtctgggcaagagagtgagactccgtctcaaaataaataaataaagatggacattttaccttttaccttacatatatgaagtgtgtgaatattttcatgcttgaggagacttatctcttgtaggcacggtcttggctatgttttgtacatattaagatactcagaatacaggtaagagacctctagcttctttatttgcccttt

SEQ ID NO: 4201 - DNA, 1237 bp, Artificial sequence
  DNA replication origin
ttaacaaagcacatcttgcactgcccttaatccatttaaccgtgagtggacacagcacatgtttcagagagcaccgggttgggggtaaggtcatagatcaatagcatcccaaggcagaagaatttttcttagtacagaacaaaatggagtctcccatgtctacttctttctacacagacacagcaacaatctgatttctctatcttttccccacatttcccccttttctattcgacaaaaccgccatcgtcatcatggcccgttctcaatgagctgttgggtacacctcccagatggggtggccgccgggcagaggggctcctcacttcccagaaggggcggccgggccgaggcgccccccacctccctcccggacggggcggctgccgggcggaggggctcctcacttctcagacggggcggctgcagggcagaggtgctcctcacttctcagacggggcggctgccgggcggaggggctcttcacttctcagatggggcggccgggcagagacgctcctcacctcccagacagggcggcggggcagaagcgctccccacatctcagacaatgggcggccgggcagagacgctcctcacttcctagacgggatggcggccgggaagaggcgctcctcacttcccagactgggcggccgggaagaggggctcctcacatcccagacaatgggcggccaggcagagacgctcctcacttcccagacggggtggcggccgggcagaggctgcaatctcggcactttgggaggccaaggcaggcggctgggaggtggaggttgtagcgagccgagatcacgccactgcactccagcctgggcaacattgagcactgagtgaacgagactccgtctgcaatcccggcacctcgggaggctgaggctggcagatcactcacggttaggagctggagaccagcccggccaacacagcgaaaccccgtctccaccaaaaaaatacgaaaaccagtcaggcgtggcagcgcgcgcctgcaatggcaggcgctgggcaggctgaggcaggagaatcaggcagggaggttgcagtgagtggagatggcagcagtacagtccagctttggctcagcatcagagggagaccgtggggagagggagaccgtggggagagggagaccatggggagagggagagggagagggagagctttgccttgcacttttatgttatagagacggttctttacttaaacctcatgaacc

SEQ ID NO: 4202 - DNA, 826 bp, Artificial sequence
  DNA replication origin
gtgaggagcctctctgcccggtcgcccatcgtctgagatgtggggagcacctctgccctgccgccccgtccgggatgtgaggagcgtctctgcccggctgccccgtctgagaagtgaggagaccctctgcctggcaaccgcccggtctgagaagtgaggagcgtctccgcccagcagccacctcgtccgggagggaggtgggggggtcagccccccgcccgaccagctgccctgtccggcaggtgaggggtgcctctgcccggccgcccctactgggaagtgaggagcccctctgcccggccagccgccccgtccaggagggaggtgggggggtcagccccccacccggccagccgccccgtccgggaggtgaggggcccctctgcccggccgcccctactgggaagtgaggagcccctctgcccggccaccaccccgtctgggaggtgtacccaacagctcaatgagaacgggccaggatgacaatggcggttttgtggaatagaaaggggggaaagattgagaaatcggatggttgccgtgtctgtgtagaaagaggtagacatgggagacttttcattttgttctgtactaagaaaaattcttctgccttgggatcctgttgattggtgaccttacccccaaccctgtgctctctgaaacatgtgctgtgtccactcagggttgaatggattaagggcagtgcaagatgtgctttgttaaacagatgcttgaaggcagcatgctccttaagagtcatcaccactccctaatctcaagtacccagggacacaaacactgcggaaggccgcagggtcctctgcct

SEQ ID NO: 4203 - DNA, 1452 bp, Artificial sequence
  DNA replication origin
ttgggggtaaggtcaccaatcaacaggatcccaaggcagaagaatttttcttagtacagaacaaaatgaaaagtctcccatgtctacctctttctacacagacacggcaaccatccgatttctcaatctttcccccctttctattccacaaaaccgccattgtcatcctggcccgttctcattgagctgttgggtacacctcccagacggggtggtggccgggcagaggggctcctcacttcccagtaggggcggccgggcagaggggcccctcacctcccggacggggcggctggccgggtggggggctgacccccccacctccctcctggacggggcggctggccgggcagaggggctcctcacttcccagtaggggcggccgggcagaggcacccctcacctgccggacagggcagctggtcgggcggggggctgacccccccacctccctcccggacgaggtggctgctgggcggagacgctcctcacttctcagaccgggcggttgccaggcagagggtctcctcacttctcagacggggcagccgggcagagacgctcctcacatcccggacggggcggcagggcagaggtgctccccacatctcagacgatgggcgaccgggcagagaggctcctcacttcccagatgtgatggcggccgggaagaggcgctcctcacttcctagatgggatggcggccgggcagagacgctcctcactttccagactgggcagccaggcagaggggctcctcacatcccggacgatgggcggccaggcggagacgctcctcacttcccagacggggtggcggccgggcagaggctgcaatctcggcactttggggggccaaggcaggctgctgggaggtggaggttgtagcgagccgagatcacgccactgcactccagcctgggcaccattgagcactgagtgaacgagactccgtctgcaatcccggcacctcgggaggccgaggctggcggatcactcgcggttaggagctggagaccagcccggccaacacagcgaaaccccgtctccaccaaaaaaatacgaaaaccagtcaggcgtggcggcgcgcgcctgcaatagcaggcactcggcaagctgaggcaggagaatcaggcagggaggttgcagtgagctgagatggcagcagtaccgtccagcttcggcaagggagaggggagagggggatagaacgatttctgaggccatcaacagatgttatgcctgcataagaaaatcatccacaatggaaagtcacaagttcataaaagtcatttgtagtatctgtggttaataggattttatctgtgttctatgaagcactactctttttaaaaatgtttttgctggttgatgccaagtgttctgcaggtcttccctaaaagaaacaagaatttaataaaaccatcctgaaacaatatttcattttatccc

SEQ ID NO: 4204 - DNA, 888 bp, Artificial sequence
  DNA replication origin
ggtcagcccccgccaggccagccgccccgtccgggagggaggtgggggggtcagccccccgcccggccagccgccccgtccgggaggtgaggggcgcctctgcccggccgcccctactgggaagtgaggagcccctctgcccggccagccgccccgtccgggagggaggtgggggggtcagccccccgcccggccagccgccccatccaggagggaggtggggggatcagccccctgcccggccagccgccccgtccgggagggaggtgggggggtcagccccctgcccggccagccgccccgtctgggagggaggtgggggggtcagccccccgcccggccagccaccccgtctgggaggtgaggggcgcctctgcccggccgcccctactgggaagtgaggagcccctctgcccggccagccgccccgtctgggaggtgtacccaacagctcattgagaacgggccatgatgacaatggcggttttgtggaatagaaaggggggaaaggtggggaaaagattgagaaatcggatggttgctgtgtctgtgtagaaagaggtagacatgggagacttttcattttgttctgtactaagaaaaattcttatcctgttgatctgtgaccttacccccaaccctgtgctctctgaatcatgtgctgtgtccactcagggttaaatggattaagggcggtgcaagatgtgctttgttaaacagatgcttgaaggcagcatgctcgttaagggtcatcaccactccctaatctcaagtacccagggacacaaacactgcggaaggccgcagggtcctctgcctaggaaaaccagagacctttgttcacttgtttatctgctgaccttccctccactattgtcctatgaccgt

SEQ ID NO: 4205 - DNA, 1346 bp, Artificial sequence
  DNA replication origin
cacttcccagtaggggcggccgggcagaggcgcccctcacctcccagacggggtggctggccgggcggggggctgacccccccacctccctcccagacggggcggctggccgggcagggggctgacccccccacctccctcccggacggggcggctggccgggcagggggctgatccccccacctccctcctggatggggcggctggccgggcggggggctgacccccccacctccctcccggacggggcggctggccgggcagaggggctcctcacttcccagtaggggcggccgggcagaggcgcccctcacctcccggacggggcggctggccgggcggggggctgacccccccacctccctcccggacggggcggctggcctggcgggggctgacccccacctccctcccggacggggtggctgctgggcggagacgctcctcacttcccagacggggtgactgccgggcggaggggctcctcacttctcagacgggcggttgccaggcggagggtctcctcacttctcagatggggcagccgggcagagacgctcctcacctcccagacggggtcgcggccgggtagaggcgctcgtcacttcctagatgggatggcggccgggcagagacgctcctcacctcccagacggggttgcggccgggtagaggcgctcctcacatcccaggcggggcagcggggcagaggctctccccgcatctcagacgatgggcggccgggcagagacgctcctcacttcctagatgggatggcgaccgggaagaggcgctcgtcacttcctagatgggatggcggccgggcagagatgctcctcactttccagactgagcagccaggcagaggggctcctcacgttccagacgatgggcggccaggcagagacgctcctcacttcccagacggggtggcagccgggcagaggctgcaatctcggcactttaggaggccaaggcaggcggctgggaggtggaggttgtagggagccgagatcacgccactgcactccagcctgggcaccattgagcactgagtgaaccagactccgtctgcaatcccggcaccccgggaggccgaggctggcggatcactcgcggttaggagctggagaccagcccggccaacacagcgaaaccccgtctccaccaaaaaaatacgaaaaccagtcaggcgtggcggcgcgcgcctgcaattgcacgcactcggcaggctgaggcaggagaatcaggcagggaggttgcagtgagccgagatggcagcagtacagtccagcttcggctcggcatgggagaggtagaggtagaggtagcggtagcggtagacg

SEQ ID NO: 4206 - DNA, 1610 bp, Artificial sequence
  DNA replication origin
gcttcggctcggcatgggagaggtagaggtagaggtagcggtagcggtagacgtagactagaggtaggggtaggggtaggggtaggggtaggggtaggggtagaggtagaggtagaggtagaggtagaattgagcttttacggtacaatgtaagaccactggagggttttaagcagggcacacatatgaccttattttacattttatttatttattattaatttatttttgaggcaaggtcttgctctgttgcccaggctggagtagggtggcataatcacagctcactgtagcctctacctcctgggctcaagtgatcctcccaccacagcctcctgagtgtctgggactacaggcacatgccaccatgcctggctaattttttgtatttttttgtagagacagggtctcgccatgttgcccaggctggtcttgaactcctgggctcaagcaatcctcctgccgtggcctcccaaaatgctcagattacaggcatgaaccattgtgttcttattttacttttttttttttttttgaaacggagtcttgctctgttgcccaggctggagttcagtggcccgatctcagctcactgcaacctctacttccgggttcaagtgattctcctgcctcaacctcctgagtagctgggattacaggcccccccaccccaactggccaagttttgtattttttgcagagatgggatttcgccatgttggccaggctgatttccaactcctgacctcaagtgatccgcccgcctcggccttccaaagtgctgagattacaggcatgagccactacacccggctttattttacattttaaatatgaattatttgctataaaatatctttctggctattgtgtggagagtgtaccatggaggatggtggtgttgagggtggcagggtgtatgtgaaagcaaccagagaaactgagagaccagttaggaggctcttgcagtatcctgggcaagatttgatgaggggaggggaagtagcaatggacatggtgagaaatggtcggttccgcagcagtgagggcttgctaatgagaacaacatttagcataacatcttgcacattgtaggtattcagctaacagtcattgaatgaatgaatgaatgaatgaagcccccttcctttctgaaatgcatgattataatccttcactttactgataaagtgaagaatatcgtcaattattctccaaactggattccattgtctcgttggtaacagtggttttgtataggtgtgggtgggtgggtgtgcctgtgttacttgaattttttgggatataatattcccctccaccctctagctcacttattaaatatttcactcctaccctttccctttttttccagatacaatgcaggtttccaacggcttgctaagagttattttccctttgtaaagcaaattgagtgggggtggctccagagctcggaaattctcttgggaggtggcaggggttggttggtctccaggggctctggttgctgggagaggtgaattgtgagtgctgggagtgacgagcaactcttcctagggcactgagggctataagcaagttattcctttaagtctatttcagggaag

SEQ ID NO: 4207 - DNA, 2398 bp, Artificial sequence
  DNA replication origin
tgaatgatcccccagcttggggggaggactccaggtgagcctctgccctcgggaggcccgggacccccggccgcccacgaccggcagcccacgctatggatccctagaggaaggaggagaagacagctcgccgcccacccccatcccattttcctcttcctttatctcattgttgccgaagctgtttacggcagcgctccctctgctcctgcatggggcgggctccgggcacggctgctcggcaggcgctgctcccgcggcgactgggggattctgcctaattcacctcccagccggtgcagagaggaccggagagcggtggaggcccggactgcagcagcgttggggccacctcccagcgtccccaccctaggaggctgcatgcggattgaagagctgcgcctgggggctgggccggccccgctgatcccgacctagcgagcaggatagcaggaccgcccaggctgcggaggggctcgggggcaggaaggtcagagcagcaagatggccagtaagaccaaggccagcgaggccctcaaggtggtggcccggtgccgccccctcagcaggaaggaggaggctgctggtcacgagcagatcctgaccatggacgtgaaactgggccaggtgaccctgcggaacccccgcgccgccccgggggagctgcccaagaccttcacctttgacgccgtgtatgatgccagctccaagcaggccgacctgtatgacgaaaccgtgaggcccctgatagactccgtgctccagggtttcaatggcacggtgtttgcctatggccagacgggcactggcaagacctataccatgcaggggacctgggtggagcccgagctgcgcggggtcatcccgaatgcctttgagcacatcttcacccacatctcccgctcccagaaccaacagtacctggtccgggcctcctatttggagatctaccaggaagagattcgagacctgctctccaaggagccgggcaagaggctagagctgaaagagaaccccgagactggcgtctacatcaaggacctctcctccttcgtcaccaagaatgtcaaggagattgagcatgtgatgaacctggggaaccagacccgggctgtgggcagcacccacatgaatgaggtcagctcccgctcccatgccatcttcatcatcactgtggagtgcagcgaacgtggctctgatggccaggaccacatccgagtgggcaagctcaacctcgtggacctggctggcagcgagaggcagaacaaggcaggccccaacacagcgggaggggcagccacaccatcctcgggtggcggtggtggcggtggaggcagtggtggtggtgctggtggagagaggcctaaggaagcctccaaaatcaacctctcattatctgccctgggcaacgtgattgctgccctggcgggcaacaggagcacccacattccctaccgggactccaagctgacccggctgctccaggactccctgggggggaatgccaagaccatcatggtagccacactggggccagcttctcacagctacgatgagagcctctccaccttgcgctttgccaaccgagccaagaacatcaagaacaagccccgggtgaacgaggaccccaaggacacactgctgcgggaattccaagaggagattgcccgcctgaaggcccagctggagaagagggggatgctggggaagcggccccggaggaagagcagccgcaggaagaaggccgtgtccgccccgcctgggtaccctgagggcccagtgattgaggcctgggtggcagaagaggaggatgacaacaacaacaaccaccgcccgccccagcccatcctggagtcagccttggagaagaacatggagaattacctgcaggaacagaaggagcggctggaggaggagaaggcagccatccaggatgaccgcagcctggtgagcgaggagaagcagaagctgctggaggagaaggagaagatgctggaggacctgcggcgggaacagcaggccacagagctgcttgcggccaagtacaaggtaagggccccagaggagctgggcactcgagatgtccccgcaggggatcccggcaaggaggctcttctttgagagtctgtgacctggcctgaagtggaggttctccctcagcaccgcacactgccctcctgccaaatgtgcccccagagcagccaggcaaattgctgtgataccgggctgccaggtacatgcacaggcacacacacacgaagcaacgtggacaggcggtctctcaagccagtgagcttggggtggtctgacctgctgtgggcatttcctgctggtggcctcaggatcagtcaggtctgtgggatggccaggcagcctcttgtgaatgtgggttcttgtt

SEQ ID NO: 4208 - DNA, 1232 bp, Artificial sequence
  DNA replication origin
agagtaaagacagacagcttgggctcagtccacagactcaactgccctctgcagagtggaccatggataggactctggcttggtccttggccttgtggaattacactttatttgtatcctacaggaaaaaaaaaaaagattaagactcccatagaggaacaccaagcacagacatggtctatccaggatactcaaggaagcaggagctgtcaggcaatccaagccagggcaggacttctcatggtacagtacttcatgattcattatttcatttgagcctcccaaccattccatgaagtagttgttaattatttctttcccgcctcgaatttttaaaaaaataaatgaggaaactaaggctggagcaaggggagtgactgctcaaagccactccattggatggccatcagaactggaacttcaatccaggttttgtcttaggtaaattctgtgcctctttcactatagaaaaaaaaaaattgctaagggaaggcttcgtggaggaggaggtgcttgaactgcccaagtggcagggcactaagtgccgaagggtgaccaggcctctgggcaaaagcacaaagatgctgcacagcaaagccagttaaagaaacaaaacacggttccgggaatgtgcactgcttgaggacaggaaggacccagatcctagaatggggcctggggctcagcaggcgctggataactgaagaaatggctgtctggaacacagatttttctatagaggagtagtggcggtgaggctgcgaaggcggaagatggagaggctttcacacaaggaaggcggtggaggaggagcgagggggctcccgggtgcttgtgcggacataaggtgcgagagaatcagctggaaggtgggctccagcagagagaagaggaaggccagaagtagaccgggacagggggaggaaaggacagagtcaaggaacatttaggagttcggttcccggaggcctggcgacaccctgacggggaggggtgacgcgcacccatttgcaggcagaaaggcaggagcaggggggtgtccgaggatggtggctcggagggaccaggcataggtggtgcaagctcagcagtcactcaaggggtggcatgcggatgagggaggcgcctcccggactgggggaccgggaaaggcattagcaacctgccagaacccggttaacaaaggcaggactacaattcccggcatgctcgggctcggtggggtgacggcg

SEQ ID NO: 4209 - DNA, 1714 bp, Artificial sequence
  DNA replication origin
aagggcctcggtcaagttggtaggtgggggtcctgccttctggtcgcagcgctgcctctttcttgccgtgtgaccttagagcaaagcatttctgctcttggagtctcagttttttcctctgcagcagttgaggattgaaccactgatctaaaacgtctcttctcgctgagaagtggtgttcatcttgtcggctgccatttctcatggggttcgagccataagatgccaggtgtcagtcacctcagaagagagggttttgtttgtatttggtggggttcttccgggggtaccgaggctgaggactgatggatcgaggcgggtggatcacttgagttcggagttcgagaccagcctggccaacatggcgaaaccctgtctctactaaaaatacaaaaattagccaggtgaaaaattagccgggcatggtggtgcttgtctgtaatcccagctacatatgtaattccagctactcaggaagctgaggcaggagaattgcttgaacctgcggggcggaggttgcagtgagccgagatcgtgccactacactcccgtgagggagcagcctagggactaaggcccgctggctccgcgagatcagccaggcccgcatcatcccccaattacctgcagagggcgccgcagacacagagagggcgaggccgaggccgaggccatctaagcttctgggaagggggtcccaaagggaggccccgagctggagtccagggggcttggaaggaagaggtgaggacagcagaaaaggaaacgcaaattaaaagaagggaacgaaggctgggcgcggtggcttacgcctgtaagtccagcactttgggaggccgagtcgggaggatcgcttgaggtcaggagttcaagaccagcctggccaacatggtgaaacgccgtctctactaaaaatacaaaaaaattagccaggagtggtggcaggtgcctgtcatcccagctactccgcaggctgaggtgggaggatcgcttgagcccgggaggtgggggttgcagtgagccgagatcgcgccactgcactccaggctgggtgatagagtgagacccagtctcaaaaaaagagaaggaaaagagagaagggatggtggcggtgggggaggaaggcggttcttgtaatgatccgagaggagaccgcagcaccggttacgccctcgaacctcggcctcctcatctgcagaatggacgcagtccacaccgcgtgctgtggaagggttggagcgccggtttacatgacacagggctatcggctaagggggcgctgggaacgtggaaggtgctctatggtggggcgctgtagggtgctcttgggcagtagggttggagtcaaatctgggttgaagtccaacctaggttgaagtcctggctgccacctgacctctgcccctcagtttgctcatcagtaaaatggggttaaggaggctgcctcgcccagctccacggagccggaggtgatgaaggtcctggaagagcagaattcagaacccgagctttgggcggcggagcaggacagggcgcgggtgggcgcggcctccgggaggccagcacgagggggagcggcggggcccggacacacccagccagaaggaggaggccgaccccgcgccgactccgcagatgccgctcgggacttcgttgtccctccaggcgcccgccctggggtcctccatcacccgccgtcacctgggcgcgggga

SEQ ID NO: 4210 - DNA, 738 bp, Artificial sequence
  DNA replication origin
accacactctgaccactcggccgcgagccagagaactagacgctggcctgcccgacggcggggcgccgatgctcccccatgagcctgctcccgggacagctgacgcccactgtgcccactcctggccgccacggaggaggggctgccgggccccacggggagacgaggagcctgcggccgcgggccccattagcattcatggaagcgagtgtgccaacgcgggccaaacccctattcttctcacacacaaaacccccggcctggctgccagccccggctaccgcccatcccccaaccaagcagcacccccctccccccaaacggtcccctcgctccatgcagcctccgggcgtaccctctcgggcccccatgcgtggttccatcagccgagcggctgggggccccaggtcctattaagaagtgggacaagattcgggggagggccgggagtttgggggtcacgccgggcagcagacccggctcccgccggcctctcccgaaggtggcctgcccgccccaggaccgaggctgctcctagggaagagaaaggaggtgcaagaagggtccccagaggggcggagcaggactaggggtggcggtaaggggaagacagagtccgggtcccagggatgagggaagacagaggtgagaggccagggacaaagggaccaagggggcgcggccggggcggggggcccaggggcagcgggggaaaggggggcaaccgacggggcggga

SEQ ID NO: 4211 - DNA, 686 bp, Artificial sequence
  DNA replication origin
ttctcttccctaggagcagcctcggtcctggggcgggcaggccaccttcgggagaggccggcgggagccgggtctgctgcccggcgtgacccccaaactcccggccctcccccgaatcttgtcccacttcttaataggacctggggcccccagccgctcggctgatggaaccacgcatgggggcccgagagggtacgcccggaggctgcatggagcgaggggaccgtttggggggaggggggtgctgcttggttgggggatgggcggtagccggggctggcagccaggccgggggttttgtgtgtgagaagaataggggtttggcccgcgttggcacactcgcttccatgaatgctaatggggcccgcggccgcaggctcctcgtctccccgtggggcccggcagcccctcctccgtggcggccaggagtgggcacagtgggcgtcagctgtcccgggagcaggctcatgggggagcatcggcgccccgccgtcgggcaggccagcgtctagttctctggctcgcggccgagtggtcagagtgtggtactgtgtctgcctgtgaatggaggtcgctgccctggggtcttctggccacttcccacacatcctttttggcatctcccctttctgggcagcttttctgagctcctcggtctgcgtagggcctcctttgggctccccggc

SEQ ID NO: 4212 - DNA, 1052 bp, Artificial sequence
  DNA replication origin
agcccttcctttccacccactgccttgttcaggggacctcgaaggagagggggggagtccccagaaacccccaaccccatctcagagaagccacccactgccttgtcaaggggacctcgaaggagaggggggagtccccagaaacccccaaccccatctcagagaagcagctccttgacaccccctccccacgccccctcatcctcccagttacaggggtgacggctgagggttggaggggttgagagagcaggtttagaaggcaggagtgggaggcccagccctggggcctgggggaagctgctctggggcagaggtgttgggagttgggaggggtctgggcctggaggcgccaaccccagcaacggtttccaggggagcaggaggggcagcccagcttccaggaggcagaaggggctgtgtccgggctgcagctggtggggagggtgggggtagggagtacctccttcctttctccttcaggcacaacttacaaaatttctgccaatcaaatgggaaatggtttactctgatggctgggggctccataaaatgtgtacatgtggggtaggcgtgtgtgtgtatgtgtgtgtgtgtgtgtggcagggtggcgggcggttcaagacgcacaggaagggcctggcccccactatgtgtgtgttgggggtgttgtctaagctttcccctgtacctcctcacctccgggggcccaagaagctctcctccaactctgctccctcctctgagagctgtcctgggtcctagccccatcttcacagccacatgggcacacagcagtaatcatggctcatgaccaccaacagctgaaccacaatagcccacagtgacagatgcttgtcacccaaacaacataactcagtctccggccaaggggcccctcccaaatgcacaggcacacagggacctacccttcaagccatacaattctgaccagacattcacaccctgatggtgacccagccatagccacacactgtcacacacaacagacagctgggccatcacaccagttgttcattcactcacccatt

SEQ ID NO: 4213 - DNA, 1614 bp, Artificial sequence
  DNA replication origin
agttgctagggatctgtgctcaccttgctgaggctggagccagatgaccagcccccttcagcccatgccagtggaaacctgccctttggccctcctgagttcctgaggggctggccgagattatggtagcaagtgaccatgaaggctcttgggacgcaggctagactcccagcaggcaggcccactccagcaacttttgtcacccactatgcagggaagttcaagctcctggaacaggcccgggatgtgcgggagccagtgaggtacttcagcagcgtggaggaggtggccagtgtcttccctgaccgcatcttcgtgatggaagccatcaccttcagcgtcaaggtcagtcactccctcaccaggtgtggtgtccccacactactccttgcctcaggggcaaccctgactctggttggaaggttgccctcaggatccaagaaggagagcggctcctggggaccccttaggggtctttggcacaatcaagccatgtcagaagggtggggaataggacccactgggctgaaggacttcctatgaaaggtagtgaagcaggagcgggtgtctggaagggtcatgttctgacttggagacttttcagggcaacctgtccctagctgccccagcacccacttgtagaggcggtggttgtggtgagcaggcagtgtaaatagacccctgctgtggggtgggagcagtggctcatgcctgtaatcccaacactttgggaggctgaggagggaggatcaactgaggccaggagtttgagaccagcctgggcaacatggagagaccctgtctctacaaaaaatgttaaaaaattagctgggcatagtggtgcgtatctatagtcctagctacttgggaggctgaggcgggaggactgttgccaggagtttgaggctgcactgagctgtgaatgtgccactgccctccagcctgggagacagagcaagaccctgtctcaaacaaacaaacaaacaaacaaaaacaactaaaagcagtccctgctatgtacagatagtgctgttctgtttacaaacccttttcttatccatcaattcatttctcttcacttagccttgttggatgggtagggcattatgatcgcccaaatggtaaagacaatgatgataaaagtcgccatttactgcatactttaaaatatgttgctgatccaagtagtggggaagaaaagaaaaatatgtcactgcacagtctttttaatcctacagcagttcttcgaagtaagagttatcagatatggtcgctaaggcgtggaggggcaactcatttaaggtggcacagctgctagtggtctctccaggatgaacgtggatctcctggcctaccatctagtccgagccccgggagggcggaagaggaaggctgttttccctttccagtctctgggagctggccgtgtggctttccctgggacctggctaaggccctgccctgtctctgggatccccaggtggtgtcgggcgagttcagcgaggacagcgaggtgtacaacttcacgctgcatgcgggcgacgagctcactcttatgggccaggcggagatcctgtgcgccaagaccaccaaggagcgctcgcgcttcaccac

SEQ ID NO: 4214 - DNA, 1472 bp, Artificial sequence
  DNA replication origin
gcagggcctgctggccggggacccgcgcgtcgagcgcctggtgcgcgacagcgcctcctactgccgcgagcgcttcgaccccgacgagtactccacggccgtgcgcgaggcgccagcggagctcgccgaagactgcgccagcccgcgccgcgcgcgcctctgcctgcccgcgccgcgcgcccccgggctcgcccgcgcccccggcccgctagcgccggctcccgccggcgagggcgaccaggagtacgtgagccccgactgggcagccgcgcccgagcccgccgcgccgcccgccgagatcccctacgaggagttgtgggcgcaccaggggcccgagggcctcgtccggccgcccccagggctcgatctcatctccttcggggccgcgggaccgccgcgtcgggagccggaagcgccgccgcctccagtccctcccaaatccgaggcggtgagtgagcgcgctgggggccgagtcccgggtccagccagggcccaaagcccgttctcctgggccccggccccggagtatgtggcagacgaggtgtcttcctcggcggggtggggaaggggagaaggaaagggcagaggcatgccaggcaaaagcatttgtagtaaggggcactggggcgggcggtggcgggagagctgtgggacagagatgcgtgtaggtccccagcctcagaggatttgagaggagccccgaagcactgttacccagaaggtaccacagaacaggggtcctttaagttgttgcgtgaaaagaaggttccttggcgaagtaagcttagaaatgctgtgaatgattcccagccctttttccctcctcatattggagtcacagagcattggtagattaaaggctctgagaagtcctgcactaaggaatcctgtttatcagaacattttctccctgcccgtaacacccgtcagcatcccatggagtcctctttggggtacacgacttgtagggagggatgcaggtggcagacgcttccttccctctgtcccttcggctttcctttgtcctctgctttctctccttttccttgaggagggagcacgtctgcttaacctgttttgatctacctttgtgttctttttcttaacatccatgatggatttccaaggaacaggaaggaggctgtgggacagggtgtgggtgcgtgagataggctgggaaggctaggaagggtggggtggctggctgactggatgagcagttggggtgcaaggcagcctattggcaaagtggggcaaatgtcaggcccagacagccccctcgcccagctgcttgggaaggggaagataaggagtgccagctgtttggagtcgaggtggagtcaccgccctctgcttgtaggtgaaggaggagtgccgcctgctcaatgcccctccagtgcctccccggggtggcaatggcagcggccggctctccagcagccccccggttccccctcgcttccccaagctgc

SEQ ID NO: 4215 - DNA, 917 bp, Artificial sequence
  DNA replication origin
ccttgaggagggagcacgtctgcttaacctgttttgatctacctttgtgttctttttcttaacatccatgatggatttccaaggaacaggaaggaggctgtgggacagggtgtgggtgcgtgagataggctgggaaggctaggaagggtggggtggctggctgactggatgagcagttggggtgcaaggcagcctattggcaaagtggggcaaatgtcaggcccagacagccccctcgcccagctgcttgggaaggggaagataaggagtgccagctgtttggagtcgaggtggagtcaccgccctctgcttgtaggtgaaggaggagtgccgcctgctcaatgcccctccagtgcctccccggggtggcaatggcagcggccggctctccagcagccccccggttccccctcgcttccccaagctgcagccggtacattcccccagctccagcctctcctactactcctctggcctccaggatgggtgagtccctgccttcccttggtcctgagttctaaggtagatcaaggcagggaagggtgaggagggggaactacagtgctgaggaagaggaagtcttgaggcctgggagattcccgagggtgcagctccctgtgcagtggctcagggattggcactgctgtctgggtgtcttggggcctggggcccagtggcctgttctgcccacttcagcttctttctctcttaaatgttgaggaacggatgggagcattgccctggtcccctcaaggtggggactttgctgcaggatagagagaagagagctccttgctgttttgaaattttgattaagttcaggccaggtgcggtggctgatgccggtaatcccagcactttgggaggccgagttgggtgaatcacttgaggtcaggagttcaagaccagcctggcta

SEQ ID NO: 4216 - DNA, 1073 bp, Artificial sequence
  DNA replication origin
gttctcgggcaaagaagctcaccacatcctctgagagcccgatgaaacgcagactgcgagagacctcctccagggagagtgcagacaggtcagcagggggctgccaggaggaggcatctcggactccaaagcctgtggctccatcccggggactggcaggaggcccttccaggcgcccttgggttagaaaaagtgctcctcccgcctcgggtccctgcagagcagctggtgacagtggggtggggacctggtgcagcaccaaaccttcaggctcaaaggccttggaggggccaagtggtgaaaggcggggtccaggcccaggtgtccccactgctctgggctcctgagaacgcagcagctcaggctctggagaactgccctgccccagctcaaagggatcgaagggctccaggactggttcctgccattcagaagaagaggaggaggagggggcgcaggaggaggggggagcagctgaataggcctggcctggcgaggctgggcctggggaatacgcagggccagaggtagccacaggacccgaggtggttctgggcccagaagacaaggccgctgaagggcctgaggggtaggcaggcccggaaaaagggttgagagctccaaacggagcaaagcgcttctggggatgtgagggcttgaatagaggagggcagctgtggtaggtcttaacaggggtgtcagcccccagaagggaggcggctcgaccgctcagaggctctgtgagggcccgggaggcctggctgggctgtgtggttgagggtaggggaccgggggctgggcggctagaggactcgcccaccttgcagtctccccaggtgcatgggtagcaatagagggagtaggtgtccggcgatggggagccactgccactgcgggaacccgccctgtggacagagacagacacacacacataggacaggtgaggctgagagggaatccgatagggtcacacatgcattgcaaccaagcaccactatgacctcagcaacacgggcctgcaccccagccccagcccaagaccctccggaatggccgtgttcttccttccagca

SEQ ID NO: 4217 - DNA, 1128 bp, Artificial sequence
  DNA replication origin
tgactaaaacccagatgccgagtggccgccggccccttagccctgcccctcgctcctggctaacatggccgaaaggtcgtattctccgggggaggacgggggcccggagaggagggggtggagtgcctggttttccagtcaggcggccggagggcagccctcaagaacggccctgaccgcccgcggggtgaggggccctttctgggcaggacccgccccttggtcccgcagagccttggtacttggacctgaaccttgctccgagagggagtcctcgcggacgtcagccaaggtgagacggcgagccctcagctctccgcccgggctttcccaaaggcgagattccacttccttccccgcaactgtcgccggtgcccccggccccctcccctccctgggaaagtgggagttgagggagcggaaggaaactcctcggacaaggtcggcagtgctagctgcagttaggacagtgacttggactagcgttccagctgaagttcgggacagtagtgtcacctgcgccctaatttatcatcacaagttaacgaagtctgggggtgtgggggtgtgtgtgtgtgtgtgggtgtgtgtgggcgtgtgtgggcgtcggccttaatgtaaccctggtctgcgtagaagtgtgtgttgtttcgcctgcttcccctgtacccaggtcggcggctatagagattgtggacggcgccatgggtttgcccgatttctgctgtaaagaataagactaggtcaggtgacctttcggggcttgagtgtgggaggaacggagacaatcctccatccggctccgttatccagataatcctgcgctctcgggggttttccgatctggatgattatctatctggtcgttcacacctcagctcacttaagcggtgaagaaactgcctacgaatcagagagagtgattttacccatggccatatgtagtagaaataagactggagcctaagtctactaactcctagtgaagagttcttcattgcatggtagctgtttttgtgctggaatgatgggctggagtcctggaataaagtgattgatttcaaaaggaagtcacattgagagcctgctgtgctctggtcaccttcatacctttttgtttagtcctca

SEQ ID NO: 4218 - DNA, 1668 bp, Artificial sequence
  DNA replication origin
cgtccgggagggaggtgggggtgtcagccccccgcccggccagccgccccgtccgggaggtgaggagcccctctgcccggccagccgccccgtccgggagggaggtgggggggtcagccccccgcccggccagccgccccgtccgggaggtgaggggcgcctctgcccggtggcccctactgggacgtgaggagcccctctgcccggccagccgccccgtctgggagggaggtgggggggtcagcccccgcccagccagccgccccgtccgggaggtgaggggcgcctctgcccggtggcccctactgggacgtgaggagcccctctgcccggccagccgccccgtctgggagggaggtgggggggtcagccccccgcccagccagccgccccgtccgggaggtgaggggtgcctctgcccagccgcccctactgggaagtgaggagcccctctgcccggccaccaccccgtctgggaggtgtgcccaacagctcattgagaacgggccaggatgacaatggcggctttgtggaatagaaaggggggaaaggtggggaaaagattgagaaatcggatggttgccgtgtctgtgtagaaagaggtagacatgggagacttttcattttgttctgtacttagaaaaattcttctgccttgggatcctgttgatctgtgaccttacccccaaccctgtgctctctgaaacatgtgctgtgtccactcagagttaaatggattaagggcggtgcaagatgtgctttgttaaacagatgcttgaaggcagcatgctcattaagagtcatcaccactccctaatctcaagtacccagggacacaaacgctgcggaaggccacagggtcctctgcctaggaaaaccagagacctttgttcacttgtttatctgctgaccttccctccactattgttctatgaccctgccaaatccccctctgtgagaaacacccaagaatgatcaataaaaaaaagaggagggaatgctatcagcaaaacacaccagggtggaaaagcacaatgcatgttcagaaaatgccaagaaccttagtttgactagagactagcatgttaagagtgaagtatataaaaaggtcaaaaaggaggtttgagccagtttaaaagttgtagggaatatggggagttactaaaggtatctgaatagagaaatcacaagaatgaaagcaatgtttcaggaagaggcacctgacggtatgaatgacaggctggagagagggacactaattagtaggcctgagatgaaatgcagtaggaatgagaaactggtggtaggtgagatggaggaaataaaaatgataaaatgccgcaaaagatgagggataaggcctaaggacaagaagagaatctccagtttctattctgggtaacgaagatagtggtagtgttaatagaaaaaaagaagtcagaataagcagcaagagtgacagacaagatgcagagtacaattttagatactgaaattgaaatgttagtgagatatccacatggtaatgtcaaggaactcaatccaagggtacttattaggaactcagaacacagatcagggctagatataaacatgagaatcttaactaagactgtagagtgagaatcaccattaccaagggaatgaggagaaagccagagtttagga

SEQ ID NO: 4219 - DNA, 981 bp, Artificial sequence
  DNA replication origin
gacacccccacctccctcccggacggggcggctggccgggcggggggctgacccccccacctccctcccggatggggcggctggccgggcggggggctgacccccccacctccctcccggacagggcggctggccaggcagaggggctcctcacttcccagtaggggcggccgggcagaggcgcccctcacctcccggacggggcggctggccgggccaggggctgacccccccacctccctcccggacggggcggctgggctggcggggggctgacccctcccacctccctcccggacggggtggctgccgggcggagatgctcctcacttcccagacggggtggctgccaggcggagaggctcctcacttctcagacggggtggccgggcagagacgctcctcacctcccagacggggtggcggccgggcagaggcgctcctcacatcccagacggggcggcggggcagaggcgctccccacatcccagacgatgggcagccgggcagagacgctcctcacttcctagatgtgatggcggccgggaagaggcgctcctcacttcccagatggggtggcggccgggcagaggctgcaatcttggcactttgggaggccaaggcaggcggctgggaggtggaggttgtagcgagccgagatcacgccactgcactccagcctgggcgccattgagcactgagtgaaccagactccgtctgcaatcccggcacctcgggaggccgaggctggcggatcactcgcggttaggagctggagaccagcccggccaacacagcgaaaccccgtctccaccaaaaaaatacgaaaaccagtcaggcgtggcggcgtgcgcctgcaattgcaggcactccgcaggctgaggcaggagaatcaggcagggagattgcagtgagccgagatggcagcagtatagtccagcttcggctcggcatgagagggagaccatggggagagggaaa

SEQ ID NO: 4220 - DNA, 1107 bp, Artificial sequence
  DNA replication origin
tgggggaaggggtggggaaggaggtgggggaaggggtggggaaggaggtgggggaaggggtggggaaggaggtgggggaaggggtggggaagggggcatgacggccccctgcccatcctcctgcctccaccggaccccagcccagcgggatggctgtgaaggggcagggcagctctgaccagggcctctgccggcccctgccccttccccacctcttgggccctggcagccgtcaggctcctggtgaccccatgcccacccccagctgccagggaagcggggcttcggctcggcaggctggacagtgcaggccaaggtggagctgtacctgtggctgggcctcagcaaacagcgcaaggagttcctgtgcggcctgccctgtggcttccaggaggtcaaggcagcccagggcctgggcctgcatgccttcccacccgtcagcctggtctacaccagtgagtgaggacccctcactcgaagcctcacctgggagggggccggaggggctgcccatcctggaacctcaggctgcccttccccacagagaagcaggcgttccagctccgagcgcacatgtaccaggcccgcagcctctttgccgccgacagcagcggactctcagacccctttgcccgcgtcttcttcatcaatcagagtcagtgcacagaggtgagggcctgggaggagggagtggctctggctttgagagcaccagaagcctgtgagcctgtggggactggagcctgtggggcctgtgagcctgtggggcctggagccacaggtcagccagtgccccggtttctcaggggaagccctgcagataactgcagcagacgcgggtcacactggaaaggctacgggctttagctgtggttatattcacaagacagggacgacaaggaggacattggcagggggcttgggccaaacctcatattagccttgattttaagatttctggaagaatcaagacacctgtcactcctgcccccaggttccgtggaagctgagtgagtaggggtggcttctgtttgtgcatctgcccccccctctgtcacttgtcccctgtctccccatcccatgctgcaggtgctgaatgagaccctg

SEQ ID NO: 4221 - DNA, 1209 bp, Artificial sequence
  DNA replication origin
ttacaaatgggaaaacaggtcacacaactactagctgacaaatccagtcagctgggctcaggccagctctgagccgacctgagccacaaatcctcaccctccccctgaggcaggggctgctggcaaggccctggaagcacctgtgaggctgaggaccagagctgatgacggtggtgtgaagagagggcatctcacatattccttcccttcaggccactccctctgccccccagcacaccgggtctcccgctgctgacctttgtctccgtcattagaaatcttgcgcaggtcaatgaagtgggtgccgatggccacgtcgttgaccttgtccgagtctcggatctgcaccttcatgcgtttgcagagtggggggaagaggtctgtaaagacgacctgctcattccacaggggctcatagctgctcttctgcactgaagtcttgccctggtggaagggggagcacaggtgagggcgtggcatgtgtgtgtgagtgggtgcatgtgtgtgtgtgtgagtgggcgcatgtgtgcgtgagtgggcacatgtgtgcatgtgtgagtgggtgtgcatgcgtgtgtgagtggatgcatgtgtgcgtgtgtgagtgggtgcatgtgtgagtgggtgcgcgtgcgtgtgtgagtggatgcatgtgtgtgtatgagtgggtgcatgtgtgcgtgagtgggtgcatgtgtgcgtgagtggatgcatgtgtgcgtgtgtgagtggttgcatgtgtgcgtgtgttaatgggtgcatgtgtgcgtgtgagtgggtgcatgtatgtattcgtgggtgcatgtgtgcacgtgtgagtgggtatgcgtgcgtgtgtgagtgggtgcatgtgtgcatgtgtgaatgggtgtgtgtgcgtgtgtgagtgggtgcatgtgtgcatgtgtgagtgggtgtgtgtgcgtgtgtgaatgggtgcatgtgtgtgtgtattcgtgggtgcacgtgtgcacgggtgagtgggtgcgtgtctgcatgtgtgagttggtatgcgtgcgtgtgtgagttggtatgcgtgcgtgtatgagtgggtgcatgtgtgtgtgcgtgcctgtgtgtggacttgtctccactcttcccacacccccagcctctcctccctctcatgccccctgcgcagctctcagtctaaggactccaggaggcagtgaggatcctctaagtccgtccctggccaacatgatttcc

SEQ ID NO: 4222 - DNA, 1171 bp, Artificial sequence
  DNA replication origin
agccaggccacctgtgtctcagaaaagataatgccacagtagagtctgaagagagggacaagcaaggtgagagggcaggaaggcacgtggatgaggagtcactggagaacctcagccaggctggcaggcctccagggaggggccatgtcccaggaatcccaggagcttcaggtcttgccagagcagatgtgtgtcggatgaggagatggacagaaagctcaatgaatgggtgcataaatgggcagagggatgggtggtgagctgcctggccggctgagagatagacggacagatggtgaatggattactggatagaaggagccattaatctgtggacaggtgggtgggtagatatatggatgggtgggtggatgggtggatatatgggtgggtggatctgtggatgggtgggtaggtggatggatctgtggatagatgggtgggtagatatatggatgggtgggtgggtggatggatggatatatgggtgagtgggtggatctgtagacaggcgggtgggtgggtggatggattcacggatgggtgggtgggtggaccaatggatatatggattggtgcgtgaatggatggatacatggatgggtgggtggatctgtggacaggtgggtggatggatttgtagatgggtgggtgagtggatggatggatacaggggtagatgtatagaggtgtgcatggttagatgaattggggacatttagcaaagaaagagaatacggttcaggaggaatgtaaaatttaccttcaaatttaaaggctatttttctttttgtcctgaaagagagacgtgtgaaagtgggtgaaggttacagggtgacagattttgagatgacctaaagaaagtgaagatatctaaaataagaagtagtgagtgccccatttctgggaggactaagcaaggttagaggaccaatcagagatggtgctgtgggggtccctacatcaggttaacacttgactcatgacttctgaggcccttctagtcctaatactgtgtgatctcaggctagagatacaaggaccacatgagatcctgagctatatgcttaccagcctgaaacatcatttcacctcccttcagcctggggctgacacctgccagtcaagggtagcccagctggggaagttgctgcatcccagacctccttta

SEQ ID NO: 4223 - DNA, 1214 bp, Artificial sequence
  DNA replication origin
gtggtgggggagaagggagaaatatttccaatgtgcttggggtaaatgtccgaagagaacgtgctcctggctgctgggggctggcccttgagcactgagggtaaagccagcttcagagccagccccacctggctgttactgctagatcactcactttcttgcctgagcctcagtttacctattatcctatgaatgtggagatatgatccagggctgtcgtgctgaactgctccaggggtgccattcacttggggggcttcaaggtgtggttgtgaagttgcaatgagacaccctggtcaagtctttaacacaggtgtgcaccacggtaagcacatagcaagcagcgacagctgtgcatgacactaacaggcccagggtgtgctggccagagttctgaagctctggggaggcgggtggggatatggatttgggaatcgtcagcacaagatggtaactgacaccttggagatggaggagatacctggggagagcatgggaggggaagcaggcccaggtcagggctccaagaagacacagcctttcagccaagaagttaggccggggagatggagctggagagacaggggaagcaggagagtggcgtgaggggcccccaagaggagcagcaggcagcgggatgaaagaaactgggtgatcaagggagaggaggatgacatggacattatactcaggaacagcaatgtccttggtgaccttgaggagagcagtgtcaatgacatctggaggcagaaaccctgcagagattgaggggtgactggggggaggaagtgaggacaacccaagtggtctgactgtggaggggtggagggaaaaaggaggtcactggagaagtgtgtgggaatgaggaaaggcccagagagaggtgacagactcctagttcctgtccttgagcacacatgggtcttcatggttgtacttagcatatgctggagtagaacaccttataggcaaggaagaaggggctggaagaaaaacaaagacagagttgggctgtgcaatgccaggttctttgagctgtagaaagagaaggatccaaggcaaaggggagaggtggattttcagcaggaggaaggatggtggcgctcccaagatgcccagggcggggccagatgcacacacaggacacacaggaaaggagccttagtctggtttgtgaatggccagcttgttccggaagggcaaaggttttgagc

SEQ ID NO: 4224 - DNA, 799 bp, Artificial sequence
  DNA replication origin
gagggttctgagcagggcctagggagggcttcagaggcgaggtgggcacagggcggaggggtgcgctgagagtcccaggaagtggaggcagcccggcccacaggcctcattcagcggctgcggctccagcttctggatgcctctggcagctcagcagagtgtgtggttttcttaatgaagctgcttttatggggctgcagggaaataaagcagcccaggaaggcccagctcatcagccagggcgctgtgtgggagtcggggggccgcaggagccaccgagatttggtttactggggatgaagaggggaggggtgattggtccccctgagggtctgtgggtgggattttggcattggaaggagagaaagatcaggagaaaaaggacatgactttggagatggccctgtgaaagggaggtggggtgttgaacggtggcgggaggctgaggctaagggacctggggagggaggctgcctggctgcggggcgagggccagtttgttgagtgagagtcgggggacagggagggcacaggagacagggggcttccggggcccctgactgcagatgagaataatcaggggaagcgtgtgtaggtgtgtggctcaggtgccctttcagaaattcgtcagccgggtctgggcagtccatgcctatgtcagcggggaatgttcttcttggaggctttccgggtgagggagaagacagggtcctcactgagtcacagcagcttcttcggtctctgacttgctcccaccttacagtttcctttctttcctcccctgtctccctcccgcatt

SEQ ID NO: 4225 - DNA, 1715 bp, Artificial sequence
  DNA replication origin
aaacctctaggaaggcccctcgccccgtcgggtggaaaattggctcctcggggttccttcaaccccaaagtccgggggcagggggctgaatttcgatcaccgaggagggcgctagtggaagggggaggggaggaggcgctccctcggccttacccgggcatgagtccagggggcacgtaggcggcattgaactcggtcagtagggtgcccgcgctgcgggaggccatggtgggtgcgcgagtacagcgagcctggcgctccgctccgccccacggtaaacagcggcgggtcacctggcaacggccacggcggcgagcctggcaacgccagctggccccgcggtcctcgcgttccgagacactgcgcccccctggcggccacctcccggagcagccccatagggcgcgcccagaaggcgcctcccatttccgcgagctctgctgggtgacccctgtcacttgccccggcgcgtcggggctctctgccttgctgcctgcgggatgtgcagaggctcagatgcgggagggaggcagaacatcgctggagaggcctggcgggatccgtcttgcggtgacccggcttggaacgcgacgctaccacaaaggacaggccaggtcctgactttggaggtcacgcacgaagcagctgccccaccgtggctcaggcccagaaacctgagtggccttagggtccccaggagctatgtctctccaaggcttcccctgcaccccagctccatgggagttccaggaaggggctctgtagtgggccgcgctgggcgaggttgcctaggacgctgtgtgtaattgtgtgtgtgcgtgcgtgcgtgcatgtgtgcgtgtgtgtgtgcgcgccttgcgaagaggagcatttttcatttttcttcttaatctctagctgatggcttccttctcacctcatcatacctgtaaactactccacaagaggcaaaaagaaaatcatagaacgtctgggtgtgtgatttacatttgtccccaatgctgccgttcattttggggatggcatccgcaggggtagcgcttgccccagagagcaggcctgctgaaggcccaccccctgtgtaatcctccctgtgactgcttcagcctccacatttgagtttctccagggacccttacaccagccttggtgcctagggcaggcacagggccttcggcttttccataaggggtgagggtatggggacagcttccacggtgccaggctcttggtgactcgggtggaggccctgccaccccagctccctctgcagcagtcctggtgtcatgaagaagcctggcagttcccactttgtctccaggtcttgcttcttcccttcagatgccggatggagagcagtgctcccctcgcacttcggttctgtaaatggcagtggatgaagaccgcagacgctactgggttcacagaatgtggctgccaccagcattctccaaagacttcccctggcaaatgccaatgaaatgaaggggagccacaggcttcccagaggctcaggaagcagaaacactgaggcctggttggaaagagagctgtaggcaaaggaacggctgcaaacaaactgggtggaaggaaaatccatccatccttcagaatgcagtcatgtctgtatttttctaaattctcattggggaacatgttctacaataaggaaaacatgagtcaaagacccccagccctggtgaggttgaccgcct

SEQ ID NO: 4226 - DNA, 1056 bp, Artificial sequence
  DNA replication origin
gtcacccagcagagctcgcggaaatgggaggcgccttctgggcgcgccctatggggctgctccgggaggtggccgccaggggggcgcagtgtctcggaacgcgaggaccgcggggccagctggcgttgccaggctcgccgccgtggccgttgccaggtgacccgccgctgtttaccgtggggcggagcggagcgccaggctcgctgtactcgcgcacccaccatggcctcccgcagcgcgggcaccctactgaccgagttcaatgccgcctacgtgccccctggactcatgcccgggtaaggccgagggagcgcctcctcccctcccccttccactagcgccctcctcggtgatcgaaattcagccccctgcccccggactttggggttgaaggaaccccgaggagccaattttccacccgacggggcgaggggccttcctagaggtttgtggtttcagagtaggaagtgggcaggcacgggcgggggcctccccagattccccttcacaggaaggcgctccctggcaagtggggcacagccagcagggcataagggacctcgcatggatgtagccggggaagggggaggagatggagccacgtggggtttagtgcttggagacgccccaggcgggcagcctccagcgcttagagaaaatgcgagaaaatcaggcccttccgtccggcgcacagggccagcacccagcattcgggcaaggtcagtacttgttggttgaaggagggaaggataccgggtgggtgcccgctcgaagaacctggcaaggccggaagagccgtagttaatgggtcatgtgtgcagtacccgcccgactttgcggtcggtcctttcacagacctccctttatcctcccagaagtttttcttggaaagcttcctggccacttgccctgagcgctggcttgctgtttagcactttcaaatactaggttacacctacctttctttactctggatattttcagactccaaccatctaacatgcaagtctggctgttgcctcctgttctttggctctttctcctacagtgtctgat

SEQ ID NO: 4227 - DNA, 902 bp, Artificial sequence
  DNA replication origin
attgcaacaaaggcagttaggggtagttaagagcatagacttcccattaagtgagactgcctgggtttaatcctgtctccatcacttaccaatggttaccctgggtagttcattcgttatttattcaacaacagccattgagcgtctactctgtcccaggcattgttctgggcacttgggatatagcagtgagcaaaaagacaaagatgtctgcccttgtggaatttatatgcaagtggagggaaataaacgagctaataacacgtagtgtgttggggagtattctgtgatgggagaaggacaaagctgggaagacataggaagtgcatgttttcacaggggctgggtgatgccctaggaggagccgacacttgaataaagacctagaggatctctgggtgagagtgtcccgaggagggggagcctccgtgcaaaggccctgaggcaggattgtgtctggcttgactgagcaaggaggcagagtgagggcgggctgacttggggattaggacttgggctccgctctgggtgacacagggctgcaagaagagggcaatgaggaaggaatgacgatcaacagatcacccgggctgctgtgttgggaatagacttccgggggcagagagagaggagggaagctcagcaagagactgccagggtgagctggagagaggcaacggtggctgggctagggtggggtagtgcatgggaagtgcggggagctgggaggatttgccaacccatcgcctgtggggtgcaagggagagaggtaagggtgactccaggttggcctgagtggctggaagagtcctgaagagtcccacttcctagggaggggacagctgtgagtgcagcaggtctagaggtaagggctggggaggggagcatgaggagcctgggct

SEQ ID NO: 4228 - DNA, 1048 bp, Artificial sequence
  DNA replication origin
cctcgtagccgccctggctgaggttgtagcgcgcccgcagctcctgctgccgcagctccagccgctgccgctcgatcagctcgggctccgactccagcgcgtcgaagaccgcggcgcccaccagcaggtaggtgaaggtgcacacgatgagcgccagcgtgcgcacgttctgccgcttcatcgtcccgcccgggccgccgccggccccccggcgcccccggcccgcgcctcggccccggccgccgctgctgctgccccggaggcggcctggggcatggctgcgctcgccgctctccgcgccgggcacccgctcagcgcccggggccgccgccgccgccgccgccgcggagctgtcccttcagcaccacccaccgccctcctccgcccggccccgcgcccgccccccgccccccgcccgcaggccgcctcctcccgccagccctcccgcccagccaaataaggactggggagacgcgccgaggagggaggaggggggctggcggaggggacgggaggggcggccgcgagagagcccgggcaggacagagagagagaaagagagagagagcgagcccgagagacagagaaaactagacagcgaaacgctgataactacggagaatgggagaaaggcagtgtaggactgagggaagggggctgtgtgacagaggaggagataaaatcagaggtgcactcagacagaaaaagaagagaggcgggcagaaaaatacagagcaaaagatggaaacagagagagcaacagactgagacagagaggcctggattgctggagataaactaatgacagagaaacagacaggaaggcaaggaaggcagagcgagcccctccccaccccaccctccaccctcatcacagcatattgcagccaggaggcacttggggcctcgctgtcctgcccttatcctatggatgaggaaatggaggcccagagaggtcaagtgacacgcatgggcacgcagtgatttcgtgacagcactgggactcagccaagcgttccttcctcccaggccacactccttcctccct

SEQ ID NO: 4229 - DNA, 1655 bp, Artificial sequence
  DNA replication origin
gcagcagcagcggcggccggggccgaggcgcgggccgggggcgccggggggccggcggcggcccgggcgggacgatgaagcggcagaacgtgcgcacgctggcgctcatcgtgtgcaccttcacctacctgctggtgggcgccgcggtcttcgacgcgctggagtcggagcccgagctgatcgagcggcagcggctggagctgcggcagcaggagctgcgggcgcgctacaacctcagccagggcggctacgaggagctggagcgcgtcgtgctgcgcctcaagccgcacaaggccggcgtgcagtggcgcttcgccggctccttctacttcgccatcaccgtcatcaccaccatcggtaacggctcgccgggcggggggcgggaacccagggctgggcgcggggctccgggagtcgtccggggccggctggggctgggggcgggggctcccccgagaggggctgggcgccgaaccctgcgctcgcagaaacccgagttcagcctggcgtgtgtgctccgcggggacggaactcggggaggcgtcgattcctggctccggacctgactctccggccgggccagccctaacttggccctgccatgttgcataggcccccagggactccgaagtgtgtgagaggggcagggacgaccggcggaggctcgggcaggaggggtgtggccgggccaggccctgaacagggcgctgagagtgagcggcgggagagcgccagtgctccgtatccctgaggatcggcttccacagcctagcaggtctacacctgctgggctctggggaggcatgaggatgtcggaatgcggcacttcggggcacttggggccaccctataacggcggctgtgagtgtacgtgtgtctgcgtgtttcagctccaggagtttggtcgccaccagtcagtgcctgtgattttctcagagcggcagaattggtgcgggaagccagatctggccttgtcagccttcttctctgctgtcccagcaaaacagtcacctcacaggaataaccccagttctttccaagccagggcagatcaccatgtaggaggccacacgtacacccagactgtcagacaacacaggcataggcacacatgcacacagatacacacaggcactcacagggtacacacagggcgggcacacacacacacacacacagagagagagacagagagagagagagagaacaaacgttgcccaggaaaggaatctctagccaggcccttggtggtgctattcaaaactgtccagacgggaataacaccttacctgtccccaacaccctatgatttcagcccagctccatcactaccgtgatatatgaccttgggcaagtcccttcccctgtctgggtctcaggctcacctccagacaaggaggggtggccaaaatgatctcaagagctcctccccagccccgacgtgcttggattctgagatgaaacccaccttcccccaaagcccattgagatgcctccagaagcagtttcctctgtctttactgttccctctcctctccctagtccccttccctgccttgatcagactcccaggggttcgttgccacttagcgcagcccatgaagatggcattgttttcctgggagtcaacaggagctgagggagtaaaaggcagg

SEQ ID NO: 4230 - DNA, 1784 bp, Artificial sequence
  DNA replication origin
gagctcctgcgcttcatgaggccgcggaaggtggacaggctgtgcagacccgtggacaccgagctgatggcggagcgtggcgccccgctgcacaggcagcgtcgcgagggcgtgtcgctgtagcggccgccccctcccggcgacgagtggctctgctccacgcacgtgtcggacgtggagaggtcccgcgggatgatcatggggatggagtactgcagcttctcgcggctcttgtaccacaggcacgagcacatggactggaagtgcagcacctccgcgtagacgttgcggaagccgccgccgcccgctgccgccgtggatgaggcggtgtccgtagtgtgcgcgctgccaccccctccgccgccgcccgcctgcccgttgcgcgtgagcagcgcgcggtgctcggcgtcgcgcttctcgtcctcggcgttcatggtcatgaagcgcagcaccacgaggttgaggaaggcgccgatgaccgtgaggcccgtaaggatgtagacgaagctgaaggccacgtactgcggctgcgtctgcagggcctggtccttctgcagcgccacgtagtcgccgaagccgatggtggtgagggtgatgaagcagtagtagtaggcctggaagaaggtccagtgctcgtagtgggagaaggcggcggcgccgatgcacagcgtgctgatgcacgagaagaagccgatgagcaccatgttggccatggacacgtcggcgcgccgcatgcccagccccttcttggcgcggtgcagcaggtacctcaccaaggtgttgatgcgctcgcccaggctctggaacatgacgagcgtgagcgggatgcccagcagcgcgtagaacatgcagaacaccttgccgccatccgtgctgggtgccgcgtgcccgtagcctgggggaaagtgggaaagaggagaaaaagcacacattttggggctgcccttccagaaaccttcttctccctccccgttgccccgccacctcccccaccttgtgggtctgggtccacagtgatgggcgctccttatccccacgcactgtgctaggccctggctcatgctttctattgtactcttgtgacacctgcagaaggtatgtaggaaggaagaaataaggagggatgacttccaaggtcacacggcttgggagcagaacaaccgtgtttgaactcgagtccgtttgacctcaatgacgggactgttttgtatgcctagagaaggggtggcctgggtgctgctgagaacttgtctagaggcacagggagagtgtgagggcacaggtcagctgggagagctggattctagttcagtgtcctgggctgcgggcgtggtccttgtcctctccatgcctcagtttccttgactacaaggtgaggtggttgccctgaatggtttctgacatcctgtgatccagtgtacaggaagggagactgaggcagggctggcttcttggtggattccccgctgccagccaaagcttatgtggggttgcttggcaacaagggcccttcagtctccctggggcagctggcccactgtgccacagaagaaaggagactgcctgcccctccctgcaagagcaggatgaatgagtgttccagggtccccatcagcctccaactggaggccttggggtcttcctctgtacttgacctgatgtaggatctgtcctcatggggaggtggtgttacccttggcaaagcaggagccctcggtgtctttccaggtgtgttactatcatcagccagataatctctctgtaccccgcccccaccctggccc

SEQ ID NO: 4231 - DNA, 1289 bp, Artificial sequence
  DNA replication origin
cgcgacgccgagcaccgcgcgctgctcacgcgcaacgggcaggcgggcggcggcggagggggtggcagcgcgcacactacggacaccgcctcatccacggcggcagcgggcggcggcggcttccgcaacgtctacgcggaggtgctgcacttccagtccatgtgctcgtgcctgtggtacaagagccgcgagaagctgcagtactccatccccatgatcatcccgcgggacctctccacgtccgacacgtgcgtggagcagagccactcgtcgccgggagggggcggccgctacagcgacacgccctcgcgacgctgcctgtgcagcggggcgccacgctccgccatcagctcggtgtccacgggtctgcacagcctgtccaccttccgcggcctcatgaagcgcaggagctccgtgtgactgccccgaggggcctggagcacctgggggcgcgggcgggggacccctgctgggaggccaggagactgcccctgctgccttctgcccagtgggaccccgcacaacatccctcaccactctcccccagcacccccatctccgactgtgcctgcttgcaccagccggcaggaggccgggctctgaggacccctggggcccccatcggagccctgcaaattccgagaaatgtgaaacttggtggggtcagggaggaaaggcagaagctgggagcctcccttccctttgaaaatctaagaagctcccagtcctcagagaccctgctggtacccagacccccaccttcggaggggacttcatgttccgtgtacgtttgcatctctatttatacctctgtcctgctaggtctcccaccttcccttggttccaaaagccagggtgtctatgtccaagtcacccctactcagccccactccccttcctcatccccagctgtgtctcccaacctcccttcgtgttgttttgcatggctttgcagttatggagaaagtggaaacccagcagtccctaaagctggtccccagaaagcaggacagaaagaaggagggacaggcaggcagcaggaggggcgagctgggaggcaggaggcagcggcctgtcagtctgcagaatggtcgcactggaggttcaagctaactggcctccagccacattctcatagcaggtaggacttcagccttccagacactgcccttagaatctggaacagaagacttcagactcaccataattgctgataattacccactcttaaatttgtcgagtgatttttagcctctgaaaactctatgctggccactgattcctttgag

SEQ ID NO: 4232 - DNA, 1267 bp, Artificial sequence
  DNA replication origin
ccccgctccgcatttccccgggcctcgcatcccttgggtggtcataacgcgcgcgaactgaccggagcaagtgggaaagcaggggaagccaggagggcagggccaagaagggggaaggcgtagaacgagcgccggggtcgccagggcccgcacgcccggcagggcccagactcactttgccgagagcgtgttgatggagccggtaacaagcatgagcccggccaggaacagctggtacttggtccaggccatgtcggcggacgctggggttcgctccagttagcggcgccgggccccgtcacccggggtctcctgcgcgagcgcttccgggccgggcgtcacgtgacccctcctgctcgccccgcccccggggagcgcgcctgagccacggtgcccgcgctctgccgagtcgtcctggagcgctttggtggccacgccgtggccctggcaaatcacggcccaggccttccagttttttttttcttttcttcctcactctcccccgcctttttgggtttcttttttctatttttttgagaaggagtctcactctgtcgcccaggctggagtgcaatggcatgatctcggctcactgcaatatccgcctcctgggttcaagcgattctcctgcttcagcctcccgagtagctcggattacaggcgcccttcaccacgcccggctaattttttgtatttttagtagagacagggcttcaccatgttggccaggctggtctcgaactcccgacctcaggtgatccgccctcctccgcatcccaaagtattgggattacaggcgtgaaccaccgcgcctggccttggtttcttatttttatctttgggtcttcctatttgtaaaaggggcggatgggacagtgcagtgagggtgcatcgtggctattacagcattttgtgaatcgttttgagaggttgagctgggcggtgtcagaaaggagccctgaagtgggcctgccgggagttccttggggaccctgtagagaggagattcccacgctggacgtttccacttcggggctcctatctgataccgcccaccttgggcacagttcatatctttcagcaaagtggcgaaggcatctagctccagttgccgaggacaccattttatagctgaggacagtaaattcagcgaagcagagtgatttgcttaagaacctgctggtgagcagtggggtagggatttgcgcttgggttctccagtctccaaaaatccgtgccttccgcatggcctctgcaccaagccctg

SEQ ID NO: 4233 - DNA, 1085 bp, Artificial sequence
  DNA replication origin
gcgcggacttctgccaagcaccggctcatgtgaggctcgcggcacagcgttctctgggctccccagaagccagcctttcgctcccggacccggcagcccgagcaggagccgtgggaccgggcgccagcaccctctgcggcgtgtcatgggcccgcgccgccggagccgaaagcccgaggccccgaggaggcgcagcccgagcccgaccccgacccccggcccctcccggcggggcccctccttaggtaaccggccgcggccccatctcgaagaggagaaaaccgaggctcgcaggcggagcccggatctcccgagtcccgatcccgtggcacttccctgttgggggacaacgcggttccgccgtccggcatccgctccgggcacgggcggtgccagccctgcgaggggctggagcaggcggttccgaaagcgggaagggaccggcttagccacttggctcctaacgccgtcttcttgttaggactagtggttacccagcgcccaccgcccaccgccaaccaggcattgcctcccactgttcgtgcgttatctcagcttcatattgtgcccattttacagctaatgagaaagccgaggcacaggccagagagcttgagcagagtcacacaacttggtgttctggcggacacgggatttccaatcctctgtgtttgtgcatttttaaattgcaaaagtattgactgctttcggtgacgatttcaaacaggagtcctcttaggaggtgtctttcaggggttttttttcccttccgggagaggctgttaggccttgaaccgaggccctctgcgctgctcactctgttgccttccagagcttgtgtccgggaaaaggggccgaagtctgtgtcttaattgtctatggtgggctggtggatgggagacccaacggcaggaggaggcagatgcctgtatggtacatggtggcaacagctgctttacttatctcttaactcttgctacgtagctatgaggaagatgggaagtgtattgtagtttatttgtttcattgctttttgtagagactgggtctccctgtgttacccaggctggtctcaaactcctggc

SEQ ID NO: 4234 - DNA, 728 bp, Artificial sequence
  DNA replication origin
gatggagactggtttgaggagaagacgaagggtctgagtttagaaacattgtattggggccgggcgcctaatcccagcactttgggaggctgaggcttatggatcacctgaggtcaggagttcaagaccagcctggtcaacatgttgaaaccccgtctctactaaaaatacaaaaattagctggtcattttggcatgcacctgtagtcccagctactctggaggctgaggcaggagaatcacttgaacctgggaggcagaggttgcagtgagccaagattgcgccacggcactccagcctaggctacagagtgagacatcgactcaaaaaataaaaataaaaataaaatagcaacatggtattggaagagcccaggaagttgagcagccaaggagctgagacctcctggatttagaaacataaacctcaaatctgggacagggattggagccagaggggtgggcttggggaccatctcagagagtcttggctgaagccaggggagagtggaggagtgaggcgagagcgatgaaggaagaagctcgggacatgcatgggtggaggcagaaggtgggtgctggaggaaggggagggctgaggtctacctatgccaggcacatagtgaaggctgaggccaggaggagaagccctggctttagacttggactgttgggaacttgaacccagatgcttactgtgagcctccattgccttgtctgtaacctggc

SEQ ID NO: 4235 - DNA, 943 bp, Artificial sequence
  DNA replication origin
cacctgggccagcagctgctgtgttcaatttgtcaccgggccttagctgccttcccgcggggcagggctcgggacctgcagcccgccatgcctgagcctccccccgcccatcgaccacccaggggctgacgagtgagggcgcacggcccgggactggcaggcagctccacctgcagccctggtgcgggatccactgggtgaagccagctgggctcctgagtctggcggggacttggagaacctttatgtctagctaagggattgtaaatacaccaatcggcactctgtatctacctcaaggtttgtaaacacaccaatcagcaccctgtgtctagctcagggtttgtgaatgcaccaatcgacactctgtatctagctactctggtggggacttggagaacttttgtgtctagctcagggattgtaaacgcaccaatcagcaccctgtcaaaacggaccaatcagctctctgtaaaaccgaccagtcggctctctgtaaaatggaccaatcagcaggatgtgggtggggccagataagggaataaaagcaggctgcgggaggtagcagtggtaacgcggtggggttgatcttccatggtgtgaagacttcgttctttcgctctttgcaatgactcttggtgctactcactctgggttcacgctgcctttatgagttgtgagactcaccgcgaaggtctgtagcttcacagctgaagccatcgagaccacgaacccaccaggaggaacgaacaactccagaagcaccgccttaaaagctgtaacacccaccgcgaagatctgcaggttcactcctgagctgccgagaccacgaacccaccggaagaaagaaacttcgaacacatccgaacatgagaaataacaaactccagatacgcgtcttttaagaactgtagcaatcaccgtgagggtccgcggcttcatt

SEQ ID NO: 4236 - DNA, 1472 bp, Artificial sequence
  DNA replication origin
atgaccccagtattctgggtggagctaagggtcagatggagtaagtcactttctcaaggtcaagtcggcagaaactgaaggagcaaggattccaacccagcaatgcgggactcccagctctgtgctctttctacttcccaggaaacggagcctaagttagcaacaacaaaccgaagtcgaggactgaggacatatgcaacccccggtttgggtgcaacctttatcaatatcctaaactgacagatgacgtagaggcagccgtttcgctgactagggaaggtagcccaagaaagctaagatgctagaatccaaatttaaggtctacgagacgctgcagaaaacatttacagtcactagagggctctctctcccttaagcaaaaagcgcagcaccgcccgcgcgcggtagtctcggaaccccgccgccgggaggccgctggcagctccacgccacctccctgaagcccagtccattttgcctacatccctgtccgggcaagccctggagaatccatagggcagtgccccaagctggagcagttttcacagccacatcccgggctgcactgggttagggatgctttgaggttcctctgggggctccctgctctctgcttaccaagcaggcgggagttgggaaggggagaaggagtgcagactcaggggtggggtaatccagaaatgcatccctcaaaggccagcctggcctggtccaggccctaagctctctggggaaggacggcagggaaccccgccttggcgggctctgcgggtcctgcgcccgggtagattttgctgagatggggagaggggaccccctccacgcccccggagtagtgaacaccattttgtttgaaagtatcctgcaaagagaaccacctcacgaggccatggctgccaggggactcctctccccaccggatcgccggggagcccggggagggagggattctgcagctgcagcttggaggtccttgatgctgcattttaacgcgcatcgcaacgcctttggagtgacattaagtgcaaagaggcaaatgactaatccaaactattattacaactgcagaaaataacacagatcaatggcaaaggcttgaaccgggattagctagggaggtgggacaaaccggggatgatccttcctctccttttttagatttgtttattttggtaaattatgtatgtatttaaacatgaagaaacaggtgaagcgaatgtaaattgggttataaataatttccaaaggcttcgctgtcccttgacagaagccagaaataagacaggcactgggcctgagcgctctggacagggaagcacccgcgtggcgctgggcaaaatcttctcagtggagagaacgcactccgggttcgagacctccccgggtgcagatgcgaactgcggtggccccaagtggccgtccactttgttcatgagaacagttttcctataacgcccacccggccctttgca

SEQ ID NO: 4237 - DNA, 921 bp, Artificial sequence
  DNA replication origin
cgctcttggggtcctctttgtacgcccgcgaagcgccgtgccgggccttgctcatagtaagcgtttaatgcgtgctcgcggggttgcaaagccctggggtgaggaggcggctcggccgaggggtttcgcgcctagcacgcagtgggccgctttcctagccgggcgcggtgcagtggaccgctggagggctgggcgggggcgcctctggccgggggccagtcctgccggtcccaggatctgcgctgtccccggtcccacacaccacccagatacacaccctccgtccttctcgcctccgagctgggatctgcccagcctggacccgacccggcggtctgttccaccgcccggctaacggagcggacgcctgcagaggactcgcccgccgcctccgagcctcccgcctgagccacaaaggcctcctgcggctgcccagcccggagcgggcgccgagccgggtccctcggctggagcccagcgcgggagcccgccttgcagcatcgatctcagcgggcaccgacgtcgacgccccgggcctggggacggggctgtagtctgagctggagagaagccgggagagggcgaggggaggcctcggttgagaaaagatggggatggggaaggctggggagctgggttaggacaggtagtgggtctcggggagcagggagtgggaactagggtttgaggaggaaagagaaggggcgggggcgggtccgaagaacgagggaaggagctcggtgcaggtggcgcccggcgaggctggttctgctgaagaatggggaggggaggagggatgcaggcgggtggaggccgcctgggtttgaggagggaggacgggagcgaggagaagacccgcgctgtgcgggggaggggggcctcctgggaaggggagcctcccgaggagggaggggcaagcag

SEQ ID NO: 4238 - DNA, 897 bp, Artificial sequence
  DNA replication origin
cagcgggcaccgacgtcgacgccccgggcctggggacggggctgtagtctgagctggagagaagccgggagagggcgaggggaggcctcggttgagaaaagatggggatggggaaggctggggagctgggttaggacaggtagtgggtctcggggagcagggagtgggaactagggtttgaggaggaaagagaaggggcgggggcgggtccgaagaacgagggaaggagctcggtgcaggtggcgcccggcgaggctggttctgctgaagaatggggaggggaggagggatgcaggcgggtggaggccgcctgggtttgaggagggaggacgggagcgaggagaagacccgcgctgtgcgggggaggggggcctcctgggaaggggagcctcccgaggagggaggggcaagcagctgagaggcggtctcgggcccgaggatcctcagctccaggcgcggggccccgcggcccaggtggccggctgggcgtggccctcggaccggggttagggacccaggatggcagatccgggaccgggctgggctggcttggtgaggagctttgtctccaggcttgaaaccagccggtagcgactcgcttagggttttgtgatcttccgcggcgcccacggcacgcccttttctcgaggagctgaaaggctttgcccagcagcaggtgctgccagggaggcggatctcccttcggggagacccggagaacaatagccgaccctggtgtccatccgacgacaaaccagggccacccaggacgcgagggtgcagttttctggtgctgggaatactccctgcggaacctccgggcacgtgctggctttggggttttatgggggcctggccacgccgggaatcccgtgtgggaggcgctcccccggcctg

SEQ ID NO: 4239 - DNA, 1056 bp, Artificial sequence
  DNA replication origin
cagccggtagcgactcgcttagggttttgtgatcttccgcggcgcccacggcacgcccttttctcgaggagctgaaaggctttgcccagcagcaggtgctgccagggaggcggatctcccttcggggagacccggagaacaatagccgaccctggtgtccatccgacgacaaaccagggccacccaggacgcgagggtgcagttttctggtgctgggaatactccctgcggaacctccgggcacgtgctggctttggggttttatgggggcctggccacgccgggaatcccgtgtgggaggcgctcccccggcctgggggcctgcagacagccacccccccactccggctcgggtgccttctggtgcagcgccgccgcccgccccgcgctgtccacccgctgccgagacgcggcgtggttagcggcgcggagctgccgggcggcgacgcaggtgccaaagactggaggtcgcctcggtgcagcgcgggttcccccgagcagcggctttgtctgccgaggcggccgtagtctaggggctgcagctgtgctttctcagggggagccgtaagggctggtgcggattgtggtcaaattgcggagaagcgggtggaaatgatcccgcaagggtgaggctctaggtttgggagccgctgctaggggtccagtgcttttctttgccagtgaccacacccaagccagtgcgtctcttgcagacttcgcccatattgtctgctgacctaagactggggtagctctgtgataggcgctgcttgcccgtgggaaagcagatgaaccgaatggaagcttaaaacaggctttcagcagggctttccacgcactcagcctctcgcccgccgtctaaacaccttgcaagtcaccgctgcagcgccttgacatgtgaagtgacacccaaagccagaattctgtgttgcactgttgctttgataactggttagatgacaagttaaaggtgaatctttagcataaagttatcattttaaattgccattcattaaaaaaaaaggcaggaatgtttttgttcccagactgggcgat

SEQ ID NO: 4240 - DNA, 1053 bp, Artificial sequence
  DNA replication origin
cccgcggctcagttgccttggagacggcgggtgccctggccccgccccgctcggactgacagcggcggccgcatcgcgcctgcgcagtgccctcgtcccccgcagtctctgtgcgttgaagccggagaccgcggcggcctcagcgaggaccctccgccccggagccgccggccggagccgcagcctctgccgcagcgcccccgccacctgtcccctccccctccgcctccgccggagccgcctcgtgcactgtgagtccgggccgaggcgacggacgccgtggggctgagtcagcgggaggccagggcccgggctgggggaggggaaccgggctccccccgcccctgcctccccacccgcactcccgcatcccgaccgcgccttccccgcgccggtcaaccccctccatccctgtcgccgggttccctccggccttggcggcccggcctccccagccactccccctccccttccctcccctccccttccctccgtctctccgggtccaccttgaggctccttccccactagacgtggccaccgcacctctgccctgggctgatattttctccaaactacctcccgtccgcccttatcccttctccctcctcctcactcctcctaggcctgacatctcccggcctctctggatctccccagtgatgtgccagaaaaagagtgacaggagagcgaggggagacttgggggagggggaacatcgggccaggcccagcctgggggcctcgggtttcttccccacacgctcctgcctggctggtttggggaagcaggtctggacagttctcactggctgctcagagcttgcagggctttccgaatagatttggctgggaagggttcagccccatcgtgatcatctagcgtttaatgaacgcggctagtgcctggtggccttctagtgggctgagctactgcccggccggtgttgcggagcggggagtagaagtagtggagggaagggagaagaggttgcgtttgggagctccaagttcctgcgcttccggtgtggtgttgtgaataagcatcttgcgg

SEQ ID NO: 4241 - DNA, 1756 bp, Artificial sequence
  DNA replication origin
cccggcctcttcgcctgggcgggggccgcaggctgccgcggaagcctcttcccgatgctcttcgctcaggagagcccggcccaggagagggactacaagtcccaggctgccttgcggcgggcgccgggcgccgggcgcgcggtcctgcgaggagacgtggcagagtgcggcgcgctcgcgccggaccggaaagccggggaagtggccgaggagggagggctgcgagccatggcgaccaagacggcgggcgtggggcggtgggaggtagtgaagaagggtcggcggcctggggtcggcgccggcgccggcggccgaggaggcggcaggaaccgcagggcgctcggggaagcaaacggagtgtggaaatacgacctgacccgtgagtacccgccctgccccgccgcctaccccaggcctgtccggcagggtcgcagcgagcggctcccagaacctgggcgcgagctcgcaggcacatccccgagcgccacgcttgcgttgtctctttggagcctcacgggaggcagacagctccagggaaggttgcggtcctcacctcccagatgagtaaactgaggcccagtgaagttggataccttggccagggtcatgtgtcagaggggctaggattccggtcctcagactctcagttcactgcacacactctcccagctgcccagggccctagctggtctctctgggcaggtgtctgagctttgaagaggtactgtggatcattatacacggtgccccctctttaagtaaccagcaggtcatggaggaagggacaggaggcccagcagtgggagaaatgaccgccacacactcaacactcaccaggaattataagtgacacctggttcttccactgaggagtggagaaagattgccacttgttgattatagagttgtcatgtcggaaccaagaggcgttagggtaggaccaagatggaaaaagcttgtcttcccagactagtagccactcactgaataaggcaaacctctatatccaacctctctgcttgttcctacatactctgatttgtctaatgaagaactgccccatctttatgaaagagcccatagactcaagagctgtaatgaaagaagctaccaggagaacagcctgccctgctccttaagcagtccaagaggaaggggctttgagacaggctcttccctggagatgaattaggtggcagtgtggggaaagggaccactgataggtgaggccttggggactcaagggtggcctgcctttctctacctatcttcaccccagctgcaatccagaccacaagcaccctttatgagcggggctttgagaatatcatgaagcggcagaataaggagcaggtcccaccccctgctgtggaacctaagaaaccagggaacaagaagcagccaaagaaggtggcaactcctcccaaccaaaaccagaagcagggccgcttccgcagcctggaggaagcactgaaagctgtgagtgtgcctagacatgagacgcagaaagaatgggggcttgagatttagagaagatgagaggagggggaggtggatgggcagctgagatcctatgggatttgaaacactttaagggttgagaggagttcaggaaaagatggaaaccccaggggaacagaatgcctgcacttagaatagaaaggaaatggaaaatttatagggaaacatggattggtaagaggaaagccttgaagacccaggaacaccagggaggagatggagaaactggttatga

SEQ ID NO: 4242 - DNA, 1110 bp, Artificial sequence
  DNA replication origin
gcggagccgacgagacggcggggctagagaggccgtcccgaccgcgccccccgccggaagcggcttgttcgggcctgagctggcgctacgaagttccggtccaggtctctgacttcgggcttgttcgctggtggcgtcggagccgagccggactggtcaggtcagaggcacgcaggggccgtcccacgggccagccccgccgtggccgtggccgtggctggcccgtggggcgaggacgggttcttgcgagggcgaggagtgcgccagcccgcagctcagcccctctcttctccgcaggatgatcacggacgtgcagctcgccatcttcgccaacatgctgggcgtgtcgctcttcttgcttgtcgttctctatcactacgtggccgtcaacaatcccaagaagcaggaatgaaagtggcgctttctccgccccaggtaacggcccggggctgtagcgcccagtccccagagctgagtggcgaggccgcgccagggctagcagggttcgaaacttacaatcagaaagtgtcgggccaagcatgatacagtccagaactgggcccctttgtctgcacagagtagagagagagcgcgctgtcctctccccgtaacctgttccctgctagaatgggagtgggttgcctaaccctcacagtctccagtaggtagatgcccaagttgggagtatagttgtaaggaggcactgacaccggtaggaacgaaggtaccgagggaaccatccaagtatgaggatttgggctcttaaatagccctcattttccccaggttgtttaggccttatttgggcagattttttttggtgaggggggtgacagatgtagaattctgtttccatgttctgaggccaggggttggctgctgacccaaactatagagaaggaagggggggctttggagccagccttaagtgtgggtcacaagtataaagggaacatggatgggcgttacttcctgaaggattccccagaggaaagctgcagcattttccttacctcaggtctttccccctcttttctagggttccaggacatagtctgaggcaagatggagggtatgaggggccttcacacttcacttcatcccttctac

SEQ ID NO: 4243 - DNA, 1660 bp, Artificial sequence
  DNA replication origin
cgccccacgggccagccacggccacggccacggcggggctggcccgtgggacggcccctgcgtgcctctgacctgaccagtccggctcggctccgacgccaccagcgaacaagcccgaagtcagagacctggaccggaacttcgtagcgccagctcaggcccgaacaagccgcttccggcggggggcgcggtcgggacggcctctctagccccgccgtctcgtcggctccgcgcggcgcgttacggccgcggctggggcggggcctcgggcgcggctgcggtgggaggtccagccgtagggggtggggcggggctgcggacgcgcgcctgggcccggcaccgcacagctggctgcagctggcgtggctcgggacgcggctagcgaagccgtggtggccgcctccccggagccgaggagtgggctggggcgagggtgcagcggcggggccggcgggatactccaacccccttccggccccggccctcagtactgctgcccacccttcgcttcccggcccggcccaaccaggtgcttcctttgggtcctgccctcagtgccctctccctggcccggacggcggggacaggggtaggaggcgttgtagaatggggacagggctggtgctgccgggtgctcctttctccggcgccatcctttgtgacccacatgcaaccaagtagaaccatcctgccttttgtgatctgaccaggttctgtcttagccgggctccctccctccaccctaccccccggaggtgggcgtcggaaatagggcggaccctcccggaatcaaaacccaaaccgtgggacttcggccaagtgggaaatcaccccccggatgtgggggagggagaaggggaggaatggagaagaggaggaagggctgggacaagcaagaggggtcctgggttcaggacagattaggtcgccgaagagaacgaagagcggtggctgcgggtagccgagggtctctggcgaggggagaggcaccctggaactctccaagcctctgcccaagccagagctttctcccccctcactccatgctttctctcagcttcaccataaaagggaacggcactgagccaggccggggccgggggctgggctgttgctctggagctgtcaggggtaatggaagccagttgctttgcggtagaggggggccagggctcaggggaggcctctgcttctcggagccaaagaaaactctacaggagatgctatgggcttgggacaggggaccagtttcccgcctgtgtgcactgagctggggatgcactatcccaaagtagccttcccgggcctgggaccatcaacagcttgtcacccaagggcttcagccccgtggcttctaaacataatccctgcctttagtagtctgtagttcccgtggcctccccgcacctcaccaccagcccccactcaatatttcccagaagcttgatatttagaaagccgagtcccctccacacaacactggtgaaaccccagacaggtactcccttatgcatccctcagtaagcggtctgtttccagctcctctctgggagagtaagggtctaggtcttaaggattacacgtcattatgcttcatgtctcctggaaatttgaagcagatccaagtccaaccaaacacttaggtctactgttgaatcag

SEQ ID NO: 4244 - DNA, 1092 bp, Artificial sequence
  DNA replication origin
gagtgacttgtccaaggtaacacagcaagtcaatggtgaggctgagaacacacactaaatactaggtcagtgacttgggagaaaggaggagaggagaatgtgctgctgggccagggaggaaaaggtcaaggactccactgaggcagatgggaaatccacagatgacagaagaggaagaaagggccttgtgtggtggctcacgcctgtaatcccagctctttgggaggctgaggtgggcagatcacaaggtcaggagttcgagaccagcctgaccaacatggtgaaaccccatctctactaaaaatacaaaaattagccaggcatgttggcacacgcctgtaatcccagctactcaggaggctgaggcaggataatcgcttgaacccgggaggaggaggttgcagtgagccaagatcacaccactgcactccagcctgggcggcagagcgagactctgtctcaaaaaaaaaaaagaagaagaggaggaggaagaaaagcacctggcaatggggagcaggcttctgtcaagcggtagagggcacgtgggcaggaagagaaagaacctttcttaaagggataaatgaaaatgggtcctgggcttgttttggtgatggtcaggccataactggatgagggtgggggtgaggtaaatcgggacctatctttagagcaccaaaggaagtcagtccctggcctggaggcaagtctgatagctctcagtgacaggcaaagagccgtcagcctgacctgaaagttccacctgcgccaccttgatctaaaagcttggtccccgtcaccatctgacccgcagctcttgaccagggtctccagctggtgggatgcttgggagaaagaaacagaagcactagacagaaaggagacaggagaatgctgtgtgccaggcactgcggaggtgcccaggtagcaaaggcataggtaagacccagacgctgtccactaaggagcaactgaggttgttggagaatgggacacaagcccccaaacagagaaccgtcacaagccaggacagaaaaagtgccaaggggcaggacagagggatgatgtgtgttccagctaggaggagggaaaaga

SEQ ID NO: 4245 - DNA, 852 bp, Artificial sequence
  DNA replication origin
tgtcctctttccctgatgaccggatcctgggggtgacagggctttgcccctgtggctgttcggaggcgcgagagtggctgtggggcgggccctggcctcctcctccctgctggctcccctcccttcccccctgtctggctggcggtccggcctcccccttcctccccccacctctccaaccatcgtgcgccacatctgcttcttgttaactccgggaaagagggaaaaaaaaggaaaaacagaaatgtggagttgccgccgggcttgaggccagcctctcagatgggccacatggagccagggccgaagctgggaaggaggcccagggctggtcactccgactgggaacaggagccagggccgcagctcccctggggctggagcaggcctcccctgggggagagggccccagagagggagcccagaggggagggtgggagggaaggactgactggacaagggagaatgaactcggagggctcagcaggacttcactcaccgtctagtctagcagtctccttttagagatgtgaaaattgaggtcagagtgggagagtgacttgtccaaggtaacacagcaagtcaatggtgaggctgagaacacacactaaatactaggtcagtgacttgggagaaaggaggagaggagaatgtgctgctgggccagggaggaaaaggtcaaggactccactgaggcagatgggaaatccacagatgacagaagaggaagaaagggccttgtgtggtggctcacgcctgtaatcccagctctttgggaggctgaggtgggcagatcacaaggtcaggagttcgagaccagcctgaccaacatggtgaaaccccatctctact

SEQ ID NO: 4246 - DNA, 991 bp, Artificial sequence
  DNA replication origin
agaaggcatctggggctggcgcgtgaggcaggtttgccctcagtctcccaccagccaaactgttgtctcagtatctcctcaaaatggctgtgaccctagcccctgtcctgcccttgctccctgcttcatacagactccctgagtcagccacccaccatctgccctcgcccagttcccaccaagggcccgttgcccggccctgggactcacatgatgctttggggacactggggctggccccaggcacaaggctggtacttgacatatgtctccactccatcctcaaggacacagctcactgtccgggtcaccacgtaggcacaccagttcctgtaggtacaaccccctctgggtccaaggaccaaagatacatgccctggaggagggcccaggggctaccagaggggctgaagaaggctccaaagatgcagaacccttggggatcagtgagagcaagggctttggcatcgccaccctccctatcccccacgctttcctgtgtagcaggagcagataaagacttttcaagatggggagacgcgcagaatggaaaaccacagagcagtcaatcctcatggtggtggggtcccggggagcctctgaatgtacacaatcatgtgtgtccctttctgggcctgtctcagtccccagattggcatgctgtgtgcgcatagccagcccgggccctgtgggtgatctgaacactggcttccaccccacccctccaggagaagacgggcaggccagcttggggttaagtagagaataagccattgatgagcctgcccctcttggggattgcagttctatactcctggccccattcactccggcctctgatctgtgtctggctggagggctggagggaacagagctggagtggtgtcagaattatggattactggatggggtcaagggagccctagaaggggacaaaagttctccctgaggctctggggctaggatacagagggcagctggcaggaaggcc

SEQ ID NO: 4247 - DNA, 923 bp, Artificial sequence
  DNA replication origin
aggagttcaaggttccagcacagggcaagggaaggaagagcagggatttaacccttggccaaaaagctgacagctgtcagctaagcaaggccacatgttggacagtaagagggacccagcctgagggacaggccatgcccaccagcagctgcccacccctgaggacagggaccagggtcactgaccgtacagggaggaataaagaggcctccttctgcctctgccaggtaccgccgcttcctccgccctcgctaccgtgtggcctacaagacagtgaccgacatggagtggaggtgctgtcagggttatgggggcgatgactgtgctgagagtcccgctccagcgctggggcctgcgtcttccacaccacggcccctggcccggcctgcccgccccaacctctctggctccagtgcaggcagccccctcagtggactggggggagaaggtgagtgtgggagctgctgcgagggtggcaagttccaaatggtgatccaatgcaatgggaaatgtggggccaggctgctgggggagtcccccgtgctctatgccagagagaagagaggggcagaagggttagtgagatcgcagagattccctgcccgtgtgtgtgtgtgtgtgtgtgtgtgtgtgtgtgtgtgtgtatttgtgtgtctgtgtgagagagagggagagagcacgcaaaagatggagagactgagaaaaagaaggccaaaaaagagaaggtgctcgcacacgccccatgtggccaagatccttcaaacagctgcaggagaaaggggcattcctttgagaagcttggtccgtggggacagacagttgagactacaaatcctagcatgcattgcacctgactacagatcccagacccctccgtggcctctggagaccgcaggtcccagcatgcagcagttcctgtggct

SEQ ID NO: 4248 - DNA, 1733 bp, Artificial sequence
  DNA replication origin
tatcaagaaaaacaggaataggtagggtccattctgttcaactgctgggccatcccagcctttcacaccccagacagctataatagactcagctttagtctccagtactgcagtggggccaacattatccattagcctcctaatacccattaaccaaacacagtgactatcacagttcctcctcactttcctctgattttcccttatcggtcaggtagtacccaattccccttgtcaagttcagagtggaatgtcaagcctggggctgccagcgggggtcagggttggagggggcagtggcaaccctgactgcagcaagggtctcagtgcacatacctggtggcccgatggggccctcttgcccgtccttgcctggtgatcctggaggtccagcagggcctgggggtccctgcagcccaggaggccctgggggcccagcctctcctgcaggccctacagtgacaaaattgagttgaaggagggccataaaaggagtttccaatgggtaaggaaggtgggtggtggcttcatgaacagggagaagatggatggaacaggtggagctttgcaggctgagggggccatggggtcccttgctgcatatgctggatccctggctggcagagcaacatcctctctccacccacaggcctagtgagcagccagagggagggcgggagctaggaccttgcatcatctcttgcaggcaaactataacacctggaatactggctggggctgcaattcatgttgggaaaagcaaggagaaagcagatgagttggaagctgggctgggggagggagaagaaaaataaggggcttgaaaggggtcccctcatgccttttgtcccctcaccagtgaggtccttcaggctgagctggtgcagacggtcctccaggagctgcagggagctgttaagggcacccagccgcctgcccaggcccgcctgtcccccgaccagcttctccagcagggctgcctgcatctggctggtggtgttggtttcccggagcccagcccagagcccagccacgtgtctggaaaggccctcgcgcaggccctgcagtcccccagccacagtgtccaaccgttcacagacaccctcaagacggcccaatcgcccctctaagctggggcactggccggcctgtgcttgtccctcctctaggcctcggaagcgctcttcactctctgtagcatgctctgtggcctcctgctgcagcctgttaatctcagaaatgatacggtccttggttgcccccaggtcagccagatcagcgccctggccctccacagtggtctggagctcattcagtgagtcattgagggagctgaagctgagaataacctcagagagctctccttgcagggcctgcagggctgagcctgagctgcccccaaacacgctgaagccgtccaggggcccacggcttgggcccccaacacctggaccagccccaggaccccgaggaggcaacagggggcaggagcagcgctccacaccatcccgaaggcggcctagttcctcttggactccgccacaggccccacagccctcatccccatgggcctgcagcagcccctccagttggcctagccgggccgcagtgagattcagccgtagtgtgaactctgcagctgtctcatcctgggcatccacacgatcctggagccggcccacaacctcttgtaatccctccagcgtggcctgccgggcctcccccgctgcttc

SEQ ID NO: 4249 - DNA, 1564 bp, Artificial sequence
  DNA replication origin
gggcggccccgagcctccctgagccggcgcgccccgggcgtggggagaggccgctctgggcgcggtgccgctgcgggcccgggtgcggcgctcgcccagggctaggtgccccgtctcaggcgagaccccaggagcccgccgcccccgctgtctcttcagccgacgtagacacgtcgggcgggaccccagtctacgcgtgttcaagctctgggtccccatagagcagggccccgctgaagatggtgagcggctcctccgagtgcgccagctgccccatgaccaggtcgacgcagaccgtgtccccggcctgcagcggcaggatgaggctgaagacgcccagggtgcccgggctgggctggctctcggccaccggcttattctccaggccctcaggctcgtagccaccggagtctacgcgggccacgccctggttggagcgggacagcacggcctccactttctcgtgccggtgcccagtcagcaccgcgctcagcaagtagcgtccagccagtggcgctgtgaacacgcctggggacaaggatagcagtcaggggggccagggaagctccggggagcgcaccagaactcctggactgaggagggaccctctgggtcttttcacctcactggaatgtgagcggcagggaactgggggctttgttcactatgcattcccagcacttaaaacagtgcctgggcaggagcaggccccagtaaagatctgctgaatgaatgaatgactacttcttctccccactgcctgagaatgaataaatgaagaaagagccggggtctccccaaatcagagaatgaagattcacactgtcggaaaaggcaagaatgggaagatatcactgcacacctcacccatttctccaaccgttcaacccagcccctcccaggactacctgtctctggatcataatagcctccatcattgagcaggactctgtcgaaggggaccgtgcctggttcagaccggggcaaactcagagcagctgaaaatgccacttggggcacaggggctgctggtgccccctccactcctgagtgggaagggtggatgttaaaggggatgctcagggcagagtgccagcccccttcccctgctggatccccagcccagggctgcccgaggacctctatcctccaacccctagtcacttctccctccagaatcaaatgaaaggcactcaccctgttcaccttgaggacctgtgagaagaggaaagggagcagtgagaaataaagcagctctcactaagtcactcagcaaacatctgctgaggctctcctgttgtgctcggtgctacgtggacttcaaagcaggaattggggtatcaagaaaaacaggaataggtagggtccattctgttcaactgctgggccatcccagcctttcacaccccagacagctataatagactcagctttagtctccagtactgcagtggggccaacattatccattagcctcctaatacccattaaccaaacacagtgactatcacagttcctcctcactttcctctgattttcccttatcggtcaggtagtacccaat

SEQ ID NO: 4250 - DNA, 1535 bp, Artificial sequence
  DNA replication origin
cgattccctgggctccaggctcccccgcgcgggcgccgcccaccgccatactaaacgatcgaggaataaagacacttggtttttctaaaaaaaactaaacgaaccgttctgctacggtacggggtcgggggctgccgggcgtgcacagggcacggggcgggagagacgacggcctccggagaggaccccgggttccgcactgcgttcgccgcctccgcccggctcggggcggctcggggttggctcaggcagcaagcggcgcccgcccggctcctgcgacgtctcccccgtgtcacgcccgtttcgccggcgtccgccagggggcgctctgcgttcccgccacgtgaggctgcggcccacccggcgggtcctgctcctccgcggcggaggcgtggcctcggctgggactaaccggggcggggcggggcggggcggggcggggccgccgcgaccgcgggcttcaggcagggctgcagatgcgaggcccagctgtacctcgcgtgtcccgggtcgggagtcggagacgcaggtgcaggagagtgcggggcaagtagcgcattttctctttgcattctcgagatcgcttagccgcgctttaaaaaggtttgcatcagctgtgagtccatctgacaagcgaggaaactaaggctgagaagtgggaggcgttgccatctgcaggcccaggcaacctgctacgggaagaccggggaccaagacctctgggttggctttcctagacccgctcgggtcttcgggtgtcgcgaggaagggccctgctcctttcgttccctgcacccctggccgctgcaggtggctccctggaggaggagctcccacgcggaggaggagccagggcagctgggagcggggacaccatcctcctggataagaggcagaggccgggaggaaccccgtcagccgggcgggcaggaagctctgggagtagcctcatggaagagaagcagatcctgtgcgtggggctagtggtgctggacgtcatcagcctggtggacaagtaccctaaggaggactcggagataaggtaggggcgcccaggtcccctaggggaccccaggggctgctgcagtccagcatttgtgccagcgaccgaggctgcagagaccccgcagtgaggccctgagaacccggcttcaaggccggacccgcgccctctacccgggaatcctgggggggctcccagcatgacagaagagaggaaggaattgaggcctttaataagaagacccaggatttaatagcatcgtgttagccaatttccatttcaactcaggcatcaggtgtcaggtgtcaggcatcaggatccccattttactgataagtatagattcagagaccaaggggcttatccaggggcacacagctacctgcttctgctgtttctttttaaaccccaagcctatgcacttgcctctcatcaacatttacttctaacttatttatccacatatctcgcacctatttctgagaaagatttgaggtagcttacagtaaaaagtatgtacagttaaactgtt

SEQ ID NO: 4251 - DNA, 1716 bp, Artificial sequence
  DNA replication origin
ttacacatgctcacactcacgctcacaatgtcacacgcatgtgcacacccgcacaagcacacgagcgcactcacgagcacacgcggactcgcacacgcgcacatgcgcactcacgcacgcacacacgcgcacactcacacgggcgcgcgcagcccctccggccgcgggcgcagcgggggcgctggtggagctgcgaagggccaggtccggcgggcggggcggcggctggcactggctccggactctgcccggccagggcggcggctccagccgggagggcgacgtggagcggccacgtggagcggcccgggggaggctggcggcgggaggcgaggcgcgggcggcgcagcagccaggagcgcccacggagctggacccccagagccgcgcggcgccgcagcaggtgggtgacaccccgccccggccggccggagacccgagcccatcgccgtcagccagccagggccgcgcggggtaggtggcctccagcctctggtccagatcccgagagcgcagtccctctgcatcccctgcggctcagacgcggcgggagcagtggcccttgcccctgtgtaccctgagggcaggtggaggaagggactggagagcgagcctgaggctccttggtgtgaatttggggcttcgcagttccccaggcgcttcccccagccccgcattccgtgttccagcagtcctgggggaggggcagctggcgggagctttccccctcatccgacggggaagaaatggagcgctggggagggcccgaggctgtcgtccgcttgcaggtggccgagggaccagctcccgggtgtgggctcctctagccctgtagccgctgtctcctttcttgggggatgggtgctgggaggcacaagggcaccagagggataaattaagaattaagggagaggattctactcaaaattttagcttcccaacagttcgactctacaggagatggaactgccggcctgtgaggtgctaggttcctgtcctggaatgattcaagcagaggccatttgacagggttgctgaggaagaaatttttgctttggatgggaagttacccaggataaccctgcaaggcccctgccacagcccagaggctctgaaatacccaagcagcacctgcttggtgccaggcacctaccctaagttttctcattgcagcctccccaaacctttaggagacagataccgttatcctcatttttaaaatgcagatcccgaccaggagcagtggctcacgcctgtaatcccagcactttgggaggccgagacgggcggaacacgaagtcaggaaatcgataccatcctggttaacacggtgaaaccccgtctctgctaaaaatacaaaaaaaatttagccaggcgtggtggcaggcgcctgtagtcccagatactcgggaggctgaggcaggagaatggagaatggcgtgaacccgggaggcggagcttgctgtgagccgagatcgtgccattgcactccagcctgggcgacagagcgagactccgcctcaaaaaaaaaaaaaaaaaaaaattcagatcccagggctcagagaggttaagacacctgcctaggtcccacagtgagtagtatcagaggcaggatttgatcagaagtctaacctgtagagcgtgctctcctcccatgcactggtgcaaaggcttgaagaacactggggccggagggtcattgtgaatgtgtgagtg

SEQ ID NO: 4252 - DNA, 1543 bp, Artificial sequence
  DNA replication origin
acaggggcaagggccactgctcccgccgcgtctgagccgcaggggatgcagagggactgcgctctcgggatctggaccagaggctggaggccacctaccccgcgcggccctggctggctgacggcgatgggctcgggtctccggccggccggggcggggtgtcacccacctgctgcggcgccgcgcggctctgggggtccagctccgtgggcgctcctggctgctgcgccgcccgcgcctcgcctcccgccgccagcctcccccgggccgctccacgtggccgctccacgtcgccctcccggctggagccgccgccctggccgggcagagtccggagccagtgccagccgccgccccgcccgccggacctggcccttcgcagctccaccagcgcccccgctgcgcccgcggccggaggggctgcgcgcgcccgtgtgagtgtgcgcgtgtgtgcgtgcgtgagtgcgcatgtgcgcgtgtgcgagtccgcgtgtgctcgtgagtgcgctcgtgtgcttgtgcgggtgtgcacatgcgtgtgacattgtgagcgtgagtgtgagcatgtgtaaggatgcacgtgtgtgagcgtgcatgtgtgcgcggatgtgtgcgtgtgcctgtatgcacacatgtgagtacagagagaccaagagacagtgaggccagtgtgcatcagaagtatgtttaactgtgctcatgctttggttgccactttctctgcctgagggacccagatgtatgtgacaaaatggaacctaacttactgttagcatgtgcggttgtgactggcatgtgtggctctgtgtatgaggaatttgtgacacggtagggggtattttgtgtgactgtgcatccgtgtgatagtgtgggcttcaggggccgggcgtggtggctcacacctgtaatcccaccactttgggaggccaaggcgggtggatcacgaggtcaggagatggagaccatcctggttaacacagtgaaaccccgtctctactgaaaatacaaaaacattagccgggcatggtgacgggcgcctgtagtgtcagctactcgggaggctgaggcaggaggatggcatgaacctgggtggtggagcttgcagtgagccgagatcacgccactgcactccagcctgggtgacaaagcaagactgagactccgtctcaataaataaataaataaataaaaaataaatgatagtgtgggcttcagggtatggccaatgtgtgactgactgcccaggggtgtggcggtgcagagtgttagaggcatatgtattggggtgtcagggtgaactcttcctgagttgtttgtgacactccatcacagcgacactgtcatcacagcgacaagcccactctcatcctgtcctcctcccagtgatgaacactgcttgtcactgcctttttagatcacggattctgctggtttcggcaatacctctcctacctctggtcatttcaaaaaggtctccattttcttcaccgtcagagttcctcagggccctctcctcactttccatctgctcatgtgctcatct

SEQ ID NO: 4253 - DNA, 2100 bp, Artificial sequence
  DNA replication origin
ctgcgcggagggagccgcgagacaggtgcgcatgcgcagtgcgcgtctgcgagaccgacttggacggagccgagctgaggctcggcttcctgctgatggtcagggttttggcaactccccggtgtgagaggggtagggagtgctcccggcggcgacggggccgagttcaccagccgccggggcagtagtcgaaggcccggcgcggcatgtcctgggtgccgcggtgcgggcagtgaacgcgcgccgggcgggatgggccggcgccgggcgccagagctgtaccgggctccgttcccgttgtacgcgcttcaggtcgaccccagcactgggctgctcatcgctgcgggcggaggaggcgccgccaagacaggcataaagaatggcgtggtgagagcgcagggccactggggctgggtcttgctgcgggctggcggcgattccagggtggccggggggtcgcggggcgggccacactccagcttcgggccctgcccacttctgttgggaagacccgcttgcctgacgcccaggggcgaatttcagtcgagaactcagcgggcggaggagaggcttttaaggtaaagtgaaaactgcacacagctgcagagtcgccaggaacgcttcagctccgcctcagagcagctccaggggtcttatactggccttttccgggaggtcttgcctgccctctagcagcggcgagagtggtgcatttgggtttaggctaagttccttccctctcctgagcttcaccctgttctgtaaaatagaggtaataatcccagtcctgctcactgtgtagatttgtgaggcccaaatgagagaaaaaagactcgagaaacccttgtgaactagaacgtgcagaaagcaaaggggtaagacatcagactcttccctaaacgtgctctctgggcacccctgaacttgctcatccgggttccccctcccacagcactttctgcagctagagctgattaatgggcgcttgagtgcctccttgctgcactcccatgacacagagacacgggccaccatgaacttggcactggctggtgacatccttgctgcagggcaggatgcccactgtcagctcctgcgcttccaggcacatcaacagcagggcaacaaggcagagaaggccggtgaggagctccctctctacccccttggggaaagggttgaacgagtaaggtcactcttggtgtctctaaagaagtgggtctggaagtagggttttggtagcaagctagaagttgtatgggcacctgccatggagagaggggccagtactccttactgtagaagcctggaacctggccaagtgtttgtgttacaggttccaaggagcaggggcctcgacaaaggaagggagcagccccagcagagaagaaatgtggagcggaaacccagcacgaggggctagaactcagggtagagaatttgcaggcggtgcagacagactttagctccgatccactgcagaaagttgtgtgcttcaaccacgataataccctgcttgccactggaggaacagatggctacgtccgtgtctggaaggtgtgggtttgcagggttagggagggtgaatgtcagtagcaacaggatcaaaattgtgagaagttgaacgtggcatctgggaaacttgtgaatgaagcttgcattgaggggccattagaaggggtggcgtgggcatcagtcacagtgtacttgctggacacctgagttaaccatggtggttgtttggctacaggtgcccagcctggagaaggttctggagttcaaagcccacgaaggggagattgaagacctggctttagggcctgatggcaaggtgaggggctgggggtgggaggaggatggagaaaggagagaggaggtgcttatgctgcttgcccagtaagtggatcccctaactgtccatccttggaatctttattcctaactagttggtaaccgtgggccgggaccttaaggcctctgtgtggcagaaggatcagctggtgacacagctgcactggcaagaaaatggacccaccttttccagcacaccttaccgctaccaggcctgcaggtgtgaagactttgggtggtggctgaaag

SEQ ID NO: 4254 - DNA, 1212 bp, Artificial sequence
  DNA replication origin
tcctggtctgggagggtgtgcctgggactgggtcggcccgggcctgagctgctggaggctgagatgctggcaattgatgcccacaggcctgagtagccttgccctgaggccctgcttccttcggccttttctcgggcagcagatgcaaggccctggcctggccctgaggcaggcggaggccgaagccgatgcctatccggagtggcccagattcctggccctgcacacagggcagtagttgagggaaagcaagcagccggggtccagtcctgtacctggggagggggcaggaggggctgcggggccggaggcacaccaggcatataggatactccacgactggggcctggccggttctgcctagccacaggtgctgcaaaagcagtagccgcaggtcgtgtgcgatgcggcggtgccccagctggaccaccagggcctgggccagggcccctgggtccctgaactgtgcaggatccttctcgcttggcacgcatctctccaccactccaggggacccggacccagtgtccctgtactgatgccagcgccatgtctgcctgttagagtggagcctatgagaaggtgggctggggcctggggaagtgagtgtggagctatgcagttcctcggggtgggaaggggactggcaaggtgagtggggaagggaggagttctgaggctgggagggagaaaaggaaggggtcagagggggagaggggtacagccagtggttggagggagaggatgcacgtggacgggggagagagaggtagttctggtgaaagaaagtaggggaacttgggagagagggagaatagggatgtggagcaaagtcagaatttgagtcacaagagccgaattggaagccaggagagggggatgctggtggaggggaggagggacgacgggactgagtggaagagaacggtggttgagagggagggaggccctgatggggagagagaggctgtaggttgtgaggagaggagtccacaagttgtgagaagccccaagtggggcgcccagggagcactgaggtctgtggcagcacctggtccttgttttgaggcaacatcgccttgaatccagaaggaactggggcaacaagactagggataagagacctggcagagtcaggaccagtatctctgaggtcagctgtgcctgagaaatcaaggccaccttctgtgcgcagagcgtggctccagcctg

SEQ ID NO: 4255 - DNA, 865 bp, Artificial sequence
  DNA replication origin
tggtgaaagaaagtaggggaacttgggagagagggagaatagggatgtggagcaaagtcagaatttgagtcacaagagccgaattggaagccaggagagggggatgctggtggaggggaggagggacgacgggactgagtggaagagaacggtggttgagagggagggaggccctgatggggagagagaggctgtaggttgtgaggagaggagtccacaagttgtgagaagccccaagtggggcgcccagggagcactgaggtctgtggcagcacctggtccttgttttgaggcaacatcgccttgaatccagaaggaactggggcaacaagactagggataagagacctggcagagtcaggaccagtatctctgaggtcagctgtgcctgagaaatcaaggccaccttctgtgcgcagagcgtggctccagcctggtgtgggtgcaggtgctggtggcaggccaaggggatacccagccctccagcaccaggctctcagggtgttcaggcatgagcatgaatctaagcttggcttctcacttctttgcagtcaaccattgatgagggatgtgtggggatggagaatcacagctgcatcttgggagtggaggggcagcagcgattatctgggtggggcagagaggaagacaaagcccataggacctggagagaaaagagagaacccaagacattgggagaattggtccatttctggctctgcctcatatccccagttccaagctgaactcaccaagactttaaatccatgtcacctttgggatcaaaagaactggcaaaatgctccagggaaggtgagaagtggggaggagaggaataaggaggaagggagggtaggatggagtt

SEQ ID NO: 4256 - DNA, 1314 bp, Artificial sequence
  DNA replication origin
cagcgcgtcaggccctcttccccgggcgtggcctaagcggcccggtccagtcgccctggggctgcttgggggcttttcctgctcgtggagctctgcgctggtcttcatgcgccctagccctctttcggggatactggccgaccccctcttccttttcccctttagtgaaggcctcccccgtcgccgcgcggcttcccggagccgactgcagactccctcagcccggtgttccccgcgtccggacgccgaggtcgcggcttcgcagaaactcgggcccctccatccgccctcagtaaacatggcggcacggcgagcggggcgggcagggggcgggcagggggcggggcccccgcgggctcccggccagggctctcggccgggctctggctacccacgtgtggagaccgggcaggtgggcctggagagcgtgagccggtgccgagaggcaccggggagcggcgtctgagccggggcggggacaagggggcggggaggggcggagcgagccggcctccggcgtgggtctgagatcttaagtgcgagcggtaaggtggtggtctccgccgcgtagagggaagcgggaaaccgagaaagaacgagggtgagggtgatgagggaagggcaaacctcaaactccagcgggaggacacgagcctggatcgccccgggcacctagtcctcttcacctcaatgctgatagcgcatagcgtcccggagcctggcgaggaggtaggagcgggatagacgcttccctaactcattttctttgccttcccaggaaaagggagcgatgttgatctcaggaagcacaaagggaccttcctagctctgactgaaccacggaggtaagggagtgcgttgctgccccagggtgggccagcgccctgactgaagggcgccaggggatccctgctcccggcgcgacagtgttggttagggccagccagaaagctccttaaagccgacccaagtgatcatctcgagtagccgagccaggcttcccttccacattacccccatggtgtctgcctggaagttcctgaaaggtttacgtttagctggctggcaaattttctaaggtgttagtagctattagcattttaaggagggcccccaaagcctttcacaccttgaggaattataggccccaggacagattttgagggaatctttttggaacagttagtcctgcagtggtctcattgccttttgtaggagtcaatgcgatccactgcagtgtgtgaccaaagtgagttcaggtttttatttttatttttatttttattttgagacggagtctcgctctgtcgccca

SEQ ID NO: 4257 - DNA, 1373 bp, Artificial sequence
  DNA replication origin
gggatgtctggggccttctggctaaagacaattctgccaagtgggtgaactgagttttgagggaggtagggggaacatttggtgcttgtacagagaactgaaatactggtagattaatttcttgaatttccaaagccccatccaagacttagaatctgggcgtgtatgattctggatgtgtttccagaggagatggcgtggtgaaggaggctgtgaaaccgatcctcattcattcaatgaggtgcaccaggcagagcacacataatgaagcctggtctggtgggaaagacagattgtaacaaatggcttactacataaggacaggttgatgctaggagggttatgaacaaagcactttggggtgcagggaagggagcactccctcacagcgggctcggagaacttcacagagaaaggtatgtttaaggagatgagacctagttggagaagggtgttccagacatgtagaatgacaaagacgaggtttgtggcttggagtctaagcgtgaagtgtcaggggagggctgaggaggaaagtgatgggctcaaaggaacataaagggagatacactgactgcttgaacaaatatctcctgagcactgagatgaccttgctgatgggaggaagagaggagaagagaggaaatggaggggtctagaacaaaccaggccagagcttccctggaggggcaggtaggttaggaaatgcctttcagaaaatgctgcaggattcggtgactaatggtcatatgagtgaagatggactggagttggagatgtgagtctgaagcgcagaggctgggtggctttgggggcagtgggcaacattcattccctggccttgtaaggcacagcacagccagtcatcaaggtggccacccatcaacaggctgctcccttttgttctgcataatttgggcactaaggaagcctggctgttggtgtgtgggggtgtgggcatgtggggtggctacatgctgtttagagacaaggaaaggctgtttcctctccctggccctccgaaacccccaaccaacaaccgatattgagcggggaagaggggtgacgtagcaggggctgaaccaaaatcaaaaggacacctgaagagatgccaggcctacggcagagcccccaccgcgtctctgcaggcccctgcaggaaggggtccagctctcttctgctcaccccctcccccaacccagcttgaaggcccccacccaaagaaagagcgagaagcacacagaagcaccacgtcagagacaaagggaaagggactaggagagaaacagaaagattgagagaggtgggggaagagaaaaagccggagaccctgccaaattccggagacaaacggacggtcagccgacagacaa

SEQ ID NO: 4258 - DNA, 1714 bp, Artificial sequence
  DNA replication origin
gtgtggccagaggggatgaagcggggtgcagcggagcgagggacccgcggtgcgctggggcggccgccggggcccgcgccgagagagacaacgaaatggacggagggtagtagggtggcgcccccgggccgagggccagcccaggtctgtcctacctcttcaaacgcaggctgcctccggcgccaccgcggtcccgggggctcaccaggcgagtggtctccaagcccccagcggctggagagggctccatgttcccggtgccccgaccgtctaggccccaccgaggaagagagaggccgggccggccccgcgccaagtccgagcagcccgccgacccccgggatccccgcagggcggcggggccaccagagtggagcgaactgcagcgactgtggcgcgcggagtccgaactgcagatcccgctgccgccggagccccgccccgcgtggggcgagctccccaagctccgcctccaggctccccggcctctccccacccttaagccccgcccccactgccaaagccccatttccccgcgccagagcccgggagcgccccgccacccgagttctggagaactcctcatctccacagccccgtcccccaggcgagctagccccacctctgcacacagtcccgcccaccggttccaagcctcgctcctgaagcccaagaacctcacgaccaaccttcgcccaacgaccaccactctgtgcatgcctgcgcgggggtgtcgcccaccacgccgtcaccctgtggccgcaaccctcacgcggaggcagaaacaggagcggacccattacctatctccagagaaccagaaagaacatgaggtgagcggtgacacagggagattccagggactccagaaacccctttacggagaatctggggtcggaattcacgagcccagtctgctgccaatcactgtaccgcgaatgatcatttatttttatacagaaacattgggtgacaagcttcctgctctccttcaacccactgttatccctgcttttcaaatgagtaaactgagacccagaggaagaagagtccaaggtcatgcaggctgtgaataaagggcccggcctggacccccatcctctttccctccccggctctggacgccgcactggcaactggagagcgctcacagttctcttacgggcgggggtccagtgaagtcgagccgcctatctggtgtcacggccactgtttatggagaggggctgaggggcagcggggcagcgtgtcagctagtgattcccatcctccacacctgcagcgccctcctggacattaccgcattctgcctcatttgggggaaactaaaacccaggggagggagcgacttacagcaaagtcggtggccgagcctcaagtcgaagcttcaaatgctcaatgttctctcccctcgcacctgccgccactgtagaatgggagggggtgggaagaggattgtgcactcgaagctgtgacagtctgtgaagaggagggtccgtaggaggaggggagcgagtgagcagggatggggaagcgtggagggtgggaatggttagtgagcccaggcaagaaactcatcagccgcatccttcagaacacactgggcgtcctgaacttaggcttctggggacagacacctaccctcgatattgttattccaacgagcccaagagtgcacttgcaaaaaaacaaaacaaaacaaaacaaaaacggg

SEQ ID NO: 4259 - DNA, 740 bp, Artificial sequence
  DNA replication origin
aggactcagaggctggagaaggaagagaaaaggcgttgctgtgggaaagacctggcaaggaaaaggcagcggaaccccagagagcagggtagacgcctgcggcccaggagaaccgagcaaggcaaggagctcaaagggagagctctgagtgtgcagggcacctctggccctgtgccgactcctcacctgggtctggccctttacctgggagtcgttctcttaagccaggtgggtgcccttcatccttttgggtgtgaaacttcacaccggccgggtccagcagttgactgcgcttgtgcgcagcgtcgacgctgagggtctgggcaggtcgttttttggcgcccccggaagcactgggtggggaggccacattggccctgggacttatttcgcgcgcagggaagcgagagcggagggcttagcaggcctgcggcccaaggcagcgtaggagcgttgctgccaggccttggggcagggattcccaccgagcccctcttccccagcaggagggcaccacccatcttgatggcccaactcactccaggaaacacaatgggtttgctgaccgtggcggatgagaggtatggctgctgcatgcccttcttaagaggtgtgttaccttcccagttgtcttcaggacttagggctctccgcttggtccctccttctcttccacccggaaacacctccacaacctggaagacccaactcatatgcccctgttcctgacactccatcat

SEQ ID NO: 4260 - DNA, 2619 bp, Artificial sequence
  DNA replication origin
gagtgagctcagcgatggcatcgcgatgctggtggcaggcaatgaccgcgtgcaagcagtgatcacacagatggaggaggtgtgccagactatcgaggtgagcctgggctggagggagggaggaacagcaactggctagcctgcggaccccgggctcccaagagaactgctcctctctgacctctcgccaaactggtctgaaagtttctggggtcctgggagtggtgggaggtgcttttgccaggctgctgggtgtgcattccagctttgccgcaaaactttaatccagttatttaacttctctgtgctttggttttgtttaacctcataaaacagtgatgatgataatgatacaccagctacctcatgggttctttttgagaattaaatggaataatgcaaataaaaaccagggctagggatatagacagcaatcagtgaagctactttaaagcattgtgtttttattatggaaaagatctgggctgggttctggctcagccactaactcacagtgtcactacggatgggtcactttctgtgttggttctctgtgagtaccctgtgctttcccagccaccgggtctcagccacgccttccctcatccttgctccccatcttttaggacaatagccggaggcagaagcagttgttaaaccagaggtttgagagcctgtgcgcagtgctggaggagcgcaagggtgagctgctgcaggcgctggcccgggagcaagaggagaagctgcagcgcgtccgcggcctcatccgtcagtatggcgaccacctggaggcctcctctaagctggtggagtctgccatccagtccatggaagagccacaaatggcgctgtatctccaggtgggctctaggggagggtggcagcgctgcacagtggctggagtcagggccttggtacctggagtcccgggttcaagtcttgtctcttgcacctgcttgcccctacgaccttgggcaagtcaccccctctgagttcgttttctgcttaacgaattgggacgtgccttcccacctaccccgcaggactgtggtgagattcagaaatgggactttgcccaggttggcccagtgcttactctcaccctccttttcttccctgcagcaggccaaggagctgatcaataagtgagtaggcatagcgggaagggaaaggagggggctgcactgctccactggctggggtggggcttgagagtgctggggcattgccagctgagtccgtgtggccactgcagggtcggggccatgtcgaaggtggagctggcagggcggccggagccaggctatgagagcatggagcaattcaccgtaagggtggagcacgtggccgaaatgctgcggaccatcgacttccagccaggtgaaggaggtggccgagggccgctgagacgggttcggaccctctgtgtggggggtgcggcgggcacgatggccgtaaaggcagggactccacctcaccaggccttccttgggctcaggcgcttccggggaggaagaggaggtggccccagacggagaggagggcagcgcggggccggaggaagagcggccggatgggccttaaggtgagagccgcccgatgggccttaaggtgagagcggcctgaggggcttggggtggggcctggctggtgtgctcgcgtcccctcccccagtgattgccctccctgcgggtagcgtggagcccccactcctcggtgcaacccaaccccggagccacaaaggcgcgccccctagggcggaaaagtacactttcctcctcacccgctgttcctctggggtgctgggagggcaggcaaggcaggctgagtagaggagaaacccacgtggcgggggacggagtgagcggggctcgagctgcctcgtgccttcgcagcacccgcccaccgagccttctttcccgggcacaggcctgcgccgacccgaccctgctcgagagcccgcgctagagtcggggaggatctgcgcagagaccgcagcatcacccaaatcggcgccggccccgggaggatctcaataaagaactcgagcgtcccagacccgtatctcctttcgctgcccaaccccgcagcctgggcttcgaaggcgacccgcccaccatcctgcccttcccagaacctgagaccgtctggggggcggaagccaaatgaacccctattgggcacctctgtgatgccaggagcgaactggtgagcccagcgccctgggaagagggccgagggcggggcggtggtgccgggacctctgaggtcctggggatttggggacccttggggtccacatgcacctggctgacctggctgaaagccgctgtctcggagccccccacagcattttgttcccctcccgctggcccgggggccccaccttcccacgggttcccacgctgctgtgactgccctgcctctacgacaaaagccaacgggtcttcagtacttttattaaaaaatagtcacgcagacagtgccctggtggctctgccccgcatcccaactctggggtgggggaaaggggtcaacgttttcgcagccccaaaccgggccatcacttgcccaccgagtcgaatatgatgcggttctgctcggcgcgctcccgctggc

SEQ ID NO: 4261 - DNA, 1273 bp, Artificial sequence
  DNA replication origin
tccagcagggtccgcagcaggtgaaaggtgaggtcaatggacagagaagggttgtcccgccgcggccgctcgcctgccgtcccgagtcccaatcggccgggccccgcgcggcgcgggaagcgctccgccagcagcaagaggagcgcgcgggccccgccaccctggttccgtgccccggggctccagcgcagactcgggtcctggaccccggccgcctcggggctcctctggctgctcccagggcacagctgtaccaggagcagcagcgcggccagcagcgctgcgcgtcccgcctgcctcatggtgccgccggccctggacacacaggggcagcgcagggtgaggtgcgcctgggacagctgcaggccgccgctcccctccccgcgctcgcccggcgacccctccggccgccgcccaatgcccgcagcctgccctccagccccagccactgcgccagtgctgttccatcccttccacccagcctccctccccggaggagcgtggtggctgagctgagcggagtcctggtgcagggggaggctgggcggacgctctgagccactcacaggttgtcggcgagcgtctgtacggtccaagattgagctccagtctctgtccctcggggcaggctgaagacgccttggggaacacagggtctgtcccggggctgtcgccagccttatatagtgccaggacagctccgactgacgtcagcgaagaacatgcactgattgtagaagcaatgacagccacagcttcgagtctgacggctggcgggcccccggaggggcgcacctccctacaccagccttcgtgcccctggggctagcgctggaagcagcactggacgcaggaaagcgagaagccggctggggcgtaaagactgctctgggacccacgggagtccctcgccccgcttagaacagccagcaatgactagggccgtccccagaccagactagtccgggtcgcgtgttctgacacacgaaagggaggcgggaccgtgaggctgtccatggtgctgaccccgtcctctgcctctagaagtggccagaaatgtgagaacgctgtgccgctggaacccactgcctccctgcagctatcagttctgcaaatgcaggcatcaggagtccaccgctggcactcagccaacacagtgggacccactgagaggcagtctgccacaaccaaagtctcccagcattcttatctttttccagccccaggatccaaattgtagggctgtctgacaggcaccatgtaacagagggtc

SEQ ID NO: 4262 - DNA, 1256 bp, Artificial sequence
  DNA replication origin
aggtcacagatcaacaggatcccaaggcagaagaatttttcttagtgcagaacaaaatgaaaagtctcccatgtctacttctttctacagagacacggcaaccatccgatttctcaatcttttccccacctttcccgcctttctattccacaaagccgccattgtcatcctggcccgttctcaatgagctgttgggcacacctcccagacggggtggtggccgggcagaggggctcctcacttcccagtaggggcggccgggcagaggcgcccctcacctcccggacggggcggctggccgggcagggggctgacccccccacctccctcccggacggggcggctggccgggcggggggctgaccccccacctccctcccggacggggtggctgccgggcggagatgctcctcacttcccagatggggtggctcctcacttctcagacggggcggccgggcagagacgctcctcacctcccagacggggtcgcggccgggcagaggcgctcctcacatcccagatggggcggcggggcagaggcgctccccacatctcagacgatgggcggccgggcagagacgctcctcacttcctagatgtgatggcggctgggaagaggcactcctcacttcctagatgggatggcggccgggcggagacgctcctcactttccagactgggcagccaggcagaggggctcctcacatcccagacgatgggcggccaggcagagacactcctcacttcccagacggggtggcggctgggcagaggctgcaatctcggcactttgggaggccaaggcaggcggctgggaggtgtaggttgtagcgagccgagatcacgccactgcactccagcctgggcaccattgagcactgagtgaacgagactccgtctgcaatcccggcacctcgggaggccgaggctggcggatcactcgcggttaggggctggagaccggcccggccaacacagcgaaaccccgtctccaccaaaaccagtcaggcgtggcagcgcgtgcctgcaatcgcaggcactcggcaggctgaggcaggagaatcaggcagggaggttgcagtgagccgagatggcagcagtacagtccagcttcggctccacatgagagggagaccatggaaagagagggagaccgtgggtagaggtagaggtagagaggtagagaggtagagaggtggaggtagaggtagagcagtttaatggtcactactttcaatggtgtaggatgagt

SEQ ID NO: 4263 - DNA, 913 bp, Artificial sequence
  DNA replication origin
aggagcgtctccgcccggccgccatcccatctaggaagtgaggagtgcctcttcccagccgccatcacatctaggaagtgaggagcgtctctgcccggccgcccatcgtctgagatgtggggagcgcctctgccccgccgccccatctgggatgtgaggagcgcctctgcccggccgcgaccccgtctgggaggtgaggagcgtctctgcccggccgccccgtctgagaagtgaggagccaccccatctgggaagtgaggagcatctccgcccggcagccaccccgtccgggagggaggtggggggtcagccccccgcccggccagccgccccgtccgggagggaggtgggggggtcagccccctgcccggccagccgccccgtccgggaggtgaggggcgcctctgcccggccgcccctactgggaagtgaggagcccctctgcccggccaccaccccgtctgggaggtgtgcccaacagctcattgagaacgggccaggatgacaatggcggctttgtggaatagaaaggcgggaaaggtggggaaaagattgagaaatcggatggttgccgtgtctctgtagaaagaagtagacatgggagacttttcattttgttctgcactaagaaaaattcttctgccttgggatcctgttgatctgtgaccttacccccaaccctgtgctctctgaaacatgtgctgtgtccactcagggttaaatggattaagggcggtgcaagatgtgctttgttaaacagatgcttgaaggcagcatgctcgttaagagtcatcaccaatccctaatctcaagtaatcagggacacaaacactgcggaaggccgcagggtcctctgcctaggaaaaccagagacctttgttcacttgtttatctgctgaccttccctccactg

SEQ ID NO: 4264 - DNA, 1178 bp, Artificial sequence
  DNA replication origin
tgaacccttaaaggaaggaaagggctttataaagtgcacagttaatagctaagtctgttcacaaaatatcttaggacttaaagggactttgcagatcaaagaatccatctttcagttgtagaaactgaggcccaaagaaatcagtttctacaggcctcatgcctgtaatctcagcattttgggaggcaaggtgggtggatcacctgaggtcaggagtttgagaccagcctggccaacatagtgaaacccctctctactaaaaatacaaaaattagctgggtgtggaggcagccgcctgtaatcccagctactcaggaggctgaggaaggagaatcgcttgaacccaggaggcagaggttgcagtgagccgagatcgtgccactgcactccagcctgggcaacaagagagaaactccgtcccaaaaaaagatatcaggtaacttgttcagggttgcacaactaattatcagtggagctctactgagttaaatagagtttaagatctggtaaggaaggaggagaaacattgcatcacagatacataacgataattggcacagctaaacacactgaaatgagccgaagaacacaaaaggaaatcggtgaatcgtttgtataagcagggaaaagaatttcaagttgccgctcagatgacagaaggaatgtgctttgacagcctgggtggaggtagtggggggaggggttggtttgtccatgcaggggtaaaggctactagagcagtaagactggacagaaaaccagaatataagaacaggaaggagcagttgttgcgcggacattaagcttcttagggagttcccggaaatgtcagacaagataaaccagggccctaccctgtggcagtgattaaaggggaactacagcctacgggaacaagaagagcgggtaaagggagacactgatgtccacgtgtagggaagggcttgaagctgtctcaaggcaggggtgctagtcccacctgctcgtgcagccccaggagctggctgtagcgcacccgacagtgcaggactccattcacgtgaatgttataggcctgaggacacaaaagtagtcaagcattttagggttgcggtctgcgcaacccccctgagaaccctggccggaagttgcctggcaactcgccggagtaacgcgctaatctcccgagggatagttcg

SEQ ID NO: 4265 - DNA, 873 bp, Artificial sequence
  DNA replication origin
aagtgcctcagtcaaggcaaggtcccctggtccatatgggcccccccgcccatggggttgggctggtccttatagtgcctacgttagtctgtgtggagcccctggccagcgggggagaaaaaggtggcttctggtccgtctgtataaaacatggggaagaaggacctagttcaggatgagtctgtgtggacagcccggctgccagcagtccccagggctggtgggccccgagagctcaaaacagagggtgggctatgaggtggggcccagccctcagaggcagagagaccaggccctcctgccccaccgtggccatgcaccttctggtggcgcttgtagttgtcccagtggcccgtggtataggcgcaggtggcacagcggaagggcttctcgcctgtgtgccgcagcatgtgacgtttgaggttcatgctctggttgcagctgtagttgcaaaggctacaccgaaaaggtttgtcaccagagtggatgcgaccatgacgcttgaggttggccagattgccacaggcataagggcagagggggcacttgtagggcttctctcctgtatggacgcgctggtgccgtttcaggttatccagatgagcagaggcataaggacagcgggcgcagcggaagggcttctcaccactgtgtgtcttcatgtgccgggccaggtggttgggatagtgagtggcaaaggggcagaggctacaggcaaagcctttgtcactggggccctggggccccccactggcaccccctccagcctctcctcgcatgcagcgcccacacatggcagctcccagccgactaccctcaccctcctccagctcttgtccacagccccggcaggtccaagggaatagcagctct

SEQ ID NO: 4266 - DNA, 1485 bp, Artificial sequence
  DNA replication origin
cccctcctgcagccagaaatgatctagttcccccagggacaggttgggaccggtctggctggcctgaagcctggagtcgggcaggacgcctcctgcgctgctccctggccggctccccgctgccgctgattggcttgctccccgcctcgtcacaatcacttcccggtcacgccattgaggctcccgccgcggccgcttcccacggactacgcgtcccgtgcgtctctgcggcggcggaagcggaagcgagtacggaggtaccagctggtctccgtaggggggtagggggctccatgaatggaagcggcggcggcggcgggagcggcctgagctgggcgccggggccagggccgggggctgcccagggcccgcgccgctgcatgggggcggcccgcgggccctgagaggaagggcagacaggcgggccgagataggaggggcggggtcgggcggccgcaggccggaggcgcgtcgggctggagccggtcacgatgccccgaaggaagcaaagccacccgcagcccgtgaaatgcgagggggtcaaaggtcaggggtcaggggccttgaggggagaggagcgggggtggggtcagtggagtgggctcaggtcagggtggagggggactcctgagggatgaagtgggcgatccagactcctagcttcccaccgaggcactaagggaatcagagtgggtcagcgagtacgggaagtgtggtccacgagggctggttcctgagggagaatccacaagccccctcccctcttcagtggatactgaagactccctcgacgaaggacccggggccctggtattggagagtgatttgctactaggccaggatctggagtttgaggaggaagaggaagaggaggaaggcgacggcaacagtgaccagctcatgggcttcgagagagactcggaaggtgggttttcgggtcttggttaaggattagcggccgctggagaccccagcccttcaggaggcaggttaggtgaacagaacaccatttcctgccacaaccgagggctggtttagtttacatttgagctagatgacttcatttgtttaatggtccaatcacttccatcactttgttgaggtgaagttctgaggcctggtcaaaggtgataggaataggagggtgggtgaatcacatggagcaactgattaaaagtaaatgccctgtctctctccctagcccattccttatgtgtatttacttttaagagaggttcagggaagcaaactctctgtaaatcattcaacccagtatttaggtctaatctaactccctttcacctgcagcgtaagctccttttgtattgagaggttttagtttctgtctttatccttccatgtccctcttccctgtgatcttagcatcaccctaccctaatttgctgcactacccatccacttatgcaagatgttttttgaaagtcattgaggggatccatgtaaatatctgttctttaggcaggc

SEQ ID NO: 4267 - DNA, 1060 bp, Artificial sequence
  DNA replication origin
cagcccccggccctggccccggcgcccagctcaggccgctcccgccgccgccgccgcttccattcatggagccccctacccccctacggagaccagctggtacctccgtactcgcttccgcttccgccgccgcagagacgcacgggacgcgtagtccgtgggaagcggccgcggcgggagcctcaatggcgtgaccgggaagtgattgtgacgaggcggggagcaagccaatcagcggcagcggggagccggccagggagcagcgcaggaggcgtcctgcccgactccaggcttcaggccagccagaccggtcccaacctgtccctgggggaactagatcatttctggctgcaggagggggcgaggggcagccgcgacgcccgccaggccggcctaccagcagctcgctctgggctctcctatacacgcgcaggacacacacgagcacacgcacacactcacatgggggctcgccacatgctacagatgggaccaagtcgggggccacggcagcagaaaaaaaaggacacgatgcgtacgattaggttttggcctttagtctgaaaaagtgttgattgaaagtgtacaacagagagcgggtgcaagcggccgagggccatggagccgccaataaaaaagaatgtccttaaataaagttcacagagtaaaaaccagaaccgccagtccttccctccaacacaacagagcacaggcacagaaccggtgatgagcccgaggagcagaggcggctgggaaggacagcagaggctcccggctgcagtgtggagggagagccctctttggaatgggcggagtgaagccacccagctccccctgcacacctcatacccactgctaaggctaaaggaaaaagacaaaactcagtctcaggtccggagggctcagaaaacagtctaggtgggcaggggtctggatgactgctagtctcgcttggccttcttcttcttgtcgctgttgccattttcttcagccccctcagtagagagcacctcctctagttttcgcttgccactctctggctggagctctgctgtgtttc

SEQ ID NO: 4268 - DNA, 1251 bp, Artificial sequence
  DNA replication origin
cgagaggacggaaggatcggcctccgaggcccgggacggtgggacccgccagtcgggtgctgaaggcggccctgctcactcagtagcccaggcccgatcgggccctgcctgctggagccgaggggccgcttcggccccgcagtcgctgcttagccctccctggcgtctctggcttggcggcggcgccccgggattctgcgggcgcgggtcgggaggccctggcgttcgcttggaactccggctgcgagaggcggggcccggcgggtgggggcgggggcgggggcggcggtcgcggcccggcggcctgcggaagctcggcggcctggcctggcctgctcgcggggaggtgcgcagactgcgcgggggcgtggcctgcgcccctgactgcgctgtcggtccggcctttgatgaggtggccgccgctggctccctgggccccagcctggttcccgcgcgggccgcggctgccttccagacgcagggcatgcgacctgttggagtgtgaaattctaggggccgggttcctccccagagcggttttatttccgactggactgtgctgcgggtctcagaggccctctggtccgttcagggtgaggacagctgagaggcctgggcccgtgagctcttgcagaggagttgacacgcagaggggctgctgtccaataaacgaaagtgtcggggaaaaactttgcagggcgatctgcattactccaaagtgaacacactgcatgtctcagggtggctggaggcggcgagaatccccttatgggagtatatgagcttttccatgtgttatctctttaaaacctctcagcggctccgagacaaaactcccagtgtcgcagaggtttcttcatcaataggagtagtgctggagaatcttgggcactgccctcattttgcctgcgaaggaaaaattaggaagggataaaaagtcacaaaaattaggaaggtgggggggataagcaaattccaagggcatctatctctgatgaagggttggtgtctcctgtggtgccctactgtggattagttatttgtgtcctcggtccagaagtttctctggagcccattggctacagctttcctgtattagaattctactgttatttcctactgtagtctggctgggaattttatttagttgttcagattttagatgcattcagtgaatgcagctgctcaaggaagtaactaatagtgtcttaccattttcttagctacttttcagaagaaggaacatgatct

SEQ ID NO: 4269 - DNA, 2417 bp, Artificial sequence
  DNA replication origin
ccgcgctcaccagcagccccgagccgacagagatgacattggctacggtgtactccggcgtgacagcgccgcggggattggccacgtgccgcaggacggtgccatgcagcacggcccccagcagcaggttcacgtggcccaccaagatcagcgcgaggcccacacgcatcagccgcctgggcccccgggcggcgtctgcaaagcacgggggagggcagggttgagtcgggcggggaggggagaggcggctcgcggcgggttaaccgcgggcagtaggacggggcaagggtagccccagggtaaggagacgagacgccagggcccggaagttaccgaaagcgcagagactgcagcgcctcatcccgtccgccgcgccagccgcagggccgctgtacctgggcccggccccgccccaacctgggccccgcctccgtcccgggtccccctcccacctgggccccgcctccgccccgggcccgctccccctggcgggaaaggcgcgaacacacgacgcttttagcaaaaagtagacttttattacagcagcaactgaggcgaatcgaatggccccccagggccaccactgcagcaccacctttctctcccgccccggccgccccagcgggattgtagaattcggctcccctagtgcccgtgggcctcctttccacacaggctgggcgggagccggcagatcagcgactagcccccaactagaaggcggctgctgagaaggcccaggcccacgtctgtgcaaaacaagtaaacaaagtgcagaggggaggaagagaggggaggggaaaggatgatgctcagaaccagggagcccccccagccctcctgaataataaaggagggaaggggcttcacagggtaatactgactggggggaagggacaggagggctgcagcacgtccagggacagccacagcgcagatcagggcctggcccgagtgagctctaagaggagacggtgacagcggctgagttgagggtactgttcctggcaaaattgaacttgttcaaggtctcttctagcagagaagtcaaccggctctggtcagcctgggggagaagagctcagtaagatgggggctgagagaagagaaggcatgggggcagccagggcagatgaaggcagaaacctcacctcactaatgaagcccagctgcaccagctcagccgccaactcggggatattctcatctgacaaagaaacaggagggggtgagtacagtacgggactgagggacctggggcccttcagacagccccactagggctaaactgtcagtcagatccacccactgctttagggtctaagatagtcattctatgtgagtcaatgtgttactgccttgtcacctcccccacccctgaatatgtccctaaaagataaggctcatagactctccatcctctgagggaaaggagagactcacttggcatcaggtcacagctcaggtgccggttcagtttgtcctccaacttcagcagaagtgtcagctggagaataggacagtcagaaaatgagacttttcttccctaccctctggctactagccctgcgcaaccctagccctgagccttacgtggtgtttgactccctcctccaccgactcaatgttgcactgcatcagcaccacctagggagggaagagagggtcactctagagacctgtccataaaaaacccaatacctagacgtctttcgagcccatagggcatggctgctagggagcattttctctaaaggatagagccttatttgagatgtcctctctcccttccaccacaaccatggagacaatccacacccacacagcccccaccttgcgagtctccacctcagctggttcaggtgtcggagtcttgacagaggggggcacgacaggtgatgtcacctcctcctgctgtggctgctggggccgaggcagcccaaaggctgtcagaggatagatcccattcctggagggagatgaagacaggtcacatgggctctgtgaacgccttaggatacccaaccccgcctgcttcctcaagaaagcctgcttctcactctgctctcacctgacatcttcaaggaatttatctaattccagagctggtgactgagagtacctggacgagaaaagagaaaggagatggaaggaaagaaacaagcaaaatagcaaattcaagcattcccagagaatggacagtttacagagcctcaagagtggtcgtgaccaatctgcccctttcagaccctctcagttactcacaaagtctgaactggttctcttcctggtcctgcagggatttcagccagtacggcactagtatccatgtttttggtgatctcctctagagcgttctctgggatcatgtctggagggcatgatggagtgggatattatgaagggatagtcagatt

SEQ ID NO: 4270 - DNA, 1216 bp, Artificial sequence
  DNA replication origin
gctttcggtaacttccgggccctggcgtctcgtctccttaccctggggctacccttgccccgtcctactgcccgcggttaacccgccgcgagccgcctctcccctccccgcccgactcaaccctgccctcccccgtgctttgcagacgccgcccgggggcccaggcggctgatgcgtgtgggcctcgcgctgatcttggtgggccacgtgaacctgctgctgggggccgtgctgcatggcaccgtcctgcggcacgtggccaatccccgcggcgctgtcacgccggagtacaccgtagccaatgtcatctctgtcggctcggggctgctggtgagcgcggcaggcgacccgggcgggggccgggctcccggagagcccagcaggccaaaggctttgtgtcttccacagagcgtttccgtgggacttgtggccctcctggcgtccaggaaccttcttcgccctccactggtgagagggacttccctggagcttttaacgagtaggcttgagtcagggaaatgggggctgactgagcttggtctttcaatagattggaggagcctcagagaaactgggtgtctagtcactgggagagttagccaggcccaggctgctcaccctgatctcctgtccctgccagcactgggtcctgctggcactagctctggtgaacctgctcttgtccgttgcctgctccctgggcctccttcttgctgtgtcactcactgtggccaacggtggccgccgccttattgctgactgccacccaggactgctggatcctctggtaccactggatgaggggccgggacatactgactgcccctttgaccccacaagaatctatgtgagcacattctcttccttcttgtggtctacaaagccttggtcctgcccttttaatttcccctatttgctgcacttgccctactccctcctactccccatccttcttgcttttcaggatacagccttggctctctggatcccttctttgctcatgtctgcaggggaggctgctctatctggttactgctgtgtggctgcactcactctacgtggagttgggccctgcaggaaggacggacttcaggggcaggtaaggaaggcaaacaggaagggttcattccacagagactggctgtgttgaaaagatgctgaccggccgggtgcggaggctcacacctgtaatcccagcactttgggaggctgaggc

SEQ ID NO: 4271 - DNA, 2068 bp, Artificial sequence
  DNA replication origin
ggagggtcgtgggaggagccccgagaggacgggagtgagggggcgggaggggaatgacggcggcgagaaccccggctgggcggggcgggcccgcgcgtcccggccgggctgcggcggagcgagcggggccagcgctgcagaaggcggcggctggctctccgggacggtcacatcccgctgcaggggcgggcggaggccgccgcactgcctcccgcaccggggacccaggccagcgtccgggcaacgccccctgctcccggacagactccgtggcccgctcgagccctgggggctccgcagacccgcgcccgctccgcccgcagctcggccccgcgctgcccgcgtcgccgggcccgcgccgggatggggtaggggcagcgccaccgagtcgggcgatgggccgccctctgggcaccgagcagccccccgaggcctgaccaaccgcgaggaccggcggaggtgggtgtgggcagggcggaccgcactctggggccgcccgggcaatgcgggggcgggagggcgtagagaaaatagggctgttgtgagctgtggggagcccaggagagctgctgccccccgacctccgtgcgttctgggcagtccttgaccccccacaactcctgccatctccaggagccccgcctggatgtcaagcggatgccaagcggatgccacagttccccccccagcggactccgtggggacatggcttcgctggtgcccctttccccatatctaagccccacggtcctcctgctggtcagctgtgacctgggcttcgtgcgagcaggtaagtaaaggggaacggggctgagggtcaaccacagctagtcaatgggtgaaacctgttaaacaccctggctcccgcagaccggcctccctctcctgtgaatgtgacggtcactcacctcagagccaactcggccactgtgtcctgggacgtcccagaaggcaacatcgtcattggctactccatttcccagcaagtatgaatcacccttctgctcccccaacctgtgtccttggatttcggcacatttcttcacttaagtgggggggatctggaagctggcgtatcctggctcaggctgcccttttcacgctactcccccggagtgcttggatgttgaagagtctctggttgagccttgtggcctggcactggggtgaggctgtcctcctctcccctcatctccctgcagcggcagaatggccccgggcagcgtgtgattcgggaggtgaacaccaccacccgggcctgtgccctctggggcctggctgaagacagtgactacacagtgcaggtcaggagcatcggccttcggggagagagtcccccagggccccgggtgcacttccgaactctcaagggttctgaccggctaccttcaaacagttcaagcccaggtgaggatctgtgctattggattctctggctgcttacctggcttgcagcctcttacttacttccccaagacaagcaacagactagctgagttgaataggatgatttaattcattgtactgccaggaaaggaaagaaaagcaggtgggaaggggattgggtatagacaggctggtattgagttgtttgggggaaggccttttaagcttcctgttacccaacttcacatcagctgcagcctgcatgagtgagtaattaacctgcagccatcccgctttttggtcgctaaccacctgtccaccaacggcttcctcccagggaggggctaccctacactccaagggcaacattatgatgggtccaccctttctaatccccagcatctccatcctgcatgtctgcagtatggaccccagtaacctggagtctgccttctgccttctcccttctcaggtgacatcacagtggaaggtctggatggagagcggccactgcagactggggaagtggtcatcattgtggtggtgttgctcatgtgggctggtgagtaagcagctagacaggggaccagggactcagtaaaggtgtgaggtggcaaaggttgtcaggagaaaaagaagtgagagatacagtggctcacgcctgtaatcccagcactttggg

SEQ ID NO: 4272 - DNA, 961 bp, Artificial sequence
  DNA replication origin
gggggggtcagccccccgcccggccggccgccccgtccgggaggtgaggggcgcctctgcccggccgcccctactgggaagtgaggacccctctgcccggccagccgccccgtccgggagggaggtgggggggtcagccccccgcccggccagccgcccagtccgggagggaggtggggggatcagccccccgcctggccagccgccccgtccgggagggaggtgggggggtcagccccccgcccggccagccgccccatccgggagggaggtgggggggatcagccccacgcctggccagccgcccggtccgggaggtgaggggcgcctctgcccggccgcccctactgggaagtgaggacccctctgcctggccagccgccccgtccgggggcggggggggtcagccccccgcccggccagccgccccatccgggaggtgaggggcgcttctgcccggccgcccctactgggaagtgaggagcccctctgcccggccacggccccgtctgggaggtgtgcccagcggctcattggggatgggccatgatgacaatggcggttttgtggaatagaaaggcgggaagagtggggaaaaaattgagaaatcggatggttgccgggtctgtgtggatagaagtagacatgggagacttttcattttgttctgtactaagaaaaattcttctgccttgggatcctgttgatctgtgaccttatccccaaccctgtgctctctgaaacatgtgctgtgtccactcagggttaaatggattaagggcggtgcaagatgtgctttgttaaacagatgcttgaaggcagcatgctcgttaagagtcatcaccactccctaatcttaagtacccagggacacaaacactgcggaaggccggaaggccgcagggtcctctggctaggaaaaccagagacctttgttcacttgtttatctactgaccttcc

SEQ ID NO: 4273 - DNA, 1340 bp, Artificial sequence
  DNA replication origin
tcctcacttcccagtaggggcggccgggcagaggcgcccctcacctcccggacggggcggccggccgggcggggggctgacccccccacctccctcccggacggggcggctggccgggcagaggggctcctcacttcccagtaggggcggccgggcagaggcgcccctcacctcccggacggggcggctggccgggcggggggctgacccccaccacctccctcccggacggggcggctggccgggcagaggggctcctcacttcccagtaggggcggccgggcagaggcgcccctcacctcccggactgggcggctggccgggcggggggctgacccccccacctccctcctggacggggcgactggccgggcagaggggctcctcacttcccagtaggggcggccgggcagaggagcccctcacctcccggacggggcggctggccgggcggggggctgaccccccccccacctccctcccggtcggggtggctgccgggcggagacgctcctcacttcccagacggggtggctgccggacggaggggctcctcacttctcagatggggcggttgccaggcagagggtttcctcacttctcagacggggcggccgggcagagacgctcctcacctcccagacagggttgcggcccagcagaggcgctcctcacatcccagacagggcggcggggcagaggtgctccccacatctcagacgatgggcggccgggcagagacgctcctcacttcctagatgggatggcggcggggaagaggcgctcctcgcttcctagatgggatggcggccgggcagagacgctcctcactttccagactgggcagccaggcagagaggctcctcatatcccagacgatggggggccaggcagagacgctcctcacttcccagacggggtggcggctgggcagaggctgcaatctcggcactttggggggccaaggcaggcggctgggaggtggaggttgtagcgagccaagatcacgccactgcactccagcctgggcaccattgagcactgagtgaaggagactccgtctgcaatcccggcacctcgggaggccgaggctggcggatcactcgcggctaggagctggagaccagcccggccaacacagcaaaaccccgtctccaccaaaaaaaacatgaaaaccagtcaggcgtggcgtggcggcgagcgcctgcaatcgcaggcactcggcaggctgatgcaggagaatcaggcagggaggctgcagtgagccgagatggcagcagtaccgtccagctttggctcggcatcagagggagaccgtggaaggagaccgtgggaagggg

SEQ ID NO: 4274 - DNA, 942 bp, Artificial sequence
  DNA replication origin
gccccgtccgggaggtgaggggcgcctctgcccggccgcccctactggaaagtgaggagcccctctgcccggccagccgccccgtccgggagggaggcgggggggggggggtcggccagccgcccggtccgggagggaggtggggggggtcagccccccttccggccggccgccccgtccgggaggtgaggggcgcctctgcccggccgcccctactgggaagtgaggacccctctgcccggccagccgccccgtccgggagggaggtgggggggacagccccccgcccagccagccgccctatccaggaggtgaggggcgcgtctgcccggccgtccctactgggaagtgaggagcccctctgcctggccagccgccccgtccgggagggtggtgggggggtcagccccccgcccggccagccgccccatccgggaggtgaggggcgcttctgcccggccgcccctactgggaagtgaggagcccctctgcccggccacgaccccgtctgggaggtgtgcccagcggctcattggggatgggccacgatgacaatggcggttttgtggaatagaaaggcgggaagggtggggaaaaaattgagaaatcggatggttgccgggtctgtgtggatagaagtagacatgggagacttttcattttgttctgtactaagaaaaattcttctgccttgggatcctgttgatctgtgaccttatccccaaccctgtgctctctgaaacatgtgctgtgtccactcagggttaaatggattaagggcggtgcaagatgtgctttgttaaacagatgcttgaaggcagcatgctcgttaagagtcatcaccactccctaatcttaagtacccagggacacaaacactgcggaaggccaaggccgcagggtcctctgcctaggaaaaccagagacctttgttcacttgtt

SEQ ID NO: 4275 - DNA, 1329 bp, Artificial sequence
  DNA replication origin
cctcccggacggggcggccggccggaaggggggctgaccccccccacctccctcccggaccgggcggctggccgacccccccccccccgcctccctcccggacggggcggctggccgggcagaggggctcctcactttccagtaggggcggccgggcagaggcgcccctcacctcccggacggggcgactggccaggcggggggctgatccccccacctccctcccggacggggcggctggccaggcggggggctgaccccccccacctccctcccggacggggcggctggccgggcagggggctgaccccccctcccccctcccggacggggcggctggccgggcggggggctgacccccccacctccctcccggatggggcggctggccaggcagaggggctcctcacttcccagtaggggcggccgggcagaggagcccctcacctcccggacggggcggctggccgggcggggggctgaccccccccacctccctcccggacggggtggctgctgggcggagacgctcctcacttcccagacggggtggttgccggacggaggggctcctcacttctcagacggggcggttgccaggcagagggtttcctcacttctcagacggagcggccgggcagagacgctccccacctcccagacagggctgcggcccagcagaggcgctcctcacatcccagacagggcggcggggcagaggtgctccccacatctcagacgatgggcggccgggcagagacgctcctcacttcctagatgggatggcggcggggaagaggcgctcctcgcttcccagatgggatggcggccgggcagagacgctcctcactttccagactgggcagccaggcagaggggctcctcacatcccagacgatgggtggccaagcagagacgctcctcacttcccagacggggtggcggccaggcagaggctgcaatctcggctctccgggaggccaaggcaggcggctgggaggtggttgcagcgagccgagatcacgccactgcactccagcctgggcaccattgagcactgagtgaacgagactccatctgcaatcccggcacctcgggaggccgaggctggcggatcactcgcggctaggagctggagaccagcccggccaacacagcgaaaccccgtctccaccaaaaaaaaccgaaaaccagtcaggcgtggcggtgcgcgcctgcaatcgcaggcactcggcaggctgaggcaggagaatcaggcagggaggttgcagtgagccgagatggcagcagtaccgtccagccttggctcggcatcagagggagaccgtg

SEQ ID NO: 4276 - DNA, 1215 bp, Artificial sequence
  DNA replication origin
tcttttcgacaaaaccgccatcatcatcatggcccattctcaatggtcactgtctcttcggagctgttgggtacacctgcagaaaggctgtcacttcacacttggaagattgcacagcggccagtcagaggtgctcctcacttcccagacagggtggcggccgggcagaggcgctcctcacatcccagatggggcggccaggcagaggcactcctcacctcccggacagggcggccgggcagaggcgctcctcacatcccagacggggtggtggccgggcagaggcactcctcagttcgcagacggggtggcagccgggcagaggcgctcctcacctcctaaacggggtggcggccgggcggaggcgctcctcacctcccagaaggggtggcggccgggcagagacgctcctcacctcccagacggggtggcggctgggcagagacgctcctcacctcccagacggggtggcggccgggcagaggtgctcctcacctcccagacagggcggccgggcagaggcgctcctcacttcccagacagggcggccgggcagaggcgctggtcacatcccagatgatgggcggccaggcagagacgctcctcacttcctagacggggtggcggccgggcagaggcgctcctcacttcccagacggggcggccgggcagagggtctcctcccatcccagatgatgggcagccaggcagagacgctcctcacttcctagatggggtggcggccgggcagaggctgtagtcttagcactttgggaggccaaggcaggcggctgggaggtggaggttgtagcgagccgagatcacgccactgcactccagcctgggcaacattgagcattgagtgagcaagactccgtctgcaatcccagcacctcgggaggcggaggcgagcagatcactcgaggtcaggagctggagaccagcctggtcaacacggcgaaaccccgtctccaccaaaaatacaaaaaccagtcaggcgtggcggcgcgtgcctgcaatcccaggcattgggcaggcccaggcaggagaatcaggggagcccgaggtagggaggttgtagctaggtgagatcacggcagtatggtccagccttggcaacagagggagaccgaagaagggagagggaggagagcggggagagggagagcgagagctgcattagtatctttcgcctctccctctgggattacaact

SEQ ID NO: 4277 - DNA, 1258 bp, Artificial sequence
  DNA replication origin
gccgggatcaagccactgccctccagcctgggcaacagagtgagacttcggtctcaaaataaataaataaataaacaaaataaatataaataaataaataaataaaaacgaccacaaaactttattggatgctgcccaccatgaggggcaacagacaagtgtgagttactcaaaaaaagtaaactaggccttctcctttgacagggaggtgcatttgaaaggtgcctccctgtgcactgactcacttagtcttgtgagggaagctttattacaattccccattgcacagatgaagttggggctcagggaggccaagggaatgaaactactaagtatgtaattggaacccaagtctcctggaatccaaatgcagtgtcctttcgctaccagatgccagcaggacccaggtaatgaactaggccagagacctgaagagcaggccagctaccaatgtgacctctatctgcccacttgggggtgagatccttacccatacaaagacagttttaaaattgattaaatgtaatgaggccggggctggggcaggctggctcacgcctgtaatcccagcactttgggaggctgaggagggcggatagcttgaggtcaggagttttgagaccagcctggccaatatggtgaaatcccatctgtaccaaaaatgtaaaaattagctgggtgtgttggcgcaggcctgtagtcccagccactcgggaggctgaggcaggagaatcgcttgaacccgggaggcggaggttgcagtgagcggagattgcgccactgcactccagactggacgacagagcaagactctgtctcaaaaaacaacaaacaaacaaacaaaagtaaagaggccgatagagggagaggagaccgagacgtagggagcagtgagtcggtttgggatgagactggcaggagcaggcagatacagtattcgacctcggagctgggcttttagcctggggtcctggcgcccctagagtgtcaggaggtgagggcctgaagctacaggcagaatcccagtgtctgtgtgggccgtgggcttgctctggacactctggggacaggatgcaaggccgtcatcagattctcaaaggggcccgtgtccagaaaaaaaacgtgttaaacctccgatatggaagcatctgcagtcccctgcccggaccggggacaccatggtgcaatgtatccctgtccccgtcactttttctaaatctttgcctagaaatccctcgtgctggactctttcaccctg

SEQ ID NO: 4278 - DNA, 1112 bp, Artificial sequence
  DNA replication origin
cccagagaagtaaaaatatcagatttttaaaaactgaaaatctccaagcacctgtaatgcttcatgcttactttcagaaaaaaacaaaaacaaacaaacaacaaagacgaaactcactttttagaaagaaaagccgggtggaagagcactaagctgagaggcactggctggttaggggtaagagccgggacgctgcagttcgggtctgggtctggattctggcttttccacacgctggctctgtgaacactgccaagctgattcatcttttgtgtctcagttttgtcatctataatatggggataataacagtgcctagcttacggagctgtgaggcttgaaggagctaatatgcacatatacacgctctgtaagggccgccccttatcatttaagtacatgcctgtttgcccttgacggggctgtgtagcagagcgcccagctggacgaatctcccagccagttggggagcccctctgagggtcattcctgcggatgtggccgtcgggaggaccagcccgtttgcagaccaagcttttgcttcctctcatccctcctgaggaagaccctgggaaaggaatgctcttcctgcgggcccttcctcagacaccaggcaaacgggtgaaggtgcagaggtcggcggtgaggaggggcccctgcggtctgccagggtgaggctgacctccagggctgcagctgctcggggggcctttggccgggttgcccaggaaggcaatgagggctcccaggcagcttactgtgcggggccgaccccagcagaggagcagggcctggtcaggggctggaatgggagaaaacagaggggcccttggggaggaaagggccccaggagggaggcagtagggtaagtagggggctgtgaggaggcgggggcaggaggctgtaggggaggtaggagactaaaggcggggggaggggggctgaggagaaagagggcctacaaggagggggaaaggagaggtgggatgtggggaagaggaggaaggaggactgagggcagggggtggggacacggaaggggtgtaggaggaaagggggtgaaggtgagataaaggggaggggaggaagggaagggggcagggagggagcag

SEQ ID NO: 4279 - DNA, 1158 bp, Artificial sequence
  DNA replication origin
gcggggggaaagaggcgggggaaggggagcgggagcttcctccgcggcctccgcagtcccgggcgcgcccagccccggccaggcgccgccgggagcgcgcgggcgagcgcaccctcgcgccctcgcccgccctcgccctgccagctccccggtcctttcctttcttgtgggttcccgtaaagcccagcagcctggagacgtctgcagagcatcacggaatctgtgctgatgcaattcactagcctccctttggtgcgccctggcctgcctcagagcgctttgatcccggccctctcctactccagaactcgtgctggctccctctgcccgccgggaggcttgcgttccgcagcccgctcaccccctttcagtccccccagcgccggacacacagcgctgtgccctggtgctgctgcgggactgacctcccccggttgagcgagtgcctcagcgaactgtgcctgccatacagagaattcagtctccaagtgccctctccttgggaaatcattccagaatcatccagttagaaagggtcctctggctccctggaatgctaaaaatagaggtgaccctttattgagtgctaaaatcagagccaggcaccatgctgaatacagggcttgttctgtgaaattctcacagcaaacgctggaggtgggtattattccctggttgcagaagaagacagtgagattgaataacttgtccaggggaactggttagtgagttagtgatctgttaggagtgcagctgagattctccgacaccaggctcttctttttccccaggacatggcatgacctgcctcctgttggaatgtctttgtctctctcttactggtcttgaaaggcatggtctttatctggtgcatgactttatcctacacttagaggtgcgccttaattctccactgaacaaatagcctcagcggcatccctcagcttagagaagaggccatgtcaagtgagggaagggaaggggaagagggaagctggggtgggaagaaaagggtagatgagctgggaagaaaagggtaggtgagctgtcttctcattgcctctctgggtctctgagacctctcttgccttacttttgccggtctccttgtttgtccatcctggccagtgtttggcccctgagagatgaggaatccca

SEQ ID NO: 4280 - DNA, 1070 bp, Artificial sequence
  DNA replication origin
cagggcgctttggccgcgcctccctttgcagcccccaagacttggctagggcggcctgaggcccgcgtggcgcggggaggggctgagaaccgagtgggaaaatgtcacgatttcttctgtgcccctcccgtccctacccccacccccagttttctgagttttgctgctgccgctggggaaggactgattcgttttgcgtcaaaggactgcatttactcagtcctgctgggagaggcgcgtaaacacccaggcaagccaggacgcagggatggggagggggaagaaaaaagcaaagcacccacggccggcgcgcgcgtccgcctgccccacacccctctcctgggcctgcggagttggggactctgtccagcgggcagcagcggaggtgcgaggagtctggctggcctcgcctcgtcgcgcacgcgcgcgcgtccttggggatagcgttcaggacagaatgtgttttatagctgtaaacaatgaccccgagtattgtttgggattaccgtatcttggggcccttggggcggccagatgccgccagccgtcccggaaatgccagcgctttatatagagccccaggaaagcttcgcgttcccggctctatttttctctgctaccaacacccccactttgcagataaggaaactgaggacagaagttgtgtgacggtgcacagcgagttgtcagcaatggactctcaacacctcttaacattgggtcctcataaggaccctgtggggtacagatggctggcgctacttaagaattgggtaaactgaggctaacacagaccctggaccaaaacctaagttccctgacttccgctacagtacttctccattcacacacaccatcatctcagcggaaggattggagctccagagcagagaagggcctaaggtcatgtctccaaactccttcactttataggaggaaactgaggcccagagaggttaaggaattcgtccaagatctcacagctcgtaaatagcgtagccgggcgttcctgctctaaggtctgtgctctgtaccctgcgccgcgcccctcccagccccgcccagcgagg

SEQ ID NO: 4281 - DNA, 702 bp, Artificial sequence
  DNA replication origin
cggaggcgccgaggcagccccggccctccccagtcccccgctcaccccccgggcccagcgcccttggtctgttccattggcgcacgttgccaaagatggtcatttgcgttagaggacgcgagtgcgggtttcctcgctttcgggtgacgtggagggagagggattccctcgcccgctcccgagtgcgctgcggcctctcccccgccctgggaaggggctcggggcggggccccgagagcggccgcgcgggtctcgcctccggattttagaaaataatcacagccctgacggcgagacgggcggttcggtgcggcgccaccgggaggccgggagccgggcgcgcagagccgctcgcagggagggcgcggctgcgcgcggtcgtaggcgccctccgcggcgccgccgagtgcagcgggcgccccgggcgcgcagggtgcccgcgccgccctgcggccgggtgttggcggggcacggcgccgggcggggctggcctgcctatttttccctccgtggcggtctgcctaccggttccctttttgttttttgtttttcatgttttcggtcctacagttaattcgttaggagtagccttgaagatgaaattaaccagtcaagacattccggccgccctatacgccgggcaattaggacgcatctaataagagtaatcgggcgtttataagcaaactccagactgttacg

SEQ ID NO: 4282 - DNA, 1573 bp, Artificial sequence
  DNA replication origin
ccccaccgcggatcatgtaccaggattatcccgggaactttgacacctcgtcccggggcagcagcggctctcctgcgcacgccgagtcctactccagcggcggcggcggccagcaggtaggtgcgggccccggtgcacctggcggcgcgggcggacccctgccctcttctcgccgccactgcctcttttgctttcttttctttttcttggcgagaaaatacctacgggccaccgttgtaagttctggattttcgtcctccccttcccccccacccccttttaaactaggggattggagagtgggcttgaagagacaacatgcccttttcctctcacgttatattttacccagatagactcctggaattgtaggccccctaccaggagcctgttacctccttccaagaactactccccctccccagtgtctgcccccccccccccacccctgccccgcgtcttctctctgggtggtggacagacaagaaaatctttgcacccactggcacctctcgacatcctgggaccctattccttcaggaaagccctctctctctcctccccgttctccatcagtcataactcctttctgaaaggggttggggacccagaaacatggttggactccttcaagtaatctggagcgagggcgagggctgccgctctgggaatcaggtgcgaaggtcaggaaggaagaagccagccttggttggctcatgccgcctgtgtgccccctgcctgcctgcctgcccccccgccgacccgtcttctgtaaggatcacggacaggaggctgcactgccccccaggaacgaaggagcaccttgagggtctgggggtacctggagcaaggagaccggcagagggaagagggggtcgggtgggggaagagacatcacgcaggctcctgggtggttctggaagcagaaaacaacttgtttctaaagcagccggactggtttgcactggagggattgtgcgtgtgatctctgtgtttataaataccaggaaggtgctgttggcgggggggtgctgatggcgtgtctgccctctgctgcagctcccccacccgctctgtctcgagagagagctgggttaacgcaggcccaatacaacatgaagcccaccgtggtcagcatctgtggagtctagcatagttggctgcagcaagggatgctcatgctccataaggcggtggccttggcctctagaaggggctagggtgggcttccagggaggggtggactcagctggaaagaattttggaacgtggctctcttttggatctgatgggggggtcccttgttccaaagtgattccctatacctggtgagtccccaaaatggcttttctgtcttccctctgcctcccatggtgctcctataagcacccacagtagagacagcctagtctgttcattgagggtgcagtcaatgcacccttcgtaatgagcaccaaggtgatgagtttaaaatccgaaaagttgttgattatgtttgcttcccagccccgctagtggtttgtgttgaatgtaaacataatgagggaataggttgaagtctgtacccactccc

SEQ ID NO: 4283 - DNA, 1220 bp, Artificial sequence
  DNA replication origin
cggggtcgaaacgccgcgtgacttgtaggtgagagaacgccgagccgtcgccgcagcctccgccgccgagaagcccttgttcccgctgctgggaaggagagtctgtgccgacaagatggcggacggggagctgaacgtggacagcctcatcacccggctgctggagggtgagtgcgcgcctggccgcgggacagagggaggtcgggcaccgccgccgacccctgcgtccccgtctgccgccggaacgcgaggggacccctttcccgccccgagacgagtctctgggagcgcggcgcggcggacgaaccgaggagggggcgaggaggctctgggcgcgggggagcggcctctgggagcgcggtcaggggagatcgggggagagggggccgttcccgcggaccctcgggggccaggcccgccggccgaaggctgtgcggagcgggtctgcgggagacagcctttcggaaaggccgccgggctccgcgcgccgtggtgctcgcctccggtgacccgaggatggggagaggatgcctgccactgggctttgtgcgtccgtggaatcactgttcttctctgttctctttgtgcattgcccttggctgcctccgattgtcgttccgggagtgaattttacgtatatatatataaacctgtccttaacaggactgcttcgtctgctctgcatttttacacaatgctatatagaatggattcttcttaaagagaggataaaattagcgggaattaatctaccgtttgttacttggcctaaaaaaattgtaagacaagatatttgatcaggttgaagatgcacctaagaaatgtgatgtatgtagatgggtttgctgaagggattggcttttgcatttgatttgagcagagcttaatttctgcacaaacttagtgaaaatctatttttaaagcctgtcttgtattcgaaaggtatttgtaggtctacgcagcatttgaactttccgggctcaagtgttcttattgaatagttttatgttggtgggaaggcaaggggggaaaacgaagaggtggactagccgggagttaaatgtattgattcattgcaggatattattcaaagttaaatgcagtcttctgccaaacagtccctctaccctaaagttttcgtcatcaataattgttttgtgagtgtgtagaaaagcctttaatcctttttaaacaatttagaggcctctttgttagccgcc

SEQ ID NO: 4284 - DNA, 1175 bp, Artificial sequence
  DNA replication origin
gagctgcgccctccctcactgccctcgcggcaggccgcacgcggggctggcggcttgggccctgaacgcgccgacgccgcctccaagccttctggcccgggccgctgagagccacgcgcgatgccggaccacgcgccacccggcccggaggcccgaagccgagcccgggaaggcgcccgccccgcgcagtcccgctcgctttaccttggcctgcagccgcgctggcgcccaggccagacaggtgcaggtaccactgaggtgcgcggaaggcacgtactcctggtgcagccggttgttggccgtctcccatactcgtaagtgaccgtcggtagaggccaaagcgaagtaggcctggctgtgcggggagaaggcgcaagggaccccagcaggggccagggggtcgcagctaccgccgccgcccgccgccattgctgctctggccccgctgcagccacgtgttcgtccgtgcgcaggcgcaccggcgcggggcggagcctggaggaggaagtgaggcggagggagcgccgggggctcagggagtggatcttcgcgtcgcaggagagcttctggcggatccgccctgtggacggtggcccgctagggcctgtcgctatcttgttctgggcgggagtgggagtatgggagaaagtaattgtagaattaagatcaagtcctgttcctttaaaaaaaaaaaaaaagggggggggccgggcgcggtggctcacgcctgtaatcacagcactttgggaggccgaagtgggcggatcccctgaggtcggagttcgagaccagcctgaccaacatgtagaaacccccgtctctactaaaaataaaaaaattagccgtgggctgggcgcggtggctcacgcctgtaatcctagcactttgggaggccgaggcgggtggatcataaggtcaggagttcaagaccagcctggccaagatgatgaaacctcgtctctactaaaaatacaaaaaaattagccgggcttggtggttggcacctgtatgtaatcccagccactcgggaggctgaggcagagaattggttgaacccgggaggcggagattgcagtgagccgagatcgcgcccctgcactccagcctgggcgacagagcgagactcgtctcaaaaaaaaaaaaaaaaaaaaaaaaaaaaaaaaaatagccaggcg

SEQ ID NO: 4285 - DNA, 795 bp, Artificial sequence
  DNA replication origin
ctgcgaccccctggcccctgctggggtcccttgcgccttctccccgcacagccaggcctacttcgctttggcctctaccgacggtcacttacgagtatgggagacggccaacaaccggctgcaccaggagtacgtgccttccgcgcacctcagtggtacctgcacctgtctggcctgggcgccagcgcggctgcaggccaaggtaaagcgagcgggactgcgcggggcgggcgccttcccgggctcggcttcgggcctccgggccgggtggcgcgtggtccggcatcgcgcgtggctctcagcggcccgggccagaaggcttggaggcggcgtcggcgcgttcagggcccaagccgccagccccgcgtgcggcctgccgcgagggcagtgagggagggcgcagctcgacccggccggcctcgtatccgagccctgccggctggcccaatgaggcctgggccccactgttgacgggcagccatgttcgccaagtcccctggtccccctggggcggcttccttctgccgggccttggctcatcagagttctggtttttgacagagccccatcttgggactatctaactttcctctgtctgtgatccggctcatcagttttgcactgggcagttggtatggactagtctgtacttgcttccggaccttccccctcctgccccccctttgggtgccggctcaccacgtgttctcgtccccgtccaggttgtgggactctcaactcttaacttttgcctttcccaggcacctctacattctcagctttttgaactcactg

SEQ ID NO: 4286 - DNA, 971 bp, Artificial sequence
  DNA replication origin
tattcataatatgagttgggttctttgccacatcattacatccattatattttaagctggaaataaaagtattcaattttttttctttatctagtgctttactttaagctttaagtttttagtggacagttgaaaaaaatcctgaattgttctttaaaatgtagctcttcttaacacagtctcacccaactcctgccttgtcacagtcccttgttctctgtcactgactcctttgccttcagtggcttgaattagggaaaacttggttaatctgctttgaggtcagcagtttgttctttgtgtgtttggggagaactcgctaagatgctggaatggggttgagagaaacaacagatcttgggtgtcccagcctgtaggaggcttgggaggtgacctgggaacactgatgagaggcgttttgggaggtggcctgggagcactggtgagaggggttttgggaggtggcctggcagcactggtgaggggggttttgggaggtggcctgggaacactggtgaggggggttttgggaggtgacctgggagcactggtgagaggggtttttgggaggtgacctgggagcactggtgagaggggtttttgggaggtgacctgggagcactggtgagaggggttttgggaggtgacttgggagcactggtgagaggagttttgggaggtgacttgggagcactggtgagaggggttttgggaggtgacttgggagcactggtgagagggtggccgaggggcattgcaattgcatgaacgatcccagcagacatcggatcttaggaatctggatggcaaatggggcaacactaatgtggcctcagttacttgcttagaagtgaggagagacccgggagatcttgtagtgaaatcttttctggaatcaactcctgaggtataaccagagtagttgtggtgtaacattcaaggtcgtggcagaacagacgaaagaatggtat

SEQ ID NO: 4287 - DNA, 2084 bp, Artificial sequence
  DNA replication origin
cagaagaattgcttgaacccaggaggcagaggttgcagtgagccaagatcgtgccactgcactccagcctgggtgacagagtgagactccatctcaaaaaataataacaataaaaaataaaaaacaaataaataaaacaaaataaataaacaaaataaatttaaataatcaagatttgcttattttgtttaatggaagggaggggctgaggcagtccctgggctggatgcctgtggacaatgcagagaagaccacttcccctccttgccgccctttaaagggagagtaggtagacatggaacagtggagatgaaatgaatgggtggggaaaggggtgagaggctgttggggttgcagagatggacgaggggaagcaccatgtcccctcgtaaatggatggatggatgagtgaaatggtaataggtcctcagggtctggaggggtaagaaggccccacagaacaagcactgggggacagcggggaggaactgtggggtcgtgggctggatggaccctgattgtcaggccaaggagactcagcattatgcgcctgggtccttgacacaaaggacccgccattcattcaatcaggaatgtcaatacaggcaaagggcctgcaagaggtgtgcaaggtggcgggggaagcaggaaaatgaaagatggggatggagcgcacagggctgcaaggatactggctaggcactattaggggaggtcaagaaggaagcggaagtacaaaccaagagggaaaggcaggggcaagaaaggggtggagctttcatggctgttaagaaagacttgggggctatggaaatgtgttggagcaggaggcactaggagcaagggtcaaagatgacactgagacttgaaggccaagaagaaggtctgcaccttgacagcaatgaggaggtcttgggagggggtggtttggggaaacacgaggtggtccttgttgccatgatggtggcacaacctccctgtctctccctctggtgctggatcacatcagccaggagaaactggagatgcccaacagaaagatggaaacccggagcctgacctgtggatggttccagggctagagcaggagatgtgaactcacccacattccaccatctggaagacttgggcacacataagggccccaggagaaaacaggagatgggggcaaacagtcctggaacaattttgggaatggcagaacttagaaatggaagagggcacacaggaagctgcctggaaggtcgagaagcaggtataaagtcaggatgcagaaaaagaagaaaaattcaagggccatccatggttcaaatgatgcaaaaaagtcaagagtaaagagataagaggaaaggccacaggtctggggccagtgagtcatgagaggcacagataaggctgctccgaggggaggaagaggccagcgtctgagtgggaaaggggaggacgtgtgcaatggtgaggaggcggaggtcagtggagcaagctgctgtctgaggaggctgacggtgaaaactgaatagagaactcgaatccaggagcaggtacatggacgggtctctataacccacagggtcggagaaagacatgaatatgtgtgtgcacagagggaaggcaccagggagatggagggaatgaggaagtgtgagaaaaatggaagaatccaagtcatcaggccccaagaaacgggagggaagcagtcacagcaggaactggattgtgactctactgaaggagccaggcccataggccctgagcacacgcacacacactccacacacatgcactcacacatacacatgcactcacacacagatacacatgcacacacatgcacacacacagatacacatgaacacacatgcactcacacacacgcactcacacacatacacatgcacacacatgcactcacacatacacacatacacacacatgcacacactccacacacaggcactcacacacacacatgcacacatacatgcacacatatacactccacacacatgcacacacactccacaaatggcttcacacacagtcacacacacaaacacatgcactcacacacatgcacacacatg

SEQ ID NO: 4288 - DNA, 958 bp, Artificial sequence
  DNA replication origin
gccatatgtcaaaaacctctgtggcttctgtggggccaggattggtacctggcatggattagttccgtaataaatatctgtcctttcctgtttggtttgtgacatggatttccctttgttgacaatgtggggctctctagccaatggaggggatggaggctctattaccatttcagtcatccatctgtccgtttactcacctaaaagctgttaagcacctactatgtgccaggtgcataggtcacaatctgtgtgctccagccaggaagtcatcaaggtgaagttcagagaggtgggtgcgtaggcgaaggctgcctgtcatgttggtgacccaggagaaagagatctgaatcatgccaggcagacttctcagggcaggatgagggcacacttgcgagatggagatggaggtggaagagggagagacggaaggaggagtgagcccctgcatccttgcgtgacagcctgcggggtgggggtgaagggcctgtgtgccaactgagaagtgggagcttcatcctcctgtaaggaggtgccaccaaaggctttcgggtgtgaaagtggcatctgctgtgacttagaaaggccatgttggcaacctcagagtggcatggaccgtgtagatggaggtggggctgctgcaggaatccggggagaaggcaaagggtggctgagcagggcagaggcagggagtctgtgggctgaggatgcagaggtgggggcggggcgggatgaatggcagggctaagccacggggtagatgtgggctgaagatgggggagctgagaccatgccggggttcctggcttcagccactggacagatactggcacccttcttggagacagggcataggagaagaggcaggtgctggggacagtgctgaggccactcttggacatgcttagacgtttgggttggagccgggaggggctcttgctggaaacagggctttgct

SEQ ID NO: 4289 - DNA, 1677 bp, Artificial sequence
  DNA replication origin
gaacttgattttttttaatacagcagggcctcttttcaattaaaatatttcctaggcagctggaatgtgtaacagataagagcacagtaactcaaggttggagagtgggggagctggaactgccccctacacctttttcccaactgcctcttctcttggagcacagtttgaaaactactgagacccagaagatcttttggcccattcgctctgttcctctctagtccaagccgctgaagggcagtgaccccaggacactccttacctgttctggccgagctgggattcataagaggtgctggtggggtccaaggtgggaggctgcggtcggccacctggctggcggtcagaagctgtcctcctgaggaaaggcagagggttgagggcacacagagctgctctccgctgcgagtctgctctcagccaaggccctgagctgttcttccagcattctgctgggttcccgagagggcccccagcctctggcggcagcgatggtggggtcagtgggtgggctgttgagagtggcggtttagcttcaaacagagaggaggtagctgggcagaatatggaatgtgtgttcccagacactttggctatgactgcttggctgtcttcagagtctcttgtttccttgtgctcctgagaaggggacattgggggtgatggggagggaatcgagaaaggggggcttgcttctgggtgctgggttggggggctggggaccttgcactgagcaggtgcactctcggggggagggttgggcaacttgggctggtgcggtggggaagttcgccgctttgtggtgggtgggcttagcaccctggggctcacaggtgggctggggggcgtctgcacagcagaggggcttggctgggcaggtctgtaagaggagggaaggctccggcgcctcttgtctgcttgaggcacccagtgtgtcctcgtgggagaggcctttctgcccacaggggggcttctctctcggctctgccttggtctggccaggctggactctgaggtcctgttttgtccagatggagggccggagtggtgccaggcgatggccttccggggctgcctgtagaggctggtggccttctctgcctgactccaagtcccacccttcacctcggggctttggctggtggctggtgggctgctcaggtccagggctggcttcctgggctggcagctgctcctgccactccctggccctgtgctgtgaggcttggtcaggctggcggtgctcttgctgggcagcaagtccagggggctcacagaggccctcagctttggggaagcccatgttctcctggtggggccagcctctcccggccctggctcctgggtttccttgggggagttctctgtggacttgctgctttctggggactccagagaagcgaatgatttgtccatcagaacttccataggcggtggagggaggtgctcgaggttcccctccatttcacagctgagctcctcactcttggctgcttctgctttaggcagagggggaaagataggtgctaagggcttccagcctatgcccattttgagagattctctgcctgatgctggagaaatttggggcttcggatacaaaggggcaagccctgtgtacttgggaaatctggggggcatgatgcaattcctgaggcagggacttgccccagc

SEQ ID NO: 4290 - DNA, 1065 bp, Artificial sequence
  DNA replication origin
ggccagcccgcggcccgggggggccccgcgcgcccccggcccacctgcctcctccgggtcctctcggagcggccggctggggacgcgggggcgcggaggaaaggccgagaggcgcgctcccgccggcgctgtctcccgtggccgcccacggagcctcccgccgcgccgctccacacctctccgggcccctcccgctgcctcccacgcggggtgggcgcgcgcgcagtgcaggcggccgggcggcgcgcaggcctcggccacggccccgcgcacgcgctggggactcggtggggacggaggaggcagcgcgcgcctgcgctggctcgcctggctcccgcgcccccgcactccccagcagtcagatgatcgggcgcacgcggggccgcgaccccggctgacagcgtctgcggggtgtcgcagtgttacctcccccgccgcgaagccaggcggccccggcacgccgtgcgtgcccaccgccttcacagccctcagcctcgcggcctcacgtctctaacctgcggcgcccccaccagctgctggggccggggacctagtcttacccgtcttgggctccccagagtccagccgagcgtggtcaagagtacatccaccagttccctgctggcagcgcttgctgtaaaaggcctaatccgtgctacacccacgttgagcaattagttcatatctcctgcggctttgctgcctcttcacccacgttttctcctgaccccttctccgtctcccaaggaccagacagggtgaaactgtgcacctaaagtcgtgaactctgacagcctgactctctgtcatctggtaacaagaaagcgttactggacacatagtgagtccccttaatgaggagacctagtaagaccatgaccgaagtttgaaacatggagacaacagtgttacatctatcagctgtctctgaggcctacagcggctgcttcatagaggctgtacttctgtgttcagcgcgcacagtgcctggcaggaacagatgttgaatgaacgtctgtcagtgtctctgcaagagcagaggtaagcgctcaccgcaccccggag

SEQ ID NO: 4291 - DNA, 1374 bp, Artificial sequence
  DNA replication origin
ggggcccggagaggtgtggagcggcgcggcgggaggctccgtgggcggccacgggagacagcgccggcgggagcgcgcctctcggcctttcctccgcgcccccgcgtccccagccggccgctccgagaggacccggaggaggcaggtgggccgggggcgcgcggggcccccccgggccgcgggctggccggcggcggggttggggccggggtgggcggccctgggggcccgcggggaggtcagtggccccgggagggtcgcgcagaggcgctgggggctgtggaagccccgcggccgcctcccgtgggcaccggtgtcgctggccgcggggaggccttctcggggcggagcggcccacccggcggggatggggactcctcgtggcggccgctgacggacggcccaactttaggttgaggggcgcggggtgtgcgggacccggcggcggagctgggctctgggccacgaccgccagccgcggctgccccgagagtccccgcacgcgcagtggctttccaacgcggcctcttcccatttctcacttgactccccttgcgcattaaattgtcgagaaacctttggccagtgggtcttcaaagctaaaccaaatggctgtccttgcagtccttggctacctgagatcccttaattctgaaccatccgcacctgggaggggaagttgaaaggagcgctggagctgagcccgcatccttaaggatcccattcactgcttatgatggtagagctttgaattagatgtcaggctgttcacgtcatccagactctggttttcagctctgtgctgagacagtgttttgatacgtatcagaggatgatgttcctatgggacaataacttgctgtatgttctgagatactagactgcgttcatattgtagcaccatcatcgtataaaacgggcgcctttgaaaggtttcagtaaacaccttcctcaggaacatccgccagcacttaaattgtacttcactttcactttgacgtttgttgtttgtgaatcttgtgcacaatttaaagtgagtcgtctaaacagcacaggatcacgtggtgcggggcattgagcaactggggaggaaagcagagacttgaacctgctggagtctagttggtctgcgtttttatgttggagaaccatcctggttccagcttattttgctttcgtaaatatgatgcattttttaaatgctttcatttgatacggtctatctggactgtaagattgagtctagccatgcatggaatgtgtttacttctgttttgtagaagatttagcccatggtattctatttgtaggattcatttcagacattttgtgtttaccacatacagtcccaccagcaagggcttttaaaaaagt

SEQ ID NO: 4292 - DNA, 1258 bp, Artificial sequence
  DNA replication origin
gcacacagtaggagtgttatggctcagtgcctgacacgtggtaggactccatgggacagtgcccttcacacagttggggctgtatggctcactgccctgcacacagtaggggctccatggctcagtgccctgcacacagttggagcggtatggctcagtgccctgcacacagcaaggtttcatggctcagtgccctgcacacagtaggggctttatggctcagtgtcctgcacatagtaggggctccatggctcagtgccctgcacacagtaggggctttatggctcaatgccctgcacacagcagggctccatggctcagtgccctgcacacagtaggggctccatggctcagtgccctgcacacagtaggggctccatggctcagtgccctgcacacagtaggggctccatggctcagtgccctgcacgtagtaggggctccatggctcagtgccctgcacgtagtaggggctccatggctcagtgccctgcacacagtaggggctttatgactcagtgccctgcacatagtaggggctccatgtctcagtgccctgcacaaagtagggctttatggctcaatgccctgcacacagcagggctccatggctcagtgccctgcacacagtaggggctttatggctcagtgccctgcacatagtaggggctccatggctcagtgccctgcacacagtaggggctttatggctcaatgccctgcacacagcagggctccatggctcagtgccctgcacactaagggctttatggctcagtgccctgcacacagtaggggctccatagctcagtgccctgcacatagtaggggctctatggctcagtgccttgcacacagttggggctccatggctcagtgccctgcacacagtagggcttcatggctatttgtggagttgaatgatggcgttgtccggctgcacacgctggtgccccaggtgaggaaatgagtgtcattgacagagaccatcaggaacagctgtggcccaaggtcagttggctccagctgggacctggggcctcttgtccattatgtctgaagagcaggtgagctgtgggacgactgccttcgggagctatgggccatgcttgacaaatggtgttatatacgatctgtgtgtgtatggtagtgggtggggaggagatgggggcaggactgcgggctgagaaggatgctggtcctagacaggtaggaaggcaggcaggctggagggggagagagggaagaaggaggaaag

SEQ ID NO: 4293 - DNA, 1027 bp, Artificial sequence
  DNA replication origin
atctcagtgacccatagtaagcaccaattaggatgctgtgcctgacaccaagtgtgcaaaggtgatgaagatccagccctgccccagaggccctgctgccagtggtggtggtggtgtgtgcacaggcatctccgtggggtgtagggagaactacagtggaggtttccacaaggcgctgccgcggaggccgggggaaaggcgctgccgcggaggccggggtaaaaggcgctgccgcggaggccgggggaaaggcgctgcactcagctgagcttgtgaatggcttctgccaggagaggggcacctgggttaagttcgaaggccctaagcattgtctacaaaaaagcgggtggccagagcctgcggtgagcacaagaagtcggtactgccgatgagaagtcgggcaaggctggcctcggggagccgaggctggaggcagcagggccaggtcctggggctgcagtgttaccccccaaaaggcctctcgctccccctggtgaaagcatgagggtggaagtgagagaaacggcctggaggtggggagagcagttggaagggagtcactgtcactcaggccatggtcaaaaggactgagccaggacaggggaaagatggcaggggagggtcaggtgcaggggacaggcccagaggtgctcaggaggtgggatcagcgtaagttgaggactgagtgaatgtggggtcgggtgcaacgctgggactacatccacgctctggcatggactgaggaagcgaggacaaaggagcgcagccactctcccacgagcttggctgagaacaggcaaggccagggcagcagcgagaggggccctgatcaggaggcctctgggccgtggtgctgagtaaccatggtgtctagagggtgggtggctggagcggatgggagagtgggaggccactgcagtgccatgagaagaacgtggattatggggtttgtgctggggagggggacagcatcctcgtgttgtcataaaatggagacagatgatggcacagcccagctctgagaggg

SEQ ID NO: 4294 - DNA, 1058 bp, Artificial sequence
  DNA replication origin
ggctgggcccggagagcagtgtaaacggcctcctccggcgggatgggagccatcgggctcctgtggctcctgccgctgctgctttccacggcagctgtgggctccgggatggggaccggccagcgcgcgggctccccagctgcggggccgccgctgcagccccgggagccactcagctactcgcgcctgcagaggaagagtctggcagttgacttcgtggtgccctcgctcttccgtgtctacgcccgggacctactgctgccaccatcctcctcggagctgaaggctggcaggcccgaggcccgcggctcgctagctctggactgcgccccgctgctcaggttgctggggccggcgccgggggtctcctggaccgccggttcaccagccccggcagaggcccggacgctgtccagggtgctgaagggcggctccgtgcgcaagctccggcgtgccaagcagttggtgctggagctgggcgaggaggcgatcttggagggttgcgtcgggccccccggggaggcggctgtggggctgctccagttcaatctcagcgagctgttcagttggtggattcgccaaggcgaagggcgactgaggatccgcctgatgcccgagaagaaggcgtcggaagtgggcagagagggaaggctgtccgcggcaattcgcgcctcccagccccgccttctcttccagatcttcgggactggtgagcagctcccgcctgagtgtgccgggatttagtgtttttagtcacattgatatgcaaccattaaataatcttcacttccaccccactttctaaaacctcagctctgcttcatcgccctccttcctcccgcaaacctccttcccgaatcagaccgtagtttcttgttttctccctgaacgcagttcaggggtcttccttcctctttagcaaccaagttgggggaaaagtttcatactcttggcagagcgccttcttctctggacttatacgctgtccgagacaaaattgggcgcccctcttcctgggccccgggacagttgaaatgccccgattacttccaggttcc

SEQ ID NO: 4295 - DNA, 1257 bp, Artificial sequence
  DNA replication origin
gtctgcctgctgaacttctgggcgtgaatcccagcccccgcgctgcgcaagtttgcagcgtccttgctctcaccggcgcctcggctcctcagagttcgcaggcactggagcggccccggcggcagcagctgagggcgttcagggcaggggcgcccgaaatcttgccgccccctcctcacccatcatcagcgcccgcggctttgggtggccgaccagagggcggccggaaagcacctcggtgccccgcgaccctccgaacagaggcggcgggaggtaccagctgctaccaccgctgccgcccccagagccgctggatcgcatctgcctgggcgcccgccacttgcagctggctgagccgcgcgagcgcgcgcagggagggggcggggcccggagggggcggggctcacaagccaactccgcgctgctgcccgacccacgcagtccggcctcgccccgccccacccgcaccctccaaccaatggcgtggctcgatcggctcctatgcaaatctgcagaggcctcggcattcattgagaaaaggagtgagcccgccccaccctccctctgttccctctccagtctcttgttcttcccctcctctagattccctgccctatttctctgcagtgtgaaagggagcaaatgtgagaactggaagaggcctttgcaatcaagcactctccctaattatacatttaagagattaaacgggtccgacttcggaaaaacaggttccagaataaaactggaggagaggggaagggaggggggagtgggaagggaggaggaagtggggagagggtggcagcgcgacactggcaaatctgagaacagcttgtattaaggccctgagacagaatattttctgacccatctattatttgaatgcattcctgggagcttaggagtcctgccgtccacacaggagaatttgggaataggggggcagagagggatggatggtcttggtctggcagagttgttctgcagctacaacaaatacctttcagacccctgtcagtcgctctgttttctcagaatggtgtctgaacatgtgtaacctcccctagtctctgtaaggcaaacattttaattccagatttacagatgcagaaactgagttgcagagcatttaattgtttgcccacaatcttgggaatgagggttcagaaccttaggccttttttactcacctgtaatggctgtacctctcctctccctttcctttcgtctctcctgagctgccaacacagaact

SEQ ID NO: 4296 - DNA, 1154 bp, Artificial sequence
  DNA replication origin
ctcttccaccaataatgactttaaacatgttgcaaactagccccaaatgctaacctacatttttaatctgagaggtatgcgtcatcaaatattttggttttatcccgaaagtcagctaacagagatgtaagtacctgggcaactctaatggaatgagaagcaacatcttccatcttaagcattgataagggttaagggaacagctgctctttgcaatgaacaaatctcactctctgaggcagaaattcgccatatagaagactgaatttcttcatctttttgagaatcatttccactacccagaaaaaacattcaaatgagttgtaaataaagtcaagcgcagttgaaaaatcctgtatccacagatgtttcttaggagtgcctatgcgcttagactcgagggctaggggtttgaaagcaaaaggcagccctctaccaggggtggtcggggaaacggcctccaagaaacgaattacacggtgcactttagttacctaggcagctgtttgtctaggaaacagcttattgttttcatttgtcatcaccgcggctcactaggtatcaggaagctcggctccagccgctacctggtgacgctaatgacgtgcgatgtctcgcagctgccgcaattagacaggccaagccttcgcctttaagaagctgactcacgtggatgctgtgttgtgtgcgctcagctgaaagggggaggtgggtccccagactgactacattggccgcctcgagagaaggggcagagttagcctctttgattggctgtacgagtccgaggtgctgggtcaggggcggggcgagctgtcgcaagcctgccctgggtctgcggcttctgagaggggtgggccgcgaagcggaggggtgcgggagtgggggagggtgagccagagaaggggcggggccccgcgaaaaaggcaggaggccgaggacaggggcggggcctagaaataaagggcgttctgggccaaccgggagagctgactgcgggggggcggagccacgccgggtgactgacgttgaggcccaaccagggagaggcggggccaaggccagggcctgactaaacctggagactcgggtggccgaggggcttcataccagctgaagagcgacaagccgctggcagccgcggatctcaccgc

SEQ ID NO: 4297 - DNA, 1102 bp, Artificial sequence
  DNA replication origin
cacggcgtgaaccgtcctgagcagggcccacgcccggcccaagcggcccagccaccgggctggggcggtgtctccctttgccccctcccccccatgaacgtccgcctcccccgccctcctgcccagaggacccgggactgacagcgcagggtgacggttgggcagcccgccgggtgtcgggaccaagagagccccccggccacccgctcagctgtttcctgctcgtgtttgttgtgccgagggaggccccgccgccaccgccgccgccgcgctctgccgccccggtccctcccgattggccggctggcgtcacgtggcctccatcagctgggccggcgggggcgctcgcgggccccactgcggctgccgggtgagcccacccgggggtcgcccgggccggcccagctccgccagcttcgggctgcggccttccctccgcttgcagtcgggagggtgggcgtgcccttgcaacccctttcctgtaccttctctgcaggtagatgggacaaatgagtgtccggatcagcgggagtgggaaattgaaatactacaaagatctgtttaatcctgataccaactaatctccctttcaagggagagtctgggaagctgtacagctcatttatttttaaactttttctgtttacagagatctgttggtaatctgaggatttttattctacgtcgtcttgacagatggaaaacctgaagtaacttcgggctaaccttgtgtttttggaaaattagtagacttggtggtgaagaaactgggaggagtaggatattagctaactttgcatagccacatatagagcgtcgcagctgcattccaccaaagaggaaccaaaaggcctgtggtgttcccagggtacatattcatgccagaagtgaagtgctttggtgaattcgtttcctgaaagtttatcgcatacttgtactgggttaggtaagaagtaaagtacaaagaatttagaatagtttctctagaagcttataacttaatcaaaagtcgtggacaaagtcgagcaataattttagcaagttatgagacgttagtaaaatatatgtagcttggaaaataatgttacctggttggatcatt

SEQ ID NO: 4298 - DNA, 1088 bp, Artificial sequence
  DNA replication origin
cctcagacaacattagcacagattgatatcacagctacagctcagtcatattttaattcctctcgccatgctgagggctgccggctcccggggatgcagattcaagggttggctgctgtgttgttgtcactttcccacagtcctgccctctggcttaagcggtgtgagggagcaaaggggtagacctccttatctgaagtgcacgactatgagttaccccagacagggggcaggaagaaaagaaaggaaggaggaaaggagggagggagagaagagggaaggcagggggtaaagaaggaagggagggatggaaggaggagaaaaacgagggagggaggaaaaaaggaaggggaagagggaggaaggaagagacagaggaagaaagggagggagggatgaagggaggcagagaggaagggagggaggagggagggagggagggaaggaaggaaggagggagggagggaaggaagaataggagcagggaagggaaaaggataggggcaaggggggaagaaaggaaagaaacagaaggaaggagggaagaaagggagggagggaggaaaaggaaggaaagaaagaagggaagacgagagggagtaagggaaaggagggtaggaagggactgaaggatggagggagggagaaagggaaagaaggaagggaggaaggaagggaggaagggaagggagggaggaaggaaaggaaagggagggagggaggaaggaaaggaaagagagggagggagggaagttcaggatattgttggccatattctctcagaccaaggtgtctcatcagctccgggatgcaggacgaggagggctagccttggctatcttggttcacaggccatctcagtcttgctcaaatctgcctcctctaccctcctcactcacgacagtgctgttgagactgcaccatagctcccactgggctgccggcagagaatcaggctgcgtctgtggaacagatgccatccatgacagggcttggaggaggctggggaaccataaaattctctgcagcccgaagcaacatcccctgctgtttatctgctattaaatctcaactcactcaggttctgg

SEQ ID NO: 4299 - DNA, 1339 bp, Artificial sequence
  DNA replication origin
cacctccttccattggaaactttgatgaacccacttttggggtcttttctttatttccagcccattctgtcctttcctcccatgtggcaagattacacttatatgtgtgattaaagcccacactcagtacatcttcgctgggtcatgttgttggatcctggggtgataccagggctagaatccccacagagctgcctattaacctgtgaatttgagcgagttactcaactctgtaccacagttcccttgcatgtaaaatgaggatgacatcagtctctaagagggtcactgcaaggaacaaatgggttaatacctatcccagagtggtgctttccattagcaaatgctcaattgctgtctgctgtgttcacgatggtgaccagggggagccaacaagaagagagaggaccttacagaccttcctttggaatcctgcccaggagctatactggaggcagggatggagccattcccaagactgtgttgacaaagcacaggaaggaagggtggcatcgggcagggagggtggcattgggcagggaggatggcatcgggcagggagggtggcatcaggcagggaggatggcatcgggcagggagggtggcatcgggcagggaggggggtatcaggcagggagggtggcatcaggcagggagggtggcatcgggcagggagggtggcattgggcagggagggtggtgtgtgggctgggagggtggcatcgggcagggaaggtggcatcaggcggggaaggtggcatcaggcagggagggtggcatcgggcagggagggtggtgtgcaggcagcctgtcccaccggcagactcaggctcacacacctcgaggcaccagtgccagtccagattagggggagactttatcttcacctgcccacccagggtacccaccttgcatgctccacagccagtagcccacacactgggagacaggtaaaaggacgagctaaaaatatatcttatgtttttcccctttctttaaattgggatggaaactagattggtgcacctgtattctttctacctttcacaaatatttttctagagtccaataaagttaagaggaaacttgttaaccttctcgggcttcacatgtttacaaacggatgatgtatttctctcgcatttcacctaaggcatcagttttctgacatcttcaatacacactcagattaaatattttgctcccaaggttgacaagtcagccaagagaggaagggaaggcaggtgaggaatggataggactgggggtggagcagcatcgggagccagtgtcagaaccagaggacaaaacagtctcctttcaacaacgaggacgcccc

SEQ ID NO: 4300 - DNA, 1213 bp, Artificial sequence
  DNA replication origin
ggcgcgctggcgctgagcggtggcttgcgggagggcgcgcagcccgcgtgccgggtttgcgggctcccgggaaaccagggcgagggtctgggtgctgcgagcaggtaacagccgccggatgtggctaccatgtgatgtttctggattttaaaacgctcgggggcatctccggacccgcggtgtgcatgagtggcagtgggtgtgggtggtgggcgcgcgctcgcctgcggagcggggctcccaacttgagctgcgcgcgagggtcccggggcggagggggctctgcggacgggcggcccaggggctggcggtctccgggcgctgccagagagtcgccggcggtcgggtcgggccagcgcccgggcgaagtgtggcggctgcgctgacctccttcccgcagctgccaggcccgacctggggaggccggaggccgggtgcgccgcgcgcgcctgtgcgttgcgggcgagcgccttgcagcctcccgggcggctgccacccctgttctctaactgttcccgaccctctcagctgcattggaagttgaatgtgcccagaacaccacgaaagagcctgtaaaaacagacgccttggtattggcggggagttgaggaaatgggaatccaagtggcttttccaactcctgctcagtcagttcctgtgagggagccagaaggttccccctataggctcactcttaccttcagattcagagccctgtagggggaaagggaaaacttccccatggctctccgaaggttcactgaaaatcagttgacaaaaggcagatcaataggagaaaaggcataataatttatttgatcatagtttttcgtgacatggtagccttccgttttctcttcacagatttggcccggggacacggaaggaggcctctgggggatttcctggccagccaggcagtctttataaactgggtccagaacagtcgtctaggggtctgggcaaaagccttggaggagcttatggtcggaaatgggagactgaaaaacaggaagatgtgggcgggaggtggcgtctcaccagttaagtacagtacagagggcctactgtgtgccaggtgcatagtaggtgccttcctcataagtagttgtaggagttgggtggtaatatgcttgtttcatagatcaggaaaacaggttcagggtctttaagtcacgtaccttaagtcgttctactggtttgaactccagcc

SEQ ID NO: 4301 - DNA, 1636 bp, Artificial sequence
  DNA replication origin
gggaagccgcgcagggcgccgccatgtttgtgggcaggcgctcagctctagacctgcggccgcgcggggagagggatgctgacccagtccagtgggagagtgccggtgtctcagtctccgcctctggggcttcgatttgggaacagcgccctctcagggacggctgcgaggacagagttgacctattcatcacactccctgctttgaatcgcctctccttcagttgctgaggtcaattccctaggaaaacaggtactctagtattgggggattttttttttttttggcatagaaaggggatccactatcaggttacacaaaataaccaaaactgtcactacccaaacttttagctaggcttagggtgaagtcaaaatcgttcccatttacttattcattcattccagcaaaacaaaacaagccaagaagcaaaatccctgcaagtattgggaatttattatggggcagttacaattttggtgactgtggatacagagatgagtgctgaacagactctcccttccaggaactccagtgaaggcaggctttaaagaggaggcatgagcagagggtcatgggaatacagggaggagtcactccttttgtgtggctaatttgaggaaggcttcatggaaagcatgactgtaagctggatcctaaatgatgaattgacatccattgttctaggagcgtaaggagtatttgcaaaggcttgaggaacttggtgtgtccaaggcagagtaaacagtttggcatagctggagtgtagggtttaggaaggtgaaagagagtgagggaggccaagcatgaaaggctttgccagagatggggaaccaatagcaatgctattactaatcattgttacattaacaaaatgctcagcatgtgcaggggcctgggctaagttctcagtgaacattgctttatttaaccttcatggcagatcatattatctccagcatcatactaaggagagtgagtgggaacactgtccaggtgtaggcaaaagcagtgcatcgtgtgtagagaatttaaacccaataataaacttgctgaaagttgatgtgctttgtattggcaccattctaaacagtgtagtgataaaacactcctccctgcccaggctaatgactcccactaccctcccttccacagatgaagaaggagtaggctatggaccaggcaggaactggaatgccaagagcagtgttggaggggcaaaagaggttgggggttgatatggttttgctttgtgtccccgcataaatctcatctctaattgtaatccccataatccccatgcgtttagggagagagctggtgggaggagattggatcatagggacagtttcattcatgctgttctcatgatagtgagtgagttctcgtgagagctgatggttttataaggggctcttcccacttggttcctcatacttctctctcctgccgccttatgaaggacgtgtttgcttccctttatgccatgactgtaagtttcctgaggcctctctaggcatgcagaactgtgagttaattaaacctttttcctttataaattacccagtcttaggtatttcttcacagcagtgtgaaaacagacgaatacagaggccaagagaccatttaggaaact

SEQ ID NO: 4302 - DNA, 828 bp, Artificial sequence
  DNA replication origin
ccgggcacgcggctaggagggccgggagcgcactctccctgctcctgggaccaagcccagccgctgctgcatccagcagcccaggccggagggaggataaataatctgggcttgaggaggaggggtgaaatcttggcaattaaagttgaacctgcaaggaaactgccagatgccggggtcccaagccggggtccccgatcggcccccagccctcgcctgctctgccctgcgtgcagcaagggatgcttcggctccgctcctgccggaccgaggcggctcaggggagacggcgacgctgcccagcccgcggacagctctgcatccgcagcagcatcctgcagccccaggcggtggtttaaatgccagctgggcaggaagccggcgcgcagaggaagtcccctagtactggcaaggcagggccggccccacggttgcggcgacgggaagccgcgcagggcgccgccatgtttgtgggcaggcgctcagctctagacctgcggccgcgcggggagagggatgctgacccagtccagtgggagagtgccggtgtctcagtctccgcctctggggcttcgatttgggaacagcgccctctcagggacggctgcgaggacagagttgacctattcatcacactccctgctttgaatcgcctctccttcagttgctgaggtcaattccctaggaaaacaggtactctagtattgggggattttttttttttttggcatagaaaggggatccactatcaggttacacaaaataaccaaaactgtcactacccaaacttttagctaggcttagggtgaagtcaaaatcgttcccatt

SEQ ID NO: 4303 - DNA, 1401 bp, Artificial sequence
  DNA replication origin
tcttctgggagggcagcggccaccggcgaggaacacggcgcgatgcaggttcagtgccagcagagcccagtgctggcaggcagcgccactttggtcgcccttggggcactggccttgtacgtcgcgaagccctccggctacgggaagcacacggagagcctgaagccggcggctacccgcctgccagcccgcgccgcctggttcctgcaggagctgccttccttcgcggtgcccgcggggatcctcgcccggcagcccctctccctcttcgggccacctgggacggtacttctgggcctcttctgcctacattacttccacaggtagcgtttttcccttgcgggcgcccagtgcagcgcactgccctgctcccggcgtccaggagcgcagcgtggagcgcgcaccgaggaacgccaaggaggcagcgtggggcgctgtgaggaacgcggaggccagcctgcctggcgcacctggcgggggccggggccggggcttggacgctagagagttgacaagcggctgcggcacagacgccgccttcactcccccaggacctcatccgctctcagcagctccaaatcctctggctgctcgagagaaagaggtcctgcgggcgggaggcgacctggaaagctcaggttggggagacctattggacaggactgttccttaactgcgcgcaggcggcggttacctgtggcatatcgcgccccgccccgcttccctttcttccttcaccttttccttgcagggtggggacagattagttctgggatcttgggagagtcttacgcgtttggcatctcccgagggaaactcagctcagaggttctcattgatttagtctttgcaggtctaaggaggaaggtgggtagagcccaaatccagacttcacagatggggaagagaatatagtgagatcccactgactcaagcgagggtccccgcttcttaggcccctcccaaaagggaccaagcacaccaccaattcatctacctttccaatttccctgggacttgaaatgtgagtgggtaacttacagctcaaatgttcttctagatttaaaaaatccgggttcaggagaactttgctttctgctctgggaaggaaagacaggaaagagaccaagggatgtcagggttcagagaaagactgtccagcctcagtaaagtctcacagggaaagggaagaacgaacacattgttaaattgcctaccatgcccaatcgtttagtatctatggtctcacttaactctgttgtaaccttttgagagatatttattatgtccactttacaaagaaactgaggctgagtaaggttatgggactgaaagaagacaatacagctggtgcccgctaagatgcaaatctgagcttgtgaatctctgaggtttaagacc

SEQ ID NO: 4304 - DNA, 1265 bp, Artificial sequence
  DNA replication origin
gcctcctctgcctgggcttccactttggcgacatttgaggagaccttcagcccaccgctgcactgtgggagcccctttctgtgctggccaaggccggagccggttccctcagcttgcagggaggtgtggagggagaggcgcgagcgggaactggggctgcctgcagcgcttgcgggccagctggagttccgggtgggcgtgggcttggcgggccccgcgctcggagcagcctgccggccctgccggccttagcacccgggccagcggctgcggagggtgtactgggtcccccagctgtgccagcccaccggcgctgcgctcgatttctcgccaggccttagctgccttcccgcggggcagggctcgggacctgctccatggcgccccctgctccacggtgcccagtcccatcgaccacccaagggctgaggagtgcgggcgcacagcgccagactggcaggcagctccacctgcagccccgggcgggatccactgggtgaagccagctgggctcctgagtctggtggggacgtggagaacatttatgtctagctcagggattgtaaatgcaccaatgggcactctgtatctagctcaaggtttgtaaacacaccaatcagcaccctgtgtctagctcagggtttgtgaatgcaccaacccacactctgtatctagctactctggtggggccttggagaacctttgtgttgacactctgtatctagctaatctagtggggacgtggagaacctttctgtctagctcagggattgtaaaggcaccaatcagcgccctgtcaaaacagaccactgggctctaccaatcagcaggaggtgggtggggccagataagagaataaaagcaggctgccccagccagaagtggcaaccagctcgggtctgcttccacgttgtggaagctttgttctttcactctttgcaataaatcttgctactgctcactctttgggtccacactgcttttatgagctgtaacactcactgcgaaggtctgcagcttcactcctgaagccagcgagaccacgagcccaccgcgaggaacagctccagacgcaccgccttaagagctgtaacactcactgccaaggtctgcagtttcactcctgagccagcgagaccacgaacccacgagaaggaagaaactccgaacacacctgaacatcagaaggaacaaactccagacgcgccaccttaagagctgtaacactcactgcgagggtccgcagcttcattcttgaagtcagt

SEQ ID NO: 4305 - DNA, 904 bp, Artificial sequence
  DNA replication origin
ggcggggaagagggcgcggacgggccgccgggcgcggaccgcgtggggagggagcgagccgaggccggcctcgccgcctcccccacccgggcggcgggcatcccgcgccggcagcccggggccggccggcctcacgctctccggagttgggcgagagggagagttgccgcctcggcagcctgcgccctccctcaggaccaggctcgaggaaggaacgtgctcccggaccccagccgacttgtcgccgcctctggcttgcaggaagcgtgcggccggccgctgccacccccgggaaggacggtgtgcccggcgccgagccccgcttctccacgccgcagggcagcgaccctccgccctcttgccgagccagggaccctttcctttcctctcccgtcttccctgccctccccgctggcggtccggggagtgccctcgcccagagggagttctctcggtctgcccccgagcccccgcgcccgcagccggagaggaagtcttctcgccccgtgcctctggtgctggagaaggaggcagcgtttccccgcacctttaaggggctccgctgtcttgcagggagtgaagggtagcacttttttacgttaccagactacagacgaggtctctgcatggggagatctgtcagaggagggcctttcagggatttgtcactttgtatgttggggctggggtggaagtactgctaagctaggggcttgggggtgggggggctcccagctcttctgtcagtgtttgcattgttactgtcattcacgaaaggggcagctggatatggcatcagcacttttcccgagcagtcgccccagtcactggtcgccctacaccaggcaggtgctggaactacctaacgaattaagtttaagctttgagcgagttgagttttctg

SEQ ID NO: 4306 - DNA, 973 bp, Artificial sequence
  DNA replication origin
agcggctccgcgaggggacgagacaccgcgggcccagcccaggaggaggcggcagcggggaggggatcagcccggcccaggaggaggaggaagaggaggaggcggcggcccaggaggaggagatggcagccggggcggtggcggcggcagcaacaatcaccacaaactccggcgaccgccggaagatggggcccacggcggcctcaccgaagcccggaaagccctggccccggcccccggcgtccccgctgctgcccagccggggctggttccgccgagccgcccccacggccccctcccctcccagctggcctccccgagccaccgcgagtgaccccacccccgtgactccgcgcccgcccccgccccccaccccccgcggggctccccgcacccacccccacccccggcagggccctccagcccggccgcccgccgccggccccgccccgctcctcctcccggccgcgcggcgaggttaacggcggaaaccggacaggcctgacggcatctggggtcgggcagccccgcgaggaggcagtggcggctgcagctacgcgcacacaaaagcccagggccggggcctgaaccggggaaggcagacccggagaagagccaacgcttccttactcgccactctaacgggtcctgcccactgagcatgcccagcaccgctgcctacccgccgaggaatctcaacgtgcacgctccgctctccggggtttagcggcagcagaggctgggaggtgggggcagggcgcggggagcaggacgcagccgcaaggcaagccccctcccccagccaacttcctcaaatggagagcacctagggctcgcggatgcggctttccacgaggacagtcccgcgggtatccatcatatacaggcatctctcatcgatttgcacccccaaggtctcattcctagggtggcacgccgggaagttcatctgtagaagcaggcgcgtggtaaa

SEQ ID NO: 4307 - DNA, 804 bp, Artificial sequence
  DNA replication origin
ggtttgatccggccgagccccttctaactgggctggtcacttggtctgcagctggggtggcgctcttcgtgggtgggtaggatgaaggaagattgtagctcgtagcttccgaggccagaccttggccaggactcacgcggactgcagagagcctcggggactgacgatggttctgcgcgcctcccagcttcttgtccgccgggaggttctgcgcaggcgcggcagtcgtgcgacagccgtcacttacggccggagctgtttgtgctgggagctggtggcgcggtgcagggctcttaagaacgaacggcttgggcgcgggtaatcagctccctttcccccactttctcacttattctaggtacttgggactgtcgtagagtttccagaccccatgtaggcgcccagtcgtggactgtcccactctgctgctctactgctcgtggtgctcccgcgcccaggtgggggtgaggggcggggtcgggggctgggctgcactccatcctggagtcttcgtgttgaaatctcccaggtaactcgcggctcttcttgttttccaagactggtatccggggactgtgacttgcagggtccgccatggagccagagcagatgctggagggacaaacgcaggtatcaggaggccgtggattcagggtggcggtgtgcagggaggcagcgagaaaggggggacttatatctctgtgaccggtgttttgttttctaggttgcagaaaatcctcactctgagtacggtctcacagacaacgttgaggtaactcgccaagttcctatgcctcatctgtg

SEQ ID NO: 4308 - DNA, 1165 bp, Artificial sequence
  DNA replication origin
gggctgaccgagtaacttgatgctttaaaaagcagctccctacacccctccctccgtccttcggggcctctcggaaggcccggcaggcgtggtgggctgcagtcaccagtcagcttcctgcctgtccccacccggccacgaccacctcggcaccagaaagaccctacggcgtcgggccctggcttcctccgggtgatagcccttccaggggctcagcctcaccttccgcgtctgctgaggagacaaaggtgaagtccccgttagtgggggcataggccgggggcgggcccggaggctgcatctcgcggcgactcccaaccggccgcggtagaagaggctgcggctgggcccagaccccgaggcggccgcggcggcgacccgcacgctcgccctacggtgcggcctacgagtctcgacgtgcaagctgcgagcgaggccagaaacgggcacagcgggccgctgagctgccccgagactaccccaccaaagtcttcttggtggcgaccacccaagcaccacgacgccggcaccctgacaggaccataacagtgacagcggcgctgggattggctctttgtaatgtgctctcccattggctcccggaggaagattctgattgggtcttcctgttgttgattccggaagtttacccaggacaggaagttcacttgtaattcgtggaaatctcaggcctctttttcctccttgggtgcttttgttcctttaagtgcgatctttcctggcgttttgtttacctattacctccgtttttgttaagtgggtgggttaaagaattttagaactaggtagattttatgggtcagccgccgtacaggatctcaagattcccttgccattagccattaattaatagtgtaggatcttgactaagttatatgtaatgtctggatggcagtttcctcacctgtaagatgaagagggatggatcggagaatgaagataaaaggcagagaagccgtaaatcgccacccagagactagggctgtagatacattcctttatgagggagaaaactgaggccagagaaagtaaggtagaaacagatttaggacagtacctaaatctcctaatttctagtcaagtgctcttttcactggaaggccctgtctactgataagcttgccgaagttaacaaactcacctg

SEQ ID NO: 4309 - DNA, 935 bp, Artificial sequence
  DNA replication origin
ctgtccgggaggtgaggggcgcctctgcccagccgcccctactgggaagtgaggagcccctctgcccggccagccgccctgtccgggagggaggtggggggatcagccccctgcccagccagccgccccgtccgggagggaggttgggggggtcagccccccgcccggccagccgccccgtccgggagggaggtggggggggtcagccccccgcccggccagccgccccgtccgggagggaggtgggggggtcagccccccgcctggccagccgccccgtccgggaggtgaggggcgcctctgcccagccgcccctactgggaagtgaggagcccctctgcccggccagccgccccgtccgggaggttggggggtcagccccccgcccggccagccgccccttccgggaggtgaggggtgcctctgcccggcctcccctactgggaagtgaggagcccctctgcctggccaccaccccgtctgggaggtgtacccaacagctcattgagaacgggccacgatgacaatggcggttttgtggaacagaaaggggggaaaggtggggaaaagattgagaaatcggatggttgccgtgtctgtgtggaaagaagtagacatgggagacacttcattttgttctgtactaagaaaaattcttctgccttgggatcctgttgatctgggaccttacccccaaacctgtgctctctgaaacatgtgctgtgtccactcagggttaaatgggttaagggcggtgcaagatgtgctttgttaaacagatgcttgaaggcagcatgctcgttaagagtcatcaccactccctaatctcaagtacccagggacacaaacactgcagaaggccgcagggtcctctgcctaggaaaaccagagacctttgttcacttgtttctttgttcacttgtttatctgctgac

SEQ ID NO: 4310 - DNA, 1330 bp, Artificial sequence
  DNA replication origin
aacctcccggacggggcggctggccgggcagaggggctcctcacttcccagtaggggcggctgggcagaggcgcccctcacctcccggacggggcggctggccaggcggggggctgacccccccacctccctcccggacggggcggctggccgggcggggggctgaccccccccacctccctcccggacggggcggctggccgggcggggggctgacccccccaacctccctcccggacggggcggctggctgggcagggggctgatccccccacctccctcccggacagggcggctggccgggcagaggggctcctcacttcccagtaggggcggctgggcagaggcgcccctcacctcccggacagggtggctggccaggcgggacgctgacccccccacttccctcccagacgggtcggctggcctggcaggggctgacccccacctccctcccggacggggtggctgccaggcagagacactcctcacttcccagacggggtggctgctgggcggaggggctcctcacttctcagacggggcggctgccgggtggaggggctcctcacttctcagacggggcggctgccgggcggacgggctcctcacttctcagacagggcggctgggcagagatgctcctcacctcccagacgtggtcgcggccgagcagaggcgctcctcacatcccagacggggcggcggggcaaaggcgctccccacatctcagacgatgggcggccgggcagagacgctcctcgcttcctagatgggatggcggccgggaagaggggctcctcacttcctagatgggatggcggccgggcagagacgctcctcactttccagactgggcagccaggcagaggggctcctcacatcccagacgatgggcggccaggcagagacgctcctcacttcccagacggggtggcggccgggcagaggctgcattctcggcactttgggaggccaaggcaggcggctgggaggtggaggttgtagcgagccgagatcacgccactgcactccagcctgggcaccattgagcactgagtgaaccagacaccgtctgcaatcccggcacctccggaggccgaggctggcggatcactcgtggttaggagctggagaccagcccggccaacacagcgaaaccccgtctccaccaaaaaaatacaaaaaccagtcaggcgtggcggcgtgcgcctgcaatggcaggcactcggcaggctgaggcaggagaatcaggcagggaggttgcagtgagccgagatggcagcagtacagtccagcttcggctcggcatcagagggagagggggagg

SEQ ID NO: 4311 - DNA, 2293 bp, Artificial sequence
  DNA replication origin
gcgagagggcagggctgggggttcgggcccagccgtgaagggaggcccggaagctgatggagggggaccttaggacttggctttttcagcggctgcagttgggaggaaagaccggcgagtcagggagtggtgggaggggagttgcctttcgggcctggagcgtccggtctggcttggtcctccgcgagaggtgaggagaccttggagcttggcaccggaggaagcgaggcccgggtaggccctggagaggctgtcggtcctgcgtccggttagatgagagcgaaaggctggaagggttgaccccgggcggagaggctggtggccggaggcgaggggcggggagcgtctgagccggcaaccaagccctcccttgtgggagaggagccggcagtctgctgttctcaggtcccgcagtgcgggggacagaccgcgggctgtgcgcccagcgtgggggtgggggtggggtgggggtggggtgggtcgtggtgggggtggggagggaagtaggcgggccagctgcctgaactgcttggtcgacgactgtaggactctgcggacgccgaagacgactagacctggtccccttgctcggggcttccaacttctacgccccagtgacgagaaagtcaggacctgtggtgtatgaaatagattcctttgggtttgtaacttcaggctgtctctacttgttttcccacagcgagccgaaaattaggatttgaaggtgtgtctgagtctcaccattggaggagagcacttctgggtggcgtaaaccttggtccagggacgggactttcagatgcgtgaggtgtatgctcagtggacggactggagtggttttggaatggccctggctgagttagatttggcggagatgacatttcatttgtggttaaatgatgggtggcttaatttggatgttgtaggtttagattgaaaagttagtgtatgagtgaatcggactcctgcatagagatgtaatgtatacaactgtctgcgtttagccaagtggaagtagttatgtggtcaaccaattcacttgtattttaacgtagacgaacaaggaaaagtttactatgtgagtaataaggcatttgtaagagtaaatggcaatttagggatgcaaacgtgaaattagacatgttaattattgttgatgtgagagttgtgaaagaattggattatgtatagtttcaggatataaacttggaacatatctaagagaaagttttgggaggtaggtttgtaattttttcttttcttggcttaggtaaatgatggggtggcccagatgtagcagtgaacagttactgcaacttggacataatggcttctcactgtgtgtaagagggagatgctcattggtaattggatgtctttctttttaaaagtcatttaaaagtatttcaagtatgaaaaggtatgaagagtaattacagtgaacaccatgcatccccaactcaggttaagaaataaaactttacaaataggattaaaatctcagctgaatctctcctggactgcatttctccaatcctccctcttcataaacgttatctttaatttgattttatccttttcatatatgtctacactttctagtatatgtttctatcttgaggatgtagtatttttgtgatttttaacttggaataagtggtatatgtactaggatttctaaagaaagtcattaacaaaagtattcaagtgttttggatagaaagaggaattttatggtgtgctttttatgtctggaggccatgtttgagaataataatgtgtgtcaggatttgttggttggggaaattggacatatatttatgtgcctgtacatggaaggaaagacaatattcactttagtggtagattactaaagaggagggttttagatgtataacatgaaggtgtaggtagataagtaaaatgtagcattgatttgggataacaggttttgttggggcatctgttgattagaagagttcgggattggatacaattgcaggtccccatgcatgaagattgagtatgtgaattaaaatatgtagaagggtttatagtgaacggaatgaaggattacagaaaaaatttggaagttaacaatggatgcattctgaaacattttcatatatgagaagtgaaatttattattatttgtaaaatttattcgtatttgtagagatggggttttgctgtgttgcccaggctggtcttgaacttccggcctcaaatgatcctcccacctcagcctcccaaagtgctggtattacaggcatgagctgtcccacctggccag

SEQ ID NO: 4312 - DNA, 995 bp, Artificial sequence
  DNA replication origin
tgaggggctcctatgcccggccgcccctactgggaagtgaagagcccctctgcccggccagtcgccccgaccaggagggaggtggggggggtcagccccccgcccggccagccgcccagtccgggaggggggagggggggtcagccccctgcccggccagccgcgccgtccgggagggaggtggggggatcagccccccgcctggccagccgccccgtccgggaggtgaggggcgcctctgcccggccgcccctactgggaagtgaggacccctctgcccggccagccgccccgtccgggagggaggtggggggatcagccccccgcccggccagccgcccagtccgggagggaggtggggggtcagccccccgcccggccagccgccccgtccgggagggaggtggggggatcagccccccgcccggccagccgccccatccgggaggtgaggggcgcttctgcccggccgcccctactgggaagtgaggagcccctctgcccggccacgaccccgtctgggaggtgtgcccagcggctcattggggatgggccatgatgacaatggcggttttgtggaatagaaaggcgggaagggtggggaaaaaattgagaaatcggatggttgccgggtctgtgtggatagaggtagacatgggagacttttcattttgttctgtactaagaaaaattctcctgccttgggatcctgttgatctgtgaccttatccccaaccctgtgctctctgaaacatgtgctgtgtccactcagggttaaatggattaagggcggtgcaagatgtgctttgttaaacagatgcttgaaggcagcatgctcgttaagagtcatcaccactccctaatcttaagtacccagggacacaaacactgcggaaggccgcagggtcctctgcctaggaaaaccagagacctttgttcacttgtttatctgctgaccttccctccactattgtcctatgaccctgccaaatccc

SEQ ID NO: 4313 - DNA, 1305 bp, Artificial sequence
  DNA replication origin
cggctggccgggcggggggctgatccccccacctccctcccggacggggcggctggccgggcggggggctgaccccccacctccctcccggactgggcggctggccgggcggggggctgatccccccacctccctcccggacggggcggctggccgggcagaggggtcctcacttcccagtaggggcggccgggcagaggcgcccctcacctcccggacggggcggctggccaggcggggggctgatccccccacctccctcccggacggcgcggctggccgggcagggggctgaccccccctcccccctcccggactgggcggctggccgggcggggggctgaccccccccacctccctcctggtcggggcgactggccgggcagaggggctcttcacttcccagtaggggcggccgggcataggagcccctcacctcccggacggggccgctcgccgggcgggcccccctatccccccacctccctcccggacggggtcgctgccgggcggagacgctcctcacttcccagacggggtggctgctggacggaggggctcctcacttctcagacggggcggttgccaggcagagggtttcctcacttctcagacggggcggccgggcagaggcgctcctcacatcccagacagggcggcggggcagaggtgctccccacctctcagacgatgggcggccgggcaaagacgctcctcacttcctaaatgggatggcggcggggaataggcgctcctcgcttcctagatgggatggcggccgggcaaaaacgctcctcactttccagactgggcagccaggcagaggggctcctcatatcccagacgatgggcggccaggcagagacgctcctcacttcccagacggggtggcggccgggcagaggctgcaatctcggctctttgggaggccaaggcaggcggctgggaggtggttgtagcgagccgagatcacgccactgcactccagccttggcaccattgagcactgagtgaacgagactccgtctgcaatcccggcacctcgggaggccgaggctggcggatcactcgcggttaggagctggagaccagcccggccaacacagcaaaaccccgtctccaccaaaaaaaaccgaaaaccagtcaggcgtggcgacgcgcgcctgcaatggcaggcactcggcaggctgaggcaggagaatcaggcagggaggttgcagtgagccgagatcgcagcagtacagtccagcttcggctcggcatcagagggagaccgtggaaggggaccgtggagaggggagaggg

SEQ ID NO: 4314 - DNA, 925 bp, Artificial sequence
  DNA replication origin
ggctgcccagtctggaaagtgaggagcatctctgcccgcccgccatcccatctaggaagtgaggagcgtctctgcccggccgccccgtctgagaagtgtggagaccctccacccggcagccgccccatctgagaagtgaggagcccctctgcccggcagccgccccgtctgagaagtgaggagcccctccacccagcagccgccccgtctgggaagtgaggagcatccccgcccggcagccaccccgtccgggagggaggtggggggggtcagcccccccgcctggccagccgccccgtccgggagggaggtggggggggtcagcccccccgcccagccagccgccccgtccgggagggaggtgggggaggtcagcccccgcccggccagccaccccgtccgggaggtgagagacgcctctgcccggccgcccctactgggaagtgaggagcccctctgcccggccacgaccccgtctgggaggtgtacccaacagctcattgagaatgggccatgatgacaatggcggttttgtggaatagaaaagggggaaaggtggggaaaagattgagaaatcggatggttgctgtgtctgtgtggaaagaagtagacatgggagacttttcattttgttctgtactaagaaaaattcttctgccttgggatactgttgatctatgaccttacccccaaccctgtgctctctgaaacatgtgctgtgtccactcagggttaaatggattaagggcggtgcaagatgtgctttgttaaacagaagcttgaaggcagcatgctcgttaagagtcatcgccactccctaatctcaagtacccagggacacaaacactgcggaaggccgaagggtcctctgcctaagaaaaccagagacctttgttcacttgtttatctgctgaccttccctccg

SEQ ID NO: 4315 - DNA, 1047 bp, Artificial sequence
  DNA replication origin
ccacacagacacagcaaccatccgatttctcaatcttttccccacctttcccccttttctattccacaaaaccgccattgtcatcatggcccattctcaatgagctgttgggtacacctcccagacggggtcgtggccgggcagaggggctcctcacttcccagtaggggcggccgggcagaggcgtctctcacctcccggacggggtggctggccgggcgggggctgacctcccccacctccctcccggacggggcggctggctgggcgggggggctgaccccccccacctccctcccggacggggcggctggccaggcgggggggctgaccccccccacctccctcccggacggggtggctgccgggcggggatgctcctcacttcccagacggggcggctgctgggtggaggggctcctcacttctcagacggggcggctgccgggcagaggggctcctcacttctcagatggggcggctgccgggtggagggtctccacacttctcagacggggcggccgggcagagacgctcctcacttcctagatgggatggcgggcgggcagagatgctcctcactttccagactgggcagccaggcagagacgctcctcacttcccagacggggtggcggccgggcagaggctgcaatctcggcactttgggaggccaaggcaggcggctgggaggtggaggttgtagcgagccaagatcacgccactgcactccagcctgggcaccattgagcactgagtgaatgagactccttctgcaatcccggcacctcgggaggccaaggctggcggatcactcgcggttaggagctggagaccagcccggccaacacagcgaaaccccgtctccaccaaaaaaatacgaaaaccagacaggcgtggcagcgcgtgcctgcaatcgcagacactcggcaggctgaggcaggagaatcaggcagggaggttgcagtgagccgagatggcagcagtacagtccagcttcggctcggcatcagagggagaccttggaaagagagggagagggagacg

SEQ ID NO: 4316 - DNA, 949 bp, Artificial sequence
  DNA replication origin
cccgtccgggagggaggtggggggggtcagcccccctgcccggccagccgccccgtccgggaggtgaggggcgcctctgcccggccgcccctactgggaagtgaggagcccctctgcccggccagccgccccgtccgcgagggaggtgggggggtcagccccccgcccggccagccgccccgtccgggagggaggtggggggggtcagcccccctgcccggccagccgccccgtccgggaggtgaggggcgcctctgcccggccgcccctactgggaagtgaggagcccctctgcctggccagccgccccgtccgggagggaggtggggggtcagccccccgaccggccagccgccccgtccgggagggaggtgggggggtcagccccccgcccggccagccgccccgcccaggaagtgaggggcgcttctgcccggccgcccctactgggaagtgaggagcccctctgcccggccaccaccccgtctgggaggtgtgcccaacagctcattgagaacgggccaggatgacaatggcggctttgtggaatagaaaggcgggaaaggtggggaaaagattgagaaatcggatggttgccgtgtctgtgtagaaagaagtagacatgggagacttttcattttgttctgcactaagaaaaattcctctgccttgggatcctgttgatctgtgaccttacccccaaccctgtgctctctgaaacatgtgctgtgtccactcagggttaaatggattaagggcggtgcaagatgtgctttgttaaacagatgcttgaaggcagcatgctcgttaagagtcatcaccaatccctaatctcaagtaatcagggacacaaacactgcggaaggccgcagggtcctctgcctaggaaaaccagagacctttgttcacttgtttatctgctgaccttccctccactattgtcccatga

SEQ ID NO: 4317 - DNA, 1212 bp, Artificial sequence
  DNA replication origin
ccaccccacccaggagcccagctggcttcccctagtggatgctgcgccggggcaatgggtggagctgcctgccagtcccacacagtgcacccgcactcctcagtccttgggcggttgatgggaccaggcgcggtggagcacggggcggcgcctgtcggggaggctcgggccatgcaggaacccactgcaggggggcttgggcatggcgggctgcaggtcccgagccctgccccgcaggaaggcgtctgaggcccagcaagaatttgagcgtggcgcgggccggccagcagtgctgggggacctggcgcaccctccgcagctgctggcccgggtgctaagctcctcactgcctggggccagcggcaccggccggctgcttcaagtgcgggcccactgagcccgcgcccatccagaactcgcactggccagtgagtgctgcacgcagccctggttcccgcctgtgcctctccctctacccctctctgcaagcagagggagccggctccagcctcggccagcccagagagggtctcccacagtgcagcagcaggctgaagggctcctcaagcatggccagagtggatgccgaggccgaggaggtgctgagagtgagtgaggcctgctagcacgttgtcacctctcaggatgatgtaggggaaggagggaggaagtgaccaggacaggaaataacatttcacaagaagtgctcttaagggaggaaggttagaatgatccatgtggtattggattagagttagagacatcagaatgaactcacgaatttagcttaatatagctacagatggttacaaatagatatttgcagatatgtatcgattcatggattagtatgtatagatacatacattttattgctctgtcagctaaaagggcctagaaaccacaacaccccaatagtaatgagcacccctagcacccagatcttggtttctaataccattctctagtaaaagaaaccaggaatcactggagaaatggctgattctagggctgcactaataacatacaaaaggaaactatagtgccagaaagtaaggaagtgctggggtaaaaagataggggtatgtcaaagggatgcaagagccaactgaaaaggttaccaatggccaaagcttgaacaacttgagcaataaagtaaataatgtagtattggctgataacccaaagtataaaataaatgttaatccacct

SEQ ID NO: 4318 - DNA, 1024 bp, Artificial sequence
  DNA replication origin
tccccacagcccaaaccacatttatcctgcaaatattaaccacttttcatagcagtgcatccatgagttattatgctaacagctgcctctgcttcattgtgcaaaagatattttcccagcaaagggtggggacgcagggcagaggagggtgagaagggaggaaaatcccaccctgtcacgctcgtttaaagttatcatgtgccgcccgccccccattcattcaacacacatttaccttctggcagcaactgcgttatgagatataaatatgaatagaatgcaatgctctacctaagggaattcatggctaagaaaaagaaatagacacaaataggtttgttgtaaagcgaagtggaattagagcaggtccagcaaagaaaggcagcagggacaagggacaggcattccaggcagcaggacagggtgagccgaggcatggaggtgggaaacagctcactgtgtgtgtcgtatctctccaggcaaagctccctgaaagaggaaagagccagggaagtgacaagcagagcccagaggggcttgcaagccatgttaaggagcttaggggtggggtgggaactgaagggtttcaagcaggggaacaatggcagatgcgcagttgcgtggatggtagatgggaggatggatcagattagggcaaaactgaaagcagggaccagtcacaagaggaacttcattccagggagagatgttgagggtctgaactgaggcagtgcagtgggaagagaaggatgaattagaaaacagttgcagagggacttgggaggtcatgggagctagatggggatgagggctgagggagaagtagcagtctggaggggtctttgagtaaggctggaacccctctctagaactctctgcccagtgcccagagaacctcacaggagataagaagatggacacacagagttgatggctgctcaagacattgtcccctcccctacaatcccccgttcaaagctggtgaggagtatggccaagcagtctgaccccaggactgtggtcc

SEQ ID NO: 4319 - DNA, 1374 bp, Artificial sequence
  DNA replication origin
cccccccccccccccccccccccccccccccctcccccccccccctccccccccccccccccccccccccccccccctccccccccccccccccccccccccccccccccccccccctccccccccccccccccccccccccccccccccccccccccccccccccctctcacccccccctccctcccccccccccccccccccccccccccccccccccccccccccccccccccccccccccccccccccccccccccccccccgccccccccccaccccccccccctacccacgcccccccgcagccccgcccgcccgcaagtacgcccgccggaaggaaggcagggaggtaagggggagggagggagggaggaaggaaagaaggaaggaaggaagggagggaaggaaggaaggagggaagggggagggagggagggaggaaggaaagaaggaaagaaggaaggagggaaagaaggaaaggaaagagagagagagggaaggaagtagagcaggagggaaggaggaagggagggaggaaggaggaaaggaaagaaggagaaaggagagaagaaggaaagaaggaaggagggaaggtaagaaggagagggagggaaggaaggagggagggagggaaggaggagagaacaaaagatgaaagattaaagaagggaagaagaaggaagaggataaggaagagaagatgaagaaggaagtgaaggtccaagaagatggtgaaatgttaacaggtgacaaaaagtacaaactaccaaatactcaaattccatcttctggagcgaggagaatggattctgatttctaactgtgcagcaaagtagatgatgaaaagggaaaactggagcctacagtaagttagagaacaaggaaaaatctaggtatattttaaaataaaatatataaaatttaggcaagattttaaatcttctgggtccaaacaaattatattccagagtacaaaagaaatttgcagatagaatcacagaaccactagcggtaagtttgagaaatcatggagagtggggaaaacgccagaaaccttggggaatgttctgttttgcaatatacgttgcggaaaaaaaaaaaccaaaaacaatagattctgaaaactacagaccataaatctgatgggattctaatcaaggagaatgagtgctattagaccttgcagcggtcagaacacttttttttttttttttttttttttgtgagacggagtctcgctctgtcacccaggttggagtgtagtggcgctatctcagctcactgcaagctccgcctctcgggtttatgccattctcctgcctcagcctcctgaatagctgggactacaggcgcgtaccaccacacccggct

SEQ ID NO: 4320 - DNA, 1033 bp, Artificial sequence
  DNA replication origin
gattggaaaatgcaagaatgtgcttctttgactctggccttcctctaacagccctgcttctgttaacacagcctttttgcagcttccttgacgtcattggctacaggctacagctgttgctagtcaaaggcattgttcctttgagctagcaggcactttgttctctcccatgacacattgttttatgagctcactctagaggagaaacattctatccctgtgctcaagttcttcaggagcacctcactgtctccctctgcccacccacctgcacctgacagctgtgggctgtgctctcagggaggcaccgtcagatgctaccagactacagaggagagcaccctcaatcctgactgaaggtttgggaaaaggctgctcagaagaggtgatacttgatatgggccctggaggaggagaagcagtttgagaagacagcagtgagagatggcatccgggcaggcgagaaatgtcagtggtcatggaggcagcatgaagggactgttggctgcagaaacctggcaaggctcttagagacagagacgaagagggagatggggctggagatggagatgatagagacagaaagattgaagatggcagagtgggggctatggggaagggtgatgaagcaggaaagatagatcgaacgagactgcgaggagcctgtgtgcctgggctttattttggaggcaatgagaaacagaaagtgtttttgagcatgatgggacaatgaggagttctgtggtttaggaaacccagcagtcacgggaagtgcagattcaaagtaagaaaacgtcccagggtttggtgatgatcttggtgggaagtgacacaggggtagtggggatggaattgaaagaaaggatgaacttccagagtatggctgtgctcagtagacaggaatcagggagggcaggaggagagtaaaagggtcctctgagcttaaatccagatgttgaggagatggtggtactatcaatggaggtggagctcttaagaggaagaaagatgggaaagaaaaggatgaggtttt

SEQ ID NO: 4321 - DNA, 1420 bp, Artificial sequence
  DNA replication origin
cgcgaacgcgggggcccgctcaggggcaaggcgccggctgccaggccggggcccgggtgcaccacgtaggtgatcctccgcagccggccgtgcgccgaggacgcgaggagccctgcccagagcaggagcccccacctgagccaggcccccgccatcgcgggccccagcgggcgcgaccggtcgcgcgcggtccggccccctcccccggccgtgcggctcgcctttccccgcgcgttcgggctcccccgagagctgccgagagcccgggaaaggcgggaggagaccaagtcggtggcgagggaggaggctctgcgggcagctgagcggccccagaccccggccgattgtggctgggagcaggaggagggcgtgggggtggggagcgcggagcccggggagcggggaggggcgaggggagcgggccgcgcaaggtgagggtccgcgcgtccggccgggggttgcagcgcgcgccgcagcggggcccggcgagggtggccgagagcgagcgagagcgcgcgggacactccgaggcagccccggcggcgaagtcttttaaaagtttctctcccgtggccccgagtgtcagacctgagcagccaatctccggcagacgtgacgtcaggcggcagatcctaattggggaaggcgtgcgaggagcccgaaggcgcgccgccaccctccacatccactggggttgcccccgtgggtcgccgaggcggaggtccccacgccccggtcccgtgtcccgggagaggacaaagcgctcagcaaagttactgaacgatcctgtcctttcagaagccccatgcgtttgatattgtttggaagccccggcattttcttatccgtgtttgctgtgatacttgctgcggggttgaattcagataccaaatcgggccccagaaagggctgtcggggcgcgctgaggtctccatcggaaaccgtttaggtggctccctgtggggctgtaaagtccccgtggctgcttctcggtgtgcagcctctggtaccctacttctcgcttggcagggatgggagtgcagggcgggcagcagagggcgcccgcgtgggacggggagaaccgcccagggacaaccgcagagacagccctgtccctgggcctttagggtaggactagagttcaggatccctgaaaaccctaagccattattgtttttaataaaggcgaatcagttcacgggaccgtaatccgaccgggtcacccaacttggagatgacctgacccattaagagagatggcagaatgtaccagggatagagtctggggggtcatagtgctctttggggaaaaccatgaaataatgacatatttacttttagcatttgaattcaaaacaatgtcgcatgattttattatgtgaatgcaatagaaagtccacagtcatagcagtcttcctct

SEQ ID NO: 4322 - DNA, 1422 bp, Artificial sequence
  DNA replication origin
caaacaaggcaggcaagttgtgcgctccaaggtgccgcaggagacccagagcggcggaggctctaggctgcaggttcaccagaagcagcagctgcaggggtaagcccacacccccttccgcccgcccgcccgcctcgcgcgcaccgcccgcggagggacctgcggggtcagggccactcggagccccgcggtggccagggcggtcgcgcgcggtgggtcggctttctcctcccgcctccgcctgctctgggcgccgcgggaagaggggagtgcggggaagcccaggaacttttactgacgtgaaactccgagtgcattgttaccgagctgcgggtaaacacaaaaggcatttctgcctggggcgtaaccttctgcgcgcaaacccaactgcttctagaagatgggcgtaaacttgaggtcactacagtttaatccctcagcatcaattaaactctgcaactgagttttaattttggtctagctaatgaaaaaaatgtttcgagggcgggctagccgtaaagatccagctcctgttctgtggcctggaactttgcagcatcagagaaatcatgggcttggacttcgctgcacctgtggggtctgctttcctggggtggggtgtcttggtattgataaaagttttggttggaatgtttctgttactgggcgctcatagtgccttcccgttgtgggaattcatctcaggttggggtgtaggggaaaacttgttttgcttagttggcatgtttttttcaggggtgattccaggccatgtgccctcactcctttttggacagttctctctgaaactcatttccaatttaaaatgttggcccagataatagaaaaaataaatttggctctactgtaatttgggggtaagaaaaccatttgttgggccctgttctcccttcctgtatagccctaggtttatgcaggctttttggttctcccagcattccctgatatatgtatgggccttgcccctctgcttgggcagctttgggttgggcatccagggtacctgttaggactctctctcatccagagggttgcagaagctggaggctggcctttctggaacatgctggaagcttgggttcttgggaagggggtctttctgctgctggactcagcgatcttgctttgtttcagggtcaatgtctgtggagggcggtgctgtcatggctggagtaaggcccctggctcccagaggtgcaccaaacgtaagttgccatgttcacagtggccctgcacagtaggcaaagtggggggaggtgtccacatgggggcatctcacaagggccacttgaaagggctcgggggaagttgaagtctgaaatacaatccacccaggcttcattaccacctaggaagggctgggtcagggtaatgttagtatcaatgccagcagcaatacat

SEQ ID NO: 4323 - DNA, 898 bp, Artificial sequence
  DNA replication origin
caaaatggagtcgcctatgtctacttccttccacacagacacagcaacaatctgatttctctatcttttccccacatttcccccttttctatttgacaaaaccgccatcgtcatcgtggcccgttctcaatgagctgttgggtacacctcccagacggggtggcggccgggcagaggggctcctcacttcccagacggggcggctcccaggcggaggggctcttcacttcccagacggggcggctgcgggcggaggggctcctcacttctcagacggggcggccgggcggagacgctcctcacctcccagatgggttcgcggcggggcagaggcgctcctcacatcccagatggggcggcggggcagaggcgctccccacatctcagacgatgggtggccgggcagagacgctcctcacttcctagacggggtggtggccgggaagaggcgctcctcacttcccagactgggcagccgggcagaggggctcctcacatcccagacgattggtggccaggcagagacgctccacacttcccagacagggtggcggccgggcagaggctgcaatctcgggactttgggaggccaaggcaggcggctgggaggtggaggttgtagcgagccgagatcacgccactgcactccagcctgggcagcactgagcactgagtgaacgagactccgtctgcaataccggcaccccgggaggccaaggctggcagaccactcgcggctaggagctggagaccagcccggccaacacagcgaaaccccgtctccaccaaaagaacacgaaaaccagtcaggtgtggcggagcgcgcctgcaatcaatcgcaggcactcggcaggctgaggcaggagaatcaggcagggaggttgcagtgagcggagat

SEQ ID NO: 4324 - DNA, 1272 bp, Artificial sequence
  DNA replication origin
ctacttctttctacacagacacagcaacaatctgatttgtctatcttttccccacatttcccccttttctattcgacaaaactgccatcgtcatcatggcctgttctcaatgagctgttgggtacacctcccagacggggtggcggccgggcagaggggctcctcacttcccagaaggggcggccgggcagaggcgccccccacctccctgatggggcggctggccaggcgggggctgccccccacctcccccggacggggcagctgccgggcggagacgctcctcacttcctagactgggcggctgccgggcggaggggctcctcacttcccagacagggtggctgccgggaggaggggctcctcacttcttagagggggcggctgccgggcagaggtgctcctcacatcccagacgggacggcgggacagaggtgctccccacatctcagaggatgggcagccgggcagagacactcctcacttcctagacgggatgacggccgggaagaggcgctcctcacttcccagactgggcatctgggcagaggggctcctcacatcccagacgatgggcggccaggcagagacgctcctcacttcccagacggggtggcggccgggcagaggctgcaatctcagcactttgggaggccaaggcaggcagctgggaggtggaggttgtagcgagctgagatcacgccactgcactccagcctgggcaacattgagcactgagtgagcgagactccatctgcaatcccggcacctcaggaggctgaggctggcagatcacttgcggttaggagctggagaccagcccggccaacacagcgaaacccgtctccaccaaaaaaatacgaaaaccagtcaggcgtggcggcgcacgcctgcgatcccaggtactcggcaggctgaggcaggagaatcaggcagggaggttgcagtgagccaagatggcagtacagtccagcttcggctcggcatcagagggagaccatggggagagggagaggcagagggagcatgaatcagaaatttatccttaaaacttgggtctatagcagattccatacctaaggctattgtagctcaataaactttcttagaatctcttgctaaagtggcattggataacaggattgcctggattagttattagctgagaaggtggtggttgtataattgctaacactgcttgctatgcatgtatgaattcctctgggaaagtagaaacacaattatacaagataaaagaaaacccaagctagc

SEQ ID NO: 4325 - DNA, 975 bp, Artificial sequence
  DNA replication origin
agataggggtggggccgatttataggatttgggtaggtaaaggaaaattacagtcaaagggggatgttctctggtggggaggggtggggtcacaaggttctcagtgggggagcttttgagccaggatgagccaggaaaaggaatttcacagtttgccagtcctgggcgggggcaaatcctcgagcttgatgtgtaggaaagggagggggcctgagcaatccttgaggggtagtagaatagcagatggaacattgagaagtgatttctttgaggatagatttccacgatggaaaggaaatgagaggttctaagaggcaggctagtggcttgtactatagcatagcctgcctttgctagtgtgtggtgattaggcctggtggaactgccatcagtaaaccaagtgtgatcagggtgaggaacaggaaagaaggaaatatggggaaatggggtgaatgtcaggtggatcagagagatacagtcatgaggttcaggtgtggtatcaggaataatgtgggaggccggattgaagtctgggccaggaacaatggtaattgtgggagactcaacaaagagtgagtacagctgaaggagccggggagcagaaagtatatgcgtcaggtgtgaggaagaaaatagattttggaagttaggagaactgtagagagtaagttgagcatagtttgtgatttttggggcttctaaaagtattaaagcagtggcagccgctgcatgcagacatgagggctaggctaaaatagtaaggtcaagttgtttggacagaaaggctacagggcgtggtcctggctcttgtgtaagaattctgactgcattaaccatgcctaggaaggaaaggagttgctgttttgtagaagggattgaggtttgggagattagcgggacacaatcagcagggagagcacgtgtgtttttatgagaattatgccgagataggtaacagatgaggatgaaatttgg

SEQ ID NO: 4326 - DNA, 1173 bp, Artificial sequence
  DNA replication origin
gtttttcatatttgttgaaagagcctaaaagctaactgatttgggagaggtcggataaagaaaaaggagcattaaccttgattatgcctttagcttcagccacctttttaagaggaaattgctgggcaggtgggggagggctagtcgtggaacaaaactgtaagccggacctggtgtgaggaagggaggtgataaaaggattatagggtggaggagcagaggctgaggaagaattgggacctagctcagcctggcaaggaggggagaggtcagatgggtctgtagaaaaggaagagtagaaagacttagcgacgcttggggttgggactgaggggacaggagggagggaaagaaggaggatttgggacgggttgcattgggaacagagatttgggagggactgatgtgtaaaagaatgcctggacgtcgggcaactcagactgtttgcctattttacgacaagaattatttagatcttgtaggatggaaaaattgaaagtgccgttttctggctgtttggagctactgtcaagtttgtattggggtcaagcagcattgcagaagaaaataagatgcttagattttaggtcaggcgagagttgaagaggttttaagttcttaagaacacaggctaagggagaagaaggaggaatggagggtggaagcttgcctatagtgaaggaggcaagtttaaagagaagggtagagacatggaaggggttcaggggttcttaccttctagaaaaggggaaagggttcagggcatggaaataagggtttagggtgcagagataagaggttggggcacggaaaaaggggttgggacacagagataagaggtcggggtgaggaaataagggatcagggcacagagataagaggtcgtggcacggaaataagtggttggggcacggaaataagggatcggggcgtagagataagaggttcaggcatagaaataagggatcgggggttcttgcccctagaaaagcagagaaggtgtagagacatggacagaaggggttgggggcttcttgccccttagaaaagtggtacttgccgctaaggatgaaggagaaggggttggggggttcttgccttccagaaaagcagagaaggggtagagacatggagagaaggggttggggggttcttgccccctagaaaagcagt

SEQ ID NO: 4327 - DNA, 1323 bp, Artificial sequence
  DNA replication origin
cagtgagctgttgggtacacctcccagacggggtggtggccgggcagaggggctcctcacttcccagtaggggtggccgggcagaggcgtccctcaccttccagacggggcggctggccgggcggggagctgactcccccacctccctcccggatggggtggctggccgggcggcgggctgacctccccgacctccatccccgacggggcagctggccgggcggggggctgaccccccaccttcctcccggacggggcggctggccgggcgggggactgacccccccacctccctcccagacggggcagctggccgggcagaggggctcctcacttcccagtaggggcggccgggcagaggcgcccctcacctcccggacggggtgtctggcctggcgggggctgacccccacctccctcccagacagggtggctgccaggcggagacgctcctcacttcccagatggggtggctgccgggcggaggggctcctcacttcccagacggggcggctgccgggcggaggggctcctcacttctcagacggggcggctgccgggcggaggggctccttacttctcagatggggcagttgccaagcggagggtctcctcacttctcagacggggcggccgggcagagacactcctcacctcccagacggggtcgccgccgggcagaggcgctcctcacatcccagacggggcggcggggcagaggcgctccccacatctcagacgatgggcggcagggcagagacgctcctcacttcctagatgggatggcggccgggacgaggcgctcctcacttcctagatgggatggcggctgggcagaaacgctcctcgctttccagactgggcagccaggcagaggggctcctcacgtcccagacgatgggcagccaggcagagacgctcctcacttcccagacggggtggcggctgggcagaggctgcaatctcggcactttgggaggccaaggcaggcggctgggaggtggaggttgtagcaagccgagatcacgccactgcactcccagcctgggcaccattgagcactgagtgaaccggactccgtctgcaatcccggcaccttgggaggccgaggctggcggatcactcgcggttaggagctggagaccagccccgccaatacagcgaaaccccgtctccaccaaaaaaaatacgaaaaccagtcaggcgtggcggcgtgtgcctgcaatcgcaggcactcggcaggctgaggcaggagaatcaggcagggaggttgcagtgagccaagatggcagcagtacagtccagcttcggctcggcatcaga

SEQ ID NO: 4328 - DNA, 976 bp, Artificial sequence
  DNA replication origin
aggagcccctccgcccggcagccgccccgtctgggaagtgaggagcccctccgcccggcagccaccccatctgggaagtgaggagcgtctccgcctggcagccaccctgtctgggagggaggtgggggtcagcccccgccaggccagacaccccgtccgggaggtgaggggcgcctctgcccggccgcccctactgggaagtgaggagcccctctgcccggccagctgccccgtctgggagggaggtgggggggtcagtcccccgcccggccagccgccccgtccgggaggaaggtggggggtcagccccccgcccggccagctgccccgtcggggatggaggtcggggaggtcagcccgccgcccggccagccaccccatccgggagggaggtgggggagtcagctccccgcccggccagccgccccgtctggaaggtgagggacgcctctgcccggccacccctactgggaagtgaggagcccctctgcccggccaccaccccgtctgggaggtgtacccaacagctcactgagaacgggccatgatgacaatggcggttttgtggaatagaaaggggggaaaggtggggaaaagattgagaaatcggatggttgccgtgtctgtgtagaaagaagtagacatgggagacttttcattttgttctgtactaagaaaaattcttctgccttgggatcctgttgatctgtgaccttacccccaaccctatgctctctgaaacatgtgctgtgtccactcagggttgaatggattaagggcggtgcaagatgtgctttgttaaacagttgcttgagggcagcatgctcgttaagagtcatcgccactccctaatctcaagtacccagggacacaaacactgcggaaggctgcagggtcctcagcctaggaaaaccagagacctgtgttcacttgtttatctgctgaccttccctccactattgtcctatgaccctgc

SEQ ID NO: 4329 - DNA, 1131 bp, Artificial sequence
  DNA replication origin
tcaatggcgactccctcaccgagtacgaagcgggcgtttgcgaaggtacggccgcccgctgcgggccccctcccacctggcctgcgccgccccctcggcgctggttgtgccgaacaaagtttgggcgagactttctggaggaaagagggctctgcgggaagaggggcggccgccgcccccaggagagtgcccccgcggccctgcgttccctctccttgttccccccgacgcttaggcagtcgcgggcgaggttgggtatggtgggtgggggcgagcgagtggaggatcgcccctgtccccgcgcagacgcgcacacgtgtggccgttcctgctgggactgggtggcccggccttgctccccgaggtgggggcgccgcgggcggggggcactgcagattctgccgcgcgcgagcccctcggggagcccggccctaccgccctccccgcactggcgcagtgtggcaccgtgagccgcacgccggccgcgaaagtcctttttctgttggcggaggagacgtgtctccagctcgcactccccgagtgactcttattattttttccttgagctcttccttcaccccttcctcctcctccgcagataaatcagtttcagccgcggaatatgtcagcccaggggaagttacacacggtggttactcatttatttgcccattgtaaacggtcaaaggctttctctcctgaaaggaaaggggggtgggggttgcacctgggagtaaaaagttgttgctattagtggctgctttttaatatcagatacccgcgtgtttcctgtcgtgttgccggttcctcctttttgtttgtttgacagcggggattgttctgctggcttctccagcacgcattgtgctccgcggtgtcgagattgacggtgggagaaacagattagattagtggagtctttctcgttggggagccaatgttagtgcgtgttggctttaatccctgcccgcttgcgtcggccttcagggtgcctggtctggtttggggtctagagcgaggcagtgagttattttgatgtggctaacgggggcacggttcggtaagcatcagttaaaagtgggatccctgctctggctgacgttgggctgatgatgctgttccgggggcatc

SEQ ID NO: 4330 - DNA, 1522 bp, Artificial sequence
  DNA replication origin
aacagagtgagaccctgtctcttgagaaaaagaaaaaagttattggttttcccattgcctccaaggcattcagagtggttgttctttctcataatatcattttataaatattcttttagacagtgatctcatacagttactgaaagagtatttacataaaccctgtatgctgtagctcagcatttgatctttgatatttcttctgtggttttgatacatcagttgaaattattctacataggtcagtatcattcagaaaacaccacacatcatagccaggtgctttaggtccacgctcagtctaagttcttcccatcattattctcgtgtgtggagagaggaagggaaggaaagaaggaatgaaggagagagggaaggaaagagggtgggagggaaagggaaggaaggagagagggggaaggaaggaaggaaggaaaggagggagggagggtgaaaaggagagaaggaaggacagagggagaaggaaggaaggtgagggagtgggaaggagagaggggaaaggaaggaaggagggagggaaggaggggaaaggagggaagaatgagggagagggcaggaagggggaagaaggaaggaaggaaggagggagtgggaaggaaggagggagaaaaggatgggaaagataaggaaggaaggagggtggggaaggagggagggggaaggaggaaagaaaggatggaggggacaggaaggagggatgagaaaggaaggagggagggggaaggaaagaaggagaaaaggagggagggaggaggagggaaggaaagagggagggaaggggaaggaagggagggagggggaaggaaggaagggaaaaatacagacaggaaggaaggggacaggaagggagggagagagggaggggagggacaggaaggaaaatataggcaggaaggaagggaaggacagggagggagagagggatagggaagggagggagaggaaggaagggagagagggagggacaggaaggaagggaggaaggaagggagagacaggaagagggagggagggacaggaaggaaggaaggaaaatacagacaggaagggaaaggaagggaaggaaggaaggaaatacaggaaggaaaaggaagacaggaagaaggaaaaggaagacaggaagaaggaaaaggaagatggaaggaaggaaggaaagaaaaaaaaaagaatatagacagtatagaccactgcttggccttgagtcagaagagttatggacaagatggaatgaggagttttacctcctgtctggtttctttgtacggtaacactgttactcaaattttattcagtgatattgcattgtatgggccaaggttcatgtaaaatataatcagtgatactgctctatcaaacattgcttcttttcataaagaattctcagcaaaatagactctaaatttgatggccaaaactaatgtcctcaatgcagtgtccaggctcagtctaagttcttcccatcattattctcatgtgtatggagagaggaaggaaagaagga

SEQ ID NO: 4331 - DNA, 1071 bp, Artificial sequence
  DNA replication origin
ccgtgatgggccgcacggccgtcctcgggggctcggcgcccggatccgaggggcggaagcacaggctcagcttctcctccaagctgcaggccggggccgggaaaccgtcggcgcccccacccgcctcggcccccgcctccgccccaggctcggggctcgcgttacagttctcctggtccaggaggctccgggccggctcctggaactcatagaaatcctgccagtccccgtccgccgccatcgccgcccggagcagtcgcgcgccccgcccaggccggcccagcccgcccagcccggccccgccccggcccgaagccccgcccccgcccgctaccgtgctgacagatcccaggctgtcccaaccctgggtctccggtggcctgagtcttcctggagttgaacgcggtgctactagaaagccaagaccttaactgccttgagtcacttcctatattctctatcatttaggaataacttccctgttagcttcccttattagcaacttggcctaaatgtggctaaaataaaggacttctttaaacttacgacctaatatcagattacgccccgaaagtcgttttccccaaggtaacctgctcctttcctaacttgccaaccagaataacagccagagtcaatgggaaatgtttaggtggtaccgaagttcattcctcaaatattttacctctcacgtgcaaagcactggctagatcctgcagaacatacaaagataattatgccagttaacatttgcaaagcacttagagcaatgcctaatagtagataccctatgtgtatgttataactaatacatgggtgccccatacacagggcttacaatgtcggagtgataagagtaacaagaaattgtttagacctcataaaaactaagtgtgattgggcggttcagttttgcaagatgaaaagagttatggagatggatggtggtgatggttccacgacagtgttaatgtgctgaatgccactgatctatacacttacagatggttaagatagtaattttatgtttattttactacaatacaaaaaaattggagtaggccaggcgag

SEQ ID NO: 4332 - DNA, 983 bp, Artificial sequence
  DNA replication origin
cccgtcacgggctcggccggcccccgcgcccaggaggctgctccctgctgactggggtgtgggcgggagcggcggagggaggaggaggcgctgcttgccgccgctgttgcctccgctgctgggcgccggggcagctccccgggtatctgcggccgccatggacgagcaggcgggtcccggcgtcttcttcagcaacaaccacccgggcgccggcggtgccaaggggctcgggcctctggcggaggctgccgcggccggcgacggggcggctgcggcgggggcggcccgagcccagtacagtctcccggggatcctgcacttcctgcagcacgagtgggcccgcttcgaggtggagagagcccagtgggaggtggagcgggcggagctgcaggtaaagaccctcccggcctggccgtcttcatcccgcctctttgctcccttccgccccgccccggacccttctccccctcccccagccttctcgcgtcccctccccctttgctgccgcccatcccacccggagccccgtccccttcttctcttcgccttttgcctttcgctgaccccacctcgaccctgttctcactcccgctcctggtgcgttgtttaccctccccacgcctgttcgtccgccccatcccactcttaactcccagactcatttcaactctctggccatcctgcatctcagggctgccctctcggtttactaattgggctggcagtagttttgagagacgcggagcaaatcgtccgctgccctggtgtgccccttcctaggtctagagacagtctccgcagaacgtgccggctttggcccctctcttcaaggaaggtgatcaagaagacaacagaagttgtgtcaggccttgagtcgaggcgagaagttgacgttgggcaaaagtgttattcatatatcagatccctttttttatatatgtaaatgtctgttctccactttcttccgaccccccggccccctc

SEQ ID NO: 4333 - DNA, 916 bp, Artificial sequence
  DNA replication origin
aggggcagcacgtgggtgccaagcccgcctgccggtgccaagcccgcccgccggtgccaagcccgcccgccagtgcctctcgcgcgcactctggatccagcgccaatttaccccaatcccgtagcagacgagggcttgtgcgagagggggccgggcggctgcagggaaggcggagtccaaggggaaaacgaaactgagaaccagctctcccgaagccgcgggtctccggccggcggcggcggcggcggcggcggcggcgcaggtgagcagggcagggggcagccgagggagcgcggggagcgggggccggggggccacgtacgaggggctgcaggcccagccggggcgggactcgccaatcctgcgtccccagctcaggacgcggacgctgatccgaagcccctggccccggctgggtcagcactgggagagcaggcccaggtccgcagcccgggtgtggggccctccccaaatccagggaaaggatcgtggagcggggtggggactgaaagccatttccttcccgtgaagaatttttatcagtgcaagtaacaaatatttcccaggcagcagttgtggggcggggtctagtggaagacgaataggcctagtggcttgacacatggaaaatacggaggcctgaaatactcatagactggctgaacaatctttggctaaaaatctcttccgtggagagttgcagtagtttcccaattgcctggccgcagttcctgttcccactccgtatcctcacccctgaacctccaccccctacctcttctccacacctcagcatctggaatgttcctttaagtaagaaccagactctcccctgctccgaccttccccgtagctttcctgtctcatcagaatcctataaacatttattaaggctcacaggcaaggcccctcgcac

SEQ ID NO: 4334 - DNA, 1163 bp, Artificial sequence
  DNA replication origin
ggggcttcggatcagcgtccgcgtcctgagctggggacgcaggattggcgagtcccgccccggctgggcctgcagcccctcgtacgtggccccccggcccccgctccccgcgctccctcggctgccccctgccctgctcacctgcgccgccgccgccgccgccgccgccgccggccggagacccgcggcttcgggagagctggttctcagtttcgttttccccttggactccgccttccctgcagccgcccggccccctctcgcacaagccctcgtctgctacgggattggggtaaattggcgctggatccagagtgcgcgcgagaggcactggcgggcgggcttggcaccggcgggcgggcttggcaccggcaggcgggcttggcacccacgtgctgcccctgcacggccaggaccctgcacccccatcccccgcccccggggctcctagggttctccgctggcctagtccgctggccgcactaggttctcgaatcaagggttccacttactctcaacacaaatatttggggtggggttgggaagatggatcttaccagctccattctacaatagaggaaactgagtaaatgaactcacccaggggtcctgccgctcgtaagtggcaaagccaggattcagttcaagtcggggcctgtaaacaccaaagcactctttccctcttgccacaccgcggccccctcacctttacaagcctggggatcagaggcctgggggcgtaatctccttcactccgctcccacccatccattcattcatgagcagacacttgccagccgctgtaaaagcacctgtgggccagtcctgctgctaaatagagacacctgcttcctacagtaccccagggagcttcctaccatagtccaacaccagtagtcctcgatttatagaaattctactcacctgatggactgcgacacactcccagagtcacacagagttccagagttcattggcacagtgactaatgagtattgaggcacagagaatttggattaacacaggtagtaagcagcggagttagaattataaccaggagtttgtactctcagtatcttagctgggataagagaggaaggtggtccaaagacagacctcaaatatacattaaatattatgcctaggccggcgcggtggctcat

SEQ ID NO: 4335 - DNA, 997 bp, Artificial sequence
  DNA replication origin
gccgccgccgcgtgcagttggggggttgggggtttgggggatgggggaggggccgccgccgcctcagcccgacgggccgggagaacaaagcggcggcggcggcggcgcgaactttttcggtgtctgttcagcgctccccgaggcgactacttacagtggcaggctcggcccgtcgtgagaaactgcgcccgccagcgtctgagtaccggacgaggcgccagcgaggcttcacgcgcctcgcaggatcccgcccgcctccggcgccccttcctccctccctccccgtcccgtcctggggccggagggcggggggccggggcgcgcggggggcgggggcgcgcggccagcgcggggcctgccgggagctgtagttcctcggcccgcgcccgccgggaggtggccgcggcgggaggtcggggttgtctctgccccgcgaaggggcgccgggagcgccgggtacagtcgggctggctccgcaccctcgagttccgggcgtcttcgtgagcgcgggggcacggggcaggggcgccgcgggagtcgcgagcgtgtctatcagttacacgcggtacttgatcgcgctgttgccgacggtactgtcttttcctctactgccgtgcactcttgagggaggcggtggcgacaatgggccagaggtgatagttggaacgggggacttgtaaggcgtccagagcagagagctgcttccaccctgagatgtcacagccctcccgcatgctcctccctgctgcctgcccccggggtggccgccggcaccgcagctcggcgcccaaaccggcacgtcccaagcccgacgttccggtgactgcaggggttttcccggtgctcggtgtttcctccccgtcggcctttaaacgcgaatgtgaccctaccaccaaagtggagtgcagtccagaatcaccaaacctgggcttccaggtgtctggaaacacaatgttaacatttgttttgctccaaaacaaagtatgaccgtgtcggg

SEQ ID NO: 4336 - DNA, 1035 bp, Artificial sequence
  DNA replication origin
cacctgagtgcgccgccccggccaggccgcagctccccaggtccctctcagcccgggctccggtgggcgcggagggggagggtcgcgttctgtcagtttctagctcgctcccctcagagctgcagccaaaacccggagagtggaataagcgccctgaagatgccggagctcccggctgagcaactggacacgcgacgaacagcagacgctacaggttctcctacccagagggaggcgtttcttctccctcagggtctttcaaaaggatttgcctaaagctggggcaagccggtggcggctgccccagacgcgcgacgaggcgcaagtggcgcagctgccggcccgagagagtaaaattcaggccgcggtggcacctgcgcccgccggtcacccggccaccgccagcgccgccgcccggcgcgcccctcccctccgccggggccggagcgtgaaccgggttaatgaatgctaattttcttaatcggcctccgtctcttcctcctccgcgagtcgtcggcctggggaaggagtaggcgacaggaaagggcggtgttttccggctgggaggtcccagcccgcatggtcagccaggggagggggctgggacccctgggagtcggacgctgggggcctggcctctgccctgagactctcgggttggatggaaatcctggcacaacgcggagaacctcccggataccttggctttgccgagagatatcagcttcaggtcatcaccgcggtgccctgggtctgtctgaaaccttagagggtgcgccttaagccgatgttgtaaacccaggctgactttaaggtgaagtgaaaaggaaacgcacacaatctggaaagcaaaatacttgggtggggtgttaaaagcctcaaagaaaaatagtagttggcaggtcaaatggccatgaggttggaagtcaaatacgaaactcggctgaagtgatgttagaagtttgacaagcaaaaacagtccgtgaagataagagacccagcattgtttcccttcttcaaaagacaactcgtcca

SEQ ID NO: 4337 - DNA, 957 bp, Artificial sequence
  DNA replication origin
tggcaaccgccccatctgagaagtgaggagtccctccgcccggcagccgccccgtctgagaagtgaggagcccctccacccagcagccaccccgtctgggaagtgaggagcgtctccgcccggcagccacctcgtccgggagggaggtgggggggtcagccccccgcccggccagccgccccgtccgggagggaggtgggggggtcagcctcccgcccggccagccgccccgtccgggagggaggtcggggggtcagccccccgcccagccagccgccccgtccgggaggtgaggggcgcctctgcccggccgcccctactgggaagtgaggagcccctctgcccggccagccgccccgtccgggagggaggtggggggggtcagccccccgcccggccagccgccccgtgaggtgaggggcgcctctgcccggccgcccctactgggaagtgaggagcccctctgcccggccaccaccccgtctgggaggtgtacccaacagctcattgagaatgggccatgatgacaatggcggttttgtggaatagaaaggggggaaaggtggggaaaagattgagaaatcggatggttgccgtgtctgtgtagaaagaggtagacatgggagacttttcattttgttctgtactaagaaaaattcttctgccttgggatcctgttgatctgtgaccttacccccaaccctgtgctctctgaaacatgtgctgtatccacccagggttgaatggattaagggcggtgcaagatgtgctttgttaaacagatgcttgaaggcagcatgctccttaagagtcatcaccactccctaatctcaagtacccagggacacaaacactgcggaaggccgcagggtcctctgcctaggaaaaccagagacctttgttcacttgtttatctgctgaccttccctccactactgtcctgtgaccctgccaaat

SEQ ID NO: 4338 - DNA, 1277 bp, Artificial sequence
  DNA replication origin
atccgatttctcaatcttttccccacctttcccccctttctattccacaaaaccgccattgtcatcatggcccattctcaatgagctgttgggtacacctcccagacggggtggtggccgggcagaggggctcctcacttcccagtaggggcggccgggcagaggcgcccctcacctcacggggcggctggccgggcggggggctgaccccccccacctccctcccggacggggcggctggccgggcagaggggctcctcacttcccagtaggggcggccgggcagaggcgcccctcacctcccggacggggcggctggctgggcggggggctgaccccccgacctccctcccggacggggcggctggccgggcgggaggctgacccccccacctccctcccggacggggcggctggccgggcggggggctgacccccccacctccctcccggacgaggtggctgccgggcggagacgctcctcacttcccagacggggtggctgctgggtggaggggctcctcacttctcagacggggcggctgccgggcggagggactcctcacttctcagatggggcggttgccaggcagagggtctcctcacttctcagggcggctgggcagagacgctcctcacatcccggacggggcagcagggcagaggtgctcctcacatctcagacgatgggcggccgggcagagatgctcctcacttcccagatgtgatggtggccgggaagaggcgctcctcacttcctagatgggatggcggccgggcagagacgctcctcactttccagactgggcagccaggcagaggggctcctcacatcccagacgatgggcggccaggcggagacgctcctcacttcccagacggggtggcggctgggcagaggctgcaatctcggcactttgggaggccaaggcaggcggctgggaggtggaggttgtagcgagccgagatcacgccactgcaccccagcctgggcaccattgagcactgagtgaaccagactccgtctgcaatcccggcacctcgggaggccgaggctggcggatcgctcgcggttaggagctggagaccagcccggccaacacagcgaaaccccgtctccaccaaaaaaatacgaaaaccagtcaggcgtggcggcgtgcgcctgcaatggcaggcacttggcaggctgaggcaggagaatcaggcagggaggttgcagtgagccgagatggcagcagtaccatccagcttcggctcggcatcagagggagaccgtg

SEQ ID NO: 4339 - DNA, 886 bp, Artificial sequence
  DNA replication origin
atgcttacattaaaagaaggaagatttttgtacaacggactcaaccaaagaaactcacgtgtatggaggagcccctccgcccggcagccgccctgtctgagaagtgaggagcccctccgcccggcagctgccctgtctgagaagtgaggagcccctccgcccggcaggcgccccgtctgagaagtgaggagcccctccatctggcagccgccccgtctgggaagtgaggagcgcctccgcccggcagccgccacgtccgggagggaggtggggggcagcccccgccaggccagccgccccgtccgggagggaggtggggggcagcccccgcccggccagccgccctgtccgggagggaggtggggggcacctccgcctggccgccgccccgtccgggaggtgggggggcgcctctgccccgccgcccctgctgggaagtgaggagcccctctgcccggccgccaccccgtctggtaggtgtacccaacagctcattgagaacgggccatgatgacgatggcggttttgtggaatagaaaggggggaaatgtggggaaaagatagagaaatcagattgttgctgtgtctgtgtagaaagaagtagacataggagactccattttgttctgtactaagaaagattcttctgccttgggatgctgttgatctatgaccttgcccccaaccctgtgctctctgaaacatgtgctgtgtccactcagggttaaatggattaagggcagtgcaagatgtgctttgttaaacagatgcttgaaggcagcatgctcattaagagtcatcaccactccctaatctcaagtacccagggacacaaacactgcggaaggctgcagggtcctctgcctaggaaacccagagacctttg

SEQ ID NO: 4340 - DNA, 2077 bp, Artificial sequence
  DNA replication origin
ctacacacagtaacaatctgatctctctttcttttccccacatttcccccttttctattcgacaaaaccgccatcgtcatcatggcccgttctcaacgagctgttgggtacacctcccagacggggtggtggccgggcagaggggctcctcacttcccagacgggtcggccgggcagaggcgcccccacctcccagacggggcggctggctgggcgggggctgcccccacctcccggacggggcggctgccgggcggagacgcgcctcacttcccggatggggcggctgccaggcggaggggctcctcagttcccagatggggcggctgctgggcggaggggctcctcacttctcagaccgggcggccgctcagagacctcctcacctcccagacggggtgccagtggggcagagacactcctcaattcccagacggggtcgcggccgggtagaggcgctcttcacatctcagatggggcggcggggcagaggcgctccccacatcccagacgatgggtggccgggcagagacgctcctcacttcctagatgggatgatggccgggaagaggcgctcctcagttcccagactgggcggccgggcagaggggctcctcacatcccggacgatgggcggccaggcagagacgctcctcacttcctagatggggtggcggccgggcagaggctgcaatctcgacactttgggaggccaaggcaggcggctgggaggtggagactgtagtgagccgagatcacgccactgcactccagcctgggcaacattgagcactgagtgagtgagactctgtctgcaatcccgacacctcgggaggccgaggctggcagatcactcgcgatcaggagctagagaccagcccggccaacacggtgaaaccccgtctccaccaaaaaatacgaaaaccagtcaggcgtggtgatgcgtgcctgcaatcgcaggtacttggcaggctgaggcaggagaatcaggcagggaggttgcagtgagtcgagatggcggcagtacagtccagcctgggctcggcatcagagggagaccgtgcaaaggggaggggggagagggagggggagggagagggaaaggtaaatacatttttttcataagtacctgccctaccctgggtattatgtactaaggtaggaataggatagcaaaatagacatgttttcaggctacaggggagcttatggctttgtaggggaggcagcactagtcaaataatcatacatatacaaaaacgaatggaaataagctcttattaaagaagagtacagaggctggatgtagtggctcatgcctgtaatcccagcactttgggaggccaaggcgggcagatagcttgagctcagaagcccgagaccagcctgggcaacatagggagaccttgtctctactaaaaataacacgactgaggtgggaggatcgtttgagtccaagagatcaaagccacagtgagccatgatctcaccactgcactgcagagtgggtaacagagcaagaccctttctcagatagatagatagatagatagatagatagatagatagagaacaggctgtttgcgagcatatgtagcagaaaggagaatatgatggcagaggatggaggttgatgcagggaagtctttcttatggaagttacagtttgccataggtaaaatcgctctggatctctattcttaaatggaatgggagtttaactgagttaatgtcttagatggtgaaattcgtaaagaaataggttgaagggaattcaggggctaaaatgaagcatagaattgaaataggatatatccaaaagagaagagtttatagtgccaaagaaaaaggagtagaaaaagcctccgatgtgttcattcagatattgaaataaaagtaaaagaattcctttaatttatccatttaagaaatatttattcaaaattattttgtcaaggaacagtgtgaaaacgaagggtggagggaaggggaggagggagagaaggagaggcataaataagatgaaggctgcacaacactacggaacctattctatggaaaagataataaagggaca

SEQ ID NO: 4341 - DNA, 1454 bp, Artificial sequence
  DNA replication origin
ctgtagcggcagccgaaacacacggcactcatgacgttggccacggccacgacggtcagcggcctcgggtcgaggaaggcgccgtccgcgctgccgcgcaccagcagcgccaccagctcgcgcgcctcgctcagcacgtggccctcgaggacttggcggctgcgcggctggcgcgtgaagaagttgcgcatcatgctgtgggctgcgcgccgctgcaccttccagtgctccgagtagtggccgaaagccatgctgcggccgccggacaccacacggaaggaggcgaaggccggccggtcggcgaaggccgagccctgctgcaccagggcctggtggatggcgcgctcgccattcagcaccactatggggcagctgcccaggcggatctggaaaacgtcgccgtagcgccgcgccaggcgagcgaacgagaggtgagccgcctggcccaccgccgccgcgtttccgatcagtggccacgcaaacgggcccgggggcgcggaccggagctgccgcctccgttgcctcagcagccgctggcccacatgcacagtggccagcaccgacaggagtagcaggagcgtggtctgctggatggacagcgggtttagcggccaagggtcgttcgggctgaggctggtgcccatgctggggacagagaggagaaggcgtgacactcaggggtgcagagacaggagcgggcgccccacgcccctaccccagcctctggggactgagtgccgttgggtggagaggtcggagctgactctctggagaaatggccgaagacgccccttcccatccccaacccactctcccttggagaagagaaggggcgtgtttccacctcgctgtaacccagcgccaaacccttcccctccccgcaaggcgcgtaacggttcctgcaatctggggacaacgctgcgggcatcgaggcggtggcgcttgatttcctttaaagtacctaccacgccacccgctacctgtaataatccatctgaagaggtcgccgggcagcgcctcggcagacagactgacctgcggggaggtgcggtttccagtggcgcgggacagccggctccgagaaggaactgggacctttgcctagggcaagacgtcaacaggaacccgcaggcccggcctggacacctgctgccctcactggaagctttaactcccactcgagtctcttggcgtcgtcagtgccaggagcgcttggattgggatggggacggagaagggtgcctcgctcgccgagccccgctgcccttggggacctggcaaagtcgaggtttcctcacagcgttgagattgagactgggggtcggtgagtggcgtcaattcccatgcccttgcggctctcacaactggagtcgcagaagcgctcgctcccactcccactccagagtcaaagcgcgccatcccgctcctccgggttttaaggactgggtagaagg

SEQ ID NO: 4342 - DNA, 1192 bp, Artificial sequence
  DNA replication origin
ggggagctagcggggcgggacccgagcggggcggagagtggcaggaggaggcgaatctccgcgctccggcgaactttatcgggttgaagtttctgctgtcgcctcccctttgcgtgcggagctgggctttgcgtgcgccgcttctggaaagtcggctccagtcatatccctgggcgctgcctgcggccgctcctcccgcgcttctcacggcacctgacacgcggaggcggcggccgagggtggggtgccggccaccaccacccttggcgtggggtgccggccgccaccaccctcggctgcgcacgcacagtcgcgcctgccaggccagcgaggcggacgcttgggccaccacccgcaggccgagcccgggcgcgtatcgccacctcgctgcgcaccggcggctctgtggtcttcctgggcgcgcttgcggtcgcgaagggggccctccctttataagggaagccggaggcgcttgggcgggggtggcttcccccgcctggcgcgccctttcctacatgctgatgcataggattttcaagacagctaagagaacaaggacttcacgaggcggggggaagggcgaactcgagggaagaggtgggatgtatctggttaaccaggtaggaattgtactggcttcatcaaaggataaatataaaagtgataggttcaccagggacaaccctgcactttgagctccactcgcgctgcgaatctcgtgctattattgacctgtttacagatgaataaactagggttcagagaggttgcgtgacttaacccaggtcgcgcagccatcaagaagtggagccagggcttgaagccaccaagtcccactccagatccttcacataagtttacacggaagaaaattgcagataagaggcccaaatgccttctttcctgcctcccttaaaaaaaaaaatgcacgtggggctaggcgcagtggctcacgcctgtaatcccagcactttgggaggcttaagcgggcggatcacttgaggtcaggagttcgagaccagcctggccaacatggcgaaaccccatctactaaaaatacaaaagttagccggacgtggtggtgcacacctgtaatcccagctactcggggatcaggggggaaggcagcagaattggttgaacgtgggaggcagaggttgcagtgagcagagattgcaccactgcactacag

SEQ ID NO: 4343 - DNA, 925 bp, Artificial sequence
  DNA replication origin
ggaggtggggagaggtcagatgggtccgtagaaaaggaagattagaaagcctcagcgacgcttggggttgggactgaggggacaggtgggagggaaagaaggaagatttgggatgagttgcattgggaacagagactagagagggaccgatgtgtaaaagaatgcctggatgtcaggcacctcagaccatttgcccattttacaacaagaattatttagatcttgtaggatggaaaaattgaaagtgccgttttccggctatttggaactactgttgagtttgtattggggtcaagcggcattgcagaagaaaataagatgcttagattttaatttaggtgagagttgaagaggttttaagtttttgaggacacaggctaagggagaagaaggaggaatggagggtggaaagttgcccatagtgaaggaagcaagcttagagaaaagagagagtagagacatggagggaaggggtttgggggttcttaccttccagaaaagcgggaaaggggttggggcacggagaagaggttggggcacggaaataagggatgggggcacagagattagaggttggggtgtggaaataagggattggggcacagagatataagaggttggggcgcggaaataagagattgggcgcagagataagaggtcggggcacggaaataagggattggggtgcagagatacgaggttggggtacttgcccctcctctagaaaagcaggacttgccgctcagggtgaaggagaaggggttggggatttcttgccccccagaaaggaggagaaggggtagagacacggagagaaggggttggggtacttgccccttccccagaaaagcaggacttgccgctaagggtgaaggaccaaggcaggcgtccctgcatggtctgacacctctgaaacctgggtgaa

SEQ ID NO: 4344 - DNA, 1020 bp, Artificial sequence
  DNA replication origin
gctgtggcgccggcgacggaccagcgacccaagcgccgcggttaaccacgtctcgtccacgacctccctaggtacgggccagcgaggcagaggccgcggggccctgatggggagagacgctcgctgctcgggctcgcgggcaccggccgcaggcggcggggtcggagtccgcggctggttcaggtctcctcccgccgccgcgcctgcccgccgggcctagcctcagccgcgccccgcgctcccgcagcgcgcggcctgaaagggcggctcgtgggccgcggctccagtagctgctgggagaaccagtggcgcgcgcgtctgcgaccggcccggccccctgcccgccagcccgccgcgtggctgccgccgtgtccgccccgaccttagggggcggccttgagccgtggccgcctgcccggggcgcggggaggtcggctgcggctccgctccgtccggcgagctccggacgcggcggggcgacccgttagctggtgggcgttcgctgtcccttacgcggacagggaggaaggggtggccagggcatgatgggccccgcggaggaggaggtcgcgcggggagcagacaccttgctgccgggtccgaaagctccttagacacccttcctggagggaaccgcagtccgcaggccagggctctgtccccgggctcgcgtttcggggctcctcggctcccgaacccattcgcgcgggttgtgcgtggctagggtgcaagtctagattttcgtgtcaaactggggttatgagccgtttacgagtcacttggacgatagtaaggcctgatcactctgaaagtgtctgtagtgtgaagtcacctgatccttggctccctggttttgctgaatgtgagctcctactgtacgtgtaccaggagcgcccctgccccctcgaagacgcagttgcgttggcagcgcagtgtatccctctcactcataacacccctatttataggagtttagcgtttgatctctcactgtggtgcgaattgatcgcatgaaatcct

SEQ ID NO: 4345 - DNA, 1344 bp, Artificial sequence
  DNA replication origin
tgggccgggcgcagtggctcacgcctgtaatcccagcactttgggaggctgaggcgggtggatcacgaggtcagtagctcaagaccagcctggccaagatggtgaaatcccgtgtctataaaaatacaaaaattagcagggtgtggtggcgggggactgtaatcccagctactccggaggctgaggcagagaattgcttgaacccgggaggcgtgagccaccatgccctacctagaatggtattttgaaagctttaataacaccagtgcttttctagagattgtgcatgctgtgaattttagacttatgaaaagacctggacaaaacagctgtttgtacacccggacatctgtttttactggagaagaggaatttctaatgcagctggcagtatggtaaaaatccaaagggatcatgtttcacagacgcctccacgggctgacttgtaatttaaaaagtgacctgaactttctactggatgtcactggatccccagaagaaggttcatcacaattaggtaagaacctgccacgattcattttccgattagagtgctttctggcatgcctctgcaaggtgctaggagcacagggccagggtatacacagttgagaagatgggggaaggtctcataagtagatggggagcgaatgcaaacaaaccttaggatggtgggggggaggggaagcaacagtagggacttgggtgaggaaagaaaagatcaagaggaaaagcagggcactggcaacaacttggggggtggatggggagagaggaggggaatggctgtgatgaggagggggcgatgaaaaggagagaaggggtgcgaaagccacctcacgtgcaggacgcacgaatcaacgattagagatgtaaagcgaattgggagggagggacttagttctctggagctcccttctgcgtttgcagagcctggcccagcgctaagggggtgtggtgctgagctcagggaggtgggggtgtgagacggcggcggcagggacacccccgccccagtccaaccagaaacttggagccggggagacggatctgcaggcgggcagggcgagggcggagcgagcgagcgatgggcggggcgggggcggagggagggcgaggagatacaggcggagggcgaggagatacaggcggagggcgaggagatacaggcggagagcggcgctaggacccgccggccaccccgccggctcccgggaggttgataaagcggcggcggcgtttgacgtcagtggggagttaattttaaatcggtacaagatggcggagggggacgaggcagcgcgagggcagcaaccgcaccaggggctgtggcgccggcgacgg

SEQ ID NO: 4346 - DNA, 1241 bp, Artificial sequence
  DNA replication origin
cgtgtctacctctttctacacagacatggcaaccatccgatttctcaatcctttccccgcctttcccccctttctattccacaaaaccgccattgtcatcatggcccgttctcaatgagctgttgggtacacctcccagacggggtggtggctgggcagaggggctcctcacttcccagaaggggcagccgggcagaggcgcccctcacctcccggaccgggcagctggccgggcggggggctgacccccccacctccctcccggacggggcggctggccgggcggggggctgactcccccacctccctcccggacgggcggctggccgggcggggggctgacccccccacctccctcccggacggggcggctggccgggcggggggctgatccccccacctccctcccggacgggggtgctggcctggcgggggctgacccccacctccctcccggatggggtggctgccgggcagagacgctcctcacttcccagacggggtggctgccgggcggaggggctcctcacttctcatatggggcggttgccaggcggagggtctcctcacttctcagacggggtggctgggcagagacgctcctcacctcccagacggggtcgcggccgggtagaggcgctcctcacatcccagacggggtggcggggcagaggcgctccccacatcttagacgatgggcggccgggcagagacgcccctcacttcctagatgggatggcggccgggaagaggcgctcctcacttcctagatgggatggcggccgggcagagacgctcctcactttccagactgggtagccaggcagaggggctcctcacgtcccagacgatgggcggccaggcagagacgctcctcacttcccagacggggtggcggccgggcagaggctgcaatcttggcactttgggaggccaaggcaggcagctgggaggtggaggttgtagcgagccgagatcacgccactgcactccagcctgggcaccattgagcactgagtgaaccagactccgtctgcaatcccggcacctcgggaggccgaggctggcggatcactcgcagttcggagctggagaccagcctggccaacacagcgaaaccccgtctccaccaaaaaaatacgaaaaccagtcaggcgtggtggcgcacgcctgcaatcgcaggcactcggcaggctgagttaggagaatcaggcagggaggctgcagtgagccgagatggc

SEQ ID NO: 4347 - DNA, 933 bp, Artificial sequence
  DNA replication origin
gcgaccccgtctgggaggtgaggagcgtctctgcccagccaccccgtctgagaagtgaggagaccctccgcctggcaaccgccccatatgagaagtgaggagcccctccgcccggcagccaccccgtctgggaagtgaggagcgtctctgcccggcagccaccccatccgggagggaggtgggggtcagcccccgccaggccagcacccccgtccgggagggaggtggggggatcagccccccgcccggccagccgccccgtccgggagggaggtgggggggtcagccccccgcccggccagccgcccgtccgggagggaggtgggggagtcagccccccgcccggccagccgccccgtccgggagggaggtgggggggtcagccccccgcccggccagctgcccggtccgggaggtgaggggcgcctctgcccggctgccccttctgggaagtgaggagcccctctgcccagccaccaccccgtctgggaggtgtacccaacagctcattgagaacgggccatgatgacaatggcggttttgtggaatagaaaggggggaaaggcggggaaaggattgagaaatcggatggttgccatgtctgtgtagaaagaggtagacacgggagacttttcattttgttctgtactaagaaaaattcttctgctttgtgatcctgttgatcggtgaccctacccccaaccctgtgctctctgaaacatgtgctgtgtccactcagggttaaatggattaatggtggtgcaagatgtgctttgttaaacagatgcttgaaggcagcatgctcgttaagagtcatcaccactccctaatctcaagtacccagggacacaaacactgcggaaggccgcagggtcctctgcataggaaaaccagagacctttgttcacttgtttatctgctgaccttccctcc

SEQ ID NO: 4348 - DNA, 1002 bp, Artificial sequence
  DNA replication origin
agttgcaaaagacgaaaaagataaaaatgcaaatacctaaatgtctttttttatgtacatttccaacttttgtgtattccaagaatttacgatgtaatgtctatgtttctagcaaaaaagaactttttctctatttgtagttggtgtctagagcaattctaatgtaaagaagttttgcatttatttggtactgttgagtggctgagcagcaaggctgctatttccactgagtggagatacacaaagatgacttaggagtcccagtcctcaggatcggagtattggtggatcacacgtgttacaaagcagaaagcattaggaaaagcaaatcagttactttgagcttcagatgcaaataatttccaaattgtcactggccaaaatgctttaaacattcagggttttgtcacaatttcaatataaaggggggaggggggagcgggaccccacagctctattcctttgtctttcagactccaagaactcagaccgtggtggtgcaaactggtgactggttcaaaagaagttggagggggcgtgtaggacaggaggctttaccaccagtcccagggtgcgtcaaggtctatggtgtaaaaaccactactcagaatggcggggttcatggacttttcaccatggccaaaccttcgattacctctgatgagccccaaagatcagagtagctgactaggccaggtcccccagcagaagggcgcgacggctgcaacatcagcggttaaattgtacagcctttcataggccggtctaatgcatccgtactaagattgttaaggctgagggtccctagcctggggaaaaacgaaaggaggcagagggtagggagacgggaaagaagacaaggagggtgtagaaaacggggagaggagggggcgggacagcatggggaaggcctcaggtttactggagagatcgtggcgttcccatagaaacgtatccctccgcccatgacccgcgtgttagtctcttcagttccttccgcgt

SEQ ID NO: 4349 - DNA, 878 bp, Artificial sequence
  DNA replication origin
ctggaaagtgaggagcgtctctgcccggccgccatcccatctaggaagtgaggagcgtctctgcccggccgcccatcgtctgagatgtggggagcgcctctgtcccgctgccccttctgggaggtgaggagcgtcgctgcccggccgccccgtctgagaagtgaggagcccctccgcccggcagccgccccgtctgggaagtgaggagcgtctccgcccggcagccaccccgtccgggaaggaggtgggggtcagcccccgccaggccagccgccccatccgggagggaggtagggggtcagcccccgcccggccagccgccccgtccaggagggaggtggggggggtcagccccccgcccggccagccgccccgtccgggaggtgaggggcgcctctgcctggccgcccctactgggaagtgaggagcccctctgcccggccaccaccccgtctgggaggtgtacccaacagctcattgagaacgggccatgatgacaatggcggttttgtggaatagaaaagggggaaaggtagggaaaagattgagaaatcggatggttgctgtgtctgtgtagaaagaagtagacatgggagacttttcattttgttctgtactaagaaaaattcttctgccttgggatcctgttgatctatgaccttacccccaaccctgtgctctctgaaacatgtgctgtgtccactcagggttaaatggattaagggcggtgcaagatgtgctttgttaaacagatgcttgaaggcagcatgctcgttaagagtcatcaccactccctaatctcaagtacccagggacacaaacactgcggagggccgcagggtcctctgcctaggaaaaccagagacctttgttcactt

SEQ ID NO: 4350 - DNA, 1032 bp, Artificial sequence
  DNA replication origin
cttagtacagaacaaaatgaaaagtctcccatgtctacttctttctacacagacacagcaaccatccgatttctcaatcttttccctacctttcccccttttctattccacaaaaccgccattgtcatcatggcccgttctcaatgagctgttgggtacacctcccagacggggtggtggccgggcagaggggctcctcacttcccagtaggggcggccaggcagaggcgcccctcacctcccggacggggcggctggccgggcggggggctgaccccccccacctccctcctggacggggcggctggccgggcgggggctgaccccctacctccctcccggatggggcggctggcctggcgggggctgacccccacctccttcccggacggggtggctgccgggcggagacgctcctcacttcccagacggggcggctgccgggcggaggggctcctcacttctcagacggggcggccgggcagcgacgctcctcacctcccagaaggggcagcgggacagaggcgctccccacatctcagacgatgggcggccgggcagagacgctcctcacttcctagatgggatggcggccgggcagagacgctcctcactttccagactgggcagccaggcagaggggctcctcacatcccagacgatgggcacccaggcagaaacgctcctcacttcccagacggggtggcggccgggcagaggctgcaatctcggcactttgggaggccaaggcaggcggctgggaggtggaggttgtagcgagccgagatcactcctgggcaccattgagcactgagtgaacgagactccgtctgcaatcccagcacctcaggaggccgaggctggcggatcattcgcggttaggagctggagaccagccgggccaacacagtgaaaccccgtctccaccaaaaaaatacgaaaaccagtcaggcgtggcggcgcacgcctgcagtcgcaggcactgggcaggctgaggcaggagaatcaggcagggaggttgcagtgagccga

SEQ ID NO: 4351 - DNA, 943 bp, Artificial sequence
  DNA replication origin
agccgctgcccaagagcgctacgtcgccggcgggcagcagcagcgcctacaaactggaggcggcggcgcaggcgcacggcaaggccaagccgctgagccgctctctcaaagagttcccgcgtgcgccgccagccgacggcgtggccccacgcctctacagcacgcgcagcagcagcggcggccgcgcgcccatcaaggccgagcgcgccgcgcaggcgcacggcccggccgccgccgccgtcgccgcccgcggcgcatccaggaccttcttcccccaacagaggtcccaaagcgaaaaacagacctatttggaagtaaggagggtaaagtaaaaccgaaccgaaacccacagcgtcgacggccccaggcctagatctgcaggaagcatcccgagttctcctagcgtggagaggagcggggccgggccaggctagggggcggctgcgcgagccgtcggcgggtggaggcggagggagagcaggggcagcccccgcgccctgcgagctgtaggctgctgggccctggaaggcgagtggcagcgcctgttctccagtaccaggacccaaagagcttgcctcatatggtacacgagggatggcagaggtagcagagaagcccgccactctttagacctgattaacacacacgcatttagggagttatgggtaatctcttcctgcttatgtgaagagttgcacttttttcagagccccgcacgcaggtcccgggccagtgtgtttcttctgtctgtgaggtgtcgtttctatgttgagaatatggaacacggtgcgccagcctactccacttcttcccggcagcattcttgcttgtagctagggaggaggcaagttgccctagctcaaggtagactcgctgcgcaatttgctgcaaagccagctttatttctgcttgcttttcttttgactggaaaagagtgtcctat

SEQ ID NO: 4352 - DNA, 1072 bp, Artificial sequence
  DNA replication origin
gggccggggaggggcggggggcctggccccggggcggtggtgcgggatgccgccgcctccgggccgcgtccgttctccacggctggtacctgtgtcgggtgggtggccaggcgcgggcctcgccccccagccccctcgccagggctagcccggctgcgcggcgcccggagggggccgggccgtccggtggggccgcggccctgttccgcgctgcgagctcgccctctcgcggctccctggcccggccgccgccgcccctctccccgcccagaggcgccccgggggcaccatgcaggcgcagcagctgccctacgagtttttcagcgaagagaacgcgcccaagtggcggggactactggtgcctgcgctgaaaaaggtgaggagcacgcgggaccccgcttcccggccgcagccccccagcgcgggcgctggggaagggctggggaggcggggcgcgcgcagggccgtctttcttcccggtctcgccgcgtctccaaaaggacggcgcacacggagaggcccccctcatacggctggctctcggtgttgacatccaccgggtgtgtgggaatgccgcagggagccggggggagtttatccggataatccaacccctgagaggtgaatgctttgccctttgattccaggacaacaacagttggaggagcctcagttttcagcggaggtcaaagcaggccacttttccgtcttcttggtcttagcccggagctgctgtcagcctaccgttttaggtgtccagtacgctggttttagtggcttgagaatgccctggccgtaaggcttgctcaaaggaattgcgagctcgcctgccagtaggaacgtggcctgctctgctcgccgtcagtattcactcctcattctcctggtttcccccgctcctccgattaacaggggctggtgcacatgctaccaatttcaggggggttttgttttgtttttgcagcgttcgagattcttggtgctgtcatttggcttgttaagaatttttagcctttgtatgtttaagtttgctacattgttacctgaagttacatacccccgatctgtgctt

SEQ ID NO: 4353 - DNA, 1310 bp, Artificial sequence
  DNA replication origin
cgcaccaccgccccggggccaggccccccgcccctccccggcccgccggcgccgccccgggctgccctctgccgcggccgccgcccgcccgccggggctgcactcccgggcccggtctggccccgcggcggagctggcggctgggggaggacgtgtggagggacgctccggccgcggcgcccgctccgcgtagttgggactccgaaacgcaagagccccgggcggggcggagctggggcggaggtctcgcggggaaggggaaggaccggaggtcgttgttggggaatctggctgccctgaggtgccgccgcggccgccgccgccaccgccgccgccggtgtagcgctggagcttcctactagcgaactgaacctgctcgctactgagcatgcgctgccgtgctgggctggttcgctccgggttttccggctcccggtgaaggaggaggaaagctcgagagagaaagagagagagagacagggagggcgcccggccgggctgtggctgcgctcctgggggctgcaggggaggggcgaaggggcccgagaagtcgcaccctggcaaagtggggcctgcaagggtgggtgatgactagggtaaagaggctccccattgtgtggcctggccgtgagggctcccacccttctcggagtccctgggcccttcgtttcggaaaggggtgtgtgtactttgttcctgaacacgaagataaggactgcccagagcacgcaatgtatagtaaacagactggacaaaagacaggtgctctgtcacgaaacctactgctcagtatctgctgagtagtagaagtgattgcggtgtttctaagtggtctttccacaaaataataaaatgtgtacgtgtagtattgattttgtgtgaatgttttagattccctctgttcatcttttaaacccactccagaaatgaactccagtaagcactttcctccagtggatatcgagacctcttttacagctcctagagcactgcacttatgcccctctcagggcgttcagtctattgtgttttgttatcttttgcggttctttcgactagataataaactggaaggcagatctttttcaccagggcctctacacagtgtagaacaggcactcagtcaatgttagtggaatgctaaaggagcagtatttataaactgtccctccaggccactgtttgtttataataggggcactttgtggcagacaccttatgatttatcattaattatcatttttttgagtatcatctcatttaatccccatagcaaccctattattttcatttcaccgataagaaggcag

SEQ ID NO: 4354 - DNA, 969 bp, Artificial sequence
  DNA replication origin
gaggagccggagtaaggggagggggaggagcggcgaaagcggaagccatgttggagtttcaccccgagcgaggggctgcgagggttctcctctccttgtgggtgtgaccaggttcggcgcggcggcgggccgcggggggcggggacgattggccgcttgtcgtcgtccgcagcggcgtgaggggagcggcggcggcggcggcggccgcagcgtggagccgggtgattgtgaccgccgggggagccgggagccggccgcggcgccctctctccgtgtggccccctgagcggcccccctcccctgcccgggagggaggcggggggcacctggggcccgccatgaaccccggcttcgatttgtcccgccggaacccgcaggaggacttcgagctgattcagcgcatcggcagcggcacctacggcgacgtctacaaggtaaaggcaggggccgcgcgccgccgaggccgtgggatcccgacccgcagccaagcctgggcgtccgagcccttgccgcctgtcctcgggagacgctggcgccagggagcagtcggggaggaggagctgcggacgccaagggctctgctgccttggtgaacaaagggccgaatgtttaaccccgagacctccccagcccttacctgagcccccccggtggacatgatttttgccacctcccttcttgcgcgcatttccagggaagggcagaacgagagcaggccacactgctcatccatagtgcagagaaggtctgggcgtttgttgcgttggcagggtcagcgcgacgaaccggacagcaggggtctggtgttgtcaaacctgcctgcttcacgccaacctggggtcgtccgctctaggttgggagctgctgcccaccaggcctcggtggtagttattatactatgctgagcgacctccatcttccatcgacagctctcagcctttagcgccttattcatccccctgtcagttt

SEQ ID NO: 4355 - DNA, 1209 bp, Artificial sequence
  DNA replication origin
cggagagagggcgccgcggccggctcccggctcccccggcggtcacaatcacccggctccacgctgcggccgccgccgccgccgccgctcccctcacgccgctgcggacgacgacaagcggccaatcgtccccgccccccgcggcccgccgccgcgccgaacctggtcacacccacaaggagaggagaaccctcgcagcccctcgctcggggtgaaactccaacatggcttccgctttcgccgctcctccccctccccttactccggctcctccaacctcctccccttttcccgactcccgcccgactgcgcagccgcgatcccggagggagcgcgccaggcctggcgcgcacccgaccccttgcgcgttccggctccgcgcgcctgccaggccggggccggcggcggaacagcttgggacccgaaacgcctcggcttttctgcggacccgcgcccggccgctgccgccggacgcttgaaaaggtttgcctggcccagggaccggggttaggactagcagaaagtggcttcttttcgtttctgattcccctaacgacaaagttggaccttggtctatctggtcccagttccaagcaggtagcatagtggtaatatccaagacagccaatgtcccagcctttattattttagaagcagctacatgtaggataccatggagtgctgcagcctttctgggattgcggggaggggtcactaaacacaccgtgaggaaaacccccaggaaaagtgagctgtgcttgcttgcccctgtcaccgacactcggacccttggagttggcctgccagggtgcaaaggagggcaggccaggagggccgcgagggaggtgtgtgcagtgggcagagcgtgaaagctccgggaggaaaacacgcggaacagctgcccaccatcccgcgtgggaggcaggcagagcgcagaactaaagcagtgattgacctccctcttcgaagagggttggattatcaaagacgggcggggactgcgcaggctgtcaagcaaccctgtaaagaaggggtggagagtggactagatctattaccgcacctgaaatataaacacgtgacgatccggaagctctttagctgtgaccttacctacccaaaaaccccaccctgcttaagacccagattgcgcgtcttacatctgagctatgtggactccagctccgattgttaatacttgcccaagaa

SEQ ID NO: 4356 - DNA, 887 bp, Artificial sequence
  DNA replication origin
agcgcctctgcccggccgccaccccgtctgggaggtgaggagtgtctctgcccggctgccccgtctgagaagtgaggagcctctccgccggcagctgccccgtctgagaagtgaggagcctctccgcccggcagccaccccatctgggaagtgaggagcgtctccgcccggcagccgccccgtccgggagggaggtgggggggtcagccccccgcccggccagccgccccgtccaggaggtgaggggcgcctctgcccggccgcccctactgggaagtgaggagcccctctgcccggccaaccgccccgtccgggagggaggtgggggggtcagtcccccgcccggccagccgccccgtccgggagggaggtgggggggtcagccccccgcccggccagccgccccgtccgggaggtgaggggcgcctctgcccggccgcccctactgggaagtgaggagcccctctgcctggccaccaccccgtctgggaggtgtgcccaacagctcattgagaacggaccaggatgacaatggcggctttgtggaatagaaaggggggaaaggtggggaaaagattgagaaatcggatggttgccgtgtctgtgtagaaagaagtagacatgggagacttttcattttgttctgtactaagaaaaattcttctgccttgggatcctgttgatctgtgaccttacccccaaccctgtgctctctgaaacatgtgctgggtccactcagagttaaatggattaagggcggtgcaagatgtgctttgttaaacagatgcttgaaggcagcatgctcgttaagagtcatcaccactccctaatctcaagtacccagggacacaaacgctgtggaaggccgcagggtcctctgcctagga

SEQ ID NO: 4357 - DNA, 1213 bp, Artificial sequence
  DNA replication origin
tcaatcttttccccacctttcccccctttctattccacaaagccgccattgtcatcctggtccgttctcaatgagctgttgggcacacctcccagacggggtggtggccaggcagaggggctcctcacttcccagtaggggcggccgggcagaggcgcccctcacctcccggacggggcggctggccgggcggggggctgacccccccacctccctcccggacggggcggctggccgggcgggggactgacccccccacctccctcccggacggggcggttggccgggcagaggggctcctcacttcccagtaggggcggccgggcagaggcgcccctcacctcctggacggggcggctggccgggcggggggctgacccccccacctccctcccggacggggcggctgccgggcggagacgctcctcacttcccagatggggtggctgccgggcggagaggctcctcacttctcagacggggcagctgccggcggagaggctcctcacttctcagacggggcagccgggcagagacactcctcacctcccagacggggtggcggccgggcagaggcgctcctcacatcccagacggggcggtggggcagaggcactccccacatcccagacaatgggcggccgggcagagatgctcctcacttcctagatgggatggcggccgggaagaggcgctcctcacttcccagatgggatggcggccgggcagagacgctcctcactttccagactgggcagccaggcagaggggcacctcacatcccagacgatgggcggccaggcagagacgctcctcacttcccagacggggtggcggccgggcagaggctgcaatctcggcactttgggaggccaaggcaggcggctgggaggtggaggttgtagcgagcccagatcacgccactgcactccagcctgggtgccattgagcactgagtgaaccagactccgtctgcaatcccggcacctcgggaggccgaggctggcagatcactcgcgtttaggagctggagatcagcccggccaacacagcgaaaccccgtctccaccaaaaaaatacgaaaaccagtcaggcgtggcggtgcgcgcctgcaattgcaggcactctgcaggctgaggcaggagaatcaggcagggaggttgcagtgagccgagatggcagcagtatagtccagcttcggctcggcatgaga

SEQ ID NO: 4358 - DNA, 1594 bp, Artificial sequence
  DNA replication origin
gaacactaaaattataattctttgtcttccttaattagactagagctcaccatagaccttgctgaaactgtgagaaaatccaagcaataattcacactgtcaggtcagcagaaatgggaatgcgggtctgatataactgaaagatttgcttaagtgatctatctatgaactgaaccgctcagaataggcacacgatcttcactggaaatgtaccctctgaagatgctaaacacaaacagcaatgaaaataaatcccagcaagagccttataccacctttacagatgtcatcctagaggaaggatataaagcatattaataccaattgatgtagggcactaattaataagtcccattaaatcatggagtaatgacatttagcatgtaatgaatgcctcataatttcttcatcattaatatttcatagcataagaacacaagcattttcatccctgggccagtgcagcatggttttctgtctctgacatgaccacaagggcattgagtggcacgagtgtattgcacctctgtggtatagactgactataccgcacaagtgattaactcttagcaccccgggtcctagcgtttcctcattttagaaaatgtgaatctgcctgccattcttggaagtaacctctgtgactggaagatggaagaactgccccaggctcaggtgttgactttggtgtgtagcattgctttgctgttgacccccaccccccagcccaagaaggaaacctgcacaggagaaaatcattactttgatttattactgggggcttgctgtatgcaaaggcaataatcacctcatggagcaggtgccactgccagggttcattgattccaggctcttctagaaattccaggaggccagtcagtctggcgggagatggacgtagtcaacgaaaaaagaagtccatctcatagcaggttgaaatgaagtgggagaaaaatctctggtcatcgttctatcgctccactgacactcggtgtctttttctttcagaagaggggcttgagcagagagaatgcttagaggctaagcgatgggcaagtgagagggaaagagccgcgacagatagagctggctgcctaggggtctcagaggcttcatcctgcaggcggcaggcggcaggacaaagggaccttcggactccagatcaagattccaaggagttaaacgctaccacgcagcccgacctggatgggatttgctcctgggtacaaaacgggacactgatcaaaatcaacttggacaagtgacaagagtgagtcttatgtcggtggatgtcttttaaggtcgttggagggaagaggacgggaggggtgtgccgaggggtaggtggagagaggcaccgagtccagagccgggatataaatgcaccaggagccggggagcagaggagcaaatgagtgggggaaagtgtgagaggaagagttggagaaaagtcgggggaaagtagggacagggttaaggggagagaggaggatgagggcggcgaggagagattaaaaggggaaggggggtcgctggagaggagggcggactgtggatcggaggtagggagaggggcgagaggagtgcgcggggt

SEQ ID NO: 4359 - DNA, 1236 bp, Artificial sequence
  DNA replication origin
gcagacagattttggatggcagtccccagctgagttagccatgggaaggaggaagttgacatgtttgagaaatgaagaatccgccaactagcaagactctgaaggccaacacattattaaccccctcttttctatgtcattccattccaggctgtaactcaacacaaatccgtctgtttgttttcctacatggctactaaatattaaaatgtactgattttggactttttcttttttggcatcatgagtccaagagaagagatgttgatttttttttttaatctcaaaggggaaaaaaatacattgagtcaagttctgaaagttaaaggaagcttcacaagttgtcacactgaatatttttacgtgaatgggattaccaaaaaaaaaaaaaaaatcaaactatctgatagcattcacagaagacaggtgttgcacagatttcagaagaacaaattgatgctctgcaactcagtgccaaacaaaacaaacaacaaaaacaacctgacaaggtaccacgaacagaagacagagtgataagcagagagtgagtgcccaaatctggaaagctctagtttaaagggcgaggacattttctctcctcagtgcctggacagcgaggagggtgggggtatggggtcctcaggaaggttggaaagcaggtgtcctatctgcctcgggcagcctccaccagcctccaccagccaacgattggtctctgaagtctaatccacacacaccctgcacttcaggggtatgaaggaaggttccggggcctccttcgctgcccatcagccctgccaggctgggatgaccacatcagttccgtctgacaccagcatccgcacaatacaggcaaagccccttccctctcttcggaggtcggcaccacttttcttccaaacggtatttccaaaaggagcacaacttgaaggaaggagcccgggtgagaaaagtcgagtctttgacggttagtccccctcacggggagcagcgtcaagaaaagacacacatgtcaggcaggtgtacaaaggcagagaaggacggggagagagagagaaccggggaatgggaggcgaaggcaggaaagaaggagacagaggcgggaggtgcggcacggacttgaaaggacgcgcaggatgtggacgaaagaagagagtcaaggagagggagaagaagggaggcagtggggaaagaaagggaagagataaagactggaggcggcgggaaggatgcaag

SEQ ID NO: 4360 - DNA, 1024 bp, Artificial sequence
  DNA replication origin
tgggcgtgagggtgcctgcctgcctgccagtgcaggctgccggaggaagaaagggctgctaaggagagatgctgcaccctgcaccgcgctgggctctgaggattcagggcgcgaagagctaagtccaccccgaatgcagagctgctggggatccaggcgtccccacccactggactcttctccgcggacatccctccttccggtaatccctggggtctttccccaaggccacatttccgagccccctgttttccagcgggcgttgggtgctcattcaccacggactgcggagaggagggaggtgtggcggggcagagacagacgaggaagaaatgtagggggtagcagggagtgggctgcggggtccacgtctctgggcactgtgccgtggtgtgctttggggattctgcacacacaggcatctttccccaagagattggaagggaactttgcagctgcattctctgcctctggagctttgctggctcttgggggaaatggtctgtgttctgagatgtgaagatatcctttttggctcctccttaatgaagaagagggcggtcttatagctggacagccggccaaagaaaccaaatccgcccaggcgatgctcttgaaaatacagtacgtgtgcatccttgattctttaaatccaccccctgcatcacccccgcctcttctctatcccccccaccaccccgtggattctgttgctgtttgatgaatggcttgggctggcaatttgtatttccctctccaaagtggtagtggttgagttgagaacaggggtgatgaaatttaacaaagcatttttagaagagagcaatgtgcatgttgtacgcagtcattggaaagtcatgctttgcgctaggtatccttttgaagcccccgaacctggctctcctgaagccgctctctctctctcctgctagtcagctactagtggttgtgaatataacaatacaaactttgtcctgctggaggtgtaaagactaaaaagagaaaaaaaggatatcagtgggag

SEQ ID NO: 4361 - DNA, 1069 bp, Artificial sequence
  DNA replication origin
tcaaaagaaaagttgcagcgcctgtgtgcgcgtgtcatcgatgggctgggtgcgagagacagcgctagcgcgcggccacaacgcactgcggggccgagagccggcaggaaatcgaaaaagctgctcgccggcagaggctgggaggctggaagggctccccacccgctcggtgctccagaaacgcgccggctttgccccgacgcgatcgcctggggagcccaaggggcgcgcagggggccccggggcgcccggcagccgcggggccgagcgcgcgtgtgagcgagtgcgaggctgcgggcggcgggcgggcgagtgtgcgcgggagggagggggagcgcgcgcgcgcccgggccccggccctcccagcctcccggcctccgcgcctgcctcccgcccgcgcgcaccgctgcccgctgccgcggctcccgctcgcgccggcgctgcacggtagtcagcccgccgccgccgcctgctttgtgcttcccacagaagatgggagcgacctcttcctgatcgggagctgtttaaaaggagggagtgcgccgtattttctactagcgtggaggaacggaggaagaatccattcacactccccaaaccaggtaggatcttatgatggacaggcagaaggcatttagtcagagaccaagaactattttccatttgctgctcataaggctacacttccctctgctttggcaaacgagcggcttctaaatttgtgtgtgtgtgtgtgtgtgtgtgtgtgtgtgtgtgtgtgtgtgtgtgatgtggtgtgtgcgcgcctgcacatttttctgggtgtccgcgcttcccagagtgaaattgctcgggctggtgcgtctgggcgtgagggtgcctgcctgcctgccagtgcaggctgccggaggaagaaagggctgctaaggagagatgctgcaccctgcaccgcgctgggctctgaggattcagggcgcgaagagctaagtccaccccgaatgcagagctgctggggatccaggcgtccccacccactggactcttctccgcggacatccctccttccggtaatccctggggtctttcccca

SEQ ID NO: 4362 - DNA, 957 bp, Artificial sequence
  DNA replication origin
aaccggggctgcgtgcagcgcttgcgggccagctggagttccaggtgggcgtgggcttggcgggccccgcactcggagcagcaggccggccctgccggccccaggcagtgagggacttggcacccgggccagcggctgcggagggtgtactgcgtcccccagcagtgccggcccactggcgctgcgctcgatttctcactggcccttagctgccttcccgcggggcagggctcgggacctgcagcccgccatgcctgagcctcccaccccctccatgggctcctgtgcggcaggagcctccctgacgagcgccgccccctgctccacggcgcccagtcccatcgaccacccaagggctgaggagtgccagcgcatggcacaggacgggcaggcagctccacctgcagccctggtgcgggatccactgggtgaagccagctgggctcctgagtctggtggggacgtggagagtctttatgtctagctcagggattgtaaacacaccaatcagcaccctgtgtctagctcagggtttgtgagtgcaccaatggacactctgtatctagctgctctggtggggccttggagaacctttgtgtccatactctgtatctaactgatctgatggggatgtggagaacctttgtatctagctcagggattgtaaacgcaccaatcagcaccctgtcaaaacagaccactgggctctaccattcagcaggatgtgggtggggccagataagagaataaaagcaggctggccgagctagcagtggcaactcgctggggtcaccttccatagtgtggaagctttgttgttttgctctttgcaataaatcttgctactgctcactctttgggtccacactgcttttatgagctgtaacactcaccgcgaagatctgcagcttgactcctgaagccagccagagcacgagcccaccagaaggaagaaac

SEQ ID NO: 4363 - DNA, 1392 bp, Artificial sequence
  DNA replication origin
gaggcgtggcctggggtgggagagagaggtcagaggggtctgcagaaaagtgggattcagaagagttagcagcactctaaggggttgggactgaagggacagacaggagggaaagaaggaagatttgggatgagtcactttgggagcagagcctagggagggagcgaagtgtaaaaaatgcctagacgtaaggcaccacagactatttgcccatcttatgacaaaaattatttaggtcttgtaggatggagaaatcaaaagtgccattctctggccatttagagccattatcaagtttgtactggggccgagtggtgttgcagaagaaaataagacacttaggttttagatcaggtgagagttgaggaggtttcaagtttttaagaacacaggctaagggggaagaaggagtaatggagggcagaagctgcccatagtaaaaaggtaagtttagagaaaagaggggtagagacatggtggcgggggtgggggtgggggtgtggtacttgctacccagaggaggtggtacttgccaccaaggtggaggatcaaggcaggcatccctgcggtgacggaacacctctgaaatgtgggtgaataatcaggcaggcatccccgcggtgatcaaacaccaagggaagaatgtcttcccaagtccgtgaccggcgctggagttttgggtttacggataaaacgcgtctcctctgtctctaccagaaaaagcaaaggaaatgaaattaagggaagggagagattgaagggtggtgctgaaattgaaagggcaaagaggttgagggatagtgaaagaggttggagaagagagtaaaaagaggcctcttacccgatttaaaattggtgaggtgtttcttgggctggtctgaggacccaaggtcataggtggatattctgacagagcaaacagcagcaggacaggggattgatctcccaagggaggtcccctgatctgagtcaaggcaccaaatgtcaagcgtgtccatgtgaagagagtccaccaatagactttgtgtgagcagcaaggctgtttatttcacttgggtaaaagtgggcttagtctgaaaagagagtcagcaaagggagataggggtggggcagttttacaggactggggtaagcagtggaaagttacagtgaaaggtggttatctattgtcagcagaagaggaggtcacaaggtgcatggtggggagatcataagactcattgtccagaagaagaatgtcacgaggtcgatcaatctatcagttggggcagggcaggaacaagtcataatggaatgtcgtaaggttggtcaatcatttaagacaggagctggctgttttacttcttttgtagttttcggttgcctctggccatctggatgtatatgtgcagg

SEQ ID NO: 4364 - DNA, 1037 bp, Artificial sequence
  DNA replication origin
accactgcactccagccttggtgacagagcaagactccatcttggcgggggggtgttgggaaaaagctcacattcctggagagatttggccatataaataaaatgctacaaaacagtgtatcatattgctgggtacagaaggaggccagcaggcctagctgacttgtaggtagagggaaaagaggccttcaggaggtctgcatggaagcttctccttcatggatatttgtgaagggatctgggctccctgcttggagcaaaggccctgtcatggaatttacagtctagagagaaagaaggtcattaagtaaaaaacgtacaaatacctaaacacataaagaataattacagattgtgattaatactgtgaagggaaagaacaggttacataagcaagaataaaagggccatgattttgtttggggaattggataagggtccccagaggaggtagccttgagccaagccaggagactgaccagggggtgttctgcagaggatcggagtggaagacggcatttccctacagcaggggctggtgcccatgaagtgagaaagagctcagggttcaagttgctgcaggccggtcagtgtggctggagcacagggagcaagtcgggaggatgtgaagggtcagatcaggcaggtgttggaggccttggtcgagggttggttttgattcaagtgtgatggcaggagagcccctgaaggttttaagaaagagagtgccaatgatgggctttgtgtgtgcaaagcagccttgctgcagtctagagaatagacaggagagggcagttggggattcagttaggatccgagtggggtgtgaaggttgttggggtgtggctcctcagagggatttgcacaagtgatcatggttggattggaaagtccaggccaagggaacagaatgtccaaaaccaagaggcaagagaaaagacgatgtggtagggggactggctttgaaaggggcagaggtttacaggagagtgctggtcagtgagccagagggggttgcaggggacatgtgttggtgc

SEQ ID NO: 4365 - DNA, 1340 bp, Artificial sequence
  DNA replication origin
ccctcccggacggggcggctggccgggcggggggccgacacccccacctccctcccggacggggcggctggccgggcggggggccgacccccccacctccctcccggacggggcggctggccgggcagaggggctcctcacttcccagtaggggcggccgggcagaggcgcccctcacctcccagacggggcggctggccgggcggagggctgaccccccccacctccctcccggacggggcggctggccgggcagaggggctcctcacttcccagtaggggcggccgggcagaggcgcccctcacctcccggaccgggcggctggccgggcggggggctgacccccccacctccctcccggatggcacggctggccgggcggggggctgaccccccacctccctcccggatggggcggctggccgggcgggggctgaccccccctcacctccctcccggatggggtggctgccgggcggagatgctcctcacttcccagatggggtggctgctgggcggagaggctcctcacttctcagacggggcagctgccgggcggaggggctcctcacttctcagacggggtggttgccaggcagagggtctcctcacttctcagacggggcggccgggcagagacgctcctcacctcccagacggggtctcggccgggcagaggcgctcctcacatcccagatggggcggtgaggcagaggcgctccccacatctcagacgatgggcggccgggcagagacgctcctcacttcctagatgtgatggcggctgggaagaggcgctcctcacttcctagatgggatggcggccgggcggagacgctcctcacttcccagactgggcggccgggcagaggggctcctcacatcccagacgatgggcggccaggcagagacactcctcacttcccagacggggtggcggccgggcagaggctgcaatctcggcactttgggaggccaaggcaggcggctgggaggtggaggttgtagtgagccgagatcacgccactgcactccagcctgggcaccattgagcactgagtgaacgagactccgtctgcaatcccggcacctcgggaggccgaggttggcggatcactcgcggttaggggctggagaccggtccggccaacacagcgaaaccccgtctccaccaaaaccagtcaggcgtggcggcgcgtgcctgcaatcgcaggcactcggcaggctgaggcaggagaatcaggcagggaggttgcagtgagccgagatggcagcagtacagtccagcttcggctccgcatgagagggagaccgtggggagagggagacggagacggag

SEQ ID NO: 4366 - DNA, 907 bp, Artificial sequence
  DNA replication origin
gcctctgcccagccgcccctactgggaagtgaggagcccctctgcccggccagctgccccgtccgcgagggaggtgggggggtcagccccccacccggccagccgccccgtccgggagggaggtggggggggtcagcccccctgcccggccagccgccccgtccgggagggaggtggggggggtcagcccccctgcccggccagccgccccgtccgggaggtgaggggcgcctctgcccggccgcccctactgggaagtgaggagcccctctgcctggccagccgccccgtccgggagggaggtggggggtcagccccccgaccggccagccgccccgtccgggagggaggtgggggggtcagccccccgcccggccagccgccccatccgggaggtgaggggcgcctctgcccggccgcccctactgggaagtgaggagcccctctgcccggccaccaccccgtctgggaggtgtgcccaacagctcattgagaacgggccaggatgacaatggcggctttgtggaatagaaaggcgggaaaggtggggaaaagattgagaaatcggatggttgccgtgtctgtgtagaaagaagtagacatgggagacttttcattttgttctgcactaagaaaaattcctctgccttgggatcctgttgatctgtgaccttacccccaaccctgtgctctctgaaacatgtgctgtgtccactcagggttaaatggattaagggcggtgcaagatgtgctttgttaaacagatgcttgaaggcagcatgctcgttaagagtcatcaccaatccctaatctcaagtaatcagggacacaaacactgcggaaggccgcagggtcctctgcctaggaaaaccagagacctttgttcacttgtttatctgctgacctt

SEQ ID NO: 4367 - DNA, 868 bp, Artificial sequence
  DNA replication origin
gatcacagtagggacctgagagtctttctgcagatagtagggtaaaacagctgccaccaaggaaggtggccctgaggaatgtgtttgttgtgacagacagtggaggagccaagggagtgtaactgttccttggctccccattgagtgtgggagcagtgccttacccaagggttgggagcatgggggataggactggagggcgtgttagtgttgcacccaagactgagaaagggcagacggccagaagagtgtgcccagtgttacacgcggggctagaggagtgggggagaggactggaggactgtgtttaacacaatgcccagaggctgggggagtaaggaacaggactaggagtgtgtttagcattatacctagaggctggggaggtaggggtcatgattgagtgtattcagtgtcacacacagagactagggaatgggcgagaagactgggggagtgtgttcagtgtcacacaggactgggggagggggacaggactgggagtgtgttgagtgttacacccaggggctagggaagtgggggacaggattggagagtgtgtcagtgcacctggggtttgaggagtagaggagagacctgggggagtgtgagtgtcacacacagggcttggggagcagaggagaggatcagggtaagtgttcagggactgcactgggggagtatgttagtggaccacacagagtcaggatagagggtctggcaggagtgaagggaaggcaaatggaaaccaattcatctgtttttgcctctggttctctgtggctgttatcactctgttcttcatggtctgttgtcccgctgtccttcctcaattatccctttcatgaacctctcaacccacctttat

SEQ ID NO: 4368 - DNA, 1271 bp, Artificial sequence
  DNA replication origin
gtaggtagactgagcagctgataaatctcaggagagggaggggaggggaggggaggggaagagagggaaggggaggggaggggccgaggagggggaagggggtgaggaggggaaggagggaggaggagggcagataagcagaggggaggagcaagggggaaaggagggagaaggggaaggggaggggagaggaggaggggaagggagggaggggagggagaagaggagggggagggcagggtaggggaggggaagaggaaggcaggagaggggaggggagaggggaggggaggggaagggaggaggttggcaggggaggggaggagaggggaggagttgggcaggggagggaaagtgggggagaaggggagtggaggagaggagagaggaaggggcaagaagggaaggggagggcaggagaaaggaataagggagaaggggagggcaggggaggagagggtaggggagaggaggggaagggagggaaagggagggaaagagaggggaagggaggggaagggatggccccagatgcaccctagagcactcactccaacatctgtaaggtgcactctgaagcagcagcccaatccttggggctgctaaagccccactattcccacaaccttctagtgtcaggtcagctccaggccatgcccaggccaaatggaataccagcataacttcagagccacccaccccttccctgtcacaatacctgttgggtttggccatcgttagtcatccctgatgctctgctgaggttgtgtgacacccccacacacaaactcccacccctcccaggcaccttcacacacaagcacagccctgggggcagctcccattccaatatcatgcttaggaacttgactctgtccccaggctaagcttccagagaccaggacttgcccacgtccccctcccccaccataatacaccaatactgagtcctcccttctctttctgcaagaaggcagcagcaagcaagaccttctactctttggggctgtttccccaccaccaggctgagagctgtgctccaccttgggacgcattagcatttttaaggttcttattcccatacacatcgtgccctgggattgtcctcttccttgaggcattagcaccttcccttcctctttctcaccccagccccgcctgcctggggtcagccttcaatccacacagtgtctggggaagagcctagaggccatgtcacacttccccagcatgtttcacggcccatctcttcctgtcggaggcacgtcctg

SEQ ID NO: 4369 - DNA, 1059 bp, Artificial sequence
  DNA replication origin
ctctgggcactttgggaggccaaggcaggcgtctgggaggtggaggttgtagcgagccgagatcacgccactgccctccagcctgggcaccattgagcactgagtgaaccagacaccgtctgcaatcccggcacctcgggaggccgaggctggcggatcactcgcggttaggagctggagaccagcccggccaacacagcgaaaccccgtctccaccaaaaaaatacgaaaaccagtcaggcgtggcggcgcgcgcctgcaatcgcaggcactcggcaggctgaggcaggagaatcaggcagggaggttgcagtgagccgagatggcagcagtatagtccagctttggctcggcatcagagggagaccctgtaaagagagggagagggagaccgtggggagtgggagaccgtggggagtgggagatcgtggggagagggagagggagagggagcgccaaggacagtattgacttaggggatccaaggagaccaaaacagacacggtctatgctgcctactttggtggggacagcaggttagatacagtggtcagtgcaaagtgacgaggtctctgatagcaggagtagcaggtattagagcggcacatgtaggagtggaggggtggggacgagggggctaggaagggtacctaggagaagtgactttaggtgctggcagaaagagtaggaatgagctaggtgaagaggctctggaaggaatgattccagccagtggggagactgtgcttgggcccagaggtagagggtattgtgaacacatgttctgttgactgcaactggcaggagatggacctggagggggtagtcagggacccaaccaggcagcctgtttccaaggagcttagactgaatcctgtgggcaatgcgaggcctctggcaggtttaagcagcggagtttacaactcttggaatcacttccgtacagtgatgcaagtggcttgagaaatcatttgataaagttgaaatcagatgataaagttgaggcccagggaggtaaatacagtcacgcctcttactacaattgttaccagctgatgt

SEQ ID NO: 4370 - DNA, 873 bp, Artificial sequence
  DNA replication origin
agcatgctgccttcaagcatctgtttaacaaagcacgtcttgcactgcccttaatccatttaaccctgagtggacacagcacatgtttcagagagcacagggttggggtgtaaggtcacagatcaacaggatcccaaggcagaataatttttcttagtacagaacaaaatgaaaagtctcccatgtctactcctttccacacagacacggcaaccatccgatttctcaatcttttccccacctttcccccctttctattccacaaaaccaccattgtcatcatggcccgttctcaatgagctgttgggcacacctcccagacggggtggtggccgggcagaggggctcctcacttcccagtaggggcggccgggcagaggcgcccctcacctcccggacggggtcgcggccgggcagagacgctcctcacatcccagacggggcggcggggcaaaggcgctccccacatctcagacgatgggcagccgggcagagatgctcctcacttcctagacggggtggcggccgggtagaggctgcactctgggcactttgggaggccaaggcaggcgtctgggaggtggaggttgtagcgagccgagatcacgccactgccctccagcctgggcaccattgagcactgagtgaaccagacaccgtctgcaatcccggcacctcgggaggccgaggctggcggatcactcgcggttaggagctggagaccagcccggccaacacagcgaaaccccgtctccaccaaaaaaatacgaaaaccagtcaggcgtggcggcgcgcgcctgcaatcgcaggcactcggcaggctgaggcaggagaatcaggcagggaggttgcagtgagccgagatggcagcag

SEQ ID NO: 4371 - DNA, 879 bp, Artificial sequence
  DNA replication origin
gtcagccccccgcccggccagccgccccgtcccggagggaggttggggggtcagcccccagcccggccagccgccccgtccgggagggaggttggggggtcagccccccgcccggccagccgccccgtccgggagggaggtgggggggtcagccccccgccaggccagccgccccgtccgggagggaggtgggggtgtcagccccccgcctggccagccgccccgtccgggaggtgaggggcgcctctgcccggacgcccctactgggaagtgaggagcccctctgcctggccagctgccccgtccgggagggaggttggggggtcagccccccgcccggccagccgcccagtccgggagggaggtgggggggtcagccccccgcccggccagccgccccatccgggaggtgaggggcgcctctgcccggccgtccctactgggaagtgaggagcccctctgtccggccaccaccccgtctgggaggtgtgcccaacagctcattgagaacgggccaggatgacaatggcggctttgtggaatagaaaggggggaaaggtggggaaaagattgagaaatcggatggttgctgtgtctgtgtagaaagaagtagacatgggagacttttcattttgttctgtactaagaaaaattcttctgccttgggatcctgttgatctgtgaccttacccccaaccctgtactctctgaaacatgtgctgtgtccactcagagttaaatggattaagggcagtgcaagatgtgctttgttaaacagatgcttgaaggcagcatgctcattaagagtcatcaccactccctaatctcaagtacccagggacacaaacgctgcggaaggccgcagggtcctctgcctag

SEQ ID NO: 4372 - DNA, 1180 bp, Artificial sequence
  DNA replication origin
cctcccggactgggcggctggccgggcggggggctgaccccccaacctccctcccggacggggcagctggccaggcagaggggctcctcacttcccagtaggggcgtccgggcagaggcgcccctcacctcccggacggggcggctggccaggcggggggctgacacccccacctccctcccggacggggcggctggcctggcggggggctgacccccccacctccctcccggacggggcggctggccgggcggggggctgaccccccaacctccctcccggacggggcggctggccgggctgggggctgaccccccaacctccctccgggacggggcggctggccgggcggggggctgaccccccccacctccctcccagacggggcggctggtctggcgggggctgacccccccacctccctcccggacggggtggctgccgggcggagacgctcctcacttcccagacggggtggctgccgggcggagaggctcctcacttctcagacggggcagctgccgggcggagaggctcctcacttctcatatggggcggctgccgggcggagggtctcctcacttctcagacggggcggccgggcagagacgctcctcacctcccagacggggtggtggctgggcagaggcgctcctcacttcctagatgtgatggcggccgggaagaggcactcttcacttcccagatgggatggcggccgggcagagacgctcctcactttccagactgggcagccaggcagaggggctcctcacatcccagacgatgggcggccaggcagagacgctcctcacttcccagacggggtggcggccaggcagaggctgcactctgggcactttgggaggccaaggcaggcggctgggaggtggaggttgtagcgagccgagatcacgccactgcactccagcctgtgcgccattgagcactgagtgaaccagactccgtctgcaatcccggcacctcgggaggccgaggctggcggatcactcgcggttaggagctggagaccagcccggccaacacagcaaaacccagtctccaccaaaaaaatacgaaaaccagtcaggcgtggcggcgcgcgcccgcaattgcaggcactccgcaggctgaggcaggagaatcaggcagggaggttgcagtgagccgagatggcagc

SEQ ID NO: 4373 - DNA, 956 bp, Artificial sequence
  DNA replication origin
cgtttgtgcccacggacggctgtctgtggagtgtgtgcctcggcgtgtctgaaggggccattgtgtccgatgaagggaatgtgtaccttgtgtgtaagttggtgctgacgccaccagaacttcggtccctcctcctccctccctgattgcatcattagtgctaattgaggggctttcacacgccagtgcactagctgtttggagtgagctcccccctcctgggagagataagccgctgcccctccccctcgcagctctcctcttccccgccactctgaaactgcccacctagatcctctcaccttcctgggcagcttcctgcctccctctgggccaggttaatctctgtcctcctcacagtgtcagggattggctggggaggggtcagggaggagaagggtccacagccttttttctgggggtgggggtgggtgggggggtatccagggaggggagattttccctgaagaggtctggcgttcctacagaatgcagtgtctgtgatgagaaagggacaggaatttctgccctgttcctttggacatggaaggaccgaggagagagctgagtccctgatctccagcctatgatcccactgaggtgggccttccagcccggactccttgttctctatggcttggggagttggggcccagtccgacttggcaagcatggaaaggcagggtgaaggaagccatgattcctccgagaacactgggtctggtggagtcaggtctgtaccgatagagctgttctgccccactctgggccgtggctgcagtctgcagggtgtagggggaaggctctgagcagatgccctctccgcagccttgcaccagatgtctttggtctaattaactgtgctgggaaaaccaacctgggtttgtaaacagagctactggctaaagtcaacagggaacagcagcaaacagcaaaccattcccctcacactcagc

SEQ ID NO: 4374 - DNA, 1270 bp, Artificial sequence
  DNA replication origin
gctcaggctccgaggcggctccgctctgcgccccgccggccccctgcccagcccgcgcgcatggccccggcggccccgaccccggcccctcgcgggcgacacatcggcctgacacttgcctccctgccgccctgcccccgccgcttataaggcccagagccgccccccgcccccgcccccgccccctcccccgccccctcccccgcccctccgcctccacctcccagctcccggcccgagcccgtcctcggcgccgccccctccggccgcccggcccggccttccccgctgactgacagcgggacctcctcccgcggccgtccgggcctgggaagcggcgcggaggcggctccggtcctgcccagcccgcggtcccgcccagcccgcggtcccccgagctccgtctgggagcgggggagggggcggcggcggccaggaggcgcgcgggggctccgcgcccaacgcgagggcggataacggggccggggcggccggataacgggattgggaggtggataacggagccggccgggcggagtgggggaaagataaaggggcgaggccggcgggtagcgggctccggaggggacgagcagctaagtccggggtgcggagatccgagtgatctcagcgctccctcctgggactgggggcctcggggcggtttgggcgcagggaaggcgcgtggaccccgtctctcgcgggtggggccgggggtggcggctcctcgctcagccccggattccggattggggcgatggtgagggggaagcgggcacagccgggccagcacctgcgagcgcgcgtgggacaggagctctaggcatagaggaatgctcgtgagctcgccgaggatgccctgttcaactccttttaccaaagtgtttctgattttccttgcctctaaagccccaaatgcagctgggggtcgctccctacccctcaagatgcctggggtctgacggggtcagccgcgtataagaaaccatgtgcatgctagtagcttgggcaaagagtgcgtttgtgcccacggacggctgtctgtggagtgtgtgcctcggcgtgtctgaaggggccattgtgtccgatgaagggaatgtgtaccttgtgtgtaagttggtgctgacgccaccagaacttcggtccctcctcctccctccctgattgcatcattagtgctaattgaggggctttcacacgccagtgcactagctgtttggagtgagctcccccctcctgggagagataagccgctgcccctccccctcgc

SEQ ID NO: 4375 - DNA, 1076 bp, Artificial sequence
  DNA replication origin
tcgctccgggctcggagcctccgaggccaggccagtcccctgagccttcgccggccccgggtccgggccgtcgcgggggccgcggggagctggcccggcagatccgggcgcgctacgaggaggtgcagcgctattcccgcgggggccccgggcccggggcgggccggccggagcggcggcgcctgatggacctggctccgggcgggcccggcctgccgcgcccccggcccccttgggcccggcccctgtccgacggcgccccaggctggcccccggctcccggcccaggctcccccggcccgggcccgcgcctgggctgcgccgcgcttcgcaacgtgtccggcgcgcagtacatgggctcaggctacaccaaggccgtgtaccgggtccgcctgcccggcggtgccgcggtggcgctcaaggcggtggactttagcggccacgatctgggcagctgcgtgcgcgagttcggggtacggaggggctgctatcggctggcggcccacaagctgcttaaggagatggtgctgctggagcggctgcggcaccccaacgtgctgcaggtacgagggtggggacgcgggggtaacggtgttggctgggagtgcccaagaccttgtcaacctggctggaagagaaccccttgatctggagtgccagtgactgcacccaggctaagctagacgcagaaaccggaccatggcccttcccactgcaccaccctgcttctcactcctgggtgggcgtccctttaccggagaactcctgggtttctcggcttccacacatctcttaaagacaggccaggacagaggctcccaaaactcagggggtggggcagtccattaggatttaggactctactccgggctggagttaggaggttgaacaccagggatattaccccaagccaaaatgaccctaagccaagacacttgagtcagaattccaactgtgtgataaagtcccccttcttgatggaacttctcccaacttccagtgatttgtctggttttgaaaatgagacgggacagcagtggggctgggaagagctggaaagagaccatgtgtcaggc

SEQ ID NO: 4376 - DNA, 1585 bp, Artificial sequence
  DNA replication origin
agatggagaaactgaggcttaggcaaagcaatttgccccagggtgacggagcaagcgtcaacttcagtttccagctcggacgcgaggggccgtcgggggcgttccggggagggggtgcctgggccgggggcggccacgcggggctgggagaggttccagcagcggcgcgtggtgtagccggcgtccggcgggactgcacgggcctggagccgctggaaaggccggtctggtggcccgggacgagggggcggccttcccggaatcccgagcagcacggcggagccggggcagctgccaggcgcggctggggaccggctcgcgctgcggttggcggcgggcaggccacataccgcgcagcgtggaggaaatggctgggattcctcctgcggcgccgcgcgggcctcggggagggcggggctcccccagtgtgtcggggcgggggcggggcgcggcggagggtgagcggggatcctggcgctggcgggggcgccccgacctgagtcctcgtccctggagcgctcccgccactttgccagcatctgggcctccagagccccgtgaaccctcgagaaggggagcacgtgaaggggctccccggccacgcccagcctcctgcccagtctctgcctcaggcctaagggttcaagaggggcctgagtcacccacctgcagagcggccctgcagcccctgctgatccgaatcaggccctgccttctggggtggcgcacgacacgcgtggggcccagcgaagaggatgctgaggacctggacgctgctccggacagtgaggcctccgcaggtcccagtttcagctttggaaagtcctggccactgacgtcctcagtgttctaggcccagcctcaggcctttctgctgcaggcatggtgggccaggcggagtcggcttctaggggatgaggcttgccctgagagagaggccggccccttgtgagattgttggctgcattgtggtgggtgaagtttagaggcagagccgggagggtggcactgaggtcagtcttgacctgggcctgagtgaggaggccgctttacactatactggggagtggaggcatgagaagatggaaaacctgggggttgggttagcttgagaaagctcccagcttcccccggacacaagcaaaaacatgatttggctggggaagtggaagaggggaaggtgaattgagggtcttagattgggtcccctataacatctgctaggaaggtggcccctggcacttggaacagggactgattgatggatccatgatctctttcctccatcagtctccactaggatgtcagatccagtcaagagtggcgtttgagaggcgttaccatctgccctgcacccctaaacccttcccgctgcagactgctgtactgacaccctcctgcccttctctggtttccagctccaatggcgtctattctctatgaattattccttgatccccgcaacttctactccttccatctgcttccacggccacgtgatcgcacttttcacactggatcatgaatatttgcttgtgaacttatctccccagcttgacaatagctctataagggcagagattgg

SEQ ID NO: 4377 - DNA, 1569 bp, Artificial sequence
  DNA replication origin
gcatggtggcacagcgcctgtagtcccaactactagggaggctgagatgggaggatcgcttgaacctgggaggtcaaagctgcagtgagccatgatcacgccactgcactccagcctgggtgacagagcaagactgtttcaaaaagaaaaagtttagaatcaaattttagattgtaaactctgattgaggttgttgccttccaactatgcttattcatctagaaagagaagtcagcatttcttgaagtctggtcgcagtatggggtccctgagagaaggcctctctaaaaataccagggggagggagggagaggtatgcgattgagagttagggaggtggttccagagaagagggcaagccctcaggttgggccgccagaggctcccaggagaagaaagaaagggaagccaggcctgcatcctggtggagcccgctcctcccaccgcggggagatccgccctcagcgctgtggtggccggaagtgctggtctagggcgggtgggggcgaggggctgcctgggaggtcagtctcccggctgggctgggatatttatagcacctgggtttctgggtctgcctccacctggatttatttatgcggcctgtggctgtggcgcctgtggagaatgaggcggggtggggtgggggggggcgcggatctcgctgcaagggtctagttcttggccttgggactctagctggactggaaacgacaaatcacaaccaggggctgtctgggggaacacaggcagagcagcacttggtgctgcgcctgcaaagccgccgatggttgggcctgttgaaactcggggctttccagattcacgcggtgtcgcctttgcggccgccgtgggcgtgggttaggcaggtgtgggcgacggggaagcgatcccctcccccgcaagtcaccccgggctccggttctcacgccttcctccgcagctcctgggaagaattaaaggcggaacaatgttccgtctccggagggatctgtacttggaaagagaactcagagagcacgtggtggccggccccatctgcagacccaaaactagagagtccacgtttgcgaacccatctgcactttcgactttccctgatcactacgtgtctggctgctctcagactgcgatgacatcatttaaaaaaaatgtaaataactgtcctttgggtctttcaagaacctagtgattgaggagagggcaacggtgaatctcgaggaaggctgtgtcgtgggaccttcaggcattgtttaatctgtgcagggcgcagtcttgggcaggccccagccctctcctctgcccactcgcaaagcccggcctgcttgctccaccggcaactgggctggaggagaggcgaggggcagggtgggtgctaagatcctgtgcgaaaagccaggaccctcgtggtacctagggaaatgaaaatcgcgttgacagtagtccaacgctttccttttctcattcacccctcgggcagcacaacgagacaggcactcctgccaacgtccccatttcacagatggagaaactgaggcttaggcaaagcaatttgccccagggtgacgg

SEQ ID NO: 4378 - DNA, 1131 bp, Artificial sequence
  DNA replication origin
ccctcttggttgcttctttagtgtccttgtaggacccacgtggtggtcatctcccgtcacgggggtccagtcttggctctgcgggcttcccaggggccacatagggagaggatccttcatgcatcagagtatcgcaggccagagtctatgccttatccccacctgtttggaaccagcttccaaaccgtggtccccagccttcagcaggcctaccgcgcaggcgcaaccaccagcctggcgcgaggcggacaaacgccgaggccgaggcaaggtgagagggcggggctggcaagaccccgcctccgtggcgtcacgtgggaggcggagtcggaagtgtgacggcgtgcgcggggcggggctactgctgcgcgcgggcgcgggggcggggcggggcgcggcgcggcgcggcgctcgcggctgctgcctgggagggaggccgggcaggcggctgagcggcgcggctctcaacgtgacggggaagtggttcgggcggccgcggcttactaccccagggcgaacggacggacgacggaggcgggagccggtagccgagccgggcgacctagagaacgagcgggtcaggctcagcgtcggccactctgtcggtccgctgaatgaagtgcccgcccctctaagcccggagcccggcgctttccccgcaagatggacggtttcgccggcagtctcggtgagtacggctggggagtcctgcgtcttctgcgaagggtaggaacttttttccttccgcacacagcccaggccctgccctcccgcctgcccctcggggtggcagcggctccactgcacatgttcccttcgaggctgccgcccctccgcggactccggtggactgagggcccctcccccatgtccaactctcctctgtgtcagaccctcctttcctcccggagcccctttcagtgcggggccctcgttcccccaaagtgggaaccccttccttctcaggccccccgatagctggcacacccctccccgtacactcacggctccctccacttaccccccttcagagttgggacatttcttcaaatccaggctcctcttcagggtacaaccttccaccacctttccacatacacgcctctctttcagggtggggatcgccttcac

SEQ ID NO: 4379 - DNA, 1765 bp, Artificial sequence
  DNA replication origin
ttccacctcagcctcccgagtagctgggactacaggtgcacaccaccatgcctggctaatttttgtacctttttgtagagacaggtttcaccgtgttgcctgtgctggtctcaaactcctgagctcaagcaatcctcatgcctcagcctcccaaagtgctgggaatacaggtgtgagccaactcgcccagccttaaaaaaatgctttgaatggattatctattaaaaatatttgaaaaataatttttaattaaaagatcaccaggcatggtggctcatgcctgtatttccagcacagagggaggctgatttgggtggcagcaattataggatatttggggtgtcgtttttctggcaggaaacctctgtggccagtggtacctttccccaagttttgctcgggcccgctggagtcatttcactcacttggcctggcaggctgcatttggttcttgctgccagcctggatcccacaccaccaagggcaagtcagacatggaatggcaaggggtgtgtgagtgagtgtggggtctggccactgcacacagtcagacatgctggctgctgcagtggggtgggcagctccaggtgccagcacaggcactggctctctgtgaggctgcggccggaccaggtaccaccacaagcagattccatggcttgcatcggggaacaagcattcagaaacttggagacaccaggaacagcagggccccaaagagggaatcacagccctgcctcagggagctcccagttttgggctccgcaaaggactgcagctcttctctacttctcttcaccagcaacgtggtgagcaaggggcatgtttcagccctgtttgtgttacagctcttttaacctcatcattccatggtcccgagttcttgtgctgcaaccaggaagaataaggtatgcagacaagcagagggtgagcaggagggtgagcaagatgaagaggagctttattgagcactagaacagctcagtctaccacagggggcagctcctttctgcttccagggtgtcccaacaagtgttcagctcctagcaaagaggagaccctggggtgggaagctcctctttgcaggtaggttgtcccaaaatctctgcagctctcagcagagaggaggccctggagtgggtagctcctctctgcagctggtcatcctgaggtctgcccagctctagctgaacctgggcttttatgggcctctgaggggaggaagtgcacaccaattgctccattagcggccatgagcgggcccagaaaaggcaccacaagttcccattctggtctgcgggacaggcagcccagcccctagccttcaggccctatgtggcctgaaggtggggcctcaccggggactcgccctcttacgcccaggagcctgtcttgcctcccgctgctgttcatggcgcccaggctgttcctgccaaggggcttctgcaagccagtgctgagctgccctcagcccccacttggcttcccacccatgctcataggcacccaaagtccagagggggccaaggtggcagggggctagcatgtcagcactgccctgagcctgtgcacacctggctgtcttcaccccagctttgttctgagatcggcgtgggcaccaacagcagggagaagtcaggcagtgggagcaggcatttccgagcctgcaaggtcaggtggggctttctgggcccccaagagtgtagggatgccttggtccacagccacggtttgggtggctgcagctgccccagagttggcgggg

SEQ ID NO: 4380 - DNA, 1425 bp, Artificial sequence
  DNA replication origin
gctgcagttgagatccccattgtttcagtgggcaagtgcattatacttcttcacagactttaaacctccacattcgagattttgctactaggaatgttttgccctttctctgtgccaactcatggccatcagcacctccaattctgtcttgaaactcactttcttacagatatttttcttgtttaatatctacttagtagatactaaacagcaaagtagcagtatctacccagtagacactaaatagcaaaatagatactgaatagcaaactatttagtagatactaaagtagcaaataactcctgtttttgagcttttaatcacatttagtgctcttaagataaattatccaagtctggggataaacaactcacagagattttcattctttaagaagccaccgagagtgattttacttaaaagacagcactcacattttcagttgtctgccttttcactaggaatccacttaagaaccagcgcaaaaggactccgtttggcgacctctagcgggcaccggacaatcctacaaaattacgaaaagtagagggcaatgaaaaactcttccctttaaccagccaggttaccctgtggtcagatgaccgcatctcaccctaccccacccttatttttttcttctagtatttgttttgcatctaacacggttcgccttacaactcacctgtctcgcctccggcgggctgggctgccggtgtcgggtgtcaggtgaatgaattgctggtagcagtttaaaataatccctgccaagtggaacccgctttctgggcacggacaagagcgcggggtagatcgctctgcggagccttcacggggctcttcccgctcggagggccggtgctgcagccgggtcaggggtgcgcgggggaaatcaagatattttgaaaaggaggatgcagacgaagaccaagagaaaggctgtttttgccggtgacaaggcgttcctccccagactttcatcccactctaagggcagcatctcgagagggtccaggcgcgctacacgttaggcgccttctcaggactcgcgccccagaacgtgggggccggggccgggtcggggaccgcttccctccgcgggctggcaggcggcaccgaggctgggggatggggcgtgtagccgccctctgagcacgcggtacgtgggtcgccccgcgcggcggtaggaagagcaaagtcggcaggaaaagccgtggctgggatgccttccctgagaaatccttaggggcgatgtcagaacccgagctgggctccggacagtttctggaaaaagctctccaaacgccgtctgtccccgcacccgagtccacactgggctttgaaccagggctgttaaaaggggccctggggactgcccaattcatcccgatggcccagggcaggacgcgggagcaggcatcccggcg

SEQ ID NO: 4381 - DNA, 1780 bp, Artificial sequence
  DNA replication origin
cgccccagcccactgcgacctcagccccggcgcccttggctcccggcagttggcgtgcactcgccccggccccccgctcccggaacccgctcccacacgggccgggtcgggccgagcctgcctacctccgacccggtacatgttggccgccatgtccgcccgcccgcccgcggagcccgagccgagccccgcccgccgccgccgcctcctcctcagcctcagccgcgaccgccgctgccgccgccgccgtcgctgctgcctcgccacgggggggaagggagggaagggaggggacagggggtgggggaagtaaaggggatggtacgccgaggggtgggggctggtgcccgcccccagcgccaggctagcaaggccgagtgggccgggccgggggaggcccggggaggctggagcgctgcggggccagcgggaattgggggggagggggaggggaaagggagtgggagtgggagggagggtggggggccttgctggaagtggagggccctggggtcagggtcctggctgaggcagaggcctgcactcaaatgcggaccaggggctgttagagaattagagtgggggctggggcttagcctctccccagcacctcttcccccacccagggtaccccgtcacctgtccaccccaagacaggtcctccttccctacctctgtccctggggaacccccctgtggctgccctagtaggcaagcgccagtctcaatgcaaactcttggatgcaaataagtgcaggcagcagggtgccttcctcgcggtgagattcaaggggccggcctggagcctgcaggctctagggccaggaagattccgggtgcttcccgcctcgccagagacccagctggggacagaggtagaaaaactcccttcctaggccaccctaactgcgtcatcgtttaccccaaaactgggctgagcagaaccaactgtccaacacccagatggaggccctggctctagacgggcactgtatatgcagggcctgttctgctgggaaaagggacctttaggagtgaggggcttcctttgtccatgggggaacagggccctacagttcacaatcaccaccacccccaaacagaggagattgtattcaatcagtttcatgtcgatggacacttaactggttacgtgcctaaagcttctaaatggttattgtcccaggccaattctctaaacaacctctgttttcacggccttcctactctcacagatacaaaaaaaaaaaaacaacgttgaatcttagctggcgatcccccaaatgaacacaaataactttctttagagaagccagtccattccaaagtactcccagacattgctgcataataaacacgaagaagatttcttggtgtggtggcttgtttggaatgtgtggtgatacacagctgtgtgctgtcgactctgggtttaaggtctgtgcggggctaagaggtgcccccagaaaagaaggttgtgttttggtggtttggtgatgacatttgtgatggtcacttatcacaaagtattgagatgaaaaaactgtgcatagctgaggcaaaatataaaaataaaaaataaagcactattgaattacattgactctatgacctgtttcctcgtctataaaatggggacgtgagttcccccttcacaggtgtggtaaggatcagttgcgatgatatctgaaaatgctttgtaaaccagggaacacagagcaccatgcaaataacaggtgtctcttgctttctttttaaccccagaaaaccacagattccc

SEQ ID NO: 4382 - DNA, 1218 bp, Artificial sequence
  DNA replication origin
gtccgggagggaggttggggggtcagccccccgcccgccagccgccccgtccgggagggaggtgggggggtcagcccccctgcccgccagccgccccgtccgggaggtgagggggcgcctctgcccggccgcccctactgggaagtgaggagcccctctgcccagccagccgccccgtccgggagggaggtgggggggtcagccccccgcccggccagccgccccgtccgggaggtgaggggcgcctctgcccggccgcccctactgggaagtgaggagcccctctgcccggccagccgccccgtccgggagggaggtgggggtgtcagccccccgcccggccagccgccccgtccgggagggaggtggggggggtcagcccccccgcccggccagccgccccgtccgggaggtgaggggcgcctctgcccggccgcccctactgggaagtgaggagcccctctgcccggccaccaccccatctgggaggtgtacccaacagctcattgagaacgggccaggatgacaatggcagctttgtggaatagaaaggcgggaaaggtggggaaaagattgagaaatcggatggttgccgtgtctgtgtggaaagaagtagacatgggagacttttcattttgttctacactaagaaaaattcctctgccttgggatcctgttgatctgtgaccttacccccaaccctgtgctctctgaaacatgtgctgtgtccactcagggttaaatggattaagggcggtgcaatatgtgctttgttaaacagatgcttgaaggcagcatgctcgttaagagtcatcaccaatccctaatctcaagtaatcagggacacaaacactgcggaaggccgcagggtcctctgcctaggaaaaccagagacctttgttcacttgcttatctgctgaccttccctccactattgtcccatgaccctgccaaatacccctctgtgagaaacacccaagaattatcaataaaaaaataaattaaaaaaaaaaaaaaagaaaagaaacattcagagcagaccaagtaagaattatcgagcaacactaaattcagcagcagcaaggatagactcacaaagttacagcataaaacactgcagaacataaacatcaataagttactgtaaaaggggctttatttttcacatttcattccagtgcttttcaaaattcttctttcaagatttaacacaaagtg

SEQ ID NO: 4383 - DNA, 1981 bp, Artificial sequence
  DNA replication origin
ccgggcagaggggctcctcacttcccagaaggggcggccgggcagaggcgcccctcagctcccagacggggcggctggccgggtggagggctgacccccccacctccctcctggacggggcggttggccgggcagaggggctcctcacttcccagtaggggcggccgggcagaggcgcccctcacctccccgacggggcggctggccgggcggaagggctgacccccccacctcccttcccggacgggggcggctggccaggtggggggctgacccccccacctccctcccggacggggcggctggccgggtgggggggctgaccccccctctccctcccggacggggtggctggccgggctgaggggctcctcacttcccagtaggggcggccgggcagaggcgcccctcacctcccggacggggcggctggccgggcggggggctgacccccccccacctccctcccggacggggtggctgccgggcggagactctcctcacttcccagatggggtggctgccgggcggagacgctcctcacttcccagatcgggtggctgccgggcggagaggctcctcacctctcagacggggcagctgccgggcggaggggctcctcacttctcagacggggcggccgggcagagacgctcctcacctcccagacggggcggcggggcagaggcgctccccacatctcagacgatctcctcacatcccagatgatgtgcggccgggcagagacgcccctcacttcctagatgtgatggcggctgggaagaggcgctcctcacttcctagatgggatggcggccgggcggagacgctcctcactttccagactgggcagccaggcagaggggctcctcacatcccagacgatgggcggccaggcagagacactcctcacttcccagacggggtggcggctgggcagaggctgcaatctcggcactttgggaggccaaggcaggcggctgggaggtgtaggttgtagtgagccgagatcacgccactgcaccccagcctgggcaccattgagcactgagtgaacgagactccgtctgcaatcccggcacctcgggaggccgaggttggcggatcactcgcggttaggggctggagaccggcctggccaacacagcgaaaccccgtctccaccaaaaccagtcaggcgtggcggcgcgtgcctgcaatcgcaggcattcggcagactgaggcaggagaatcaggcagggaggttgcagtgagccgagatggcagcagtacagtccagcttcggctccgcatgagagggagaccggaggtagaggtaggggtaggggtaggggtaggggtaggggtagaggtagaggtagaggtaggtagaggtagagggtagagctctgaatgtttcttgaggttcacttttaccccgcaagtaaaatagggtggatacaaagataagtgacctgtcattgttctcaagggatgcagtgaaatcagttaactgtagagtagagcaaagcatactgtgaagtaccttaagcgtatgtgggtgctgctttgtagcaaagaggagtctcccgctggagattggtgagagtctcatggatcagactctggctcagaggcattgttcaactttatttatttatttatttcgacatagggtcttgctgtatcgcccaggctggagtgcagtggtgcgatctcagctcacagcaccttccacctcctgggctcaagcgatcctcctacatcagtctctgagtagctgggaccatgggcttggctaatttttgtattttttgtagagatgtttggtcttgaactcctgggctcaagcgatctgcttgcctcagcctcccaaagtgctggaattgcaggcatgagccatcacacctggcctgtctaactttaaatttatcttttgaattctctttactcttcatccactctaataattgatttatctcacaccgaggtggacagattg

SEQ ID NO: 4384 - DNA, 1014 bp, Artificial sequence
  DNA replication origin
ggagtggtgatgactcttaacgagcatgctgccttcaagcatctgtttaacaaagcacatcttgcaccgccattaatccatttaaccctgagtggacacagcacatgtttcagagagcaccgggttgggagtaaggtcatagatcaacagcatcccaaggcagaacaattcttcttagtacagaacaaaatggagtctcctatgtctacttctttctacacagacacagcaacaatctgacttctctatcttttccccacatttcccccttttctattcgacaaaaccgccatcgtcatcatggcccgttctcaatgagctgttgggtacacctcccagacggggtggcagccgggcagaggggctcctcacttcccagacgggcggctgccaggtggaggggctcctcacttctcagacggggcggctgccgggcggaggggctcttcacttctcagacggggcggctgggcagagacgctcctcacctcccagacggggtcgtggccgggcagaggcgctccccacatctcagacgatgggcggccaggcagagatgctcctcacttcctagacgggaagaggcgctcctcacttctcagactgggcagccgggcagaggggctcctcacatcccagacgatgggcggccaggcagagacgctcctcacttcccagacggggtggcggccgggcagaggctgcagtctcggcactttgggaggccaaggcaggcggctgggaggtggaggttgtagcgagccgagatcacgccactgcactccagcctgggcaacattgagcactgagtgaaccagagtccgtctgcaatcccggcacctcgggaggccgaggctggcagatcactcgcggttaggagctggagaccagcccggccaacacagcgaaaccccgtctccaccaaaaaaaatacgaaaaccagtcaggcttggcggcgcgcgcctgcaatcgcaggcactcagcaggctgaggcaggagaatcagacagggagg

SEQ ID NO: 4385 - DNA, 917 bp, Artificial sequence
  DNA replication origin
aataaactcaatacaaccctctcattttacagccgatttagccagccaagagagggtcacaaagccagggaatgactgaacctgagccaggtctcaggctccttgactcccacgctggcgttgggtctgtggggcatctagtcagctgtttggaacaaaagggttcccaaactcctcagtctttctgctgttggtgtggtgttacctttttatgcaaaaaatacctcagcacctcctgagaacagcctgccccatccccacagcagggtcccctttcagggtgcagacactggggtgaataagcagcagaatgtgtctgtgtagggcttcagggtgttctcaggtggccctgccacagagggcaggggcaagggctttcctctgggaaggggaggcgctgggtctgggaccatttgtacacacagggcacagcagcctagaggctgcctgcatggatgacgatggtgtggatggcaggggaggggctatgggggaggtctgagcccccaaactagactggcaggtcctttctgagtgtcctgtcctgtgggctgctttccagcccagctgggaggcatggaggcaagacggaagagccagtctctttccttttccttcccttttgggaggctgggcccaataaaccggaaacacacgtgtggacctgatgtttggaaaggtggatgaggttgcagggcaggagaaggctgtcatgaacagtccatgcttaaagaacttaaagctgcatagagcttcaaggaggggagggaagccgcaaggaacttgactggggaagagtgtgcacaggagagctgggtgcagaggctctgagattagaagcactgggggtgagcttggggaacgattgagaaggctggtccaggagggtggaccagccatggagtctggtcttggcc

SEQ ID NO: 4386 - DNA, 1697 bp, Artificial sequence
  DNA replication origin
tttaaaatcaacttcactgagatgtaatttaggtacatacagacaattcttaaacaactccactcaagaattctttcaacccatcagtcagaatgcataaaccagacctgcccctcctctgcccagaactcttcagcagcttctcaccttgcttgcttcagcagcttctcaccttgctgaatagtaacccctcctgtaaaatttatatgttgaagtcctaacgcccagtactgcagaatgtgaccttatttggaatagggtccttgagatgtagttaggttaggatgaggtcatcctggagtagggtgagcccctgatccaatatgtctggtgttcttttaaaagagggaaatttggacacagacacacacacaaggagactgccttgtgaagacgaaggtggaggtgggcgtggtacagcagaagcaagaataccaatgatgccagcaaaccaccaaatgctagggagaggcccgggcagatggacgcgagacctcagggggagcgaagggaggactgagaaggagcgactgcagatggggatgaagtgttggaaggaggcaaagatgatgctacatctttaattgggggtgggcaacaacagtgatagaagagatctttggggagatattgactgttggccatgtggtattgcatggtaaccaagagtgtgcgtggactctggagtcgaactgctccgtgggttgagtctggagcctatcgcacaggcgctccgtgacactagaaaagttacttatgaaaatcccccctcacggtgctactgtgagaatgagatgagatgatgtaaaaacacttggcatagtcctgggcctgctgtttgccttgaggtgccaccctactgaccatgtcctgtggacacagcaaaaatggggaatgtaaaccttgatctagctggcatgtggggccccgccatggaactggggggatgagggaggtgaccataccacaggggagggcctgagaggtctgcctgagaaagatggcagctggatggccaaccctgttgggtgctgcaggcagaggctactggcagaggtggcctagggagggtctggtgtggtgtgtgtgtgtgtgtgttcgtgcacacctgcatagaggggccctgaaaaaagcaagacatcaagatcttcccaaaggagcggattctctgcctccccctttgcctgtggcttctgggacagggttggggtgtatgatttggctgcccccaggcctacattctagtgcatttctgccttgaaaaccaccctccccacacttttgagttttcccaaaatgcacagtgtcacttggggttggagaattgtttctcagccctggaaggagaggtgcaccctgtcatgtcatctcctacagcctgagaaccagctcagccttcttcagaagtcaaggccacagtcacaagaaagaggaacagaccgatgtggtggaaccggaacagcctgtctccatcttcccccaagaaccaagagattaaagcggtccttctgcaagcttctgggtccaggaactcggagctggaaggtgagggcgcagatggaggagggggaggaggcgagggcagggggcggccatgggggtgctggactcacatgagcttgttgcagaccgggggctggaaggagccccggttctccttcacccaggccctcactcccaggcggcgctccatgact

SEQ ID NO: 4387 - DNA, 941 bp, Artificial sequence
  DNA replication origin
ggcgcctgcggtggggcctgctcccggcggaggacaaagaatccagacccttcctggacgcttgtccccagacgttccttccctctacgccccgaggggaatcccagggaaggttcccagaaatactacagtgaggagatcgcgggttggaagtcccagcacctgagaacacggtgctggcgctgggctcaagatttggctttcccatctggaaaaggggaatgactgccccgccactcagggctgcggcgctcacccagcgggaagccgcacggcggtccccgcaggtcccgattcaaggtgagccccagacctgctgcgtgcggccggcagactccgccgcgggctcggcgaggggagcggtgcaggcgccgagctgcggagcccgggctcagggcaggaccgcgagccctccccacctgaggcccagccgagcggccgctgtccgcgcagtgtcgcagtggaccccgagccccgtgctgaactccttaggcgtcttaggaacatactcagttcgcacgcagctatgggaggaatttggcagatgtggacaccggcctcagtgtcctagccctcgggaatctcggggtgttaatgatgacagccccgtgtgagagactctaacagttatcctgggggtgaggggctggggcgctgggcctgggcgtgcatgtgtgaggaaagagaaatctgcgcgggtgtggaagatggagaagcctgtctttctgcaggactcagaactttcttaggaagtttggagggagtgggagctgacgggtaggggaggaggaaaatggctcaggcccctgacaccggaatccagactatagagtttaagaaactaaacgcctctaaatcctgccctcacagcccgcctggcctgggctggttttctcagcattccagacataaagactcctctagtacaactcaaaatcaaa

SEQ ID NO: 4388 - DNA, 1471 bp, Artificial sequence
  DNA replication origin
cgggtttccaaatggccacagatgtgacccttcacccttccctgcggctgttgaggtcattgcccagagaactttcctttggaaccaagtgggccttgctgcctggagagggagaaagcaaaccggatgatcctcatcctggggagcctggagccagcgggcccttgtttaattctgaaggaatgtgcgaggttcccgcccagcggagcaggccccagcctgactgggagcctcagcactcctggggcagcagctgcgtctgcaccgggtcggcgtgggggtgggagctgggccagctggggacctacagcatccagggagagacaatcacacaaactgggtggctggagtaggctaggggcgagggaggcccataacaccttcctccaggagccggggcctgtgtgtccagctctgtgctcaggggaggacaagcagggaagaggagacggtcctggcagtggagagcaaagtccccggcaggagatgaggtgccatgggaggcaaagcacagagtacagagaggaggcagcgaggagcgttccctgggggctgtgtcatcagggaaggcttcttggaagaggtggaggtttagctgggccctacagggtggggaggatctgaaggaaaagaggacattccgggagaaggaagaggacaggaggttctgctaaagatgcagagctggaaaagagcaacgcctctatggaatgacagtgtggacccgggtccagaggaggggaaaagaggcggctaaggcaggaaagtcagctccggttcatcctgaggggtttgagtgccagccagaggtcctccttacacaatgggggtggtggggtggggggcaggggagctcttgaaggttcttgaaaggggagttacctgatgaagtaggcgttttaggatgagaggctggccacataatctggtgggatcatggcagctgggacggaggtcatgagagtggaagaggctggaggaggggtgtttggcgcgggggagaaggtttgagtggggaaatggctgaggcctggggagtaaagcaggcagaactgaatccatttcacatttgggacattcttgaggcctcctttctgtgtttgggttcccctgacctaagagcaccgtgtcagcctaagacagctccctgcccacaggccaactggcccagatggacctgggggacagaagccaggccctatgctagcctgggtcccagcccccattcacaccctacccagagtggccctggcctctccagtgggcttcggggtatcttattccctgacacaaaaagtggcatctctccctggtgtggggattatcctggtgggcagaggcagaaaccccttgaataggaacttagccagtccaggtgagcgtgtgaatgcctgtgtggcccagctgggtgtgaacacaagtgtgagttctgtccagttcttgcaagagagtgggggaccctgtccagcct

SEQ ID NO: 4389 - DNA, 765 bp, Artificial sequence
  DNA replication origin
cctgccaggcacagagaacagcatgtgcaaaggagtaagggagagcctagtaggtctgggacatgccagcagttcactaggcctggatagaaagtttgagcatggggagaggccagagaaggggctggagaagggatgggcccaggtcacagggagcaaagtccactggcccaagaagccagggcttcatagggtcagcagtagggagcctgccagggctttaaagagaggaaagacatgagcagcttagcattttagaaagttcattcgactgaaaatgtgcagaaagcacaaactaaagcacagacacaaaacaagttcagaggatgtggctgtcacccaggtgagcagtgatagcttggacttggggccggggggatggagatgaggggacagttgtaagaaatatttaggagggagtgagagaggcttgtgatgaaccagcatgggggggacaagggccgggctgttgttaaggatgaataccaggattgtggacagcttggctgagtgaagggtggcagcaggaatccagggagaggctggtgtattggccttggccatgtacctggctggctgttagggatgtgggtctggagagggaggtgctggcctggtgctctggagtagtttgaacccagatttcaatgctgcctggggagaggaagaggctgggagatggagtggagtgagcagagtggacagtgcccttccctttctactaagccaaaccttagcatgcttcaagatccactcaccccttcc

SEQ ID NO: 4390 - DNA, 947 bp, Artificial sequence
  DNA replication origin
ctctcccttgaccaatggagcaggccccattcatttatttattcaatagatggttcttgcatacccactgtggccaaggcagtggctaagccctgaggatccagaggtgactgagcatgaactcagtctccaggacctccccaactgccgagggagcccccacaaaaaccaatgaacagctttagtggatggatcgattgcttgaacattaagtgcacactgtgtaccagcaccctgctaggctcataggagccaccggtgaacagaataggtaaagaccctgccctagtgaagctgacactttttgcaagggagatggagtataaaaaaaattaaaaattggttaaataatatgtttagaaggtgacgcatgctatggaaagaaagaaaagtggggcagggggaggagggccaggaagtaggggctggttgcagtggtgtccagggcagggagggtgggcttccctgagaaggcaagactgcagcaaagacagtccctggcgagggagatgagcatggtgtctggggacgtgccaaggcccagagagaggaggggcctgcagtgttcagggcttcaaggaggctggtgcaagctggggtggagagagaatggagggtagaagtgaaggtccaaagggaagggggaccagagagggaggagtcggaggccactgtgcagttttagctttgaccgtgagtgaaatgggaggtgctggagggttgtgagcagagagatgtgtattgactggcattttcaaaggaccatttgggctgttgggtccacagccgactggaaggggcagggggcaagggcaaggggcagtcaggaggcgactttgacagtccagaccagaggtgagggtgctgcagccaggcagaggatgggagaattgccttgggagaaacttgaatatggttccagggtaacttggagaagggaatgataa

SEQ ID NO: 4391 - DNA, 944 bp, Artificial sequence
  DNA replication origin
tgaggagcgtctctgccccgccgccatcccacctaggaagtgaggagtgcctcttcctggccgccatcccatctaggaagtgaggagcgtctctgcccggccgcccatcgtctgagatgtggggagcgcctttgccccgccgccccgtctgggatgtgaggagcgcctctgcccggccgcgaccccgtctgggaggtgaggagcgtctctgcccagctgcctcgtctgagaagggaggagaccctccgcccggcagccgccccatctgagaagtgaggagcccctccgcccggcagccgccccgtccgggagggaggtgggggtcagcccccgccaggccagccgccccgtctgggagggaggtgggggggtcagccccccgcccggccagccaccccgtccgggaggtgaggggcgcctctgcccggccgcccctactgggaagtgaggagcccctctgcccggccaccaccccgtctgggaggtgtgcccaacagcccattgagaacgggccatgatgacaatggtggttttgtggaatagaaagcggggaaaggtggggaaaagattgagaaatcggatggttgccgtgtctgtgtggaaaggagtagacatgggagacttttcattttgttctgtactaagaaaaattcttctgccttgggatcctgttgatctgtgaccttacccccaaccctgtgctctctgaaacatgtgctgtgtccactcagagttaaatggattaagggcggtgcaagatgtgctttgttaaacagatgcttgaaggcagcatgctcgttaagagtcatcaccactccctaatctcaagtacccagggacacaaacactgtggaaggccgctgggtcctctgcctaggaaaaccagagacctttgttcacttgtttatctgctgacattccctccactattgtcctatgaccct

SEQ ID NO: 4392 - DNA, 1062 bp, Artificial sequence
  DNA replication origin
ttagtacagaacaaaatgaaaagtctcccatgtctactcctttccacacagacacggcaaccatccgatttctcaatcttttccccacctttccccgctttctattccacaaaaccaccattgtcatcatggcccgttctcaatgggctgttgggcacacctcccagacggggtggtggccgggcagaggggctcctcacttcccagtaggggcggccgggcagaggcgcccctcacctcccggacggggtggctggccgggcggggggctgacccccccacctccctcccagacggggcggctggcctggcgggggctgacccccacctccctcccggacggggcggctgccgggcggaggggctcctcacttctcagatggggcggctgccgggcggagggtctcctcccttctcagacgaggcagctgggcagagacgctcctcacctcccagacggggtcgcggccgggcagaggcgctcctcacatcccagacggggcggcggggcaaaggcgctccccacatctcagacgatgggcggccgggcagagacgctcctcacttcctagatgggatggcggccaggaagaggcactcctcacttcctaggtgggatggcggcggggcagagacgctcctcactttccagactgggcagccaggcagaggggctcctcacatcccagacgatgggcggccaggcagagacgctcctcacttcctagacggggtgggcagaggctgcactctgggcactttgggaggccaaggcaggcggctgggaggtggaggttgtagcgagccgagatcacgccactgcactccagcctgggcaccattgagcactgagtgaaccagacaccgtctgcaatcccggcacctccggaggccgaggctggcggatcactcgcggttaggagctggagaccagcctagccaacacagcgaaaccccgtctccaccaaaaaaatacgaaaaccagtcaggcgtggcggcgcgcgcctgcaatcgcaggcactcagcaggctgaggcaggagaatcaggcagggaggttgcag

SEQ ID NO: 4393 - DNA, 1737 bp, Artificial sequence
  DNA replication origin
cagagagggagaaagatggggagacacagagagggagaccaaaagagaaacagccggcgggtggaaggcccggagaccgacagacagaggtagaggacaagggaacggcagaagacgcagcgaagggtggccacggcagcagcacggcgcagggcgcagctgaatcgccgctctgttcccggcgcgcactgaggggctttcttcgcggccgtgggaaagtggtgggcgagcgcgcgccccggtcgccgtgtggaccgtaattagccggattagggcgggagctgcgcgggccgggcaggcctggccagagaacaaaaggcccctctttgtccgcgcaaacggcggggtcgcgaggtcaccgggcagggtcccccaggagcgggcgaggggacgcgcgcctggagaatggggcctctgtgcacctggagggggccggcgggggccgcccgtgggcctgggactccagggaggccgcagccccgcttcagggtgcagacttagggcctctggcggagagcagggagggagaagaggaacagaagccgagaatggaggccagagaaggagagacaccaaaggggcaggaagctggcccgttcttactagtaatggtacctgtgacatggacaacatttattgagcgcttgctgtgtaccggctccacgcccagcctgggagacatacatcatctcatgtaatcctcataactacctcctaaatcagatactgtcatatccgagtttatccgagttttacagataagagagctgaggtgcaaggattgtggtttgcctgaggtcacacagtcagaaggggtgcctcacgtctttgctggcacacagtaagcacccaacaattatgtgatgaatgaatgacaaggttggcagtgtctggaaaaggcagagacacaaagagccctggcctcaccccctggccacccacagcctggggatgtttgggaattgggagctcccagccttcagggaaactgcctgggagatctgcagaggcgggtgtcagtgctgacacctcacccacttggggcagtgtaggggatgccagtcactagggtcaggggctcaagggatgggacatgtttctttccagcagccccaacagaactgtagctccctcagggctctctgcctgcagccccaggtccctccaaagcccagggcaatgtgaagggctgacggtgccccatgggagtgggaagaggaggcactggggccttcccccgccacccagctctcaccagccatgcctgagggtcagaaaggctctgactttcaaagagcattctctgggctgtgggggtcatgccccagctgaccaaacgtctctcctcacgggagatgtcgtcagagaccacacactccagcccacaaccaccggcaggtgatgggcatgggagaagtggacaggtgtgccttgcgtggggcattaggggccgtggggcctgtggcaaagcctgctgtcgacaggacagtcactgcacactgtggcctgtgagtgccatatgggccgagatggtcaggcctgagcttttcaagagaaatacgaattccaggctgggcacggtgaatcacccttctaatcccagcactttgggaggccaaggtgggtggattacctgaggtcaggagtgcaagaccaacctggccaacaaggtgaaaccccatctctactaaaaatacaaaaattagccgggcatggtggtgtgtatctgtagtccca

SEQ ID NO: 4394 - DNA, 1912 bp, Artificial sequence
  DNA replication origin
ttttaataatatgtaataaaatataaggtataacagggaaatgaaatgcacagatcttaagcgtgcggttccaagtattttgagtgtgagtgtgactgtgtgttgcagggggaaggtaacagaagagttgagtcccttcactgggtatggcatttggaatatcagtgctatcatgttttggcatgtctgctgcctgccgttttgttttttaaattgccaacttcagaaagtttataagactaaggaattcctgtataccctttccccagattcaccaattatttacatttatgaaatcatttgagaaaaatttagagaaatcttgcccctttacccttaaatacttcagtttatatttcaaggacattcttttacgtagtctggcttcctcttagctgagccttgggcatttcattttcagacagtattgggtcattctatatcttaagtaaagctgatttaatgggagagagagctggattggttttctgcttgatgctgtgctggtggcctggctgttgggggctgcctaggtcacagggtcccccagggaaaatctgttgacttccgcagctatgcttgagtctgcttgttactggacagctggtctgtccccttagaggcttggctgaactctgtgctctccttccctctactttgttctcgagttttctgcacattcttccacccacagatgtgaatgtcgtgtgatgttggctttccagtgtcttgcatggcgtggtagcagcagaaatgagcttggctgggcaccctctctgggccttggaggcaagcctgggctcctctgaaaatacaggcagcttcctttccctgacttgcctggaggagccaggccctgtggtgcggtctggctctgaggcctgtggtcctgcttgggactggcagtcttaggctgagggaacattttccagagtatagccgagggacagaatgtctcagtaagacgggctcggaggggaagtgttttggaaaggcctctgcttgctctgggaggcgttcaggatgctgaggttttggaaatctatggcggctcttcacaactgctcccagctttgggaggaggaatagacgggtgctcgtttcctcgggttcagtggcaaaggtgaagaccagcactgccgacctgggacctgggcctctcccgggcctggggaggacactggactttgaaggggaatgcagcctagaaggcctggaccctggagtcaggagatgctgctcccatccagtaagccctggctggagctcttctgggcaccaaccctggcataaaaccagtggggcctctgggcctgcactcaacagtgcctctgatggagcaggtaggagaaccccccgcaaatccaccaggcagaacagaacacgctggaggcatttaaccaggcaggcacgtctcctgcaaggagaggccagggaagggagagttcagatgcccccagctgccaggggatgcttagcggaggaagtgaggcctgagcccccctttctagcaccctctcccttcttctgttctgcttttgtatacaaccagcatgccgagggtccagttccagctctgttctgtgatcttggacaagtccgtttatctccttgggcccatttcccgcctgtgaaatgggacgtggagcactggagccaccttcccgggacagtgctgagtggtcaccaaatgttggtgggcttcagaggtgcttggagagcttaggcagatgcctgggaagttgggagcctgaattcccggtggtgaggcccaggcgtgtgtaggcattgctttcaaccagctctcctggtggtccttggagcggagctgggttactgtggaggcaccacatcccccgcccctaacttaactgcaggctccttggacccagactcgggcctttattcctgg

SEQ ID NO: 4395 - DNA, 896 bp, Artificial sequence
  DNA replication origin
tgcagaggagtcatgaagacttagatttcaattctagctttcactgattcattcattcagccaatattcaagttctgctatgtgctggacactgtgtctactgatttccacatccactgggtttcaatggtgagcaaaatgcacatggttctcgtcctgaaggagcttaaaatcatgtaagggagacatattcctcaaataattactcgaagagacataaaataatagcagcaatgagtgctctaggaggatgtctcctagtcaagaggtcagggaaaagtttttgaagaagtgacaccagacctgagatacaaaaagggtgattaggagtcaaccaggtgaagatggggaggaagggtgttccatgcagaagaaacagcatgtgcaaagaatgcttctaccaaggaggaagctggtgggtgttcaggggactggaagaaggctgccatgactgaaacggagagaggaggagcagagtgggaggggctcgagaagaggctggatggcacaggccgggcagaccatgcccaggtctttgtcataagagcagtgggaagccattgagctggcttaacctgggagttggcatggctagatttgcatttccaaaaaggtgctcgaggctgccatgggggtgagcgtggtggagtggaagaagactagcatggggactggcaaggatgctcctgcaggattcaggagaggcatgcgggggccttggactagggtggtggcaacagacatggaggaaagggcaagattggagaatgatttattaaggcaaaaaaccggactttggtgcccaattgtctataggaggtgaggacaagagaggagcagggatgacctgaggtttctgggttgagtagccaggtgggtggtggtgccatctgatt

SEQ ID NO: 4396 - DNA, 994 bp, Artificial sequence
  DNA replication origin
ggcggttacaccactgcggtttgttggccccagggagcgcctcccttacataacgcctgacataactgccctaaaacacacgcatggcaactcccacatagcaccacacatgctgtcatgccggctcacccccccacactcacacacactcacagagccacaccacagcctcacgcactcacacacacacaccccttcccacacacgctgtcatcccaatgctgtcatttcagaaaggatttcttttgctcccaccacccatcacacaggcagggcctccccgacgtggcttcagtgcctctggttcctcaggccccaggagccctgagcccactgggactgctccaggcctcgcctgggtctcccaggtggcagcctcagactgtggtgccagcctaggcagtggacgacaacagggggacttgagaacagggcagggagtcggagaaagaccagagtccaggctggagcccctgagatgtggactccagaaactcagaacaggcagtggggagggacagacagggagggacgcggcctccgaggtattatacttagtgcaacatgttactacgagggcaggcttcaagcatttaatgcatgatgggccaggcgcagtggctaacgcctataatcccagcactttggcaggccggaggatggcttgagctcaggagttcgacaccagcctggacaacatagcgagaccccctgtctataaaaaataaaataatactataaattaggaaaaatgcatgtgaccctcccaagaaacacgtgagccacactgtgacccatgcatgctacttctcgggattcatctgatggagatattcacccaaggccctgagttaaaaaaacgttcatgctgcaatgttggtaaaagcaaaataatgcagagcctccctgtccatcccctggaccctcacaaacagagccacatgcagccatgttccaatgccctaaatgataggtcaggggagagaatgacccc

SEQ ID NO: 4397 - DNA, 1392 bp, Artificial sequence
  DNA replication origin
ctggcccggcactagaatgctcggtgctaaaacctgcctgggggcgctcagaaaaacgccagggtggccatgtgcagggaggaagcccgctagagagcactgaacctcggaaaggaaccgtccccaaacacccgctctccttcagttttgcttgtggtgacaagtgagggcggatgtgactctcaccaagttttcttgagaccggaagttgggtctcggcaccgtcctcggccttggaagttcgtgggagccggcacagcccttagaggctagccgggcttaccttccatcaggggcccattgtcgtgaactctaattgtgtttattttttcttgtccacactcctgggggatatgcagagctgtggccgtccagggcaattccagttctgtgccgctgctggcacggctgagggagggaggaggacagcgggggctgtggcggggcggggcctggcagctggacaggcctccccaggaggagccctgcagggaggaggcgggagggagcggggcagcaggaagccacagcacctccagggcccaacctctcctgatgggttttgctagaccttgaaagagtgtgtgtgtgtgtgttgtgtgtgttgtgtgtgtgtgtgcgcgcgcgcatgcatgccgtgcacgtgtgtggaggcctgaggggtgcgcctgtatgggaagtgtattagtacgtgtttctgcgtccttttctgtctgtgggtgtgcagaggtttgtggtgttgctccgtctgcaggtgttcaggggtctgcatgtgtgatgtcgccctaggggagtactggtgtgtggatctgtgtgcttctgcatgtggaggctatgtggggggagggtctgtgggtatggctgtgtttggatgtgagtgtgtctgtgtgtaagtgtgtgtggatgtgtgtgagtgctggtgtgggtttgggtgtatctgttgctatgtaggtatgtggatctttggggtgtgcctgggtgtgggtgtgtctgttgtgatgtgggggttggtgtgtacgcaggggcgtgtgtgttggtatacatgggtgtgtctgtgtgtaagtatgtgtggatgtgtgtgagggctggtgggggtttgggtatgtctgttgctgtgtaggtaggtatgtgggtccttggggtatgtctgagtctgggtgtgtgtgtgtgtgtgtgtgtgtgtgtgtgtgatctatgggagtgggtttgggtgtgcctgtgtgtagctgctgctgtgtgtgggtaggtgtgtggctctgtggggggtgagcagctgtaagtgttgctgtgtatttgggtctggatgtgtctgctgcggtgtgcatgtgggtgtgtctgtatgtgggtgttaccaacacctacggaggaaaagcagacctttttagcatggct

SEQ ID NO: 4398 - DNA, 828 bp, Artificial sequence
  DNA replication origin
aaagttgtgggtctggatggcgagcggcgtgatgaggctgctgagctccggaccgaaggcgaaggcgttgttggcgcacgaggccgacgagcaggccgcgcacggggcccccggcgccagcaggtcctcggcgcccccggtgccgtacagcagagcggccgcagccgcggccgccgcggaggcgcagcatgtcggggcgcccgagggcgtggaggccgcggaggccgaggaacaggaggaggcggaggaggagcaggacgaggccgaagagcaggagggcggcggcggcgtgcgcgacgtggggctgtcgagcagcagcggcgactcgaggccgcccgggggctgatggtggcccgacgggaagcccgagaagctgaggctgtggtgcaacttgggccgcggctcccgcgggaagcccaggtgcaacgcatcgcgcgtgccaaaggcacgcaggtccccggaggcgccccccgacggcgcgggccgccgctcgtccgcgttgtggatgaagtggcagcgcggcccataggggcagaagccgatggtatgaaaggtgcggcacagctcggtcttgtacttcggatggcgagtcaggctgcgcagctcgtggaagccatgcgcgaactggcacttttcgccgtacttgcacgtgccgctctcctcgaagggccggcacagctcggtcttgtagcgcgtggagttgatctgggagccgccgccccccttctgctgctgctgcaggtgcaggaggtgctggctgcgatcgccgttctcgctaaacgagcggtcccggaatttgttctccttgttgagcagggctgtgccgcc

SEQ ID NO: 4399 - DNA, 876 bp, Artificial sequence
  DNA replication origin
ggcgccccccgacggcgcgggccgccgctcgtccgcgttgtggatgaagtggcagcgcggcccataggggcagaagccgatggtatgaaaggtgcggcacagctcggtcttgtacttcggatggcgagtcaggctgcgcagctcgtggaagccatgcgcgaactggcacttttcgccgtacttgcacgtgccgctctcctcgaagggccggcacagctcggtcttgtagcgcgtggagttgatctgggagccgccgccccccttctgctgctgctgcaggtgcaggaggtgctggctgcgatcgccgttctcgctaaacgagcggtcccggaatttgttctccttgttgagcagggctgtgccgccgccccccgacggctccttaagggtgccgtaggaggtcggaccgccggccgccgcgctgccgcagctgctgccgttagcggcgcccgggaacttgggcgagcagctgccggggctgggcgcggggtgggcgagtgcatgcaggttgctggccgagtgccgtcggaggaatcccggcgcgaagcccgagctgggggcggcggccacaggcgtccccaccgccttcttgtccagcatgttgttcaggttgaggttggccagggatttctctgtctgccaaagggaggggagcggggaagggatgaaaaacggaaggggaagacagactcggggcgagccgcagaggaactcccagcctgattcttttcctttttttcccccactcttggcggatcccgactcggcctccaccctccacctatacacgcgcaaaaccagcaagatcttgctggacggagcgggagaggggaggacgcccaccgtgggccgcgctgggtttcgacacgtgatcct

SEQ ID NO: 4400 - DNA, 1644 bp, Artificial sequence
  DNA replication origin
ccgccgggtggcggcgggaaggcacggctgttctcctccggggctgcgcggtcggagagccccggtacgtttagcgtggccgggattctgcagccctggacgtgtctttccctgccctgttctccgaggcggacctgtggagctttaagctcccaccttcggttttgtactgggcgcgggaattgcaaaatgccagaatatcgcaaccatccccgcggcccggcgggtttgcaaagggtgccccggccaggaggcgggggctcggggcctgcgtccagtcggtggcggctccagcccgactgcacgtggagtcgcggtgggggtgggggtggccacgcgggcggccgccgcggcagtcttgccggtggagcccgggctcgtttctccgccccctccccgcccaggctcagtaaacagggcttgagcgccggggcctgccgggcagggctgagtgtctgaggacaaggcgctggctttgctaatcacatcacaagaccttgagccagggccaaaggcgcggagtggcgcgggacgtcccgggcgggggagctgactctgaggacaggaggaaaggccgggagagccgtgcgggcttgaaggcgacttagcgccacctttccgtctgctggtcgggccggccttccccagccctctggggctgggggtgcagctgcctgccgaggctccccgcccggcacagcctgggcctgttgcgtcctcccagcctcttccctccccggcagtgggggcgccgcgcccagcctttgctcgatgagggctgcaggatccggctgagaccaacccgcggcgcaggtggggctgcacagacgctgatggtgggcgcgccaccctctgttttccctcactcgccagccccgcaccccaacagcttgcgctggaaaatgcgctttgccagcgggcgccccgccttcgtccgggtacggaggggacactcccatctagcgcccagtgaggctaaagccgctgacagccccactaggaacgatctggagtctggtctagggcacttctccctccgcgttcatacaggttgccacaaaaagcttgggcctgaagctcgaaggccccggacccgctggggaaagaactaggcctgccactcagggattcgagtccctggagtgtatcctgcatttcccactactgtactcccctcatggcccagggagccagagtccagggtaaggatcaggaatgctgggctggagttcaggtcctgccccagagaaatcatgtggtcttaggcaaatcacatcatctctttggtacttgggtttccttgttaaacgaagataatattcttgctttattcatctctcacctttggcaaggtgcaaatgatatctgtgaaggtgtttaaaagacaagcaagaactaaaccatctttatgtattaaaccaaattgacaaaagcgtaagggtggagaaagcctggcttctgaactgtggccagatggacagagagccacagaatcatgagtgcagagctgtgggggcacccaagtcctggaccctaggactcacagccaagagcaggtgacctcagagggaccagtttcacttttagcacctaccctacactgaccccttgacatacctgggcaactgtggtctggtttgttct

SEQ ID NO: 4401 - DNA, 808 bp, Artificial sequence
  DNA replication origin
gaggccaaggcaggcggctgctccttgccctcgggccccgcggggcccgtccgctcctccagccgctgcctcccgggcggccgttaattacaattttaagagcagatttctgagccatatttctgactgtgccaaataaatgaaattccttttgaatgtaatgctgtcctctagcagcagtgggtaggaaggatagggaaatggtacctggagatgatagtactgtgctcttattattattagattgttatgagattcggtttttagacattgaaacagagatgacacagaggttgaagatcccagctgcccagggtttcccccactgctttataaagatactgcctggctgggctcagtggctcccacctgtaatcccagcactttgggaggccgaggcgggcagatcacctgaggtcaggagtttgagaccagcctgggcaacatggtgaaaccctgtctctactaaaaatacaaaaattagctgggtgtggtggcgtgtgcctgtatttccagctactctggaggctgagacaggagaattacttgtaccggggaggcgaaggttgcagtgagccaatattgtgccactgcactccagcctgggtgaccgagggagattctgtctccaaaaaaataaaaaaataaaaagatgcctcctggtgagctgggaattctgcagtgtctgagttaagagtagcggtatggccgggcacggtggctcacgctgtaatcccagcactttgggaggctgaggcgagcagatcacgaggtcaggagttcgaaaccagcctgtccagcatggcaa

SEQ ID NO: 4402 - DNA, 1310 bp, Artificial sequence
  DNA replication origin
gcagaggcgcccctcacctcccggacggggcggctggccgggcgggggggctgatccccccccacctccctcccggacggggcggctggccgggcggggggccgacccccccacctccctcccggacggggcggctggccgggcggggggccgacccccccacctccctcccggacggggtggctggccgggctgaggggctcctcacttcccagtaggggtggctgggcagaggcgcccctcacctcccggacgggggggctggccgggcggggggctgacccccccacctccctcccggacggcacggctggccaggcggggggctgacccccccacctccctcccggacggcacggctggccgggcgggggggctgaccgcccacctccctcccggatggggcggctggccgggcggggggctgacccccccccacctccctcccggacggggtggctgccgggcggagacgctcctcacttcccagatggggtggctgccgggcagagaggctcctcacttctcagacggggcagctgccgggcggaggggctcctcacttctcagacggggtggttgccaggcagagggtctcctcacttctcagacggggtggccgggcagagacgctcctcacctcccagacggggtctcggccgggcagaggcgctcctcacatcccagatggggcggcggggcagaggcgctccccacatctcagacgatgggcggccgggcagagacgctcctcacttcctagatgtgatggcggctgggaagaggcgctcctcacttcctagatgggatggcggccgggcggagacgctcctcactttccagactgggcagccaggcagaggggctcctcacatcccagacgatgggcggccaggcagagacactcctcacttcccagacggggtggcggccgggcagaggctgcaatctcggcactttgggaggccaaggcaggcggctgctccttgccctcgggccccgcggggcccgtccgctcctccagccgctgcctcccgggcggccgttaattacaattttaagagcagatttctgagccatatttctgactgtgccaaataaatgaaattccttttgaatgtaatgctgtcctctagcagcagtgggtaggaaggatagggaaatggtacctggagatgatagtactgtgctcttattattattagattgttatgagattcggtttttagacattgaaacagagatgacacagaggttgaagatcccagctgcccagggtttcccccactgctttataaagatactgcctg

SEQ ID NO: 4403 - DNA, 919 bp, Artificial sequence
  DNA replication origin
cagcccccccgtccgggaggtgaggggcgcctctgcccagccacccctactgggaagtgaggagcccctcagcccggccagccaccccgtccgggagggaggtgggggggtcggccccccgcccggccagccgccccgtccgggagggaggtgggggggtcggccccccgcccggccagccgccccgtccgggagggaggtggggggggatcagcccccccgcccggccagccgccccgtccgggaggtgaggggcgcctctgcccggccgcccctactgggaagtgaggagcccctctgcccggccagccgccatccgggagggaggtgggggggtcagccccccgcccggccagccgccccgtccgggagggagtgtggggggggtcagccccccggcccggccagccgccccggccgcccctactgggaagtgaggagcccctctgcccggccaccaccccgtctgggaggtgtgcccaacagctcattgagaacgggccaggatgacaatggcggctttgtggaatagaaaggcgggaaaggtggggaaaagattgagaaatcggatggttgccgtgtctgtgtagaaagaagtagacatgggagacttttcattttgttctgcactaagaaaaattcctctgccttgggatcctgttgatctgtgaccttacccccaaccctgtgctctctgaaacatgtgctgtgtccactcagggttaaatggattaagggcggtgcaagatgtgctttgttaaacagatgcttgaaggcagcatgctcgttaagagtcatcaccactccctaatctcaagtaatcagggacacaaacactgcggaaggccgcagggtcctctgcctaggaaaaccagagacctttgttcacttgtttatctgctgaccttccctccactgt

SEQ ID NO: 4404 - DNA, 1244 bp, Artificial sequence
  DNA replication origin
aatatcacaccactgtgctccagcctaggcaaaagagtaagaccctatctcaaatatttatacgtatatatatatacacacacacacacacacacacacacacacatatatatcaacaacaacaacaacaaacggtttaccagttctcaaggaagcttactaaaaatgtatccagcttccctcagtcttttatatccaaaatcctgactttcccaatcagaacctagaaagcagcacggtatgaagagtagaaattcttaaagaaggagggagggagggaagaaaaaagaaagggaaggagggagggagggagggaagaaggaagggaggaagggagggaggaagggaggaaagggaggaaagggagggaagggagggaagggagggaaggaatgaagggaaggaagggaaggaagagaaggaagggaaggataggaagggaaggaagggaagggaggaaagagagggaagggagggaaggtagggaagggagggaaggtagggaagggagggaaggaagggaaggaaaggagggagggagggaagaaggaaggaaagagggaaggaaagagggcaggagggcaggcagacaagaaggcaggcaggcaggcagatgcacaaaaagaggtagggagggccgggcgtggtggctcactcctgtaatccagcactttgggaggccgaggcaggtggatcacctgaggtcaggagttcaagactggcctggccaacatggcgaaacccagtctctataaaaatacaaaaaaattagcctggcatattggtttgctcttgtaatcccagctactcgggaggctgaggtgggagattcacttgaacccgggagacagaggttgcagtgagccgagattgcaccactgcactccagcctgggcgacagagcaagactccagctcaaaaaaaaggtaaggggtttgttgttgctgttttcctatgctaagtgctatggcctaagcccctactaaaagtaacagaagtgaacaggccaggctatagctgctattcaggcctttgtattgtcttgagcagatcactgaagcaaattattgttccataaacagattactccaactcctatccacagagctatctcactcccactggataagtattctaagataagaataaaacccgcagactaaaatcaaattacataagctgtatacccaactaactggtcattagacaattattttgtaccaataaatccgattccctgacta

SEQ ID NO: 4405 - DNA, 934 bp, Artificial sequence
  DNA replication origin
gcatctctgcccggccgccatcccatctaggaagtgaggagcctctctgcccggccacccatcttctgagatgtggggagcgcctctgccccgccgcccggtctggaatgtgaggagcgcctctgcccggccgcgaccccgtctgggaggtgaggagcgtctctgccaggccgcctcgtctgagaagtgaggagaccctctgcctggcaaccgccccgtctgagaagtgaggagcccctccgcccggcagccgccccgtctgggagggaggtggggggatcagccccccgcccggccagccgccccgtcctggagggaggtggggagatcagccccccgcccggccagccgccccgtccgggagggaggtgggggggggtcagccccccgcccagccagctgcccggtgcgggaggtgaggggcgcctctgcccagccacccctactgggaagtgaggagcccctctgcccggccaccaccccgtcttggaggtgtacccaacagctcattgagaacgggccatgatgacaatggcggttttgtggaatagaaatgggggaaaggtggggaaaagattgagaaatcggatggttgccgtgtctgtgtggaaagaagtagacatgggagacttttcattttgttctgtactaagaaaaattcttctgccttgggatcctgttgatctgtgaccttacccccaaccctgtgctctctgaaacatgtgctgtgtccactcagggttaaatggattaagggcgttgcaagatatgctttgttaaacagatgcttgaaggcagcatgctcgttaagagtcatcaccactccgtaatctcaagtacctagggacacaaacactgcagagggccgaagggtcctctgcctaggaaaaccagagacctttgttcacttgtttatctgctgaccttccctcca

SEQ ID NO: 4406 - DNA, 1069 bp, Artificial sequence
  DNA replication origin
gacacagcacatgtttcagagagcacagggttgggggtaaggtcacagatcaacaggatcccaaggcagaagaatttttcttagtacagaacaaaatgaaaagtctcccatgtctacttctttccacacagacacggcaaccatccgatttctcaatcttttccccacctttcccccatttctattccacaaaaccgccattgtcatcatggcccgttctcaatgagctgttgggtacacctccaagacggggtggtggccgggcagaggggctcctcacttcccagtaggggtggctgggcagaggcgcccctcacctcccgcaccgggcagctggctgggcggggggctgacccccccccacctccctcccggacggggcggctggccgggcggggggctgatctccccacctccctccaggacggggcggctggccgggcggggggctgatccccccacctccctcccagacggggcggctgccgggcggaggggctcctcacttctcagacggggcggttgccaggcagagggtctcctcacttctcagacgaggcggcctggcagagacgctcctcacctcccagacggggtcgcggccgggcagaggcgctcctcacattccagaccgggcggcggggcagaggcgctccccacatctcagaagatgggtggccgggcagagaggctcctcacttcctagatgggatggcggccgggcagagatgctcctcactttccagactgggcagccaggcagaggggctcctcacatcccagaccatgggcggccaggcagagacgctcctcacttcccagacggggtggcggccgggcagaggctgcaatctcggcactttgggcggccaaggcaggcggctgggaggtggaggttgtagcgagccgagatcacgccactgcactccagcctgggcaccattgagcactgagtgaacgaggctccgtctgcaatcccggcacctcaggaggccgaggctcgcagatcactcgcggttaggagctggagaccagcccggccaacacagcgaaaccccgtctccaccaa

SEQ ID NO: 4407 - DNA, 891 bp, Artificial sequence
  DNA replication origin
ctactgggaagtgaggagcccctctgcccggccagccgccccgtccgggagggaggtgggcgggtcagccccccgcccagccagccgccctgtccgagagggaggtggggggggtcagccccctgcctggccagccgccccgtctgggagggaggtggggggggtcagccccccgcctggccagccgccccgtctgggagggaggtggggggggtcagccccccgcccggccagccgccttgtctgggaggtgaggggcgcctctgcccggccgcccctactgggaagtgaggagcccctctgccccaccagccgccccgtctaggagggaggtgggggggtcagtcccccgcccggccagccgccccatccgggagggaggtggggggtcagccccccgcccggccagccgcccagtccgggaggtgaggggcgcctcttcccggccgcccctactgggaagtgaggagcccctctgcccggccaccaccccatctgggaggtgtacccaacagctcattgagaacgggccatgatgacaatggtggttttgtggaatagaaaggggggaaaggtggggaaaagattgagaaatcggatggttgccgtgtctgtgtagaaagaagtagacatgggagacttttcattttgttctgtactaagaaaaattcttctgccttgggatcctgttgatctgtgaccttacccccaaccctgtgctctctgaaacatgtgctgtgtccactcagggttacatggattaaaggcggtgcaagatgtgctttgttaaacagatgcttgaagtcagcatgctcgttaagagtcatcaccactccctaatctcaagtacccagggacacaaacactgcggaaggccgcagggtcctctgc

SEQ ID NO: 4408 - DNA, 1268 bp, Artificial sequence
  DNA replication origin
ctggtggggcagaggggctcctcacttcccagtaggggcggccgggcagaggcgcccctcacctcccagacaaggcggctggccgggcggggggctgaccccccccacctccctcccagacggggcggctggccaggcggggggctgaccccccccacctccctcccagacggggcggctggccaggcagggggctgaccccccccacctccctctcggacagggcggctggctgggcggggggctgacccgcccacctccctcccggacggggcggctggccgggcagaggggctcctcacttcccagtaggggcggctgggcagaggcgcccctcacctcccggacggggtggctggccgggcggggggctgacccccccacctccctcccagacggggcagctggcctggcgggggctgacccccacctccctcccggacggggtggctgccgggcggagacgctcctcacttcccagatggggtggctgccggccggaggcgctcctcacttctcagacggggcggttgccaggcggagggtctcctcacttctcagacggggcggccgggcagagacgctcctcacctcccagacggggtcgcggccaggcagaggcgctcctcacattgcagaccgggcggcggggcagaggcgctccccacatctcagaggatgggaggccgggcagagacgctcctcacttcctagatgggatggcggcagggaggaggcgctcctcacttcctagatgggatggcggccgggcagagacgctcctcactttccagactgggcagccaggcagaggggctcctcacgtcccagacgatgggcagccaggcagagacgctcctcacttcccagacggggtggcggccgggcagaggctgcactcagcactttgggaggccaaggcaggcggctgggaggtggaggttgtagcgagccaagatcacgccactgcactccagcctgggcaccattgagcactgagtgaacgaggctccgtttgcaatccctgcacctcgggaggccgaggctggcagatcactcgcggttaggagctggagaccagcctggccaacacagcgaaatcccgtctccaccaaaaaaatacgaaaaccagtcaggcgtggcggcgcgcgcctgcaatcgcaggcacttggcaggctgaggcaggagaatcaggcagggaggttgcagtgagccgagatggcagcagtacagtccagctttggctcggcatcagagggagaccgtgt

SEQ ID NO: 4409 - DNA, 1396 bp, Artificial sequence
  DNA replication origin
aagggctggtataaaaataatctctaatagcacaaaatcctcctgaagggaacacctgtcccactttctcacgttgctttccaggttcttccgacaccccaatttcccgcccactcttctccctccggggtacaggtcaggcaggtatcccagctcggcggctctgataggtcggcgatgatttcattgttagggaacatccgggcctttcccctccccgcaacacctccccagagcccggccttcccagtttcccactctcgcctgcgccccacccgcggctgaagcaaaacaaccgcctctcccctgcccacttcttgtcctcgtctgagtcgtcccttcccgtctccacgccgaagagaggcgtttagatcctccaatgagggcctaggaggactttcttagccaatcagtagccaagcccctgcaattccgggtgggaccaggcgtccacacctatagctggactgctcgttggtcccttatggcgcttcttttacgcgaggcttagaggtcaaatacaagggggcacggtcctcacagaacggaaaggatccgtacagactctccgggtttgaccgttttctaggacgaaccaatcgctttccagatacttccccgccttttgcgcgttcatttgaaaaaagccggtgtgacggacttggaaattggctcagtgactgacccgcaagaaagccagtgactgggggttcggatcacgagttggaccaataagaaaagacaatcgctggggccggggctttgctaggaggagcgcaggtgggcgttatttgattgacggagggctctacttatggctggtagcgggggctggtccctgacgttcgggaggtaggacctagcggaggcggggccgaataaagtaaatggtaataaagggttgggtctcacttagtgggcggtgtttgatggacagctgaccttgcctattgaaagtagccactgatgcccaatgggaaattagaaacccagaggcggggccgggtgggcggggtaaacgaagtacggaggtgccgagggagcagcacggggagggggagcggtgattgacaagactcccagcaaaccgggggccgtgagagggcgcgcggcatcccagtgggtggcagctggaggcggggcaccctgaggggcggggaaggactagggtgcggggagggggttgcaaaaggagccgagcggcttctgctcaatggcggaaaagccgccggtgctctgacggcctcgttcccctagcagttgcgggggagtttcctgccggcgcggctggagtctctgattctcagggttcggtggttggaagatgctccagagagacgaggctgcggcggaggaggtggcggcggccgaatcggcaacggcgctagggtggaga

SEQ ID NO: 4410 - DNA, 938 bp, Artificial sequence
  DNA replication origin
tgattctcagggttcggtggttggaagatgctccagagagacgaggctgcggcggaggaggtggcggcggccgaatcggcaacggcgctagggtggagagaaggcggcatcggcggcggcggcggcgtgaggggccgggcggtgtaaacagccccggaggcggcggtcgagaccccgagggggaagcggcggctgagtcagggtcgcgcctccgttggaaacttgggctgagtaccgcggcgggcgcgagcgaggcgccctagacatcttctccctcccttgcctcaggtaaggccgcccggcaccccgccggaggggaagcggctgaccggccgcgccgccgaggccccgggccctgggcaggttttcgcggtgctgccgagccgcggccggggcctctgtccttccgaatcctcgctgctttccctgctgccgcggagcctaggcaggggaacgccgggcctggctctcgggtataggccccttccccggccgccgcctccgctgggctgaggtctgggagaggcgcagggagagaatgggagtttgctggaacgcctggaagctgactgattctctcttccctccgcttcagtctgcaagcatctctttcacacgaaagcactggggctaccccaagccttggcgcttctcttcctggtgcatgccctgtttgaaaacactatcttttaccattcgtttcctcatcagcttctgccctactctgcgctccacttcacttccttgttaaatcgtctttctctgctgtctatgcgttctaccctcgccttccctccttagtggctttaaattgtgtgtttctcttttcttcgtaccccggcatctcttgcctgtcttccctagcaccatccttttcggatgtcattcctaacagtgaagttcttaattgaaactgccacttattgtcagtaccccaa

SEQ ID NO: 4411 - DNA, 989 bp, Artificial sequence
  DNA replication origin
actccagttggcactttgacgaagtgcgaaaccaatgttattttcatcagtttatgaaagagcaacctgatttaaatttccgcaatcctgatgttcaagaagaaataaaagtgagtatagatacccacacagacttctccattaatggaggtttaggtatttatttaaaacactttatattgcacagtaattgtgtaggcaaaatcaagtctttaattatttgaaatactctatagttatttgaaacactttatattgcacaataattgtgtaggcaataatcaagcctgaattaaatcccaggattaagctctctggtgcaaatgtagactctcagacatgtctgtgactccttccttcatctaactcagagtaccctaaatggaaggagtcagaaacacctgccaccctagctccaagttgccccgccacctgtgacagtgagctgtacggtgcctgtgacggtgagctgtgcggtgcctgtgacggtgagctgtgcggtgcctgtgacggtgagctgtgcggtgcctgtgacggtgagctgtgcggtgtctgtgacggtgagctgtgcggtgtctgtgactgagctgtgcactgtctgtgacggtgagctgtgcggtgtctgtgacggtgagctgtgcggtgcctgtgactgagctgtgcggtgtctgtgactgagctgtgcagtgcctgtgactgagctgtgcggtgtctgtgacggtgagctgtgcggtgcctgtgacggtgagctgtgcggtgcctgtgacggtgagctgtgcggtgcctgtgatggtgagctgtgcggtgtctgtgacagtgagctgctgcagggaggtgggtcatttggggtctggctcctgcatctaaaatgggcttcttgatggttatttggctttcatgtcttagctgtctcatctatgaaacacagttggtggcaatatttgtctcatagggctgtttggaagattagatgagataacacatgcacg

SEQ ID NO: 4412 - DNA, 1303 bp, Artificial sequence
  DNA replication origin
agtggggtcctcacttcccagtaggggcagccgggcagaggcgcccctcacctcccggacggggcggctggccaggcggggggctgatccccccacctccctcccggactgggcggctggccgggcggggggctgaccccccacctccctcccggactgggcggctggccgggcggggggctgaccccccacctccctcctggacggggcggctggccgggcagaggggtcctcacttcccggtaggggcggccgggcagaggcgcccctcacctcccggacggggcggccggccgggagggagtctgacccccccacctccctccggacggggcggctggccgggcaggggcctgacccccccctcccggacggggcggctggccgggcagaggggctcctcacttcccagtaggcgcggccgggcagaggagcccctcccctcccggacggggcggctggccgggcggggggctgaccccccccctccctcccggacggggtggctgccgggcggagacgctcctcacttcccagacggggtggctgccggacggaggggctcctcacttctcagacggggcggttgccaggcagagggtttcctcacttctcagacggggcggccgggcagaggcgctcctcacatcccagacagggttgcggcccagcagaggtgctcctcacatcccagacagggcggcggggcagaggcgctccccacatctcagacgatgggcggcggggaagaggcgctcctcgcttcctagatgggatggcggccgggcagagacgctcctcactttccagactgggcagccaggcagagaggctcctcatatcccagacgatgggggaccaggcagagacgctcctcacttcccagacggggtggcggccgggcagaggctgcaatctcggcactttggggggccaaggcaggcggctgggaggtggaggttgtagcgagccgagatcacgccactgcactccagcctgggcaccattgagcactgagtgaacgagactccgtctgcaatcccagcacctcgggaggccgaggctggcggatcactcgcggtcaggagctgagaccagcccggccaacacagcaaaaccccgtctccaccaaaaaaaaaaaaggaaaaccagtcaggcgtggcggcgcgcgcctgcaatcgcaggcactcggcaggctgaggcaggagaatcaggcagggaggttgcagtgagccgagatggcagcagtaccgtccagctttggctcggcatcagagggagaccgtggaaggagaccgtggag

SEQ ID NO: 4413 - DNA, 904 bp, Artificial sequence
  DNA replication origin
ggtggggggtcagcccccgacccggccatccgccccgtccgggagggaggtggggggatcagccccccgcctggccagccgccccgtccgggaggtgaggggcgcctctgcccggctgcccattctgggagggaggtgggggggtcagccccccgcccggccggccgccccatccgggaggtgaggggcgcctctgcccggccgcccctactgggaagtgaggagcccctctgcctggcgagccgccccgtctgggagggtggtgggggggtcagccccccgcctggccagccgccctatccaggaggtgaggggcgcctctgcccggccgcccctactgggaagtgaggagcccctctgcctggccagccgccccgtccgggagggtggtgggggggtcagccccccgcctggccagccgccccatccgggaggtgaggggcgcttctgcccggccgcccctactgggaagtgaggagcccctctgcccggccacgaccccgtctgggaggtgtgcccagcggctcattggggatgggccatgatgacaatggcggttttgtggaatagaaaggcgggaagggtggggaaaaaattgagaaatcggatggttgccgggtctgtgtggatagaagtagacatgggagacttttcattttgttctgtactaagaaaaattcttctgccttgggatcctgttgatctgtgaccttatccccaaccctgtgctctctgaaacatgtgctgtgtccactcagggttacatggattaaaggcggtgcaagatgtgctttgttaaacagatgcttgaagtcagcatgctcgttaagagtcgtgtcaccactccctaatctcaagtacccagggacacaaacactgcggaaggccgcagggtcctctgcct

SEQ ID NO: 4414 - DNA, 1043 bp, Artificial sequence
  DNA replication origin
gcggccggccccgaaggcgcgagggacagcgcggccggcggtggagcctcactcaggcacggagcccacagagcgaggctgaggaggactccatgctgttgtccgtcgggaaaccggactactctggggcgcgctggagccaccattctgccagcagccggggaggggccgcgagggctcccaagtggacggaagtaggcgaccaacttcgccgcgactcctgcttcctagagaagggccttggctgaggaggcggcgggaggggactgttgcaaacagctgttcctcatacatatttcattacacaatcagataatgcgtcccaccaccttctcaattattcacagataaacattttcaagacgttttgacatctgtcttagtgcctgctattaatttagtaatcactgtagttaaaaatgtatgggatttttgccgtcggagcacctcgtatccggcgcgcgggcccagtgtgggactgcggctgggagcccgggccctccgggagtgaagatacctttggaggtgagacggcctctctagcgcgttgacactgttgatggaagggattaaaggggtatcaggttattttaatttattgttgaagatgatgactgccccctccccgatccgcataccgtcctcactttcccaccccaaccctagacccgacaacaccgttcagccctttgccccgggcagcggaaatggttagcttcctctaggagtttctgctgaggaaggcgcaggcaaccctagtcggcttagagagagacaaccgcacgcgatcaccgagcacgatttctcccaacaaaaaaactaacaataatagcgatccacacactcaagaggtctcaaacctccgaagttttgccccgagtcttgtggccctggcagaggtgacaagggcatttgggaaagacagagaaaaataaattcgctccagtgactgtacacggggcatttgaggctgtgagaaaacgagttgcttttctgcttgagtgataaatgttgcaacgggcatagctatgtagaagcaaaca

SEQ ID NO: 4415 - DNA, 998 bp, Artificial sequence
  DNA replication origin
tccagaaagtcctgagtgtggatttggagcagcctgcttcccaagcccagagcattaattccccccaaaagtaacccttaagggcccaagagctgtgtatgcaaggagggagtgaaggaccttgagctccgactgtccagggaaaagggcatcagaggagaggggagacagaaagggaaggaaggctacacttcctgaggactgaagcacaatttttaagagggtgtcttatatttactggccagccatgtcagctgccccactaagaaaaggtgaagtagatgactgctttggtttcccttccttccagggctctggctctctgcctctctgccaggctgccaggccagtcttgcagggtggtcttgcctatagcactttttttgccaggcctccctgggactagaagccaaagaagggatacctctgttgagggggagtgcaggacgggctgtggtcccctgccttccctactgccacttgtcataacatgtgactgggctctgtgaatggtggaggcaatgatgggttagggaggggagctgcccaccctttctcaaatccaagtcctggcacaccaggtctggctgttcagaaggggaaccttgggaagaagtgtgtggcctctgggcagtggaagccaagggaacctaaggtgataggaggatggaaggctgaccctcagccaccccagcattagtccagatgcacctttaaggaactggagtgactaattgatttgcaattggtccacttgggagaggctggcagtgcactccctgggctggatcctgagacagcaaaagcctctcctgccacccgctcccctccctgcactgcccccaaccagtatggctcacacctcccaactctccagcccctctctcttgggaatgggtaactgcaggcagctaggctgggtttgtgcccaccctcctgggcctggcagtgggaggtgccgtggttcaagacagagccaaacttcccctgtttcagaa

SEQ ID NO: 4416 - DNA, 1150 bp, Artificial sequence
  DNA replication origin
ccggccagccccggagggaggctgggcaggtgctgcgggctctgccgaaagcgctgaaataaaaaaccatcgccactcagggagaactgaggcaagtggggctgagactctggcgacacccccgccccccagcctctgccccagcgcctgccgccctgccgccctgccgcaccccgcctgcttgggtggcgaccgcggttccggaacgcgaagcagggcagagggctgcagagaggcgtgtagctttgtgcgccaggacccggtggggcaggtggcagccccgggctgtccgcgcctcccagcagagccgagctcggcgccgcccaccgagcccacctcgcggtccagccgccgccagcgcctttcggctctggcctgaagcagtactcccgcctcctggagcgggtaagttgagagtccggagagcagggcagggaggcggggcggctggtcccagagcggagggccggactggctccccgccgggctgggggcgcaggctccataggatctcagtcgaggggttctgagtgcgtgtttgggtgggaagcagggctgtggagcgccagagcttcccctcccaaattcccaggcgctgggcactggggagtggagcagaagcagagggaccttgggttccggggcccagcggccttccacgctggtctgggaaccaagcaagccctagggcagtgcgaggactgggaagggaccctgggggaccgctagaggaggtggcgcgtggagggcgcctgcaccctggggtcgctcagagcggagagtctcgggtggataggtcagcttgcagatcctctaggtctcttctctgctctctggccgctctgattgcgggatctgggacttggcgcccgtacaggccgggtcacctgtgcagaacaaatttgctgccatcatccccgcttcaatcctggccccggcgatctaaaatatcgccttcaggtggggcagggagaaaagatgtctttggggtttaaatagtgttctccttgtacccggaccaactggcatttatttacaaatgtcacccgccaccccagcactgggaaagtctcaaccacatctggagaacgcccgagagacctcccactctctccttgttttgggttacagggaaagccaacgggtctgc

SEQ ID NO: 4417 - DNA, 1029 bp, Artificial sequence
  DNA replication origin
cgctccaggaggcgggagtactgcttcaggccagagccgaaaggcgctggcggcggctggaccgcgaggtgggctcggtgggcggcgccgagctcggctctgctgggaggcgcggacagcccggggctgccacctgccccaccgggtcctggcgcacaaagctacacgcctctctgcagccctctgccctgcttcgcgttccggaaccgcggtcgccacccaagcaggcggggtgcggcagggcggcagggcggcaggcgctggggcagaggctggggggcgggggtgtcgccagagtctcagccccacttgcctcagttctccctgagtggcgatggttttttatttcagcgctttcggcagagcccgcagcacctgcccagcctccctccggggctggccgggcagtggcagggagaggccaggtcgccaccacccggaggcgggggtttcggggacggggaggggactgaccgggttcacccgcccgcccggcgcctgggtccccggctccgggggatgcagtttcggggtcacgagctgctttcaaaaagttgaacacaatattcggaaacccacccgtaggaattctccccccacacgcggcacaatacccactcccctcccctttttcattccttcctcccccgcttcctcctcctgccccttccccctcccacccttcagcctataatccttcccctacgagagaaagggatcgggaagaaaacatgaagtgtctgtttttgtgtcccaacctttgggctctttctgggccctcagtgaatgaccgcccagagctttcagctgcgtggagaaggactcatggccaggaggagaggaaatatatatggagtggagagagcactgaaatggggcttggcaggtcttccctttggaggaatatttttctgccccagtcgtcgtgttgaagacctgctaccccacggctgtctctggctaagtgagccagtattggcccctcgccggacccagggcctccctgccgcccggaatcctccaaggagg

SEQ ID NO: 4418 - DNA, 1471 bp, Artificial sequence
  DNA replication origin
cgggaacttcttgcgcacgcggtacttgtccaccgggccgagtgggcggccgcgcagcttctcggcctcctggtagtgcgcctcgagccacatggcctgcagcttgccgtgagactccttggtgaacttgtggttctcaaggatgtggtagaggtcgcggaagttgcccgtgtggaaggcgaccacggcgcgcgcgcgcaggatcgactcgtgtttgttgatggcctcgcacgccccgggggccacgggcagcgaccagaggaagcggcccagccgctcgatgtcgcccgtctcctccagcgtctcacagacgctggccacctgctccggcgagaagttgagggtgggcagctggaacatggacaactcttccgggggggccctggagccgccgccgccgccgccgcctgctccgccagcaccgccgcctcccgcaccgttcccgccgccgctgccgcctcccgcgccgccgccgcctcccgcaccgttcccgccgccgctactcgccagaagtatggagcggtggtgagaatcggcgaagtttggcaacaagaagtgggaggaatagaggtctaggggggagcggaataccatggactgacctgagaggagaggagaaaattcagggagaggaagagagaggggaggaagaggaggagaggggcgatgaggaccaggaggagggagaggagaggggggaggaggagaaggaaaggaggggggagcaggaggaggagggagaggaggaagggcgtaagggacacccacaccccacacacatccacacacacacacacccgcgcagccacatagagagggaggtaggagagcggcccggtgcgcgcgcgcagagagagaacccgagacagagagggagagggagagggagagaggagagggagagccaaccaccgccgagtcaagattcagcgattccaccgcaatcgccctaatgacaacagcctcataatatctcccctaaatccacagtgagtgcagcattgaaacattttgtttcgcttttctattggtctgtggcgtgtcgttgtggcgttgccacggcaaccactgccaatcactgtcagccctgccaatcaataccgagaacgtaaggacggttttaccacttagccagagggcggggggagggggagagcagggaaggagggagaagtggggggataaagagaattttttttatctttgcaactcttaatctcgctacctccccctcctctcttctctcttctccctctctctcctcttttctctaccgctgtctctgagacttcttcttccctttttcctaaagaagttgatccagaaattcgaaaagccctgggcagagttgttgaatgggatgtgcaattagagaggggattttgttgggaggcaagagggtcccccaggctccacatagtccaggtcggcaggcaaggaaagacggctgaccagcccagcgggcgcggtt

SEQ ID NO: 4419 - DNA, 1928 bp, Artificial sequence
  DNA replication origin
cgaggccatcaacaaacacgagtcgatcctgcgcgcgcgcgccgtggtcgccttccacacgggcaacttccgcgacctctaccacatccttgagaaccacaagttcaccaaggagtctcacggcaagctgcaggccatgtggctcgaggcgcactaccaggaggccgagaagctgcgcggccgcccactcggcccggtggacaagtaccgcgtgcgcaagaagttcccgctgccacgcaccatctgggacggcgagcagaagacgcattgcttcaaggagcggactcggagcctgttgcgggagtggtacctacaggacccctaccccaaccccagcaagaaacgcgaactggcgcaggccaccggcctcactcccacacaagtaggcaactggtttaagaaccggcggcagcgcgaccgcgccgcggcggccaagaacaggttagtggcggggcccgcggcctggctacagcctcagaggcctgggaaggggagaggggttgagatggggctagcggagcggccgctgagagccagggaagccgtgactcctggccagtcggagaaagtttccgcttgtccgggacgcgcggaagagggggccgggctggctgtgggtgtattgattgctttgaccaagaggggctttcgtcagggcagagagtgtgtgcttgcgacccgagtacccgcagcccctgggagacttagccctgcgctgcacccgtgcctgcctcctcagccctgccgccagctcggcgatcctctggagcctagagacagggagggaaggaaagcactctttgccatctggttcttatttctgtgcgttgcaaaaccccgagagaaatccactagcgtcagagagaggaaagtgaacctgggtccctatcacaaggggaaaaggccagaggccactgcgcagcgggcctgtttccccgcaacgctgcacgttgcctgaccgggagcaggagagccgggctgggagtggagaggcctagcgtgtgcgtgtgcgtgtgtgtgtgcacgcccgtgtgcatgtactcgccctcctgtttcagccgaggagaatccctttggtcctctaagctgggaagcgggcacgagcagcctcgttgccggcaagttggccacaaagtcacaaaattgtatagggcttgaccaacatcacaggagctgggcctgggggaaggagaaaaagaaccagagggaaagaagtggataggcgaaaggagtggggagagaagggagaaagaaaagaggaagttgggtgaaagccctgatgtggagcctgtgtctttctctatccagccaggaaggcccagggcctggtgtacttcagggagcaggacccccagctgctgacagctgcccgtgggtgggggctgggtgtgagtttctggaggtgtgttcgagtttaggcggccgggacctgagcccatggccctctcacccctgccgtggagcccacttttcgtctgatgaggggagcgcccagggtcaagccaaggcctccttgtggagagaattccagacaccaggtccaggcagaaggttcccggtgggggaaagggcagctggagactgctctgtgcgcctctcttgccttctcctttgccccttttctgtctccctgctctttccccacttttccaccgccagctttcctattttctctaccctcggtcctgcgctctgcgctggcatccagagagcaaagtatgcagttctacccggagactggccgggcggtggggaacccgcagctcccggtgtgtgtttgagggagcagggacggggttactaggggaactcgaccggtcgcggggcagccggctcagtttgaagagccccagggactgcggagggaagaagcgcccggctcctctccgacttctgcttctccagggcttggcgtactttgtcgcttg

SEQ ID NO: 4420 - DNA, 1093 bp, Artificial sequence
  DNA replication origin
caaagtctcaggcacccccaggctgggcccttcgtcttcaaccccattcccagccgggactggccagactcgtgcctccagccccactattgatcggcatctccgccccgcgccgtggcagcttccgggtcatttcattttaatcagttgtgtgtctcgccggggataatcaactgcactggcactgggcagtcgattccgcaggattcaaggagggcaagaagagaggccaggtggggggctcagggccagggctaggggcagggacggaagagggctgggtgcggagagagtgagcaggccagaaggggtagacgggcctcttccctcaggcaggcacatctaggggtcaaggctttgatacagatttgcccagtttcacaccccattctgcctgttcaggtttccaatgcaaatcttggattgtcattatttttctttgagaaaatagccaagttggctattattcctcaagcctctggaaacttacggtaagtgactgaggtacacaggaggtctaagcacacagggaaggctccgagccagaacactccgctgggatgccaggcggaagtgtgctgcgtgcagggtagtgggtgcggactcactggaacgccagaagcagaggagccagcctactggctgctgcatggcccagacataggggacagatggttagcacttaggcctgcatattgggtctgacccaggctcacaagacccacgagagagcacacaccaatgcacacattctcctggccgaggcacaacctgcagcattcccaggaggtgggggctgtgcagtgactgagatggctttctgcaggtggaacttcagcctggccttgccctcaagctctgtctgagtggcccgtagggtgttgaccgctttggccagggctttgaggggcccagaaaagactaggcctaggccagcagctggtaaaaggcaagatctggccagaaaggggcctctattctctcactccgatgtttaaaggggcaaaggccgaatcaaccacaatatccccagtaaatcaaacagaataaaggatggactgggatagccaaagagcccaatccccttctgccc

SEQ ID NO: 4421 - DNA, 1208 bp, Artificial sequence
  DNA replication origin
acggctggaggtgaggtgtgatataacatagagggcatgtttatgtagatgagatgaattgcacatacgtgtgtgtgtgtgtgtgtgtgtgtgtgtgtgtgtgtgtgtgtgtgtgtagcctctgtcagcctggctgttcctgcccgctcccgccgagccccgcccggcacagtggagctcaatcagccgctgcatgaatacactcgaatggaaagttgtgctcagctgaccggagaaattggagccgggctagtactgctcccctcctccatggctccctctcgcctgcccccgccctccctcgggccagacggccaccggggcccgcacactggggccagggagcttcagctcagctggggccggaaagggccggagcggtgggaagccgtgggggcctcagcgcgcgtaccagggggtcgagcgtcccgcgggccgggcatctcagctccagcgctgggggacagagaggacaaggggaaggcccgggaaagtccctgaggcacagccggtgctccaggtgacggccacacaaaggcttaggcgggactgacagggccacggaggcagaggaagaagagagggagaagagactgctccaagacgccgagtgcatccagtgcgccacaggcctgggaatggacttcgagctccggggtcccgggtgatgcgctgggtcgagaatgtaccaggctgtcctattctccttgcagaagaacctgggggccactccaccatcacagccccctcggcaagcccaggcaagggccttcccgctgcctcactgaaccgtctccccgcccaaagtctcaggcacccccaggctgggcccttcgtcttcaaccccattcccagccgggactggccagactcgtgcctccagccccactattgatcggcatctccgccccgcgccgtggcagcttccgggtcatttcattttaatcagttgtgtgtctcgccggggataatcaactgcactggcactgggcagtcgattccgcaggattcaaggagggcaagaagagaggccaggtggggggctcagggccagggctaggggcagggacggaagagggctgggtgcggagagagtgagcaggccagaaggggtagacgggcctcttccctcaggcaggcacatctaggggtcaaggctttgatacagatttgcccagtttcacaccccattctgcctgttcaggttt

SEQ ID NO: 4422 - DNA, 1178 bp, Artificial sequence
  DNA replication origin
aagtccagccggccacaagtcaacgtgctcccctaggcgctttcttggagaaggaattgctctcctgctgcaatggcaccctctccccaaccagccttggccctccccctgcttaagcctgggaagctgctccccatcttccctcagacccttccggctcccgccccttccctgttctctcctctcctcactttttgtttcaactccctctcctttctctcccttttccttttgcctttatcctcactctataatttatagccctcttcttcactctcccttcttgctctgcagaacagcataacatgggcgtttaggggtggattgtaacacagaggcctctgtttacctgctcactcccaacagcaggcatgcttctctcaaggtgcttatctagttccctacctatcttctttgggccctagcctagtgtgtgtgtgtgtgtttgtgtgtgtgtgtgtgtgtgtgtgtgtgtgtgcgtgcaatgaatgggtggtctgtgagtccctagagtcaagctctgtggtttggaggttggcatgcctctgggtggcatgtcttatgtctctgggttggctcacaggtatgtgtgtgtgcccgaaggtttcctctgtgtgtttgtcatggtgactgtgtagtggctgtgttctctgactggatttattgttcattttctccctttcttgtgtttaaacttttggttagccccagcacactgtgtacttacaacaggctgtgcactaaatgtctattggtgctaatgccattttatgcagatgtgtatttctattgtgtgaatctgggtagctctgtaggagggtgcgattgtgagcctgggcattttgtgcgtgcgactgtacagatttggagtgcatgcatcctggagagtgtgcctgcaggaaaggcagatgaaggattcttgtgtttgtatctgaggaccggtgtagaatccataaggggaaaatcagaaaggcaggccttatgttgtgtagagaagcaggtctatgggtgctgggaaactgctctgagggcaggtaggtgcctgagggaaggggctcggctgtgtttatgatggcacggctggaggtgaggtgtgatataacatagagggcatgtttatgtagatgagatgaattgcacatacgtgtgtgtgtgtgtgtgtgtgtgtgtgtgtgtgt

SEQ ID NO: 4423 - DNA, 1277 bp, Artificial sequence
  DNA replication origin
cgcaccctcctacagagctacccagattcacacaatagaaatacacatctgcataaaatggcattagcaccaatagacatttagtgcacagcctgttgtaagtacacagtgtgctggggctaaccaaaagtttaaacacaagaaagggagaaaatgaacaataaatccagtcagagaacacagccactacacagtcaccatgacaaacacacagaggaaaccttcgggcacacacacatacctgtgagccaacccagagacataagacatgccacccagaggcatgccaacctccaaaccacagagcttgactctagggactcacagaccacccattcattgcacgcacacacacacacacacacacacacacacacaaacacacacacacacactaggctagggcccaaagaagataggtagggaactagataagcaccttgagagaagcatgcctgctgttgggagtgagcaggtaaacagaggcctctgtgttacaatccacccctaaacgcccatgttatgctgttctgcagagcaagaagggagagtgaagaagagggctataaattatagagtgaggataaaggcaaaaggaaaagggagagaaaggagagggagttgaaacaaaaagtgaggagaggagagaacagggaaggggcgggagccggaagggtctgagggaagatggggagcagcttcccaggcttaagcagggggagggccaaggctggttggggagagggtgccattgcagcaggagagcaattccttctccaagaaagcgcctaggggagcacgttgacttgtggccggctggacttgggaagtgggacgaatactgggggtgcacagcagtttggggcccaacagcacccattccccttgtgggctggggaggtcatgcagcttcctctgcccagaagaggcccacccaagaaagcacccaccttcccatgcctcccttccctggactcaggggcagcttttcccctcacactacacactcttagagatgcccccaatatgattccattcgtaagacacacacagtcactgctctgcatgcacacacacacacacacacacacacccctctgccttctacagtgggcataggcaaccacccacttctgctcagggatgccgcaagggacagaagcatatctccactcctagcaacgactccccactttttacaaataaaaccacgactctaactggtttctacacacactctttttggaaaagaaaagggctttaacctgcaggagtct

SEQ ID NO: 4424 - DNA, 1234 bp, Artificial sequence
  DNA replication origin
aatatttaatatttgtaaaatatttgaaatcaaattgtaagttaggatctcatatttcccaaatatgcccaatgattgagacatcaaagccaatcataaatgaaatgtgtcaagattctatacacagaaaattgtaagcaggaaacttaatgtgagcatggtgacattttagtgtgtttgatgtgcagcctctgaagctcttcaaattggcctggaggagattcagcaccttatgtgagtcaattcaacattgtttattaagcacctactatgtactaggcattgttccagaaacttgagtgacatcgatggacccaaaaaagatgtgtcctcatctctaaagggaaacagtgaaaaggaagcaaaatcaataagtaaaacatgtagtgtgtttgaaggtaacaaggaataataaaaagtgaggccaggtaaggggaccaggaggggtggggtggggtggggtgggagaaagcagtggcaagaaatggagttgtcagtttaggcctctgttaaaaagtgagatgtgagaaggacttgaagaaggtgagccaaggaaatatctggaaggaatgtgttccaagaagggcgaacagctacaataaaggcctaagatatgcctgctgtgcttgaggaacagcaagggggccagtgtaacttgaagtgggaggcacagaaacaatgttgggtcagggtgcaggtccgccaggccctacaggtcatcacagggaattgcttcacactcaaggaaattggggaccgtaggaagttctgcgcaagtggaaggtgggagctgccattggcaggaactgggagagttgagggtgagagtgaggcatgtttggggtaggaacaggagcaatcaggatttcaggttggacatgttgagtctgagcatctgtgaaacattcagatagagaggttaagtgggcagttgggcctatgagtaggagctcgggagaggtggacaggttcgagttttcggcagattttatagagatgatgtttaaggccacagagtgggatgacctcactaagggagagtggagaaggagaaaagaaaaggaaaaaggccagaaccctgggcactccaactgttatgggctggggagaagagagacgaggaagagccagcaaaacaagctgatgcgtgaccggggacacaggaggaaaaccaagagagtgttgtccaggaagtcaacgcagcacaggaaggcagagggctgccatgatgaac

SEQ ID NO: 4425 - DNA, 1411 bp, Artificial sequence
  DNA replication origin
agctctacaagatcctggagagccaccagttctcgccgcacaaccacgccaagctgcagcagctgtggctcaaggcacactacatcgaggcggagaagctgcgcggccgacccctgggcgccgtgggcaaataccgcgtgcgccgcaaattcccgctgccgcgctccatctgggacggcgaggagaccagctactgcttcaaggaaaagagtcgcagcgtgctgcgcgagtggtacgcgcacaacccctacccttcaccccgcgagaagcgtgagctggcggaggccacgggcctcaccaccacacaggtcagcaactggttcaagaaccggcggcagcgcgaccgggcggccgaggccaaggaaaggtacgagtaagtagaccttcttcggcgccagctccccggggcccaagggaggggttcgcagggcttctgccggtcccccggagaggcctaaactgggcccccaggcccggccacagcccagcggcagcccggcctgacttggacgatgcttaggcctttctatgccggagacccggcgagcagggatttgtctaaagcgggcagagcaattcaggaagttgtcaactaactactcggtcgctagaggaaaagggtggagaagcagagagcttcggggcagcgcagaactgtgggcctgtatcccctgtgaggcaggcacagtaggtctggtcatcctcaggacagaggggtttgagcccagatgaaaggggatttgcagatttcttgctggtggtgcttcccggcatttccccccagccttagctccaggccaaagtgtgatggggtcgggactggggctggaacttccctagaatgacctggatggggaaaagccaggccatgaattttcgttgtcacatggagttgagagcgggtcctttatctccttagaaaggatccagaggtgaaagggaggaagtgtcagttctgggagagaagagacgcatgccctgttttctgccttgctagagatagccgcccttccctggcactccaggcccttgatgcctctctccttaggccctacctctgatgggtaggtcggaatgtctgcggtgagctgagaggcacagaggggctgggagttggatgtcctcaggtaaaccaggacttcctgaaccagcctaaaggttgatcattaggcccttgccactgcctgccctataacccctcaggacctcaaacctggagagaaacttattatgggaacagaatccagcccggggtaagagcaaaacaggacacctggggttggtgatatggggtgtgttccaccctgagtttgaatgatcagggtcagaggtgagggtgctgaaccagaaacatcttagggggagtgctgcaggctcagatacttccaggtatctgagaccctgaggttgg

SEQ ID NO: 4426 - DNA, 1119 bp, Artificial sequence
  DNA replication origin
cccctggcccggcactggcccccggtgagccccgagtcactgccgtacgtccccgcgccggccgcgggtcccacgaagctccgaaccccaacggcccgcgcgcctggcccaagccctcgcccaagcccgggggccgcccggggcgccgctccgcatgctccgcgcccgcccgccgttccctcgctcgcttctcactcgttctccctcccgtctagctggctctcagctttcttaataatattattctaagcgggcatgaggcgcggcggcccgcgccctgattggtccggttatctgacccggggcctgccagcgccagacaatagtcggagtcaaattattcgccatggagacgctgtcagtcactggtaacccgagcctcggcgggccgggcggctccccccggccggctccgctgacagatcgccccgctccgcgcagaactgagggcggctctactggagcctggggcgctctgagagcctgggaggcggagaggggccgggttggggccggcggcggcggagattgacggggcggatgcccaaagagggagggaggaggaggacaggagagcggggggagcgggcgaagacgaaaaggggtggatcgaggtggggagagaagaggagagaagggaaggcggagaccgtttaagggggtgtccaggaggaaggggagggagaggggtggaaggagactccaggggaagaaagtttgggcagctttggctaggagagggctctgcagcctcgcccagaccctacagggttccccttctccccaggtcaccgcgtccctcccaggctctctgttcaccgggcacattctaccccggcgcaggccagtgggatgggagagtttggacgtgctcgggtgccgcccaaagacttggctttttctgctgacagcgccccacccccatcctagaaactctggactcagcggtcctcgagggaaaaggggagggagtagacgaaagaaatggggaagatttggcagtggccgcaggcggacgccggagaatcgacttcccggaggatcccgcctttcctccctctcctagccccgccggctgcctggcggcctgtaccgccccaactctgcgctctctgctcc

SEQ ID NO: 4427 - DNA, 1147 bp, Artificial sequence
  DNA replication origin
tcccaggctctctgttcaccgggcacattctaccccggcgcaggccagtgggatgggagagtttggacgtgctcgggtgccgcccaaagacttggctttttctgctgacagcgccccacccccatcctagaaactctggactcagcggtcctcgagggaaaaggggagggagtagacgaaagaaatggggaagatttggcagtggccgcaggcggacgccggagaatcgacttcccggaggatcccgcctttcctccctctcctagccccgccggctgcctggcggcctgtaccgccccaactctgcgctctctgctcctcgccgggcggggactcagacttaaccccacgggtcccacagcccgaggagcgccaggcagttccgtgtggcctctatggaagctgactccggccggcagctgcgacgcagaaccccggacggcgcagacccgcagtctgcccaccggggcgggggagaggggcgacggcagggactctaggacggtggtggggcttccccggtgggtggtcggggaggagaacggaggcaagattcccagtcctcccgcttcgccgctggggatcggctcggctcctggccactccagcctgggaaccggctcgctgagctccgggatgaggtgctttaaaagggggtcctgttttttgcttctttgtcagggtgccaatggaaacatgtggtgctggtcctgtgggagaagggctcgcacaaaggtgggagaactgaggatgggtgtgttcttgctctacgttttgaaaagcccggggcttagctccttcccggacatgtcctttccacttccttcagtttcctcctcttcccccctcagctgctgcaggccaggagctcctagggccatactcagtgcctgacccaagccagcacaaatcctgggctctgccctcagccagtctagggctatggaacccgagtctaggccagttccttctttcccacccttttatgctttctatggagtttgtgctaggagcgcggaatgggagtctagagccctgggttcaacttttggttttgcttggtgtctatggtaaggcatatatttatgcctttgtgtttatttccttctctgcaagatttcaaaaattttccctgtgctgcagcatt

SEQ ID NO: 4428 - DNA, 1050 bp, Artificial sequence
  DNA replication origin
ttgttcaaacgaaaagaacgagcacaggggctcggggccagcctggaggccggcacagaggcgagtcggcccgggtggcgccgggaccaggcgggatttggggcgggtatccgggcccgggcgctggcagcctccctgcgacccccggccctgcgtccccgcccgcggtcccgccttagtcctggagtcccttcctgggccccttcgcctgggtgcggaggggcgcgggcgcggcgggcagggccacggggcgaggggacgggctcgcggctttgggttcagggagccgcggagctccaccgccgggttgttttgcaatggggctttggagaggttgcgcgtcccgggccccatggctccgccgggtctgcacgccagcgcccccacgcggcgggcccagagttcaggccggcggggctgcgcgctcggctccccgcaggcctgtagcccaggagggagaggagggagaggacgcggagagggcccgctggttcttccctcctcaccccagcactgacccgcctgtgcgctggcacggagggctcgaaaatcggggcgcgtccgcgaagagcgagacctcggagacagacacacaacccagaggtgcactaggttgccagacggtctgatcacaggattcttggggggatagacgctggcttttctccatcacacgtttcccctgcaacgtctgggtgcccaggaaatgtttgaatggatgcctgaatgaccaatcgggtttgactgacagcaacagctgggaagtgacccggccaataggagaatggccctcttcctcctctttcctcccgctcttctctcccagccccccctcttactctcctgttccttggaggggaagtctcagagagtggacgctttccttcaaccaggagccctgggtgctggagtctccccagggcccgaggagctacagactgaactcactgcccttagaaattccaggtctaactgcctatagcatcaccaggttcccattcttcttggctcagacccaccactttctgcaggaaagaaagttttctaagt

SEQ ID NO: 4429 - DNA, 930 bp, Artificial sequence
  DNA replication origin
accccggttccccagtccgtggcgcttccctccctccagtccgcgcgcccggccgccgcaggagcggctccccgccttagcccgcaggccgcgaggtgcacggccctctctaccgagaagcctgaccgccccgggcctccccgtcggcctccagcgcctacacccgtttcggcgcccactcttcgttctgcgcccctagatgcccatcggctgcgggagaggctcccggaaagctcggtggggccccgcgcagagcccgcccgccggagccgcaatgctgccatggtttccccgcgccaccagccaggcaaggcgcggcgcgaagggctctgggaggaagccgtcggcacctgcgggcactgcaccctccactccccgcctgccgtcccccgcctgccgtcccccgtccgcagcgcccacagccacgtgcgcggagcggagctgctcccggccgggggcagcccagcccccggcgcctgaaggggccgccgcgcccgccccgcacctgcaccctcctctcccacttgcctttccatctgcgcgcggaaatgccacgggcttagaacaaacttttattttttttcagcgacattcacgagagagacgaataggacacggtcatccgagtgccgaggcgcggaagcgcgaactgcccggagcgacctggcttggcgcacagactcattaaccaagcccgagaggaggcagcaatgcgtgtgcgggaaagggagcggttctcaaaatacaaagtgataaaacagcttccagttatattgaaaaacgatgcaaaccctcaattccttttttttttttttggacctggccggacctggaaatgccggttataaacaagaataaaaacttgaatttattggtggaagtcctgttaaaagagctcaacacaagcatatgagacaaactgcaaggtga

SEQ ID NO: 4430 - DNA, 1007 bp, Artificial sequence
  DNA replication origin
aagtgggagaggagggtgcaggtgcggggcgggcgcggcggccccttcaggcgccgggggctgggctgcccccggccgggagcagctccgctccgcgcacgtggctgtgggcgctgcggacgggggacggcaggcgggggacggcaggcggggagtggagggtgcagtgcccgcaggtgccgacggcttcctcccagagcccttcgcgccgcgccttgcctggctggtggcgcggggaaaccatggcagcattgcggctccggcgggcgggctctgcgcggggccccaccgagctttccgggagcctctcccgcagccgatgggcatctaggggcgcagaacgaagagtgggcgccgaaacgggtgtaggcgctggaggccgacggggaggcccggggcggtcaggcttctcggtagagagggccgtgcacctcgcggcctgcgggctaaggcggggagccgctcctgcggcggccgggcgcgcggactggagggagggaagcgccacggactggggaaccggggtgacggggagacgggggggctggtggggtgaggtcggcgggcagcagccaagtgttctgcagctccgaaccccgccaccctctgggcgaacggaatggcacccgcggagacgggcggggacgggcgaaagcgggtttgctccgacccgaagctgagcccgggttggagggcgagaccgtaggcgagaatggccgcgcgggctgggagacccgggccggtatggagtgagtggagccgcccgaggtagggtagttggggatggtagttgtgaagacagtcggagtctagctccgggcagacgaaacaccggggcgcgccagggtccgtttcctccttctctctgctttcccaccagccctgtagatacggagccagcagtcgggctagagcggaggctgagggtcgcggttccaagggcggtctctcgccccgggtcaggccccaccccgcggtggcggtcgcgtggcgctgtcctggagttg

SEQ ID NO: 4431 - DNA, 1700 bp, Artificial sequence
  DNA replication origin
cggggacgggcgaaagcgggtttgctccgacccgaagctgagcccgggttggagggcgagaccgtaggcgagaatggccgcgcgggctgggagacccgggccggtatggagtgagtggagccgcccgaggtagggtagttggggatggtagttgtgaagacagtcggagtctagctccgggcagacgaaacaccggggcgcgccagggtccgtttcctccttctctctgctttcccaccagccctgtagatacggagccagcagtcgggctagagcggaggctgagggtcgcggttccaagggcggtctctcgccccgggtcaggccccaccccgcggtggcggtcgcgtggcgctgtcctggagttgagctgtccccgcgccgcggcccgcacgcccaggaccgcacaccgccgcccgcaggcagagacgcctgcaacctcgccctctcgcccggctcccagctcggggctgggaaccggaaaggtgcatttccgtgtggggtgggggcgattcccggctgtcggcggtggggctaggccttgcggcggatgagccagaccttcccggctttccagccagccgggttcgggatttcccgacggtcggacgggtggaggcgaggatgggccgctatcccccagcctcttcaggaagaagccgtagggccaaggaagggatgggtgacggggctcacaccattccagcgctgccctcgaactcgcgggcctccgttccctttgcagtcacttggtgtgcgccccagtcccgggcaacattactgcccgcgggcgccttgtgtgcatggctgctgcctgcggcgcaccggcctgagcctggagggaggtgcggggcgggagaggcggccctccctgggtctcccctgcctgtcacatctgcacttatttaaagctcggctggtggtccgcgctctctggaatgccagttgcgggcctggcctcctacggcatttgcactgattagctagcgggtcatgggggagatgaggggcttaggggggcagaccggaggttcacagtattccgcctgcctctgtcccgcgtgctaatcggagcccagtgattcccgctgcaccaatggctgagtgtgttagggagcagaaaaccgaacttgaaggatgttggatgcgtctgggaaccggccattgccacttagtagtatgttgtgggccggcgcgcacacatgaccctaaatctctgcaggctctagcgctgaagcgggcggagaaggggaacaagtgctgtgaccccaagtcctaaaagtttgtacgcagtgtctgggatatgcagtatccttgatgcgaaactcttaaatgtttgctggtgcaagtccatacaaaacgaggttggcctgcctcgcttaaaataccgtacacaaagcgtaaaaaaggcacgggcaatccgcatcgaggacgccaccccaagcgcaagaggcccggtgcaaattcatcgctgaaaaacaagctgggttctaatttactgtgactcccacgggcgcaggggttgggaggagaagcaaagggggacatttttttatttttgaagcctcaaaaagttcgatctgattttgcatttgcctttggacttggtataattaagggtgaaaataaggcccctctgtatttctattcccctttgcttttctgcggagcttttacctcagaggaaagttgttttagta

SEQ ID NO: 4432 - DNA, 871 bp, Artificial sequence
  DNA replication origin
aggtgaccatgggcaggacagagactggcaactctgagagagaaatggatttggggaaagagaaaagaaaacactagttacaattggatacatggagttggagttgttggtggtgactgtcatgaaggagtacccagggaagagtaaacagatagatggaacaaaacaggaggaaggcagaactctgaggaatgcccacatctaggggagccagtgcaacagacaacatggaacggcagggttagtaggagacgggccatgaggaaaagggagggaagttccaagaagaaaggctggaaggtatttctgatgcttcaaggagacccaagaaggggagatggtgaggcagttgggttgggcaataaagaagttgagcagggtgtgggaagtagaggcagaaagattttgcacctggctttaaagaagtttcaccatgatgactgcatggaaagttttttttgggtgatgggcccttgagcaatattcaaggataaataataaggagggagagattgaaaggcacccaagaggggactctgatggagcaggatcatgggaggggcaggaaggggtggagcaggtgggcttgcaaagcagcaggaagaaggtgcgatagaccagagaacagttaaggtaaagacaagggggagcgagggtgcaggcagcctgccggggaaggaaacaatgagatcctatgctgagagtgagggctggggatgaaggtgatgggaagagagaagtggcttggaaatttgaggcagggaggacacggaacagaaagtcaggcaggaatgaataatagggcattgagaagctgaagatggaagcccggctctgcaacatcctcgtctgcacagtcatgacatttgct

SEQ ID NO: 4433 - DNA, 948 bp, Artificial sequence
  DNA replication origin
acaagccacgtaggatttcaaaaggggaggataatgttccgaggcaaggaaccagcaaaacactgaggaataaaagtaaaaattgtatctggggaatgatgagtggtcccaaatgaatggaggagaaagttaagcacctgtggggtgtgtgtggggtgtgtatgtgtttgtgtgagtgtgttggtgggagtggaaagtggaattaggagttttgagatgctttgttttgcaaaccgcagataacccttaaaggtgttggagacttgtggatggagtgagtggtgatgcaacccaacctatatattcataattgaccctgtaagccataaaaaggacaagctgagaagggatgatattagaggcaggaggaccagaggctacttcagtagcccaggtcagagaggaggaggactggcaaggcagaggcagtgttcctggagggaggggatagatgctggggaccctgcagaggtcaggggcagccagtcaggtgtggtgggaggaagggaagtgctctcttcggggtgcctgagaaggtgaccatgggcaggacagagactggcaactctgagagagaaatggatttggggaaagagaaaagaaaacactagttacaattggatacatggagttggagttgttggtggtgactgtcatgaaggagtacccagggaagagtaaacagatagatggaacaaaacaggaggaaggcagaactctgaggaatgcccacatctaggggagccagtgcaacagacaacatggaacggcagggttagtaggagacgggccatgaggaaaagggagggaagttccaagaagaaaggctggaaggtatttctgatgcttcaaggagacccaagaaggggagatggtgaggcagttgggttgggcaataaagaagttgagcagggtgtgggaagtagaggcagaaagattttgcacctg

SEQ ID NO: 4434 - DNA, 2272 bp, Artificial sequence
  DNA replication origin
tctccttcctgtttcctctgagttttccaagactcccactcctgggaaaagccccagagactacgagtgttttagccccttgggcaggggggatacctagttacctgtgtccagagagctgccctgccctgaaaaacagcatcctcaacatttctcattggagctaagaccccaagcagcagtgagaggtgacagcaaaggccaggccaggccctgggcatcctaagcctggaatccttccgctcaacccactccaccaactcagtaaggaaaacagtccagtcctaatcccacagcccacaaacaaacagctcacagctggccagctcaccaaaacaagtaaaccaggtctcctgcccagggcagggcagattgagcaaggctcagaccgtcttgcttatcctctttgtgacccagtaaaggattgtgaggcagaggaggtggtgacacataaaaacacatctggaggtactgctgcatctcagggcaggaggtacagaggggacaaagagaggggtcagctgaggggcatcaaagaagaaaggactgaggtggttcaggtgaagaatggactgagggggcttgagggagaatgggctgaggggactcgggggaggatggactgaggaaactcgggggaggatggactgaggggactcggggagaatggactgaggggacttgggggaaaatggactgaggggactcgggggaaaatggactgaggggactcaggggaaaatggactgaggatactctcggaggatgaactgaggatactcgcggaggatgcactgaggatactcgggggaggacggactgaggggattcggggagaatggactgaggggacttgggggaaaatggactgaggggactcgagggaaaatggactgaggggactcgcggaggatgcactgaggatactcgcggaggatgcactgaggatactcgcggaggatggactgaggttactcgcggaggatggactgaggatactcgcggaggatggactgaggatactcgggggaaaatggactgaggggactcgggggaaaatggactgaggatactcgggggaaaatggactgaggggactcgcggaggatgaactgaggatactcgcggaggatggactgaggatactcgcggaggatggactgaggatactcgggggaaaatggactgaggggacccgggggaggatagactcaggatactcagagaggatggactgaggggactcgggggaggatggattcaggatactcagagaggatggactgagggggctcgggggaggatggactcaggatacgcagagaggatggactgaggggactcaggggaggatggactgaggatacttgggagaggatggactgaggatattcggagaggatggactgaggggactcgggagaggttggactgaggatactcggagaggatggattgaggggactcgggggaggatggactgaggatactcgcagaggatggactgaggggactcgggggaggatggactgaggatactcagagaggatggactgaggggactcgggggaggatggactgaggatactcggagaggatggactgaggggactcgggggaggatggactcaggatactcggagaggatggactgaggggacttgggggaggatggactcaggatactcaggatggactgaggggactcgggggaggatggactcaggatactcagagaggatggactgaggggactcaggggaggatggactgaggatactcggagaggatggactgaggggacttgggggaggatggactcaggatactgagagaggatggactgaggggactcagggcaggatggactgaggatactagcggaagatggactgagaagactcggggaagagtggactgaggatactcgcggaggacggactgagaagactcgggggacgatgcactgaggatactcgtggaggatggactgagaagactcagggaggatgggctgaagatactcggggaggatgcactgaggatacttggagaggatggactgagaggactcggggaagaatggactgaggggactcggagaggatggattgaggatactctggggaggatgcactgagggcgctctgggaaggatgaactgaggagactcatgaatagtctcccactactctatcagagataaccacattttagcaaacactccgttggagtcaccccatgcacacatgtgtacatgcagccaagcctt

SEQ ID NO: 4435 - DNA, 1557 bp, Artificial sequence
  DNA replication origin
tactaaccccaagttacagatgaacagactgaggcacagctgacaagggaggctgtcctcaactactgtgctcctgtctgtggaccgtggacactagtctgaacatttaccagtgacgcgagtggcccataggagtcaaactccctttatcagcacagacagtcaagatgatgtgagaaggaaagatgctgatggggagaattctcataagggaaaaggattaaggaagtggataaattcattcgttcagtcaattcatttttattgagcaactactatgcaccagttacagtctctgagttcgtggagaagaacaaatcaacaaagaagtttaaaaattgcaagtggtgatcgatcccatggaggtagcaaatgggaccaagatagagaatgacagggctggagggagaaacccacgttagagagggcatcggggaatgtctctcttaggtgacatggaagcaggggctagtgtgagccatgtggggagcagtgggaagggcttcctgggagggctgtcattgcaaaggtgctgggggaaacaggcttggtggactgagaacctgaaagaccaggatggccagccaactgtgagtgggagaaaggctgcatggtgaggccggagggtgggggcacacagagcaaggggttgggagagggggacttttgatttggttccgagagcaataaaaatgtattgaagaagcttgaaagcttcccagaggagagtgacataaaagaaccttggcctttgtgaggagaacgactggagagcaaaggagcaggcaaggccagggaggcaggaagctgcagcagcagcatgcctggggccacggggtgctgaagaagaccctggggcccgggagcagcaaaggagagagcaagccactcctgaacatgtggcagctgctgggcgaggcggtgtttcctctagaaggacagcatctccaaggggtgttgccaagatggacagcggacaaaaggcctggagttgcctcgcagttactagtaggctccgatgccatgcccctaagggatggagaaaggagagtggcgtgtgatggtggcttcaggaaaggccagaactctggtgcctgggggagaaagggacatcagaatctgggcgggaagtgaccagaaggacaaggagggtgccattccctccacagacataccctgagccccgaccatgctgctggctcttgggcagcaggagagggcttcatggctgtgaccttggaggtgggcccagaaggctgagtagggatctgcaggtggaagacaggtaggaggccttccaggcggagccctgtggagtacagcgctgcttttcagagcccaggagatagtcactgtggctgcaagccccaggactgggaggaaggaggccaggctgggaacggattgtcaaaggctagaggggggagttttcccccagcagagccctgagccaggccacccaccatgaacagtcacacaaatggggcgggatctcagcctggcctcttggcgtgtcaactccgtgccttccctgaccacatgcccagggcagatcgc

SEQ ID NO: 4436 - DNA, 972 bp, Artificial sequence
  DNA replication origin
cgcaggctgcgagaacttgttgacaagtgaaagctcggtagagccccggcttggtttgtggtctgcttattttttgcaaagtgactgttcctgtttgcgctggtccttatcggtgcccctttgggggacttcggcactgatcagcgcgctgacagccgccgtccgggctgcgggaaaatggggcgcgccctccggggggcgagtggctgtgtccttgctaatttcctccgtaacctttaaactctcgctggaagctaccgccgcggctggtcacgtgaggagagccctgggctgctggggaaaaatttcctcggctgggagccgggaccgggccggcggccggcgagggactgccccgcgcccgagactgggaacctgggagggcagggccggagcgctgggccccggggcgcggcccagctgggacacccgcgaagacggcggcggtgaagaggtcggctccgctgccggggagctggggattatgcaaatggggaaagaaaacctccgccctcgcccttctgccaagtcaagtctgggaatttgtaggtattgtggtaagctgagtgttcatctggcgggtctggttagtgtaaaccaaaatttaaaacgcgcctcccgatcactttttcctcagtgggtaaaggttatcattgcctgcggcttaaaagcctaaaaaggcttaaaggcgaggaaggaggcagtcccctggaaaaacaggatatcaagtgcagcaaacacgtcccaaaaatgatccgaaaagttctagggccatctcctaagaacaggcaaagcctttgcctgcaaccgctctggagcttcctaatacagtaatttctcgcagcctgccctgttgaacagggcagctgggtagagatggtgctaagattcagtcttccgtatgatctaggtagctccgatgtaaaaagccaggatttcaatggttgtcttaccctgtcactcccccagctg

SEQ ID NO: 4437 - DNA, 1378 bp, Artificial sequence
  DNA replication origin
cctcccggagtcgaaatttcccgggattatgtttcggaaaggtaggtaagcgccgggcgcggcgcccgctttcccgcagtccggagccggagagccagcgaggcggcgaggcagcccccgcggcttgcagcggagccgacagctcgtcttctcttctggaggtgcagctggtggtcggggggagagacttgctccaaacacggacatcccccagctctcccccctccctgttttccgttaggaacccggcgaggaaatacatgcactggctgagaatcgcccgcgccagggcgcaacgccacaaggtgtagggagtgtgcggggtggggcgaaaggggacccaagagtccctgtggctcggagtgccgggccgtcggttcttcattcctgccctcggggcagacggagtgaccccggcccccactccccgccccgaccatggtagtgttcaatggccttcttaagatcaaaatctgcgaggccgtgagcttgaagcccacagcctggtcgctgcgccatgcggtgggaccccggccgcagactttccttctcgacccctacattgccctcaatgtggacgactcgcgcatcggccaaacggccaccaagcagaagaccaacagcccggcctggcacgacgagttcgtcaccgatgtgtgcaacggacgcaagatcgagctggctgtctttcacgatgcccccataggctacgacgacttcgtggccaactgcaccatccagtttgaggagctgctgcagaacgggagccgccacttcgaggactgggtgagtgcggcgcctccccgtcattccgggaacccggttgtggggtcccggggaaagactcgctggtcttgatcgtagggctccgggacttattgacgactggggtgtgtgtgcctgtaagtctcagtttccttggggaggtacacttcacttcatagttggggagaaacaggcattggcgaggaagatgagacttggaaagaggatgtggccctctgctccctctgtgccctccagttggtgggtgctgcgggaggtttgcaaactgggagagcctgggccactggtgctgaaggttggccgaggacccggctttcttccgcaggcgcgtggtgggctggctgtgtgtgattgtgtgtgggtgggtccctccgtccttggaaaggcacgtggagcctttgactgaaggcttcttgcacgtcctggctttgtcctgcttagccgagcgaggagttgctttatttttccctccgagaggaagctggcttgtttctattctcttgcatggtggttagctcatcttctgacatacaagtagaaaaaatgtgttctcctccaggatgtctcctctatggtcccagaaacatcagtc

SEQ ID NO: 4438 - DNA, 789 bp, Artificial sequence
  DNA replication origin
agggtgtttcaagctgaacctgagcaatgtcatggatgcacttttggtctggcctgggaaggaagatgcttctggtaacaatgtgtaagggaaggattggacgctggagacttgaggctgactgagagattctgcagggggccaaggtggctcaggaggcctgaacttggaagtggtggtgggatgagaagtcaggaacagatcctgaggagtgcggggtaggggagtgaagtaggtgggaggtggcaatggatgggtgggtgggagaaggtcagaggcgaccctcagacttcctgaaagggccgattgggagaaaggtgaagactttatttaggcaagatagggggttcaggcagagagtaaacttgaaaggaagataagtttgcttgtaaagatgttgaatctgagatcattaaagctccagtgtagatgcccagcaccaagtgagaaactcgagattagcattctggaagagaggccagggctggaggtgagaatggcagtgtgatggttggaaccatgggggtggctgaggtgacctggagagaaagtggacagaagagaagcagggcaaggcccaggtttagggaatgccccgaggcatgggtaggagatggtgcaggccggaagggcagggaggaaggtcgagaggagatggtcacccagcagggctgggtcctgtcttgagctagctgaaaataatggaaaatgaggaggctgtcggatctgacagctgatgttctctctgagaggctggtctcaagaaaactctccacaaagtgactgggg

SEQ ID NO: 4439 - DNA, 1557 bp, Artificial sequence
  DNA replication origin
tcggccggcttggggcgggcacggggcgggcgcggagggcggggggcgggcaccggcgcgggtgtgtgggcgggcacgcgccggcaggccccgcccgcgccgagctccgggcggctcactgcgtcccggccaatggggacgcgcggccgcagcctctgccctgaccctggcccgcctcctgcccccgcgctgcgccccgcctcctgcctccgcacttcgaggacttgtttatgaggtcgtctgggcggcgggtagcggggtgggactccgcgtcggggagaggcagcctgcgcagggccgaggggcggccgggagccgggctccgggattgctgcgggggacggcagttgcgccacagcgtcggtgtcctcgtaccggcgccgtgcccttggaacgagggcaggaccgcgggcagcgccgggccagcgcggagcccctccacgctgctgcgctcctgcgtccctggccctcgggccaggtggggataatttctcggcccccagcggctgcgtttcgggcgtgggcgatgcgcccttttcggtgggacgcagctgacttgaccgtctgggagaagcagtgcaaggaaattgatctagggctgcgcctactcttccttccctctcccagcagggtggttgcttaccggcttgtgccaggcggtttggttttggcggggatgcggcagaggaggccctttgagccgcccgaggccggggcgagttcagaattggagaagtcagtctggttccccagtgtgatcttggagtgacaagagttggccatgtgccctcaagtcactgcatctcaggcctgccctctctgccgccagggtcgatggaagtcctgggaaacccaaaggctacaggtgttggaaatttgtagatttaagggctcacacaggcaacggttagcgctcagggattttccagcggcgcttttgacgctgccttccatctccgggcccagtgctcccctgccccgcgctgagctgtctcccactcgctaccggcgatggggaagggacatctggggagaggacaggggacgcccttagtttttgaaggctgtggaaggacccatgagtttcacaggtgtaacttgaagttggaaagcgagggccaaagaactggtctatatctctccctttagcctcttgccacattttatactagaacgatctacagaagcgatttgaagagaagggtaggtttcagcgccataataaaaatgaacacgtgttttccccgtgtacacagaaagggttgggggagatacttttcaggagcctggagaaggcgaagtggggagagggcaaaaactgacgaagaattgggaaatactttttttttttttttgagactgagtcccactctgtcgcccaggctggagtgctgtggccccatctcgactcactgcaacctccgcttcccgcgattcttgtggctcagcctccggagtaactggaattaaaggcgcccaccaccaccctcagctaatttttgtatttttagtagagacgggagttttaccatgttggccaggctggtctcaaactcc

SEQ ID NO: 4440 - DNA, 1274 bp, Artificial sequence
  DNA replication origin
ggcagtgtcctgagactgtatggtcagctcagcccggcctccgactccttccgactcccagcattcgagccacttttttttttctttgaaaactcagaaaagtgactccttttccagggaaaaaggaacttgggttcccttctctccgtcctcttttcgggtctgacagcctccacccactccttccccggaccccgcctccgcgcgcaggttcctcccagtcacctttctccacccccgcccccgcacctagcccgccgcgcgccaccttccacctgactgcgcggggcgctcgggacctgcgcgcacctcggaccttcaccacccgcccgggccgcggggagcggacgagggccacagccccccacccgccagggagcccaggtgctcggcgtctgaacgtctcaaagggccacagcgacaatgacagctgacaaggagaagaaaaggtaagcgggcgtccgggccgatcagggggccggtccgaggccagggccgggctgcgcggggcaggcgcgaccgagagtggttgggagaagagtgctgagaggtcttcggagctcgaggctcggtttggagggctgtgagggggagagcatgtgcccggtttgggggcgcggatcagcagctttgcagtggagacttctgcggctcggaggagtcggggatttgcgcgcacggcgaggccaggaggccgagggagatggcctggaggtcggaggtgcttccgcggtgcctttgaaaatctcccagccgccccgcagcagattaccgtggccaccggcgcttggaaatgtttgtgggtgcatgtcctcgactttctctggtctctcattttggggcagcatccacgtctctatttttctctggattcgcggagtccttccaaatgcgctcctgtgcccgcgccgcggcccaagtgggcaaaggggggcgggaggcggagagcggctcagggacacgatcctaccgaggagccaggacccttcagagcgccccgctgccgggctccagaccccaccgaaggttggagaacccacttcctcgtgccgcaccttgactctggggagagtaggtagtgagtgacctggattgccctgcgggggcagatggttcggtgtgtaggaagcggacggcaacactggatgtccctggcaggtccgggtgtctgtctccgaagaggacagagaagggcagccacgatctgcccgcctgccctcgcgagcctctcggcactgggtgagaggcaactctggccatttcttgctgccctc

SEQ ID NO: 4441 - DNA, 1122 bp, Artificial sequence
  DNA replication origin
gcacattgattttgtatcctgagattttgctgaagttgcttatcaattcgacaagtttttgggctgagatgatggggttttgtaaatataaaatcatgtcgtctgcaaacagcaacttgacttcctctcttcctatttgaatacactttataatgtattgttgacctgaagatgtttaaaccaggtaggggatggtttgagaccttccatgggtaacaacagaacaccaatagggagggagggaaatgaagatacatgaaagaacataaggcaatttcggaaaactcagacaagaaaatgaggtttcagggcacatcaacatagtaccttaacttggaggcaagtcacctggaaaatgtagaaagttggtagtatttattaagcagaatttatccaaatagacaaaaatcaatcacatctttatggagacccaactttaagcaatgccttgtggtttcagagagggccctggtttaaaataggagaaaagcatctggcactcaaaatgggatgggataaggggcaggaaaggacacagccagactgactgcacacttcagccgaggtagcagccctgtgggcaaggggccagtcagggagggagtagtaaggatgggcgctgagagatggaccgtcatcataagcagaaagaaagtaagacactggatggggagaacactgcgggcaaaggcctgctggtggaaaggggtctgaggtctgcgtgtggagagcaggtgggtttggcagtagtcaagagacttgcagaggacaatgtctagaaagacactggggtgtgaatgggaaagggtggaaatgtctgcctgagagttggggcattatgcaaaagagcccatcaaaggcttcttagcagggctgtaccttcgccaaacctggactcaggaagatcagcctgggggtggtgggggcaggagtcttggactatatgccaaaagccagagggagcctgtacacagcgagggccaggacacaagacaaggcatcgcgattggaaggaagagatgtggcccacaagctgttgggtgtcaggtctgaggactcagcctctggctacacagaacagagcagctcagcttggggtgaggttgtgagaaagcagggaca

SEQ ID NO: 4442 - DNA, 1641 bp, Artificial sequence
  DNA replication origin
aagaatgaggtcactgtcaccaatgaagtcaccactgcatgattcatcggacatcagttccccactgggaatgctatgacattcccagagcttctcctactcttagctcacatttatagatgagaaaacggaggcccagagaagggaagtgacatgctcaaggtaacactgctaaccagggtcagagctaggaccaaactcagctctcctggctgagtgctctccttttcaagctcctggatagaccctcctttcaggacacgagtccctgcaaatgctgcctgaacaaatggtcctgcaagccaagaatggggcaggccctgctctctttctctctaagagcaagtagcagaggccggtcttgaaccaggaactgaccttaaggcacttttctgccttcctcaacctgttattcagtccatacaaaatatcttccagattcattgcatctaaagcagctagcaatgcgcatacctagtcgcagacacgcagggccaaagggtgggtcctggggagaggctcaatgagaatctgcaaggaacttacagtgatttccgaagacttcctgggagagtggaaatcagattcggagtttgagagttcaggcctcctggatagtgaggaacgggaatacaacagtgagcatttccccaagtgtgctccaagtccttgagtactgggagcagctggaagcctttgggacaaccgcttcacctttctaggtctcagttttcttccctacaacctaagggtgatggtccagttgacctccgcgctgcctctcaatgctgcatttttctaacgctgtgaatcgatgaaaggaagcgattacctctagtcagcaagttgaggggaggggtgcggtgtcagcgcagagtgcacccccgccccaatgcccagtgttcaatgctgcattcttggccagtgaacaggacctggccagatgggtgtgttccggcatcgccaggcagaggggcaggggttgccgcctcgagcacaggccaagtttcagagcactagtgtgtatcagttctccgggattacaacggaatacctttgaggaacattggggaccgaaaggcgacctcggagaatgtggcctccagggggagcccaggtacatttgccgggtccggagccgacggggtatcctttttctggctggtgtgtgtgtggaggggcgtgcttcagtggttcaacacgctgtatctcccttagttaccggtttcatagtaaatgattaaagctcgtgctacggaaggcgtggggtggtggtggtgggggggaccacgcaataagccagggttcctgctttccagctcaaggaccgccaccaccccacgcgccttaaatttttttttttttttttttacccttttggtctctcctccttgatttctagttccgttgtgcacttagaggccgagaggatggctctggccttccgggtggaggtgaaatatgcatgtataatttggcatgactattgcgtcatcgtggaggtcgtcgtggttccccgagaggcctccacgtcttctcccagcatcggggcctttggacgcttccgggcgctgcgggcacttgcgcgaggagccctcggctccccaggcgactcccctcctcccctccgcggtcctcggc

SEQ ID NO: 4443 - DNA, 1655 bp, Artificial sequence
  DNA replication origin
gccggcagggccgcgcggcggcagcaggcgggggcgcgtggcgcgggccgcgctcggggaggcgcctgggcccgccctcctccggggcgccgcgggaggggcccgggttggcgcggggcggggagagccgcctggcccctcccctccgccgccctccccaaagttgccgtctcccccggggccggccggtcttatgatccggcggatcctcctggggaggccgggccggggagagggcgcgggcgccgagtggcgggggcagcgggcgggcgcggcgaccggggccggggcggggatccgggcggcgaccgcggcggcggcagcgccccgggcccgccgccccctcccctcctgcgaggggagccgctgcatggggccgggggggcggccctgcggcgcggagcggcggcgacggcggcggaccccccaggcgggctggggctgagcccggggccggggcgggggctccggggggaccatgcccggaggccggccggcagcagcatggctcacgggcccggcgcgctgatgctcaagtgcgtggtggtcggcgacggggcggtgggcaagacgtgcctactcatgagctatgccaacgacgccttcccggaggagtacgtgcccaccgtcttcgaccactacgcaggtaagcctcggaactgctgactaaggggccgctccccgggccgggaactttggagcaactttggcggagccccctcgccgcctccccagagcgcactcctctcccctcccccgccgcgccctctgccaggcggccggccccacccccgaagcttcgctcctggcaacccctcgcccgctgatccaccccctctcccacccgccccctacgcggctcctgctccccgcacttcctacccctcggcgccctgggccgtcctccttgaccttcccacatcccctttcctactgccccaaggccccgggggaaatattcgaggggaccgagcgagacgtggctacgggacttgggagaagggggtggacggctggggaccacatcacaccccggccctttgccggttcacagtgagctggccgcacgggaaaagggggtgacatctcgcggggagcgcccccacgcctctagctgggttgggagaggagggtccgggtggggagcgaaattgccccagagcccaggtcactgtgagcttctctccccgcccccacttctgtccttgcagtcagcgtcaccgtggggggcaagcagtacctcctaggactctatgacacggccggacaggtgagtgtcttggcctctggccgacgcccccctcctgttccccagttctttgtggctgcgaagggcctttggaaaccgaggtgtctaggtgggagggtgtgtctgcgacgggcttcccctggattaggtctttatttcttgtaacaagtcagcaaattaggaaaacaaacaaaacaaacagagccggataagccccccccatgtgaacccctgggctgtgaaagtttttgcctgtgtgggtcgttctgtgtggcgcctggtgtgtgggtcccaactcctgttgcaaagtggcagcagccaatcatgaagcgcccttatttttagttgcagatgaccaggtctcccccccacagcctctgtctggtccctcattggtgagtggtct

SEQ ID NO: 4444 - DNA, 1112 bp, Artificial sequence
  DNA replication origin
gcgggccgggcgcgaccgcggggacactcaccgtttggggcgcgcggggcggcctcatccagggcacctgcggccaggcaggacgggcccggacggcgcagtcaccgacagggcgagtccgcctgccctccggtgcgtcccgtcccctccgactgcccagcgagcgcagcgtcgcttcctccggacggagcccggggaccccagctccgccggatgcccccgccaggcccccacccccttccctgccgcctccccttcttcacccgtttcccctcccccctccccccaacccccaccagaatggaaaatacctcccggggcggggggcggggggcgggcaggggcacgcctctctgaagggcagcctaccgtgaccaatagcaggcagggctttagaggggcgggattcctagcggccaatccggaggcgggtaggtgaaggccgaaggagggaggcagggcgcgagacgggggcggcccgggagtcggggaggtccggccgcttgggtgcgcgctctgcgcggctgccattttggagtctggcagctgcgacgggcgccgtgtccggccggggaaagggaggagccagtcaggtgggagagaggcggtcacgtgggcctgagaggcggggtaaagcgggctgcggcccgaagggaggggtcgacggcggggagtctcggggattgagggggaatgtcacgtggtcggagaagggcaagcgatgggcttgtgggtggaaggtgaacctgaagtaggagtggggggaaagctttgtccctggtttcaagtcttagggagaaggagaggaaagtgctgaatggagggcgtgagtgccgagtaggaaaatgtgaatgagtctctccagcgcccttcagcatggagccacccagttagcaagttccaagatccacgggaaaccgggcacctcctgcaattcaagtattcctatccccgcccccagctgccacaaaaatgactcacaaatcggagggaggggtgtcggtctccgtcgttttgtctgcattttatatggaagggccccctccctggaaatggctgaaagggtggaggaagagaagcatagttcacgcctgcaagggctcttcccgctg

SEQ ID NO: 4445 - DNA, 1138 bp, Artificial sequence
  DNA replication origin
gccccccgccccccgccccgggaggtattttccattctggtgggggttggggggaggggggaggggaaacgggtgaagaaggggaggcggcagggaagggggtgggggcctggcgggggcatccggcggagctggggtccccgggctccgtccggaggaagcgacgctgcgctcgctgggcagtcggaggggacgggacgcaccggagggcaggcggactcgccctgtcggtgactgcgccgtccgggcccgtcctgcctggccgcaggtgccctggatgaggccgccccgcgcgccccaaacggtgagtgtccccgcggtcgcgcccggcccgccgcctgctccccggcccccgcgccgtcgtccgcggccgcctctcggtgccccagtgcccgcgcccggcgcattccgcccccggctgtcgcccccgcaccgcggcggaggcagcgccggcctctggctgggatgggctggccgggaaaaggactgctagcccgggccgcgagccccgtgcagaccacgccgctcacagtgggagcttgcgcttagtaggctctcgatgcatttctgtggaattgtttttctggttggaggaacgtggggttcctaaggggaagggggtcgtccggggccagtaggagggcatccgtgatcggggtcgtggtgggtcgcggggaggccaccggagactgaagcagttacacaggctgcagggaagggagcaccgaccaagtcacttggggctccaagagcccgatctgggggtcttcaaggtcgaggagaaaagatcctcttggggatgagggagggaaccaatgagtacatatgtgggaaatgaattgagtgccccgggaggtttaactaaccaaggtgggtaagggatgcggaggcgggagctggaagacccctctgcaactacttgggctcctaagagtctttgatgtggggtttgggcatccgagtagcagaagcggagtgatttttgtggagagggaattgcatttaaagaaggatgctaaaaaaacagtgtaaatacatcttggtttggttccgaactttgaaaggcttgagggattggagtcacaaggaaattttgacattttcttgtggcattccaactaaagggtgcctggctgct

SEQ ID NO: 4446 - DNA, 950 bp, Artificial sequence
  DNA replication origin
gctactgctggtctctgtcccgcagggccctgacttcccccgactcaggccagctgtctccagcacagaccatccaccagccaggcccgagggaaacagctggaaccaaatgactgcagtgcctgccgctaaatgaccaggccttccaaaataaacaaaggaaagtcaagggaaccaggactgccagcatcaacgagggagtcggctgagagcagtgaggtgggggcagagcctgggaacatgttgctggcgggggtggccagggcagtgacagggactactctaagaaaagtccctcagccaaagggtagacattggggaataggatggagggcagggaactcccccgctattcccacatccacacacatataccagaatgtacacttttttggaacttctgcaatatatttaaggcttagaggaaattaggcatatattgggtggatatgtagatggatggatagatgggtgagtaggtaggtgggtgggtgggtggatgggtggatggatagatggatgaatagatgggtgggtggatggatggatggatatatgaatgcatgggtaggtagatggatggatggatggatggatggatggatggatggatggatggatatatggatgggtgggtaggtgggtaggtggatgaatggatatatgggtggatatatggatgggtaagtaggtaggtggatggatggatgaatggatggatggatggatgggtggatggatggttggatggatggatagatggatgggtaagtaggtgaatggatggatggtgagtggatgggtggatggatggatggatggatgagtaggtgagtgggtggatggatatatgtctgggtaggtagatggatgcatggacagatggctaaacgaagcaatgaatgcatgcatttatgggtaatgagtaaataggcccagggtttttattt

SEQ ID NO: 4447 - DNA, 981 bp, Artificial sequence
  DNA replication origin
acgacctggctttgtgtggtggccccgtcaccgctgctgcccctgacacgtcacaaaaatggggagaggccggccgacaggccccaaccccgacggcgagcctcccgggagctggcctgccgctgtccgccccgccctgttgcgatgcgggccaggcatgctcgcgaggacccaggcccgttcccaggcccgcgactctctggacgcccctctgctgggagcatttgtattttcttattttagcggagttcctctttccaacttgacttccctaacccgttgacctgtcctctgtggaatctctgttgccctggatttcttaaaggctttaggctgtttcaccaccttggtatttatttatttcttcatgctggtctaagactgtgatcaaagctctatggagtgcttagcagggtttagcccagggctgtggggtgcccagaagttcacaggactacggggcggggcctagcgggggcagccgaggtccacccttggggggagacctcttacaggggcccggccccgctgccgccgcagctcacagaccagtgctggagaagccacagcaagacccgaaaccaaaaaccaccggcatttaagtgacacattgtatggtccagactgaagactcaaaagacagcagggtcagggcaaacttttgagcagactcctaagagttagaaggtgctccacgtcctccctctggagtcttcaccactgccctaagtgtttttggacaactgtaaccgagggaaggtttttatgtcaagcagaacccaggctcctagtgcatagtcccgtgtggcctttcacatgaagccacacagggtgattagttgaagacagtcttcctgttcccactgacccccgactcccatgtggaggccctcctctccgggttctaaatgcagctccagtccttgtttggtgggcaggatttcctaacggtgggtgctgctctgagcacctggggactgt

SEQ ID NO: 4448 - DNA, 1435 bp, Artificial sequence
  DNA replication origin
gcccggaggcgccgggcggtgcgctgggagctgctggtgctgctgctgctgctgctgcccaccctccgccgcccgggcccccgctgccgcccgggccccggctgccgtctgcgcccccgtcgaccccgcccgcgagtgcgccccagccaggacgccgcccccggccgggtctccacttcttggccgcaccttccatgacagcgcccgcgagaagatggctgcgaagggcgcgcacggctcctacctgaaggtggagagcgagctggagcgctgccgcgccgagggccactgggaccgcatgccggagctggtccggcagctgcagacgctgagcatgcccggcggcggaggtaacaggcgaggcagcccgagcgcagcgttcacctttccggacaccggtgagtaagggaagaggctggctcgccggcagcgagcgcgcgaaacgcaccgcctcctccaggaagcgcgcccagacagtcctcggccgacagcgggcgcctgccagcccaccgtgctagtcttaagagcagccagggcagttaggaaggtccttctgccgcgagagaaaaatcacatgtggtttgggggcttggagggaagagaaacggcttttgctctgtgtcctttaggataatgtggctaactctgtctaccgtgaaatggtggtatctgcatatcatgagatcagtgcattggctggactctgccccccaccgcggtccgagggtggggtgtccctaaactccatcaggtgaagtgtgtctgtgtcgtctttgtccatagttctcgcaagtgacgttgaaaacggagctccgtccgaagcagacaggggcgagggtttgacgagctccagggtggggtggtggagaaatggggaagaggcttggccagcctcagtttcctcatctgtggcgatctcgggacacatccagctctagcagtcggtggctttagcagtagggctggtttggctgggccgggctcttgtgctggggcgggaaagcaccctgatgtggcagcggggaacaccccgccccagtctctaacctcaaatcctgttcctggggccttcagcttaccctccctgagtcctctctgtgggcacaatcacttaggaggctttgtggaaggaggcagggaataaatgaatacagatataaataatttttaaagactgctcagcctgttgaaggctctgagagggacagatcgtgatagtaatagtaatagtcaacgcttacttcgtgcttcctgtgtgccagacactgtcctgagcactttaatcaaccccgtgaagcaggtactcttgtttgtcccactttacagataaggaaactgaggcacagagcaactaaataacttgatcagctagccaataagttgtggaaccaggatttgtgcccaggtttctgagtacatcctttaaatcacttgc

SEQ ID NO: 4449 - DNA, 745 bp, Artificial sequence
  DNA replication origin
gcctggcttgccccagaggcaggagaaatgcagcccgccgaagtgaccataagaccaagccccggctggtgagcatgctctcagggccccaactccaaaagggtcaggggagcggggtacctagaccccgtgggctgtggatcagagaggcctgggttctatgctggctcggcctcagtggtgtcctccggtaaaaaatgggactgctgtggcccgctcctcagaaggtagggcttccccaggctggtatgggggacacagcaccatccccagcaggcagggctgccctccacctgacagcaaatacatgggcttcttcgggcttccctccgccggcctggagctcagcccatttcctgggtggttccggcaaggagagctccactgtgagagccaaaggcttgtctgcaatccccaggcagtcaggtgggggcatcggcaggcatcagggtcaagccacctgagaggtcctgttttggaggatgtgtgcatgcccagagcgccagcctgcaggctgaggcgccacaggaaagtaaaggaggctctgaaggacctgaggtggggagtcctggacacaccagcattctctcagcacccctggggaaaaggcgggtctgcctgcagagtcatggtggaggtggtcctggggctaaggtagtcagcagacaggaggtccctatggggccccagaagccaaggcctgatggtggtgtccacacagtgaaggagtagcttgggggtcaca

SEQ ID NO: 4450 - DNA, 1081 bp, Artificial sequence
  DNA replication origin
tatcctgggctacgtatccaaatccacagccatcactgtgccggccagccagatgtactcttggcaggatgggctggctgggggcctcagagacccaggcaggctaggactctagcttacagtccattcagggagttctcgagttctcaactccctgaggctgccaaaatgaggtctccaaggaaactgggccctaggctccactggctccgctggcctggcccgccatctctctaggaggatggatgctattcatcagagagggatgaataactgaacaggttaaaaaatgcatcaccaaaggtttatcgttcactagattagcaagaaaagcactggttcttttacagggaactaaaaataaagttggtattcctgggaggggagggatgctcctggaggggcacagaggtgccccgtgcctgtccaggacctggggtcaggagtgaggagtggggacagggtgggggcgcagcctagaggtggaggaggatggagggagtcacagggggaggggcagtgcaagaggaagggagcgaagccaccgacgacagtggaaacaacagccaggatgacatcagggccgttggggagaaaatggttgagacagaagaacctggagagggagacagaatgcctcagaaacagagtgacaattcaggtcaggtcaggacagacacaggcaccgggacaagggtctaggcatggggtgagagggaaggggtcccagcactgagagtaactgtgacgagaggaggagccaggctgacgcagggcagagcctggcttgccccagaggcaggagaaatgcagcccgccgaagtgaccataagaccaagccccggctggtgagcatgctctcagggccccaactccaaaagggtcaggggagcggggtacctagaccccgtgggctgtggatcagagaggcctgggttctatgctggctcggcctcagtggtgtcctccggtaaaaaatgggactgctgtggcccgctcctcagaaggtagggcttccccaggctggtatgggggacacagcaccatccccagcaggcagggctgccctccacctgacagc

SEQ ID NO: 4451 - DNA, 1163 bp, Artificial sequence
  DNA replication origin
cgggcgtctggaaaggtcaagcagggggcgaattcaatccacccgaccgacggttagtgcgggcgccaggaagcgcctttgtccgcttgcggccgccatgcgcccagggggcgggaggagcgcgcggggccctggggcgagcgtcggcgtcgcagttagcccgcgtcctccgcgtgccgggatccagggggcgcgcgggcgggcgggcggcgcgctgtgtgggccgagcccgcgcggcgcagggagcggccggtgggggcggggcgggcgagcgcctcgcgggacccggagccgccgccccgctcggccccgctcgagctccagctgctctgctggcacctgcaggactgcggagatctccttggcgctgcggggccattggcggggatgggcgggggaggggggcctcgacggtttcccatccccctctggcaaccctaatcttccttctccatctgggccctggggcgtcttccaccacccaggccggatgctttaaaaaaaattgctttttaaagtgtctgtcgttgaaagaaattagtcttacccttgaagtcaggggcgcgtcctcgcaatacacatcttgttagggaaagtgttcggctccagctagggttctacaaggcgtttcttgttcaccgccggagggaagcaggctccggagtgactgccttctgaaagtcggtcttgtaacaattggatggatgcctttgaagagcccctgtccctattctatgcttgaaaacagcgtgcagtcctaatgttcaagaaccacgaccacataaaaacattgctccccttctgctgctttgaaaacgacccctaaattccgtgtagaagttgccaggtcgtcttgacgtacacttcgtttgtatgatgtttgtctgtcaaatactgtgatggaagagtgtatgcgggggaggagcagggaatttttaaaagcattttccggtcacctcagactgggagatcatgttctttcctgaaaaaaaaaaaaaaaaacacctaatgagggcggtgatctgtgatacttactttgtggttcctcctgccaagtggttacagcgatgggtgtgtccaggaggcaaggtgacatcttaaacaggagttagggatccttgccaactgaaacctccagcctgtatgggtgtggggagacgatt

SEQ ID NO: 4452 - DNA, 1128 bp, Artificial sequence
  DNA replication origin
caaaacactaggttaaaaagctgagttcagggtacgcgtttatcggaatctttcagcttcattctttatcggcttaaggtgttttcgtctacccctcaataaggggcgggaaagtgggtgagtgtggcagggaaggatacgtggaagaggaaggttctccagccaagcgcaaagcaggcgactctgccgcctggcgcagttgccaggacagcgcggcccgagcagcaacggcagaagccgcaccgcgtcccggcggcggctgcgagtcccagtgacgcattgcaggtacaaaccagccaatcagaggcaggctcaacgaccaacgggggacgcatcgccgccacgatgctcctccgcgccgcaaagtagcgcccctcaggggccgctccaccggccttttaacggctcgctggaaatgaaacccacttacgtcatccgttcgcccactttccttgatctcttgcctcatcgaccaaataactgtgaagaaaggggtcccgagaagagtttgaggggagggggttggccgggactcgtttgcgatgttccgttatctggatgcggcggagggatctggcggagggaggtgtttatgaggcgctgggggcggaggaggcgaattagtccgagtggagagagcgagctgagtggttgtgtggtcgcgtctcggaaaccggtagcgcttgcagcatggtgagtgcatcgctgagctgccggcgctgggcctgtggggggaagagactggagcgaactgactaaacaaaggaaactcgcctcccttacaccttcaaggagtggtttctgccagagggatggcgcgaaagaggccagggatgccggcgacggttgtgtcgcaggtgctcccccacccccattctcttcaggggggcttcctctagtgagttgagggccggacgcacagttcccgaggtggtgaagctcctcgggggcttggctggaggaggatgggtccgggatgagggacagcccagtgcacgggaaggagagaaagtgaaggaagggagagagggagcgtagagagccttctgtcgggcgtctggaaaggtcaagcagggggcgaattcaatccacccgaccgacggttagtgcgggcgccaggaagcgcct

SEQ ID NO: 4453 - DNA, 1818 bp, Artificial sequence
  DNA replication origin
cagtgcctgaaggagcctcagcagaagagtgccagggaggagaggcagagactatgattggaatacagagggggagcaggagaacagagtgtcgtcataggggtcaagagaggggagagaatcaagaagagaacagggtcaagagcatcatttcttggctagatgctatggctcacacctataatcttagcactttgggagacctaggtggaaagatcacttgaggccaggagtttgagaccagcctgggcaataaaacgagactccatctctacaaaaaattagaaaatcagctggatttggtggcacacacctgcagtcttagctactcaggaggctgaggcaggagaatcacttgagcccaggaatttgaggctacagtgagctgtgattgtgccactgcactccagcctaggcaacagagtgataccttgtcccccccaaaaaaaaaaaaagagtgtcatatcttcagcaatgtcaaggcaggagctgaaagtggccacagactggacaatgagaaggtcactcttgtcttttgtgcattttactgtcatagcaggctgtgcctcaccaaacatgccctaccatcacatttggctggtgatatggtttggctgtgtccccactcaaagtcttatcttcagttgtaatccccataatccccacgtgtcaagggagagaccaggtggaggtagctgaatcatgggggtggttcctccatgctgttcttgtgatagtgagtgaattctcatgatatccgttggttttataaggggctcttctcctttcacttgttcactcttctccttcctgctgccttgtgaagaaggtgcctcacttccccttcaccttccgccatgattgtaagtttcctgaggcttccccagcaatgctgaactgtgagtcaattaaacctgtttcctttataaattacccagtctcaggcagttctttacagcagtgtgaatggactaatagagcgggaaggagaagaggcagaggatggtagagagggaaggtttacttgctcaggagaaagatcagatgaactagagagagatggaaggtagaggagagagagaggagaatagatgaagccaagctgccaaggctgcagagctttcaggaggcggttgcctttggacaggtagaaggtagcacggcctctcagcttggaggaaggtaggaatgccggaggggaacatatgtttcttggtggggcagaggagtaggtgcatataaacaagggaattcctacctgatggcctctattttctcagcaaagctcaaagggtgggaaacacttagaagggccatggtggggaagggggaggtttgctgacagggacactaagaagtgtttctaggctgctcagcggcccactaggctatgcagatgatgactttgtagtagcgccaatctgcgtgggctgtgattttctccagcagagctcagcagcccaggagcccagatgtcagagtgtaggaagagctgcctgataaggctgggcggcagccagaccggagcagcagcagggcaaaggcggagaggagggaggctgggcttaggcaaaggagggtgatgagatggcccaggaagcataggtgaagtagagaaggaaatgaagaagttggggggaaggttctgaagcagtgacagaaaaatggcaggggaaagagactacaggttttgaggaggttgaaaatctagcacactgggagttaggagtgggcgggctggaaggtgggaggctctgatctgagtgggctggggaacaattcaaagcaatatgtaatcaagtgctaaataggctggta

SEQ ID NO: 4454 - DNA, 1129 bp, Artificial sequence
  DNA replication origin
aatccgcgcctcaccttcctgagctgcggcaaaagtcgccgtcgccgcggcaagcagaagcccgaacgcgaggacctgcgggggcgccatgctgcgcgcgcgccgagaagaggggcgcgggaggggcccgggactcgcgggagggcgtgcgccgggagtgggacacgaggagccggccgggcagcgcgaggcctggggcacgcgggtccgcgtcgggaggacagcgacgagggggtccccggaccgcgtcgaaggtgctcgctcgccgaaggactagcgctctgtgcgcgcggcggggcggagcgcacacctgcccgacctggcggccccgcctctcggccccttcccgggactgctcacctctggccgctggtgctcgttgatgagtcaccgcccgggagttgggggagtgagtaggctcccctcccccagccccggcgctgcagttggggcgcggccctctccacaggtgtgggcccgcgcgccccgctccgccccgccccaggtgcttcgtctccatggcggcgttagggatctttggtggcctccgaggaggtttgaagattctgtgctgagacttccttttaaccggaggagcgctgctctgaagccttgaagaatggggcctggggggaagggtgcgggaactggatagaggaacgtggaggctaaaggaaatacaaacacaggcagagaaccttccagaacactataaaaaagacctttgagcttttacctggcaatttaattatactcctttgaaattagaaagaaaaaaaaaagaaagaagaggaaagaagaaatcttggctctcttgggaagaaaatgagtgtttctttataattactcttaataattcttttttcgttttcataagcatttctagcacttgaagatgtaagaaaaggtgttcccaggctgagcgcggtggctcacgcctgtaatcctagcactttgggaggccgaggcgggcggatcacctgaggtttgaagttcgagaccagcctgaccaacatggaggaacgccgtctctactaaaagatacaaaattagccgggcgtggtggcgcatgcctgtaatcccagctactggggaggctgaggttgcagtgagcagagatcgtgccatt

SEQ ID NO: 4455 - DNA, 808 bp, Artificial sequence
  DNA replication origin
gggtgtggggtcgcgcattttcttcaaccaggaggtgaggaggtttcgacatggcggtgcagccgaaggagacgctgcagttggagagcgcggccgaggtcggcttcgtgcgcttctttcagggcatgccggagaagccgaccaccacagtgcgccttttcgaccggggcgacttctatacggcgcacggcgaggacgcgctgctggccgcccgggaggtgttcaagacccagggggtgatcaagtacatggggccggcaggtgagggccgggacggcgcgtgctggggagggacccggggccttgtggcgcggctcctttcccgcctcagagagtgggcggtgagcagcctctccagtgcggaggcacgggggcggaacgttggtgcttgtgcggattccgccgtccccaggttctgcttggctccggagggacgcccccctcagccctgaaacccgtgcctctccagccgccccggatctgaacttgtgatcacggagtgtttacgtcgtgccaggcattttaatgcattgttctagttcattttccagcagtcgcattcctcgccttggccctacatgtagcgctcattacaaacacggccagaatctcttattaacaaacagcagccaggagtgagatttaaaatagactgggggtttaggagacccttttatgacacgtaattctgctcccacgacgctcccatttataccgccggtccagctaagggtctggtaatggagcgccgttgaagagcagtatgatgaagtggtcaggaccaacggactctggagctgggctgctt

SEQ ID NO: 4456 - DNA, 1271 bp, Artificial sequence
  DNA replication origin
gtaatcccagcactttgggaggccgaggcaggtggatcatgaggttaggagatcaagaccattctggctaacatggtgaaaccctgtctctaccaaaaatacaaaaaattagctgacatggtggtgcgcacctgtagtcccagcttctcaggtggctgaggcaggagaatcgcttgaacccaggaggtggaggttgcagtgagctgagatcacaccactgcgctccagcttgggcaacaaaaaaaaaaaaaaaaaaaagaaaaagaaaatgagtctttactggctgggcacagtggctcacacctgtaatcccagcactttgggagaccgagacgggcagatcacctgaggtcgggcattcgagaccagcctgaccaatatggagaaaccccatttgtactaaaaatacaaaattagcggggcgtggtggcgcatgcctgtaatcccagctattcgggaggctgaggcaggagaattgcctgaacccgggaggcggaggttgcggtgagcagagatcgtgccgttgcactccattctgggcaacaagagcgaaactctccatctcaaaaaaaagaaaatgagtctatactttgctgttttcatactctcttagtgtggtgtaggcagccatgtatcccccttgtgcctctatttctccattctgtgaatgagtgtcttccactgctgtgcttttctgattccgtaacctttgtttgtttgtttgtttgtttgtttgtttgttttttattgatcattcttgggtgtttctcgcagagggggatttggcagggtcacaggacaatagtggagggaaggtcagcagataaacaagtgaacaaaggtctctggttttcctaggcagaggaccctgcggccttccgcagtgtttgtgtccctgggtacttgagattagggagtggtgatgactcttaatgagcgtgctgccttcaagcatctgtttaacaaagcacatcttgcaccacccttaatccgttcaaccctgagtggacacagcacatgtttcagagagcacagggttgggggtaaggtcacagatcaacaggatcccaaggcagaataatttttcgtagtacagaacaaaatgaaaagtctcccacgtctacctctttctacacagacacggcaaccatccgatttctcaatcttttccccacctttcccccctttctattccacaaaaccgccattgtcatcatggcccgttctcaatgagctgttgagtacacctcccagacggggtggtggccggg

SEQ ID NO: 4457 - DNA, 1430 bp, Artificial sequence
  DNA replication origin
ggctgacccccccacctgcctccaggacggggcggctggccgggcagagcggctcctcacttcccagtaggggcggccaggcagaggcgcccctcacctcccggacggggcggctggccgggcagaggggctcctctcttcccagtaggggcggccgggcagaggcgcccctcacctcccggatggggcggctggccgggcggggggctgacccccccacatccttcccggacggggcggctggccgggcagagggtctcctcacttcccagtaggggcggccgggcagaggcgcccctcacctcccggacggggcagctggccgggcggggtgctgacccccccacctctctcctggctgggcggctggctgggcggggggatgacccccccatctccctcctggatggggcggctggccgggcggggggctaacccccccacctcccttccggacggggtggctgccgggcgcagacgctcctcacttcccagacggagtggctgccgggcggaggggctcctcacttctcagacggtgtggctgccgggcggaggggctcctcacttctcagacggggcggttgccaggcagagggtctcctcacttctcagacggggcggccgggcagagacgctcctcacatcccagacggggcggcagggcagaggcgctccccacatctcagacgatgggcggcctggtagagacgctcctcacttcctagatgggatggcggccgggcagagacgctcctcactttccagactgggcagccaggcagagaggctcctcacatcccggacgatgggcggccaggcagagatgctcctcacttcccagacggggtggcggccgggcagaggctgcaatctcggcactttgcggggccaaggcaggcagctgggaggtggaggttgtagcgaactgagatcacgccactgcaccccagcctgggcaccattgagcactgagtgaacgcgactccgtctgacatcccggcacctcgggaggccgaggctggcggatcactcgcggttaggagctggagaccagcccggccaacacagcgaaaccccgtctccaccaaaaaaataccaaaaccagtcaggcgtggcggcgcgcacctgcaatcgcaggcactcggcaggctgaggcaggagaatcaggcagggaggttgtagtgagccgagatggcagcagtacagtccagctttggctcggcatcagggggagaccatggaaagagagggagagggagaccgtggggagagggagaggagggagagggagagggaaccttttgttttattccagtaggaccagctagaaacagaaggtgattgaccagtattagggatggaatcagggtacaattatggagacaggctatctaaacaattcactctcaccatttaaatcagctgtt

SEQ ID NO: 4458 - DNA, 1426 bp, Artificial sequence
  DNA replication origin
ccaaatagtatttctttaaaaaaattttttttgtttcattttattggataaagattaagaaagcgccagcagtgactgagagaagcaaaccacgcccggcggccccgcggcctggagagggtccccggcgcgggcggacgggcggtctacctggaggcgctggtctcggccagccggttgttcatgatgcccagcgcgcccacgccgcccgagaagccgttctggcgcgtgttgacgcacacgctgcgcgggtagccgttggccgtctccgacagctgcttctgcagcagcgccagcgacaccttgttggaggccgtgaggtcgcgcatggagatgagctcgcccgagaggcggcggccctcggcgtcgctgtcgcgggccgcggggtcggcaccgagcgcggccaggcggcggcgcagccgggagcctggggtgatggcattgcgccgggccaggggcgcgccaggagccgggcagcagcgcgcgcagcagcggcagctcagcttgcgcagcatccagttgagcacctgcttgatgaggatggagatgacgttgaagagcgagtaaatgcagcacacgccgagcaggatgaagaggaagttgcccaggcggtagagcccctggttccggtaggcggcgtgctggctgctcaccaggtccccgaagccgatggtgctgaaggtgacgaagcagaagtagagcgagtccacgtagtcccagccctccacgctggtgtacatggccgaggcgcagcaggacagcagcacggcgaacaggcccaggatgagcagcacgtggtacaccgagggcttccagcccgccaggctgtcggcctccgagagcgcggagccgcggcggaaggtggcgggcagcaggccgctgcggcgcagctggcgctcccggcaggcgcgcatgatgaaggccagcagcgagatgatgcgctccaggaagaggttgaagaacaggatggtcccagcgcagccgaacagcccgtaggcgatgaggaaggccttcccgcccaccgtcgcgggggtggtcatgccgaaacctgtggagacagggcagggtcagcgcggtcctggccgcgcaggtggtcctcactgggcgagggtggggggtgtgggggcgggggcatgcaggtgcttgcgcggctcctatctcgagtggcaccactcaggtggaggaagaacagcacttagtcatttatctcccttggtggcacttaataggtttcctgatcttggcagcccctaaactgatggaggagacatggcccttcatcttggggacctataaacccaagtggttgggacaggtagtcactaggaaggacccatcatgacacaaaaaatagaaaccactgctgcacaggtgcaaaccactgagctacccacaaagccaacaagggacacctgctctcccactc

SEQ ID NO: 4459 - DNA, 1774 bp, Artificial sequence
  DNA replication origin
ggtgcctctaggtggaagaaagggaaagggcgtgtttacaagaagaagagcacaagtcaacaatgagctatggatgcatgatgtcatcctctaggactaagcatccttagtacttttaaagcacttaaaaaaaaaaaaactctagttgctatagcaacttgatgcagctcttaaaaggggattttttttgagggggtcattttatatcttctatcaccataacaacatgatatagctttttaaagggtatttttatccaatttgtgtgtgccttggacttgggccatatttgccttttctatttaaaataatcagatcaagcatgacacatgaaaaatcattgaaggcaaggaagtgctttcatagactatacatatacacttagagagacatctctagctgctcatatgctgcacatggaggcagcctctctccctgcctccaaccagccatctgctgtggcttatcctgggcagttacagtccatgcctctgtatctgaactggcataccaaaccactccagaaggtgtgtctatgaaatccctcacttctcaagcccagcaaatccagccccctcctccaaaactgcacaggagagagtgccttagggtgactagaggtgtgaccagccaagtgccttcttccatcctgggattcaaagcaggagtggggggacacacacagccttgtcaaggtgataagcatgcgtttctgctgcactctatacaggtgagtaaccgagggtgggggctttgtttcacatgacacccagggcccagggaaagtgggggatgggaaaagtgagtgagaggagaggaagaaagaggaatgaaggggtggatggagagcaggggtggctccagaatttctccacaggagctcagaggcagcaatctggccacagagggaggggtgggggcctgaaggagtattgacacagcattcttcataaggttgagaaaacgtgaactgtttatatccaaaaaaagagagaagagatgatggaaagaataggggaactatccctgctcccagctaccccttggtaccactaatggttggaaaaagtggcaagggaacaaaaaaagggtcaagaaattggagaaggggctgggagctgggggagaacacaaggaagggaggcagaacaacagcagctgaagtcctggcctcaggctaacgggctttactttggggggcggtatagactgtaggagaagcaagtgggaaggagatgtagggaaagtgatcctggggcaagtggtcaccctctccagggtaaaggagttagaggccactgagggagaaaacagggtaaaagaagaaagcgggggagactatgaaaagaaataaaagcgccgagggtggagggagaaggggcttttgagatcatcctggagaggaaactgaggcctgggggttgtgggtggaaaacaggaaggaaccggtagcccttggcacgtattcttagaggagaaaacggaggctcacaaaggtcagatcacagagccggccagtgttggagcacaggcggcccggggtgagcgccagaggtgggctttcttccctcactgaaagccgggagggagagagagagagagaacgggggccggcggagaagagggcgagacgaaagtaagcaaagggacattagaagggaaggcagagccgagggacgcggaccgagcggccgagcagtggaaagggcggcaggtgaaaggcacagagaggaaagatgcgcgggggacgcgccgctcacctatggttgacacc

SEQ ID NO: 4460 - DNA, 1828 bp, Artificial sequence
  DNA replication origin
ggggtggagagttgggctgctgcgacgcctcccggtggctctggcggcaccaatgcggggcaccggagcaggtgtccgactgcggtgcgggctaccactccgccggggaacctcgtcttgctcctccctgcgcttcgcctctggaatctctcccttatctcatgccgcggtgaaactttgctcaagttggtggtgctctgaggtctccagggctggaggccgcgcgacgcgaatcgccgacactggattctcgggcgttagtccgaagtttaagttcccttcgttcactcctttgccctggatcgaaccgcagccccaggacgcagcgggttccactggaaacggggaatcggggagaggcggtcgctgggctccgggcgacctgggaacgagggcgtttgctccccctcccgaccgagcgggcggccggcgtcagcaccgcggacagcgcatcggtgccgcagccgcgggcgggcgccgctagggctgccaggggtccgaggcgcgggcaaggctgctcaccccgctgtgctgtgcaccccaaaccttccctgttttcctttctacctcccgtgtgcacccccctacccgccacccgaggcaggtgcggtcgctgaagcaggctgctgacagggcggggacgctgcggaatagagacgggggaggagtcaagcgcgggtagggggccaaggtgccacagggagaaagagcccaggcccggcggactgccgggctcctcgcgccaccccagctcaccgacccctctagcccggggcggggaataacaccctgggtgcggtagagagtagaggaatagaggaggtgtaggggaagctcactggcagctcccctgaggccggcgcggggaacggtgtgctatggaacgcccctgggaaatggtcgcccccctacgccccaccgcggcaggaaaagacgacggatgccccgcgcggctgcgggtgctcctctgctggacacaagccggctttgccggggccacaaaagttctggcgtggaacaccctcagtacaggcggaaaatcatcctcttcgggcagccagctccttccctgtcctcccgcttactatggactgcgggaagcaagaccctggtgatgatatgatggcagaaaataaaaataataatggtgactgtacttagatatcccaggtgggtgagcggtggcaaaaagcagacccctgccccctgccctaccgcccatttccaatcccgggctaaggtcaacccaaagtggtggcagcagcgtcagtcaattacgggtcatagtactaaaagtgttccctccactactcactgagcatttcccgccttcgaaactagggccggtcgcagacaggagagctgctgaaagctgaaaggcatttgacttggggtgttgattgtcccaaaccagggtgctctggagatttggttcttcccagatatgctgcctcagtttatagatggagccaagtacacttccctctgtggtagggacagatgggtggaaactccaccaccaccatttcagaactaggcttcctggcactggatggcatgtggctagttttgcagggctcttcttacaatgggcctagggtatcgttgtgtgagggggagaatatcttatccaccaagaaagtcgaacctccctcttttctggagcacagcagaaggtgtatacaaacacaaatttttgttattgcagactattgttattattgccaaaacagtcaactctttctccaaggctttggctcccctggactctccacagatgctgccctaggccctgttcccccagtacccccactcttaacagcttcag

SEQ ID NO: 4461 - DNA, 861 bp, Artificial sequence
  DNA replication origin
gtacagggtgctctgtcgcgacataccgacagccggcaaggcccaaccgttctgtcggacggagctcctaaaagcaccgcatctaccgcgcggctcctgctggcgggaaatctggggggaggcgcgctccgccggaggaacccgggccccagtggccaatcaacaggcgcctcgccgtgcgcgggcggtgcgcgccaggccccgcccccgggcgcgcggcgacgtggggaagggcggggctggcacactggtgggtaggggcggggctggcacgctggcggtgaggggcccgccctgccgccgacgcctgggccccgcgcggggaactgctgagctccccttccctcacgccgcggggctggccgggccggaacactccgacccggggttagttgcggccgcggggctagcaggctcggaaagccctgcctctctggagcggaagcgggaacagcgggggcgcgcaccgcccgggcggggataaccggggggacccgaaaggcctcggaaaggggctcgcggggagaaacgcgtccagcgctcgcgtgacctcctgccgttagagcattttcgcaaggagacggagcgaaagggaccaaactttagtcagcagttcaccttcacgttgtattctcaagatttgtatagagtaggcacttggtaaacgctaaatgaatattgtaatagcattcgttagcgatgctgttgtgtatggtgaaagcctgcagctgtacaaagttttcctttgccaggcactgatcccagcattttacatctggtaactaaatcgatcctctcaataacctgtgacgtaagtacttaagggccacagtccgttatctgagccctttgacccaggtg

SEQ ID NO: 4462 - DNA, 1044 bp, Artificial sequence
  DNA replication origin
ggcggggcctggcgcgcaccgcccgcgcacggcgaggcgcctgttgattggccactggggcccgggttcctccggcggagcgcgcctccccccagatttcccgccagcaggagccgcgcggtagatgcggtgcttttaggagctccgtccgacagaacggttgggccttgccggctgtcggtatgtcgcgacagagcaccctgtacagcttcttccccaagtctccggcgctgagtgatgccaacaaggcctcggccagggcctcacgcgaaggcggccgtgccgccgctgcccccggggcctctccttccccaggcggggatgcggcctggagcgaggctgggcctgggcccaggcccttggcgcgctccgcgtcaccgcccaaggcgaagaacctcaacggagggctgcggagatcggtagcgcctgctgcccccaccaggtagcggggtgggggtggggtcgaaggcgggggcatagcggcggggcgcttggaacccggcgaggggaggctcgcacagggggttgggggggtgcacggcctggccctgggctcggaggaggcggggccgcagagttggcttgaatgagtgcaggggtcgagtctggagcatttgggggtgtagcttgtaaacagggtcggaggagagaggctgtgcaggaagagggctgcaggggagacgcggagagttcgggccttttggagggaggagacgcgtcccgccaggtgggggtgctgggctaaggaaggggcgacgcgcgcagctccgggtggggagggggcctgggaggtgggagcactgggggtggggcgagaaggggaaggcgcccggcccacttggtgggcggggcggggggcggggtggcgggaaggaggaatgcctgcgggaggccgaacggggagagtccggtggtgtggggtgcgaaaggaggttcctcggccggcgcggagatagtgagttggggctccagtagtcgatcgaggtagacacttagaggtagttaagagccgcggtcgccgagacgccttggggacggtgggcc

SEQ ID NO: 4463 - DNA, 1026 bp, Artificial sequence
  DNA replication origin
tcggaggagagaggctgtgcaggaagagggctgcaggggagacgcggagagttcgggccttttggagggaggagacgcgtcccgccaggtgggggtgctgggctaaggaaggggcgacgcgcgcagctccgggtggggagggggcctgggaggtgggagcactgggggtggggcgagaaggggaaggcgcccggcccacttggtgggcggggcggggggcggggtggcgggaaggaggaatgcctgcgggaggccgaacggggagagtccggtggtgtggggtgcgaaaggaggttcctcggccggcgcggagatagtgagttggggctccagtagtcgatcgaggtagacacttagaggtagttaagagccgcggtcgccgagacgccttggggacggtgggccttcggcctaggtgaggggccgccgagggggtgggccacgagctgcgagcgcgggggggtgtgtcaccatggggaccgcggggcctaattgggcggggcggggccgtggggagccgaagtgctgggatccggctgggtccttcggtaggtaggctgcacgtgcaccgagacgaagatagaatattttgacgtatgtggaaattcgtgtcgagtggaaaatattttattttatgaaatagtgtaatttttatggggcaccactgggcttttagaggccttaatcgggcgctggacaaagatgtgtggacgtgagtgactccggggaagcctgtcgggagttgtcctcactttatgggcagttaagtgcttttttttttttttcctttttgagagagagtttcgctcaagtccaggctggagtgcaatggcgcgatctcagctcaccgcaatctccgcgtcccggcttcaagcgattccccagcttcagcctcccgagtagtcgggattacaggaatgcgcccccacaccccgccaattttgtatttttagtagagacggggtttctccatgttggtcaggctagtctcggaattcccgacctcaggtgatccacccgcctcgg

SEQ ID NO: 4464 - DNA, 1517 bp, Artificial sequence
  DNA replication origin
gcgtgtgtgtgtccctccgccaacgccgccacctcagcccggcaaatgaactccgtccgagccgccaaccggagacccaggcgagtgtcgcggccgcgcccggtgcagcaacagcagcagcagcccccgcagcagccgccgccgcagccgccccagcagcagccgccccagcagcagcctccgccgccgccgcagcagcagcagcagcagcagcctccgccgccgccaccgccgcctccgccgctgcctcaggagcggaacaacgtcggcgagcggggtaaggccgcgctacctcccaaccgcccgccttcccgggcaccgcgggaagggaggccggggcgggcgggcgggcgggcgggcgggggcggcctgcgcgccctgggggtgggagacccaagctgagcggaggcgggtcccccggtgccgcagtgtcagcccgggccgggcccggccggcaggaaaagccgcggcttcccttctcgcctgggctctcgctcaggccgcgctttgtttggtttcgggggctcagcaccctccacccccacccatccctttggcttctccgctcgctcacagaccccgcgggagtctgttggtggccggggggaaggcgagcggcgtgatttctcccttttctgccgccttccatggtttagtctgcctctttctagtggtaggtggggggagcgactgggagcgatcgggtggtggggttggctggggaacttgttttccccctcttttctgtgttagcctaccccttcctgaggaggagcgggagaggggaatcggggtggtctgtggtgttggcaggggaacttgtttcccccgcccccccgtccctggtcacggggtagggggagcagcgactcctctcccaaccccacagtgtttgctgcgcagtttgtctttagttacgaacccctgggaaggacccattaaatcaagacctttaaataaataaatatagaatccatcggccatttccagccccctccctcgtgtgcagtgcagttacccttccgctctatcgacaccccctcgcctgtcctccccgagcgaccccccatgccgcggtgctactctccgtctcctagtggggtttgaacgccccttgcttagaactggccccttgggatattttgtgtgtgtgtgtgtgtgtgtgtgtgtgtgtgtgtgtgtgtttgcgcgcgcgcgcgtgtgtgtgttgtgtccaaggcctagtgaaatgtgtcatttggacccaactgtttagcactgtctggtaaccaccattgtctaagggctgaggctccccgaggttgaaatcctgctttagcaaaaataatgttcagttctacttggatgatgtggttattttgggaggtttatgagggggggtgttgcaccttggtctccaaacataaccattctctttattaattagctgttcgcagtagtggtagaggtcagaaccgtatttatgtgtacggttgttgttttaaggaggaggagaattgttaggagacattttgcgt

SEQ ID NO: 4465 - DNA, 828 bp, Artificial sequence
  DNA replication origin
gctgttgctgcaccgggcgcggccgcgacactcgcctgggtctccggttggcggctcggacggagttcatttgccgggctgaggtggcggcgttggcggagggacacacacacgcacacgcacagcgagcttcggggcaggagaaaggggtggggagagtgggagaggggggaggaaggagagggggcgaggggaaggggagacgctgagggcggagggggcgagcgggaccccgagtccggagaaaggcccgggtagacagacggagaccgagcgaggccggccgggagggcctgacgcacggggaaggccgaagccgccgggcggggcggccgcgagggacgaaggcagaaagacgggcagaccgagagaaagaaagaaagggcgtccgccgcttggggatcccgaggcgaagcgcggcggcggcggcggcggcggctgaagagacagatcccggtcccgccgactcgcgagcggcgtctccggcagcggggggagtgggcgggcgggtgaggaagggagaaaaagagagggagagaagggagggagggagcagggggcgcccggctcttttttttccctcttcctcccccccacaccccctgaaagagatttctgtgaggaatttttctctctttcttcggtctcttctctctcctcccccccttctctcctcggcgaaggggaaatgagtgtgaagggaggagatagggggaaaaagaggcgtcgtccttcctcctccttaaaggaacctttcctcctcctcctcgtcagccctgtcgccgctgcttctgctgctgctccgtggcaggaggagccattgacacc

SEQ ID NO: 4466 - DNA, 1454 bp, Artificial sequence
  DNA replication origin
gcggcggctgaagagacagatcccggtcccgccgactcgcgagcggcgtctccggcagcggggggagtgggcgggcgggtgaggaagggagaaaaagagagggagagaagggagggagggagcagggggcgcccggctcttttttttccctcttcctcccccccacaccccctgaaagagatttctgtgaggaatttttctctctttcttcggtctcttctctctcctcccccccttctctcctcggcgaaggggaaatgagtgtgaagggaggagatagggggaaaaagaggcgtcgtccttcctcctccttaaaggaacctttcctcctcctcctcgtcagccctgtcgccgctgcttctgctgctgctccgtggcaggaggagccattgacaccgccggagcctccactcgcccagtcggtccctccccgccgcggggctggccgggggcgcgggggagggccgcggggcggcggggggaggggtgggtgggcggggaaaggaggggcggggattccgtccaggcggccaatctaaggcgcccgtacaaccttccggccaatggggcctccgctcttatcgcgaagtcccttcaacgccctgtttcctctctcgggtttcctccctcccccgcctaggagggggaaagaggaaagggggagtgtggcggggcgggtgataatggggaggtatcagggcaaataatagagcagggggtgggcgaagagagcgccagtgcgtagcgacgattctgggagaggaggtgctcggaggaaagggcgggggttgctgatgtaatggggagaagtgattaatccttcggttcgccgtttcagcttcccccctaccccaaccttcacccgatttttttgagctgaaaaaaaagtggaacgagggagccaatctttggtaactcgggttttctgtggtaggtgggttcaaaatctgagctgtagggagcgctagagatttcgtgccctttagccaagctgagggtatttgcaaaccctgaagatttccgtctccgagctttgggcttggtaagcgaagtttggagtcggtgcctaatcgtatatcatctaaaccttgaaaaggctttgacctttggccaatttgatttgttctttgaagaagtgtatacaatgtgtgggaaaataatatgtgagaggagagaagtaaatgtgttgatgttgtgattgtttatgtgatttaatttttaattttttttttttaggtcccacaaactgcaaggaaaagaaaaaccctcaacaggaattacctttatacctgatgcccccaacataatctctctccaagggaaacgtgtttttattgccttgcggctgaaaatgtattctcgattctcccccttctctcttttgttgtgcattttttggatgtggtaaaactggcagtttatctgattatctggttttcagaactttgggcgat

SEQ ID NO: 4467 - DNA, 1247 bp, Artificial sequence
  DNA replication origin
gccgagcccccttcctcggggtcgcgggaggcgggactggagggaggggtggggctaatcgccttggcgccgcgttgccatggcagcggggaaggggagggagggggaggaagcgagcgggagggggatgtggtgctgccggggccgccactgcagctgctgctgcctgctggttgccgcgtcttcccggaggcgactgctggaagctgcagggaacagctgcggtgctctgccatattgtgtcttccccggccggtccctcgcctcccggccgagctgacggtgagtcccgggcggagcggtcccctccagggtcggcgctccccgccccagcccgcggcgcagctcccgggcgcggaggcagcgcgagcgacccgcgccaggcgtggggcgcggaggcggctgtcccgtgacgcgcccggacatttttgtccagtgaggaatttgcgccggcgcgggggtgtccccggcgcgcgtatcgggtggtgtgtgggctccgggggatgtcgaactgaggggagtgtggcttgtgaggagttaggagtttttcctgagaggtaatgaccgcccgggaggggctgtcgcgcggcggaaaccgcggcgaggggtgtcgtctctccgggaaggcgtggagggggccccaaggaccctcagggctcggctcggggctggaatctgctgttagggaagtaccccaagcacctcggagcctttgcaacgccccctcctctggcttgaagtggagcgagacatgtcgggctcggagtcctcgtccggccccagttgggactggctgggccccgccaagtagtgcacggggaggtgccgggggcggccgggcgttgtggtgggcagaggcgggtcccgggtgtgtgtgggagcgaccccggcaccctctcgcccctccaccgcctcgagggggcctcagagggtggctgtcttgggagctactgtttcagcgctgcaatatggacacttcctgttcgccgcctcctttggggccgtggttacctttgccttttagtcctctttcctggcaaggtgagaggtctgcggtggaagaggccttcagcctttcaagtttgccccactgcagcagcagcctgtgtggaacccggcaggacggtggtagttagcggaaagcagcccatgtgctccgtgctccatcctccactacttaactccacccccttttgcacctttgcaaaatgcctctttttccactgcatctctcgggagttggggtg

SEQ ID NO: 4468 - DNA, 1170 bp, Artificial sequence
  DNA replication origin
catctcctgggagctgcaggtggaggcaccgtaatggtggacggagacggctgaggggaaaggtggggcgcgctcgcgtgcccctcccgcagtacccctaggtcccgacaagtcgctgccacggcaacctgaggccgcagggcgggggaccccctactcccagaccacgatgggtaccttcgagtactcctgagccagcttctggtacttcccctgcaactcagccgaggccatggcctcccccgccccgtacaggccaggccgcccaggcggctcagcctgtctcccgcccccaaacccagacacgctcccgggaacgggtcaggcagtatctgcctgcttggccaccgcagccgccgccgccgccgccgccgcgcctcctcctccacttccgggttcccggggtgggaggaaggtggagtggggccgggggcggagcgaccacagagggcggggcgacgtctggcgtcagtgccccacccttcgcgcccgaatacgtgcgtgcgtagcctcgctagcgtgcctgggctgtgcccctgggaccagggggcgccatcttgactcatggtccaagatggcgacctggaacgctgagcgagagaatcaagacgggaagagactcatgagagcctatagaatgggcgggggacctaggagagggacgataattgcgaagaccagagggccggaagaagaaacattctaagcgcatcaagaattctggccgactccccacagccccgggttcccatggcaaccgcctggcgcttgatggttacatctttcagcacaagcgtggaaagatttgtgtattcggctattttgtcatccgcatatgatagcacaggacatgctctgcactgtaaactctcagaccttcccgatatttgtaactttggctgctgccactggccccggctccaaaccttcagtgtcctgtattttgacatttctttgtgtccgtctctacccacttcattctcccactcctacccctttacacacaccacatcagagcttttttgtggggactgagtaaaagacctttaggaaatttcaggtatcgattccttctatgcatgcagagtagatatgaacagcaaaaataaaaaataaaaaaattgaagcagaaatagtctgcctgagagattttatgtggatactgcttga

SEQ ID NO: 4469 - DNA, 966 bp, Artificial sequence
  DNA replication origin
tgaggggcgcctctgcccggccgcccctactgggaagtgaggagcccctctgcccggccagccgccccgtccgggagggaggtgggggggtcggccccccgcccggccagccgccccatccgggagggaggtgggggggtcagccccccgcccggccagccgccctgtccaggagggaggtgggggtgtcagccccacgcccggccagccgcctcgtccgtgagggaggtgggggggtcagccccccacccggccagccgccccgtccgggagggaggtggggggggtcagcccccctgcccggccagtggccccgtccggtaggtgaggggcgcctctgcccggccgcccctactgggaagtgaggagcccctctgcccggccagccgccccatccgggagggaggtggggggggtcagccccccccgcccggccagccgccccgtccgggaggtgaggggcgcctctgcccagccacctccccgtctgggaggtgtgcccaacagctcattgagaacgggccaggatgacaatggcggctttgtggaatagaaaggcgggaaaggcggggaaaagattgagaaatcggatggttgcagtgtctgtgtagaaagaagtagacatgggagacttttcattttgttctgcactaagaaaaattcctctgtcttgggatcctgttgatctgtgaccttacccccaaccctgtgctctctgaaacatgtgctgtgtccactcagggttaaatggattaagggcggtgcaagatgtgctttgttaaacagatgcttgaaggcagcatgctcgttaagagtcatcaccaatccctaatctcaagtaatcagggacacaaacactgcggaaggccgcagggtcctctgcctaggaaaaccagagacctttgttcacttgtttatctgctgaccttccctccactattgtcccatgaccctgccaaatccccc

SEQ ID NO: 4470 - DNA, 1331 bp, Artificial sequence
  DNA replication origin
gacccccccatctccctcccggacggggtggctggccgggctgaggggctcctcacttcccagtaggggcggccgggcagaggcgcccctcacctcccggacggggcggctggccgggcggggggctgacccccccacctccctcctggacggcacggctgcccgggcgggggggctgaccccccacctccctcccggacggggcggctggccgggtgggggggctgacccccccatctccctcccggacggggtggctggccgggctgaggggctcctcacttcccagtaggggcggccgggcagaggcgcccctcacctcccggacggggcggctggccgggcggggggctgacccccccacctccctcctggacggcacggctgcccgggcgggggggctgaccccccacctccctcccggatggggcggctggccgggcggggggctgacccccccccacctccctcccggacggggtggctgccgggcggagacgctcctcacttcccagatggggtggctgccgggcggagacgctcctcacttctcagacggggcagctgccgggcggaggggctcctcacttctcagacggggtggttgccaggcagagggtctcctcacttctcagacggggcggccgggcagagacgctcctcacctcccagacggggtctcggccgggcagaggcgctcctcacatcccagatggggcggcggggcagaggcgctccccacatctcagacgatgggcggccgagcagagaggctcctcacttcctagatgtgatggcggccgggcagagacgctcctcactttccagactgggcagccaggcagaggggctcctcacatcccagacgatgggcggccaggcagagacactcctcacttcccagacggggtggcggccgggcagaggctgcaatctcggcactttgggaggccaaggcaggcggctgggaggtgtaggttgtagtgagccgagatcacgccactgcactccagcctgggcaccattgagcactgagtgaacgagactccgtctgcaatcccggcacctcgggaggccgaggttggcggatcactcgcggttaggggctaagtgcaaaattttttgttaaagcctttggtagtctttgaaattcaataaagttcacaagtattttgcaagcactccccatagacttggagacttaaatattattttttgtgtgctgaagtttgcttttgagactaagacattactaaagttaatgccaatcttttataactgctttgtatataggaccttaataaagaattttaaaaatctgtcaggtgcgg

SEQ ID NO: 4471 - DNA, 908 bp, Artificial sequence
  DNA replication origin
ggagggcctcggcccggccgcgaccccgtctgggaggtgaggagcgtctctgccaggccgccccgtctgagaagtgaggagaccctccgcctggcaaccgccccgtctgagaagtgaggagcccctccgcctggcaaccgccccgtctgggaagtgaggagcgtctccgcccagcagccgccccgtccgggagggaggtggggggctcagccccccgcccggccagccgccccgtccgggaggtgaggggcgcctctgcccggccgcccctactgggaagtgaggagcccctctgcccagccaggagcccctctgcccagccagccgccccgtccgggagggaggtgggggggtcagccccccgcctggccagccacccagtccgggagctgaggggcgcctctgcccggccacccctactgggaagtgaggagcccctctgcccggccaccaccccgtctgggaggtgtacccaacagctcattgagaatgggccatgatgacgatggcagttttctggaatagaaaagggggcaaggtggggaaaagattgagaaatcgaatggttgccgtgtctgtgtagaaagaagtagacatgggagacttttcattttgttctgtactaagaaaaattcttctgccttgggatcctgttgatctatgaccttacccccaaccctgtgctctctgaaacatgtgctgtgtccactcagggttaaatggattaagggcggtgcaagatgtgctttgttaaacagatgcttgaaggcagcatgctcattaagagtcatcaccactccctaatctcaagtacccagggacacaaacactctgcctaggaaaacagagacctttgttcacttgtttgtctgctgaccttccctccactagtgtcctatgaccctgcc

SEQ ID NO: 4472 - DNA, 1313 bp, Artificial sequence
  DNA replication origin
gagcacagggttgggggtaaggtcatagatcaacaggatcccaaggcagaagaatttttcttagtacagaacaaaatgaaaagtctcccatgtctacttctttctacacagacacggcaaccattcgatttctcaatcttttccccaccttgcccccttttctattccagaaaactgccatcgtcatcatggcccattctcaatgagctgttgggtacacctcccagacggggtggtggccgggcagaggggctcctcacttcccagtaggggtggccgggcagaggcgcccctcagctcccggactgggtggctggccaggcggggggctgacccccccacctccctcccggacggggcggctggctgggcagaggggctcctggctgggcagaggggctcctcacttcccagtaggggcggccgggcagaggcgcccctcacctcccggacggggcggctggccgggcggggggctgagccccccacctccctcccggacggggcggctgctgggcggagacgctcctcacttcccagacggggcggttgccaggcggaggggctcctcacttctcagacggggcggttgccaggcggagggtctcctcacttctcagacggggcggcctggcagagacgctcctcacctcccagacggggtcgcggccgggccgaggccctcctcacatcccagacggggcggcggggcagaggcgctccccacatctcagacgatgggctgctgggcagagacgctcctcacttcctagatgggatgggggcccggacgaggtgctcctcacttcccaggtgggatggcggccgggcagagacgctcctcactttccagactgggcagccaggcagagacgctcctcacttcccagaggatgggcagcccggcagagacgctcctcacttcccagacggggtggcggccgggcagaggctgcaatctccgcactttgggaggccaaggcaggcggctgggaggtggaggccgtagcgagccgagatcacgccactgcactccagcctgggcaccattgagcactgaatgaatgagactccgtctgcaatcccggcacctcgggaggccgaggctggcggatcactggcggctaggaggtggagaccagtccggccaacacagcgaaaccccgtccccaccaaaaaaacacgaaaaccagtcaggcgtggcggcgcgcgcctgcaatcgcaggcactcggcaggctgaggcaggagaatcaggcagggaggctgcagcgagccgagatggcagcagtacagtccagctttggcccggcat

SEQ ID NO: 4473 - DNA, 958 bp, Artificial sequence
  DNA replication origin
cccaaatgcacctcccttttgtcgagctcccatttctctgagccttaggagcccaggagcgagtgcagggtagaaagaggggagcgaggggataacccgcgagaacttggcatcgcagacccaccgtgtccgcctcgcaaggatgccggtgacctgtagattgcaataggcactgaatgatgcttgctgctgccatggaaatggtggatgtggtgcgctcccaaactggatgccccccacgccactcctaggaggccgctgagggtgagcgggactatccaaagcagggccaggcgcccccctgcgccgccgccgccgccgccgccgccgccgcccccgggcgagcccagctcggcgccgcaccggagcatcctctggtacatggcggggcgcccgccgaggggcagccgccgcgggaggcaaagtttggggcgcggggagaggagagggcgcaggggagcgggcggcgcggagtgggctgaggggccggccgcctcaccgcgccagggcacccatcctctccctccttcggacagtcttctcggggtcctggagtccgccgtgcctagcaccccaaacaatccgaaacatagccgaggcgaatgcagctggagaggggcttgtccggaaaggcagccccgggaacagcaagcgcggagcgggtggctgctcccagatttccagggctccaggttctcgagagatactcccaaagagtttcgggcgagagtgcgtgccggcgggtggggggccgagaaattgtttaaagctcctcctggaaggtcctcacttctacatgacagacatccaccgcgaatccactaggtaaatccatttagctttgtgtgcggggactagggaggccacttcgccggcccaacctcctttcaagacagaagcagaccccatggaatccaggcgccccttccctccattcagccccggccggctcgcccgc

SEQ ID NO: 4474 - DNA, 1336 bp, Artificial sequence
  DNA replication origin
tggagaggggcttgtccggaaaggcagccccgggaacagcaagcgcggagcgggtggctgctcccagatttccagggctccaggttctcgagagatactcccaaagagtttcgggcgagagtgcgtgccggcgggtggggggccgagaaattgtttaaagctcctcctggaaggtcctcacttctacatgacagacatccaccgcgaatccactaggtaaatccatttagctttgtgtgcggggactagggaggccacttcgccggcccaacctcctttcaagacagaagcagaccccatggaatccaggcgccccttccctccattcagccccggccggctcgcccgctagcgccagcctcccccgggcagcgcgcggagcagcggcgcgcatcgcctgctcccgaggcaatctccgcgtccgccgcctcctgacacttacgcccggcgaggggttcagagggaagagtgcgcccttctgaaggaagtgggaatcgaacggcggaaaggcagctgagaagaagatgcagacgaaggagtaagggagagaaacagaaaaagaaaaagaaaaagaaaaaaagaaaagaaaaaccacacacgctggtgaagcaaggggctctatgcaaatctgcagtctccaaacagcaaatcactgaagctcggatgcaatgcagaggacgagcctatgtaacgagggaggctggtctagcttcccacgaaaatcgccctgctttgcctctcccttgcattctccacgcatcaaagggacacgtgtaaggcgaaacgggaacacctaaaaagcaactctccctccaccaggtgatccctccatctgaactacaatggcaaatggcacccttcccctacccaatggtttagatgtaaccagtgtctttagagatcttaaaagggagagaattcgggtctttttattggaccaaacttgttctaccaggtgtttaaactcaatctgctaaatatggcttgataccttgtactcaagcatcagtcgcgatgatctgttaatcacatatgttactcataacaaggattcttcttcccattaccatattatatctcatataaggcagtggaagttcaggggaccaaaactcacaaggagggaaaaggatgcattaatttggcagctgcagaagaggcagaaagtggaagaatgggaagagaggaagagaagggtcaggagagaaacaggaagaaagcagaaaagaaagaaatggcatgaataaaattgcttgtatttcagtcaatattttaggaatatttaagatcttccaagatctctatagaagccccgctgtgatgatctttgctaaca

SEQ ID NO: 4475 - DNA, 890 bp, Artificial sequence
  DNA replication origin
tgtctctgcccggccacccatcttctgagatgtggggagcgcctttgccccaccgccctgtctgggatgtaaggagcgcctctgcccggccgcgaccccgtctgggaggtgaggagcgtctctgcccagccgccccgtctgagaagggaggagaccctccgcctggcaaccgccccgtctgagaagtgaggagcccctccgcccggcagccgccccgtctgagaagtgaggagcccctccgcccggcagccaccccgtctgggagggaggtgggggtcagcccccgccaggccagccgccccatctgggagggaggcggggggttcagccccctcccggccagccgccccgtccgggagggaggtggggggggtcagccccccgcccggccagccgccccgtccgggaggtgaggggtgcctctgcccggccgccccgtccgggaggtgaggggtgcctctgcccggccgcccctactgggaagtgaggagcccctctgcccggccaccaccccgtctgggaggggtacccaacagctcattgagaacgggccatgatgacaatggcggttttgtggaatagaaagcggggaaaggtggggaaaagattgagaaatcggatggttgccctgtctgtgtggaaagaagtagacgtgggagacttttcatttcgttctgtactaagaaaaattcttctgccttgggatcctgttgatctgtgaccttacccccaaacctgtgctctctgaaacatgtgctgtgtccagtcagggttaaatggattaagggcggtgcaagatgtgctttgttaaacagatgcttgaaggcagcatgctcgttaagagtcatcaccactccctaatctcaagtacccagggacacaaacactgc

SEQ ID NO: 4476 - DNA, 1295 bp, Artificial sequence
  DNA replication origin
aatttttcttagtacagaacgaaatgaaaagtctcccacgtctacttctttccacacagacagggcaaccatccgatttctcaatcttttccccacctttccccgctttctattccacaaaaccgccattgtcatcatggcccgttctcaatgagctgttgggtacccctcccagacggggtggtggccgggcagaggggctcctcacttcccagtaggggcggccgggcagaggcacccctcacctcccggacggggcggccgggcagaggcacccctcacctcccggacggggcggctggccgggcggggggctgaccccccccacctccctcccggacggggcggctggccgggagggggctgaaccccccgcctccctcccagatggggcggctggcctggcgggggctgacccccacctccctcccagacggggtggctgccgggcggaggggctcctcacttctcagacggggcggctgccgggcggaggggctcctcacttctcagacggggcggttgccaggcggagggtctcctcccttctcagacggggcggctgggcagagacgctcctcacctcccagacggggtcgcggccgggcagaggcgctccttacatcccagacagggcggtggggcaaaggcgctccccacatctcagaagatgggtggccgggcagagacactcctcacttcctagatgggatggcggccgggaagaggtgctcctcacttcctagatgggatggcggccgggcagagaccctcctcactttccagactgggcagccaggcagaggggctcctcatgtcccagacgataggcggccaggcagagacgctcctcacttcccagacggggtggcggccaggcagaggctgcactctcggcactttgggaggccaaggcaggcggctgggaggtggaggttgtagcgagccaagatcacgccactgcactccagcctgggcaccattgagcactgagtgaaccagacaccgtctgcaatcccggcacctcgggaggccgaggctggcggatcactcgcggttaggagctggagaccagcccagccaacacagcaaaaccccgtctccaccaaaaaaatacgaaaaccagtcaggcgtggtggcacgtgcctgcaatcgcaggcactcggcaggctgaggcaggagactcaggcagggaggttgcagtgagccgagatggcagcagtacagtccagcttcggcttggcatcagagggagaccgtggaaagagagggagagggagaccgtggggagaggg

SEQ ID NO: 4477 - DNA, 1290 bp, Artificial sequence
  DNA replication origin
ccttttcagaggcgtcaggcttgagcgtctatctccaggagtgcgggaggggagaacaggcaacggaggggagcaggaggaggaggaggaggagaaggaggaggagggggaggagagggaaagagctgggaaggaaaaggcggtggtggagcctgagaaggctgggttacgtgacgccgggtgctgtccttctgaaagagaagggcggagctgagctctccgcagtaccatggagagcggcgggcccgtcctttggctggggaatgggtgggctcggcccgtggtcgcagcccctccaggtctggatgctgcggagcgaggtgcttttacctttgcatcgtccccttgcagggggagcctgatcctgggggcggggaccttccgcaagcgcttctaacttgtcaccaccctctcttccccatcggaaagaaagaaagagagagagagagagagagagagagagagagagagagagagaacgaacgaacacgaaccagagaaccacgtagcctactgagcatgcccaggcccctgctagacccatggaaagctgtatggagattccacttctccggggtttggtagtgattgggcggggatacctgagagggtgccaggaaagggtccagcagtcaaagagaaggggccaaggagtcgataattatgatgagctctggctttacttgtgcaccttggtctcctgctcggaacccttgaaaagaagctgcagcttttcgaggaatgcaggggcaagcaagactcacacaggcactggcattcttctagatccgatgtcccttgccccaccccttactgtggctctgccttgggtaatcacaacaaatcttcatgacttgcctaggctgtgccaaaaagatgtaaaaggaacccaccagggtaagatgccaacttgcagacgacgatcaactgtgtctgacaaggtgctttttactgcagcctgtcgtcattctccagccttctgtgctctgtcttgaaccaagttttctacctgtttaactcttccctccgtctcctcctcccttttgcagctggtaaaacctggtgaaagtaaaactgggtgtgaggctctaaccatgcaactgggcatgcccaataggcattgctgggtttggtgagaaaggggttaaatctaagggagcttacagattaggtggtagaggagttcggggtctgtggctttaaattatggtttgcaccctatggacatttaaattcctattcctgtatattcctagcctgggttagttttggagcagatacagacatttt

SEQ ID NO: 4478 - DNA, 1285 bp, Artificial sequence
  DNA replication origin
ctatcatgaccgcctgcgagtagttgagcgtggagcccctgttgtatagggagctgatggcgttctccatcgtgttgaactgctccagctggtgggacagagcattggcctgcctgaacgccatctgctgctcatagtacgcgtccccaaacacgctgcccagagtggaagtgtgttgcggggagctccctggggagaagccttgattggagactggcgaggtgggagactggttggccgaggagccggggctagtgccgctactgctgcagaggcggcgccgaggcgatgtcgatccccatcgacggcaggccgggattcttcgtggggactggaagagagaggacggtaccgtgaccgcgagcgggggcggctgtggcccacgattcaggttggtgctgggcaacaggggctgccggggggcaggcggacgggcgcctgtaggggcggtggggttggcggctgctgagacccaggctaagggggcggcggaggctggggctgcggcagcggctgctgggagtccgtctgggtgaagaaggcgtagggtacctgctgctccagagacagggcattcaaggccacggcctgagtgatgtatgacagcggggacagagtgggcgatgactgctgatgcctcgtctctgtgctcgggacagggggctgacgccggctggacggtgctgcggaggggagccgagtgtactcatccccttggccggcgccgctgatgcccaggtgcatcaggttggccgagacgttgtcggtgctgctggagctactgagtgcggggaaggtgggctcctcggagtcgagcggggaagggaagtggatgttggtcaggcggtgcagggagcccacagtattgtgaatggcggagatcagggctgtagtgttttcctggtcggcggacgggaagatgttgattcgttgattccgcgcaggacttggtcctggatcccgtcttcttggtttccccacgcttgcttggaaaggtttttgtctgcctctgatatggtctcttccattcctgggactgttaacagtaagacttttttctggtgcacgtcctgggacccactagtaaaggattctggctgcatgggcgtcattgtgctctggcgcagggcgagtcagaattggtccttctccagctggtgtccgtgggtggcaagaggtacacggtgccgtatgggcagctgttggcctgctgtccgtgtttgtcctttgacaggtgcaggcagtgcggggagcctagtcggccgcattcccggtacaccctgtt

SEQ ID NO: 4479 - DNA, 1160 bp, Artificial sequence
  DNA replication origin
tctttcagcacaagccctacaagccagaagagatagggggtgtatattcagcatatatatataattttgccttcaaaattgtgtttatttcactttgcgtctgctccgcgctctgccgcctcctccctggggcggcttgggactcagtctctacctgaccacgggctgggggtggcagataggttgggggaccaggaaccgaggaaggcagtaagagctggacaaacagtcggaaaatgcatggtggcggaccatgcgcgcccctcccctgagcctgctcgccaggcttggagctgatacttcccgcatcttacagcggacggcttaggccccggcggggcttcgagctagggagtcggtacagggagggtctgcgggggcgggggcctcacaccctccgatcccagctcagcccgggccggcgagtgggtggacgcccggctcgcggcctagcgactgggcttcgcgggaggtggacaaccgggggcgggctgggggcgcttggcggcattggaagctcagaatcacaagctcggctattggagagggacagagcgtggctgtccccgggctggggaggcgccgtcgggatggctgagcggcagggtgccggcatgcccgctcacaggcggtccattcggaaggtgttcttggtggctgggtccgccagaaccacgtcggggtcattgagcatgtgcagtccgttcagggtctgtccgtccagggtcagggggtcgatcttgagttcatccaggggaaactggctgtcggagtcgaagctgaggtcgccgaccctgaccagagagctggtcagttctttaaagaggctggggggccgggggagactgtcctgtcactatgaggatgatgttggggatgccactgtggctggtgtagcccagctgctgcgagttcagcaggctcccgtggctgtgggtgagggctatcatgaccgcctgcgagtagttgagcgtggagcccctgttgtatagggagctgatggcgttctccatcgtgttgaactgctccagctggtgggacagagcattggcctgcctgaacgccatctgctgctcatagtacgcgtccccaaacacgctgcccagagtggaagtgtgttgcggggagctccctggggagaagccttgattggagactgg

SEQ ID NO: 4480 - DNA, 1236 bp, Artificial sequence
  DNA replication origin
cttgaggccggtccggaacctctgggcccggcggctgcagcgtcaccagcagagccggtgcggggcgggcagagcggccgctgccgccgccaacgaactgagagccgcgtggggcccagcagcacgccggccagggaagggggcctagcgatcggtccgagggcgacgggccgccagcggccgcagggcgacgaagacgcggaggaggcggagcccggagaggggtgggggccggggagggttcgggtgggagggggtggggggggtgtccctgggctcatggagccggccgagcgggcgggagtcggagagcccccggagccgggcgggcgtcccgagccgggcccgcggggcttcgtcccgcagaaggagatcgtctacaacaagctgctgccctacgcggagcggctagacgccgagtccgacttgcagctggcccagatcaaatgcaacctgggccgggccgtgcagctccaagagctgtggcccgggggcctcttctggaccaggaaactctccacgtaagtgtgcccgggcctgcgggccgggccggggggaaaggctcagtgagaggtgtcggggatggttgctctttgtccagagggctggacccttagctctgtcctcgctggagctgtccccgagcggtgatcccagggtcgtgacagagcctgtgaagtactcaagccgtcctccctgccactttcctacgggacttcccgggtctttaccatccctctacgtcctccgcatctgcttctcccgaagtgttcgggttgttgtcttcccacctggggggccctgggtagcccaagggccccggccccgagggagagaggtgagcctttctcaagggtcctccgtggacttttgcgcatgggagaggcggggcaaagagaatttgtctttgggggagttccttgacttgtctccttgcttcctccggttcttccttcccctacgatccccgcctcttcgcatctccgttggcgtctagtaactttctgaatggagagaagaccatagggaaacttaagggttttgctttttgggggccctctcagacctggcggagttgatcgaaaagggtcgtttaaagtcagacctcattcttgagcttaacgtcttatgtggacagtgttgttttggattgtgtgttgctcctgttgtgacatttcttttggagagacatttaagatactgaggaaagtagggaagagcactgtcaggatgtcc

SEQ ID NO: 4481 - DNA, 1153 bp, Artificial sequence
  DNA replication origin
ctcctccgcgtcttcgtcgccctgcggccgctggcggcccgtcgccctcggaccgatcgctaggcccccttccctggccggcgtgctgctgggccccacgcggctctcagttcgttggcggcggcagcggccgctctgcccgccccgcaccggctctgctggtgacgctgcagccgccgggcccagaggttccggaccggcctcaagtcacttccggggcggggcggggcggagcgacggcgtcgggggaggcggtggtggcggcagctggagcccaacgggctgcgccttcttcgccgtgggcccggctcggagcccccaccccaggcctcaccggcccagcgcgaggctgcctcaccggaaacacgaggccgaattccaagctattgtcctgcttcgccgggggtcgcgcactccaagcggcagcccactggagtcccagtcgccacgacaggcggcagccaggtcggcctggtccccctagccgagcagccccggcttctgggttagaggggtttatggaaaagcctacgtacccacttgctccttatagatttatttactccatcccgcttgttccttatagatttaatttttctgtcccctttaagtccccatctttctggtattctggccgccatcattccaaagaagaaaatagttactcgctgaacaaatgctatttgaacagctgttttgtgtgtaaggcgctcagtttaggctattgagatagaaagtttaacctggtttccgccctcccaaggacttagtctagcagagataaagacgtgaattacaagataatgctcttaattgctagataagtacaagaatccttaggaactctacaaagaagttgaaactagggggtttgagagggtgtcattttcctagaagtgatacttaatttaagctatgaaggttgagtgcaaagttggttagaaaaaggagggaggaggacacgtatttcagctgagagaacagctttgacgctgcaagcatgtattctaaaaattcaaagttcaaaatagcgtaagagaggggacggagaaatgagactgagaaggcaatcctaaggaattcagagctttatcctagagacaaacttccaaaagattttaagcatagcagtgggatgatataatttacattt

SEQ ID NO: 4482 - DNA, 896 bp, Artificial sequence
  DNA replication origin
ccgggaggaggtgggggccagccccccgcccggccagccgccccgtccggaggtgaggggcacctctgcccggccgcccctactgggaagtgaggagcccctctgcccggccagccgccccgtccgggagggaggtgggagggtcaaccccctgcccggccagccgccccgtccgggaggtgaggggcgcctctgcccggccgcccctactgggaagtgaggagcccctctgcccggccagccgccccgtccaggagggaggtgggggggtcagccccccgcgcggccagccgccccatctgggagggaggtgggggggtcagccccccactcggccagccgccccgtccgggagggaggtggtggggtcagccccccgcccagccagctgccccgtccgggagggaggtgggggggtcagccccccgcccagccagccgccccgtccgggaggtgaggggcgcctctgcccggccgcccctactgggaagtgaggagcccctctgcccggccaccaccccgtctgggaggtgtgtccaacagctccttgagaacgggccaggatgacaatggcggtttggtggaatagaagtgggggaaaggtggggaaaagattgagaaatcggatggttgccgtgtctgtgtagaaagaagtagacatgggagacttcgttttgttctgtactaagaaaaattattttgccttgggatcctgttgatctgtgaccttacccccaaccctgtgctctctgaaacatgtgctgtgtccactcagggttaaatggattaagggcggtgcaagatgtgctttgttaaacagatgcttgaaggcagcatgctcgttaagagtcatcaccactccctaatctcaagtacccagggacacaaacaccgcg

SEQ ID NO: 4483 - DNA, 1331 bp, Artificial sequence
  DNA replication origin
ctccctcctggacggggcggctggccgggcagaggggctcctcacttcccagtaggggcggccgggcagaggcgcccctcacctcccggacggggcggctggccgggcagggggttgaccctcccacctccctcccggacggggcggctggccgggcagaggggctcctcacttcccagtaggggcggccgggcagaggtgcccctcacctccggacggggcggctggccgggcggggggctggcccccacctcctcccggatggggcggctggccgggcggggctgacccccccacctcctccggatggggcggctggccgggcgggggctgacccccccacctccctcccggacggggcggctggccgggcggggggctgacccccacctccctcccggacggggtggctgcggggcggagacgctcctcacttcccagacggggtggctgctgggcggaggggctcctcacttctcggacggggcggctgccgggtggaggggctcctcacttctcagacggggcggccgggcagagacgctcctcacctcccagacggggcggcggagcagaggcgctccccacatctcagacgatgggtggccgggcagagacgctcctcacttcctagatgggatggcggccgggcagagacgctcctcactttccagactgggcagccaggcagaggggctcctcacgtcccagacgatggatggccaggcagagatgctcctcacttcccagacggggtggcggcctggcagaggctgtactctcggcactttgggaggccaaggcaggcggctgggaggtggaggttgtagcgagccaagatcacgccactgcactccagcctgggcaccactgagcactgagtgaaccagactccatctgcaatcccggcacctcgggaggccgaggctggcggatccctcgcggttaggagctggagaccagcccggccaacacagcgaaaccccgtctccaccaaaaaaatacgaaaaccagtcaggtgtggcggcgcgcgcctgcaatcacaggcactcggcaggctgaggcaggagaatcaggcagggaggttgcagtgagctgagatggcagcagtacagtccagccttggctcggcatcagagggagaccgtggaaagagagggagagggagaccgtggggagagggagagggggagggggagctaatctgttttttaaaaatagagacggggtcttgctatgttggccaggttggtcttgaactcttgacctcaagcaatcctcttgcctcagcctctcaaagtgctagccttacaggcatgagcccccacatc

SEQ ID NO: 4484 - DNA, 1090 bp, Artificial sequence
  DNA replication origin
aacataaaagaatagggaatagtctaatgaatccccatgtacccactttagaacatgagttgtcaactcatgttcaatcttgtttcatctatacctccatctatcttccctcccgttctcctcccaactcttccccctaccccactggattacttttaagcaaatcctggacatttgaagatagagacaacaggggcatgaatgcaagagaaaggtaaagataccttcaaaatttttgccttgaacatctcaaaagttggggtgttcacaataaactgaagtggagaagtctgtgggaggggccatcagctgagggtggaagattgtgggcgggtccgtcagctgaggtgggaagattgtgggagggtccgtcagctgaggtgggaagattgtgggaggggccgtcagctgaggtggggggcagcaggagggaccattagctgaggtgggaagattgtgggaggggccatcagctgaggtgggctgtcacgggccgttactcagcgaggtctgtgggaggggccatcagcttaggagggaagtgcgccatagtttagaacattgaaatttgagatgcctgttagatgttcaattggaaatgttgagtacggtgttggttaaatgaatctggagtcgagagaataagcttaagtggtagaagtaaagtttagggttgtcaacatgcacgtggtatttaaagttatgaggtggataatattgccaaaggcatgaatataggtgaaggagagagcacgtctggagccttgagctctgtggctctccaacattacgaagttagagatgaggagaaatcaccagaaaagactaaaaagatgcgaatactgaggaaagcggaaccccaagaaagtgtgatgtccaagaagccaagtgaaaaaagtgctgataggtttaagtaagaggaggacagacaactggtcagcggagttagcagccgtgaaatgaaattgttagggaagaggaagctggtagactggtgggtgtgggagagcaaaagcatgatgggaaacaggttcaaggagaatggaggagttagaccacagcaagtgtagacagcttttttgaggatttc

SEQ ID NO: 4485 - DNA, 907 bp, Artificial sequence
  DNA replication origin
acaggacgggaccagtgggcgctgctgcgcagggctgcgcgctcgctccgggaggagaggcggccgagggagggactggaggaatccgcagcctgcacggcaacagcggcactgattccgggggctgggcgggagcgcggggggcggggggaggaggagaggagggcgctcgcagggagggggcgaggggcggggagaggagcgcgcggggcgggcgcgcgcgcacacacacacaagcgcactcccgggatccctcccgcacgccctccgccctccgcactcctccctccccactcccgcccgctccctctgcttcgcccgccctctcctcctgcccggagccccgcagccgcccagggagccgagcctcgggcgcgtccacgtcctctccagctgaggctcttcccgggtccagcccggacctcatcctcccagcggcggggaccgaccaggctggccggggcggggtgggcactgctgctgccgctacccgagcaggacaataggggctttgtctccacagccggagagggccaatttcacgtttaatttgaggctaattcgattatcgccatggaaagaggcggtctaattttctacgtgatttgtgcagcctcttttcgcccttgatgttgcgttcggaatgctggggagagagggtatttagggaggttttggagcgtcacttgcttggttggtttgagatgcagttggtgatgccttataggttctacccaacttggagaagggcgacggcgacctcttcgtgggaaaccttgggcgctggaggatgggtggtgggggtcgttccttgtgaggttaatgtattcttttgcaaatgctttttcgcccaccctttcgctttgggtagctgggagcagaccctacaagtggttcatccaactcc

SEQ ID NO: 4486 - DNA, 917 bp, Artificial sequence
  DNA replication origin
gatgcgggacgaggggcggcaggctctgcggtgaggcggcagcagacccgccgtgcgcaccgctgccgtccggccccagccccggcgcggcgcggcgattcctcctccctgcctccgccggcgcctccctgcagccgggcgcggcggcccctgacgcggaggcccctggcgcggaggtgggtgcggagcggacagcggacagccggagggtctattttcaggtgccctctctgtggccccgcgggtggggagcgggggcggcggtgacagggccgggctctgcgcgtagcggtgcaggggatgcggccaggcgtggtcccggctgcgccgcgctgcagctgagccggaggcggcggccccgcgcccccacctccgccccatccctgcgcttgctaccctcgtgcgcccgccccccccccgccctttctgccgtccccactctcccagggctgggcgtgagccgcctccgggcgccgagccgccgctgcgcccgcccttcagctcctgccaccctctcttcaacaggtttgtctcagcgcagggaccctccgggcctgctttgggtaggtgggctggctcgtcatcaccccccacaccacgcccacggccctcttttagggggcgccttctctttgtttttgtgataggaaaggtgccaactgctgccatcagatgaggagggggtggggatcagaacgcaaacctctgtccattatttttccaatcgaaagccaggccagatagtaagtgaggacagggtgcgtgtgggggtgcttcggcggagcagaaaattgaattcggtggggtttatttgggcggggatgtgcttttttggcaagatggatggctcacggtgccctcgccgtgatgcagcacaatgcagcagtatcgcagcttccttggttctcgctggcggg

SEQ ID NO: 4487 - DNA, 1213 bp, Artificial sequence
  DNA replication origin
gacccctgagtggacacagcacatggttcagagagcacagggttgggggtaaggtcacagatcaacaggatcccaaggcagaagaatttttcttagtacagaacaaaatgaaaagtctcccatgtctacttctttctacacagacacggcaaccatccgatttctcagtcttttccccacctttcccccctttctattccacaaaaccgccattgtcatcctggcccgttctcaatgagctgttgggtacacctcccagacagggtggtggccgggcagaggggctcctcacttcccagcaggggcggccgggcagaggcgcccctcacctcccagacggggcggctggccgggcgtggggctgacccccccacctccctcccggacagggtggctggccgggcagaggggctcctcacttcccagtaggggcggccgggcagaggcgcccctcacctccgggacggggcggctgccgggcggagaggctcctcacttctcagacggggtggttgccaggcagagggtctcctcacttctcagacggggcggccgggcagagacgctcctcacctcccagacgggtcgcggccgggcagaggcgctcctcacatcccagacagggcggcggggcagaggcgctccccacatctcagacgacgggcggccgggcagagacgctcctcacttcctagatgtgatggcggccgggaagaggcgctcctcacttcctagatgggatggcggccgggcagagacgctcctcactttccagactgggcagccaggcagaggggctcctcacatcccagacgatgggcgaccaggcagagacgctcctcgcttcccagatggggtggcggccgggcagaggctgcaatctcggcactttgggaggccaaggcaggcggctgggaggtggaggttgtagccagccgagatcacgccactgcactccagcctgggcaccattgagcactgagtgaacgagactccgtctgcaatcccggcaccttgggaggccgaggctggcagatcactcacggttaggagctggagaccagcccggccaacacagtgaaaccctgtctccaccaaaaaaatacgaaaaccagtcaggcgtggcggcgcgtgcctgcaattgcaggcactcggcaggctgaggcaggagaatcaggcagggaggttgcagtgagccgagatgggagcagta

SEQ ID NO: 4488 - DNA, 961 bp, Artificial sequence
  DNA replication origin
tctggaaagtgaggagcgtctctgcccggccgccatcccatctaggaagtgaggagcgcctcttcccggccgccatcacatctaggaagtgaggagcgtctctgcccggccgcccgtcgtctgagatgtggggagcgcctctgccccgccgccctgtctgggatgtgaggagcgcctctgcccggccgcgacccgtctgggaggtgaggagcgtctctgcccggccgccccgtctgagaagtgaggagaccctctgcctggcaaccaccccgtctgagaagtgaggagcctctccgcccggcagccgccccgtcccggaggtgaggggcgcctctgcccggccgcccctactgggaagtgaggagcccctctgcccggccagccaccctgtccgggagggaggtgggggggtcagccccacgcccggccagccgccccgtctgggaggtgaggggcgcctctgcccggccgcccctgctgggaagtgaggagcccctctgcccggccaccaccctgtctgggaggtgtacccaacagctcattgagaacgggccaggatgacaatggcggttttgtggaatagaaaggggggaaaggtggggaaaagactgagaaatcggatggttgccgtgtctgtgtagaaagaagtagacatgggagacttttcattttgttctgtactaagaaaaattcttctgccttgggatcctgttgatctgtgaccttacccccaaccctgtgctctctgaaccatgtgctgtgtccactcaggggtcaatggattaagggcggtgcaagatgtgctttgttaaacagatgcttgaaggcagcatgctcgttaagagtcatcaccactccctaatctcaagtacccagggacacaaatactgtggaaggcagcagggtcctctgcctaggaaaaccagagaccttttttcacttgtttatctgctgaccttcc

SEQ ID NO: 4489 - DNA, 1138 bp, Artificial sequence
  DNA replication origin
ggtgatgaaaggaggggtgcattttgaagaatatactcttaattttgaaagtatgataatttttagaacatttccacatcatctcctcagtgaccctgtggaggtgggcattaattattactcagtctgacagctgaggtttagaaagaatccagggtttcttctaaggtcatagggtaattaagaggcttggccaggactagcaactcaggtcttgggaatcctagtcaagtgctttttccaagaccaagtgttttgtaatgctctgcctagcctcccatcagcattgtgaattggcagcacttaggggctttaaaaaatgttctacatcttagatgataagaaatgttgtcttcttcaggttgggcctggctttcaaaagccaaaggttgacatgtggaagtattaaaaacctagttatgtggctggaaggagttgggggttgttcagcgttgagcagttagctaggctctgggtttaattctaagcctggacaggatgcagttacttcaattacaagtgccctggggactgaggtgaacctggggtgggggaccacgtctttactacatattgggatccctgaggaatgaaattaccttcttcagtgagtattgctgtagggctccaaactggaaatgccaaaagtgtaatttgttgtctgcctgtttaggtagtgaggaaaaaggggggacaggagggtggagagagaggggggagatctagagtcaatttcccaagaatacattttgatcattctcttttctatgtggaagatttcatttttggttgagattggtgggagaagaagctgggaaggagagatttaaaattttggagaaccacaagtttagaggccttgttttacaaatcagagtaggaatttgagggtagtttcggttccctcatctcccctccggatcataaacaactccaggtcagggatctcggcggtgtttacctgtgtacctttttcccacaatgccttgcaaatcggtgctcccataaatcttccttgcgtcgaattcctatcataggcccgtgttattccaggaaaccaccgccttcatatcccctgatggcagcgtaagtcagccgagattcttcactgagcccgaacttacacctcccctggctg

SEQ ID NO: 4490 - DNA, 948 bp, Artificial sequence
  DNA replication origin
acacagacacagcaacaatctgatttctctatcttttccccacctttcccccttttctattccacaaaaccgccatcgtcatcatggccagttctcaatgagctgttggtacacctcccagatggggtggtggccgggaagaggggctcctcacttcccagaaggggcggccgggcagaggcgccctccacctccgggacggggcagcggccgggcggaggcgccccccacctccctcccggacggagcggccggccgggcgggggccgaccccccacctccctcccggacagggtggctgccgggcggagacgctcctcacttcccagatggggtggcagccgggcggaggggctcctcacttctcagacggggcggccgggcagagacgctcctcacctcccagacggggtcgccgccgggcagaggcgctccccacatctcagacgatgggcggccgggcagagacgctcctcacttcctagacggaatggtggccgggaagaggcgctcctcacttcccagactgggcagccgggcagagggactcctctcatcccagacgatgggtggccaggcagagacgctcctcacttcccagatggggtggcagccgggcagaggctgcaatctcggcactttgggaggccaaggcaggcggctgggaggtggaggttgtagctagccgagatcacgccactgcactccagcctgggcaacattgagcactgagtgaacgagactccgtctgcaattccggcacctcgggaggccgaggctggcggatcactcgcggttaggagctggagaccagcccagccaacacagcgaaaccccgtctccaccgaaaaaagacgaaaaccagtcaggcgtggtggcgccgcctgcaatcgcaggcactcggcaggctgaggcaggagaatcaggcagggaggttgcagtgagctg

SEQ ID NO: 4491 - DNA, 843 bp, Artificial sequence
  DNA replication origin
tgagaggagtccctctgcccggctgcccagtctgggaagtgaggagcgcctcttcccggccaccattccgtctaggaagtgaggagcgtctctgcccggccgcccatcgtctgagatgtggggagcgcctctgcccggcggcgaccccgtctgggaggtgaggagcgtctctgcccggccgccccgtctgagaagtgaggagcccctccgcccggctgccaccccatctgggaagtgaggagcgtctccgcccggcagccaccctgtccgggagggaggtggggggtcggcccccgcccggccggccgctccgtccgggagggaggtggggggcgcctccgcccggccgctgccccgtcccggaggtggagggcgcctctgcccggccgccccttctgggaagtgaggagcccctcttcccggccaccaccccatctgggaggtgtaccaacagctcattgagaactggccatgatgacgatggcggttttgtggaatagaaaagggggaaaggtggggaaaagatagagaaatcagattgttgctgtgtctgtgtagaaagaagtagacatgggagacttcattttgttctgtactaagaaaaattcttctgccttgggatgctgttgatctatgaccttacccccaaccctgtgctctctgaaacatgtgctgtgtccactcagggttaaatggattaagggcggtgcaagatgtgctttgttaaacaggtgcttgaaggcagcatgctcgttaagagtcatcaccactccctaatctcaagtacccagggacacaaacactgcggagggccgcagggtcctctgcctaggaaaaccagag

SEQ ID NO: 4492 - DNA, 1794 bp, Artificial sequence
  DNA replication origin
tgtcaaatcaaggctatcgcagaataaatcccgccgcctgccgcgaagccccggcgcaccgcaaacttcagtgagcgaactgggtgatcgctgttgggatatgcagattcctgatgtaaaaggcggggtggcccccccgagagcctctcccgggggccggagcccgcaggtgcagtgaggcgcgcgcgccggtgccggcgcccccagagccgccttgcccgggtagagggagcccggcgcccggcggggtctggcggccgcacaccggcggcggcggcttgtctgcggcggctgcagcggatgatggtggcggccggcccgctgggctgtgcctgtgtgtcgccgcggaaatcagcgccctgcgccgcgcgctgagcccctgcaggtccgccgcagccccagcctcggcgaggacggccccggcgcgcgggggggcggggggcgcgcggggtcggcttatcatggcggatcggacggcgccccgctgccagctccggctggagtgggtgtacgggtaccggggtcaccagtgccgcaacaacctgtactacacggcaggcaaggaggtggtctactttgtggctggggtcggggtggtttacaacacccgcgagcacagccaaaaattcttcctgggacacaacgacgacattatcaggtaagggggtggccaggggcggcggggaggggttgcgtgtggaggctgggaaggtgggaagcggttgacctggggtcggatccgggagccccgtggaatagaggattctctctggagccgcatggaattactgaagggctgctgattctagggccagggcagaaacagtgtggggagtgtaggtgaggagggagagatgtcttttcgctgtatccctccggaattctggcttttaaatctccaaggagttgagtgttctgatgctttcttgctgttctttcctgctacaagtggaaggagcctgggtaactatgaaacacttcttccttccctaaccaggtgcacggtaggaccaataacctgaagtgtgggcatcatctttgggaggctcctcagtgggtttctcagtaagcaagaggattaaaaaagatctaaaagaaattttactactggtaatttggaatcttcatctcagatgctttggacctgggaaatttctgcagtgggtggggagtttgttctctaatatttcacttggcagtgttttaatgcccaaagcatatttatacactaaatggatgcttccacagcatcattgaggttattaaaggctggcagctgctggatcacaaaatcctaccagccagcccacacaatgaccaacatctgctagcggatggcccaagactgactgacaggagagctcatttggatgaatggccgttttaggggccctcccgattaaatggaaaggggttatattgtgattcttggccctatcctctcatctttggaccagacacattttcctccagcccttgtcagcttttatgtgagcaaacaaggtatgggccagatgctgttcacagggaatccttttcagccttcagcagttaaggaagattttcgtcatatgggagcctcagcccacagggaaaatgacttgctgaggatggactacaactgacagagaccatatttataccttccaaacttgtgtgtttcattgatgtagaacaactaccattacattctcagaatattgccacttttgctctaagtttgtctttcacaatgaaataaatgaagtgatgtcatgtccatgctcctaatttctcagtgcagagaatgatttc

SEQ ID NO: 4493 - DNA, 1266 bp, Artificial sequence
  DNA replication origin
ggctgtccgcggccccagtgcccaccgcccctgccgccggcgcgcccctgatggacttcggaaatgacttcgtgccgccggcgccccggggacccctgccggccgctccccccgtcgccccggagcggcagccgtcttgggacccgagcccggtgtcgtcgaccgtgcccgcgccatccccgctgtctgctgccgcagtctcgccctccaagctccctgaggacgacgagcctccggcccggcctccccctcctcccccggccagcgtgagcccccaggcagagcccgtgtggaccccgccagccccggctcccgccgcgcccccctccaccccggccgcgcccaagcgcaggggctcctcgggctcagtgggtgagtgccgcgacctctcgcttcgcgccgcccctcgcgcccctccctcttttgtgtgcagccccagatgctttgggctggtccctcctctccgccccgagggcgctttgtctgcggacttcggggcgatggcgccccgtctggttggaagcgcggggagaagggtggggcggcccttggagcccgggtttgttcttattgtccgtcttggtttcggggaacacgtgcaccgctcccggctcccactttcaccctgtgtgatgcccagcgtacggattctcggaagttaggcacccacccgtagtaggagccgggtatatacccgagagccagggttgtggatttatcgggttggttgggcttcgaggtgaggaaggaaaggccttggcacccagatatttttaggaggtgcttttgtctacccgtctgggttgctcctttggaaaaggtgcagttttgctgcgggtctgttggcctgcattctgccccgggctccctcctcacctcctggctggcgtgggtggcccctttgcgcttcccctccccctcctcctgtgctcgtggggagctggccgagtggaaaacgtccacattgacccaaccgcagtgaagggagagcgcctccagtggtgtggtgcgtggagaaatgggaaggagagagttctggtaaagtcctgccaccgcccagctccccggggtgtgatgtggactgctccccaccagctaaaccgagccagggaaaggggatctaggcattgtgttcgagggggcgtagttctgccggggtttcagctgcagggtcggaggaattgctgttagtgtggacttggcccagcctcttagtgcatcataattgaatcttacagaaaaaaataaaaggcaaaatggttgaca

SEQ ID NO: 4494 - DNA, 1932 bp, Artificial sequence
  DNA replication origin
ccccacccttctccccgcgcttccaaccagacggggcgccatcgccccgaagtccgcagacaaagcgccctcggggcggagaggagggaccagcccaaagcatctggggctgcacacaaaagagggaggggcgcgaggggcggcgcgaagcgagaggtcgcggcactcacccactgagcccgaggagcccctgcgcttgggcgcggccggggtggaggggggcgcggcgggagccggggctggcggggtccacacgggctctgcctgggggctcacgctggccgggggaggagggggaggccgggccggaggctcgtcgtcctcagggagcttggagggcgagactgcggcagcagacagcggggatggcgcgggcacggtcgacgacaccgggctcgggtcccaagacggctgccgctccggggcgacggggggagcggccggcaggggtccccggggcgccggcggcacgaagtcatttccgaagtccatcaggggcgcgccggcggcaggggcggtgggcactggggccgcggacagcccggcggcgggcttcctctccagcacctccagctcctccaggtcttcgtcctcgtcctcctcttcctcctcctcttcttcctcctcgtcctcgggctccctcacgaactggtacttgaacgcgggctgcggccggggtgggctgtccgaggacgagaccagaggagactggtccaggtcttccatggctggagggtggagatgatgctgcagctgctgccgccgccgccggggccgcgtctcagagccgcgggcggttgtgggggttggggaggactgagaggggctgggccgactgagccgagggacctactgtggtgacggctcccggaacaatgagactgctcctcctgcctccgcgccggtgatgcgccacccgccctgtccccacttgccgccgccgcccagatgagctaggagtgaggccagcggactctccgcccagtttggcgtgactcaccctccccaggggagggcagggactggcgcgggagggagagagccaatcggctacaggatcgagaagataggcgaccagccgggccaacagaaagggaaggagatgaaagtgggtggggactacggcacttcctctctcttaccggctgggattgcgttcaatgggcggggctgagagctgggagctccacccccactttgggtaaccgtgagttggggtggggtcttggccttgcccgcagctggcgtccgtatgtcgttagagcactgggaaagggggcgggctgctggctgggaggggtcggcgcggtttctggcgcgccaccggaagggcgttatcctgggggaactgagagtggaaactttcctcccgggaaaggaagaaacccgactggagaaaggtattagcgggactgggaagtgggccctaaggatttttaaagatttttgaaataaaagattatttgttcactcaaagttccaaactacatcactactactaccaccctaaaataagaaaaaaattgttttttgacagttaggctcactcagtctaaaccgcagcccccgaaattgggaggaaaacagctgtgctgaattaactagggatctggggccgaccatttgaaagtctgctcttcttccaaagagagtttggggccttgcctgctggactcttacatggtaagagagtgagtcacccaaagagagaggcagcggggagacaggaaagtggaaatacaaagatgccttggaaagctaatttggttcacgttacatttcagtcaccttaggttcatgagtcaacatttcggatgattcaggctttctgggagtcaggaagccccatagtcattggtttgatatgcaggaataagcatgatccccattccactttttatgaggctggagagtttaaagagagtagttgca

SEQ ID NO: 4495 - DNA, 1213 bp, Artificial sequence
  DNA replication origin
ttcctattccattttgctggggagaaggcatgctttacagaacacatcaaactgtccgaaaaaggctgtctgcatccctcatgtttataagagaaggatttctttccccttccttcacgtatcaaagaagtcactcggggaggaaataaaccataattaggcatgagcgagcgagcagacagaccccttgctctgccttccctgtccccgcccaccaggcaaccgtcctgggcgcaaccgaggagcgggttgtctccgcagcagctgcagcgagcgcgcgcccacgcccgagcccgcgcccgccgccaggatctgggcggcggcgaggctagcccgggggcgcgctcgctcgggagcgcgctcatgcagcggttttcttctcccacaatccagaggcagctgcacgggaggggcggggagtcggcggaaggatatcggcgcggagggagcagcgcgctccctttgacggcggcccccggcattggcgggcggcgctggcgggcggcgaggggtggggtgtgatgcggcactgcggttctgaggccgttactccggcttctccatagagggcggagaaggctggagcgcggcggtgattttgtgccagggattcccagagacgcgctgaaaggctggcagggcttaggaagctggggggttagggacacacattcaagcccccacccccgggaggggaagggggctggaggcgaggcttgagggcggcggaggaatggtgtctgctcggggggaaggggcgagccctgcctgttggtactgaggggctgcgggcagtggaggctccgcgggtcgaaagcggctccatgcccatcggtgggtggaacgtgtagaggtcggaacgccgaggtcgagtctggtggcgcctcggtatccttaacgtggtctctgtttaacgtatttcatttagcccccgttgggattgattcattgggagcagtttcgctggtctggatcctccaggagctggacaaccttgacgggctttttgtcttgggttccagccccctttcccttcctcctcctccagatgccttttctctgcccctcctcgcccggtacagacatttccagcgcaggctgctgctcgtggtgtccgtcgtcgaagccacttcttgggatttcggctcgtttcactctggggtgttttttgaggagggagagtgcccccctcctccacgatgggatttttctc

SEQ ID NO: 4496 - DNA, 1267 bp, Artificial sequence
  DNA replication origin
tttctattccacaaaaccgccattgtcatcatggcccgttctcaatgagctgttgggcacacctcccagacggggtggtggccgggcagaggggctcctcacttcccagtaggggcggccgggcagaggcgcccctcacctcccagacggggcggctggccgggcagaggggctcctcacttcccagtaggggcggccgggcagaggcgcccctcacctcccggacggggcggctggctgggcgggggggctgacccccccacctccctcctggacggggcggccggccaggcagaggggctcctcacttcccagtaggggcggccgggcagaggcgcccctcacctcccggacggggcggctggccgggcggggggctgatccccccacctccctcccggacggggcggctggccgggcggggggctgacccccccacctccctgccggacgaggtggctgccgggcagagacgctcctcacttcccagacggggtggctgctgggcggaggggcttctcacttctcagacggcgcggctgccgggcggaggggctcctcacttctcagactgggcggttgccgggcggagggtctcctcacttctcagacggggcggccgggcagagacgctcctcacatcccggacggggcggcagggcagaggtgctccccacatctcagacgatgggcggccgggcagagacgctcctcacttcccagatgggatggcggccgggaagaggcgctcctcacttcctagacggggtggcggccgggcagaggctgcaatctcggcactttgggaggccaaggcaggctgctgggaggtgaaggttgtagcgagctgagatcacgccactgcactccagcctgggcaccattgagcatggagtgaacgagactccgtctgcaatcccggcacctcaggatgccgaggctagcggatcactcgcagttaggagctggagaccagcccagccaacacagcgaaaccccgtctccaccaaaaaaatacgaaaaccagtcaggcgtggcggcgcgcgcctgcaatcgcaggcagtcggcaggctgaggcaggagaatcaggcagcagtaccgtccagcttcagctcggcatcagagggaaaccatggagagagggagagggagaccgtgggtagaggtagaggtagaggtagaggtagaggtggagagagggagagagggcaggattttttttaagtaagaattctttaccaatccttctttccccaacataaaatct

SEQ ID NO: 4497 - DNA, 956 bp, Artificial sequence
  DNA replication origin
gagcccctccgcccggcagccgcgccgtctgagaagtgagaagcccctccgcccagcagccaccccgtctgggaagtgaggagcgtctctgcccggcagccacctcgtccggcagggaggtgggggggtcagccccccgcccggccagccgccccgtccgggagggaggtggggggatcagccccccgcccggccagccgccccgtccgggaggtgaggggcgcctctgcccggccgcccctactgggaagtgaggagcccctctgcctggccggccgccccgtccaggagggaggtgggggggtcagcccccccgcccagccagccgccccgtccgggaggtgaggggcgcctctgcccggccgcccctactgggaagtgaggagcccctctgcccggccagccgccccgtctgggaggtgaggggcgcctctgcccggccgcccctactgggaagtgaggagcccctctgcccggccaccaccccgtctgggaggtgtgcccaacagctcattgagaacgggccatgatgacaatggcggttttgtggaatagaaaggggggaaaggtggggaaaagattgagaaatcggatggttgccgtgtctgtgtagaaagaggtagacgtgggagacttttcattttgttctgtactaagaaaaattcttctgccttgggatcctgttgatctgtgaccttacccccaaccctgtgctctctgaaacatgtgctgtgtccactcagggttgaatagattaagggcggtgcaagatgtgctttgttaaacagacgcttgaaggcagcatgctccttaagagtcatcaccactccctaatctcaagtacccagggacacaaacactgcggaaggccgcagggtcctctgcctaggaaaaccagagacctttgttcacttgtttatctgctgaccttccctccactattgtcctgtgaccct

SEQ ID NO: 4498 - DNA, 1014 bp, Artificial sequence
  DNA replication origin
ccctcatggtgtaggcctggggaagggggacacagtcactgtgggaaaggcagaaccctcactggatgcttcttccctgtctctccaaaggaatagaagccttaggtgctgtgggaaggcaacaaacaccattagcctaagacattgtgaaaagcagccaggcacactggagcatgcctgtagtaccagctactccagaggctgaggtgggagcaccccttgagcccaggaatttgaatccagcctgggcaacatagtgagatccccctcccccaaaagagagagagaaggaaggaagaaagggaaggtgggagggtggcagagaagagggaaaagaaaggagaaaggtgagggcaggggaggggagagaggggaggggagggggaggggatgggaaggggaaggctgaggggagggggaggggagggggagtggggaggggaggggaggggaggggaaaaaaagaaaaagaaagaaaaagctgtggaaactgattgcagctcagggaagaaacagaacaagactctctacccctggggaagggacagaaagaatgctgggctcagaatgacatctgggatgggggtatgaacacagagaatgccaccagcacccaagaccctgagacatagtgcctgcctgatactgagggttaatcagaacaacagacagcacaagcccctgacttcccacctccaggctaacaagctgctagtgacaactaacaatgacttcctgctaggagagagtatggagaggcgtctccaaggtgtctctgaggtggcaagggaagcaggaaacagattgcatactcatgtgaattctgaacagaattttaggaaagtactagttacagagtggcaggcagattccaggactaagaagagtgctgcagcactgaggcattagcacccatggggaagtgttaatgccggggcagcaaggaggagaagcagtagaattggagtgagagctggaagcgggcaagcagggcctgcccagtaggagccacag

SEQ ID NO: 4499 - DNA, 1431 bp, Artificial sequence
  DNA replication origin
cagccgccccgtctgagaagtgaggagcctctccgcccggcagccaccccatctgggaagtgaggagcgtctctgcccggcagccaccccgtccgggagggaggttgggggggtcagccccccgcccggccagccgccccgtccgggagggaggtgggggtgtcagccccccgcccggccagccgccccgtccgggagggaggtggggggatcagcccccccgcccggccagccgccccgtccgggaggtgaggggcgcctctgcctggccgcccctactgggaagtgaggagcccctctgcctggccagccgccccgtccgggagggaggtgggggggtcagcccccgcccggccagcttccccgtccgggagggaggtggggggggtcagccccccacccggccagccgccccgtccgggaggtgaggggcgcctctgcccggccgcccctactgggaagtgaggggcccctctgtccggccaccacccagtctgggaggtgtgtccaacagctcattgagaacgggccaggatgacaatggcggctttgtggaatagaaaggggggaaaggtggggaaaagattgagaaatcggatggttgccgtgtctgtgtagaaagaagtagacatgggagacttttcattttgttctgcgctaagaaaaattcttctgccttgggatcttgttgatctgtgaccttacccccaaccctgtgctctctgaaacatgtgctgtgtccactcagggttaaatggattaagggcagtgcgagatgtgctttgttaaacagatgtttgaaggcagcatgctcgttaagagtcatcaccactccctaatctcaagtaatcagggacacaaacactgtggaaggccacagggtcctctgcctaggaaaaccagagacttttgttcacttgtttatctgctgaccttcccttcactattgtcccatgaccttgccaaatccccctctgtgagaaacacccaagaattatcaataaaaaaataaattaaaaaaaaaaaaaaaagaaaggacctaccatgcacagccaaggaacaccatcgatttgctttgcctccttcgcattgttacataaacctggaaacaggcattgtcaggaaaaaggaagttagcatattcaaactctaattcagattccaacactcattaatcatagaaatttgaaaattagacacagtgaggacaaagagcacattctaagtgaataccaaaggaacacttactatctccttcctcaattcaatgcatttttgctttctttggtgtatatgacaactgtttgctcatgctcacaacaaaagcactaactgtgcatacaatcactcagtgttttggttttatattgcctcttctgtgtatgattttttttccttagctaattattgtcttcagaaccgaaccacatt

SEQ ID NO: 4500 - DNA, 1567 bp, Artificial sequence
  DNA replication origin
cacaaagccgccattgtcatcctggcccgttctcaatgagctgttggacacacctcccagactgggtggtggccggacagaggggcccctcacttcccagtaggggcggccgggcagaggcgcccctcacctcccggacggggcggctggccgggtggggggctgaccccccccacctccctcccggacggggaagctggccgggcgggggctgacccccccacctccctcccggacggggcggctggccaggcagaggggctcctcacttcccagtaggggcggccaggcagaggcgcccctcacctcccggacggggcggctggccgggcgggggggctgatccccccacctccctcccggacggggcggctggccgggcggggggctgacacccccacctccctcccggacggggcggctggccgggcggggggctgacccccccaacctccctcccggacggggtggctgccgggcagagacgctcctcacttcccagatggggtggctgccgggcggagaggctcctcacttctcagacggggcggctgctgggcggaggggctcctcacttctcagacggggtggttgccaggcagagggtctcctcacttctcagacggggcggccgggcagagacgctcctcacctcccagacggggtcgcggccgggcagaggcgctcctcacatcccagatggggcggcggggcagaggcgctccccacatctcagacgatgggcggccgggcagagatgctcctcacttcctagatgtgatggcggctgggaagaggcgctcctcacttcctagatgggatggcggccgggtggagacgctcctcactttccagactaggcagccaggcagaggggctcctcacatcccagacgatgggcggccaggcagagacactcctcacttcccagacggggtggtggccgggcagaggctgcaatctcggcactttgggaggccaaggcaggcggctgggaggtgtaggttgtagcgagccgagatcacgccactgcactccagcctgggcaccattgagcactgagtgaacgagactccgtctgcaatcccggcacctcgggaggccgaggctggcggatcactcgcggttaggggctggagactggcccggccaacacagcgataccccgtctccaccaaaaccagtcaggcgtggcggcgcgtgcctgcaatcgcaggcactcggcaggctgaggcaggagaatcaggcagggaggttgcagtgagccgagatggcagcagtacagtccagcttcggctccgcatgagagggagaccgtggaaagagagggagaccgtggggagagggagagggagagggagagggaggtcctttcttattttgggtgacattcccatcctcagctcactcccagaagtcaaagtcttcttgttcttttcgtataattcctgacaaaacccactctctcaaccttcataataaggcatatgggtctgatgctggcctcgactgttccagatatccagcaggttttcaatttttttttctcctcttttcataggtgttg

SEQ ID NO: 4501 - DNA, 1521 bp, Artificial sequence
  DNA replication origin
tcattcatgcagataattattattctgaatcaatgaccaaaattagaaacatgaaaaccttaaggtgatctagctcaactgtaatccactgctagtgtatataatttgtggagactttttttttttttttggctttccttcttccttgtcttcccaacacaagtctaatttttcctctcagccatctctctgatttctcatatctatttggtgttaactgatcagagggagttagcagagaagggggctggctgtttcattttagaatacgactcttgaagaacccgtgatggaggaataaacagaagtcctggttcctatttctagacaagaggctgcccaatgtaatatgtaatatcagtaatagtaaggttgcatttctgtagggtggctcgatcaagcgcttcttgtataccatatcattagctgcccgagggccagtaaggtcggatggtttgttcaaggacaagaactaacaagtaacagagataggacttatctttttctgaccttcactttccctttctgtgacaaaactggtcttaggaactgtgttgagcagagccttctgtgggcgtgagagcggcttggaggtgtcaaagaaaaattgcatccgatatagttaaacagacaagggggaattattcaaggctattgcaatagggaagagagagagggagggagaggggaactagtagaagactagtggaggagattaggatgggaagttggtcagtgtaatgaggccatttgtgtttcctaattggaacttattaaagttaggctcctcctctccacaaacactaggagatagggacccttttttccttgatgattacatttcaaagggatgcctcacagatccctgagaaagatccccaggctgtaaaacccagcaagaggcggagagatttacatgtcaaagggtcagaggaaacattcaccaatggaagttggctaaagtaaatgctctgagaaaaggaaggtctggggcctacagttaggaagaaacctgtctaaagtttagttaagctgaggggaatgttaaggccatttggtcaccgtaagcagtaccacatttccttgcctctcccgggagccaggtctcagtgtccccaataggggacacgcactgaccggcgggtgaagggactgattttgattatcatcctaccagatagagattattccctctgcacccgggttaactgaaacccggtgggggtagatccttgccattttccggccctgtaccccactggaaataacatgcggtggtcaagggcatccacctctttaggcaaaagcatgttttcagcccagagacgattccacccaactttacaagaggatagcccaaagatagaagccagggactcagacttcctccttccagaaataaccatcataaaaaagccgacccagtaaacgcctggcagcctgcggcatagaagaaaatggaaatctccttggctggcatttcagcttgcctgagggggcttgctttgctccgaggggagg

SEQ ID NO: 4502 - DNA, 890 bp, Artificial sequence
  DNA replication origin
cagcgggggagctgcaccgccgttcccctgccctctcctccgccctaagccgagactgtcgccccccgcactctctgccctgcacacaggcgtgcacgcacacgcactttcctcccccttgcccagctgcagcccccggcttctcccctctcctagcttggagggcgcgccgggcaccgcggcgcctccccggctgctctagcgacgccgccgcggctgcccgaaggctgctgcgctcctcctgccgccttcgctgcgcccgcggccgctcctaggctgctccggaaagccttcgatttgcagagcggagtcgagaaggggtggagggtgggggaccggctggaggaggagcctggagctggggccacccgtaacccgcagcagctcccgcatgggctggacgcagctgccactcgaccgctgcccgggccctcgaggtgcgctcccggctgtcctgcccgggagggctgggggcgcggctctttctgcgcccgggcgggtggggctggaatggggagaaggtgaggagctgtggccgcccggtctttgggaggctcgcgcgcgccaccgtgtggcggaagaagctccctcctctgccctctgcacaccggccttgtcaccaggcaggggaaacagctgctgacccaaatgcgaggtgcttcgtatttggagggatcggggatcaggaaagatggggtagcaggacctgagggataaccagttatttgcactttggagaatgggaggagaggcaaatggcaaaaacgggggttggggaaaggggcagcttaagaaaatccaaatggtctgaaaagggcgaaaagaggcgtcagggcactgctcttatggggctacccatccccaccccccactctcgccccacccctagg

SEQ ID NO: 4503 - DNA, 1698 bp, Artificial sequence
  DNA replication origin
tgcagctcccccgctgtccccgaggatttcccgcggcagccccgggctccccagtgcccctcaccatggacttgcgcggagttgggacgggcctcggcagcagcaagcggctggctgccgggccctgggggagcgcgggcgcgcgcgcggggatggcgaggtaggatggccacccagcgcgacccccgccgccccaacccagcggcccctgggcggtgccgctgactcgccggagcgcacaggggtgtgggcggaggcggcctcgccgcgcccgcgccttcgggagtcgcctcgcctcttccacccacttgcacctgccaccccgcggataccatgtcgaaggcggccggaggcgcggcggcggctgcggcggcggcggaaagttgttccccagccccggccggctcgtccgcggccccgcccgcgccggtggaggacctgtccaaagtgtcggacgaggagctgctgcagtggagcaaggaggagctgatccgcagcctgcggcgcgccgaggcggagaaggtgagcgcgatgctggaccacagcaacctcatccgcgaggtgaaccgccgcctgcagctgcacctcggcgagatccgcggcctcaaggtgagcgcgggccaggtggggaggcgcggcgcggctgggagcggggtgccccgaggaggaggcggggccaggcaaactttccctccctccctcaacaggtgaccctccccttctcccggtcggcaccccctacccccagtccccagcccctgtgtaacttttccaaacttcggaggcgtctgctcccctcctctccccaacacggggcgctccactgtctggctgttcggggaggcgctgaggacgctggaaagcagggagggaggtgaagggcacgcgaacctttcatttcttagggaggctggaaaatctgtgcctggggagccgggtttcagtcagttaggcggaaaggccagtgagggggtgaatccaggggatcttcgccttggagggtcgggaatgcggctgctctgggccagcagctcttgggcgggcagagggcgaggaaagggcgccactgccagggagagcggctggcggggcgcccgggagaagcagcgggcgccaccctcagagcagtcttgtgtcaccgggtacataggagttcaagctctgccttcacgtcttctcccaattcctgtgctttccctctcccggagtttggaaggcatcccctggagttgccttactccccttcccacttaaccccaggttgactgggggaaagaggaggagcaaagagactcagtatggaaggagcagcattttgacagagtaccccaagtgttggtcagtgatggtttctttctgagccagcccccctgccaccctcttctaggaaaagaagggaaacgtaccccaagcccactaactttcttttctccttggagagcgccgggtctgcgaggagtgtgcctgcccagctgcagtacactagtggccgggaaccgccctgctggcgagcaccacaaacttcctctccttccagctagcgctggtgcctcctggtattccttcctctcattgttctgctttgtttgtaggaagccagacacaaacgaaatcactgcagggacttcagggagcaaattcccgaaggcacaagctgttcttttcccctttccactcctatccccacatatcagacag

SEQ ID NO: 4504 - DNA, 1244 bp, Artificial sequence
  DNA replication origin
atgtgaaggaggctttgaagtgggggaaaaggcagcaatgagtcatggctgtagcccaggaatagtcagggaagcagataatttagttaaactatctcagcctaataaagggaactgggcaggtggggataattaaaaggagtgcttaaaagagtattgtctaaattggcaccagagttggggaattttaagaggtttaagcctggccgtcaatacccacaacgttatgggggcgaaggaaacaggcccttgaaaagaaggtaatgtggagtgggtagcctttgtattgattaagaaggggatggatttaccctccactgtgacagtaacctaaagcatctgtgatggtccaggaagcttctgaggcaattgggcagcctcagtcttcagccgctaagccaagaagatctgggaaggagtcagggagcctcgggccagagttccaggggtgctgggagtggctgccgggtgagttggactgggggaaaaggcgatttccagtggggtaccacatagatgggacacgacttggaggaatcctgggctgtgggcattccttggcctggtggccagatttccagcacttgtagcaagctcctgggggagggaggcctggaggaatgcctggcggctgcagtttaggtgtttggaagttcttgtgtgctggagatgtggctggggtttgtctcacagtggaggcaaggaattgcaactcagaaatacattgctacttggctgcctctactctattattgtacatcttgcaggtgaggttaattaagtcctgttgtggggtttgagggtcagaatttaatttttggagctttatttaatgtcgggagaagattaggtaataaaataaaatgcatattgagaataagacggccttctggcctttcagggtctagggctgtaaagcgtctcagggttgctgccaaacgagctatgaactgggctgggtttttatatttgatgaaaaagagcctaaacgtgaactgattttgggagagttcggaaaaagaaaaaggagcattaaccttgactatgcctttagctccagccaccttttgtaagacgaaattgctgggcaggtgggggagggctagtcgcagaacaaaactgtaagcctgaccggctgtgaggaggggaggtgataaaaggattatagggttggggagcagaggctgaggaagaaatgggacctagcttggcctggtgaggaggggagaggtcagatgggtctg

SEQ ID NO: 4505 - DNA, 910 bp, Artificial sequence
  DNA replication origin
ggtcactgcccggccccacctcccgggctgagtggcgcgctccgcctgggtcccggaggcggtggcgcaaggcgagcgcgcaccggggccgtccgctgggctggcccaggcggggaggtcctgaccccaagaggcaacaaacgagtggaggggcactgctctccacactgctctgccgcccccaccccaactctccccaccccttccccctggctgcagcagcagcagcagcagcagcagcagcaaacgaacagagccacagcgtcaccgaaatccaagcggagcccagctgcgccgggggcaagaggagggggctggggcgatccggtgggggagggggcaggggatggtgggggtgctccggggccgccgggggcggggaggcagcgggggtggcgcgcgcggcggccgccccgggcccgcggccggcgtcacttacccggccagggcgcgggagcagctcggccgactcctcggagcccgcggcggctcggggccggcggtcggcgcagcccgggcgctgccaaatgtaaacaatccgccatgatttctttgtttagctaattgaacctgccgccgtctcgagtcccaggcgctccctctcccttctctccccttcccccctcgcgctctcttttatttatttatttgtctctccccccaccccgcccttagtctttccctctctttagtcttagtagctgcttttaatggaagtcgaggcagttgggtagttggtgcagggagtgcggtggtggtttttataaatacaggtaaaataatacccaaatttcaggctgaggtgcagtttctggaagaggaggagggtgttcctctccttccctccctctttccccctcccccgtttattagagtatcctcggtggaaagtgccagaaaaatgtgctgc

SEQ ID NO: 4506 - DNA, 1736 bp, Artificial sequence
  DNA replication origin
ccgacgaggaggcaaaaggcgattgtctggagtctccgaagctaaggaagggatctttgagctgcctggaggccgcgtagccggcgagccactgcgagtacacgttctccgtgttgggcatcgcggccgggggcaggtcgaactccttctcgagcttgatgcgcttagagaaggggctcagcgagctggggctgcccagcagcagctttttggacaggccccccgaggccgactcgcccggggagcagccgcggccattaacagtgccatcgtctatgcggtccgactcgccggccaccgagtcttcgtcgcaagtgtccctgtggccctcggcctcggccaggtggccgcgcttatgcttctcgcccaggacctggtggaaggcctcgctgaagtgctgcatggagctgagcaccatgccctgcatgacgtcgggcagggcgcggctctcgtcgcccacgcccacgaccgcgccccgcgagctgttctcgtggtggcgcgccgcctccaggctcagcccgaagccgtagtccaccctctcgctctccgtcagctcctcctcctcctcttcctcctcttcttcctcttcctcgtcgtcctcctcttcctcctcgtccccgttctccgggatcaggttggggtcgttctcgctcttgaacttggccaccacggacttgagcgcgctgctggcgctgcccaccaagtcgctggtgccgggttccggggagctggcggtggagagaccgtcgtcggacttgaccgtcatgggggacgatttgtgcatgtgcgtcttcatgtggcgcttcagcttgctggcctgggtgcacgcgtggtcgcacaggttgcacttgtagggcttctcgcccgtgtggctgcgccggtgcaccaccaggttgctctgaaatttgaacgtcttgccgcagaactcgcatgacttggacttgaccgggggctgggagggaggaggggcggattgcagaggagggagggggggcgtcgccaggaagggcggcttgctacctggctggaatggttgcagtaacctttgcatagggctgggccggcctggggacagcggtgggctagacgtgttccctgccagctctctaagtctcctagagaaatccatggcgggaggctccatagccattggattcaaccgcagcaccctgtcaaaggcactcgggtgatgggtggccagggccatctcttccgcccccaggcgctctatgcggtgggggtccaagtgatgtctcggtggtggactaaacagggggggagtgggtggaaagcgcccttctgccaggccggaagcctctctcgatactgatcctggtattcttagcaggttaaaggggttattgtctgcaatatgaatcccatggagaggtggctgggaaggacattctgcacctagtcctgaagggataccaacccgcggggtcaggggacttccgtgttcgctttctaagtagattcttaatccatgagtgttctgtgcgtgttgcaagagaaaccatgcactggtgaatggctgtttgcaagttgtacatgtgtagctgctgggctcatctttacctgcaaaataatacaacaccaacatcaatgtttaatcactgaggcgggcatcagcaattgcttatttatgttccacctccagccttccctgcccccacccctcaaccccaaggcctaagccctcactgacctaccccctgtgcctggcacgtctgagc

SEQ ID NO: 4507 - DNA, 833 bp, Artificial sequence
  DNA replication origin
ctgagggcttatgaaattcacacaataactctttgttacctaggattacctaggagttaacaaaaataaacaactggctttgaatctggtctcagggtgcatgccctgctcttcagataccatttacaagatgggtaagtgtcatctccctcccatctaaaaacagtcccccttagagccttaactctggcatcttgctctttgttattctctctccatgacctttttccttttctttttttttctttccacagcaggttatttttcatttactttcaaataaaaattagatgtcacacttcttttcttcttgaacctgcttttttgtgtttagggtggaatcactgcccaccccctaaccttttagccatgcatgattcataccatgtgttcctacacagagaagcaaactgtattattttctaaaacagtatctttcagaaaacatttgtataaatggacaaatttaagtttcataaaatggtccctactataaaagctcacttgaacaagtaaatggtggtggcagtggtggtggtggtggtggtggtgatgatggtggtggtagtggtggtggtggtggtgatggtggtgttggtggtgatggtggtggtggtggtggtgatggtggtggtggtggtggtgatggtggtggtgatggcggtgatggtactggtgatggtggtggtggtagtgatggtggtggtaatggtggtggtggtgatggtggtggtggtggtagtgatggtggtggtaatggtggtggtggtgatggtggtggtggtggtagtgatggtggtggtaatggtggtggtggtgatggtggtgatgat

SEQ ID NO: 4508 - DNA, 1207 bp, Artificial sequence
  DNA replication origin
cttgatcttgttctgcctcctagcgaccgaatggctcattcagcccacatagcagaggcggggggcgggggggtggtactgaggaccgggatggctcctgccccctctgagcacccagaaaatgaggacagaaagaagtggccccctcaccccctcccaaactggccctttaaccccgggacaggaggagggggtactaaccctcccagcctagagtgtcccaagatggacccaggagggagaggggtacgagggagcagcctggactgcgcgccccggtctgtcctttgagcccccactgcatccttccgaagaagggcctgactttcccgagtcctgcgaacactgcccttccttcccgccggtacctggccgggctgtaacttcacaccgccgcgcgccgcgtctgatccgcatccggcgcggccgggggagttgggggcgggggagagcggcgagggagggatgcgagggggtggggagagggagggccgcgcaacgtgccggggtgggggagcttccgaagtgtgtgacaagttccagggcccagtgaaaaattaaattccctgtgcgcaccccccaccaccacccctttaaaaaaacacagaaccaagtataggtggtcctttaaaactgcatcaaaaatttaaagtaagaatcataaattgagtagggggggaatgtgggccctcacgcctttctttcccttgctgccaaactttcctaagtgcccaccgcccgcctttccaggcgcagtcagcgggagacagccaccaccaccagctcttatacagactcacaagaacctcagaccaagccaggcctggggaagagggcaagacccaaagggtgaagtgctcggggtcccaggatccagcgcccttaaaatgcacactcaaacacacttctcccctgcccttccccggcaaccccgccacctggcctagtcgtgctcggggcgcagggggactggtgaccagaccgggcggggtggggggtgggcagggaaagcacgtggtgacctcctcgcggtcccgagctgtggacaagagacgtctgagaaagtacccagggcggaggggaggggaggcgcagaacgcgcttttacagttgccctgcaaaataaaaatgctttgcaaagccgagtttcacccagccgatttcgcagtctgggaggtcgagaagaggtctcggcattgtgctgggg

SEQ ID NO: 4509 - DNA, 1850 bp, Artificial sequence
  DNA replication origin
cactggccattggcttgtcctggtctctttttcatgtccagcccctgatgtgtgtccattggtgtgagcttccccttccctcctccccttctctcctgctcgccctgcccatgttttgtgtgtctctgtccatccagactcctgacgttcaagttcgcagggacgtcacgtccgcacttgaacttgcagctcaggggggcttttgccatttttttcatctctctctctctctctccctctatctctcttctctctctctccctctttttttttttttttttttttttttttttgcttaaaaaaaagccatgacggctctcccacaattcatcttccctgcgccatctttgtattatttctaatttattttggatgtcaaaaggcactgatgaagatattttctctggagtctccttctttctaacccggctctcccgatgtgaaccgagccgtcgtccgcccgccgccgccgccgccgccgccgccgcccgccccgcagcccaccatgtctcgccgcaagcaaggcaaaccccagcacttaagcaaacgggaattctcgcgtaagtaacccaataatagtaataataattattaataatcacgagagcgcgcaggactagaagcaaaagcgagggggagagaggggtgtgtgcatgcatttttaaatttttcacgagaaaaacctccgagagtcgaggtaaaagagataaagggggaaaaaaccctcatcccatctggaaccattgccgtgtatgcacttttgagacagcacgcaccttttaattttatttaattttacaaaaatttgactcctcctctttcctcctttccgccgctttatttctcttttcgaaaaggaatgcaatgattccactccccccccgccccgccagttttgcaaaataatgaacaatgctaaggttgcgaacaactcacatgcaaacctgggggtgggagctggtggggaaagggaggttgcttcccactcaccgtaagaaaatgggggggtagggagggagtgagtacaagtctaaaaaacgattcccggggagaaaagaggtgagactggcttttggacaccagcgcgctcacggtcaagtgtgcagcgggaggaaagtagtcatccccacaatagtgagaaagtggcactgtggaaaggggcccccggcgctcctgagtccgcggagtcgggagaggggccgcggcgacggggagagccgtgggaccgggaaggacgggagacgcggccggcactgccgccttttgttccggccagaggtgggtgtttgtcccgctgccttttgtgccggctcctcgcgcttgccctcccgcgccgccgccgccgccgccgccgaagggcaggagctagggccgggggaggaggcggccgggggcacgcgggagagggagggagggagcccggactgctgcctcctgggttgccgctgccctcccctcccgaccgaacctcagaggcagcaaggagaagactggcacataaataaataaatacataaaaataaaataaataaaacaaggcaagagaatgtacaatttcttgcccccaaaccgaagccaaacgctctgccaacccttttctgtgacggccttctctttgactcccccaccagcccccctgcaaaaatctcacaatctctcatctagaaaaaaatttacaatcaccctcttcccccaaaccccttcagttgcaaacttagggcgccgacggcacggagagggagagaggaactccctcctcttactattttttggaagattttcaaaaaaagtggaagtggattttgattgggaaaaatctcgtgtctgaatgtttacaagcaccgcgtgtg

SEQ ID NO: 4510 - DNA, 1464 bp, Artificial sequence
  DNA replication origin
tggatagctcctctctgctgttggttgtcccctcatctctttgggtctggctgagtccagggctttatatgggcctcagaggggaggaagtgtgtgccaattggtccatgggcagccatgggtgggcctggaaaaaggaccacaagttcctactcctgtcccggggactggcagcccagcccccaggcttcaggccctccctggcttgaaggtggggcttcactgtggacctgccgctttctgcccaggaacctctctgcctcctgctgctgttcatggcgccctggctgttcttgccaaggggcgcctgcaggccagcaccaaactgccctcagcccctccttggcctccctcccgtacttgttggtgcccaaagtctacagggggctgaggcagcatggggctggcgtgtcagcactgccatgagtgtgcacacacctggctgggctgcgacagtgcccaggctcggctccaacccttctccgagattggtgcaggcactgggagcagggagaggtcagggagcgggagcagacccctccaggcctgtggggacaacgggggggccttcccgggtccctgaaagtgcagagatgcttaggtccacagccgcaagttgggtgagactccagggactgcctgcctctttgcgttttccccacagcagaggccgccccagccaaccccgtgcaaattaacccgacactttcagggctggccccacgagtcccggctgtgcctttggccgggtgcttgtggacccctgagatggtgatggggagcgaggttgaggccgggacggaggctttgggcctgagaacaggtcctggccggccatgcgagagcagaggtggcacagttggctgcctcggggatgtggagcacaggggtcccaccgccgccactgctgctcccacaacccctcctgccgccaccgcccacacctcccggctgcagcaggcttgatggcagcagctactccggacggtccacactgccatcactggaaacaggttgtgcccagttagcggttaatttattctacttggctgacgtctgaaagaattaatgcagctaatctttccaagtgatcatcagtctttaggagtccatagagtaccctactggtcatccgaaggaagtcctgttagtttagaaggacaggtctacatacgaaccacagcatatccataaattaagccgtgtcttgaagtggatgtgaatgataatcgttggcctttttttgtgacacgtagaagcagactacatgtggtatttattgacttatacaatgtttccgtcatgtttacaaaatgctgtgtgctgtgggggacatatcgttacctttctttaaggtgaaagctgtgggagtctaacaggaaacagaaatctcagtgtcagtcacttactatgcaaagcatttggcatacatttcttttttttcttttttttttcttgaaacgg

SEQ ID NO: 4511 - DNA, 790 bp, Artificial sequence
  DNA replication origin
gccctagcgttaggagacgcgcagcggaaccccggcggccccagcccctccccgcccgcgcgtccccgcgtccccgcgtccccgcgcgacccgcctcccagatcccggctggggctcccgggcgcgccgcggcagggcggggcggggccgggggcggggccttctggcagtttctgggagctgcgaacgcgccgccccggggctcggcggccggaaacgctggcttcggagccttaggcgccgcggcctttccttgttttccgcccagtccacgccgccatggccaagtggggccaggggaacccccactggatcgtggaggagcgggaggacgggaccaacgtgaacaactggcgctggcgcggctggcggcggcctccttccgggatctggggagggccgggccgcgggagccggggctgccctggggtctgtgcggggccgcggggccagggggtcagggggccgccccccctcagctgctggacgcagggctcggccttcgcctctcggctcgggagagtccttgagtacggagaccggctaggagggttgcagctgcctctttttgaaagttgggttgggccccaagagtgacttccgacagacctttccactcccaccgtctgtggcctgagggccttcccttctcctcccgcccacccctctggatgtttcggggagttagaagggagctggattgagagactgtgttaggggcgggggtatggaacgtagtggaaagggcagaaatttggatctcagttcgcgcccaccccgcaggcgcctc

SEQ ID NO: 4512 - DNA, 891 bp, Artificial sequence
  DNA replication origin
gcacaagaatcacttgaacccgcttgggggaggggggttgcagtgagtcaagattgtaccaatgcactctagcttgggcaacagagcgagactccgcctccaaaaaaaaagattgcttttaggttgagtgcagtggctcacacctataatcccagcactgtgggaggctgactgcttgaacccaggagttcaagactagcctcgtactcacgggcgagacccaatctctattaaaaatttttaaaaattagccaggcatggtggtgcgtgtctgttgtcccagatactcaggaggctgaggcgggaggattgcatgaacttgggaggtctaggctgcaatgagccatgttcatgccactgcactcgatcatgagtgacagagtgagacctggtgaaagagaaggaggagagagatgggggaggacagaaagagagggagagaaggggggtgaaagggtaagggaggaggaggggaaagtgggggaaggacggagaagcgggggaaggaggcggaagcgggggaaggaggcggaagcaggggaaggaggcggaagcggggaaggaggcggaagcgggggaaggaggcggaagcgggaagaggggaaagtcgggggagggagaaaggggagggagaaaagggaaggagaaagagggaggagagagaaaataactgcttttatgatcagaaagctagctagaaactttcatctgaaaaaagctaccaaagaaacccattcatcattgccatcacctattttagatatttaagttacactgctgaaataaagtctgaaaatcatggattgaaagcaatcatacagaactcagaacatttcaaaataaacaaaaaatgtccttagagaaatgaagtctcaaagtaagtgttaaacc

SEQ ID NO: 4513 - DNA, 1113 bp, Artificial sequence
  DNA replication origin
gggagggggagaggaggggagcgaggggaggtgcgcaggccggaggggcgccgaggcgccggcggcggggaagggggggaaggacggggggaggggagagggggggagggggcgggtggggagagaagcagcagagtcacttcaccgaccagacgccgcggccaccgccgacgccgccgccattttaacagagcgctcgggctgcgctcggctctttccgcccgggcttaggagcggacgagaggcgcctcgcgctctcattcctccgcctccctccctttctcgcctctcctccgccccccacctctccctccgcacacacgccgcacgctccacaccccgccgtggccggctcgccgccctccctttcctcttccgtccggcctccccgccctcggtccaccccctccgcgcgctcgcccaccccgcccagcccggatctctgtcagcggccggaagggaaacgcgaagccagcgcggccgcggggggagtccgggtgagtaggagaagatggcggaggcaacggacgggtcgcggttgcgtggcgtcgcccaccacgacccactccacgggctctgaggcccggggagcgccaggtcactcgctccgtcctgtcccccgcccctgggcttcgccatttttccccagggcctgggtcggggagttggtgcgggtttctttggtgtccccggcctcttccgcgcttaggcttttggggtacgggaagcaaggagtcaacttgggtgccgggccgggtctacgccgtagccctctttcgggcgcaagggccactccccccggggtctgagagtgaatcagcccagggcccggcttaactgcatcggtgattatcgctaccctgcagttccttgaaggtcctccgtcctggagcagtaagatccttgacgtaactagaaatggcagggtaaggagtgtttgcctgacatcgtctcgtttttacggaagagggcccctcacgatgtgcccatcagccccacctgaaatagcaagaaatcttcttcagcagagagcgaataacaaggatattaagataaagaacaggtgaagggggcagtcagctgaagcttgtaagggaattttcctcacgccgg

SEQ ID NO: 4514 - DNA, 860 bp, Artificial sequence
  DNA replication origin
tccctaagtgcgggatttcaggagtgagccaacgcgcccagccaccttttaaatttttgtagacacagggctcccactatgtttctcaggattgttgcttaccttttatcaggaggaactcaattatgtatggccagccctagaaaagccagatcaccatgatggttggtttcaactgctacctgaaaaaacgtgagaccagcacgttggctcatacctgtaatcctaacattttgggccggaggatcagttgaggccaggagtttgagaccagcctgggtaacatagcaagaccctgtccctactaaaaataaaaaacaattagttacgtgtggtggagagcgcctgtagccccagctactagggaagtgggaggatcccttgagcccataaagtggaggctgtagtgaactgtgatcgcaccactgcactctaaccttggcgacagagtgagactttgtctcaaaaaaaaaaaattcaaataaaaataattggggttgtgttggcagggaaaaaagggatacgtgggaatgtatgttgagtggacaacgaatgtctgcctcaggatccaaagtaagtctgcaaaaacccaattctgtgagaaagacaaggaagaagggaagatgatggtagaatagaactacaatcctaaggatcacctgctagtgggaaacaaaacgggttgggcagactgtttatagtatcaacttcaagcagcagaaaggcaaagcatttggaaccaggtggttctggcatggagagatgggcgtgccataacctccacaaaagctatcgagagaatgactacagagccttgacagacactctggttaccgttcagagattctgtacacgatctt

SEQ ID NO: 4515 - DNA, 1363 bp, Artificial sequence
  DNA replication origin
tcgtcccctctcccccctccccaccttccctcgccctaatcccccaacgaggaaggaaggagcagttggttcaatctctgggtaagtcgactgtgtcttcggggccgagggtcgggcggcggcgcggccgggcgggcgggaggaggccggcgtggggcgcggcggcggcggccgcgggaagcgagcccgggaggcggcgggcgggccgggggcgcggcgggcccacagcggagcctgcgattgaatggagccgcttttgccgctgggggatggaggcggggaggcggcctcgggaggggagcgcttgctgggtcattcgcgtgtgcgggtggcggtggaggaaggcgaggagtgtgatagtgaagcggggccccgcgcggggtgggaggggttccccagcccctggggctggggagaagttggggtgatttcaggaacatctctgtaaattattaggagtggaagtttccagaaatatttagtgcagcagcattgaaacgtccgcctgcatcacgtggccccctcggtggagagcttgggatgggggagggaggggctgccgactccctgttcctccagcaaggaaactcgaaagctctccggttttgcagagtggcatgtgaagtaggaaagatcagtttttcaggggcctgcacatgggattccgtcttgtagttccttttcaggggtttgaatgtgataagttggttaaaccatttactgttggccttgtacagtggaggatgccctgattctccttcattccgatgtctgtgagtttgggttgggtgggaggaagtggtgtagtagaggaagcattcagtactggctcagcccggacctcctctgatcacgccgaggccatgctgcatagagaaaggggcggtgaacttaaggcgcctggtctaaatgcctcctccgagtaagggcggggtgagtgcgtgctcctgtgtgctatagttagaagggctgcaaatcggttcgggtgggaagcgaggggagggcgggccctaatgaggtgtgtttttcctgaatgaagcgggcgattgcccacacaacctaaggagcagtctttcgccttgtagcgacttgtttttcacctagtgtgaagttattaagcaacggttatgattttctgggttttgtttaggaattggcattgggtgtcacttgtagagtcacattatccattaagctggataatccctagtgtatgttatccagtgagtggattttaggattgaagagcccaatgggaatgagcgttcgtggttacacctctcgcactatggcttgtttgctgtctgattgtatatcttaagtgtgggacactgctgttagtggaaagaatgttttggaagcg

SEQ ID NO: 4516 - DNA, 952 bp, Artificial sequence
  DNA replication origin
ccactctgcgggcaaatcgctgctgaaaagaggtaggggccgaagcggcgggctcgtgtggagccgtgaggcgggattgactggcgctcgggccaatgagagataggctcatggcgcggctgtagctggaactgaccaataggagggcgggctgggggcggaggcccaggttccaaacgctccgcggcgccatgggctgaaaactcaaccgagatggaatctcccagtctgaaccggtttcaaccggttccgagtttgaggcactaggaggagggggagaagcggctgcagcggccgcggcaggagcagcgggagctacagcatcagcaagagcaacagtagctacagccccggcggcggtgcctgttccagtctttgctgctgcagtccgtgcaaccacccagagggggaggggggaaccaccagtcgctgaggaacaagagaaggggggaaagtttaggcgagccttgggggggggggggccagcgccggagccgcgtgagagagggagccgtgttttggtaggggggagtcggactgcaactggcagcagagcgtctccccggccgtgtggactctacaccccctactcctgccgcttctgctgctgcctgtggctggagggtccccctggggctgaatctttgggacttgaccccgttccctcccccttccctcactccccagccgggcgggagcatttattccccagattaattccccttttgggggggggcgggtgtgtgtgtgtgtgtgtgtgtgtgtgtgtgttgggggaagcgtccctgaaatagtaaatattattgagctctttttgcccttttcctgtccgtttttttaatttccttttttgaggtgggaaaactgaaacccaccttgattcgtcccctctcccccctccccaccttccctcgccctaatcccccaacgaggaaggaaggagcagttggtt

SEQ ID NO: 4517 - DNA, 1097 bp, Artificial sequence
  DNA replication origin
gtctggctctattgcccaggctggagtgcagtgtggtgtgatctgggctcattgcaacttcctcctcccaggctgaagccatcctcccacctcagcctcctgagtagttgagaatacagatgtgcaccagcacacccagtgaatttttgtattttttgtagagatggggtttcgccatgttgcccaggctgatcttgaactcatgtgctcaagccatccacccgccatggccttccaaagtgctgggattacaggtgtgagccacaacgcccagtctagaaagagaatttctttaatagtgtgaagcatgaactgtttcagtgtagctgccaaaccatgtcactctgcagtgtttcaggtgggtttacttacaggtgaggagaccatatggagccacccactcttacctctggtaaggtttgattaaatttctgatttccttagccaactatacagaatctctctctgagggagaagtggacaggagaaaaataggaggaagcaagggagtgggctgctgggcgtgttgggcttgagaacgagtaaggggtggtggtagggaggactcagagtcggaggggggatggttggagaggggggaagagagaggtagagtggagcagaggcatatggtggggggtcatgctgttcggtggaggattaggatgttgtcgaggaggggagaaatcagccagatcaaaggaggagaagtcgtcggctagggctgttggggtgagggaagcaggaggtgagtctggtttggagcgggtgaggagaatttggaaagtagaaccagactgacagagggaagggcagttacagtgagtgaagaaagcctgaacataaggaatctcagaccatttcctattgcgatggcaaaagttgtaaagtcccgtttcaggctattgggagccattgtccagttggtattggggccatgcagtattgcagtgaaagataagcctcttaaaacagatctctgaacggaggccgagagcattgagatcacggaatggaggagcagtgggtagaggaagaagagactgtcggtgacgaagactacaggagagggcgtcccctttcccgtggaacttgtc

SEQ ID NO: 4518 - DNA, 1143 bp, Artificial sequence
  DNA replication origin
agaaatcagccagatcaaaggaggagaagtcgtcggctagggctgttggggtgagggaagcaggaggtgagtctggtttggagcgggtgaggagaatttggaaagtagaaccagactgacagagggaagggcagttacagtgagtgaagaaagcctgaacataaggaatctcagaccatttcctattgcgatggcaaaagttgtaaagtcccgtttcaggctattgggagccattgtccagttggtattggggccatgcagtattgcagtgaaagataagcctcttaaaacagatctctgaacggaggccgagagcattgagatcacggaatggaggagcagtgggtagaggaagaagagactgtcggtgacgaagactacaggagagggcgtcccctttcccgtggaacttgtctggaatagaggaggtaactgctgtatcaggcgtccctgaagcagaggaaccagaggcctggaggccggaggaagcccttggccgagtgctgggtctttcagaaatggagagacagacggtcaagggttccgggggcaaggcaacagtctcttcactcaccctggtggaggctttgatgcattgatggtggatgaagtcgccagcaatgggagagtctaggagattctctgggtctttggcaggtttggggaaagggagattggcagggagaggggtgttaggggagggagagagtgggggagagagagagtgagagtgagtcccggccagagtctgtctgcttcctgggttttggcaccataatgtaaggttagcagagagaaaggacgagagggagacctgaggtcaggcgaggaagtttactaacctgccggctgctccatcacagacagaggaggcagcaccaagcttatggaatgaggggtttatattggggaggggagtttgagggagttctttggtatggctgcatcccggggttgtttgctggttaattttgccacatatcaccttgtgacgtttattacaggagggtgtaggtaaagtttgtttatgcttcctacgacctccccctgtggggtctggatggtttgtaattggggtttgcttatcgcagcaaggtctgataagtgaagtctgctggcttcaccgtggagcctagacaaggg

SEQ ID NO: 4519 - DNA, 1788 bp, Artificial sequence
  DNA replication origin
ctggtagaggggcctggcggtgagagggcagcggggagggagccggcgggggtgctcggcgcccgggccctaccttgtccgggagcagctccagctcggcggggcgggggcaagggcgggagatcgcggccacatccacgtcccggccgctccgcgcggctcagcccggcgaccgccgcagctcacgctccatgcgcggcgccccggacgggcggcccggcggtgtcggcggcagggactgctccggcttggctctgctagcctccggcacttgttgccgctgctgccgctgccgctgcgcctcactccaggctccggttccaggcgcagcagccgccgcgggcgcccggccccgcccctcccctgcccgcccgccaatggggcccggccccgcccctcacgtcaccgcccgacggccccgccccgcgccccaagttttgggagggttccgctctccccacccggtaccaggacccacccgggcccgcgctccctgcggcttccagggaccctccagcccccacgcaccctcctgcaaagccgagggttaagctggggaaagggggcctctaggaaggcgacccccctggaaatgcctggcagctccaaaaacactaatgaaactcagctccagcctccgcccctccagttgtgggtggcccctcttgcggttcgtctgaggctaggggactaggcgcatcgcctagcgagactccagtggccttttctgtccagtttgtaaccggaactagaccgaccccggccgccccctccagtgctggggcgggtgaggaatggccccgccggggaggcgggggagggaggcctgggccaccctggggtctgacctttgctccacctcttaggtgctcacgacccagagtggtgccctgcttggtactgccactggatcctctggcttatgaagccgtccaggacaggaagggtggggggtggtccttagttctcttcgtggggtcatgcagagtggtttcctcgaggtcccacgcccgtctcaggaagccagaaacgcaagatgccgggcgctcggcccgaacccgtgccgcggcccaaggggcaaggcggataccgaggcaaggcctaaagggccggactctgaccgcaccctccggacactgcagggctccgccggccagaggcggccttggcgccaaccacacctagcagcggggtccccgggcccaccgatgcgccctcctagccccgcgctccttcgaggggttccaaggtgactcagagacgcagctgacacaattctgaggcccccaggtaagcctggcgataccggatggagaagttacctggtcttgaaaggcccagtccagccagcgagacccgcgtgcgctccgcggggaggcaagcctaaccaggggctcacctggaagcgtccccgccccctggtccttatctctgaatcgaaaccgaacctggacccatctagataattggactgagcaattaaggacgcttcgctcctaactgttagcattttttcctaaggctctcggaggcggaatcagctggaaaggaacattgctaagtaggaatttcaggcacctgtgaactgagcccactcaataatcggccctttcccttaaccaaactcagcaaaggaagaaagaccaagttgctgcggatgcacagagccacgtgggtgcgggtcctctagaaacaggaattcagagtcagtagatatggaaatgttatggtttgcagtcttcggaccatgctgctttcatgctgttcacatgattctcctcggactgc

SEQ ID NO: 4520 - DNA, 892 bp, Artificial sequence
  DNA replication origin
ctgccgtgctggagtagccgccagtcccgcgcccgcagccccggcagggccccccacgcccaccttcccacgaggggtgtctcgtagagtccggcttcaggcgctccctggcctggcagcacccaccccaccccgccccaccccacccccacgactcgggctagcagcctggttaatcattcaacgcaaacagtgtggaatattttttttaaaaggtcaaagcgaaaggttttccctaagtttggcagaaaccagttttgggggagccggagacagaagtggcagaggttgggggtggggggtggggagcggctgccggcggctctttggctcacaaaacacctgatctccccatgcggcacgggaggccggcgcagtgcgagggtggggtgcgggggtgcgagcgaggaatcacgcgcgcccccctccccgaaatgcccgcgcgccccggatgaggaggcccggccccagatgccccttgccaaagcccgcatcgccccggcgccggatcccccggaagttggggtgcagcgaggagggggaaggtccccgggctccagggcgaggtgggcacggaatgggttgggaggttccaaagccccgcagcgggcggtgtccctctcctctccctctgggctgaggttgggtggctgggacggcgggaaggtaagggaggcttaaatgcggcaggagccacctagggacggcttcctccaccggggcgcgggtacgaagccggaaccggcgaggaaccgggcgggggtagcagggtgtccggaaggtggggccgggaagcagggaggcggaaggggactggtagaggggcctggcggtgagagggcagcggggagggagccggcgggggtgctcggcgcccgggccctaccttgtc

SEQ ID NO: 4521 - DNA, 1148 bp, Artificial sequence
  DNA replication origin
gtagaatgcactctgatcctaatgacgatggaggtgccgaccttagatattcacgttcttgccttgatatgaggggcattctcacctccgtcacattcctgggcaacccagagcaacctggaagggaactgagggcctgccccagagctaagagcacttaaaaggatcaggagccaagggacagtccttttacttttttttttttgcaatagaggcacgttgtcactaagtcaccaagactggcctcaaactcctggccttaaagcaatcctcctgcctcagcctcccgaagtgccgggatcacaggcataagccaccaaatccagctgacaatccttttaaatttgtggaaaatacaccttagaaaccataaaatggaaccccttccatttctacaaaatggacctccctcaggcctggggcctccgaaagagacccatttccccaggaaggggatggggcaggagacttgctgggtttgaagctgagaagtgtacacagatgggcaaaggggaccccgagagtcgtgctggcttcaaggacaggctgacttgcacattcagggagagactgagggctggagagacagaactgtttgaaatggagggttgattggactccagtgaaagagaagggcgagggcgctgacgctgggaatgggtgggctaggagtaaacctagaagggttctcctggtatgaagggccaacagccccttcacggaggtggactcaagagtgggcttgactcagaaaggaacgagaggtggaaatatttcggggagggcgcccacagagataactctgaggactgcgcagggaggccaaggaagagacccaggaagaggctgtgggtgcagtgtgggaggatcaggcccagcacttagcagccaaagaaagctttcaggcagagattcaagaacccgggcaacagatgccgtaaccacggcaggaaggagaatttccaggtgtggaggtcaatgtggtgaaggcctcaggtcaggaaagacaagaaaaaatgctggggagccaagcatgggggcgcacacctggagtcccagctactcaggagactgagacgggagggtcacttgagctcaggaggttgaggctgcagtgagctatgattgcatcactgcactccagcctg

SEQ ID NO: 4522 - DNA, 1001 bp, Artificial sequence
  DNA replication origin
tggcggcggggacaggaccagaacttggggcctcgcgcccaggtcctcccgtccttgccttctcccagctcccctccaggctaaccacctccacgcgggggccgggtgctgctgctgccctgagagctcagcccctttcccggggcgggcaccgcttcccggtcccgggcctctctgctctcccgaggcgatagccaccctgcgatctctcgcgcggccagcaggggccagcatcccccgcggaaagggtcgctgggctgggctggccgagagccggggatcggcgaccccgggcgccgctgccaagccccctgccgtgcgggctgctgcttcgccgtcccagccccgcagccttttgtgtctttccacttctcccctggcccgctgcgctctcgctctagagaaggcagagactgccttgggtgtggcagccaggagtggacggttgcgggctgggaggctggccgggtttcctccccgtcgcggacctggaggaagggctgggtgcggcgggaaggccccggagggagagctgagcctgggttggtagcatggtgaggaatagcggcctcaggggcagagatgtccgtttctttgtgcaccgaaagctctgagaaggacatcccgataccagtgaacttctagatttggaatgagcttcttaccgagcatctcacattccaaagtgcatctgattcggaagtcctcgtggttctaccttcggaaggtgggggtggggtgggctgcctgggtgcagagggctgagccaggctggtgggaactcctcagcgtccagcacctgtggggctgcagcaagcttttgctgctaggctctaaacgaagcctgtaattaaggccttagtttaactgggtgcgctctcacttttatctgtggcctggcctgagcggttgcctccagcagcctcagctaccctcactgctttgccgctgaacccaggaacggctattccactgcaagggagctaagaccttcatttgtt

SEQ ID NO: 4523 - DNA, 1062 bp, Artificial sequence
  DNA replication origin
cagcaacaatctgatttctctatcccttccccacatttccgacctctctattcgacaaaaccgccatcgtcatcatggcctgctctcaatgagctgttgggtacacctcccagatggggtggcggctgggcagaggggctcctcacttcccagaaggggcggccgggcagaggtgccgcccacctcccggacggggcggctggccgggcgggggctgccccccacctccctccctgacggggcggctggctggccgggggctggcccccacctccctcccagacggggcggctggccgggggggcgctgccccccacctccctcccggatggggcggctggccgggcgggggctgccccccacctccctcccggatggggcacctggccgggtgggggctgccccccacctccaggagggggcggctgccgggcggagacgctcctcacttcccagacggggtggctgccaggcagaggcgctcctcacatcccagacggggtggcggggcagaggcactccccacagctcagacgatgggcggccaggcagagacgctcctcgcttcctagatgggatggtggccgggaagaggcgctcctcacttcccagactgggcagccgggcagaggggctcctcacatcccagacgatgggcggacaggcagagacactcctcacttcccagacggggtggcagccgggcagaggctgcaatctcggcactttgggaggccaaggcaggcagctgggaggtggaggttgtagcgagcggagatcacgccactgcactccagcctgggcaacattgagcactgagtgaacgagactccatctgcaatcctggcacctcgggaggccgaggttggcagatcactcgcggttaggagctggagaccagcccggccaacacagcaaaaccccgtctccaccaaaaaaatacgaaaaccagtcaggcatggcggcgcgcacctgcaatcgcaggcactcggcaggctgaggcaggagaatcaggcagggaggttgcagtgagcagagatggcggcactacagtccagcttc

SEQ ID NO: 4524 - DNA, 1202 bp, Artificial sequence
  DNA replication origin
gccaccatcccatctaggaagcgaggagcgtctctgcctggccgcccatcgtctgagctgtggggagtgcctctgccccgccaccccgtctgggatgtgaggagcgcctctgcctggcagccaccccgtctgggaagtgaggagcgtctccgcccggcagccgccccctcctggaggtggggggcagcccccacccggccaggtgccccatccgggagggaggtggggggcagcccccgcccggccagccgccccatccgggagggaggtggggggcagcgcccccccggccagccgccccgtctgggagggaggtgggggccagcccccggccagccagccgccccgtcagggagggaggtggggggcagcccccgcccggccagccgccccgtccgggaggtgggcggcacctctgcccggccgccccttctgggaagtgaggagcccctctgcccagccgccaccccatctgggaggtgtacccaacagctcattgagagcaggccatgatgacgatggcggttttgtcgaatagagaggtcggaaatgtggggaagggatagagaaatcagattgttgctgtgtctgtgtggaaggaagtagacatgggagactccattttgttctgtgctaagaaaaattcttctgccttgggatgctgttgatctatgaccttacccccaacctggtgctctctgaaacatgtgctgtgtccactcagggttaaatggattaagggctgtgcaagatgtgctttgttaaacagatgcttgaaggcagcatgctggttaagagtcatcaccactccctaatctcaagtacccagggacacaaacactgcagaaggccccagggtcctctgcctaggaaaaccagagacctttgttcacttgtttatctgctgaccttccctccactattgtcttatgaccctgccaaatccccctctgcgagaaacacccaagaatgataaaaaaaaaaaaaaaaaaaaaactcaaatagctctagcaggagctgtgcctccttgtttgtggtaggagattccagatgcagcaatttgcctttcactttgaagtggttatcttggcatgccctccatcactggacctctcaaaatgtcattgaagcagccagtccctgagtcatcatagcatttacttcccacgagcttaccaagacttctagtatacgagcctctc

SEQ ID NO: 4525 - DNA, 1225 bp, Artificial sequence
  DNA replication origin
gggcggtggaggttgagctgccgtgggtagggttagtgtgagaggtgcggcgggggaggtaatgatgatggtggcggaggagaaaggcgggggagggggtgctgggcgctgagcggtggctctggcagggcttggtagggtgggggacggtcgcggggcgatctgtcagggagggggtgggcgtgaggggcgccgtccgcctgaggggctgcagatcccggctaccgcgagcgccgtggctggcttggctgttccatgtggctccggcggggatggaggactcggtggcggcggcggctgctgctgcggcggcgacggaggagcggctatgagaagggaacggggccagactcagcccgacagcgggattagaggtgtgaggagggggcgggagtggacgagcggcggggccggggctcggggtccgggctggggtcttctggtatcgcctgggtgacagggaccgcggacgagccaccgcctgtctccgctggggggcaggggtctgggctccgtgcgtgaggagactgggctccggcggactgtttccctgaggatgggggagggaggcaccgcaccctgcacagtccacttgccccgctggtcattgcttcacccccaggcaggagtttccatttccctccggttggcagcgaaggagcccaagtggcctggagccgggacattgccctctctctgcctggagatttccctccactcctcgttccccatccatttcctccctccgactgaaaaatagcattcctcctggctccctaatttgttccaagcacatattgtcggacttgaggctattaattatcgactgaaaaacaaagtttattaaaaaatactccacttctccctctttctggcggtggacattaaacagcatccctagactttcccgctctgctcgcccttcagtgatgctaacagggggaggtagggccccgagttaccgtctctctggattgttgttggtgctgactacctgatgtgtcgctccacgtcttcggtgtgaattgtaatttcttccttggtgtcttgcatccttgatgttactggcttttgaggtcagtgttttgtttcattgtttaaaagacatgcagagaactgggatggtcttttgcagcgttatttaacatgggtggttagtcatttctcatgattctctcctcatattctttctctttttgtctttgttttgcttttcagccctcca

SEQ ID NO: 4526 - DNA, 1193 bp, Artificial sequence
  DNA replication origin
tgacctagaggacttgattgtggtataaggtggattcagccaactgacttcatttctggaagattttagggggccagtgctcagctcccaactcctggactgtgtgctctaactctggaggacttttatcagccctgactttgttctctggctcctcggggataggaatccactgtgctgtggcggtgggggcgctccaaggtgctgggtggtgttggccaaagtgttttgtagtgtggtgacagtgatatccatcctcatttgcttgtgccttatttgcatgtgcctcatttgcatatgccagcagcagcggctgtggcagtgtggtggagtgtatgctcattggttgcggcagtgtgctagtgggtcccggggtgcctgcctccaagccagtgttcacctcagtggcagaggcaacccattcgtggggatgcgggggccccctgctggcaactgtgcatgccgtcatgctggtggtggtgttggcacaggggtggggcactggcaggcacaagtctgtgtgcactgtgtgcactgccatcaggggtggttactcagggcagcagggagtctgctgttttctgcctggtttcactcccacagcagtgttggtacaaaggcagggtgctggtgggggtggagttggatggctctgtgcctgccgaggctcccattgaaatatggttggtggaggatgggggatggactgcactttggaggcagcagtggctgggtagggtgcatgcacatgggcagctgatggagcaaggaagccaaaacttgcccatgcacacactgccagcaaagcgatgtggggggttgtcatgattggaggtggtgtgtgggagctacagtgtggggaggaagcaggtaggctggtgcgtggctatgagagctgccctgctggagctctccaccagtcaagcactgttgctagcataggagctaagttgtgggcccctagggcgctcaaggcttctgtgcaagcagaagtggccaggctaggacccagggagaggccagcagaccaagggacacaggggttgggctggccttgtctgatgggcaagactgccctgcagagttgaggtccaacagtacctctagggctaaaatctcctatgggagcaagtcaagcctagggggatgggcaaccctggctgtgccctattacagatgctccttcaccaaac

SEQ ID NO: 4527 - DNA, 1131 bp, Artificial sequence
  DNA replication origin
agcgcagcgctaacccaggcggggacacaccttaggctcgcgcaggcccctaccaggagtagcccgcgaggcccgcggtcagccgcccgcggctcggagccactgtgatcgtgctgaggtttaaagaaagcaacgaaatataccccttccttaggttccgaggaaaggcgccggctggagcgcactagttttgggggaaagaatatgcggacgtcccggggtgcgcttcgccggcgtccgcgtccatagcccggcgctgccctagtcccggccagtccgctgtgtgccggggttggccctccagtgccggggcgcgtgaccttgccccattcctccaccttaactcattcctccctccaccaggccctgtttcgcctgcagcctcagcacctgacctgggtccggcgcagcgaggtgggacggcagtgcgctctggaatgtgccagcgcggtccccggggtacgcctcgcgggaggccggcgctctcggttccagatgctgccaccattctcggggaagttgggaggtatcaagtagcacggattttttttttcctaattagagtatttatctaatcccaaattgcaggcgaattttcttaacgctcagcccataaaaccccaggattaagaaaagaaagaggagagggggagagggaggagagtggagagggagagagactgggatgaaagtttcttgaaagcagcgcagaggattgaggcggccgtcgctaggcaaatgtccaggtgggagatgctgggccagaagccatgaccgttccagcatcggccgcggtgcgggaaggggaagtggggacaccactggaggaggtgaagccgtccagctcaaggccctcgagccgggaaggggcgagggagctgggtgtggagacaaggatccagcatccaggtgacctccaggcccggccaggctctggaggacacttgggacaaggggagggctttggatctgaggccgagggatctgaccaggggcggaagttctgctccggcccgcagactgtgcccaagcaagcccgctgccaacgcccctgctcctctgcgaccctcggaccgatagtctcttttcccgcagcgcgggctttcgagttccgggtcctccggcgtgctg

SEQ ID NO: 4528 - DNA, 1166 bp, Artificial sequence
  DNA replication origin
ctgcaaagtagcctgcgccggcacgagcagcccgcggcgtcggtctcaggtggcggcgccggggaagaaaacgctggggcccgcggcgccgggagaggggccgaggcccgggctcctccagcccgccgcccccgggtcctggcgcccacacccgagcggctgagccctgtagcgcgcgggagagcgaaggaaccggttctccagcacctcgcctcctccctgccactccctccggagcgccgagagcgcgagaagggcgggggcgcccagggcaggcctggagacccacggccccctccgcggccaggactcgggctctccgctcgccttcctcgcctagctctgcgccgcttttgccagccgagtcccggagttagcgcgcgaccggggcggggcgggagggcggggagggcggggtgtggggggcgggggagggcgggggcgcgcggaggtaacccccggctcgcgcagccattgcccggctccctgtcactcagcccgcgcggggcccccgattggcggcctagccccgttacgcactcgcctcgcgttcacatacccggggagggcagtagaaaggtgatcaatcttcatcaggctacatttccaatcacctaaacaaccgagcaagacaagccactccgacaaggtaaatcgcttgatttatttagtttgcaaagtgactctgcaggacttcccagtccccactgcctccacgttgcaccgggagtgccgcggcaacgccgagccacctcccaactctgcccctcgaattcccccccttgcggcccctcggcgcgatcccaggcgaggcaatgtcctgagaacgtgtggggcttagcaaacaaagtgtctgtgcaataaagtgaaacccagaaggacacgcacaaagccattgaaaaaaaagatagaggtgggaagaaggaagttgggaaaagaaagaaacctgggggtcctagaccagccgccagggtaattccagtgctgctctgttttgcaggttggctgcccggcgggtctctgtgagagatccaggtagatggtgaacggccccggcagctgagggcaggtaaggagaaagccgcggggccaccccggactccgggagcgcgttggttacccttatctccccctcctcaaatggatcccggcttccccggtcccca

SEQ ID NO: 4529 - DNA, 1808 bp, Artificial sequence
  DNA replication origin
caggcggaggaagcagcagcggcgccaggctccttgtaatccaagcagtcggcagagttgaaggcaagcccagagccaccgtagccttggtggtggtggtggtgatggtggtggtggtggcctgaggactggctcaacgggtggtgcgcatgtgggtggtgatgatggtggcccgccatggaggagggtgccatggggctgagctggtgcgggtggtgatgtgagtgcatgggcgctaggtatgagctgcagtccacgccgccaaagtaggaagaggagggcgtagggtagccttggccgtagctgccgccctggccgtaggacatgggataagaggctgctgcggtggcggcgcctgcagctacggagcgctgcatacacgaggtgttgctaggcgcggccaatggctccggcaccgacacggacgcgggcgctgagcctggcgagatggaggccgggctccagatagatgaggcagctggtgtactcagcgacgacgcggccgccaccgggttcccacctagtcccgcagccgctgcagccgctgggttggcggaagagctggacgccgagctagaggacgaggcagagctggacacagctggcggcgtgaattggccactgctttcggagcccgagctctcccgcactggagaggacttcttcttggctgggcggctcttggttccgctcccgctctgctgctgctggcggcatttggcgcggcggttcttgaaccagacctgcagtgggccggatgggggagagtgggtcaaagggagctaggggagcttgttgctccaccgccccgcggacccaactcccggtccagaatatcgcaatcctttctcaccgaggcctccgccccttcctgtctctggcctggccagaccctgccccctacctcggttcccagctcctccaccctcccccatccttctgctcaaagcccctcctcagctggctccagagcagggatgcgcacctccccacccctaccgcaactctgccctagggcggaatatttcagtctgcccagtcagaagttctgccatctctaaattgctgctgttggctgcttccgtgtatgtttggaggccccgtgtgtgtttggaggcccagttttctactaacagagctcaggcaacagtggagaggtacagagccgaagagtgtggaacagtcaccaagtctagggcctgagccgtttcactgagcagctcctggaggccagaactgggcagggcgagtatttgggtgggggtaggagcaaggccagaggctaaacagaggtagtacttgagggactcgggaaggaagcctgggtgggatttcgttggccctttggctccaggtggggaaccaaatggaatggttactcttctaggagagccccagcacatggcactgcattcctggtcccccttctcaagctttcgagtaaaggaggcgagactcttgaggagagttctgagttagaatccgaacgttatcatcggaaccctttcatctcaaaaacagaaataagaaagccggcagcaggattttgcacttagcatcctctgtaagcagaggaagcgtctaatgagacccaggcagagcaccaggctccagccaatctccgctcttccatttctaggattcccggggtggaagacaagggcagaggcagaattcaggcctctaagggaaactgccaagtcctggggcaggcgaagaagcaggggcaagtgtcaggcccgcagggcgctttacattcgggagcttccctagtcctccggcaattctaaaaagtactttcgataccg

SEQ ID NO: 4530 - DNA, 1132 bp, Artificial sequence
  DNA replication origin
tatatgtgctgtatatatcttaaagttctgtttcctgggtgctaagacaagatatgttcagttcaaccaaccaacagcaactaaaaagtttaagtggtccctggaacggacctgactatgtacagcgttcccgccgaggcggaagcttgaaccagtccagcgcagggcggggcgggatgcggctctgtgcgcggaaggctggggacgcgctcctccggcgggcctagccctggcgcgccccagcgcactccgctggggcggaagaaacgccgggaggctctggccggcaggcgtggagcaaaatcgagggcagctgaaggggcagcagtctgcgcgggaggaactcttagtggttttgatttggagtagtgtgcgggtgctccaatgggcagaaacacgccagttagtgactccagtgtccagaaagaataaattaaagtgttgggctcaaacagcggatcagagcgcagagcctccgaaggctgcaagtgcttaatagctgtccagaaagactggaaggggaggcttaagagtttagtaggggctgaaggggggaaataatacatctctcctgtatagaatgtgtaggccaagccgaagcaccggtccccccatccaaggggcagggtgggtttgcacatccccccaagcaagtggcacaaaaatgggggcggcagtgcaggcaatggacatctttttggggggtgaaaattcagttttggagaagacgaggcaaaggcgggcggtgcagcagcagcaacaggatcgggaccacggagggcgcaggtagttgcgtttcttctcctctttcattcctgggctcacaagacctggaaccgccatgaggcttggtccttatagtccagacagtcgggggagttgaagttgagtttccaggcggaggaagcagcagcggcgccaggctccttgtaatccaagcagtcggcagagttgaaggcaagcccagagccaccgtagccttggtggtggtggtggtgatggtggtggtggtggcctgaggactggctcaacgggtggtgcgcatgtgggtggtgatgatggtggcccgccatggaggagggtgccatggggctgagctggtgcgggtggtgatgtgagtgcatgggcgcta

SEQ ID NO: 4531 - DNA, 831 bp, Artificial sequence
  DNA replication origin
accattgagcactgagtgaacgagactccgtctgcaatcccggcacctcgggaggccgaggctggtggatcacttgcggttaggggctggagaccggcctggccaacacagcgaaaccccatctccaccaaaaccagtcaggcgtggcggcgcgagcctgcaatcgcaggcactcggcaggctgagtcaggagaatcaggcagggaggttgcagtgagccgagatggcagcagtacagtccagcttcggctcagcatgagagggagaccgtggaaagagagggagagggagaccgtggggagagggagagggggaggaggagggggaggggcagggggagcgggagggcagggagcattctaagtagagggaatggcttgctggaaggcccagaaataggaaaaagagtggcaaggccaaaaaatggaaaggccattatagctggagccaggagaatgagaaagttactggttatgagattttaaaaatttatttatatttttttaaaaaagacactctgactgctctgtggagtgagattagaaggggtaagaggggtacagggaggaagaggctattacagttgtccaagtgggaaagatggtggtctgtgtggcagttggggcatcaggcttgggccataatagacaagttccagagataacacaggagatagagttgacaagattgctgtctggttggttatgggaagttgtcaagaatgatttccattagctggcatatacaacagccagagcacctcccctcatgacaccactctgaagtggacagatcaagaacgctcactgtcattttgtagatttgcaaaca

SEQ ID NO: 4532 - DNA, 1139 bp, Artificial sequence
  DNA replication origin
agaagttttcttagtacagaacaaaatgaaaagtctcccatgtctacttctttctacacagacacggcaaccatccgatttctcaatcttttccccacctttctcgcctttctattccacaaagccgccattgtcatcctggcccgttctcaatgagctgttgggcacacctcccagacggggcggctggccgggcagagggggtcctcacttcccagtaggggcggccgggcagaggcgcccctcacctcccggacggggcggctggccgggcggggggctgacccccccccacctccctcccggacggggcggctggccgggcgggggctgacccccccacctccctcccggacggggcggctggccgggcggggggctgacccccccccacctccctcccggatggggcggctggccgggcggagacgctcctcacttcccagacggggcggctgccgggcggaggggctcctcacttctcagacggggcggccgggcagagatgctcctcacctcccagatggggtcgcggccgggcagaggtgctcctcacatcccagacggggcggcggggcagaggcgctccccacatctcagacgatgggcggccgggcagagacgctcctcacttcctagatgtgatggcggccgggcagaggtgctcctcacttcctaggtgggatggcggccgggcggagacgctcctcactttccagactgggcagccaggcagaggggctcctcacatcccagatgatgggcggccaggcagagacgctcctcacttcccagacggggtggcggccgggcagaggctgcaatctcggcactttgggaggccaaggcaggcggcggggaggtggaggttgtagcgagccgagatcacgccactgcactccagcctgggcaccattgagcactgagtgaacgagactccgtctgcaatcccggcacctcgggaggccgaggctggtggatcacttgcggttaggggctggagaccggcctggccaacacagcgaaaccccatctccaccaaaaccagtcaggcgtggcggcgcgagcctgcaatcgcaggcactcggcaggctgagtcaggagaatcaggcagggaggttgcagtgagccgagatggc

SEQ ID NO: 4533 - DNA, 913 bp, Artificial sequence
  DNA replication origin
acctaggaagtgaggagcacctctgcccggccgccatcacatctaggaagtgaggagcgtctctgcccggccgcccatcgtctgagatgtggggagcgcctctgccccgccgccccgtctgggatgtgaggagcacctctgcccggccgcgaccccatctgggaggtgaggagcatctctgcccggccgccccgtctgagaagtgaggagcccctccgcccggcagccgccccgtctgggaagtgaggagcgtctccgcccggccagccgccccatccgggagggaggtgggggggggtcagccccccgcccggccagccgccccgtccgggagggaggtgggggggtcagcccccgcccggccagccgccccgtccgggagggaggtgggggggggtcagccccccgcccggccagccgccccgtccgggaggtgaggggcgcctctgcccggccgcccctactgggaagtgaggaccccctctgcccggccagccgccccgtctgggaggtgtgcccaacagctcattgagaacgggccaggatgacaatggcggctttgtggaatagaaaggcgagaaaggtggggaaaagattgagaaatcggatggttgccgtgtctgtgtagaaagaagtagacatgggagacttttcattttgttctgtactaagaaaacttcttctgccttgggatcctgttgatctgtgaccttacccccaaccctgtgctctctgaaacatgtgctgtgtccactcagcgttgaacggattaagggcggtgcaagatgtgctttgttaaacagatgcttgaaggcagcatgctcgttaagagtcatcaccactccctaatctcaagtacccagggacacaaacactgcggaaggccgcagggtcctctgcctaggaaaaccag
